United States Patent Application Publication US 2018/0305689 A1 - sequence listing, part 112

SEQ ID NO: 1574736 - RNA, 19 nt, Artificial Sequence
  Description of Artificial Sequence: Synthetic oligonucleotide
  Antisense strand to SEQ ID NO: 1574735
aacucucgccgucaacucu

SEQ ID NO: 1574737 - RNA, 19 nt, Artificial Sequence
  Description of Artificial Sequence: Synthetic oligonucleotide
  Sense strand starting at position 1937 of SEQ ID NO: 1560079
cuucgagacucaccauguu

SEQ ID NO: 1574738 - RNA, 19 nt, Artificial Sequence
  Description of Artificial Sequence: Synthetic oligonucleotide
  Antisense strand to SEQ ID NO: 1574737
aacauggugagucucgaag

SEQ ID NO: 1574739 - RNA, 19 nt, Artificial Sequence
  Description of Artificial Sequence: Synthetic oligonucleotide
  Sense strand starting at position 2037 of SEQ ID NO: 1560079
ggaggaaaugaccgucuuu

SEQ ID NO: 1574740 - RNA, 19 nt, Artificial Sequence
  Description of Artificial Sequence: Synthetic oligonucleotide
  Antisense strand to SEQ ID NO: 1574739
aaagacggucauuuccucc

SEQ ID NO: 1574741 - RNA, 19 nt, Artificial Sequence
  Description of Artificial Sequence: Synthetic oligonucleotide
  Sense strand starting at position 2067 of SEQ ID NO: 1560079
ucucauuggucugcacacu

SEQ ID NO: 1574742 - RNA, 19 nt, Artificial Sequence
  Description of Artificial Sequence: Synthetic oligonucleotide
  Antisense strand to SEQ ID NO: 1574741
agugugcagaccaaugaga

SEQ ID NO: 1574743 - RNA, 19 nt, Artificial Sequence
  Description of Artificial Sequence: Synthetic oligonucleotide
  Sense strand starting at position 2681 of SEQ ID NO: 1560079
cggccaggcugauuugaga

SEQ ID NO: 1574744 - RNA, 19 nt, Artificial Sequence
  Description of Artificial Sequence: Synthetic oligonucleotide
  Antisense strand to SEQ ID NO: 1574743
ucucaaaucagccuggccg

SEQ ID NO: 1574745 - RNA, 19 nt, Artificial Sequence
  Description of Artificial Sequence: Synthetic oligonucleotide
  Sense strand starting at position 2712 of SEQ ID NO: 1560079
gagcuagucugcggaggua

SEQ ID NO: 1574746 - RNA, 19 nt, Artificial Sequence
  Description of Artificial Sequence: Synthetic oligonucleotide
  Antisense strand to SEQ ID NO: 1574745
uaccuccgcagacuagcuc

SEQ ID NO: 1574747 - RNA, 19 nt, Artificial Sequence
  Description of Artificial Sequence: Synthetic oligonucleotide
  Sense strand starting at position 2756 of SEQ ID NO: 1560079
guuaaaucuuccuucuagg

SEQ ID NO: 1574748 - RNA, 19 nt, Artificial Sequence
  Description of Artificial Sequence: Synthetic oligonucleotide
  Antisense strand to SEQ ID NO: 1574747
ccuagaaggaagauuuaac

SEQ ID NO: 1574749 - RNA, 19 nt, Artificial Sequence
  Description of Artificial Sequence: Synthetic oligonucleotide
  Sense strand starting at position 3320 of SEQ ID NO: 1560079
ucauccuucuaggguuaua

SEQ ID NO: 1574750 - RNA, 19 nt, Artificial Sequence
  Description of Artificial Sequence: Synthetic oligonucleotide
  Antisense strand to SEQ ID NO: 1574749
uauaacccuagaaggauga

SEQ ID NO: 1574751 - RNA, 19 nt, Artificial Sequence
  Description of Artificial Sequence: Synthetic oligonucleotide
  Sense strand starting at position 3325 of SEQ ID NO: 1560079
cuucuaggguuauaaaguu

SEQ ID NO: 1574752 - RNA, 19 nt, Artificial Sequence
  Description of Artificial Sequence: Synthetic oligonucleotide
  Antisense strand to SEQ ID NO: 1574751
aacuuuauaacccuagaag

SEQ ID NO: 1574753 - RNA, 19 nt, Artificial Sequence
  Description of Artificial Sequence: Synthetic oligonucleotide
  Sense strand starting at position 3331 of SEQ ID NO: 1560079
ggguuauaaaguuggcaau

SEQ ID NO: 1574754 - RNA, 19 nt, Artificial Sequence
  Description of Artificial Sequence: Synthetic oligonucleotide
  Antisense strand to SEQ ID NO: 1574753
auugccaacuuuauaaccc

SEQ ID NO: 1574755 - RNA, 19 nt, Artificial Sequence
  Description of Artificial Sequence: Synthetic oligonucleotide
  Sense strand starting at position 3332 of SEQ ID NO: 1560079
gguuauaaaguuggcaaua

SEQ ID NO: 1574756 - RNA, 19 nt, Artificial Sequence
  Description of Artificial Sequence: Synthetic oligonucleotide
  Antisense strand to SEQ ID NO: 1574755
uauugccaacuuuauaacc

SEQ ID NO: 1574757 - RNA, 19 nt, Artificial Sequence
  Description of Artificial Sequence: Synthetic oligonucleotide
  Sense strand starting at position 3334 of SEQ ID NO: 1560079
uuauaaaguuggcaauaga

SEQ ID NO: 1574758 - RNA, 19 nt, Artificial Sequence
  Description of Artificial Sequence: Synthetic oligonucleotide
  Antisense strand to SEQ ID NO: 1574757
ucuauugccaacuuuauaa

SEQ ID NO: 1574759 - RNA, 19 nt, Artificial Sequence
  Description of Artificial Sequence: Synthetic oligonucleotide
  Sense strand starting at position 3923 of SEQ ID NO: 1560079
acgcucuuaugagaaugua

SEQ ID NO: 1574760 - RNA, 19 nt, Artificial Sequence
  Description of Artificial Sequence: Synthetic oligonucleotide
  Antisense strand to SEQ ID NO: 1574759
uacauucucauaagagcgu

SEQ ID NO: 1574761 - RNA, 19 nt, Artificial Sequence
  Description of Artificial Sequence: Synthetic oligonucleotide
  Sense strand starting at position 3926 of SEQ ID NO: 1560079
cucuuaugagaauguaauu

SEQ ID NO: 1574762 - RNA, 19 nt, Artificial Sequence
  Description of Artificial Sequence: Synthetic oligonucleotide
  Antisense strand to SEQ ID NO: 1574761
aauuacauucucauaagag

SEQ ID NO: 1574763 - RNA, 19 nt, Artificial Sequence
  Description of Artificial Sequence: Synthetic oligonucleotide
  Sense strand starting at position 3958 of SEQ ID NO: 1560079
gacagaucaggcgguaaua

SEQ ID NO: 1574764 - RNA, 19 nt, Artificial Sequence
  Description of Artificial Sequence: Synthetic oligonucleotide
  Antisense strand to SEQ ID NO: 1574763
uauuaccgccugaucuguc

SEQ ID NO: 1574765 - RNA, 19 nt, Artificial Sequence
  Description of Artificial Sequence: Synthetic oligonucleotide
  Sense strand starting at position 80 of SEQ ID NO: 1560080
ggucgauauuugguaagug

SEQ ID NO: 1574766 - RNA, 19 nt, Artificial Sequence
  Description of Artificial Sequence: Synthetic oligonucleotide
  Antisense strand to SEQ ID NO: 1574765
cacuuaccaaauaucgacc

SEQ ID NO: 1574767 - RNA, 19 nt, Artificial Sequence
  Description of Artificial Sequence: Synthetic oligonucleotide
  Sense strand starting at position 81 of SEQ ID NO: 1560080
gucgauauuugguaaguga

SEQ ID NO: 1574768 - RNA, 19 nt, Artificial Sequence
  Description of Artificial Sequence: Synthetic oligonucleotide
  Antisense strand to SEQ ID NO: 1574767
ucacuuaccaaauaucgac

SEQ ID NO: 1574769 - RNA, 19 nt, Artificial Sequence
  Description of Artificial Sequence: Synthetic oligonucleotide
  Sense strand starting at position 129 of SEQ ID NO: 1560080
gagacuaaguggucacuua

SEQ ID NO: 1574770 - RNA, 19 nt, Artificial Sequence
  Description of Artificial Sequence: Synthetic oligonucleotide
  Antisense strand to SEQ ID NO: 1574769
uaagugaccacuuagucuc

SEQ ID NO: 1574771 - RNA, 19 nt, Artificial Sequence
  Description of Artificial Sequence: Synthetic oligonucleotide
  Sense strand starting at position 223 of SEQ ID NO: 1560080
uggguucucugcucuggaa

SEQ ID NO: 1574772 - RNA, 19 nt, Artificial Sequence
  Description of Artificial Sequence: Synthetic oligonucleotide
  Antisense strand to SEQ ID NO: 1574771
uuccagagcagagaaccca

SEQ ID NO: 1574773 - RNA, 19 nt, Artificial Sequence
  Description of Artificial Sequence: Synthetic oligonucleotide
  Sense strand starting at position 602 of SEQ ID NO: 1560080
uaggauuccucccucacga

SEQ ID NO: 1574774 - RNA, 19 nt, Artificial Sequence
  Description of Artificial Sequence: Synthetic oligonucleotide
  Antisense strand to SEQ ID NO: 1574773
ucgugagggaggaauccua

SEQ ID NO: 1574775 - RNA, 19 nt, Artificial Sequence
  Description of Artificial Sequence: Synthetic oligonucleotide
  Sense strand starting at position 665 of SEQ ID NO: 1560080
cagaauacaugugccagaa

SEQ ID NO: 1574776 - RNA, 19 nt, Artificial Sequence
  Description of Artificial Sequence: Synthetic oligonucleotide
  Antisense strand to SEQ ID NO: 1574775
uucuggcacauguauucug

SEQ ID NO: 1574777 - RNA, 19 nt, Artificial Sequence
  Description of Artificial Sequence: Synthetic oligonucleotide
  Sense strand starting at position 669 of SEQ ID NO: 1560080
auacaugugccagaauguu

SEQ ID NO: 1574778 - RNA, 19 nt, Artificial Sequence
  Description of Artificial Sequence: Synthetic oligonucleotide
  Antisense strand to SEQ ID NO: 1574777
aacauucuggcacauguau

SEQ ID NO: 1574779 - RNA, 19 nt, Artificial Sequence
  Description of Artificial Sequence: Synthetic oligonucleotide
  Sense strand starting at position 754 of SEQ ID NO: 1560080
ggguguucacccuguggaa

SEQ ID NO: 1574780 - RNA, 19 nt, Artificial Sequence
  Description of Artificial Sequence: Synthetic oligonucleotide
  Antisense strand to SEQ ID NO: 1574779
uuccacagggugaacaccc

SEQ ID NO: 1574781 - RNA, 19 nt, Artificial Sequence
  Description of Artificial Sequence: Synthetic oligonucleotide
  Sense strand starting at position 1163 of SEQ ID NO: 1560080
auuggaaucgcugaguuaa

SEQ ID NO: 1574782 - RNA, 19 nt, Artificial Sequence
  Description of Artificial Sequence: Synthetic oligonucleotide
  Antisense strand to SEQ ID NO: 1574781
uuaacucagcgauuccaau

SEQ ID NO: 1574783 - RNA, 19 nt, Artificial Sequence
  Description of Artificial Sequence: Synthetic oligonucleotide
  Sense strand starting at position 1165 of SEQ ID NO: 1560080
uggaaucgcugaguuaaag

SEQ ID NO: 1574784 - RNA, 19 nt, Artificial Sequence
  Description of Artificial Sequence: Synthetic oligonucleotide
  Antisense strand to SEQ ID NO: 1574783
cuuuaacucagcgauucca

SEQ ID NO: 1574785 - RNA, 19 nt, Artificial Sequence
  Description of Artificial Sequence: Synthetic oligonucleotide
  Sense strand starting at position 1212 of SEQ ID NO: 1560080
gguggaucugccgaaagcu

SEQ ID NO: 1574786 - RNA, 19 nt, Artificial Sequence
  Description of Artificial Sequence: Synthetic oligonucleotide
  Antisense strand to SEQ ID NO: 1574785
agcuuucggcagauccacc

SEQ ID NO: 1574787 - RNA, 19 nt, Artificial Sequence
  Description of Artificial Sequence: Synthetic oligonucleotide
  Sense strand starting at position 1220 of SEQ ID NO: 1560080
ugccgaaagcugcaggaau

SEQ ID NO: 1574788 - RNA, 19 nt, Artificial Sequence
  Description of Artificial Sequence: Synthetic oligonucleotide
  Antisense strand to SEQ ID NO: 1574787
auuccugcagcuuucggca

SEQ ID NO: 1574789 - RNA, 19 nt, Artificial Sequence
  Description of Artificial Sequence: Synthetic oligonucleotide
  Sense strand starting at position 1251 of SEQ ID NO: 1560080
gagagaggcuguuucccau

SEQ ID NO: 1574790 - RNA, 19 nt, Artificial Sequence
  Description of Artificial Sequence: Synthetic oligonucleotide
  Antisense strand to SEQ ID NO: 1574789
augggaaacagccucucuc

SEQ ID NO: 1574791 - RNA, 19 nt, Artificial Sequence
  Description of Artificial Sequence: Synthetic oligonucleotide
  Sense strand starting at position 1254 of SEQ ID NO: 1560080
agaggcuguuucccauaca

SEQ ID NO: 1574792 - RNA, 19 nt, Artificial Sequence
  Description of Artificial Sequence: Synthetic oligonucleotide
  Antisense strand to SEQ ID NO: 1574791
uguaugggaaacagccucu

SEQ ID NO: 1574793 - RNA, 19 nt, Artificial Sequence
  Description of Artificial Sequence: Synthetic oligonucleotide
  Sense strand starting at position 1257 of SEQ ID NO: 1560080
ggcuguuucccauacaucu

SEQ ID NO: 1574794 - RNA, 19 nt, Artificial Sequence
  Description of Artificial Sequence: Synthetic oligonucleotide
  Antisense strand to SEQ ID NO: 1574793
agauguaugggaaacagcc

SEQ ID NO: 1574795 - RNA, 19 nt, Artificial Sequence
  Description of Artificial Sequence: Synthetic oligonucleotide
  Sense strand starting at position 1585 of SEQ ID NO: 1560080
augcuuagauccuuugaca

SEQ ID NO: 1574796 - RNA, 19 nt, Artificial Sequence
  Description of Artificial Sequence: Synthetic oligonucleotide
  Antisense strand to SEQ ID NO: 1574795
ugucaaaggaucuaagcau

SEQ ID NO: 1574797 - RNA, 19 nt, Artificial Sequence
  Description of Artificial Sequence: Synthetic oligonucleotide
  Sense strand starting at position 1588 of SEQ ID NO: 1560080
cuuagauccuuugacaaga

SEQ ID NO: 1574798 - RNA, 19 nt, Artificial Sequence
  Description of Artificial Sequence: Synthetic oligonucleotide
  Antisense strand to SEQ ID NO: 1574797
ucuugucaaaggaucuaag

SEQ ID NO: 1574799 - RNA, 19 nt, Artificial Sequence
  Description of Artificial Sequence: Synthetic oligonucleotide
  Sense strand starting at position 1674 of SEQ ID NO: 1560080
guaauaagacugcacuucu

SEQ ID NO: 1574800 - RNA, 19 nt, Artificial Sequence
  Description of Artificial Sequence: Synthetic oligonucleotide
  Antisense strand to SEQ ID NO: 1574799
agaagugcagucuuauuac

SEQ ID NO: 1574801 - RNA, 19 nt, Artificial Sequence
  Description of Artificial Sequence: Synthetic oligonucleotide
  Sense strand starting at position 1709 of SEQ ID NO: 1560080
uucccagauucugaaagua

SEQ ID NO: 1574802 - RNA, 19 nt, Artificial Sequence
  Description of Artificial Sequence: Synthetic oligonucleotide
  Antisense strand to SEQ ID NO: 1574801
uacuuucagaaucugggaa

SEQ ID NO: 1574803 - RNA, 19 nt, Artificial Sequence
  Description of Artificial Sequence: Synthetic oligonucleotide
  Sense strand starting at position 1726 of SEQ ID NO: 1560080
uaaugauuccgagaagcca

SEQ ID NO: 1574804 - RNA, 19 nt, Artificial Sequence
  Description of Artificial Sequence: Synthetic oligonucleotide
  Antisense strand to SEQ ID NO: 1574803
uggcuucucggaaucauua

SEQ ID NO: 1574805 - RNA, 19 nt, Artificial Sequence
  Description of Artificial Sequence: Synthetic oligonucleotide
  Sense strand starting at position 1985 of SEQ ID NO: 1560080
cccagugaaucuuuauaag

SEQ ID NO: 1574806 - RNA, 19 nt, Artificial Sequence
  Description of Artificial Sequence: Synthetic oligonucleotide
  Antisense strand to SEQ ID NO: 1574805
cuuauaaagauucacuggg

SEQ ID NO: 1574807 - RNA, 19 nt, Artificial Sequence
  Description of Artificial Sequence: Synthetic oligonucleotide
  Sense strand starting at position 2043 of SEQ ID NO: 1560080
guguuuguccugucuucuu

SEQ ID NO: 1574808 - RNA, 19 nt, Artificial Sequence
  Description of Artificial Sequence: Synthetic oligonucleotide
  Antisense strand to SEQ ID NO: 1574807
aagaagacaggacaaacac

SEQ ID NO: 1574809 - RNA, 19 nt, Artificial Sequence
  Description of Artificial Sequence: Synthetic oligonucleotide
  Sense strand starting at position 2054 of SEQ ID NO: 1560080
gucuucuucccgugacuca

SEQ ID NO: 1574810 - RNA, 19 nt, Artificial Sequence
  Description of Artificial Sequence: Synthetic oligonucleotide
  Antisense strand to SEQ ID NO: 1574809
ugagucacgggaagaagac

SEQ ID NO: 1574811 - RNA, 19 nt, Artificial Sequence
  Description of Artificial Sequence: Synthetic oligonucleotide
  Sense strand starting at position 2202 of SEQ ID NO: 1560080
ucuuuaacgccuuagaggu

SEQ ID NO: 1574812 - RNA, 19 nt, Artificial Sequence
  Description of Artificial Sequence: Synthetic oligonucleotide
  Antisense strand to SEQ ID NO: 1574811
accucuaaggcguuaaaga

SEQ ID NO: 1574813 - RNA, 19 nt, Artificial Sequence
  Description of Artificial Sequence: Synthetic oligonucleotide
  Sense strand starting at position 2226 of SEQ ID NO: 1560080
ccuggauucuguuugccca

SEQ ID NO: 1574814 - RNA, 19 nt, Artificial Sequence
  Description of Artificial Sequence: Synthetic oligonucleotide
  Antisense strand to SEQ ID NO: 1574813
ugggcaaacagaauccagg

SEQ ID NO: 1574815 - RNA, 19 nt, Artificial Sequence
  Description of Artificial Sequence: Synthetic oligonucleotide
  Sense strand starting at position 2229 of SEQ ID NO: 1560080
ggauucuguuugcccacaa

SEQ ID NO: 1574816 - RNA, 19 nt, Artificial Sequence
  Description of Artificial Sequence: Synthetic oligonucleotide
  Antisense strand to SEQ ID NO: 1574815
uugugggcaaacagaaucc

SEQ ID NO: 1574817 - RNA, 19 nt, Artificial Sequence
  Description of Artificial Sequence: Synthetic oligonucleotide
  Sense strand starting at position 2365 of SEQ ID NO: 1560080
gggucacauucuccacaaa

SEQ ID NO: 1574818 - RNA, 19 nt, Artificial Sequence
  Description of Artificial Sequence: Synthetic oligonucleotide
  Antisense strand to SEQ ID NO: 1574817
uuuguggagaaugugaccc

SEQ ID NO: 1574819 - RNA, 19 nt, Artificial Sequence
  Description of Artificial Sequence: Synthetic oligonucleotide
  Sense strand starting at position 2481 of SEQ ID NO: 1560080
gaagauguuguuggccaua

SEQ ID NO: 1574820 - RNA, 19 nt, Artificial Sequence
  Description of Artificial Sequence: Synthetic oligonucleotide
  Antisense strand to SEQ ID NO: 1574819
uauggccaacaacaucuuc

SEQ ID NO: 1574821 - RNA, 19 nt, Artificial Sequence
  Description of Artificial Sequence: Synthetic oligonucleotide
  Sense strand starting at position 2486 of SEQ ID NO: 1560080
uguuguuggccauagcgau

SEQ ID NO: 1574822 - RNA, 19 nt, Artificial Sequence
  Description of Artificial Sequence: Synthetic oligonucleotide
  Antisense strand to SEQ ID NO: 1574821
aucgcuauggccaacaaca

SEQ ID NO: 1574823 - RNA, 19 nt, Artificial Sequence
  Description of Artificial Sequence: Synthetic oligonucleotide
  Sense strand starting at position 2702 of SEQ ID NO: 1560080
cuguguugcccagccucaa

SEQ ID NO: 1574824 - RNA, 19 nt, Artificial Sequence
  Description of Artificial Sequence: Synthetic oligonucleotide
  Antisense strand to SEQ ID NO: 1574823
uugaggcugggcaacacag

SEQ ID NO: 1574825 - RNA, 19 nt, Artificial Sequence
  Description of Artificial Sequence: Synthetic oligonucleotide
  Sense strand starting at position 2940 of SEQ ID NO: 1560080
ugcuaugagcguuggauac

SEQ ID NO: 1574826 - RNA, 19 nt, Artificial Sequence
  Description of Artificial Sequence: Synthetic oligonucleotide
  Antisense strand to SEQ ID NO: 1574825
guauccaacgcucauagca

SEQ ID NO: 1574827 - RNA, 19 nt, Artificial Sequence
  Description of Artificial Sequence: Synthetic oligonucleotide
  Sense strand starting at position 3338 of SEQ ID NO: 1560080
uaacgugaauucuuaaagu

SEQ ID NO: 1574828 - RNA, 19 nt, Artificial Sequence
  Description of Artificial Sequence: Synthetic oligonucleotide
  Antisense strand to SEQ ID NO: 1574827
acuuuaagaauucacguua

SEQ ID NO: 1574829 - RNA, 19 nt, Artificial Sequence
  Description of Artificial Sequence: Synthetic oligonucleotide
  Sense strand starting at position 3448 of SEQ ID NO: 1560080
uugugcgugcuuuagggau

SEQ ID NO: 1574830 - RNA, 19 nt, Artificial Sequence
  Description of Artificial Sequence: Synthetic oligonucleotide
  Antisense strand to SEQ ID NO: 1574829
aucccuaaagcacgcacaa

SEQ ID NO: 1574831 - RNA, 19 nt, Artificial Sequence
  Description of Artificial Sequence: Synthetic oligonucleotide
  Sense strand starting at position 3471 of SEQ ID NO: 1560080
gggauauauuuacacacuu

SEQ ID NO: 1574832 - RNA, 19 nt, Artificial Sequence
  Description of Artificial Sequence: Synthetic oligonucleotide
  Antisense strand to SEQ ID NO: 1574831
aaguguguaaauauauccc

SEQ ID NO: 1574833 - RNA, 19 nt, Artificial Sequence
  Description of Artificial Sequence: Synthetic oligonucleotide
  Sense strand starting at position 3511 of SEQ ID NO: 1560080
augaaaucacuuugcuaga

SEQ ID NO: 1574834 - RNA, 19 nt, Artificial Sequence
  Description of Artificial Sequence: Synthetic oligonucleotide
  Antisense strand to SEQ ID NO: 1574833
ucuagcaaagugauuucau

SEQ ID NO: 1574835 - RNA, 19 nt, Artificial Sequence
  Description of Artificial Sequence: Synthetic oligonucleotide
  Sense strand starting at position 3512 of SEQ ID NO: 1560080
ugaaaucacuuugcuagag

SEQ ID NO: 1574836 - RNA, 19 nt, Artificial Sequence
  Description of Artificial Sequence: Synthetic oligonucleotide
  Antisense strand to SEQ ID NO: 1574835
cucuagcaaagugauuuca

SEQ ID NO: 1574837 - RNA, 19 nt, Artificial Sequence
  Description of Artificial Sequence: Synthetic oligonucleotide
  Sense strand starting at position 3528 of SEQ ID NO: 1560080
gaggaaguuguucgugaga

SEQ ID NO: 1574838 - RNA, 19 nt, Artificial Sequence
  Description of Artificial Sequence: Synthetic oligonucleotide
  Antisense strand to SEQ ID NO: 1574837
ucucacgaacaacuuccuc

SEQ ID NO: 1574839 - RNA, 19 nt, Artificial Sequence
  Description of Artificial Sequence: Synthetic oligonucleotide
  Sense strand starting at position 3531 of SEQ ID NO: 1560080
gaaguuguucgugagacaa

SEQ ID NO: 1574840 - RNA, 19 nt, Artificial Sequence
  Description of Artificial Sequence: Synthetic oligonucleotide
  Antisense strand to SEQ ID NO: 1574839
uugucucacgaacaacuuc

SEQ ID NO: 1574841 - RNA, 19 nt, Artificial Sequence
  Description of Artificial Sequence: Synthetic oligonucleotide
  Sense strand starting at position 3730 of SEQ ID NO: 1560080
cccaaucuccugugggaau

SEQ ID NO: 1574842 - RNA, 19 nt, Artificial Sequence
  Description of Artificial Sequence: Synthetic oligonucleotide
  Antisense strand to SEQ ID NO: 1574841
auucccacaggagauuggg

SEQ ID NO: 1574843 - RNA, 19 nt, Artificial Sequence
  Description of Artificial Sequence: Synthetic oligonucleotide
  Sense strand starting at position 3790 of SEQ ID NO: 1560080
gguggaaccuucccuuuau

SEQ ID NO: 1574844 - RNA, 19 nt, Artificial Sequence
  Description of Artificial Sequence: Synthetic oligonucleotide
  Antisense strand to SEQ ID NO: 1574843
auaaagggaagguuccacc

SEQ ID NO: 1574845 - RNA, 19 nt, Artificial Sequence
  Description of Artificial Sequence: Synthetic oligonucleotide
  Sense strand starting at position 405 of SEQ ID NO: 1560081
cgcaaauggcccuauauau

SEQ ID NO: 1574846 - RNA, 19 nt, Artificial Sequence
  Description of Artificial Sequence: Synthetic oligonucleotide
  Antisense strand to SEQ ID NO: 1574845
auauauagggccauuugcg

SEQ ID NO: 1574847 - RNA, 19 nt, Artificial Sequence
  Description of Artificial Sequence: Synthetic oligonucleotide
  Sense strand starting at position 439 of SEQ ID NO: 1560081
gucuuccuccacuagaaga

SEQ ID NO: 1574848 - RNA, 19 nt, Artificial Sequence
  Description of Artificial Sequence: Synthetic oligonucleotide
  Antisense strand to SEQ ID NO: 1574847
ucuucuaguggaggaagac

SEQ ID NO: 1574849 - RNA, 19 nt, Artificial Sequence
  Description of Artificial Sequence: Synthetic oligonucleotide
  Sense strand starting at position 1744 of SEQ ID NO: 1560081
acuccauggcccuggagau

SEQ ID NO: 1574850 - RNA, 19 nt, Artificial Sequence
  Description of Artificial Sequence: Synthetic oligonucleotide
  Antisense strand to SEQ ID NO: 1574849
aucuccagggccauggagu

SEQ ID NO: 1574851 - RNA, 19 nt, Artificial Sequence
  Description of Artificial Sequence: Synthetic oligonucleotide
  Sense strand starting at position 1757 of SEQ ID NO: 1560081
ggagaucuaggguguccau

SEQ ID NO: 1574852 - RNA, 19 nt, Artificial Sequence
  Description of Artificial Sequence: Synthetic oligonucleotide
  Antisense strand to SEQ ID NO: 1574851
auggacacccuagaucucc

SEQ ID NO: 1574853 - RNA, 19 nt, Artificial Sequence
  Description of Artificial Sequence: Synthetic oligonucleotide
  Sense strand starting at position 1794 of SEQ ID NO: 1560081
ccuugcaaacuggaauauu

SEQ ID NO: 1574854 - RNA, 19 nt, Artificial Sequence
  Description of Artificial Sequence: Synthetic oligonucleotide
  Antisense strand to SEQ ID NO: 1574853
aauauuccaguuugcaagg

SEQ ID NO: 1574855 - RNA, 19 nt, Artificial Sequence
  Description of Artificial Sequence: Synthetic oligonucleotide
  Sense strand starting at position 1802 of SEQ ID NO: 1560081
acuggaauauugcgucaua

SEQ ID NO: 1574856 - RNA, 19 nt, Artificial Sequence
  Description of Artificial Sequence: Synthetic oligonucleotide
  Antisense strand to SEQ ID NO: 1574855
uaugacgcaauauuccagu

SEQ ID NO: 1574857 - RNA, 19 nt, Artificial Sequence
  Description of Artificial Sequence: Synthetic oligonucleotide
  Sense strand starting at position 1803 of SEQ ID NO: 1560081
cuggaauauugcgucauaa

SEQ ID NO: 1574858 - RNA, 19 nt, Artificial Sequence
  Description of Artificial Sequence: Synthetic oligonucleotide
  Antisense strand to SEQ ID NO: 1574857
uuaugacgcaauauuccag

SEQ ID NO: 1574859 - RNA, 19 nt, Artificial Sequence
  Description of Artificial Sequence: Synthetic oligonucleotide
  Sense strand starting at position 1805 of SEQ ID NO: 1560081
ggaauauugcgucauaagg

SEQ ID NO: 1574860 - RNA, 19 nt, Artificial Sequence
  Description of Artificial Sequence: Synthetic oligonucleotide
  Antisense strand to SEQ ID NO: 1574859
ccuuaugacgcaauauucc

SEQ ID NO: 1574861 - RNA, 19 nt, Artificial Sequence
  Description of Artificial Sequence: Synthetic oligonucleotide
  Sense strand starting at position 1807 of SEQ ID NO: 1560081
aauauugcgucauaaggac

SEQ ID NO: 1574862 - RNA, 19 nt, Artificial Sequence
  Description of Artificial Sequence: Synthetic oligonucleotide
  Antisense strand to SEQ ID NO: 1574861
guccuuaugacgcaauauu

SEQ ID NO: 1574863 - RNA, 19 nt, Artificial Sequence
  Description of Artificial Sequence: Synthetic oligonucleotide
  Sense strand starting at position 1822 of SEQ ID NO: 1560081
ggacuccagugcuuuagaa

SEQ ID NO: 1574864 - RNA, 19 nt, Artificial Sequence
  Description of Artificial Sequence: Synthetic oligonucleotide
  Antisense strand to SEQ ID NO: 1574863
uucuaaagcacuggagucc

SEQ ID NO: 1574865 - RNA, 19 nt, Artificial Sequence
  Description of Artificial Sequence: Synthetic oligonucleotide
  Sense strand starting at position 1824 of SEQ ID NO: 1560081
acuccagugcuuuagaaua

SEQ ID NO: 1574866 - RNA, 19 nt, Artificial Sequence
  Description of Artificial Sequence: Synthetic oligonucleotide
  Antisense strand to SEQ ID NO: 1574865
uauucuaaagcacuggagu

SEQ ID NO: 1574867 - RNA, 19 nt, Artificial Sequence
  Description of Artificial Sequence: Synthetic oligonucleotide
  Sense strand starting at position 1826 of SEQ ID NO: 1560081
uccagugcuuuagaauauu

SEQ ID NO: 1574868 - RNA, 19 nt, Artificial Sequence
  Description of Artificial Sequence: Synthetic oligonucleotide
  Antisense strand to SEQ ID NO: 1574867
aauauucuaaagcacugga

SEQ ID NO: 1574869 - RNA, 19 nt, Artificial Sequence
  Description of Artificial Sequence: Synthetic oligonucleotide
  Sense strand starting at position 1829 of SEQ ID NO: 1560081
agugcuuuagaauauugga

SEQ ID NO: 1574870 - RNA, 19 nt, Artificial Sequence
  Description of Artificial Sequence: Synthetic oligonucleotide
  Antisense strand to SEQ ID NO: 1574869
uccaauauucuaaagcacu

SEQ ID NO: 1574871 - RNA, 19 nt, Artificial Sequence
  Description of Artificial Sequence: Synthetic oligonucleotide
  Sense strand starting at position 1832 of SEQ ID NO: 1560081
gcuuuagaauauuggaauu

SEQ ID NO: 1574872 - RNA, 19 nt, Artificial Sequence
  Description of Artificial Sequence: Synthetic oligonucleotide
  Antisense strand to SEQ ID NO: 1574871
aauuccaauauucuaaagc

SEQ ID NO: 1574873 - RNA, 19 nt, Artificial Sequence
  Description of Artificial Sequence: Synthetic oligonucleotide
  Sense strand starting at position 2149 of SEQ ID NO: 1560081
ucuagaacuuaguguuguu

SEQ ID NO: 1574874 - RNA, 19 nt, Artificial Sequence
  Description of Artificial Sequence: Synthetic oligonucleotide
  Antisense strand to SEQ ID NO: 1574873
aacaacacuaaguucuaga

SEQ ID NO: 1574875 - RNA, 19 nt, Artificial Sequence
  Description of Artificial Sequence: Synthetic oligonucleotide
  Sense strand starting at position 2152 of SEQ ID NO: 1560081
agaacuuaguguuguuaga

SEQ ID NO: 1574876 - RNA, 19 nt, Artificial Sequence
  Description of Artificial Sequence: Synthetic oligonucleotide
  Antisense strand to SEQ ID NO: 1574875
ucuaacaacacuaaguucu

SEQ ID NO: 1574877 - RNA, 19 nt, Artificial Sequence
  Description of Artificial Sequence: Synthetic oligonucleotide
  Sense strand starting at position 2154 of SEQ ID NO: 1560081
aacuuaguguuguuagaag

SEQ ID NO: 1574878 - RNA, 19 nt, Artificial Sequence
  Description of Artificial Sequence: Synthetic oligonucleotide
  Antisense strand to SEQ ID NO: 1574877
cuucuaacaacacuaaguu

SEQ ID NO: 1574879 - RNA, 19 nt, Artificial Sequence
  Description of Artificial Sequence: Synthetic oligonucleotide
  Sense strand starting at position 2209 of SEQ ID NO: 1560081
acccuaguacauuggaaua

SEQ ID NO: 1574880 - RNA, 19 nt, Artificial Sequence
  Description of Artificial Sequence: Synthetic oligonucleotide
  Antisense strand to SEQ ID NO: 1574879
uauuccaauguacuagggu

SEQ ID NO: 1574881 - RNA, 19 nt, Artificial Sequence
  Description of Artificial Sequence: Synthetic oligonucleotide
  Sense strand starting at position 2211 of SEQ ID NO: 1560081
ccuaguacauuggaauauu

SEQ ID NO: 1574882 - RNA, 19 nt, Artificial Sequence
  Description of Artificial Sequence: Synthetic oligonucleotide
  Antisense strand to SEQ ID NO: 1574881
aauauuccaauguacuagg

SEQ ID NO: 1574883 - RNA, 19 nt, Artificial Sequence
  Description of Artificial Sequence: Synthetic oligonucleotide
  Sense strand starting at position 2383 of SEQ ID NO: 1560081
augcgugccugugauccua

SEQ ID NO: 1574884 - RNA, 19 nt, Artificial Sequence
  Description of Artificial Sequence: Synthetic oligonucleotide
  Antisense strand to SEQ ID NO: 1574883
uaggaucacaggcacgcau

SEQ ID NO: 1574885 - RNA, 19 nt, Artificial Sequence
  Description of Artificial Sequence: Synthetic oligonucleotide
  Sense strand starting at position 2443 of SEQ ID NO: 1560081
gagauugagugagcuugau

SEQ ID NO: 1574886 - RNA, 19 nt, Artificial Sequence
  Description of Artificial Sequence: Synthetic oligonucleotide
  Antisense strand to SEQ ID NO: 1574885
aucaagcucacucaaucuc

SEQ ID NO: 1574887 - RNA, 19 nt, Artificial Sequence
  Description of Artificial Sequence: Synthetic oligonucleotide
  Sense strand starting at position 2447 of SEQ ID NO: 1560081
uugagugagcuugaucaua

SEQ ID NO: 1574888 - RNA, 19 nt, Artificial Sequence
  Description of Artificial Sequence: Synthetic oligonucleotide
  Antisense strand to SEQ ID NO: 1574887
uaugaucaagcucacucaa

SEQ ID NO: 1574889 - RNA, 19 nt, Artificial Sequence
  Description of Artificial Sequence: Synthetic oligonucleotide
  Sense strand starting at position 2449 of SEQ ID NO: 1560081
gagugagcuugaucauacc

SEQ ID NO: 1574890 - RNA, 19 nt, Artificial Sequence
  Description of Artificial Sequence: Synthetic oligonucleotide
  Antisense strand to SEQ ID NO: 1574889
gguaugaucaagcucacuc

SEQ ID NO: 1574891 - RNA, 19 nt, Artificial Sequence
  Description of Artificial Sequence: Synthetic oligonucleotide
  Sense strand starting at position 2607 of SEQ ID NO: 1560081
cagggaagcuggcuauguu

SEQ ID NO: 1574892 - RNA, 19 nt, Artificial Sequence
  Description of Artificial Sequence: Synthetic oligonucleotide
  Antisense strand to SEQ ID NO: 1574891
aacauagccagcuucccug

SEQ ID NO: 1574893 - RNA, 19 nt, Artificial Sequence
  Description of Artificial Sequence: Synthetic oligonucleotide
  Sense strand starting at position 2619 of SEQ ID NO: 1560081
cuauguuggaguuguacag

SEQ ID NO: 1574894 - RNA, 19 nt, Artificial Sequence
  Description of Artificial Sequence: Synthetic oligonucleotide
  Antisense strand to SEQ ID NO: 1574893
cuguacaacuccaacauag

SEQ ID NO: 1574895 - RNA, 19 nt, Artificial Sequence
  Description of Artificial Sequence: Synthetic oligonucleotide
  Sense strand starting at position 2623 of SEQ ID NO: 1560081
guuggaguuguacaggcau

SEQ ID NO: 1574896 - RNA, 19 nt, Artificial Sequence
  Description of Artificial Sequence: Synthetic oligonucleotide
  Antisense strand to SEQ ID NO: 1574895
augccuguacaacuccaac

SEQ ID NO: 1574897 - RNA, 19 nt, Artificial Sequence
  Description of Artificial Sequence: Synthetic oligonucleotide
  Sense strand starting at position 2653 of SEQ ID NO: 1560081
gcuucuugagaaggugaca

SEQ ID NO: 1574898 - RNA, 19 nt, Artificial Sequence
  Description of Artificial Sequence: Synthetic oligonucleotide
  Antisense strand to SEQ ID NO: 1574897
ugucaccuucucaagaagc

SEQ ID NO: 1574899 - RNA, 19 nt, Artificial Sequence
  Description of Artificial Sequence: Synthetic oligonucleotide
  Sense strand starting at position 2775 of SEQ ID NO: 1560081
acaugacggucauguccaa

SEQ ID NO: 1574900 - RNA, 19 nt, Artificial Sequence
  Description of Artificial Sequence: Synthetic oligonucleotide
  Antisense strand to SEQ ID NO: 1574899
uuggacaugaccgucaugu

SEQ ID NO: 1574901 - RNA, 19 nt, Artificial Sequence
  Description of Artificial Sequence: Synthetic oligonucleotide
  Sense strand starting at position 2849 of SEQ ID NO: 1560081
gaggcaauagcagagucau

SEQ ID NO: 1574902 - RNA, 19 nt, Artificial Sequence
  Description of Artificial Sequence: Synthetic oligonucleotide
  Antisense strand to SEQ ID NO: 1574901
augacucugcuauugccuc

SEQ ID NO: 1574903 - RNA, 19 nt, Artificial Sequence
  Description of Artificial Sequence: Synthetic oligonucleotide
  Sense strand starting at position 2892 of SEQ ID NO: 1560081
gccaguaaucacgggaauu

SEQ ID NO: 1574904 - RNA, 19 nt, Artificial Sequence
  Description of Artificial Sequence: Synthetic oligonucleotide
  Antisense strand to SEQ ID NO: 1574903
aauucccgugauuacuggc

SEQ ID NO: 1574905 - RNA, 19 nt, Artificial Sequence
  Description of Artificial Sequence: Synthetic oligonucleotide
  Sense strand starting at position 3234 of SEQ ID NO: 1560081
acgcaaggacaucaucauu

SEQ ID NO: 1574906 - RNA, 19 nt, Artificial Sequence
  Description of Artificial Sequence: Synthetic oligonucleotide
  Antisense strand to SEQ ID NO: 1574905
aaugaugauguccuugcgu

SEQ ID NO: 1574907 - RNA, 19 nt, Artificial Sequence
  Description of Artificial Sequence: Synthetic oligonucleotide
  Sense strand starting at position 3257 of SEQ ID NO: 1560081
ccaaaugagacaggugcua

SEQ ID NO: 1574908 - RNA, 19 nt, Artificial Sequence
  Description of Artificial Sequence: Synthetic oligonucleotide
  Antisense strand to SEQ ID NO: 1574907
uagcaccugucucauuugg

SEQ ID NO: 1574909 - RNA, 19 nt, Artificial Sequence
  Description of Artificial Sequence: Synthetic oligonucleotide
  Sense strand starting at position 3606 of SEQ ID NO: 1560081
caugucgggccacaauaau

SEQ ID NO: 1574910 - RNA, 19 nt, Artificial Sequence
  Description of Artificial Sequence: Synthetic oligonucleotide
  Antisense strand to SEQ ID NO: 1574909
auuauuguggcccgacaug

SEQ ID NO: 1574911 - RNA, 19 nt, Artificial Sequence
  Description of Artificial Sequence: Synthetic oligonucleotide
  Sense strand starting at position 3612 of SEQ ID NO: 1560081
gggccacaauaauauuauu

SEQ ID NO: 1574912 - RNA, 19 nt, Artificial Sequence
  Description of Artificial Sequence: Synthetic oligonucleotide
  Antisense strand to SEQ ID NO: 1574911
aauaauauuauuguggccc

SEQ ID NO: 1574913 - RNA, 19 nt, Artificial Sequence
  Description of Artificial Sequence: Synthetic oligonucleotide
  Sense strand starting at position 3940 of SEQ ID NO: 1560081
ugccacugugccugacaau

SEQ ID NO: 1574914 - RNA, 19 nt, Artificial Sequence
  Description of Artificial Sequence: Synthetic oligonucleotide
  Antisense strand to SEQ ID NO: 1574913
auugucaggcacaguggca

SEQ ID NO: 1574915 - RNA, 19 nt, Artificial Sequence
  Description of Artificial Sequence: Synthetic oligonucleotide
  Sense strand starting at position 3941 of SEQ ID NO: 1560081
gccacugugccugacaaua

SEQ ID NO: 1574916 - RNA, 19 nt, Artificial Sequence
  Description of Artificial Sequence: Synthetic oligonucleotide
  Antisense strand to SEQ ID NO: 1574915
uauugucaggcacaguggc

SEQ ID NO: 1574917 - RNA, 19 nt, Artificial Sequence
  Description of Artificial Sequence: Synthetic oligonucleotide
  Sense strand starting at position 3946 of SEQ ID NO: 1560081
ugugccugacaauaauaau

SEQ ID NO: 1574918 - RNA, 19 nt, Artificial Sequence
  Description of Artificial Sequence: Synthetic oligonucleotide
  Antisense strand to SEQ ID NO: 1574917
auuauuauugucaggcaca

SEQ ID NO: 1574919 - RNA, 19 nt, Artificial Sequence
  Description of Artificial Sequence: Synthetic oligonucleotide
  Sense strand starting at position 3975 of SEQ ID NO: 1560081
uuauuauuauuggaagcca

SEQ ID NO: 1574920 - RNA, 19 nt, Artificial Sequence
  Description of Artificial Sequence: Synthetic oligonucleotide
  Antisense strand to SEQ ID NO: 1574919
uggcuuccaauaauaauaa

SEQ ID NO: 1574921 - RNA, 19 nt, Artificial Sequence
  Description of Artificial Sequence: Synthetic oligonucleotide
  Sense strand starting at position 124 of SEQ ID NO: 1560082
caugucgggccacaauaau

SEQ ID NO: 1574922 - RNA, 19 nt, Artificial Sequence
  Description of Artificial Sequence: Synthetic oligonucleotide
  Antisense strand to SEQ ID NO: 1574921
auuauuguggcccgacaug

SEQ ID NO: 1574923 - RNA, 19 nt, Artificial Sequence
  Description of Artificial Sequence: Synthetic oligonucleotide
  Sense strand starting at position 130 of SEQ ID NO: 1560082
gggccacaauaauauuauu

SEQ ID NO: 1574924 - RNA, 19 nt, Artificial Sequence
  Description of Artificial Sequence: Synthetic oligonucleotide
  Antisense strand to SEQ ID NO: 1574923
aauaauauuauuguggccc

SEQ ID NO: 1574925 - RNA, 19 nt, Artificial Sequence
  Description of Artificial Sequence: Synthetic oligonucleotide
  Sense strand starting at position 458 of SEQ ID NO: 1560082
ugccacugugccugacaau

SEQ ID NO: 1574926 - RNA, 19 nt, Artificial Sequence
  Description of Artificial Sequence: Synthetic oligonucleotide
  Antisense strand to SEQ ID NO: 1574925
auugucaggcacaguggca

SEQ ID NO: 1574927 - RNA, 19 nt, Artificial Sequence
  Description of Artificial Sequence: Synthetic oligonucleotide
  Sense strand starting at position 459 of SEQ ID NO: 1560082
gccacugugccugacaaua

SEQ ID NO: 1574928 - RNA, 19 nt, Artificial Sequence
  Description of Artificial Sequence: Synthetic oligonucleotide
  Antisense strand to SEQ ID NO: 1574927
uauugucaggcacaguggc

SEQ ID NO: 1574929 - RNA, 19 nt, Artificial Sequence
  Description of Artificial Sequence: Synthetic oligonucleotide
  Sense strand starting at position 464 of SEQ ID NO: 1560082
ugugccugacaauaauaau

SEQ ID NO: 1574930 - RNA, 19 nt, Artificial Sequence
  Description of Artificial Sequence: Synthetic oligonucleotide
  Antisense strand to SEQ ID NO: 1574929
auuauuauugucaggcaca

SEQ ID NO: 1574931 - RNA, 19 nt, Artificial Sequence
  Description of Artificial Sequence: Synthetic oligonucleotide
  Sense strand starting at position 493 of SEQ ID NO: 1560082
uuauuauuauuggaagcca

SEQ ID NO: 1574932 - RNA, 19 nt, Artificial Sequence
  Description of Artificial Sequence: Synthetic oligonucleotide
  Antisense strand to SEQ ID NO: 1574931
uggcuuccaauaauaauaa

SEQ ID NO: 1574933 - RNA, 19 nt, Artificial Sequence
  Description of Artificial Sequence: Synthetic oligonucleotide
  Sense strand starting at position 507 of SEQ ID NO: 1560082
agccacuguuucuugaaca

SEQ ID NO: 1574934 - RNA, 19 nt, Artificial Sequence
  Description of Artificial Sequence: Synthetic oligonucleotide
  Antisense strand to SEQ ID NO: 1574933
uguucaagaaacaguggcu

SEQ ID NO: 1574935 - RNA, 19 nt, Artificial Sequence
  Description of Artificial Sequence: Synthetic oligonucleotide
  Sense strand starting at position 563 of SEQ ID NO: 1560082
gacagauauugcucuguca

SEQ ID NO: 1574936 - RNA, 19 nt, Artificial Sequence
  Description of Artificial Sequence: Synthetic oligonucleotide
  Antisense strand to SEQ ID NO: 1574935
ugacagagcaauaucuguc

SEQ ID NO: 1574937 - RNA, 19 nt, Artificial Sequence
  Description of Artificial Sequence: Synthetic oligonucleotide
  Sense strand starting at position 799 of SEQ ID NO: 1560082
aaacucugugcucaaguga

SEQ ID NO: 1574938 - RNA, 19 nt, Artificial Sequence
  Description of Artificial Sequence: Synthetic oligonucleotide
  Antisense strand to SEQ ID NO: 1574937
ucacuugagcacagaguuu

SEQ ID NO: 1574939 - RNA, 19 nt, Artificial Sequence
  Description of Artificial Sequence: Synthetic oligonucleotide
  Sense strand starting at position 1240 of SEQ ID NO: 1560082
gucugaauuugacacuauu

SEQ ID NO: 1574940 - RNA, 19 nt, Artificial Sequence
  Description of Artificial Sequence: Synthetic oligonucleotide
  Antisense strand to SEQ ID NO: 1574939
aauagugucaaauucagac

SEQ ID NO: 1574941 - RNA, 19 nt, Artificial Sequence
  Description of Artificial Sequence: Synthetic oligonucleotide
  Sense strand starting at position 1621 of SEQ ID NO: 1560082
agcccuaaguagguaaauu

SEQ ID NO: 1574942 - RNA, 19 nt, Artificial Sequence
  Description of Artificial Sequence: Synthetic oligonucleotide
  Antisense strand to SEQ ID NO: 1574941
aauuuaccuacuuagggcu

SEQ ID NO: 1574943 - RNA, 19 nt, Artificial Sequence
  Description of Artificial Sequence: Synthetic oligonucleotide
  Sense strand starting at position 1810 of SEQ ID NO: 1560082
aaacaagagucauugaggu

SEQ ID NO: 1574944 - RNA, 19 nt, Artificial Sequence
  Description of Artificial Sequence: Synthetic oligonucleotide
  Antisense strand to SEQ ID NO: 1574943
accucaaugacucuuguuu

SEQ ID NO: 1574945 - RNA, 19 nt, Artificial Sequence
  Description of Artificial Sequence: Synthetic oligonucleotide
  Sense strand starting at position 1814 of SEQ ID NO: 1560082
aagagucauugaggugaac

SEQ ID NO: 1574946 - RNA, 19 nt, Artificial Sequence
  Description of Artificial Sequence: Synthetic oligonucleotide
  Antisense strand to SEQ ID NO: 1574945
guucaccucaaugacucuu

SEQ ID NO: 1574947 - RNA, 19 nt, Artificial Sequence
  Description of Artificial Sequence: Synthetic oligonucleotide
  Sense strand starting at position 1816 of SEQ ID NO: 1560082
gagucauugaggugaaccu

SEQ ID NO: 1574948 - RNA, 19 nt, Artificial Sequence
  Description of Artificial Sequence: Synthetic oligonucleotide
  Antisense strand to SEQ ID NO: 1574947
agguucaccucaaugacuc

SEQ ID NO: 1574949 - RNA, 19 nt, Artificial Sequence
  Description of Artificial Sequence: Synthetic oligonucleotide
  Sense strand starting at position 2089 of SEQ ID NO: 1560082
ccagguagcagugaagagu

SEQ ID NO: 1574950 - RNA, 19 nt, Artificial Sequence
  Description of Artificial Sequence: Synthetic oligonucleotide
  Antisense strand to SEQ ID NO: 1574949
acucuucacugcuaccugg

SEQ ID NO: 1574951 - RNA, 19 nt, Artificial Sequence
  Description of Artificial Sequence: Synthetic oligonucleotide
  Sense strand starting at position 2142 of SEQ ID NO: 1560082
auuccacuuucguauuauu

SEQ ID NO: 1574952 - RNA, 19 nt, Artificial Sequence
  Description of Artificial Sequence: Synthetic oligonucleotide
  Antisense strand to SEQ ID NO: 1574951
aauaauacgaaaguggaau

SEQ ID NO: 1574953 - RNA, 19 nt, Artificial Sequence
  Description of Artificial Sequence: Synthetic oligonucleotide
  Sense strand starting at position 2345 of SEQ ID NO: 1560082
agugguucgugccugcaau

SEQ ID NO: 1574954 - RNA, 19 nt, Artificial Sequence
  Description of Artificial Sequence: Synthetic oligonucleotide
  Antisense strand to SEQ ID NO: 1574953
auugcaggcacgaaccacu

SEQ ID NO: 1574955 - RNA, 19 nt, Artificial Sequence
  Description of Artificial Sequence: Synthetic oligonucleotide
  Sense strand starting at position 2979 of SEQ ID NO: 1560082
cuaucugugccucaguaaa

SEQ ID NO: 1574956 - RNA, 19 nt, Artificial Sequence
  Description of Artificial Sequence: Synthetic oligonucleotide
  Antisense strand to SEQ ID NO: 1574955
uuuacugaggcacagauag

SEQ ID NO: 1574957 - RNA, 19 nt, Artificial Sequence
  Description of Artificial Sequence: Synthetic oligonucleotide
  Sense strand starting at position 3056 of SEQ ID NO: 1560082
gguagagcugaguguauag

SEQ ID NO: 1574958 - RNA, 19 nt, Artificial Sequence
  Description of Artificial Sequence: Synthetic oligonucleotide
  Antisense strand to SEQ ID NO: 1574957
cuauacacucagcucuacc

SEQ ID NO: 1574959 - RNA, 19 nt, Artificial Sequence
  Description of Artificial Sequence: Synthetic oligonucleotide
  Sense strand starting at position 3065 of SEQ ID NO: 1560082
gaguguauagcgcugguuu

SEQ ID NO: 1574960 - RNA, 19 nt, Artificial Sequence
  Description of Artificial Sequence: Synthetic oligonucleotide
  Antisense strand to SEQ ID NO: 1574959
aaaccagcgcuauacacuc

SEQ ID NO: 1574961 - RNA, 19 nt, Artificial Sequence
  Description of Artificial Sequence: Synthetic oligonucleotide
  Sense strand starting at position 3089 of SEQ ID NO: 1560082
gggugucauacguaggcua

SEQ ID NO: 1574962 - RNA, 19 nt, Artificial Sequence
  Description of Artificial Sequence: Synthetic oligonucleotide
  Antisense strand to SEQ ID NO: 1574961
uagccuacguaugacaccc

SEQ ID NO: 1574963 - RNA, 19 nt, Artificial Sequence
  Description of Artificial Sequence: Synthetic oligonucleotide
  Sense strand starting at position 3166 of SEQ ID NO: 1560082
ggcccuuguugauuacaau

SEQ ID NO: 1574964 - RNA, 19 nt, Artificial Sequence
  Description of Artificial Sequence: Synthetic oligonucleotide
  Antisense strand to SEQ ID NO: 1574963
auuguaaucaacaagggcc

SEQ ID NO: 1574965 - RNA, 19 nt, Artificial Sequence
  Description of Artificial Sequence: Synthetic oligonucleotide
  Sense strand starting at position 3520 of SEQ ID NO: 1560082
ccaggaaacuuucugugca

SEQ ID NO: 1574966 - RNA, 19 nt, Artificial Sequence
  Description of Artificial Sequence: Synthetic oligonucleotide
  Antisense strand to SEQ ID NO: 1574965
ugcacagaaaguuuccugg

SEQ ID NO: 1574967 - RNA, 19 nt, Artificial Sequence
  Description of Artificial Sequence: Synthetic oligonucleotide
  Sense strand starting at position 3521 of SEQ ID NO: 1560082
caggaaacuuucugugcau

SEQ ID NO: 1574968 - RNA, 19 nt, Artificial Sequence
  Description of Artificial Sequence: Synthetic oligonucleotide
  Antisense strand to SEQ ID NO: 1574967
augcacagaaaguuuccug

SEQ ID NO: 1574969 - RNA, 19 nt, Artificial Sequence
  Description of Artificial Sequence: Synthetic oligonucleotide
  Sense strand starting at position 3522 of SEQ ID NO: 1560082
aggaaacuuucugugcaua

SEQ ID NO: 1574970 - RNA, 19 nt, Artificial Sequence
  Description of Artificial Sequence: Synthetic oligonucleotide
  Antisense strand to SEQ ID NO: 1574969
uaugcacagaaaguuuccu

SEQ ID NO: 1574971 - RNA, 19 nt, Artificial Sequence
  Description of Artificial Sequence: Synthetic oligonucleotide
  Sense strand starting at position 3523 of SEQ ID NO: 1560082
ggaaacuuucugugcauau

SEQ ID NO: 1574972 - RNA, 19 nt, Artificial Sequence
  Description of Artificial Sequence: Synthetic oligonucleotide
  Antisense strand to SEQ ID NO: 1574971
auaugcacagaaaguuucc

SEQ ID NO: 1574973 - RNA, 19 nt, Artificial Sequence
  Description of Artificial Sequence: Synthetic oligonucleotide
  Sense strand starting at position 3564 of SEQ ID NO: 1560082
aagcaaugguaucguagau

SEQ ID NO: 1574974 - RNA, 19 nt, Artificial Sequence
  Description of Artificial Sequence: Synthetic oligonucleotide
  Antisense strand to SEQ ID NO: 1574973
aucuacgauaccauugcuu

SEQ ID NO: 1574975 - RNA, 19 nt, Artificial Sequence
  Description of Artificial Sequence: Synthetic oligonucleotide
  Sense strand starting at position 3568 of SEQ ID NO: 1560082
aaugguaucguagauggca

SEQ ID NO: 1574976 - RNA, 19 nt, Artificial Sequence
  Description of Artificial Sequence: Synthetic oligonucleotide
  Antisense strand to SEQ ID NO: 1574975
ugccaucuacgauaccauu

SEQ ID NO: 1574977 - RNA, 19 nt, Artificial Sequence
  Description of Artificial Sequence: Synthetic oligonucleotide
  Sense strand starting at position 3570 of SEQ ID NO: 1560082
ugguaucguagauggcauu

SEQ ID NO: 1574978 - RNA, 19 nt, Artificial Sequence
  Description of Artificial Sequence: Synthetic oligonucleotide
  Antisense strand to SEQ ID NO: 1574977
aaugccaucuacgauacca

SEQ ID NO: 1574979 - RNA, 19 nt, Artificial Sequence
  Description of Artificial Sequence: Synthetic oligonucleotide
  Sense strand starting at position 3583 of SEQ ID NO: 1560082
ggcauuuccuuuguaacgu

SEQ ID NO: 1574980 - RNA, 19 nt, Artificial Sequence
  Description of Artificial Sequence: Synthetic oligonucleotide
  Antisense strand to SEQ ID NO: 1574979
acguuacaaaggaaaugcc

SEQ ID NO: 1574981 - RNA, 19 nt, Artificial Sequence
  Description of Artificial Sequence: Synthetic oligonucleotide
  Sense strand starting at position 3592 of SEQ ID NO: 1560082
uuuguaacgucuuaaccag

SEQ ID NO: 1574982 - RNA, 19 nt, Artificial Sequence
  Description of Artificial Sequence: Synthetic oligonucleotide
  Antisense strand to SEQ ID NO: 1574981
cugguuaagacguuacaaa

SEQ ID NO: 1574983 - RNA, 19 nt, Artificial Sequence
  Description of Artificial Sequence: Synthetic oligonucleotide
  Sense strand starting at position 3615 of SEQ ID NO: 1560082
gggagcuuucaacauacgu

SEQ ID NO: 1574984 - RNA, 19 nt, Artificial Sequence
  Description of Artificial Sequence: Synthetic oligonucleotide
  Antisense strand to SEQ ID NO: 1574983
acguauguugaaagcuccc

SEQ ID NO: 1574985 - RNA, 19 nt, Artificial Sequence
  Description of Artificial Sequence: Synthetic oligonucleotide
  Sense strand starting at position 3656 of SEQ ID NO: 1560082
cacuuaacgugcccgauau

SEQ ID NO: 1574986 - RNA, 19 nt, Artificial Sequence
  Description of Artificial Sequence: Synthetic oligonucleotide
  Antisense strand to SEQ ID NO: 1574985
auaucgggcacguuaagug

SEQ ID NO: 1574987 - RNA, 19 nt, Artificial Sequence
  Description of Artificial Sequence: Synthetic oligonucleotide
  Sense strand starting at position 3681 of SEQ ID NO: 1560082
uccugucuaucuguacaga

SEQ ID NO: 1574988 - RNA, 19 nt, Artificial Sequence
  Description of Artificial Sequence: Synthetic oligonucleotide
  Antisense strand to SEQ ID NO: 1574987
ucuguacagauagacagga

SEQ ID NO: 1574989 - RNA, 19 nt, Artificial Sequence
  Description of Artificial Sequence: Synthetic oligonucleotide
  Sense strand starting at position 3682 of SEQ ID NO: 1560082
ccugucuaucuguacagau

SEQ ID NO: 1574990 - RNA, 19 nt, Artificial Sequence
  Description of Artificial Sequence: Synthetic oligonucleotide
  Antisense strand to SEQ ID NO: 1574989
aucuguacagauagacagg

SEQ ID NO: 1574991 - RNA, 19 nt, Artificial Sequence
  Description of Artificial Sequence: Synthetic oligonucleotide
  Sense strand starting at position 3684 of SEQ ID NO: 1560082
ugucuaucuguacagauau

SEQ ID NO: 1574992 - RNA, 19 nt, Artificial Sequence
  Description of Artificial Sequence: Synthetic oligonucleotide
  Antisense strand to SEQ ID NO: 1574991
auaucuguacagauagaca

SEQ ID NO: 1574993 - RNA, 19 nt, Artificial Sequence
  Description of Artificial Sequence: Synthetic oligonucleotide
  Sense strand starting at position 3707 of SEQ ID NO: 1560082
cccauucguccucaaagca

SEQ ID NO: 1574994 - RNA, 19 nt, Artificial Sequence
  Description of Artificial Sequence: Synthetic oligonucleotide
  Antisense strand to SEQ ID NO: 1574993
ugcuuugaggacgaauggg

SEQ ID NO: 1574995 - RNA, 19 nt, Artificial Sequence
  Description of Artificial Sequence: Synthetic oligonucleotide
  Sense strand starting at position 3748 of SEQ ID NO: 1560082
ccaaguggugcuuauuaac

SEQ ID NO: 1574996 - RNA, 19 nt, Artificial Sequence
  Description of Artificial Sequence: Synthetic oligonucleotide
  Antisense strand to SEQ ID NO: 1574995
guuaauaagcaccacuugg

SEQ ID NO: 1574997 - RNA, 19 nt, Artificial Sequence
  Description of Artificial Sequence: Synthetic oligonucleotide
  Sense strand starting at position 3751 of SEQ ID NO: 1560082
aguggugcuuauuaacuaa

SEQ ID NO: 1574998 - RNA, 19 nt, Artificial Sequence
  Description of Artificial Sequence: Synthetic oligonucleotide
  Antisense strand to SEQ ID NO: 1574997
uuaguuaauaagcaccacu

SEQ ID NO: 1574999 - RNA, 19 nt, Artificial Sequence
  Description of Artificial Sequence: Synthetic oligonucleotide
  Sense strand starting at position 3781 of SEQ ID NO: 1560082
uaacaaugguaaggagaau

SEQ ID NO: 1575000 - RNA, 19 nt, Artificial Sequence
  Description of Artificial Sequence: Synthetic oligonucleotide
  Antisense strand to SEQ ID NO: 1574999
auucuccuuaccauuguua

SEQ ID NO: 1575001 - RNA, 19 nt, Artificial Sequence
  Description of Artificial Sequence: Synthetic oligonucleotide
  Sense strand starting at position 527 of SEQ ID NO: 1560083
ggcucagauccagaauucu

SEQ ID NO: 1575002 - RNA, 19 nt, Artificial Sequence
  Description of Artificial Sequence: Synthetic oligonucleotide
  Antisense strand to SEQ ID NO: 1575001
agaauucuggaucugagcc

SEQ ID NO: 1575003 - RNA, 19 nt, Artificial Sequence
  Description of Artificial Sequence: Synthetic oligonucleotide
  Sense strand starting at position 535 of SEQ ID NO: 1560083
uccagaauucuggguccua

SEQ ID NO: 1575004 - RNA, 19 nt, Artificial Sequence
  Description of Artificial Sequence: Synthetic oligonucleotide
  Antisense strand to SEQ ID NO: 1575003
uaggacccagaauucugga

SEQ ID NO: 1575005 - RNA, 19 nt, Artificial Sequence
  Description of Artificial Sequence: Synthetic oligonucleotide
  Sense strand starting at position 536 of SEQ ID NO: 1560083
ccagaauucuggguccuag

SEQ ID NO: 1575006 - RNA, 19 nt, Artificial Sequence
  Description of Artificial Sequence: Synthetic oligonucleotide
  Antisense strand to SEQ ID NO: 1575005
cuaggacccagaauucugg

SEQ ID NO: 1575007 - RNA, 19 nt, Artificial Sequence
  Description of Artificial Sequence: Synthetic oligonucleotide
  Sense strand starting at position 540 of SEQ ID NO: 1560083
aauucuggguccuagaaga

SEQ ID NO: 1575008 - RNA, 19 nt, Artificial Sequence
  Description of Artificial Sequence: Synthetic oligonucleotide
  Antisense strand to SEQ ID NO: 1575007
ucuucuaggacccagaauu

SEQ ID NO: 1575009 - RNA, 19 nt, Artificial Sequence
  Description of Artificial Sequence: Synthetic oligonucleotide
  Sense strand starting at position 551 of SEQ ID NO: 1560083
cuagaagaaucuuggaaua

SEQ ID NO: 1575010 - RNA, 19 nt, Artificial Sequence
  Description of Artificial Sequence: Synthetic oligonucleotide
  Antisense strand to SEQ ID NO: 1575009
uauuccaagauucuucuag

SEQ ID NO: 1575011 - RNA, 19 nt, Artificial Sequence
  Description of Artificial Sequence: Synthetic oligonucleotide
  Sense strand starting at position 553 of SEQ ID NO: 1560083
agaagaaucuuggaauagu

SEQ ID NO: 1575012 - RNA, 19 nt, Artificial Sequence
  Description of Artificial Sequence: Synthetic oligonucleotide
  Antisense strand to SEQ ID NO: 1575011
acuauuccaagauucuucu

SEQ ID NO: 1575013 - RNA, 19 nt, Artificial Sequence
  Description of Artificial Sequence: Synthetic oligonucleotide
  Sense strand starting at position 562 of SEQ ID NO: 1560083
uuggaauaguuuccaaguu

SEQ ID NO: 1575014 - RNA, 19 nt, Artificial Sequence
  Description of Artificial Sequence: Synthetic oligonucleotide
  Antisense strand to SEQ ID NO: 1575013
aacuuggaaacuauuccaa

SEQ ID NO: 1575015 - RNA, 19 nt, Artificial Sequence
  Description of Artificial Sequence: Synthetic oligonucleotide
  Sense strand starting at position 563 of SEQ ID NO: 1560083
uggaauaguuuccaaguuu

SEQ ID NO: 1575016 - RNA, 19 nt, Artificial Sequence
  Description of Artificial Sequence: Synthetic oligonucleotide
  Antisense strand to SEQ ID NO: 1575015
aaacuuggaaacuauucca

SEQ ID NO: 1575017 - RNA, 19 nt, Artificial Sequence
  Description of Artificial Sequence: Synthetic oligonucleotide
  Sense strand starting at position 711 of SEQ ID NO: 1560083
aucuuaagccacuguagau

SEQ ID NO: 1575018 - RNA, 19 nt, Artificial Sequence
  Description of Artificial Sequence: Synthetic oligonucleotide
  Antisense strand to SEQ ID NO: 1575017
aucuacaguggcuuaagau

SEQ ID NO: 1575019 - RNA, 19 nt, Artificial Sequence
  Description of Artificial Sequence: Synthetic oligonucleotide
  Sense strand starting at position 835 of SEQ ID NO: 1560083
aucccacagcuggauuauu

SEQ ID NO: 1575020 - RNA, 19 nt, Artificial Sequence
  Description of Artificial Sequence: Synthetic oligonucleotide
  Antisense strand to SEQ ID NO: 1575019
aauaauccagcugugggau

SEQ ID NO: 1575021 - RNA, 19 nt, Artificial Sequence
  Description of Artificial Sequence: Synthetic oligonucleotide
  Sense strand starting at position 840 of SEQ ID NO: 1560083
acagcuggauuauuauuaa

SEQ ID NO: 1575022 - RNA, 19 nt, Artificial Sequence
  Description of Artificial Sequence: Synthetic oligonucleotide
  Antisense strand to SEQ ID NO: 1575021
uuaauaauaauccagcugu

SEQ ID NO: 1575023 - RNA, 19 nt, Artificial Sequence
  Description of Artificial Sequence: Synthetic oligonucleotide
  Sense strand starting at position 843 of SEQ ID NO: 1560083
gcuggauuauuauuaaugu

SEQ ID NO: 1575024 - RNA, 19 nt, Artificial Sequence
  Description of Artificial Sequence: Synthetic oligonucleotide
  Antisense strand to SEQ ID NO: 1575023
acauuaauaauaauccagc

SEQ ID NO: 1575025 - RNA, 19 nt, Artificial Sequence
  Description of Artificial Sequence: Synthetic oligonucleotide
  Sense strand starting at position 1015 of SEQ ID NO: 1560083
acuugaaaugcgcauguau

SEQ ID NO: 1575026 - RNA, 19 nt, Artificial Sequence
  Description of Artificial Sequence: Synthetic oligonucleotide
  Antisense strand to SEQ ID NO: 1575025
auacaugcgcauuucaagu

SEQ ID NO: 1575027 - RNA, 19 nt, Artificial Sequence
  Description of Artificial Sequence: Synthetic oligonucleotide
  Sense strand starting at position 1017 of SEQ ID NO: 1560083
uugaaaugcgcauguauaa

SEQ ID NO: 1575028 - RNA, 19 nt, Artificial Sequence
  Description of Artificial Sequence: Synthetic oligonucleotide
  Antisense strand to SEQ ID NO: 1575027
uuauacaugcgcauuucaa

SEQ ID NO: 1575029 - RNA, 19 nt, Artificial Sequence
  Description of Artificial Sequence: Synthetic oligonucleotide
  Sense strand starting at position 1140 of SEQ ID NO: 1560083
ccagguuccugagucugaa

SEQ ID NO: 1575030 - RNA, 19 nt, Artificial Sequence
  Description of Artificial Sequence: Synthetic oligonucleotide
  Antisense strand to SEQ ID NO: 1575029
uucagacucaggaaccugg

SEQ ID NO: 1575031 - RNA, 19 nt, Artificial Sequence
  Description of Artificial Sequence: Synthetic oligonucleotide
  Sense strand starting at position 1213 of SEQ ID NO: 1560083
cacgaaguuucccuggaga

SEQ ID NO: 1575032 - RNA, 19 nt, Artificial Sequence
  Description of Artificial Sequence: Synthetic oligonucleotide
  Antisense strand to SEQ ID NO: 1575031
ucuccagggaaacuucgug

SEQ ID NO: 1575033 - RNA, 19 nt, Artificial Sequence
  Description of Artificial Sequence: Synthetic oligonucleotide
  Sense strand starting at position 1215 of SEQ ID NO: 1560083
cgaaguuucccuggagauu

SEQ ID NO: 1575034 - RNA, 19 nt, Artificial Sequence
  Description of Artificial Sequence: Synthetic oligonucleotide
  Antisense strand to SEQ ID NO: 1575033
aaucuccagggaaacuucg

SEQ ID NO: 1575035 - RNA, 19 nt, Artificial Sequence
  Description of Artificial Sequence: Synthetic oligonucleotide
  Sense strand starting at position 1224 of SEQ ID NO: 1560083
ccuggagauuauccuugua

SEQ ID NO: 1575036 - RNA, 19 nt, Artificial Sequence
  Description of Artificial Sequence: Synthetic oligonucleotide
  Antisense strand to SEQ ID NO: 1575035
uacaaggauaaucuccagg

SEQ ID NO: 1575037 - RNA, 19 nt, Artificial Sequence
  Description of Artificial Sequence: Synthetic oligonucleotide
  Sense strand starting at position 1226 of SEQ ID NO: 1560083
uggagauuauccuuguagc

SEQ ID NO: 1575038 - RNA, 19 nt, Artificial Sequence
  Description of Artificial Sequence: Synthetic oligonucleotide
  Antisense strand to SEQ ID NO: 1575037
gcuacaaggauaaucucca

SEQ ID NO: 1575039 - RNA, 19 nt, Artificial Sequence
  Description of Artificial Sequence: Synthetic oligonucleotide
  Sense strand starting at position 1227 of SEQ ID NO: 1560083
ggagauuauccuuguagcu

SEQ ID NO: 1575040 - RNA, 19 nt, Artificial Sequence
  Description of Artificial Sequence: Synthetic oligonucleotide
  Antisense strand to SEQ ID NO: 1575039
agcuacaaggauaaucucc

SEQ ID NO: 1575041 - RNA, 19 nt, Artificial Sequence
  Description of Artificial Sequence: Synthetic oligonucleotide
  Sense strand starting at position 1741 of SEQ ID NO: 1560083
gcuaccucuugguuccuaa

SEQ ID NO: 1575042 - RNA, 19 nt, Artificial Sequence
  Description of Artificial Sequence: Synthetic oligonucleotide
  Antisense strand to SEQ ID NO: 1575041
uuaggaaccaagagguagc

SEQ ID NO: 1575043 - RNA, 19 nt, Artificial Sequence
  Description of Artificial Sequence: Synthetic oligonucleotide
  Sense strand starting at position 2064 of SEQ ID NO: 1560083
gggagcaggugaucucaua

SEQ ID NO: 1575044 - RNA, 19 nt, Artificial Sequence
  Description of Artificial Sequence: Synthetic oligonucleotide
  Antisense strand to SEQ ID NO: 1575043
uaugagaucaccugcuccc

SEQ ID NO: 1575045 - RNA, 19 nt, Artificial Sequence
  Description of Artificial Sequence: Synthetic oligonucleotide
  Sense strand starting at position 2072 of SEQ ID NO: 1560083
gugaucucauagcggcaaa

SEQ ID NO: 1575046 - RNA, 19 nt, Artificial Sequence
  Description of Artificial Sequence: Synthetic oligonucleotide
  Antisense strand to SEQ ID NO: 1575045
uuugccgcuaugagaucac

SEQ ID NO: 1575047 - RNA, 19 nt, Artificial Sequence
  Description of Artificial Sequence: Synthetic oligonucleotide
  Sense strand starting at position 3149 of SEQ ID NO: 1560083
cccgucuaaugguagugaa

SEQ ID NO: 1575048 - RNA, 19 nt, Artificial Sequence
  Description of Artificial Sequence: Synthetic oligonucleotide
  Antisense strand to SEQ ID NO: 1575047
uucacuaccauuagacggg

SEQ ID NO: 1575049 - RNA, 19 nt, Artificial Sequence
  Description of Artificial Sequence: Synthetic oligonucleotide
  Sense strand starting at position 3152 of SEQ ID NO: 1560083
gucuaaugguagugaaacu

SEQ ID NO: 1575050 - RNA, 19 nt, Artificial Sequence
  Description of Artificial Sequence: Synthetic oligonucleotide
  Antisense strand to SEQ ID NO: 1575049
aguuucacuaccauuagac

SEQ ID NO: 1575051 - RNA, 19 nt, Artificial Sequence
  Description of Artificial Sequence: Synthetic oligonucleotide
  Sense strand starting at position 3161 of SEQ ID NO: 1560083
uagugaaacugcucauugu

SEQ ID NO: 1575052 - RNA, 19 nt, Artificial Sequence
  Description of Artificial Sequence: Synthetic oligonucleotide
  Antisense strand to SEQ ID NO: 1575051
acaaugagcaguuucacua

SEQ ID NO: 1575053 - RNA, 19 nt, Artificial Sequence
  Description of Artificial Sequence: Synthetic oligonucleotide
  Sense strand starting at position 3240 of SEQ ID NO: 1560083
gugcgaucauggcuugauc

SEQ ID NO: 1575054 - RNA, 19 nt, Artificial Sequence
  Description of Artificial Sequence: Synthetic oligonucleotide
  Antisense strand to SEQ ID NO: 1575053
gaucaagccaugaucgcac

SEQ ID NO: 1575055 - RNA, 19 nt, Artificial Sequence
  Description of Artificial Sequence: Synthetic oligonucleotide
  Sense strand starting at position 3242 of SEQ ID NO: 1560083
gcgaucauggcuugaucca

SEQ ID NO: 1575056 - RNA, 19 nt, Artificial Sequence
  Description of Artificial Sequence: Synthetic oligonucleotide
  Antisense strand to SEQ ID NO: 1575055
uggaucaagccaugaucgc

SEQ ID NO: 1575057 - RNA, 19 nt, Artificial Sequence
  Description of Artificial Sequence: Synthetic oligonucleotide
  Sense strand starting at position 3372 of SEQ ID NO: 1560083
gauguagucuugcuaugau

SEQ ID NO: 1575058 - RNA, 19 nt, Artificial Sequence
  Description of Artificial Sequence: Synthetic oligonucleotide
  Antisense strand to SEQ ID NO: 1575057
aucauagcaagacuacauc

SEQ ID NO: 1575059 - RNA, 19 nt, Artificial Sequence
  Description of Artificial Sequence: Synthetic oligonucleotide
  Sense strand starting at position 110 of SEQ ID NO: 1560084
gggcaagucagacacagua

SEQ ID NO: 1575060 - RNA, 19 nt, Artificial Sequence
  Description of Artificial Sequence: Synthetic oligonucleotide
  Antisense strand to SEQ ID NO: 1575059
uacugugucugacuugccc

SEQ ID NO: 1575061 - RNA, 19 nt, Artificial Sequence
  Description of Artificial Sequence: Synthetic oligonucleotide
  Sense strand starting at position 226 of SEQ ID NO: 1560084
agguuagaaucucugugca

SEQ ID NO: 1575062 - RNA, 19 nt, Artificial Sequence
  Description of Artificial Sequence: Synthetic oligonucleotide
  Antisense strand to SEQ ID NO: 1575061
ugcacagagauucuaaccu

SEQ ID NO: 1575063 - RNA, 19 nt, Artificial Sequence
  Description of Artificial Sequence: Synthetic oligonucleotide
  Sense strand starting at position 231 of SEQ ID NO: 1560084
agaaucucugugcauggaa

SEQ ID NO: 1575064 - RNA, 19 nt, Artificial Sequence
  Description of Artificial Sequence: Synthetic oligonucleotide
  Antisense strand to SEQ ID NO: 1575063
uuccaugcacagagauucu

SEQ ID NO: 1575065 - RNA, 19 nt, Artificial Sequence
  Description of Artificial Sequence: Synthetic oligonucleotide
  Sense strand starting at position 234 of SEQ ID NO: 1560084
aucucugugcauggaaaca

SEQ ID NO: 1575066 - RNA, 19 nt, Artificial Sequence
  Description of Artificial Sequence: Synthetic oligonucleotide
  Antisense strand to SEQ ID NO: 1575065
uguuuccaugcacagagau

SEQ ID NO: 1575067 - RNA, 19 nt, Artificial Sequence
  Description of Artificial Sequence: Synthetic oligonucleotide
  Sense strand starting at position 359 of SEQ ID NO: 1560084
aaggguugggcuuacauau

SEQ ID NO: 1575068 - RNA, 19 nt, Artificial Sequence
  Description of Artificial Sequence: Synthetic oligonucleotide
  Antisense strand to SEQ ID NO: 1575067
auauguaagcccaacccuu

SEQ ID NO: 1575069 - RNA, 19 nt, Artificial Sequence
  Description of Artificial Sequence: Synthetic oligonucleotide
  Sense strand starting at position 383 of SEQ ID NO: 1560084
gcauguuaacaaggaaauu

SEQ ID NO: 1575070 - RNA, 19 nt, Artificial Sequence
  Description of Artificial Sequence: Synthetic oligonucleotide
  Antisense strand to SEQ ID NO: 1575069
aauuuccuuguuaacaugc

SEQ ID NO: 1575071 - RNA, 19 nt, Artificial Sequence
  Description of Artificial Sequence: Synthetic oligonucleotide
  Sense strand starting at position 876 of SEQ ID NO: 1560084
ucuggacaaguugguauau

SEQ ID NO: 1575072 - RNA, 19 nt, Artificial Sequence
  Description of Artificial Sequence: Synthetic oligonucleotide
  Antisense strand to SEQ ID NO: 1575071
auauaccaacuuguccaga

SEQ ID NO: 1575073 - RNA, 19 nt, Artificial Sequence
  Description of Artificial Sequence: Synthetic oligonucleotide
  Sense strand starting at position 877 of SEQ ID NO: 1560084
cuggacaaguugguauaua

SEQ ID NO: 1575074 - RNA, 19 nt, Artificial Sequence
  Description of Artificial Sequence: Synthetic oligonucleotide
  Antisense strand to SEQ ID NO: 1575073
uauauaccaacuuguccag

SEQ ID NO: 1575075 - RNA, 19 nt, Artificial Sequence
  Description of Artificial Sequence: Synthetic oligonucleotide
  Sense strand starting at position 1275 of SEQ ID NO: 1560084
guaagcuuaaggcaaauga

SEQ ID NO: 1575076 - RNA, 19 nt, Artificial Sequence
  Description of Artificial Sequence: Synthetic oligonucleotide
  Antisense strand to SEQ ID NO: 1575075
ucauuugccuuaagcuuac

SEQ ID NO: 1575077 - RNA, 19 nt, Artificial Sequence
  Description of Artificial Sequence: Synthetic oligonucleotide
  Sense strand starting at position 1335 of SEQ ID NO: 1560084
gaaugaaagucacugaccu

SEQ ID NO: 1575078 - RNA, 19 nt, Artificial Sequence
  Description of Artificial Sequence: Synthetic oligonucleotide
  Antisense strand to SEQ ID NO: 1575077
aggucagugacuuucauuc

SEQ ID NO: 1575079 - RNA, 19 nt, Artificial Sequence
  Description of Artificial Sequence: Synthetic oligonucleotide
  Sense strand starting at position 1342 of SEQ ID NO: 1560084
agucacugaccucaugagu

SEQ ID NO: 1575080 - RNA, 19 nt, Artificial Sequence
  Description of Artificial Sequence: Synthetic oligonucleotide
  Antisense strand to SEQ ID NO: 1575079
acucaugaggucagugacu

SEQ ID NO: 1575081 - RNA, 19 nt, Artificial Sequence
  Description of Artificial Sequence: Synthetic oligonucleotide
  Sense strand starting at position 1356 of SEQ ID NO: 1560084
ugaguuguucugaggugua

SEQ ID NO: 1575082 - RNA, 19 nt, Artificial Sequence
  Description of Artificial Sequence: Synthetic oligonucleotide
  Antisense strand to SEQ ID NO: 1575081
uacaccucagaacaacuca

SEQ ID NO: 1575083 - RNA, 19 nt, Artificial Sequence
  Description of Artificial Sequence: Synthetic oligonucleotide
  Sense strand starting at position 1361 of SEQ ID NO: 1560084
uguucugagguguaaauaa

SEQ ID NO: 1575084 - RNA, 19 nt, Artificial Sequence
  Description of Artificial Sequence: Synthetic oligonucleotide
  Antisense strand to SEQ ID NO: 1575083
uuauuuacaccucagaaca

SEQ ID NO: 1575085 - RNA, 19 nt, Artificial Sequence
  Description of Artificial Sequence: Synthetic oligonucleotide
  Sense strand starting at position 1377 of SEQ ID NO: 1560084
uaacaucaggugugcaaau

SEQ ID NO: 1575086 - RNA, 19 nt, Artificial Sequence
  Description of Artificial Sequence: Synthetic oligonucleotide
  Antisense strand to SEQ ID NO: 1575085
auuugcacaccugauguua

SEQ ID NO: 1575087 - RNA, 19 nt, Artificial Sequence
  Description of Artificial Sequence: Synthetic oligonucleotide
  Sense strand starting at position 1413 of SEQ ID NO: 1560084
ggcacagaacaaugacuua

SEQ ID NO: 1575088 - RNA, 19 nt, Artificial Sequence
  Description of Artificial Sequence: Synthetic oligonucleotide
  Antisense strand to SEQ ID NO: 1575087
uaagucauuguucugugcc

SEQ ID NO: 1575089 - RNA, 19 nt, Artificial Sequence
  Description of Artificial Sequence: Synthetic oligonucleotide
  Sense strand starting at position 1447 of SEQ ID NO: 1560084
uguuauuaacgucaucauu

SEQ ID NO: 1575090 - RNA, 19 nt, Artificial Sequence
  Description of Artificial Sequence: Synthetic oligonucleotide
  Antisense strand to SEQ ID NO: 1575089
aaugaugacguuaauaaca

SEQ ID NO: 1575091 - RNA, 19 nt, Artificial Sequence
  Description of Artificial Sequence: Synthetic oligonucleotide
  Sense strand starting at position 1652 of SEQ ID NO: 1560084
ccaccaggguccuuggaau

SEQ ID NO: 1575092 - RNA, 19 nt, Artificial Sequence
  Description of Artificial Sequence: Synthetic oligonucleotide
  Antisense strand to SEQ ID NO: 1575091
auuccaaggacccuggugg

SEQ ID NO: 1575093 - RNA, 19 nt, Artificial Sequence
  Description of Artificial Sequence: Synthetic oligonucleotide
  Sense strand starting at position 1824 of SEQ ID NO: 1560084
gccuuuccucaagaagaug

SEQ ID NO: 1575094 - RNA, 19 nt, Artificial Sequence
  Description of Artificial Sequence: Synthetic oligonucleotide
  Antisense strand to SEQ ID NO: 1575093
caucuucuugaggaaaggc

SEQ ID NO: 1575095 - RNA, 19 nt, Artificial Sequence
  Description of Artificial Sequence: Synthetic oligonucleotide
  Sense strand starting at position 2038 of SEQ ID NO: 1560084
ggaaaucucuacccggguu

SEQ ID NO: 1575096 - RNA, 19 nt, Artificial Sequence
  Description of Artificial Sequence: Synthetic oligonucleotide
  Antisense strand to SEQ ID NO: 1575095
aacccggguagagauuucc

SEQ ID NO: 1575097 - RNA, 19 nt, Artificial Sequence
  Description of Artificial Sequence: Synthetic oligonucleotide
  Sense strand starting at position 2085 of SEQ ID NO: 1560084
cccaucuggcuugaaugau

SEQ ID NO: 1575098 - RNA, 19 nt, Artificial Sequence
  Description of Artificial Sequence: Synthetic oligonucleotide
  Antisense strand to SEQ ID NO: 1575097
aucauucaagccagauggg

SEQ ID NO: 1575099 - RNA, 19 nt, Artificial Sequence
  Description of Artificial Sequence: Synthetic oligonucleotide
  Sense strand starting at position 2454 of SEQ ID NO: 1560084
cuacgauugcaccauugua

SEQ ID NO: 1575100 - RNA, 19 nt, Artificial Sequence
  Description of Artificial Sequence: Synthetic oligonucleotide
  Antisense strand to SEQ ID NO: 1575099
uacaauggugcaaucguag

SEQ ID NO: 1575101 - RNA, 19 nt, Artificial Sequence
  Description of Artificial Sequence: Synthetic oligonucleotide
  Sense strand starting at position 2738 of SEQ ID NO: 1560084
ugacuaagagcauggcauu

SEQ ID NO: 1575102 - RNA, 19 nt, Artificial Sequence
  Description of Artificial Sequence: Synthetic oligonucleotide
  Antisense strand to SEQ ID NO: 1575101
aaugccaugcucuuaguca

SEQ ID NO: 1575103 - RNA, 19 nt, Artificial Sequence
  Description of Artificial Sequence: Synthetic oligonucleotide
  Sense strand starting at position 2784 of SEQ ID NO: 1560084
ucugucuuuccugaaugau

SEQ ID NO: 1575104 - RNA, 19 nt, Artificial Sequence
  Description of Artificial Sequence: Synthetic oligonucleotide
  Antisense strand to SEQ ID NO: 1575103
aucauucaggaaagacaga

SEQ ID NO: 1575105 - RNA, 19 nt, Artificial Sequence
  Description of Artificial Sequence: Synthetic oligonucleotide
  Sense strand starting at position 3115 of SEQ ID NO: 1560084
ggagguuugcacuguaagg

SEQ ID NO: 1575106 - RNA, 19 nt, Artificial Sequence
  Description of Artificial Sequence: Synthetic oligonucleotide
  Antisense strand to SEQ ID NO: 1575105
ccuuacagugcaaaccucc

SEQ ID NO: 1575107 - RNA, 19 nt, Artificial Sequence
  Description of Artificial Sequence: Synthetic oligonucleotide
  Sense strand starting at position 3200 of SEQ ID NO: 1560084
auguccacucaugggaaua

SEQ ID NO: 1575108 - RNA, 19 nt, Artificial Sequence
  Description of Artificial Sequence: Synthetic oligonucleotide
  Antisense strand to SEQ ID NO: 1575107
uauucccaugaguggacau

SEQ ID NO: 1575109 - RNA, 19 nt, Artificial Sequence
  Description of Artificial Sequence: Synthetic oligonucleotide
  Sense strand starting at position 3201 of SEQ ID NO: 1560084
uguccacucaugggaauag

SEQ ID NO: 1575110 - RNA, 19 nt, Artificial Sequence
  Description of Artificial Sequence: Synthetic oligonucleotide
  Antisense strand to SEQ ID NO: 1575109
cuauucccaugaguggaca

SEQ ID NO: 1575111 - RNA, 19 nt, Artificial Sequence
  Description of Artificial Sequence: Synthetic oligonucleotide
  Sense strand starting at position 3210 of SEQ ID NO: 1560084
augggaauagcauggugua

SEQ ID NO: 1575112 - RNA, 19 nt, Artificial Sequence
  Description of Artificial Sequence: Synthetic oligonucleotide
  Antisense strand to SEQ ID NO: 1575111
uacaccaugcuauucccau

SEQ ID NO: 1575113 - RNA, 19 nt, Artificial Sequence
  Description of Artificial Sequence: Synthetic oligonucleotide
  Sense strand starting at position 3211 of SEQ ID NO: 1560084
ugggaauagcaugguguau

SEQ ID NO: 1575114 - RNA, 19 nt, Artificial Sequence
  Description of Artificial Sequence: Synthetic oligonucleotide
  Antisense strand to SEQ ID NO: 1575113
auacaccaugcuauuccca

SEQ ID NO: 1575115 - RNA, 19 nt, Artificial Sequence
  Description of Artificial Sequence: Synthetic oligonucleotide
  Sense strand starting at position 3229 of SEQ ID NO: 1560084
ugguguugaagccagacua

SEQ ID NO: 1575116 - RNA, 19 nt, Artificial Sequence
  Description of Artificial Sequence: Synthetic oligonucleotide
  Antisense strand to SEQ ID NO: 1575115
uagucuggcuucaacacca

SEQ ID NO: 1575117 - RNA, 19 nt, Artificial Sequence
  Description of Artificial Sequence: Synthetic oligonucleotide
  Sense strand starting at position 3422 of SEQ ID NO: 1560084
uugguauguccucauggau

SEQ ID NO: 1575118 - RNA, 19 nt, Artificial Sequence
  Description of Artificial Sequence: Synthetic oligonucleotide
  Antisense strand to SEQ ID NO: 1575117
auccaugaggacauaccaa

SEQ ID NO: 1575119 - RNA, 19 nt, Artificial Sequence
  Description of Artificial Sequence: Synthetic oligonucleotide
  Sense strand starting at position 3476 of SEQ ID NO: 1560084
aguuucaguguguauagga

SEQ ID NO: 1575120 - RNA, 19 nt, Artificial Sequence
  Description of Artificial Sequence: Synthetic oligonucleotide
  Antisense strand to SEQ ID NO: 1575119
uccuauacacacugaaacu

SEQ ID NO: 1575121 - RNA, 19 nt, Artificial Sequence
  Description of Artificial Sequence: Synthetic oligonucleotide
  Sense strand starting at position 3621 of SEQ ID NO: 1560084
cagagugccuaggaaauuu

SEQ ID NO: 1575122 - RNA, 19 nt, Artificial Sequence
  Description of Artificial Sequence: Synthetic oligonucleotide
  Antisense strand to SEQ ID NO: 1575121
aaauuuccuaggcacucug

SEQ ID NO: 1575123 - RNA, 19 nt, Artificial Sequence
  Description of Artificial Sequence: Synthetic oligonucleotide
  Sense strand starting at position 3645 of SEQ ID NO: 1560084
auuccaugucuagagcaaa

SEQ ID NO: 1575124 - RNA, 19 nt, Artificial Sequence
  Description of Artificial Sequence: Synthetic oligonucleotide
  Antisense strand to SEQ ID NO: 1575123
uuugcucuagacauggaau

SEQ ID NO: 1575125 - RNA, 19 nt, Artificial Sequence
  Description of Artificial Sequence: Synthetic oligonucleotide
  Sense strand starting at position 3695 of SEQ ID NO: 1560084
ugcuuaaagcaagaaauug

SEQ ID NO: 1575126 - RNA, 19 nt, Artificial Sequence
  Description of Artificial Sequence: Synthetic oligonucleotide
  Antisense strand to SEQ ID NO: 1575125
caauuucuugcuuuaagca

SEQ ID NO: 1575127 - RNA, 19 nt, Artificial Sequence
  Description of Artificial Sequence: Synthetic oligonucleotide
  Sense strand starting at position 3703 of SEQ ID NO: 1560084
gcaagaaauugcucaaagu

SEQ ID NO: 1575128 - RNA, 19 nt, Artificial Sequence
  Description of Artificial Sequence: Synthetic oligonucleotide
  Antisense strand to SEQ ID NO: 1575127
acuuugagcaauuucuugc

SEQ ID NO: 1575129 - RNA, 19 nt, Artificial Sequence
  Description of Artificial Sequence: Synthetic oligonucleotide
  Sense strand starting at position 3746 of SEQ ID NO: 1560084
acaggagucugcuugaaga

SEQ ID NO: 1575130 - RNA, 19 nt, Artificial Sequence
  Description of Artificial Sequence: Synthetic oligonucleotide
  Antisense strand to SEQ ID NO: 1575129
ucuucaagcagacuccugu

SEQ ID NO: 1575131 - RNA, 19 nt, Artificial Sequence
  Description of Artificial Sequence: Synthetic oligonucleotide
  Sense strand starting at position 3847 of SEQ ID NO: 1560084
aggaguccauacucagaua

SEQ ID NO: 1575132 - RNA, 19 nt, Artificial Sequence
  Description of Artificial Sequence: Synthetic oligonucleotide
  Antisense strand to SEQ ID NO: 1575131
uaucugaguauggacuccu

SEQ ID NO: 1575133 - RNA, 19 nt, Artificial Sequence
  Description of Artificial Sequence: Synthetic oligonucleotide
  Sense strand starting at position 3877 of SEQ ID NO: 1560084
aagugagaaguuugauauu

SEQ ID NO: 1575134 - RNA, 19 nt, Artificial Sequence
  Description of Artificial Sequence: Synthetic oligonucleotide
  Antisense strand to SEQ ID NO: 1575133
aauaucaaacuucucacuu

SEQ ID NO: 1575135 - RNA, 19 nt, Artificial Sequence
  Description of Artificial Sequence: Synthetic oligonucleotide
  Sense strand starting at position 3942 of SEQ ID NO: 1560084
uuacguuauaguggagaaa

SEQ ID NO: 1575136 - RNA, 19 nt, Artificial Sequence
  Description of Artificial Sequence: Synthetic oligonucleotide
  Antisense strand to SEQ ID NO: 1575135
uuucuccacuauaacguaa

SEQ ID NO: 1575137 - RNA, 19 nt, Artificial Sequence
  Description of Artificial Sequence: Synthetic oligonucleotide
  Sense strand starting at position 3945 of SEQ ID NO: 1560084
cguuauaguggagaaacgu

SEQ ID NO: 1575138 - RNA, 19 nt, Artificial Sequence
  Description of Artificial Sequence: Synthetic oligonucleotide
  Antisense strand to SEQ ID NO: 1575137
acguuucuccacuauaacg

SEQ ID NO: 1575139 - RNA, 19 nt, Artificial Sequence
  Description of Artificial Sequence: Synthetic oligonucleotide
  Sense strand starting at position 219 of SEQ ID NO: 1560085
guuggaacugugcggagaa

SEQ ID NO: 1575140 - RNA, 19 nt, Artificial Sequence
  Description of Artificial Sequence: Synthetic oligonucleotide
  Antisense strand to SEQ ID NO: 1575139
uucuccgcacaguuccaac

SEQ ID NO: 1575141 - RNA, 19 nt, Artificial Sequence
  Description of Artificial Sequence: Synthetic oligonucleotide
  Sense strand starting at position 307 of SEQ ID NO: 1560085
cugggucaugcuuagauaa

SEQ ID NO: 1575142 - RNA, 19 nt, Artificial Sequence
  Description of Artificial Sequence: Synthetic oligonucleotide
  Antisense strand to SEQ ID NO: 1575141
uuaucuaagcaugacccag

SEQ ID NO: 1575143 - RNA, 19 nt, Artificial Sequence
  Description of Artificial Sequence: Synthetic oligonucleotide
  Sense strand starting at position 328 of SEQ ID NO: 1560085
gcuagaaagcccgacuaau

SEQ ID NO: 1575144 - RNA, 19 nt, Artificial Sequence
  Description of Artificial Sequence: Synthetic oligonucleotide
  Antisense strand to SEQ ID NO: 1575143
auuagucgggcuuucuagc

SEQ ID NO: 1575145 - RNA, 19 nt, Artificial Sequence
  Description of Artificial Sequence: Synthetic oligonucleotide
  Sense strand starting at position 361 of SEQ ID NO: 1560085
ugccuacaucucgauagau

SEQ ID NO: 1575146 - RNA, 19 nt, Artificial Sequence
  Description of Artificial Sequence: Synthetic oligonucleotide
  Antisense strand to SEQ ID NO: 1575145
aucuaucgagauguaggca

SEQ ID NO: 1575147 - RNA, 19 nt, Artificial Sequence
  Description of Artificial Sequence: Synthetic oligonucleotide
  Sense strand starting at position 363 of SEQ ID NO: 1560085
ccuacaucucgauagaugu

SEQ ID NO: 1575148 - RNA, 19 nt, Artificial Sequence
  Description of Artificial Sequence: Synthetic oligonucleotide
  Antisense strand to SEQ ID NO: 1575147
acaucuaucgagauguagg

SEQ ID NO: 1575149 - RNA, 19 nt, Artificial Sequence
  Description of Artificial Sequence: Synthetic oligonucleotide
  Sense strand starting at position 446 of SEQ ID NO: 1560085
uugauagcaucuccacaga

SEQ ID NO: 1575150 - RNA, 19 nt, Artificial Sequence
  Description of Artificial Sequence: Synthetic oligonucleotide
  Antisense strand to SEQ ID NO: 1575149
ucuguggagaugcuaucaa

SEQ ID NO: 1575151 - RNA, 19 nt, Artificial Sequence
  Description of Artificial Sequence: Synthetic oligonucleotide
  Sense strand starting at position 488 of SEQ ID NO: 1560085
uccucuggaucuuugauua

SEQ ID NO: 1575152 - RNA, 19 nt, Artificial Sequence
  Description of Artificial Sequence: Synthetic oligonucleotide
  Antisense strand to SEQ ID NO: 1575151
uaaucaaagauccagagga

SEQ ID NO: 1575153 - RNA, 19 nt, Artificial Sequence
  Description of Artificial Sequence: Synthetic oligonucleotide
  Sense strand starting at position 539 of SEQ ID NO: 1560085
cuaagauguccacaugggu

SEQ ID NO: 1575154 - RNA, 19 nt, Artificial Sequence
  Description of Artificial Sequence: Synthetic oligonucleotide
  Antisense strand to SEQ ID NO: 1575153
acccauguggacaucuuag

SEQ ID NO: 1575155 - RNA, 19 nt, Artificial Sequence
  Description of Artificial Sequence: Synthetic oligonucleotide
  Sense strand starting at position 652 of SEQ ID NO: 1560085
cugucuuucuuacugaaag

SEQ ID NO: 1575156 - RNA, 19 nt, Artificial Sequence
  Description of Artificial Sequence: Synthetic oligonucleotide
  Antisense strand to SEQ ID NO: 1575155
cuuucaguaagaaagacag

SEQ ID NO: 1575157 - RNA, 19 nt, Artificial Sequence
  Description of Artificial Sequence: Synthetic oligonucleotide
  Sense strand starting at position 662 of SEQ ID NO: 1560085
uacugaaaguguccagauc

SEQ ID NO: 1575158 - RNA, 19 nt, Artificial Sequence
  Description of Artificial Sequence: Synthetic oligonucleotide
  Antisense strand to SEQ ID NO: 1575157
gaucuggacacuuucagua

SEQ ID NO: 1575159 - RNA, 19 nt, Artificial Sequence
  Description of Artificial Sequence: Synthetic oligonucleotide
  Sense strand starting at position 716 of SEQ ID NO: 1560085
ugggaucucuuucucgaca

SEQ ID NO: 1575160 - RNA, 19 nt, Artificial Sequence
  Description of Artificial Sequence: Synthetic oligonucleotide
  Antisense strand to SEQ ID NO: 1575159
ugucgagaaagagauccca

SEQ ID NO: 1575161 - RNA, 19 nt, Artificial Sequence
  Description of Artificial Sequence: Synthetic oligonucleotide
  Sense strand starting at position 881 of SEQ ID NO: 1560085
cuggcuucucagugugaag

SEQ ID NO: 1575162 - RNA, 19 nt, Artificial Sequence
  Description of Artificial Sequence: Synthetic oligonucleotide
  Antisense strand to SEQ ID NO: 1575161
cuucacacugagaagccag

SEQ ID NO: 1575163 - RNA, 19 nt, Artificial Sequence
  Description of Artificial Sequence: Synthetic oligonucleotide
  Sense strand starting at position 1112 of SEQ ID NO: 1560085
aagcucacuccguagaacu

SEQ ID NO: 1575164 - RNA, 19 nt, Artificial Sequence
  Description of Artificial Sequence: Synthetic oligonucleotide
  Antisense strand to SEQ ID NO: 1575163
aguucuacggagugagcuu

SEQ ID NO: 1575165 - RNA, 19 nt, Artificial Sequence
  Description of Artificial Sequence: Synthetic oligonucleotide
  Sense strand starting at position 1203 of SEQ ID NO: 1560085
uagagucgguccuugggaa

SEQ ID NO: 1575166 - RNA, 19 nt, Artificial Sequence
  Description of Artificial Sequence: Synthetic oligonucleotide
  Antisense strand to SEQ ID NO: 1575165
uucccaaggaccgacucua

SEQ ID NO: 1575167 - RNA, 19 nt, Artificial Sequence
  Description of Artificial Sequence: Synthetic oligonucleotide
  Sense strand starting at position 1470 of SEQ ID NO: 1560085
auggccauucggugaucuu

SEQ ID NO: 1575168 - RNA, 19 nt, Artificial Sequence
  Description of Artificial Sequence: Synthetic oligonucleotide
  Antisense strand to SEQ ID NO: 1575167
aagaucaccgaauggccau

SEQ ID NO: 1575169 - RNA, 19 nt, Artificial Sequence
  Description of Artificial Sequence: Synthetic oligonucleotide
  Sense strand starting at position 1471 of SEQ ID NO: 1560085
uggccauucggugaucuuu

SEQ ID NO: 1575170 - RNA, 19 nt, Artificial Sequence
  Description of Artificial Sequence: Synthetic oligonucleotide
  Antisense strand to SEQ ID NO: 1575169
aaagaucaccgaauggcca

SEQ ID NO: 1575171 - RNA, 19 nt, Artificial Sequence
  Description of Artificial Sequence: Synthetic oligonucleotide
  Sense strand starting at position 1538 of SEQ ID NO: 1560085
cgguuaaccgugaggcagu

SEQ ID NO: 1575172 - RNA, 19 nt, Artificial Sequence
  Description of Artificial Sequence: Synthetic oligonucleotide
  Antisense strand to SEQ ID NO: 1575171
acugccucacgguuaaccg

SEQ ID NO: 1575173 - RNA, 19 nt, Artificial Sequence
  Description of Artificial Sequence: Synthetic oligonucleotide
  Sense strand starting at position 1605 of SEQ ID NO: 1560085
gcgccauugacugcuugua

SEQ ID NO: 1575174 - RNA, 19 nt, Artificial Sequence
  Description of Artificial Sequence: Synthetic oligonucleotide
  Antisense strand to SEQ ID NO: 1575173
uacaagcagucaauggcgc

SEQ ID NO: 1575175 - RNA, 19 nt, Artificial Sequence
  Description of Artificial Sequence: Synthetic oligonucleotide
  Sense strand starting at position 2468 of SEQ ID NO: 1560085
ugcugaaagaucuguagcu

SEQ ID NO: 1575176 - RNA, 19 nt, Artificial Sequence
  Description of Artificial Sequence: Synthetic oligonucleotide
  Antisense strand to SEQ ID NO: 1575175
agcuacagaucuuucagca

SEQ ID NO: 1575177 - RNA, 19 nt, Artificial Sequence
  Description of Artificial Sequence: Synthetic oligonucleotide
  Sense strand starting at position 2469 of SEQ ID NO: 1560085
gcugaaagaucuguagcuc

SEQ ID NO: 1575178 - RNA, 19 nt, Artificial Sequence
  Description of Artificial Sequence: Synthetic oligonucleotide
  Antisense strand to SEQ ID NO: 1575177
gagcuacagaucuuucagc

SEQ ID NO: 1575179 - RNA, 19 nt, Artificial Sequence
  Description of Artificial Sequence: Synthetic oligonucleotide
  Sense strand starting at position 2653 of SEQ ID NO: 1560085
ucuucugcucccggaggaa

SEQ ID NO: 1575180 - RNA, 19 nt, Artificial Sequence
  Description of Artificial Sequence: Synthetic oligonucleotide
  Antisense strand to SEQ ID NO: 1575179
uuccuccgggagcagaaga

SEQ ID NO: 1575181 - RNA, 19 nt, Artificial Sequence
  Description of Artificial Sequence: Synthetic oligonucleotide
  Sense strand starting at position 2666 of SEQ ID NO: 1560085
gaggaagugugagugugua

SEQ ID NO: 1575182 - RNA, 19 nt, Artificial Sequence
  Description of Artificial Sequence: Synthetic oligonucleotide
  Antisense strand to SEQ ID NO: 1575181
uacacacucacacuuccuc

SEQ ID NO: 1575183 - RNA, 19 nt, Artificial Sequence
  Description of Artificial Sequence: Synthetic oligonucleotide
  Sense strand starting at position 2667 of SEQ ID NO: 1560085
aggaagugugaguguguau

SEQ ID NO: 1575184 - RNA, 19 nt, Artificial Sequence
  Description of Artificial Sequence: Synthetic oligonucleotide
  Antisense strand to SEQ ID NO: 1575183
auacacacucacacuuccu

SEQ ID NO: 1575185 - RNA, 19 nt, Artificial Sequence
  Description of Artificial Sequence: Synthetic oligonucleotide
  Sense strand starting at position 2725 of SEQ ID NO: 1560085
guuaaauugcagcagugaa

SEQ ID NO: 1575186 - RNA, 19 nt, Artificial Sequence
  Description of Artificial Sequence: Synthetic oligonucleotide
  Antisense strand to SEQ ID NO: 1575185
uucacugcugcaauuuaac

SEQ ID NO: 1575187 - RNA, 19 nt, Artificial Sequence
  Description of Artificial Sequence: Synthetic oligonucleotide
  Sense strand starting at position 2904 of SEQ ID NO: 1560085
gaggguugcggguagaaga

SEQ ID NO: 1575188 - RNA, 19 nt, Artificial Sequence
  Description of Artificial Sequence: Synthetic oligonucleotide
  Antisense strand to SEQ ID NO: 1575187
ucuucuacccgcaacccuc

SEQ ID NO: 1575189 - RNA, 19 nt, Artificial Sequence
  Description of Artificial Sequence: Synthetic oligonucleotide
  Sense strand starting at position 3298 of SEQ ID NO: 1560085
ggauuugugucuagaggug

SEQ ID NO: 1575190 - RNA, 19 nt, Artificial Sequence
  Description of Artificial Sequence: Synthetic oligonucleotide
  Antisense strand to SEQ ID NO: 1575189
caccucuagacacaaaucc

SEQ ID NO: 1575191 - RNA, 19 nt, Artificial Sequence
  Description of Artificial Sequence: Synthetic oligonucleotide
  Sense strand starting at position 3314 of SEQ ID NO: 1560085
gugcgauucgucagucucu

SEQ ID NO: 1575192 - RNA, 19 nt, Artificial Sequence
  Description of Artificial Sequence: Synthetic oligonucleotide
  Antisense strand to SEQ ID NO: 1575191
agagacugacgaaucgcac

SEQ ID NO: 1575193 - RNA, 19 nt, Artificial Sequence
  Description of Artificial Sequence: Synthetic oligonucleotide
  Sense strand starting at position 3316 of SEQ ID NO: 1560085
gcgauucgucagucucuaa

SEQ ID NO: 1575194 - RNA, 19 nt, Artificial Sequence
  Description of Artificial Sequence: Synthetic oligonucleotide
  Antisense strand to SEQ ID NO: 1575193
uuagagacugacgaaucgc

SEQ ID NO: 1575195 - RNA, 19 nt, Artificial Sequence
  Description of Artificial Sequence: Synthetic oligonucleotide
  Sense strand starting at position 3319 of SEQ ID NO: 1560085
auucgucagucucuaaaca

SEQ ID NO: 1575196 - RNA, 19 nt, Artificial Sequence
  Description of Artificial Sequence: Synthetic oligonucleotide
  Antisense strand to SEQ ID NO: 1575195
uguuuagagacugacgaau

SEQ ID NO: 1575197 - RNA, 19 nt, Artificial Sequence
  Description of Artificial Sequence: Synthetic oligonucleotide
  Sense strand starting at position 3429 of SEQ ID NO: 1560085
gcaaguuggaauuaaaggu

SEQ ID NO: 1575198 - RNA, 19 nt, Artificial Sequence
  Description of Artificial Sequence: Synthetic oligonucleotide
  Antisense strand to SEQ ID NO: 1575197
accuuuaauuccaacuugc

SEQ ID NO: 1575199 - RNA, 19 nt, Artificial Sequence
  Description of Artificial Sequence: Synthetic oligonucleotide
  Sense strand starting at position 3433 of SEQ ID NO: 1560085
guuggaauuaaagguuuau

SEQ ID NO: 1575200 - RNA, 19 nt, Artificial Sequence
  Description of Artificial Sequence: Synthetic oligonucleotide
  Antisense strand to SEQ ID NO: 1575199
auaaaccuuuaauuccaac

SEQ ID NO: 1575201 - RNA, 19 nt, Artificial Sequence
  Description of Artificial Sequence: Synthetic oligonucleotide
  Sense strand starting at position 3445 of SEQ ID NO: 1560085
gguuuauucuaccuuggag

SEQ ID NO: 1575202 - RNA, 19 nt, Artificial Sequence
  Description of Artificial Sequence: Synthetic oligonucleotide
  Antisense strand to SEQ ID NO: 1575201
cuccaagguagaauaaacc

SEQ ID NO: 1575203 - RNA, 19 nt, Artificial Sequence
  Description of Artificial Sequence: Synthetic oligonucleotide
  Sense strand starting at position 3511 of SEQ ID NO: 1560085
gguccuaguuggcuggaua

SEQ ID NO: 1575204 - RNA, 19 nt, Artificial Sequence
  Description of Artificial Sequence: Synthetic oligonucleotide
  Antisense strand to SEQ ID NO: 1575203
uauccagccaacuaggacc

SEQ ID NO: 1575205 - RNA, 19 nt, Artificial Sequence
  Description of Artificial Sequence: Synthetic oligonucleotide
  Sense strand starting at position 3541 of SEQ ID NO: 1560085
ugguauaguuugcuugaua

SEQ ID NO: 1575206 - RNA, 19 nt, Artificial Sequence
  Description of Artificial Sequence: Synthetic oligonucleotide
  Antisense strand to SEQ ID NO: 1575205
uaucaagcaaacuauacca

SEQ ID NO: 1575207 - RNA, 19 nt, Artificial Sequence
  Description of Artificial Sequence: Synthetic oligonucleotide
  Sense strand starting at position 3542 of SEQ ID NO: 1560085
gguauaguuugcuugauac

SEQ ID NO: 1575208 - RNA, 19 nt, Artificial Sequence
  Description of Artificial Sequence: Synthetic oligonucleotide
  Antisense strand to SEQ ID NO: 1575207
guaucaagcaaacuauacc

SEQ ID NO: 1575209 - RNA, 19 nt, Artificial Sequence
  Description of Artificial Sequence: Synthetic oligonucleotide
  Sense strand starting at position 3661 of SEQ ID NO: 1560085
aguuaagaaauuggucuga

SEQ ID NO: 1575210 - RNA, 19 nt, Artificial Sequence
  Description of Artificial Sequence: Synthetic oligonucleotide
  Antisense strand to SEQ ID NO: 1575209
ucagaccaauuucuuaacu

SEQ ID NO: 1575211 - RNA, 19 nt, Artificial Sequence
  Description of Artificial Sequence: Synthetic oligonucleotide
  Sense strand starting at position 3666 of SEQ ID NO: 1560085
agaaauuggucugaaauga

SEQ ID NO: 1575212 - RNA, 19 nt, Artificial Sequence
  Description of Artificial Sequence: Synthetic oligonucleotide
  Antisense strand to SEQ ID NO: 1575211
ucauuucagaccaauuucu

SEQ ID NO: 1575213 - RNA, 19 nt, Artificial Sequence
  Description of Artificial Sequence: Synthetic oligonucleotide
  Sense strand starting at position 3777 of SEQ ID NO: 1560085
agcaauaaucgcuaccuga

SEQ ID NO: 1575214 - RNA, 19 nt, Artificial Sequence
  Description of Artificial Sequence: Synthetic oligonucleotide
  Antisense strand to SEQ ID NO: 1575213
ucagguagcgauuauugcu

SEQ ID NO: 1575215 - RNA, 19 nt, Artificial Sequence
  Description of Artificial Sequence: Synthetic oligonucleotide
  Sense strand starting at position 3787 of SEQ ID NO: 1560085
gcuaccugacuuuauggua

SEQ ID NO: 1575216 - RNA, 19 nt, Artificial Sequence
  Description of Artificial Sequence: Synthetic oligonucleotide
  Antisense strand to SEQ ID NO: 1575215
uaccauaaagucagguagc

SEQ ID NO: 1575217 - RNA, 19 nt, Artificial Sequence
  Description of Artificial Sequence: Synthetic oligonucleotide
  Sense strand starting at position 3831 of SEQ ID NO: 1560085
guuugacuaccuuauuaug

SEQ ID NO: 1575218 - RNA, 19 nt, Artificial Sequence
  Description of Artificial Sequence: Synthetic oligonucleotide
  Antisense strand to SEQ ID NO: 1575217
cauaauaagguagucaaac

SEQ ID NO: 1575219 - RNA, 19 nt, Artificial Sequence
  Description of Artificial Sequence: Synthetic oligonucleotide
  Sense strand starting at position 37 of SEQ ID NO: 1560086
aggcgucuggugagagcuu

SEQ ID NO: 1575220 - RNA, 19 nt, Artificial Sequence
  Description of Artificial Sequence: Synthetic oligonucleotide
  Antisense strand to SEQ ID NO: 1575219
aagcucucaccagacgccu

SEQ ID NO: 1575221 - RNA, 19 nt, Artificial Sequence
  Description of Artificial Sequence: Synthetic oligonucleotide
  Sense strand starting at position 49 of SEQ ID NO: 1560086
agagcuugguuugguggaa

SEQ ID NO: 1575222 - RNA, 19 nt, Artificial Sequence
  Description of Artificial Sequence: Synthetic oligonucleotide
  Antisense strand to SEQ ID NO: 1575221
uuccaccaaaccaagcucu

SEQ ID NO: 1575223 - RNA, 19 nt, Artificial Sequence
  Description of Artificial Sequence: Synthetic oligonucleotide
  Sense strand starting at position 315 of SEQ ID NO: 1560086
ccagcugugucuggaauca

SEQ ID NO: 1575224 - RNA, 19 nt, Artificial Sequence
  Description of Artificial Sequence: Synthetic oligonucleotide
  Antisense strand to SEQ ID NO: 1575223
ugauuccagacacagcugg

SEQ ID NO: 1575225 - RNA, 19 nt, Artificial Sequence
  Description of Artificial Sequence: Synthetic oligonucleotide
  Sense strand starting at position 415 of SEQ ID NO: 1560086
cagcgaugccugggaacau

SEQ ID NO: 1575226 - RNA, 19 nt, Artificial Sequence
  Description of Artificial Sequence: Synthetic oligonucleotide
  Antisense strand to SEQ ID NO: 1575225
auguucccaggcaucgcug

SEQ ID NO: 1575227 - RNA, 19 nt, Artificial Sequence
  Description of Artificial Sequence: Synthetic oligonucleotide
  Sense strand starting at position 416 of SEQ ID NO: 1560086
agcgaugccugggaacauu

SEQ ID NO: 1575228 - RNA, 19 nt, Artificial Sequence
  Description of Artificial Sequence: Synthetic oligonucleotide
  Antisense strand to SEQ ID NO: 1575227
aauguucccaggcaucgcu

SEQ ID NO: 1575229 - RNA, 19 nt, Artificial Sequence
  Description of Artificial Sequence: Synthetic oligonucleotide
  Sense strand starting at position 462 of SEQ ID NO: 1560086
gucauagaaucaucuggga

SEQ ID NO: 1575230 - RNA, 19 nt, Artificial Sequence
  Description of Artificial Sequence: Synthetic oligonucleotide
  Antisense strand to SEQ ID NO: 1575229
ucccagaugauucuaugac

SEQ ID NO: 1575231 - RNA, 19 nt, Artificial Sequence
  Description of Artificial Sequence: Synthetic oligonucleotide
  Sense strand starting at position 467 of SEQ ID NO: 1560086
agaaucaucugggaccaua

SEQ ID NO: 1575232 - RNA, 19 nt, Artificial Sequence
  Description of Artificial Sequence: Synthetic oligonucleotide
  Antisense strand to SEQ ID NO: 1575231
uauggucccagaugauucu

SEQ ID NO: 1575233 - RNA, 19 nt, Artificial Sequence
  Description of Artificial Sequence: Synthetic oligonucleotide
  Sense strand starting at position 678 of SEQ ID NO: 1560086
ggcacaagcucucuuuaga

SEQ ID NO: 1575234 - RNA, 19 nt, Artificial Sequence
  Description of Artificial Sequence: Synthetic oligonucleotide
  Antisense strand to SEQ ID NO: 1575233
ucuaaagagagcuugugcc

SEQ ID NO: 1575235 - RNA, 19 nt, Artificial Sequence
  Description of Artificial Sequence: Synthetic oligonucleotide
  Sense strand starting at position 681 of SEQ ID NO: 1560086
acaagcucucuuuagaggu

SEQ ID NO: 1575236 - RNA, 19 nt, Artificial Sequence
  Description of Artificial Sequence: Synthetic oligonucleotide
  Antisense strand to SEQ ID NO: 1575235
accucuaaagagagcuugu

SEQ ID NO: 1575237 - RNA, 19 nt, Artificial Sequence
  Description of Artificial Sequence: Synthetic oligonucleotide
  Sense strand starting at position 687 of SEQ ID NO: 1560086
ucucuuuagaggugcagaa

SEQ ID NO: 1575238 - RNA, 19 nt, Artificial Sequence
  Description of Artificial Sequence: Synthetic oligonucleotide
  Antisense strand to SEQ ID NO: 1575237
uucugcaccucuaaagaga

SEQ ID NO: 1575239 - RNA, 19 nt, Artificial Sequence
  Description of Artificial Sequence: Synthetic oligonucleotide
  Sense strand starting at position 689 of SEQ ID NO: 1560086
ucuuuagaggugcagaaua

SEQ ID NO: 1575240 - RNA, 19 nt, Artificial Sequence
  Description of Artificial Sequence: Synthetic oligonucleotide
  Antisense strand to SEQ ID NO: 1575239
uauucugcaccucuaaaga

SEQ ID NO: 1575241 - RNA, 19 nt, Artificial Sequence
  Description of Artificial Sequence: Synthetic oligonucleotide
  Sense strand starting at position 898 of SEQ ID NO: 1560086
cucuaucucucagcaguuu

SEQ ID NO: 1575242 - RNA, 19 nt, Artificial Sequence
  Description of Artificial Sequence: Synthetic oligonucleotide
  Antisense strand to SEQ ID NO: 1575241
aaacugcugagagauagag

SEQ ID NO: 1575243 - RNA, 19 nt, Artificial Sequence
  Description of Artificial Sequence: Synthetic oligonucleotide
  Sense strand starting at position 907 of SEQ ID NO: 1560086
ucagcaguuucugagagca

SEQ ID NO: 1575244 - RNA, 19 nt, Artificial Sequence
  Description of Artificial Sequence: Synthetic oligonucleotide
  Antisense strand to SEQ ID NO: 1575243
ugcucucagaaacugcuga

SEQ ID NO: 1575245 - RNA, 19 nt, Artificial Sequence
  Description of Artificial Sequence: Synthetic oligonucleotide
  Sense strand starting at position 909 of SEQ ID NO: 1560086
agcaguuucugagagcaga

SEQ ID NO: 1575246 - RNA, 19 nt, Artificial Sequence
  Description of Artificial Sequence: Synthetic oligonucleotide
  Antisense strand to SEQ ID NO: 1575245
ucugcucucagaaacugcu

SEQ ID NO: 1575247 - RNA, 19 nt, Artificial Sequence
  Description of Artificial Sequence: Synthetic oligonucleotide
  Sense strand starting at position 2726 of SEQ ID NO: 1560086
ucgggcuugacccguaaau

SEQ ID NO: 1575248 - RNA, 19 nt, Artificial Sequence
  Description of Artificial Sequence: Synthetic oligonucleotide
  Antisense strand to SEQ ID NO: 1575247
auuuacgggucaagcccga

SEQ ID NO: 1575249 - RNA, 19 nt, Artificial Sequence
  Description of Artificial Sequence: Synthetic oligonucleotide
  Sense strand starting at position 2728 of SEQ ID NO: 1560086
gggcuugacccguaaauaa

SEQ ID NO: 1575250 - RNA, 19 nt, Artificial Sequence
  Description of Artificial Sequence: Synthetic oligonucleotide
  Antisense strand to SEQ ID NO: 1575249
uuauuuacgggucaagccc

SEQ ID NO: 1575251 - RNA, 19 nt, Artificial Sequence
  Description of Artificial Sequence: Synthetic oligonucleotide
  Sense strand starting at position 3055 of SEQ ID NO: 1560086
cccacuucugagugguaga

SEQ ID NO: 1575252 - RNA, 19 nt, Artificial Sequence
  Description of Artificial Sequence: Synthetic oligonucleotide
  Antisense strand to SEQ ID NO: 1575251
ucuaccacucagaaguggg

SEQ ID NO: 1575253 - RNA, 19 nt, Artificial Sequence
  Description of Artificial Sequence: Synthetic oligonucleotide
  Sense strand starting at position 3056 of SEQ ID NO: 1560086
ccacuucugagugguagag

SEQ ID NO: 1575254 - RNA, 19 nt, Artificial Sequence
  Description of Artificial Sequence: Synthetic oligonucleotide
  Antisense strand to SEQ ID NO: 1575253
cucuaccacucagaagugg

SEQ ID NO: 1575255 - RNA, 19 nt, Artificial Sequence
  Description of Artificial Sequence: Synthetic oligonucleotide
  Sense strand starting at position 3058 of SEQ ID NO: 1560086
acuucugagugguagagga

SEQ ID NO: 1575256 - RNA, 19 nt, Artificial Sequence
  Description of Artificial Sequence: Synthetic oligonucleotide
  Antisense strand to SEQ ID NO: 1575255
uccucuaccacucagaagu

SEQ ID NO: 1575257 - RNA, 19 nt, Artificial Sequence
  Description of Artificial Sequence: Synthetic oligonucleotide
  Sense strand starting at position 95 of SEQ ID NO: 1560087
ccacgacucggcugugauc

SEQ ID NO: 1575258 - RNA, 19 nt, Artificial Sequence
  Description of Artificial Sequence: Synthetic oligonucleotide
  Antisense strand to SEQ ID NO: 1575257
gaucacagccgagucgugg

SEQ ID NO: 1575259 - RNA, 19 nt, Artificial Sequence
  Description of Artificial Sequence: Synthetic oligonucleotide
  Sense strand starting at position 106 of SEQ ID NO: 1560087
cugugaucuugcugucuug

SEQ ID NO: 1575260 - RNA, 19 nt, Artificial Sequence
  Description of Artificial Sequence: Synthetic oligonucleotide
  Antisense strand to SEQ ID NO: 1575259
caagacagcaagaucacag

SEQ ID NO: 1575261 - RNA, 19 nt, Artificial Sequence
  Description of Artificial Sequence: Synthetic oligonucleotide
  Sense strand starting at position 358 of SEQ ID NO: 1560087
aggguuacgagcuguacua

SEQ ID NO: 1575262 - RNA, 19 nt, Artificial Sequence
  Description of Artificial Sequence: Synthetic oligonucleotide
  Antisense strand to SEQ ID NO: 1575261
uaguacagcucguaacccu

SEQ ID NO: 1575263 - RNA, 19 nt, Artificial Sequence
  Description of Artificial Sequence: Synthetic oligonucleotide
  Sense strand starting at position 404 of SEQ ID NO: 1560087
guggaugucugucugggau

SEQ ID NO: 1575264 - RNA, 19 nt, Artificial Sequence
  Description of Artificial Sequence: Synthetic oligonucleotide
  Antisense strand to SEQ ID NO: 1575263
aucccagacagacauccac

SEQ ID NO: 1575265 - RNA, 19 nt, Artificial Sequence
  Description of Artificial Sequence: Synthetic oligonucleotide
  Sense strand starting at position 406 of SEQ ID NO: 1560087
ggaugucugucugggauuc

SEQ ID NO: 1575266 - RNA, 19 nt, Artificial Sequence
  Description of Artificial Sequence: Synthetic oligonucleotide
  Antisense strand to SEQ ID NO: 1575265
gaaucccagacagacaucc

SEQ ID NO: 1575267 - RNA, 19 nt, Artificial Sequence
  Description of Artificial Sequence: Synthetic oligonucleotide
  Sense strand starting at position 767 of SEQ ID NO: 1560087
ccuagagacuccugcuuga

SEQ ID NO: 1575268 - RNA, 19 nt, Artificial Sequence
  Description of Artificial Sequence: Synthetic oligonucleotide
  Antisense strand to SEQ ID NO: 1575267
ucaagcaggagucucuagg

SEQ ID NO: 1575269 - RNA, 19 nt, Artificial Sequence
  Description of Artificial Sequence: Synthetic oligonucleotide
  Sense strand starting at position 771 of SEQ ID NO: 1560087
gagacuccugcuugaagga

SEQ ID NO: 1575270 - RNA, 19 nt, Artificial Sequence
  Description of Artificial Sequence: Synthetic oligonucleotide
  Antisense strand to SEQ ID NO: 1575269
uccuucaagcaggagucuc

SEQ ID NO: 1575271 - RNA, 19 nt, Artificial Sequence
  Description of Artificial Sequence: Synthetic oligonucleotide
  Sense strand starting at position 797 of SEQ ID NO: 1560087
gcuggaacucuaggucuua

SEQ ID NO: 1575272 - RNA, 19 nt, Artificial Sequence
  Description of Artificial Sequence: Synthetic oligonucleotide
  Antisense strand to SEQ ID NO: 1575271
uaagaccuagaguuccagc

SEQ ID NO: 1575273 - RNA, 19 nt, Artificial Sequence
  Description of Artificial Sequence: Synthetic oligonucleotide
  Sense strand starting at position 798 of SEQ ID NO: 1560087
cuggaacucuaggucuuaa

SEQ ID NO: 1575274 - RNA, 19 nt, Artificial Sequence
  Description of Artificial Sequence: Synthetic oligonucleotide
  Antisense strand to SEQ ID NO: 1575273
uuaagaccuagaguuccag

SEQ ID NO: 1575275 - RNA, 19 nt, Artificial Sequence
  Description of Artificial Sequence: Synthetic oligonucleotide
  Sense strand starting at position 837 of SEQ ID NO: 1560087
cagaacuuguggucccuaa

SEQ ID NO: 1575276 - RNA, 19 nt, Artificial Sequence
  Description of Artificial Sequence: Synthetic oligonucleotide
  Antisense strand to SEQ ID NO: 1575275
uuagggaccacaaguucug

SEQ ID NO: 1575277 - RNA, 19 nt, Artificial Sequence
  Description of Artificial Sequence: Synthetic oligonucleotide
  Sense strand starting at position 841 of SEQ ID NO: 1560087
acuuguggucccuaaagag

SEQ ID NO: 1575278 - RNA, 19 nt, Artificial Sequence
  Description of Artificial Sequence: Synthetic oligonucleotide
  Antisense strand to SEQ ID NO: 1575277
cucuuuagggaccacaagu

SEQ ID NO: 1575279 - RNA, 19 nt, Artificial Sequence
  Description of Artificial Sequence: Synthetic oligonucleotide
  Sense strand starting at position 876 of SEQ ID NO: 1560087
ccaggauucuuacaaugaa

SEQ ID NO: 1575280 - RNA, 19 nt, Artificial Sequence
  Description of Artificial Sequence: Synthetic oligonucleotide
  Antisense strand to SEQ ID NO: 1575279
uucauuguaagaauccugg

SEQ ID NO: 1575281 - RNA, 19 nt, Artificial Sequence
  Description of Artificial Sequence: Synthetic oligonucleotide
  Sense strand starting at position 890 of SEQ ID NO: 1560087
augaauuggucuuuguggu

SEQ ID NO: 1575282 - RNA, 19 nt, Artificial Sequence
  Description of Artificial Sequence: Synthetic oligonucleotide
  Antisense strand to SEQ ID NO: 1575281
accacaaagaccaauucau

SEQ ID NO: 1575283 - RNA, 19 nt, Artificial Sequence
  Description of Artificial Sequence: Synthetic oligonucleotide
  Sense strand starting at position 903 of SEQ ID NO: 1560087
uguggucccugggagguau

SEQ ID NO: 1575284 - RNA, 19 nt, Artificial Sequence
  Description of Artificial Sequence: Synthetic oligonucleotide
  Antisense strand to SEQ ID NO: 1575283
auaccucccagggaccaca

SEQ ID NO: 1575285 - RNA, 19 nt, Artificial Sequence
  Description of Artificial Sequence: Synthetic oligonucleotide
  Sense strand starting at position 907 of SEQ ID NO: 1560087
gucccugggagguauagau

SEQ ID NO: 1575286 - RNA, 19 nt, Artificial Sequence
  Description of Artificial Sequence: Synthetic oligonucleotide
  Antisense strand to SEQ ID NO: 1575285
aucuauaccucccagggac

SEQ ID NO: 1575287 - RNA, 19 nt, Artificial Sequence
  Description of Artificial Sequence: Synthetic oligonucleotide
  Sense strand starting at position 1676 of SEQ ID NO: 1560087
gaaacuguugaguggaaga

SEQ ID NO: 1575288 - RNA, 19 nt, Artificial Sequence
  Description of Artificial Sequence: Synthetic oligonucleotide
  Antisense strand to SEQ ID NO: 1575287
ucuuccacucaacaguuuc

SEQ ID NO: 1575289 - RNA, 19 nt, Artificial Sequence
  Description of Artificial Sequence: Synthetic oligonucleotide
  Sense strand starting at position 2043 of SEQ ID NO: 1560087
aucgaaaucucagaucuga

SEQ ID NO: 1575290 - RNA, 19 nt, Artificial Sequence
  Description of Artificial Sequence: Synthetic oligonucleotide
  Antisense strand to SEQ ID NO: 1575289
ucagaucugagauuucgau

SEQ ID NO: 1575291 - RNA, 19 nt, Artificial Sequence
  Description of Artificial Sequence: Synthetic oligonucleotide
  Sense strand starting at position 2090 of SEQ ID NO: 1560087
ccuagagucugaccagaga

SEQ ID NO: 1575292 - RNA, 19 nt, Artificial Sequence
  Description of Artificial Sequence: Synthetic oligonucleotide
  Antisense strand to SEQ ID NO: 1575291
ucucuggucagacucuagg

SEQ ID NO: 1575293 - RNA, 19 nt, Artificial Sequence
  Description of Artificial Sequence: Synthetic oligonucleotide
  Sense strand starting at position 2278 of SEQ ID NO: 1560087
uacugugacuccgagcaga

SEQ ID NO: 1575294 - RNA, 19 nt, Artificial Sequence
  Description of Artificial Sequence: Synthetic oligonucleotide
  Antisense strand to SEQ ID NO: 1575293
ucugcucggagucacagua

SEQ ID NO: 1575295 - RNA, 19 nt, Artificial Sequence
  Description of Artificial Sequence: Synthetic oligonucleotide
  Sense strand starting at position 2416 of SEQ ID NO: 1560087
guggaucagugacucagaa

SEQ ID NO: 1575296 - RNA, 19 nt, Artificial Sequence
  Description of Artificial Sequence: Synthetic oligonucleotide
  Antisense strand to SEQ ID NO: 1575295
uucugagucacugauccac

SEQ ID NO: 1575297 - RNA, 19 nt, Artificial Sequence
  Description of Artificial Sequence: Synthetic oligonucleotide
  Sense strand starting at position 2420 of SEQ ID NO: 1560087
aucagugacucagaaacua

SEQ ID NO: 1575298 - RNA, 19 nt, Artificial Sequence
  Description of Artificial Sequence: Synthetic oligonucleotide
  Antisense strand to SEQ ID NO: 1575297
uaguuucugagucacugau

SEQ ID NO: 1575299 - RNA, 19 nt, Artificial Sequence
  Description of Artificial Sequence: Synthetic oligonucleotide
  Sense strand starting at position 2671 of SEQ ID NO: 1560087
cuaaucugaugcccugaua

SEQ ID NO: 1575300 - RNA, 19 nt, Artificial Sequence
  Description of Artificial Sequence: Synthetic oligonucleotide
  Antisense strand to SEQ ID NO: 1575299
uaucagggcaucagauuag

SEQ ID NO: 1575301 - RNA, 19 nt, Artificial Sequence
  Description of Artificial Sequence: Synthetic oligonucleotide
  Sense strand starting at position 2674 of SEQ ID NO: 1560087
aucugaugcccugauacau

SEQ ID NO: 1575302 - RNA, 19 nt, Artificial Sequence
  Description of Artificial Sequence: Synthetic oligonucleotide
  Antisense strand to SEQ ID NO: 1575301
auguaucagggcaucagau

SEQ ID NO: 1575303 - RNA, 19 nt, Artificial Sequence
  Description of Artificial Sequence: Synthetic oligonucleotide
  Sense strand starting at position 2799 of SEQ ID NO: 1560087
aucuaagacuuugagcaga

SEQ ID NO: 1575304 - RNA, 19 nt, Artificial Sequence
  Description of Artificial Sequence: Synthetic oligonucleotide
  Antisense strand to SEQ ID NO: 1575303
ucugcucaaagucuuagau

SEQ ID NO: 1575305 - RNA, 19 nt, Artificial Sequence
  Description of Artificial Sequence: Synthetic oligonucleotide
  Sense strand starting at position 2837 of SEQ ID NO: 1560087
acucaagauuuguaucuug

SEQ ID NO: 1575306 - RNA, 19 nt, Artificial Sequence
  Description of Artificial Sequence: Synthetic oligonucleotide
  Antisense strand to SEQ ID NO: 1575305
caagauacaaaucuugagu

SEQ ID NO: 1575307 - RNA, 19 nt, Artificial Sequence
  Description of Artificial Sequence: Synthetic oligonucleotide
  Sense strand starting at position 2842 of SEQ ID NO: 1560087
agauuuguaucuugagccu

SEQ ID NO: 1575308 - RNA, 19 nt, Artificial Sequence
  Description of Artificial Sequence: Synthetic oligonucleotide
  Antisense strand to SEQ ID NO: 1575307
aggcucaagauacaaaucu

SEQ ID NO: 1575309 - RNA, 19 nt, Artificial Sequence
  Description of Artificial Sequence: Synthetic oligonucleotide
  Sense strand starting at position 3289 of SEQ ID NO: 1560087
ugcugagucccagaacauu

SEQ ID NO: 1575310 - RNA, 19 nt, Artificial Sequence
  Description of Artificial Sequence: Synthetic oligonucleotide
  Antisense strand to SEQ ID NO: 1575309
aauguucugggacucagca

SEQ ID NO: 1575311 - RNA, 19 nt, Artificial Sequence
  Description of Artificial Sequence: Synthetic oligonucleotide
  Sense strand starting at position 3825 of SEQ ID NO: 1560087
gaaacuuccuaccagaggu

SEQ ID NO: 1575312 - RNA, 19 nt, Artificial Sequence
  Description of Artificial Sequence: Synthetic oligonucleotide
  Antisense strand to SEQ ID NO: 1575311
accucugguaggaaguuuc

SEQ ID NO: 1575313 - RNA, 19 nt, Artificial Sequence
  Description of Artificial Sequence: Synthetic oligonucleotide
  Sense strand starting at position 21 of SEQ ID NO: 1560088
gagauaacguucccggcuu

SEQ ID NO: 1575314 - RNA, 19 nt, Artificial Sequence
  Description of Artificial Sequence: Synthetic oligonucleotide
  Antisense strand to SEQ ID NO: 1575313
aagccgggaacguuaucuc

SEQ ID NO: 1575315 - RNA, 19 nt, Artificial Sequence
  Description of Artificial Sequence: Synthetic oligonucleotide
  Sense strand starting at position 33 of SEQ ID NO: 1560088
ccggcuugucgugaacacu

SEQ ID NO: 1575316 - RNA, 19 nt, Artificial Sequence
  Description of Artificial Sequence: Synthetic oligonucleotide
  Antisense strand to SEQ ID NO: 1575315
aguguucacgacaagccgg

SEQ ID NO: 1575317 - RNA, 19 nt, Artificial Sequence
  Description of Artificial Sequence: Synthetic oligonucleotide
  Sense strand starting at position 203 of SEQ ID NO: 1560088
ggaagacaguggucacaca

SEQ ID NO: 1575318 - RNA, 19 nt, Artificial Sequence
  Description of Artificial Sequence: Synthetic oligonucleotide
  Antisense strand to SEQ ID NO: 1575317
ugugugaccacugucuucc

SEQ ID NO: 1575319 - RNA, 19 nt, Artificial Sequence
  Description of Artificial Sequence: Synthetic oligonucleotide
  Sense strand starting at position 227 of SEQ ID NO: 1560088
gcagauaugcagcagaacu

SEQ ID NO: 1575320 - RNA, 19 nt, Artificial Sequence
  Description of Artificial Sequence: Synthetic oligonucleotide
  Antisense strand to SEQ ID NO: 1575319
aguucugcugcauaucugc

SEQ ID NO: 1575321 - RNA, 19 nt, Artificial Sequence
  Description of Artificial Sequence: Synthetic oligonucleotide
  Sense strand starting at position 278 of SEQ ID NO: 1560088
gcuacuugauacucaggaa

SEQ ID NO: 1575322 - RNA, 19 nt, Artificial Sequence
  Description of Artificial Sequence: Synthetic oligonucleotide
  Antisense strand to SEQ ID NO: 1575321
uuccugaguaucaaguagc

SEQ ID NO: 1575323 - RNA, 19 nt, Artificial Sequence
  Description of Artificial Sequence: Synthetic oligonucleotide
  Sense strand starting at position 281 of SEQ ID NO: 1560088
acuugauacucaggaaaga

SEQ ID NO: 1575324 - RNA, 19 nt, Artificial Sequence
  Description of Artificial Sequence: Synthetic oligonucleotide
  Antisense strand to SEQ ID NO: 1575323
ucuuuccugaguaucaagu

SEQ ID NO: 1575325 - RNA, 19 nt, Artificial Sequence
  Description of Artificial Sequence: Synthetic oligonucleotide
  Sense strand starting at position 299 of SEQ ID NO: 1560088
aaauacugaugcuaagagu

SEQ ID NO: 1575326 - RNA, 19 nt, Artificial Sequence
  Description of Artificial Sequence: Synthetic oligonucleotide
  Antisense strand to SEQ ID NO: 1575325
acucuuagcaucaguauuu

SEQ ID NO: 1575327 - RNA, 19 nt, Artificial Sequence
  Description of Artificial Sequence: Synthetic oligonucleotide
  Sense strand starting at position 348 of SEQ ID NO: 1560088
gcaggagucuuggagaagu

SEQ ID NO: 1575328 - RNA, 19 nt, Artificial Sequence
  Description of Artificial Sequence: Synthetic oligonucleotide
  Antisense strand to SEQ ID NO: 1575327
acuucuccaagacuccugc

SEQ ID NO: 1575329 - RNA, 19 nt, Artificial Sequence
  Description of Artificial Sequence: Synthetic oligonucleotide
  Sense strand starting at position 685 of SEQ ID NO: 1560088
gagagaaagucaugaguga

SEQ ID NO: 1575330 - RNA, 19 nt, Artificial Sequence
  Description of Artificial Sequence: Synthetic oligonucleotide
  Antisense strand to SEQ ID NO: 1575329
ucacucaugacuuucucuc

SEQ ID NO: 1575331 - RNA, 19 nt, Artificial Sequence
  Description of Artificial Sequence: Synthetic oligonucleotide
  Sense strand starting at position 696 of SEQ ID NO: 1560088
augagugagggcgaguuaa

SEQ ID NO: 1575332 - RNA, 19 nt, Artificial Sequence
  Description of Artificial Sequence: Synthetic oligonucleotide
  Antisense strand to SEQ ID NO: 1575331
uuaacucgcccucacucau

SEQ ID NO: 1575333 - RNA, 19 nt, Artificial Sequence
  Description of Artificial Sequence: Synthetic oligonucleotide
  Sense strand starting at position 707 of SEQ ID NO: 1560088
cgaguuaaggcacgaaguu

SEQ ID NO: 1575334 - RNA, 19 nt, Artificial Sequence
  Description of Artificial Sequence: Synthetic oligonucleotide
  Antisense strand to SEQ ID NO: 1575333
aacuucgugccuuaacucg

SEQ ID NO: 1575335 - RNA, 19 nt, Artificial Sequence
  Description of Artificial Sequence: Synthetic oligonucleotide
  Sense strand starting at position 708 of SEQ ID NO: 1560088
gaguuaaggcacgaaguuu

SEQ ID NO: 1575336 - RNA, 19 nt, Artificial Sequence
  Description of Artificial Sequence: Synthetic oligonucleotide
  Antisense strand to SEQ ID NO: 1575335
aaacuucgugccuuaacuc

SEQ ID NO: 1575337 - RNA, 19 nt, Artificial Sequence
  Description of Artificial Sequence: Synthetic oligonucleotide
  Sense strand starting at position 768 of SEQ ID NO: 1560088
ggaagacugggccgugaaa

SEQ ID NO: 1575338 - RNA, 19 nt, Artificial Sequence
  Description of Artificial Sequence: Synthetic oligonucleotide
  Antisense strand to SEQ ID NO: 1575337
uuucacggcccagucuucc

SEQ ID NO: 1575339 - RNA, 19 nt, Artificial Sequence
  Description of Artificial Sequence: Synthetic oligonucleotide
  Sense strand starting at position 1391 of SEQ ID NO: 1560088
ggagcaugccgaggaauuc

SEQ ID NO: 1575340 - RNA, 19 nt, Artificial Sequence
  Description of Artificial Sequence: Synthetic oligonucleotide
  Antisense strand to SEQ ID NO: 1575339
gaauuccucggcaugcucc

SEQ ID NO: 1575341 - RNA, 19 nt, Artificial Sequence
  Description of Artificial Sequence: Synthetic oligonucleotide
  Sense strand starting at position 2294 of SEQ ID NO: 1560088
cuugucuucugcccaagaa

SEQ ID NO: 1575342 - RNA, 19 nt, Artificial Sequence
  Description of Artificial Sequence: Synthetic oligonucleotide
  Antisense strand to SEQ ID NO: 1575341
uucuugggcagaagacaag

SEQ ID NO: 1575343 - RNA, 19 nt, Artificial Sequence
  Description of Artificial Sequence: Synthetic oligonucleotide
  Sense strand starting at position 2295 of SEQ ID NO: 1560088
uugucuucugcccaagaaa

SEQ ID NO: 1575344 - RNA, 19 nt, Artificial Sequence
  Description of Artificial Sequence: Synthetic oligonucleotide
  Antisense strand to SEQ ID NO: 1575343
uuucuugggcagaagacaa

SEQ ID NO: 1575345 - RNA, 19 nt, Artificial Sequence
  Description of Artificial Sequence: Synthetic oligonucleotide
  Sense strand starting at position 2399 of SEQ ID NO: 1560088
ccugucuucugcccaagaa

SEQ ID NO: 1575346 - RNA, 19 nt, Artificial Sequence
  Description of Artificial Sequence: Synthetic oligonucleotide
  Antisense strand to SEQ ID NO: 1575345
uucuugggcagaagacagg

SEQ ID NO: 1575347 - RNA, 19 nt, Artificial Sequence
  Description of Artificial Sequence: Synthetic oligonucleotide
  Sense strand starting at position 2400 of SEQ ID NO: 1560088
cugucuucugcccaagaaa

SEQ ID NO: 1575348 - RNA, 19 nt, Artificial Sequence
  Description of Artificial Sequence: Synthetic oligonucleotide
  Antisense strand to SEQ ID NO: 1575347
uuucuugggcagaagacag

SEQ ID NO: 1575349 - RNA, 19 nt, Artificial Sequence
  Description of Artificial Sequence: Synthetic oligonucleotide
  Sense strand starting at position 2811 of SEQ ID NO: 1560088
ucgcguucuuccuuccuua

SEQ ID NO: 1575350 - RNA, 19 nt, Artificial Sequence
  Description of Artificial Sequence: Synthetic oligonucleotide
  Antisense strand to SEQ ID NO: 1575349
uaaggaaggaagaacgcga

SEQ ID NO: 1575351 - RNA, 19 nt, Artificial Sequence
  Description of Artificial Sequence: Synthetic oligonucleotide
  Sense strand starting at position 2972 of SEQ ID NO: 1560088
gcaccacuuccgugggagu

SEQ ID NO: 1575352 - RNA, 19 nt, Artificial Sequence
  Description of Artificial Sequence: Synthetic oligonucleotide
  Antisense strand to SEQ ID NO: 1575351
acucccacggaaguggugc

SEQ ID NO: 1575353 - RNA, 19 nt, Artificial Sequence
  Description of Artificial Sequence: Synthetic oligonucleotide
  Sense strand starting at position 2973 of SEQ ID NO: 1560088
caccacuuccgugggagua

SEQ ID NO: 1575354 - RNA, 19 nt, Artificial Sequence
  Description of Artificial Sequence: Synthetic oligonucleotide
  Antisense strand to SEQ ID NO: 1575353
uacucccacggaaguggug

SEQ ID NO: 1575355 - RNA, 19 nt, Artificial Sequence
  Description of Artificial Sequence: Synthetic oligonucleotide
  Sense strand starting at position 2974 of SEQ ID NO: 1560088
accacuuccgugggaguaa

SEQ ID NO: 1575356 - RNA, 19 nt, Artificial Sequence
  Description of Artificial Sequence: Synthetic oligonucleotide
  Antisense strand to SEQ ID NO: 1575355
uuacucccacggaaguggu

SEQ ID NO: 1575357 - RNA, 19 nt, Artificial Sequence
  Description of Artificial Sequence: Synthetic oligonucleotide
  Sense strand starting at position 3053 of SEQ ID NO: 1560088
aguuuccucuccuuaggaa

SEQ ID NO: 1575358 - RNA, 19 nt, Artificial Sequence
  Description of Artificial Sequence: Synthetic oligonucleotide
  Antisense strand to SEQ ID NO: 1575357
uuccuaaggagaggaaacu

SEQ ID NO: 1575359 - RNA, 19 nt, Artificial Sequence
  Description of Artificial Sequence: Synthetic oligonucleotide
  Sense strand starting at position 3054 of SEQ ID NO: 1560088
guuuccucuccuuaggaaa

SEQ ID NO: 1575360 - RNA, 19 nt, Artificial Sequence
  Description of Artificial Sequence: Synthetic oligonucleotide
  Antisense strand to SEQ ID NO: 1575359
uuuccuaaggagaggaaac

SEQ ID NO: 1575361 - RNA, 19 nt, Artificial Sequence
  Description of Artificial Sequence: Synthetic oligonucleotide
  Sense strand starting at position 3280 of SEQ ID NO: 1560088
auguuugagucccaccuga

SEQ ID NO: 1575362 - RNA, 19 nt, Artificial Sequence
  Description of Artificial Sequence: Synthetic oligonucleotide
  Antisense strand to SEQ ID NO: 1575361
ucaggugggacucaaacau

SEQ ID NO: 1575363 - RNA, 19 nt, Artificial Sequence
  Description of Artificial Sequence: Synthetic oligonucleotide
  Sense strand starting at position 3297 of SEQ ID NO: 1560088
gagaaaguccgacaugguu

SEQ ID NO: 1575364 - RNA, 19 nt, Artificial Sequence
  Description of Artificial Sequence: Synthetic oligonucleotide
  Antisense strand to SEQ ID NO: 1575363
aaccaugucggacuuucuc

SEQ ID NO: 1575365 - RNA, 19 nt, Artificial Sequence
  Description of Artificial Sequence: Synthetic oligonucleotide
  Sense strand starting at position 3489 of SEQ ID NO: 1560088
augccuuuacuccaggaaa

SEQ ID NO: 1575366 - RNA, 19 nt, Artificial Sequence
  Description of Artificial Sequence: Synthetic oligonucleotide
  Antisense strand to SEQ ID NO: 1575365
uuuccuggaguaaaggcau

SEQ ID NO: 1575367 - RNA, 19 nt, Artificial Sequence
  Description of Artificial Sequence: Synthetic oligonucleotide
  Sense strand starting at position 3625 of SEQ ID NO: 1560088
aaauuuccuccgugaguuc

SEQ ID NO: 1575368 - RNA, 19 nt, Artificial Sequence
  Description of Artificial Sequence: Synthetic oligonucleotide
  Antisense strand to SEQ ID NO: 1575367
gaacucacggaggaaauuu

SEQ ID NO: 1575369 - RNA, 19 nt, Artificial Sequence
  Description of Artificial Sequence: Synthetic oligonucleotide
  Sense strand starting at position 3634 of SEQ ID NO: 1560088
ccgugaguuccacggcauu

SEQ ID NO: 1575370 - RNA, 19 nt, Artificial Sequence
  Description of Artificial Sequence: Synthetic oligonucleotide
  Antisense strand to SEQ ID NO: 1575369
aaugccguggaacucacgg

SEQ ID NO: 1575371 - RNA, 19 nt, Artificial Sequence
  Description of Artificial Sequence: Synthetic oligonucleotide
  Sense strand starting at position 468 of SEQ ID NO: 1560089
ugaaaccaaucauugcaga

SEQ ID NO: 1575372 - RNA, 19 nt, Artificial Sequence
  Description of Artificial Sequence: Synthetic oligonucleotide
  Antisense strand to SEQ ID NO: 1575371
ucugcaaugauugguuuca

SEQ ID NO: 1575373 - RNA, 19 nt, Artificial Sequence
  Description of Artificial Sequence: Synthetic oligonucleotide
  Sense strand starting at position 491 of SEQ ID NO: 1560089
uuaaauauuggccacaagu

SEQ ID NO: 1575374 - RNA, 19 nt, Artificial Sequence
  Description of Artificial Sequence: Synthetic oligonucleotide
  Antisense strand to SEQ ID NO: 1575373
acuuguggccaauauuuaa

SEQ ID NO: 1575375 - RNA, 19 nt, Artificial Sequence
  Description of Artificial Sequence: Synthetic oligonucleotide
  Sense strand starting at position 520 of SEQ ID NO: 1560089
uuucgugaacauuaauucu

SEQ ID NO: 1575376 - RNA, 19 nt, Artificial Sequence
  Description of Artificial Sequence: Synthetic oligonucleotide
  Antisense strand to SEQ ID NO: 1575375
agaauuaauguucacgaaa

SEQ ID NO: 1575377 - RNA, 19 nt, Artificial Sequence
  Description of Artificial Sequence: Synthetic oligonucleotide
  Sense strand starting at position 523 of SEQ ID NO: 1560089
cgugaacauuaauucuaau

SEQ ID NO: 1575378 - RNA, 19 nt, Artificial Sequence
  Description of Artificial Sequence: Synthetic oligonucleotide
  Antisense strand to SEQ ID NO: 1575377
auuagaauuaauguucacg

SEQ ID NO: 1575379 - RNA, 19 nt, Artificial Sequence
  Description of Artificial Sequence: Synthetic oligonucleotide
  Sense strand starting at position 543 of SEQ ID NO: 1560089
acauaucuagaguggcaaa

SEQ ID NO: 1575380 - RNA, 19 nt, Artificial Sequence
  Description of Artificial Sequence: Synthetic oligonucleotide
  Antisense strand to SEQ ID NO: 1575379
uuugccacucuagauaugu

SEQ ID NO: 1575381 - RNA, 19 nt, Artificial Sequence
  Description of Artificial Sequence: Synthetic oligonucleotide
  Sense strand starting at position 546 of SEQ ID NO: 1560089
uaucuagaguggcaaauua

SEQ ID NO: 1575382 - RNA, 19 nt, Artificial Sequence
  Description of Artificial Sequence: Synthetic oligonucleotide
  Antisense strand to SEQ ID NO: 1575381
uaauuugccacucuagaua

SEQ ID NO: 1575383 - RNA, 19 nt, Artificial Sequence
  Description of Artificial Sequence: Synthetic oligonucleotide
  Sense strand starting at position 553 of SEQ ID NO: 1560089
aguggcaaauuauugugaa

SEQ ID NO: 1575384 - RNA, 19 nt, Artificial Sequence
  Description of Artificial Sequence: Synthetic oligonucleotide
  Antisense strand to SEQ ID NO: 1575383
uucacaauaauuugccacu

SEQ ID NO: 1575385 - RNA, 19 nt, Artificial Sequence
  Description of Artificial Sequence: Synthetic oligonucleotide
  Sense strand starting at position 611 of SEQ ID NO: 1560089
agaugacauuaacaagacu

SEQ ID NO: 1575386 - RNA, 19 nt, Artificial Sequence
  Description of Artificial Sequence: Synthetic oligonucleotide
  Antisense strand to SEQ ID NO: 1575385
agucuuguuaaugucaucu

SEQ ID NO: 1575387 - RNA, 19 nt, Artificial Sequence
  Description of Artificial Sequence: Synthetic oligonucleotide
  Sense strand starting at position 968 of SEQ ID NO: 1560089
gcaagacuggccugagugu

SEQ ID NO: 1575388 - RNA, 19 nt, Artificial Sequence
  Description of Artificial Sequence: Synthetic oligonucleotide
  Antisense strand to SEQ ID NO: 1575387
acacucaggccagucuugc

SEQ ID NO: 1575389 - RNA, 19 nt, Artificial Sequence
  Description of Artificial Sequence: Synthetic oligonucleotide
  Sense strand starting at position 1050 of SEQ ID NO: 1560089
uugguuucucuguacugga

SEQ ID NO: 1575390 - RNA, 19 nt, Artificial Sequence
  Description of Artificial Sequence: Synthetic oligonucleotide
  Antisense strand to SEQ ID NO: 1575389
uccaguacagagaaaccaa

SEQ ID NO: 1575391 - RNA, 19 nt, Artificial Sequence
  Description of Artificial Sequence: Synthetic oligonucleotide
  Sense strand starting at position 1144 of SEQ ID NO: 1560089
cuaggaaucagcugugagu

SEQ ID NO: 1575392 - RNA, 19 nt, Artificial Sequence
  Description of Artificial Sequence: Synthetic oligonucleotide
  Antisense strand to SEQ ID NO: 1575391
acucacagcugauuccuag

SEQ ID NO: 1575393 - RNA, 19 nt, Artificial Sequence
  Description of Artificial Sequence: Synthetic oligonucleotide
  Sense strand starting at position 1244 of SEQ ID NO: 1560089
cucugaaaucuacgcacuu

SEQ ID NO: 1575394 - RNA, 19 nt, Artificial Sequence
  Description of Artificial Sequence: Synthetic oligonucleotide
  Antisense strand to SEQ ID NO: 1575393
aagugcguagauuucagag

SEQ ID NO: 1575395 - RNA, 19 nt, Artificial Sequence
  Description of Artificial Sequence: Synthetic oligonucleotide
  Sense strand starting at position 1245 of SEQ ID NO: 1560089
ucugaaaucuacgcacuuu

SEQ ID NO: 1575396 - RNA, 19 nt, Artificial Sequence
  Description of Artificial Sequence: Synthetic oligonucleotide
  Antisense strand to SEQ ID NO: 1575395
aaagugcguagauuucaga

SEQ ID NO: 1575397 - RNA, 19 nt, Artificial Sequence
  Description of Artificial Sequence: Synthetic oligonucleotide
  Sense strand starting at position 1308 of SEQ ID NO: 1560089
ucaucuacugucuggacaa

SEQ ID NO: 1575398 - RNA, 19 nt, Artificial Sequence
  Description of Artificial Sequence: Synthetic oligonucleotide
  Antisense strand to SEQ ID NO: 1575397
uuguccagacaguagauga

SEQ ID NO: 1575399 - RNA, 19 nt, Artificial Sequence
  Description of Artificial Sequence: Synthetic oligonucleotide
  Sense strand starting at position 1310 of SEQ ID NO: 1560089
aucuacugucuggacaauu

SEQ ID NO: 1575400 - RNA, 19 nt, Artificial Sequence
  Description of Artificial Sequence: Synthetic oligonucleotide
  Antisense strand to SEQ ID NO: 1575399
aauuguccagacaguagau

SEQ ID NO: 1575401 - RNA, 19 nt, Artificial Sequence
  Description of Artificial Sequence: Synthetic oligonucleotide
  Sense strand starting at position 1389 of SEQ ID NO: 1560089
gccagaaaguaugcagagu

SEQ ID NO: 1575402 - RNA, 19 nt, Artificial Sequence
  Description of Artificial Sequence: Synthetic oligonucleotide
  Antisense strand to SEQ ID NO: 1575401
acucugcauacuuucuggc

SEQ ID NO: 1575403 - RNA, 19 nt, Artificial Sequence
  Description of Artificial Sequence: Synthetic oligonucleotide
  Sense strand starting at position 1390 of SEQ ID NO: 1560089
ccagaaaguaugcagaguu

SEQ ID NO: 1575404 - RNA, 19 nt, Artificial Sequence
  Description of Artificial Sequence: Synthetic oligonucleotide
  Antisense strand to SEQ ID NO: 1575403
aacucugcauacuuucugg

SEQ ID NO: 1575405 - RNA, 19 nt, Artificial Sequence
  Description of Artificial Sequence: Synthetic oligonucleotide
  Sense strand starting at position 1506 of SEQ ID NO: 1560089
ucgauaugauaugaucuga

SEQ ID NO: 1575406 - RNA, 19 nt, Artificial Sequence
  Description of Artificial Sequence: Synthetic oligonucleotide
  Antisense strand to SEQ ID NO: 1575405
ucagaucauaucauaucga

SEQ ID NO: 1575407 - RNA, 19 nt, Artificial Sequence
  Description of Artificial Sequence: Synthetic oligonucleotide
  Sense strand starting at position 1511 of SEQ ID NO: 1560089
augauaugaucugaucucu

SEQ ID NO: 1575408 - RNA, 19 nt, Artificial Sequence
  Description of Artificial Sequence: Synthetic oligonucleotide
  Antisense strand to SEQ ID NO: 1575407
agagaucagaucauaucau

SEQ ID NO: 1575409 - RNA, 19 nt, Artificial Sequence
  Description of Artificial Sequence: Synthetic oligonucleotide
  Sense strand starting at position 1516 of SEQ ID NO: 1560089
augaucugaucucucguua

SEQ ID NO: 1575410 - RNA, 19 nt, Artificial Sequence
  Description of Artificial Sequence: Synthetic oligonucleotide
  Antisense strand to SEQ ID NO: 1575409
uaacgagagaucagaucau

SEQ ID NO: 1575411 - RNA, 19 nt, Artificial Sequence
  Description of Artificial Sequence: Synthetic oligonucleotide
  Sense strand starting at position 2109 of SEQ ID NO: 1560089
uuccacuacgucugcaaau

SEQ ID NO: 1575412 - RNA, 19 nt, Artificial Sequence
  Description of Artificial Sequence: Synthetic oligonucleotide
  Antisense strand to SEQ ID NO: 1575411
auuugcagacguaguggaa

SEQ ID NO: 1575413 - RNA, 19 nt, Artificial Sequence
  Description of Artificial Sequence: Synthetic oligonucleotide
  Sense strand starting at position 2111 of SEQ ID NO: 1560089
ccacuacgucugcaaaugu

SEQ ID NO: 1575414 - RNA, 19 nt, Artificial Sequence
  Description of Artificial Sequence: Synthetic oligonucleotide
  Antisense strand to SEQ ID NO: 1575413
acauuugcagacguagugg

SEQ ID NO: 1575415 - RNA, 19 nt, Artificial Sequence
  Description of Artificial Sequence: Synthetic oligonucleotide
  Sense strand starting at position 2124 of SEQ ID NO: 1560089
aaauguggaccgcgugauu

SEQ ID NO: 1575416 - RNA, 19 nt, Artificial Sequence
  Description of Artificial Sequence: Synthetic oligonucleotide
  Antisense strand to SEQ ID NO: 1575415
aaucacgcgguccacauuu

SEQ ID NO: 1575417 - RNA, 19 nt, Artificial Sequence
  Description of Artificial Sequence: Synthetic oligonucleotide
  Sense strand starting at position 2126 of SEQ ID NO: 1560089
auguggaccgcgugauuga

SEQ ID NO: 1575418 - RNA, 19 nt, Artificial Sequence
  Description of Artificial Sequence: Synthetic oligonucleotide
  Antisense strand to SEQ ID NO: 1575417
ucaaucacgcgguccacau

SEQ ID NO: 1575419 - RNA, 19 nt, Artificial Sequence
  Description of Artificial Sequence: Synthetic oligonucleotide
  Sense strand starting at position 2139 of SEQ ID NO: 1560089
gauugacuccagugggauu

SEQ ID NO: 1575420 - RNA, 19 nt, Artificial Sequence
  Description of Artificial Sequence: Synthetic oligonucleotide
  Antisense strand to SEQ ID NO: 1575419
aaucccacuggagucaauc

SEQ ID NO: 1575421 - RNA, 19 nt, Artificial Sequence
  Description of Artificial Sequence: Synthetic oligonucleotide
  Sense strand starting at position 2326 of SEQ ID NO: 1560089
ucggaaguagcgcuucauu

SEQ ID NO: 1575422 - RNA, 19 nt, Artificial Sequence
  Description of Artificial Sequence: Synthetic oligonucleotide
  Antisense strand to SEQ ID NO: 1575421
aaugaagcgcuacuuccga

SEQ ID NO: 1575423 - RNA, 19 nt, Artificial Sequence
  Description of Artificial Sequence: Synthetic oligonucleotide
  Sense strand starting at position 2483 of SEQ ID NO: 1560089
ucuuaugagagucaucguu

SEQ ID NO: 1575424 - RNA, 19 nt, Artificial Sequence
  Description of Artificial Sequence: Synthetic oligonucleotide
  Antisense strand to SEQ ID NO: 1575423
aacgaugacucucauaaga

SEQ ID NO: 1575425 - RNA, 19 nt, Artificial Sequence
  Description of Artificial Sequence: Synthetic oligonucleotide
  Sense strand starting at position 2485 of SEQ ID NO: 1560089
uuaugagagucaucguuau

SEQ ID NO: 1575426 - RNA, 19 nt, Artificial Sequence
  Description of Artificial Sequence: Synthetic oligonucleotide
  Antisense strand to SEQ ID NO: 1575425
auaacgaugacucucauaa

SEQ ID NO: 1575427 - RNA, 19 nt, Artificial Sequence
  Description of Artificial Sequence: Synthetic oligonucleotide
  Sense strand starting at position 2489 of SEQ ID NO: 1560089
gagagucaucguuaugcuc

SEQ ID NO: 1575428 - RNA, 19 nt, Artificial Sequence
  Description of Artificial Sequence: Synthetic oligonucleotide
  Antisense strand to SEQ ID NO: 1575427
gagcauaacgaugacucuc

SEQ ID NO: 1575429 - RNA, 19 nt, Artificial Sequence
  Description of Artificial Sequence: Synthetic oligonucleotide
  Sense strand starting at position 2732 of SEQ ID NO: 1560089
ggacuugcuguugaaacaa

SEQ ID NO: 1575430 - RNA, 19 nt, Artificial Sequence
  Description of Artificial Sequence: Synthetic oligonucleotide
  Antisense strand to SEQ ID NO: 1575429
uuguuucaacagcaagucc

SEQ ID NO: 1575431 - RNA, 19 nt, Artificial Sequence
  Description of Artificial Sequence: Synthetic oligonucleotide
  Sense strand starting at position 2894 of SEQ ID NO: 1560089
ccuguuuauggaggaugau

SEQ ID NO: 1575432 - RNA, 19 nt, Artificial Sequence
  Description of Artificial Sequence: Synthetic oligonucleotide
  Antisense strand to SEQ ID NO: 1575431
aucauccuccauaaacagg

SEQ ID NO: 1575433 - RNA, 19 nt, Artificial Sequence
  Description of Artificial Sequence: Synthetic oligonucleotide
  Sense strand starting at position 2897 of SEQ ID NO: 1560089
guuuauggaggaugauagu

SEQ ID NO: 1575434 - RNA, 19 nt, Artificial Sequence
  Description of Artificial Sequence: Synthetic oligonucleotide
  Antisense strand to SEQ ID NO: 1575433
acuaucauccuccauaaac

SEQ ID NO: 1575435 - RNA, 19 nt, Artificial Sequence
  Description of Artificial Sequence: Synthetic oligonucleotide
  Sense strand starting at position 2900 of SEQ ID NO: 1560089
uauggaggaugauaguaau

SEQ ID NO: 1575436 - RNA, 19 nt, Artificial Sequence
  Description of Artificial Sequence: Synthetic oligonucleotide
  Antisense strand to SEQ ID NO: 1575435
auuacuaucauccuccaua

SEQ ID NO: 1575437 - RNA, 19 nt, Artificial Sequence
  Description of Artificial Sequence: Synthetic oligonucleotide
  Sense strand starting at position 2903 of SEQ ID NO: 1560089
ggaggaugauaguaauuua

SEQ ID NO: 1575438 - RNA, 19 nt, Artificial Sequence
  Description of Artificial Sequence: Synthetic oligonucleotide
  Antisense strand to SEQ ID NO: 1575437
uaaauuacuaucauccucc

SEQ ID NO: 1575439 - RNA, 19 nt, Artificial Sequence
  Description of Artificial Sequence: Synthetic oligonucleotide
  Sense strand starting at position 3476 of SEQ ID NO: 1560089
agguuccugugaguugaga

SEQ ID NO: 1575440 - RNA, 19 nt, Artificial Sequence
  Description of Artificial Sequence: Synthetic oligonucleotide
  Antisense strand to SEQ ID NO: 1575439
ucucaacucacaggaaccu

SEQ ID NO: 1575441 - RNA, 19 nt, Artificial Sequence
  Description of Artificial Sequence: Synthetic oligonucleotide
  Sense strand starting at position 3478 of SEQ ID NO: 1560089
guuccugugaguugagauc

SEQ ID NO: 1575442 - RNA, 19 nt, Artificial Sequence
  Description of Artificial Sequence: Synthetic oligonucleotide
  Antisense strand to SEQ ID NO: 1575441
gaucucaacucacaggaac

SEQ ID NO: 1575443 - RNA, 19 nt, Artificial Sequence
  Description of Artificial Sequence: Synthetic oligonucleotide
  Sense strand starting at position 3576 of SEQ ID NO: 1560089
aacguuuaucuuggaauac

SEQ ID NO: 1575444 - RNA, 19 nt, Artificial Sequence
  Description of Artificial Sequence: Synthetic oligonucleotide
  Antisense strand to SEQ ID NO: 1575443
guauuccaagauaaacguu

SEQ ID NO: 1575445 - RNA, 19 nt, Artificial Sequence
  Description of Artificial Sequence: Synthetic oligonucleotide
  Sense strand starting at position 3628 of SEQ ID NO: 1560089
uaugcuuugcuugguguua

SEQ ID NO: 1575446 - RNA, 19 nt, Artificial Sequence
  Description of Artificial Sequence: Synthetic oligonucleotide
  Antisense strand to SEQ ID NO: 1575445
uaacaccaagcaaagcaua

SEQ ID NO: 1575447 - RNA, 19 nt, Artificial Sequence
  Description of Artificial Sequence: Synthetic oligonucleotide
  Sense strand starting at position 3719 of SEQ ID NO: 1560089
ugagauguggguugucaug

SEQ ID NO: 1575448 - RNA, 19 nt, Artificial Sequence
  Description of Artificial Sequence: Synthetic oligonucleotide
  Antisense strand to SEQ ID NO: 1575447
caugacaacccacaucuca

SEQ ID NO: 1575449 - RNA, 19 nt, Artificial Sequence
  Description of Artificial Sequence: Synthetic oligonucleotide
  Sense strand starting at position 3728 of SEQ ID NO: 1560089
gguugucaugcugauggga

SEQ ID NO: 1575450 - RNA, 19 nt, Artificial Sequence
  Description of Artificial Sequence: Synthetic oligonucleotide
  Antisense strand to SEQ ID NO: 1575449
ucccaucagcaugacaacc

SEQ ID NO: 1575451 - RNA, 19 nt, Artificial Sequence
  Description of Artificial Sequence: Synthetic oligonucleotide
  Sense strand starting at position 14 of SEQ ID NO: 1560090
ccaucacgguucuagaacu

SEQ ID NO: 1575452 - RNA, 19 nt, Artificial Sequence
  Description of Artificial Sequence: Synthetic oligonucleotide
  Antisense strand to SEQ ID NO: 1575451
aguucuagaaccgugaugg

SEQ ID NO: 1575453 - RNA, 19 nt, Artificial Sequence
  Description of Artificial Sequence: Synthetic oligonucleotide
  Sense strand starting at position 22 of SEQ ID NO: 1560090
guucuagaacuuuaaaggu

SEQ ID NO: 1575454 - RNA, 19 nt, Artificial Sequence
  Description of Artificial Sequence: Synthetic oligonucleotide
  Antisense strand to SEQ ID NO: 1575453
accuuuaaaguucuagaac

SEQ ID NO: 1575455 - RNA, 19 nt, Artificial Sequence
  Description of Artificial Sequence: Synthetic oligonucleotide
  Sense strand starting at position 31 of SEQ ID NO: 1560090
cuuuaaaggugucaagauu

SEQ ID NO: 1575456 - RNA, 19 nt, Artificial Sequence
  Description of Artificial Sequence: Synthetic oligonucleotide
  Antisense strand to SEQ ID NO: 1575455
aaucuugacaccuuuaaag

SEQ ID NO: 1575457 - RNA, 19 nt, Artificial Sequence
  Description of Artificial Sequence: Synthetic oligonucleotide
  Sense strand starting at position 56 of SEQ ID NO: 1560090
ccuucuggauucuagaauc

SEQ ID NO: 1575458 - RNA, 19 nt, Artificial Sequence
  Description of Artificial Sequence: Synthetic oligonucleotide
  Antisense strand to SEQ ID NO: 1575457
gauucuagaauccagaagg

SEQ ID NO: 1575459 - RNA, 19 nt, Artificial Sequence
  Description of Artificial Sequence: Synthetic oligonucleotide
  Sense strand starting at position 64 of SEQ ID NO: 1560090
auucuagaauccuguagau

SEQ ID NO: 1575460 - RNA, 19 nt, Artificial Sequence
  Description of Artificial Sequence: Synthetic oligonucleotide
  Antisense strand to SEQ ID NO: 1575459
aucuacaggauucuagaau

SEQ ID NO: 1575461 - RNA, 19 nt, Artificial Sequence
  Description of Artificial Sequence: Synthetic oligonucleotide
  Sense strand starting at position 66 of SEQ ID NO: 1560090
ucuagaauccuguagaugu

SEQ ID NO: 1575462 - RNA, 19 nt, Artificial Sequence
  Description of Artificial Sequence: Synthetic oligonucleotide
  Antisense strand to SEQ ID NO: 1575461
acaucuacaggauucuaga

SEQ ID NO: 1575463 - RNA, 19 nt, Artificial Sequence
  Description of Artificial Sequence: Synthetic oligonucleotide
  Sense strand starting at position 68 of SEQ ID NO: 1560090
uagaauccuguagauguca

SEQ ID NO: 1575464 - RNA, 19 nt, Artificial Sequence
  Description of Artificial Sequence: Synthetic oligonucleotide
  Antisense strand to SEQ ID NO: 1575463
ugacaucuacaggauucua

SEQ ID NO: 1575465 - RNA, 19 nt, Artificial Sequence
  Description of Artificial Sequence: Synthetic oligonucleotide
  Sense strand starting at position 76 of SEQ ID NO: 1560090
uguagaugucagcauucua

SEQ ID NO: 1575466 - RNA, 19 nt, Artificial Sequence
  Description of Artificial Sequence: Synthetic oligonucleotide
  Antisense strand to SEQ ID NO: 1575465
uagaaugcugacaucuaca

SEQ ID NO: 1575467 - RNA, 19 nt, Artificial Sequence
  Description of Artificial Sequence: Synthetic oligonucleotide
  Sense strand starting at position 125 of SEQ ID NO: 1560090
ucauuaguuccaggauucu

SEQ ID NO: 1575468 - RNA, 19 nt, Artificial Sequence
  Description of Artificial Sequence: Synthetic oligonucleotide
  Antisense strand to SEQ ID NO: 1575467
agaauccuggaacuaauga

SEQ ID NO: 1575469 - RNA, 19 nt, Artificial Sequence
  Description of Artificial Sequence: Synthetic oligonucleotide
  Sense strand starting at position 139 of SEQ ID NO: 1560090
auucuaugagccugguguu

SEQ ID NO: 1575470 - RNA, 19 nt, Artificial Sequence
  Description of Artificial Sequence: Synthetic oligonucleotide
  Antisense strand to SEQ ID NO: 1575469
aacaccaggcucauagaau

SEQ ID NO: 1575471 - RNA, 19 nt, Artificial Sequence
  Description of Artificial Sequence: Synthetic oligonucleotide
  Sense strand starting at position 140 of SEQ ID NO: 1560090
uucuaugagccugguguuu

SEQ ID NO: 1575472 - RNA, 19 nt, Artificial Sequence
  Description of Artificial Sequence: Synthetic oligonucleotide
  Antisense strand to SEQ ID NO: 1575471
aaacaccaggcucauagaa

SEQ ID NO: 1575473 - RNA, 19 nt, Artificial Sequence
  Description of Artificial Sequence: Synthetic oligonucleotide
  Sense strand starting at position 189 of SEQ ID NO: 1560090
auggaaaugucacugaggu

SEQ ID NO: 1575474 - RNA, 19 nt, Artificial Sequence
  Description of Artificial Sequence: Synthetic oligonucleotide
  Antisense strand to SEQ ID NO: 1575473
accucagugacauuuccau

SEQ ID NO: 1575475 - RNA, 19 nt, Artificial Sequence
  Description of Artificial Sequence: Synthetic oligonucleotide
  Sense strand starting at position 190 of SEQ ID NO: 1560090
uggaaaugucacugaggua

SEQ ID NO: 1575476 - RNA, 19 nt, Artificial Sequence
  Description of Artificial Sequence: Synthetic oligonucleotide
  Antisense strand to SEQ ID NO: 1575475
uaccucagugacauuucca

SEQ ID NO: 1575477 - RNA, 19 nt, Artificial Sequence
  Description of Artificial Sequence: Synthetic oligonucleotide
  Sense strand starting at position 212 of SEQ ID NO: 1560090
aaguucucaucugggaaau

SEQ ID NO: 1575478 - RNA, 19 nt, Artificial Sequence
  Description of Artificial Sequence: Synthetic oligonucleotide
  Antisense strand to SEQ ID NO: 1575477
auuucccagaugagaacuu

SEQ ID NO: 1575479 - RNA, 19 nt, Artificial Sequence
  Description of Artificial Sequence: Synthetic oligonucleotide
  Sense strand starting at position 213 of SEQ ID NO: 1560090
aguucucaucugggaaauu

SEQ ID NO: 1575480 - RNA, 19 nt, Artificial Sequence
  Description of Artificial Sequence: Synthetic oligonucleotide
  Antisense strand to SEQ ID NO: 1575479
aauuucccagaugagaacu

SEQ ID NO: 1575481 - RNA, 19 nt, Artificial Sequence
  Description of Artificial Sequence: Synthetic oligonucleotide
  Sense strand starting at position 214 of SEQ ID NO: 1560090
guucucaucugggaaauug

SEQ ID NO: 1575482 - RNA, 19 nt, Artificial Sequence
  Description of Artificial Sequence: Synthetic oligonucleotide
  Antisense strand to SEQ ID NO: 1575481
caauuucccagaugagaac

SEQ ID NO: 1575483 - RNA, 19 nt, Artificial Sequence
  Description of Artificial Sequence: Synthetic oligonucleotide
  Sense strand starting at position 226 of SEQ ID NO: 1560090
gaaauuguggcaugucugu

SEQ ID NO: 1575484 - RNA, 19 nt, Artificial Sequence
  Description of Artificial Sequence: Synthetic oligonucleotide
  Antisense strand to SEQ ID NO: 1575483
acagacaugccacaauuuc

SEQ ID NO: 1575485 - RNA, 19 nt, Artificial Sequence
  Description of Artificial Sequence: Synthetic oligonucleotide
  Sense strand starting at position 231 of SEQ ID NO: 1560090
uguggcaugucuguuguaa

SEQ ID NO: 1575486 - RNA, 19 nt, Artificial Sequence
  Description of Artificial Sequence: Synthetic oligonucleotide
  Antisense strand to SEQ ID NO: 1575485
uuacaacagacaugccaca

SEQ ID NO: 1575487 - RNA, 19 nt, Artificial Sequence
  Description of Artificial Sequence: Synthetic oligonucleotide
  Sense strand starting at position 350 of SEQ ID NO: 1560090
gaggauggcucugccucaa

SEQ ID NO: 1575488 - RNA, 19 nt, Artificial Sequence
  Description of Artificial Sequence: Synthetic oligonucleotide
  Antisense strand to SEQ ID NO: 1575487
uugaggcagagccauccuc

SEQ ID NO: 1575489 - RNA, 19 nt, Artificial Sequence
  Description of Artificial Sequence: Synthetic oligonucleotide
  Sense strand starting at position 394 of SEQ ID NO: 1560090
gcacucaacuugccagaaa

SEQ ID NO: 1575490 - RNA, 19 nt, Artificial Sequence
  Description of Artificial Sequence: Synthetic oligonucleotide
  Antisense strand to SEQ ID NO: 1575489
uuucuggcaaguugagugc

SEQ ID NO: 1575491 - RNA, 19 nt, Artificial Sequence
  Description of Artificial Sequence: Synthetic oligonucleotide
  Sense strand starting at position 499 of SEQ ID NO: 1560090
agaggaagguguuuaccau

SEQ ID NO: 1575492 - RNA, 19 nt, Artificial Sequence
  Description of Artificial Sequence: Synthetic oligonucleotide
  Antisense strand to SEQ ID NO: 1575491
augguaaacaccuuccucu

SEQ ID NO: 1575493 - RNA, 19 nt, Artificial Sequence
  Description of Artificial Sequence: Synthetic oligonucleotide
  Sense strand starting at position 500 of SEQ ID NO: 1560090
gaggaagguguuuaccauu

SEQ ID NO: 1575494 - RNA, 19 nt, Artificial Sequence
  Description of Artificial Sequence: Synthetic oligonucleotide
  Antisense strand to SEQ ID NO: 1575493
aaugguaaacaccuuccuc

SEQ ID NO: 1575495 - RNA, 19 nt, Artificial Sequence
  Description of Artificial Sequence: Synthetic oligonucleotide
  Sense strand starting at position 711 of SEQ ID NO: 1560090
agacuuacacagugugaga

SEQ ID NO: 1575496 - RNA, 19 nt, Artificial Sequence
  Description of Artificial Sequence: Synthetic oligonucleotide
  Antisense strand to SEQ ID NO: 1575495
ucucacacuguguaagucu

SEQ ID NO: 1575497 - RNA, 19 nt, Artificial Sequence
  Description of Artificial Sequence: Synthetic oligonucleotide
  Sense strand starting at position 739 of SEQ ID NO: 1560090
ggugacauuuccugaccuu

SEQ ID NO: 1575498 - RNA, 19 nt, Artificial Sequence
  Description of Artificial Sequence: Synthetic oligonucleotide
  Antisense strand to SEQ ID NO: 1575497
aaggucaggaaaugucacc

SEQ ID NO: 1575499 - RNA, 19 nt, Artificial Sequence
  Description of Artificial Sequence: Synthetic oligonucleotide
  Sense strand starting at position 902 of SEQ ID NO: 1560090
uggagaggcauucgcugaa

SEQ ID NO: 1575500 - RNA, 19 nt, Artificial Sequence
  Description of Artificial Sequence: Synthetic oligonucleotide
  Antisense strand to SEQ ID NO: 1575499
uucagcgaaugccucucca

SEQ ID NO: 1575501 - RNA, 19 nt, Artificial Sequence
  Description of Artificial Sequence: Synthetic oligonucleotide
  Sense strand starting at position 906 of SEQ ID NO: 1560090
gaggcauucgcugaaucca

SEQ ID NO: 1575502 - RNA, 19 nt, Artificial Sequence
  Description of Artificial Sequence: Synthetic oligonucleotide
  Antisense strand to SEQ ID NO: 1575501
uggauucagcgaaugccuc

SEQ ID NO: 1575503 - RNA, 19 nt, Artificial Sequence
  Description of Artificial Sequence: Synthetic oligonucleotide
  Sense strand starting at position 2479 of SEQ ID NO: 1560090
gggaaaggugagugugaga

SEQ ID NO: 1575504 - RNA, 19 nt, Artificial Sequence
  Description of Artificial Sequence: Synthetic oligonucleotide
  Antisense strand to SEQ ID NO: 1575503
ucucacacucaccuuuccc

SEQ ID NO: 1575505 - RNA, 19 nt, Artificial Sequence
  Description of Artificial Sequence: Synthetic oligonucleotide
  Sense strand starting at position 2704 of SEQ ID NO: 1560090
cguguuuccgcgucauucu

SEQ ID NO: 1575506 - RNA, 19 nt, Artificial Sequence
  Description of Artificial Sequence: Synthetic oligonucleotide
  Antisense strand to SEQ ID NO: 1575505
agaaugacgcggaaacacg

SEQ ID NO: 1575507 - RNA, 19 nt, Artificial Sequence
  Description of Artificial Sequence: Synthetic oligonucleotide
  Sense strand starting at position 2762 of SEQ ID NO: 1560090
gccugaauccuggguccca

SEQ ID NO: 1575508 - RNA, 19 nt, Artificial Sequence
  Description of Artificial Sequence: Synthetic oligonucleotide
  Antisense strand to SEQ ID NO: 1575507
ugggacccaggauucaggc

SEQ ID NO: 1575509 - RNA, 19 nt, Artificial Sequence
  Description of Artificial Sequence: Synthetic oligonucleotide
  Sense strand starting at position 2903 of SEQ ID NO: 1560090
caucuuugagggugacuca

SEQ ID NO: 1575510 - RNA, 19 nt, Artificial Sequence
  Description of Artificial Sequence: Synthetic oligonucleotide
  Antisense strand to SEQ ID NO: 1575509
ugagucacccucaaagaug

SEQ ID NO: 1575511 - RNA, 19 nt, Artificial Sequence
  Description of Artificial Sequence: Synthetic oligonucleotide
  Sense strand starting at position 2957 of SEQ ID NO: 1560090
guggguuucccugagccca

SEQ ID NO: 1575512 - RNA, 19 nt, Artificial Sequence
  Description of Artificial Sequence: Synthetic oligonucleotide
  Antisense strand to SEQ ID NO: 1575511
ugggcucagggaaacccac

SEQ ID NO: 1575513 - RNA, 19 nt, Artificial Sequence
  Description of Artificial Sequence: Synthetic oligonucleotide
  Sense strand starting at position 2993 of SEQ ID NO: 1560090
agaccugaugcgggaucau

SEQ ID NO: 1575514 - RNA, 19 nt, Artificial Sequence
  Description of Artificial Sequence: Synthetic oligonucleotide
  Antisense strand to SEQ ID NO: 1575513
augaucccgcaucaggucu

SEQ ID NO: 1575515 - RNA, 19 nt, Artificial Sequence
  Description of Artificial Sequence: Synthetic oligonucleotide
  Sense strand starting at position 3071 of SEQ ID NO: 1560090
gcccauuugucaggcaaac

SEQ ID NO: 1575516 - RNA, 19 nt, Artificial Sequence
  Description of Artificial Sequence: Synthetic oligonucleotide
  Antisense strand to SEQ ID NO: 1575515
guuugccugacaaaugggc

SEQ ID NO: 1575517 - RNA, 19 nt, Artificial Sequence
  Description of Artificial Sequence: Synthetic oligonucleotide
  Sense strand starting at position 3522 of SEQ ID NO: 1560090
cucccaguauccuuucuga

SEQ ID NO: 1575518 - RNA, 19 nt, Artificial Sequence
  Description of Artificial Sequence: Synthetic oligonucleotide
  Antisense strand to SEQ ID NO: 1575517
ucagaaaggauacugggag

SEQ ID NO: 1575519 - RNA, 19 nt, Artificial Sequence
  Description of Artificial Sequence: Synthetic oligonucleotide
  Sense strand starting at position 3566 of SEQ ID NO: 1560090
ccuugugucccaggaccau

SEQ ID NO: 1575520 - RNA, 19 nt, Artificial Sequence
  Description of Artificial Sequence: Synthetic oligonucleotide
  Antisense strand to SEQ ID NO: 1575519
augguccugggacacaagg

SEQ ID NO: 1575521 - RNA, 19 nt, Artificial Sequence
  Description of Artificial Sequence: Synthetic oligonucleotide
  Sense strand starting at position 3775 of SEQ ID NO: 1560090
ggacgauggcuccagcaau

SEQ ID NO: 1575522 - RNA, 19 nt, Artificial Sequence
  Description of Artificial Sequence: Synthetic oligonucleotide
  Antisense strand to SEQ ID NO: 1575521
auugcuggagccaucgucc

SEQ ID NO: 1575523 - RNA, 19 nt, Artificial Sequence
  Description of Artificial Sequence: Synthetic oligonucleotide
  Sense strand starting at position 3892 of SEQ ID NO: 1560090
uucuguagacuugggaaga

SEQ ID NO: 1575524 - RNA, 19 nt, Artificial Sequence
  Description of Artificial Sequence: Synthetic oligonucleotide
  Antisense strand to SEQ ID NO: 1575523
ucuucccaagucuacagaa

SEQ ID NO: 1575525 - RNA, 19 nt, Artificial Sequence
  Description of Artificial Sequence: Synthetic oligonucleotide
  Sense strand starting at position 3935 of SEQ ID NO: 1560090
ggcucacauucugugacuu

SEQ ID NO: 1575526 - RNA, 19 nt, Artificial Sequence
  Description of Artificial Sequence: Synthetic oligonucleotide
  Antisense strand to SEQ ID NO: 1575525
aagucacagaaugugagcc

SEQ ID NO: 1575527 - RNA, 19 nt, Artificial Sequence
  Description of Artificial Sequence: Synthetic oligonucleotide
  Sense strand starting at position 3936 of SEQ ID NO: 1560090
gcucacauucugugacuuu

SEQ ID NO: 1575528 - RNA, 19 nt, Artificial Sequence
  Description of Artificial Sequence: Synthetic oligonucleotide
  Antisense strand to SEQ ID NO: 1575527
aaagucacagaaugugagc

SEQ ID NO: 1575529 - RNA, 19 nt, Artificial Sequence
  Description of Artificial Sequence: Synthetic oligonucleotide
  Sense strand starting at position 3976 of SEQ ID NO: 1560090
uugaucugccuuuggaaua

SEQ ID NO: 1575530 - RNA, 19 nt, Artificial Sequence
  Description of Artificial Sequence: Synthetic oligonucleotide
  Antisense strand to SEQ ID NO: 1575529
uauuccaaaggcagaucaa

SEQ ID NO: 1575531 - RNA, 19 nt, Artificial Sequence
  Description of Artificial Sequence: Synthetic oligonucleotide
  Sense strand starting at position 51 of SEQ ID NO: 1560091
ugugucagcaaguaugaga

SEQ ID NO: 1575532 - RNA, 19 nt, Artificial Sequence
  Description of Artificial Sequence: Synthetic oligonucleotide
  Antisense strand to SEQ ID NO: 1575531
ucucauacuugcugacaca

SEQ ID NO: 1575533 - RNA, 19 nt, Artificial Sequence
  Description of Artificial Sequence: Synthetic oligonucleotide
  Sense strand starting at position 208 of SEQ ID NO: 1560091
cucucaaagcccugugaau

SEQ ID NO: 1575534 - RNA, 19 nt, Artificial Sequence
  Description of Artificial Sequence: Synthetic oligonucleotide
  Antisense strand to SEQ ID NO: 1575533
auucacagggcuuugagag

SEQ ID NO: 1575535 - RNA, 19 nt, Artificial Sequence
  Description of Artificial Sequence: Synthetic oligonucleotide
  Sense strand starting at position 210 of SEQ ID NO: 1560091
cucaaagcccugugaauua

SEQ ID NO: 1575536 - RNA, 19 nt, Artificial Sequence
  Description of Artificial Sequence: Synthetic oligonucleotide
  Antisense strand to SEQ ID NO: 1575535
uaauucacagggcuuugag

SEQ ID NO: 1575537 - RNA, 19 nt, Artificial Sequence
  Description of Artificial Sequence: Synthetic oligonucleotide
  Sense strand starting at position 295 of SEQ ID NO: 1560091
agaggcacucucugaucaa

SEQ ID NO: 1575538 - RNA, 19 nt, Artificial Sequence
  Description of Artificial Sequence: Synthetic oligonucleotide
  Antisense strand to SEQ ID NO: 1575537
uugaucagagagugccucu

SEQ ID NO: 1575539 - RNA, 19 nt, Artificial Sequence
  Description of Artificial Sequence: Synthetic oligonucleotide
  Sense strand starting at position 342 of SEQ ID NO: 1560091
ggaauaggcaucugauugu

SEQ ID NO: 1575540 - RNA, 19 nt, Artificial Sequence
  Description of Artificial Sequence: Synthetic oligonucleotide
  Antisense strand to SEQ ID NO: 1575539
acaaucagaugccuauucc

SEQ ID NO: 1575541 - RNA, 19 nt, Artificial Sequence
  Description of Artificial Sequence: Synthetic oligonucleotide
  Sense strand starting at position 348 of SEQ ID NO: 1560091
ggcaucugauugucacuga

SEQ ID NO: 1575542 - RNA, 19 nt, Artificial Sequence
  Description of Artificial Sequence: Synthetic oligonucleotide
  Antisense strand to SEQ ID NO: 1575541
ucagugacaaucagaugcc

SEQ ID NO: 1575543 - RNA, 19 nt, Artificial Sequence
  Description of Artificial Sequence: Synthetic oligonucleotide
  Sense strand starting at position 373 of SEQ ID NO: 1560091
acuguacugcacugucauu

SEQ ID NO: 1575544 - RNA, 19 nt, Artificial Sequence
  Description of Artificial Sequence: Synthetic oligonucleotide
  Antisense strand to SEQ ID NO: 1575543
aaugacagugcaguacagu

SEQ ID NO: 1575545 - RNA, 19 nt, Artificial Sequence
  Description of Artificial Sequence: Synthetic oligonucleotide
  Sense strand starting at position 383 of SEQ ID NO: 1560091
acugucauuuggcacaagu

SEQ ID NO: 1575546 - RNA, 19 nt, Artificial Sequence
  Description of Artificial Sequence: Synthetic oligonucleotide
  Antisense strand to SEQ ID NO: 1575545
acuugugccaaaugacagu

SEQ ID NO: 1575547 - RNA, 19 nt, Artificial Sequence
  Description of Artificial Sequence: Synthetic oligonucleotide
  Sense strand starting at position 469 of SEQ ID NO: 1560091
cagugcucuuggccugaaa

SEQ ID NO: 1575548 - RNA, 19 nt, Artificial Sequence
  Description of Artificial Sequence: Synthetic oligonucleotide
  Antisense strand to SEQ ID NO: 1575547
uuucaggccaagagcacug

SEQ ID NO: 1575549 - RNA, 19 nt, Artificial Sequence
  Description of Artificial Sequence: Synthetic oligonucleotide
  Sense strand starting at position 503 of SEQ ID NO: 1560091
ugaggcuucuaggcuugaa

SEQ ID NO: 1575550 - RNA, 19 nt, Artificial Sequence
  Description of Artificial Sequence: Synthetic oligonucleotide
  Antisense strand to SEQ ID NO: 1575549
uucaagccuagaagccuca

SEQ ID NO: 1575551 - RNA, 19 nt, Artificial Sequence
  Description of Artificial Sequence: Synthetic oligonucleotide
  Sense strand starting at position 650 of SEQ ID NO: 1560091
cgcguucuuccugaggaag

SEQ ID NO: 1575552 - RNA, 19 nt, Artificial Sequence
  Description of Artificial Sequence: Synthetic oligonucleotide
  Antisense strand to SEQ ID NO: 1575551
cuuccucaggaagaacgcg

SEQ ID NO: 1575553 - RNA, 19 nt, Artificial Sequence
  Description of Artificial Sequence: Synthetic oligonucleotide
  Sense strand starting at position 932 of SEQ ID NO: 1560091
gucuuucuagagcaacagu

SEQ ID NO: 1575554 - RNA, 19 nt, Artificial Sequence
  Description of Artificial Sequence: Synthetic oligonucleotide
  Antisense strand to SEQ ID NO: 1575553
acuguugcucuagaaagac

SEQ ID NO: 1575555 - RNA, 19 nt, Artificial Sequence
  Description of Artificial Sequence: Synthetic oligonucleotide
  Sense strand starting at position 949 of SEQ ID NO: 1560091
gucuuaacccacuaguaac

SEQ ID NO: 1575556 - RNA, 19 nt, Artificial Sequence
  Description of Artificial Sequence: Synthetic oligonucleotide
  Antisense strand to SEQ ID NO: 1575555
guuacuaguggguuaagac

SEQ ID NO: 1575557 - RNA, 19 nt, Artificial Sequence
  Description of Artificial Sequence: Synthetic oligonucleotide
  Sense strand starting at position 1226 of SEQ ID NO: 1560091
ucgggagucucaucuguag

SEQ ID NO: 1575558 - RNA, 19 nt, Artificial Sequence
  Description of Artificial Sequence: Synthetic oligonucleotide
  Antisense strand to SEQ ID NO: 1575557
cuacagaugagacucccga

SEQ ID NO: 1575559 - RNA, 19 nt, Artificial Sequence
  Description of Artificial Sequence: Synthetic oligonucleotide
  Sense strand starting at position 1228 of SEQ ID NO: 1560091
gggagucucaucuguagaa

SEQ ID NO: 1575560 - RNA, 19 nt, Artificial Sequence
  Description of Artificial Sequence: Synthetic oligonucleotide
  Antisense strand to SEQ ID NO: 1575559
uucuacagaugagacuccc

SEQ ID NO: 1575561 - RNA, 19 nt, Artificial Sequence
  Description of Artificial Sequence: Synthetic oligonucleotide
  Sense strand starting at position 1229 of SEQ ID NO: 1560091
ggagucucaucuguagaag

SEQ ID NO: 1575562 - RNA, 19 nt, Artificial Sequence
  Description of Artificial Sequence: Synthetic oligonucleotide
  Antisense strand to SEQ ID NO: 1575561
cuucuacagaugagacucc

SEQ ID NO: 1575563 - RNA, 19 nt, Artificial Sequence
  Description of Artificial Sequence: Synthetic oligonucleotide
  Sense strand starting at position 1230 of SEQ ID NO: 1560091
gagucucaucuguagaagu

SEQ ID NO: 1575564 - RNA, 19 nt, Artificial Sequence
  Description of Artificial Sequence: Synthetic oligonucleotide
  Antisense strand to SEQ ID NO: 1575563
acuucuacagaugagacuc

SEQ ID NO: 1575565 - RNA, 19 nt, Artificial Sequence
  Description of Artificial Sequence: Synthetic oligonucleotide
  Sense strand starting at position 1232 of SEQ ID NO: 1560091
gucucaucuguagaaguga

SEQ ID NO: 1575566 - RNA, 19 nt, Artificial Sequence
  Description of Artificial Sequence: Synthetic oligonucleotide
  Antisense strand to SEQ ID NO: 1575565
ucacuucuacagaugagac

SEQ ID NO: 1575567 - RNA, 19 nt, Artificial Sequence
  Description of Artificial Sequence: Synthetic oligonucleotide
  Sense strand starting at position 1377 of SEQ ID NO: 1560091
gcauccucucaggaccaaa

SEQ ID NO: 1575568 - RNA, 19 nt, Artificial Sequence
  Description of Artificial Sequence: Synthetic oligonucleotide
  Antisense strand to SEQ ID NO: 1575567
uuugguccugagaggaugc

SEQ ID NO: 1575569 - RNA, 19 nt, Artificial Sequence
  Description of Artificial Sequence: Synthetic oligonucleotide
  Sense strand starting at position 1579 of SEQ ID NO: 1560091
auacccauuuguggacuua

SEQ ID NO: 1575570 - RNA, 19 nt, Artificial Sequence
  Description of Artificial Sequence: Synthetic oligonucleotide
  Antisense strand to SEQ ID NO: 1575569
uaaguccacaaauggguau

SEQ ID NO: 1575571 - RNA, 19 nt, Artificial Sequence
  Description of Artificial Sequence: Synthetic oligonucleotide
  Sense strand starting at position 1625 of SEQ ID NO: 1560091
ucuggaaaccucuggugau

SEQ ID NO: 1575572 - RNA, 19 nt, Artificial Sequence
  Description of Artificial Sequence: Synthetic oligonucleotide
  Antisense strand to SEQ ID NO: 1575571
aucaccagagguuuccaga

SEQ ID NO: 1575573 - RNA, 19 nt, Artificial Sequence
  Description of Artificial Sequence: Synthetic oligonucleotide
  Sense strand starting at position 2256 of SEQ ID NO: 1560091
cugugagccgcgucacuau

SEQ ID NO: 1575574 - RNA, 19 nt, Artificial Sequence
  Description of Artificial Sequence: Synthetic oligonucleotide
  Antisense strand to SEQ ID NO: 1575573
auagugacgcggcucacag

SEQ ID NO: 1575575 - RNA, 19 nt, Artificial Sequence
  Description of Artificial Sequence: Synthetic oligonucleotide
  Sense strand starting at position 2432 of SEQ ID NO: 1560091
acggcgucgccguuagaga

SEQ ID NO: 1575576 - RNA, 19 nt, Artificial Sequence
  Description of Artificial Sequence: Synthetic oligonucleotide
  Antisense strand to SEQ ID NO: 1575575
ucucuaacggcgacgccgu

SEQ ID NO: 1575577 - RNA, 19 nt, Artificial Sequence
  Description of Artificial Sequence: Synthetic oligonucleotide
  Sense strand starting at position 2724 of SEQ ID NO: 1560091
ccgcucagggucugugaaa

SEQ ID NO: 1575578 - RNA, 19 nt, Artificial Sequence
  Description of Artificial Sequence: Synthetic oligonucleotide
  Antisense strand to SEQ ID NO: 1575577
uuucacagacccugagcgg

SEQ ID NO: 1575579 - RNA, 19 nt, Artificial Sequence
  Description of Artificial Sequence: Synthetic oligonucleotide
  Sense strand starting at position 2725 of SEQ ID NO: 1560091
cgcucagggucugugaaau

SEQ ID NO: 1575580 - RNA, 19 nt, Artificial Sequence
  Description of Artificial Sequence: Synthetic oligonucleotide
  Antisense strand to SEQ ID NO: 1575579
auuucacagacccugagcg

SEQ ID NO: 1575581 - RNA, 19 nt, Artificial Sequence
  Description of Artificial Sequence: Synthetic oligonucleotide
  Sense strand starting at position 2789 of SEQ ID NO: 1560091
ucauucgugcuauaagcau

SEQ ID NO: 1575582 - RNA, 19 nt, Artificial Sequence
  Description of Artificial Sequence: Synthetic oligonucleotide
  Antisense strand to SEQ ID NO: 1575581
augcuuauagcacgaauga

SEQ ID NO: 1575583 - RNA, 19 nt, Artificial Sequence
  Description of Artificial Sequence: Synthetic oligonucleotide
  Sense strand starting at position 2900 of SEQ ID NO: 1560091
uccuuauuccaguguucca

SEQ ID NO: 1575584 - RNA, 19 nt, Artificial Sequence
  Description of Artificial Sequence: Synthetic oligonucleotide
  Antisense strand to SEQ ID NO: 1575583
uggaacacuggaauaagga

SEQ ID NO: 1575585 - RNA, 19 nt, Artificial Sequence
  Description of Artificial Sequence: Synthetic oligonucleotide
  Sense strand starting at position 2937 of SEQ ID NO: 1560091
acugaaacuuuguuuauag

SEQ ID NO: 1575586 - RNA, 19 nt, Artificial Sequence
  Description of Artificial Sequence: Synthetic oligonucleotide
  Antisense strand to SEQ ID NO: 1575585
cuauaaacaaaguuucagu

SEQ ID NO: 1575587 - RNA, 19 nt, Artificial Sequence
  Description of Artificial Sequence: Synthetic oligonucleotide
  Sense strand starting at position 3034 of SEQ ID NO: 1560091
ccauguugaugguuaagag

SEQ ID NO: 1575588 - RNA, 19 nt, Artificial Sequence
  Description of Artificial Sequence: Synthetic oligonucleotide
  Antisense strand to SEQ ID NO: 1575587
cucuuaaccaucaacaugg

SEQ ID NO: 1575589 - RNA, 19 nt, Artificial Sequence
  Description of Artificial Sequence: Synthetic oligonucleotide
  Sense strand starting at position 3042 of SEQ ID NO: 1560091
augguuaagagaugggcaa

SEQ ID NO: 1575590 - RNA, 19 nt, Artificial Sequence
  Description of Artificial Sequence: Synthetic oligonucleotide
  Antisense strand to SEQ ID NO: 1575589
uugcccaucucuuaaccau

SEQ ID NO: 1575591 - RNA, 19 nt, Artificial Sequence
  Description of Artificial Sequence: Synthetic oligonucleotide
  Sense strand starting at position 3043 of SEQ ID NO: 1560091
ugguuaagagaugggcaaa

SEQ ID NO: 1575592 - RNA, 19 nt, Artificial Sequence
  Description of Artificial Sequence: Synthetic oligonucleotide
  Antisense strand to SEQ ID NO: 1575591
uuugcccaucucuuaacca

SEQ ID NO: 1575593 - RNA, 19 nt, Artificial Sequence
  Description of Artificial Sequence: Synthetic oligonucleotide
  Sense strand starting at position 3183 of SEQ ID NO: 1560091
ggguccuucccauagauuc

SEQ ID NO: 1575594 - RNA, 19 nt, Artificial Sequence
  Description of Artificial Sequence: Synthetic oligonucleotide
  Antisense strand to SEQ ID NO: 1575593
gaaucuaugggaaggaccc

SEQ ID NO: 1575595 - RNA, 19 nt, Artificial Sequence
  Description of Artificial Sequence: Synthetic oligonucleotide
  Sense strand starting at position 3193 of SEQ ID NO: 1560091
cauagauucugacuauggu

SEQ ID NO: 1575596 - RNA, 19 nt, Artificial Sequence
  Description of Artificial Sequence: Synthetic oligonucleotide
  Antisense strand to SEQ ID NO: 1575595
accauagucagaaucuaug

SEQ ID NO: 1575597 - RNA, 19 nt, Artificial Sequence
  Description of Artificial Sequence: Synthetic oligonucleotide
  Sense strand starting at position 3196 of SEQ ID NO: 1560091
agauucugacuauggucau

SEQ ID NO: 1575598 - RNA, 19 nt, Artificial Sequence
  Description of Artificial Sequence: Synthetic oligonucleotide
  Antisense strand to SEQ ID NO: 1575597
augaccauagucagaaucu

SEQ ID NO: 1575599 - RNA, 19 nt, Artificial Sequence
  Description of Artificial Sequence: Synthetic oligonucleotide
  Sense strand starting at position 3338 of SEQ ID NO: 1560091
acuuguuacucagucucaa

SEQ ID NO: 1575600 - RNA, 19 nt, Artificial Sequence
  Description of Artificial Sequence: Synthetic oligonucleotide
  Antisense strand to SEQ ID NO: 1575599
uugagacugaguaacaagu

SEQ ID NO: 1575601 - RNA, 19 nt, Artificial Sequence
  Description of Artificial Sequence: Synthetic oligonucleotide
  Sense strand starting at position 3461 of SEQ ID NO: 1560091
gguaacaagugaguucuua

SEQ ID NO: 1575602 - RNA, 19 nt, Artificial Sequence
  Description of Artificial Sequence: Synthetic oligonucleotide
  Antisense strand to SEQ ID NO: 1575601
uaagaacucacuuguuacc

SEQ ID NO: 1575603 - RNA, 19 nt, Artificial Sequence
  Description of Artificial Sequence: Synthetic oligonucleotide
  Sense strand starting at position 3465 of SEQ ID NO: 1560091
acaagugaguucuuauucu

SEQ ID NO: 1575604 - RNA, 19 nt, Artificial Sequence
  Description of Artificial Sequence: Synthetic oligonucleotide
  Antisense strand to SEQ ID NO: 1575603
agaauaagaacucacuugu

SEQ ID NO: 1575605 - RNA, 19 nt, Artificial Sequence
  Description of Artificial Sequence: Synthetic oligonucleotide
  Sense strand starting at position 3469 of SEQ ID NO: 1560091
gugaguucuuauucuguua

SEQ ID NO: 1575606 - RNA, 19 nt, Artificial Sequence
  Description of Artificial Sequence: Synthetic oligonucleotide
  Antisense strand to SEQ ID NO: 1575605
uaacagaauaagaacucac

SEQ ID NO: 1575607 - RNA, 19 nt, Artificial Sequence
  Description of Artificial Sequence: Synthetic oligonucleotide
  Sense strand starting at position 3472 of SEQ ID NO: 1560091
aguucuuauucuguuaguu

SEQ ID NO: 1575608 - RNA, 19 nt, Artificial Sequence
  Description of Artificial Sequence: Synthetic oligonucleotide
  Antisense strand to SEQ ID NO: 1575607
aacuaacagaauaagaacu

SEQ ID NO: 1575609 - RNA, 19 nt, Artificial Sequence
  Description of Artificial Sequence: Synthetic oligonucleotide
  Sense strand starting at position 3939 of SEQ ID NO: 1560091
gugggagguuucuuccaua

SEQ ID NO: 1575610 - RNA, 19 nt, Artificial Sequence
  Description of Artificial Sequence: Synthetic oligonucleotide
  Antisense strand to SEQ ID NO: 1575609
uauggaagaaaccucccac

SEQ ID NO: 1575611 - RNA, 19 nt, Artificial Sequence
  Description of Artificial Sequence: Synthetic oligonucleotide
  Sense strand starting at position 398 of SEQ ID NO: 1560092
gaggcugaccucugaaucu

SEQ ID NO: 1575612 - RNA, 19 nt, Artificial Sequence
  Description of Artificial Sequence: Synthetic oligonucleotide
  Antisense strand to SEQ ID NO: 1575611
agauucagaggucagccuc

SEQ ID NO: 1575613 - RNA, 19 nt, Artificial Sequence
  Description of Artificial Sequence: Synthetic oligonucleotide
  Sense strand starting at position 559 of SEQ ID NO: 1560092
agcagauccaguuaagagu

SEQ ID NO: 1575614 - RNA, 19 nt, Artificial Sequence
  Description of Artificial Sequence: Synthetic oligonucleotide
  Antisense strand to SEQ ID NO: 1575613
acucuuaacuggaucugcu

SEQ ID NO: 1575615 - RNA, 19 nt, Artificial Sequence
  Description of Artificial Sequence: Synthetic oligonucleotide
  Sense strand starting at position 568 of SEQ ID NO: 1560092
aguuaagagucagagacua

SEQ ID NO: 1575616 - RNA, 19 nt, Artificial Sequence
  Description of Artificial Sequence: Synthetic oligonucleotide
  Antisense strand to SEQ ID NO: 1575615
uagucucugacucuuaacu

SEQ ID NO: 1575617 - RNA, 19 nt, Artificial Sequence
  Description of Artificial Sequence: Synthetic oligonucleotide
  Sense strand starting at position 576 of SEQ ID NO: 1560092
gucagagacuacccaucau

SEQ ID NO: 1575618 - RNA, 19 nt, Artificial Sequence
  Description of Artificial Sequence: Synthetic oligonucleotide
  Antisense strand to SEQ ID NO: 1575617
augauggguagucucugac

SEQ ID NO: 1575619 - RNA, 19 nt, Artificial Sequence
  Description of Artificial Sequence: Synthetic oligonucleotide
  Sense strand starting at position 620 of SEQ ID NO: 1560092
aaaggaagaccugguucuu

SEQ ID NO: 1575620 - RNA, 19 nt, Artificial Sequence
  Description of Artificial Sequence: Synthetic oligonucleotide
  Antisense strand to SEQ ID NO: 1575619
aagaaccaggucuuccuuu

SEQ ID NO: 1575621 - RNA, 19 nt, Artificial Sequence
  Description of Artificial Sequence: Synthetic oligonucleotide
  Sense strand starting at position 677 of SEQ ID NO: 1560092
cccugauucuguccugaau

SEQ ID NO: 1575622 - RNA, 19 nt, Artificial Sequence
  Description of Artificial Sequence: Synthetic oligonucleotide
  Antisense strand to SEQ ID NO: 1575621
auucaggacagaaucaggg

SEQ ID NO: 1575623 - RNA, 19 nt, Artificial Sequence
  Description of Artificial Sequence: Synthetic oligonucleotide
  Sense strand starting at position 739 of SEQ ID NO: 1560092
aucagugcucuagaacuca

SEQ ID NO: 1575624 - RNA, 19 nt, Artificial Sequence
  Description of Artificial Sequence: Synthetic oligonucleotide
  Antisense strand to SEQ ID NO: 1575623
ugaguucuagagcacugau

SEQ ID NO: 1575625 - RNA, 19 nt, Artificial Sequence
  Description of Artificial Sequence: Synthetic oligonucleotide
  Sense strand starting at position 768 of SEQ ID NO: 1560092
uaguaagauugggaaauaa

SEQ ID NO: 1575626 - RNA, 19 nt, Artificial Sequence
  Description of Artificial Sequence: Synthetic oligonucleotide
  Antisense strand to SEQ ID NO: 1575625
uuauuucccaaucuuacua

SEQ ID NO: 1575627 - RNA, 19 nt, Artificial Sequence
  Description of Artificial Sequence: Synthetic oligonucleotide
  Sense strand starting at position 816 of SEQ ID NO: 1560092
agccuagaucugcgaucau

SEQ ID NO: 1575628 - RNA, 19 nt, Artificial Sequence
  Description of Artificial Sequence: Synthetic oligonucleotide
  Antisense strand to SEQ ID NO: 1575627
augaucgcagaucuaggcu

SEQ ID NO: 1575629 - RNA, 19 nt, Artificial Sequence
  Description of Artificial Sequence: Synthetic oligonucleotide
  Sense strand starting at position 820 of SEQ ID NO: 1560092
uagaucugcgaucauaaug

SEQ ID NO: 1575630 - RNA, 19 nt, Artificial Sequence
  Description of Artificial Sequence: Synthetic oligonucleotide
  Antisense strand to SEQ ID NO: 1575629
cauuaugaucgcagaucua

SEQ ID NO: 1575631 - RNA, 19 nt, Artificial Sequence
  Description of Artificial Sequence: Synthetic oligonucleotide
  Sense strand starting at position 842 of SEQ ID NO: 1560092
uaaauuguugcugggacuu

SEQ ID NO: 1575632 - RNA, 19 nt, Artificial Sequence
  Description of Artificial Sequence: Synthetic oligonucleotide
  Antisense strand to SEQ ID NO: 1575631
aagucccagcaacaauuua

SEQ ID NO: 1575633 - RNA, 19 nt, Artificial Sequence
  Description of Artificial Sequence: Synthetic oligonucleotide
  Sense strand starting at position 848 of SEQ ID NO: 1560092
guugcugggacuuauucuu

SEQ ID NO: 1575634 - RNA, 19 nt, Artificial Sequence
  Description of Artificial Sequence: Synthetic oligonucleotide
  Antisense strand to SEQ ID NO: 1575633
aagaauaagucccagcaac

SEQ ID NO: 1575635 - RNA, 19 nt, Artificial Sequence
  Description of Artificial Sequence: Synthetic oligonucleotide
  Sense strand starting at position 915 of SEQ ID NO: 1560092
ugggucucccucuaacuaa

SEQ ID NO: 1575636 - RNA, 19 nt, Artificial Sequence
  Description of Artificial Sequence: Synthetic oligonucleotide
  Antisense strand to SEQ ID NO: 1575635
uuaguuagagggagaccca

SEQ ID NO: 1575637 - RNA, 19 nt, Artificial Sequence
  Description of Artificial Sequence: Synthetic oligonucleotide
  Sense strand starting at position 1312 of SEQ ID NO: 1560092
ggacuucugccaggaaguc

SEQ ID NO: 1575638 - RNA, 19 nt, Artificial Sequence
  Description of Artificial Sequence: Synthetic oligonucleotide
  Antisense strand to SEQ ID NO: 1575637
gacuuccuggcagaagucc

SEQ ID NO: 1575639 - RNA, 19 nt, Artificial Sequence
  Description of Artificial Sequence: Synthetic oligonucleotide
  Sense strand starting at position 1736 of SEQ ID NO: 1560092
ggaccucuaaacgguaauu

SEQ ID NO: 1575640 - RNA, 19 nt, Artificial Sequence
  Description of Artificial Sequence: Synthetic oligonucleotide
  Antisense strand to SEQ ID NO: 1575639
aauuaccguuuagaggucc

SEQ ID NO: 1575641 - RNA, 19 nt, Artificial Sequence
  Description of Artificial Sequence: Synthetic oligonucleotide
  Sense strand starting at position 1746 of SEQ ID NO: 1560092
acgguaauuacgggcgaca

SEQ ID NO: 1575642 - RNA, 19 nt, Artificial Sequence
  Description of Artificial Sequence: Synthetic oligonucleotide
  Antisense strand to SEQ ID NO: 1575641
ugucgcccguaauuaccgu

SEQ ID NO: 1575643 - RNA, 19 nt, Artificial Sequence
  Description of Artificial Sequence: Synthetic oligonucleotide
  Sense strand starting at position 1748 of SEQ ID NO: 1560092
gguaauuacgggcgacaac

SEQ ID NO: 1575644 - RNA, 19 nt, Artificial Sequence
  Description of Artificial Sequence: Synthetic oligonucleotide
  Antisense strand to SEQ ID NO: 1575643
guugucgcccguaauuacc

SEQ ID NO: 1575645 - RNA, 19 nt, Artificial Sequence
  Description of Artificial Sequence: Synthetic oligonucleotide
  Sense strand starting at position 1824 of SEQ ID NO: 1560092
gcguuaccuccguccagaa

SEQ ID NO: 1575646 - RNA, 19 nt, Artificial Sequence
  Description of Artificial Sequence: Synthetic oligonucleotide
  Antisense strand to SEQ ID NO: 1575645
uucuggacggagguaacgc

SEQ ID NO: 1575647 - RNA, 19 nt, Artificial Sequence
  Description of Artificial Sequence: Synthetic oligonucleotide
  Sense strand starting at position 2072 of SEQ ID NO: 1560092
ccacuuugucauuggucua

SEQ ID NO: 1575648 - RNA, 19 nt, Artificial Sequence
  Description of Artificial Sequence: Synthetic oligonucleotide
  Antisense strand to SEQ ID NO: 1575647
uagaccaaugacaaagugg

SEQ ID NO: 1575649 - RNA, 19 nt, Artificial Sequence
  Description of Artificial Sequence: Synthetic oligonucleotide
  Sense strand starting at position 2079 of SEQ ID NO: 1560092
gucauuggucuaugcccau

SEQ ID NO: 1575650 - RNA, 19 nt, Artificial Sequence
  Description of Artificial Sequence: Synthetic oligonucleotide
  Antisense strand to SEQ ID NO: 1575649
augggcauagaccaaugac

SEQ ID NO: 1575651 - RNA, 19 nt, Artificial Sequence
  Description of Artificial Sequence: Synthetic oligonucleotide
  Sense strand starting at position 2662 of SEQ ID NO: 1560092
acuuaagcucucugaagug

SEQ ID NO: 1575652 - RNA, 19 nt, Artificial Sequence
  Description of Artificial Sequence: Synthetic oligonucleotide
  Antisense strand to SEQ ID NO: 1575651
cacuucagagagcuuaagu

SEQ ID NO: 1575653 - RNA, 19 nt, Artificial Sequence
  Description of Artificial Sequence: Synthetic oligonucleotide
  Sense strand starting at position 2667 of SEQ ID NO: 1560092
agcucucugaagugacaga

SEQ ID NO: 1575654 - RNA, 19 nt, Artificial Sequence
  Description of Artificial Sequence: Synthetic oligonucleotide
  Antisense strand to SEQ ID NO: 1575653
ucugucacuucagagagcu

SEQ ID NO: 1575655 - RNA, 19 nt, Artificial Sequence
  Description of Artificial Sequence: Synthetic oligonucleotide
  Sense strand starting at position 2683 of SEQ ID NO: 1560092
agacguuccugagcagaca

SEQ ID NO: 1575656 - RNA, 19 nt, Artificial Sequence
  Description of Artificial Sequence: Synthetic oligonucleotide
  Antisense strand to SEQ ID NO: 1575655
ugucugcucaggaacgucu

SEQ ID NO: 1575657 - RNA, 19 nt, Artificial Sequence
  Description of Artificial Sequence: Synthetic oligonucleotide
  Sense strand starting at position 2754 of SEQ ID NO: 1560092
uaaagcuguccugggacaa

SEQ ID NO: 1575658 - RNA, 19 nt, Artificial Sequence
  Description of Artificial Sequence: Synthetic oligonucleotide
  Antisense strand to SEQ ID NO: 1575657
uugucccaggacagcuuua

SEQ ID NO: 1575659 - RNA, 19 nt, Artificial Sequence
  Description of Artificial Sequence: Synthetic oligonucleotide
  Sense strand starting at position 2755 of SEQ ID NO: 1560092
aaagcuguccugggacaag

SEQ ID NO: 1575660 - RNA, 19 nt, Artificial Sequence
  Description of Artificial Sequence: Synthetic oligonucleotide
  Antisense strand to SEQ ID NO: 1575659
cuugucccaggacagcuuu

SEQ ID NO: 1575661 - RNA, 19 nt, Artificial Sequence
  Description of Artificial Sequence: Synthetic oligonucleotide
  Sense strand starting at position 2782 of SEQ ID NO: 1560092
aaggcuuaacgaugugacu

SEQ ID NO: 1575662 - RNA, 19 nt, Artificial Sequence
  Description of Artificial Sequence: Synthetic oligonucleotide
  Antisense strand to SEQ ID NO: 1575661
agucacaucguuaagccuu

SEQ ID NO: 1575663 - RNA, 19 nt, Artificial Sequence
  Description of Artificial Sequence: Synthetic oligonucleotide
  Sense strand starting at position 2784 of SEQ ID NO: 1560092
ggcuuaacgaugugacugu

SEQ ID NO: 1575664 - RNA, 19 nt, Artificial Sequence
  Description of Artificial Sequence: Synthetic oligonucleotide
  Antisense strand to SEQ ID NO: 1575663
acagucacaucguuaagcc

SEQ ID NO: 1575665 - RNA, 19 nt, Artificial Sequence
  Description of Artificial Sequence: Synthetic oligonucleotide
  Sense strand starting at position 2788 of SEQ ID NO: 1560092
uaacgaugugacugugacu

SEQ ID NO: 1575666 - RNA, 19 nt, Artificial Sequence
  Description of Artificial Sequence: Synthetic oligonucleotide
  Antisense strand to SEQ ID NO: 1575665
agucacagucacaucguua

SEQ ID NO: 1575667 - RNA, 19 nt, Artificial Sequence
  Description of Artificial Sequence: Synthetic oligonucleotide
  Sense strand starting at position 2816 of SEQ ID NO: 1560092
gggauaggguuauuaccca

SEQ ID NO: 1575668 - RNA, 19 nt, Artificial Sequence
  Description of Artificial Sequence: Synthetic oligonucleotide
  Antisense strand to SEQ ID NO: 1575667
uggguaauaacccuauccc

SEQ ID NO: 1575669 - RNA, 19 nt, Artificial Sequence
  Description of Artificial Sequence: Synthetic oligonucleotide
  Sense strand starting at position 2820 of SEQ ID NO: 1560092
uaggguuauuacccagauu

SEQ ID NO: 1575670 - RNA, 19 nt, Artificial Sequence
  Description of Artificial Sequence: Synthetic oligonucleotide
  Antisense strand to SEQ ID NO: 1575669
aaucuggguaauaacccua

SEQ ID NO: 1575671 - RNA, 19 nt, Artificial Sequence
  Description of Artificial Sequence: Synthetic oligonucleotide
  Sense strand starting at position 2823 of SEQ ID NO: 1560092
gguuauuacccagauugca

SEQ ID NO: 1575672 - RNA, 19 nt, Artificial Sequence
  Description of Artificial Sequence: Synthetic oligonucleotide
  Antisense strand to SEQ ID NO: 1575671
ugcaaucuggguaauaacc

SEQ ID NO: 1575673 - RNA, 19 nt, Artificial Sequence
  Description of Artificial Sequence: Synthetic oligonucleotide
  Sense strand starting at position 2858 of SEQ ID NO: 1560092
ccucucaaccgguaaauga

SEQ ID NO: 1575674 - RNA, 19 nt, Artificial Sequence
  Description of Artificial Sequence: Synthetic oligonucleotide
  Antisense strand to SEQ ID NO: 1575673
ucauuuaccgguugagagg

SEQ ID NO: 1575675 - RNA, 19 nt, Artificial Sequence
  Description of Artificial Sequence: Synthetic oligonucleotide
  Sense strand starting at position 3133 of SEQ ID NO: 1560092
uuccaaacucugggcaaau

SEQ ID NO: 1575676 - RNA, 19 nt, Artificial Sequence
  Description of Artificial Sequence: Synthetic oligonucleotide
  Antisense strand to SEQ ID NO: 1575675
auuugcccagaguuuggaa

SEQ ID NO: 1575677 - RNA, 19 nt, Artificial Sequence
  Description of Artificial Sequence: Synthetic oligonucleotide
  Sense strand starting at position 3134 of SEQ ID NO: 1560092
uccaaacucugggcaaaua

SEQ ID NO: 1575678 - RNA, 19 nt, Artificial Sequence
  Description of Artificial Sequence: Synthetic oligonucleotide
  Antisense strand to SEQ ID NO: 1575677
uauuugcccagaguuugga

SEQ ID NO: 1575679 - RNA, 19 nt, Artificial Sequence
  Description of Artificial Sequence: Synthetic oligonucleotide
  Sense strand starting at position 3171 of SEQ ID NO: 1560092
gcgggaguggacuauggaa

SEQ ID NO: 1575680 - RNA, 19 nt, Artificial Sequence
  Description of Artificial Sequence: Synthetic oligonucleotide
  Antisense strand to SEQ ID NO: 1575679
uuccauaguccacucccgc

SEQ ID NO: 1575681 - RNA, 19 nt, Artificial Sequence
  Description of Artificial Sequence: Synthetic oligonucleotide
  Sense strand starting at position 3238 of SEQ ID NO: 1560092
cuggcuaaugguugugacu

SEQ ID NO: 1575682 - RNA, 19 nt, Artificial Sequence
  Description of Artificial Sequence: Synthetic oligonucleotide
  Antisense strand to SEQ ID NO: 1575681
agucacaaccauuagccag

SEQ ID NO: 1575683 - RNA, 19 nt, Artificial Sequence
  Description of Artificial Sequence: Synthetic oligonucleotide
  Sense strand starting at position 3316 of SEQ ID NO: 1560092
uggcaagggucucugguua

SEQ ID NO: 1575684 - RNA, 19 nt, Artificial Sequence
  Description of Artificial Sequence: Synthetic oligonucleotide
  Antisense strand to SEQ ID NO: 1575683
uaaccagagacccuugcca

SEQ ID NO: 1575685 - RNA, 19 nt, Artificial Sequence
  Description of Artificial Sequence: Synthetic oligonucleotide
  Sense strand starting at position 3701 of SEQ ID NO: 1560092
ccacuuccucuagguagua

SEQ ID NO: 1575686 - RNA, 19 nt, Artificial Sequence
  Description of Artificial Sequence: Synthetic oligonucleotide
  Antisense strand to SEQ ID NO: 1575685
uacuaccuagaggaagugg

SEQ ID NO: 1575687 - RNA, 19 nt, Artificial Sequence
  Description of Artificial Sequence: Synthetic oligonucleotide
  Sense strand starting at position 3915 of SEQ ID NO: 1560092
aaguacuugcugcaugaua

SEQ ID NO: 1575688 - RNA, 19 nt, Artificial Sequence
  Description of Artificial Sequence: Synthetic oligonucleotide
  Antisense strand to SEQ ID NO: 1575687
uaucaugcagcaaguacuu

SEQ ID NO: 1575689 - RNA, 19 nt, Artificial Sequence
  Description of Artificial Sequence: Synthetic oligonucleotide
  Sense strand starting at position 3917 of SEQ ID NO: 1560092
guacuugcugcaugauaga

SEQ ID NO: 1575690 - RNA, 19 nt, Artificial Sequence
  Description of Artificial Sequence: Synthetic oligonucleotide
  Antisense strand to SEQ ID NO: 1575689
ucuaucaugcagcaaguac

SEQ ID NO: 1575691 - RNA, 19 nt, Artificial Sequence
  Description of Artificial Sequence: Synthetic oligonucleotide
  Sense strand starting at position 539 of SEQ ID NO: 1560093
ggcccuugauccucaaaug

SEQ ID NO: 1575692 - RNA, 19 nt, Artificial Sequence
  Description of Artificial Sequence: Synthetic oligonucleotide
  Antisense strand to SEQ ID NO: 1575691
cauuugaggaucaagggcc

SEQ ID NO: 1575693 - RNA, 19 nt, Artificial Sequence
  Description of Artificial Sequence: Synthetic oligonucleotide
  Sense strand starting at position 560 of SEQ ID NO: 1560093
cuugacuagugucuauuaa

SEQ ID NO: 1575694 - RNA, 19 nt, Artificial Sequence
  Description of Artificial Sequence: Synthetic oligonucleotide
  Antisense strand to SEQ ID NO: 1575693
uuaauagacacuagucaag

SEQ ID NO: 1575695 - RNA, 19 nt, Artificial Sequence
  Description of Artificial Sequence: Synthetic oligonucleotide
  Sense strand starting at position 561 of SEQ ID NO: 1560093
uugacuagugucuauuaag

SEQ ID NO: 1575696 - RNA, 19 nt, Artificial Sequence
  Description of Artificial Sequence: Synthetic oligonucleotide
  Antisense strand to SEQ ID NO: 1575695
cuuaauagacacuagucaa

SEQ ID NO: 1575697 - RNA, 19 nt, Artificial Sequence
  Description of Artificial Sequence: Synthetic oligonucleotide
  Sense strand starting at position 589 of SEQ ID NO: 1560093
uuugguaaugccuacuaau

SEQ ID NO: 1575698 - RNA, 19 nt, Artificial Sequence
  Description of Artificial Sequence: Synthetic oligonucleotide
  Antisense strand to SEQ ID NO: 1575697
auuaguaggcauuaccaaa

SEQ ID NO: 1575699 - RNA, 19 nt, Artificial Sequence
  Description of Artificial Sequence: Synthetic oligonucleotide
  Sense strand starting at position 698 of SEQ ID NO: 1560093
cugaauaugucuccuugga

SEQ ID NO: 1575700 - RNA, 19 nt, Artificial Sequence
  Description of Artificial Sequence: Synthetic oligonucleotide
  Antisense strand to SEQ ID NO: 1575699
uccaaggagacauauucag

SEQ ID NO: 1575701 - RNA, 19 nt, Artificial Sequence
  Description of Artificial Sequence: Synthetic oligonucleotide
  Sense strand starting at position 700 of SEQ ID NO: 1560093
gaauaugucuccuuggacu

SEQ ID NO: 1575702 - RNA, 19 nt, Artificial Sequence
  Description of Artificial Sequence: Synthetic oligonucleotide
  Antisense strand to SEQ ID NO: 1575701
aguccaaggagacauauuc

SEQ ID NO: 1575703 - RNA, 19 nt, Artificial Sequence
  Description of Artificial Sequence: Synthetic oligonucleotide
  Sense strand starting at position 723 of SEQ ID NO: 1560093
gggaccuaauaccaauaaa

SEQ ID NO: 1575704 - RNA, 19 nt, Artificial Sequence
  Description of Artificial Sequence: Synthetic oligonucleotide
  Antisense strand to SEQ ID NO: 1575703
uuuauugguauuagguccc

SEQ ID NO: 1575705 - RNA, 19 nt, Artificial Sequence
  Description of Artificial Sequence: Synthetic oligonucleotide
  Sense strand starting at position 1058 of SEQ ID NO: 1560093
aggaaucuuuggcaauaaa

SEQ ID NO: 1575706 - RNA, 19 nt, Artificial Sequence
  Description of Artificial Sequence: Synthetic oligonucleotide
  Antisense strand to SEQ ID NO: 1575705
uuuauugccaaagauuccu

SEQ ID NO: 1575707 - RNA, 19 nt, Artificial Sequence
  Description of Artificial Sequence: Synthetic oligonucleotide
  Sense strand starting at position 1503 of SEQ ID NO: 1560093
gagguugcuauggaaaugu

SEQ ID NO: 1575708 - RNA, 19 nt, Artificial Sequence
  Description of Artificial Sequence: Synthetic oligonucleotide
  Antisense strand to SEQ ID NO: 1575707
acauuuccauagcaaccuc

SEQ ID NO: 1575709 - RNA, 19 nt, Artificial Sequence
  Description of Artificial Sequence: Synthetic oligonucleotide
  Sense strand starting at position 1518 of SEQ ID NO: 1560093
auguaacauuaggcucaau

SEQ ID NO: 1575710 - RNA, 19 nt, Artificial Sequence
  Description of Artificial Sequence: Synthetic oligonucleotide
  Antisense strand to SEQ ID NO: 1575709
auugagccuaauguuacau

SEQ ID NO: 1575711 - RNA, 19 nt, Artificial Sequence
  Description of Artificial Sequence: Synthetic oligonucleotide
  Sense strand starting at position 1584 of SEQ ID NO: 1560093
aaacuugcccgacgaaagu

SEQ ID NO: 1575712 - RNA, 19 nt, Artificial Sequence
  Description of Artificial Sequence: Synthetic oligonucleotide
  Antisense strand to SEQ ID NO: 1575711
acuuucgucgggcaaguuu

SEQ ID NO: 1575713 - RNA, 19 nt, Artificial Sequence
  Description of Artificial Sequence: Synthetic oligonucleotide
  Sense strand starting at position 1609 of SEQ ID NO: 1560093
ugcccaaaucgggagucau

SEQ ID NO: 1575714 - RNA, 19 nt, Artificial Sequence
  Description of Artificial Sequence: Synthetic oligonucleotide
  Antisense strand to SEQ ID NO: 1575713
augacucccgauuugggca

SEQ ID NO: 1575715 - RNA, 19 nt, Artificial Sequence
  Description of Artificial Sequence: Synthetic oligonucleotide
  Sense strand starting at position 1621 of SEQ ID NO: 1560093
gagucauugguggacugca

SEQ ID NO: 1575716 - RNA, 19 nt, Artificial Sequence
  Description of Artificial Sequence: Synthetic oligonucleotide
  Antisense strand to SEQ ID NO: 1575715
ugcaguccaccaaugacuc

SEQ ID NO: 1575717 - RNA, 19 nt, Artificial Sequence
  Description of Artificial Sequence: Synthetic oligonucleotide
  Sense strand starting at position 1673 of SEQ ID NO: 1560093
ggaaauaacaccgguuaga

SEQ ID NO: 1575718 - RNA, 19 nt, Artificial Sequence
  Description of Artificial Sequence: Synthetic oligonucleotide
  Antisense strand to SEQ ID NO: 1575717
ucuaaccgguguuauuucc

SEQ ID NO: 1575719 - RNA, 19 nt, Artificial Sequence
  Description of Artificial Sequence: Synthetic oligonucleotide
  Sense strand starting at position 1682 of SEQ ID NO: 1560093
accgguuagaggugauaau

SEQ ID NO: 1575720 - RNA, 19 nt, Artificial Sequence
  Description of Artificial Sequence: Synthetic oligonucleotide
  Antisense strand to SEQ ID NO: 1575719
auuaucaccucuaaccggu

SEQ ID NO: 1575721 - RNA, 19 nt, Artificial Sequence
  Description of Artificial Sequence: Synthetic oligonucleotide
  Sense strand starting at position 1683 of SEQ ID NO: 1560093
ccgguuagaggugauaaug

SEQ ID NO: 1575722 - RNA, 19 nt, Artificial Sequence
  Description of Artificial Sequence: Synthetic oligonucleotide
  Antisense strand to SEQ ID NO: 1575721
cauuaucaccucuaaccgg

SEQ ID NO: 1575723 - RNA, 19 nt, Artificial Sequence
  Description of Artificial Sequence: Synthetic oligonucleotide
  Sense strand starting at position 1689 of SEQ ID NO: 1560093
agaggugauaaugguuaau

SEQ ID NO: 1575724 - RNA, 19 nt, Artificial Sequence
  Description of Artificial Sequence: Synthetic oligonucleotide
  Antisense strand to SEQ ID NO: 1575723
auuaaccauuaucaccucu

SEQ ID NO: 1575725 - RNA, 19 nt, Artificial Sequence
  Description of Artificial Sequence: Synthetic oligonucleotide
  Sense strand starting at position 1698 of SEQ ID NO: 1560093
aaugguuaauuugggcuaa

SEQ ID NO: 1575726 - RNA, 19 nt, Artificial Sequence
  Description of Artificial Sequence: Synthetic oligonucleotide
  Antisense strand to SEQ ID NO: 1575725
uuagcccaaauuaaccauu

SEQ ID NO: 1575727 - RNA, 19 nt, Artificial Sequence
  Description of Artificial Sequence: Synthetic oligonucleotide
  Sense strand starting at position 1852 of SEQ ID NO: 1560093
ucuagaaauuccucuugga

SEQ ID NO: 1575728 - RNA, 19 nt, Artificial Sequence
  Description of Artificial Sequence: Synthetic oligonucleotide
  Antisense strand to SEQ ID NO: 1575727
uccaagaggaauuucuaga

SEQ ID NO: 1575729 - RNA, 19 nt, Artificial Sequence
  Description of Artificial Sequence: Synthetic oligonucleotide
  Sense strand starting at position 2029 of SEQ ID NO: 1560093
gucacaacucgcgauuaug

SEQ ID NO: 1575730 - RNA, 19 nt, Artificial Sequence
  Description of Artificial Sequence: Synthetic oligonucleotide
  Antisense strand to SEQ ID NO: 1575729
cauaaucgcgaguugugac

SEQ ID NO: 1575731 - RNA, 19 nt, Artificial Sequence
  Description of Artificial Sequence: Synthetic oligonucleotide
  Sense strand starting at position 2039 of SEQ ID NO: 1560093
gcgauuaugaccugagggu

SEQ ID NO: 1575732 - RNA, 19 nt, Artificial Sequence
  Description of Artificial Sequence: Synthetic oligonucleotide
  Antisense strand to SEQ ID NO: 1575731
acccucaggucauaaucgc

SEQ ID NO: 1575733 - RNA, 19 nt, Artificial Sequence
  Description of Artificial Sequence: Synthetic oligonucleotide
  Sense strand starting at position 2498 of SEQ ID NO: 1560093
uugguuuguugauuuguaa

SEQ ID NO: 1575734 - RNA, 19 nt, Artificial Sequence
  Description of Artificial Sequence: Synthetic oligonucleotide
  Antisense strand to SEQ ID NO: 1575733
uuacaaaucaacaaaccaa

SEQ ID NO: 1575735 - RNA, 19 nt, Artificial Sequence
  Description of Artificial Sequence: Synthetic oligonucleotide
  Sense strand starting at position 2505 of SEQ ID NO: 1560093
guugauuuguaacaacuuu

SEQ ID NO: 1575736 - RNA, 19 nt, Artificial Sequence
  Description of Artificial Sequence: Synthetic oligonucleotide
  Antisense strand to SEQ ID NO: 1575735
aaaguuguuacaaaucaac

SEQ ID NO: 1575737 - RNA, 19 nt, Artificial Sequence
  Description of Artificial Sequence: Synthetic oligonucleotide
  Sense strand starting at position 2566 of SEQ ID NO: 1560093
gcugacgacuccguuauuu

SEQ ID NO: 1575738 - RNA, 19 nt, Artificial Sequence
  Description of Artificial Sequence: Synthetic oligonucleotide
  Antisense strand to SEQ ID NO: 1575737
aaauaacggagucgucagc

SEQ ID NO: 1575739 - RNA, 19 nt, Artificial Sequence
  Description of Artificial Sequence: Synthetic oligonucleotide
  Sense strand starting at position 3058 of SEQ ID NO: 1560093
ucugcuuucugaguuuauu

SEQ ID NO: 1575740 - RNA, 19 nt, Artificial Sequence
  Description of Artificial Sequence: Synthetic oligonucleotide
  Antisense strand to SEQ ID NO: 1575739
aauaaacucagaaagcaga

SEQ ID NO: 1575741 - RNA, 19 nt, Artificial Sequence
  Description of Artificial Sequence: Synthetic oligonucleotide
  Sense strand starting at position 3125 of SEQ ID NO: 1560093
ggaguuuagugucuggcua

SEQ ID NO: 1575742 - RNA, 19 nt, Artificial Sequence
  Description of Artificial Sequence: Synthetic oligonucleotide
  Antisense strand to SEQ ID NO: 1575741
uagccagacacuaaacucc

SEQ ID NO: 1575743 - RNA, 19 nt, Artificial Sequence
  Description of Artificial Sequence: Synthetic oligonucleotide
  Sense strand starting at position 3126 of SEQ ID NO: 1560093
gaguuuagugucuggcuac

SEQ ID NO: 1575744 - RNA, 19 nt, Artificial Sequence
  Description of Artificial Sequence: Synthetic oligonucleotide
  Antisense strand to SEQ ID NO: 1575743
guagccagacacuaaacuc

SEQ ID NO: 1575745 - RNA, 19 nt, Artificial Sequence
  Description of Artificial Sequence: Synthetic oligonucleotide
  Sense strand starting at position 3129 of SEQ ID NO: 1560093
uuuagugucuggcuacuuu

SEQ ID NO: 1575746 - RNA, 19 nt, Artificial Sequence
  Description of Artificial Sequence: Synthetic oligonucleotide
  Antisense strand to SEQ ID NO: 1575745
aaaguagccagacacuaaa

SEQ ID NO: 1575747 - RNA, 19 nt, Artificial Sequence
  Description of Artificial Sequence: Synthetic oligonucleotide
  Sense strand starting at position 3278 of SEQ ID NO: 1560093
cguccugaguauuugggau

SEQ ID NO: 1575748 - RNA, 19 nt, Artificial Sequence
  Description of Artificial Sequence: Synthetic oligonucleotide
  Antisense strand to SEQ ID NO: 1575747
aucccaaauacucaggacg

SEQ ID NO: 1575749 - RNA, 19 nt, Artificial Sequence
  Description of Artificial Sequence: Synthetic oligonucleotide
  Sense strand starting at position 3465 of SEQ ID NO: 1560093
uucccuuagcgugauguau

SEQ ID NO: 1575750 - RNA, 19 nt, Artificial Sequence
  Description of Artificial Sequence: Synthetic oligonucleotide
  Antisense strand to SEQ ID NO: 1575749
auacaucacgcuaagggaa

SEQ ID NO: 1575751 - RNA, 19 nt, Artificial Sequence
  Description of Artificial Sequence: Synthetic oligonucleotide
  Sense strand starting at position 3469 of SEQ ID NO: 1560093
cuuagcgugauguauuuga

SEQ ID NO: 1575752 - RNA, 19 nt, Artificial Sequence
  Description of Artificial Sequence: Synthetic oligonucleotide
  Antisense strand to SEQ ID NO: 1575751
ucaaauacaucacgcuaag

SEQ ID NO: 1575753 - RNA, 19 nt, Artificial Sequence
  Description of Artificial Sequence: Synthetic oligonucleotide
  Sense strand starting at position 3476 of SEQ ID NO: 1560093
ugauguauuugagauuccu

SEQ ID NO: 1575754 - RNA, 19 nt, Artificial Sequence
  Description of Artificial Sequence: Synthetic oligonucleotide
  Antisense strand to SEQ ID NO: 1575753
aggaaucucaaauacauca

SEQ ID NO: 1575755 - RNA, 19 nt, Artificial Sequence
  Description of Artificial Sequence: Synthetic oligonucleotide
  Sense strand starting at position 3487 of SEQ ID NO: 1560093
agauuccugcgugcuguua

SEQ ID NO: 1575756 - RNA, 19 nt, Artificial Sequence
  Description of Artificial Sequence: Synthetic oligonucleotide
  Antisense strand to SEQ ID NO: 1575755
uaacagcacgcaggaaucu

SEQ ID NO: 1575757 - RNA, 19 nt, Artificial Sequence
  Description of Artificial Sequence: Synthetic oligonucleotide
  Sense strand starting at position 3488 of SEQ ID NO: 1560093
gauuccugcgugcuguuau

SEQ ID NO: 1575758 - RNA, 19 nt, Artificial Sequence
  Description of Artificial Sequence: Synthetic oligonucleotide
  Antisense strand to SEQ ID NO: 1575757
auaacagcacgcaggaauc

SEQ ID NO: 1575759 - RNA, 19 nt, Artificial Sequence
  Description of Artificial Sequence: Synthetic oligonucleotide
  Sense strand starting at position 3491 of SEQ ID NO: 1560093
uccugcgugcuguuauauu

SEQ ID NO: 1575760 - RNA, 19 nt, Artificial Sequence
  Description of Artificial Sequence: Synthetic oligonucleotide
  Antisense strand to SEQ ID NO: 1575759
aauauaacagcacgcagga

SEQ ID NO: 1575761 - RNA, 19 nt, Artificial Sequence
  Description of Artificial Sequence: Synthetic oligonucleotide
  Sense strand starting at position 3496 of SEQ ID NO: 1560093
cgugcuguuauauuaguau

SEQ ID NO: 1575762 - RNA, 19 nt, Artificial Sequence
  Description of Artificial Sequence: Synthetic oligonucleotide
  Antisense strand to SEQ ID NO: 1575761
auacuaauauaacagcacg

SEQ ID NO: 1575763 - RNA, 19 nt, Artificial Sequence
  Description of Artificial Sequence: Synthetic oligonucleotide
  Sense strand starting at position 3526 of SEQ ID NO: 1560093
auugcugaacuguauuaca

SEQ ID NO: 1575764 - RNA, 19 nt, Artificial Sequence
  Description of Artificial Sequence: Synthetic oligonucleotide
  Antisense strand to SEQ ID NO: 1575763
uguaauacaguucagcaau

SEQ ID NO: 1575765 - RNA, 19 nt, Artificial Sequence
  Description of Artificial Sequence: Synthetic oligonucleotide
  Sense strand starting at position 3552 of SEQ ID NO: 1560093
gauggaccauaguuuguaa

SEQ ID NO: 1575766 - RNA, 19 nt, Artificial Sequence
  Description of Artificial Sequence: Synthetic oligonucleotide
  Antisense strand to SEQ ID NO: 1575765
uuacaaacuaugguccauc

SEQ ID NO: 1575767 - RNA, 19 nt, Artificial Sequence
  Description of Artificial Sequence: Synthetic oligonucleotide
  Sense strand starting at position 3610 of SEQ ID NO: 1560093
uuuagucuacuaggaguaa

SEQ ID NO: 1575768 - RNA, 19 nt, Artificial Sequence
  Description of Artificial Sequence: Synthetic oligonucleotide
  Antisense strand to SEQ ID NO: 1575767
uuacuccuaguagacuaaa

SEQ ID NO: 1575769 - RNA, 19 nt, Artificial Sequence
  Description of Artificial Sequence: Synthetic oligonucleotide
  Sense strand starting at position 3657 of SEQ ID NO: 1560093
gugggauuguaaucucagc

SEQ ID NO: 1575770 - RNA, 19 nt, Artificial Sequence
  Description of Artificial Sequence: Synthetic oligonucleotide
  Antisense strand to SEQ ID NO: 1575769
gcugagauuacaaucccac

SEQ ID NO: 1575771 - RNA, 19 nt, Artificial Sequence
  Description of Artificial Sequence: Synthetic oligonucleotide
  Sense strand starting at position 197 of SEQ ID NO: 1560094
gcgagcaaccguuucgcau

SEQ ID NO: 1575772 - RNA, 19 nt, Artificial Sequence
  Description of Artificial Sequence: Synthetic oligonucleotide
  Antisense strand to SEQ ID NO: 1575771
augcgaaacgguugcucgc

SEQ ID NO: 1575773 - RNA, 19 nt, Artificial Sequence
  Description of Artificial Sequence: Synthetic oligonucleotide
  Sense strand starting at position 228 of SEQ ID NO: 1560094
ccgugccacgcgaagaauu

SEQ ID NO: 1575774 - RNA, 19 nt, Artificial Sequence
  Description of Artificial Sequence: Synthetic oligonucleotide
  Antisense strand to SEQ ID NO: 1575773
aauucuucgcguggcacgg

SEQ ID NO: 1575775 - RNA, 19 nt, Artificial Sequence
  Description of Artificial Sequence: Synthetic oligonucleotide
  Sense strand starting at position 238 of SEQ ID NO: 1560094
cgaagaauucuguggucac

SEQ ID NO: 1575776 - RNA, 19 nt, Artificial Sequence
  Description of Artificial Sequence: Synthetic oligonucleotide
  Antisense strand to SEQ ID NO: 1575775
gugaccacagaauucuucg

SEQ ID NO: 1575777 - RNA, 19 nt, Artificial Sequence
  Description of Artificial Sequence: Synthetic oligonucleotide
  Sense strand starting at position 241 of SEQ ID NO: 1560094
agaauucuguggucacuac

SEQ ID NO: 1575778 - RNA, 19 nt, Artificial Sequence
  Description of Artificial Sequence: Synthetic oligonucleotide
  Antisense strand to SEQ ID NO: 1575777
guagugaccacagaauucu

SEQ ID NO: 1575779 - RNA, 19 nt, Artificial Sequence
  Description of Artificial Sequence: Synthetic oligonucleotide
  Sense strand starting at position 242 of SEQ ID NO: 1560094
gaauucuguggucacuaca

SEQ ID NO: 1575780 - RNA, 19 nt, Artificial Sequence
  Description of Artificial Sequence: Synthetic oligonucleotide
  Antisense strand to SEQ ID NO: 1575779
uguagugaccacagaauuc

SEQ ID NO: 1575781 - RNA, 19 nt, Artificial Sequence
  Description of Artificial Sequence: Synthetic oligonucleotide
  Sense strand starting at position 315 of SEQ ID NO: 1560094
ggagcagugcccuacacau

SEQ ID NO: 1575782 - RNA, 19 nt, Artificial Sequence
  Description of Artificial Sequence: Synthetic oligonucleotide
  Antisense strand to SEQ ID NO: 1575781
auguguagggcacugcucc

SEQ ID NO: 1575783 - RNA, 19 nt, Artificial Sequence
  Description of Artificial Sequence: Synthetic oligonucleotide
  Sense strand starting at position 366 of SEQ ID NO: 1560094
aacagauaagucugugaau

SEQ ID NO: 1575784 - RNA, 19 nt, Artificial Sequence
  Description of Artificial Sequence: Synthetic oligonucleotide
  Antisense strand to SEQ ID NO: 1575783
auucacagacuuaucuguu

SEQ ID NO: 1575785 - RNA, 19 nt, Artificial Sequence
  Description of Artificial Sequence: Synthetic oligonucleotide
  Sense strand starting at position 367 of SEQ ID NO: 1560094
acagauaagucugugaaug

SEQ ID NO: 1575786 - RNA, 19 nt, Artificial Sequence
  Description of Artificial Sequence: Synthetic oligonucleotide
  Antisense strand to SEQ ID NO: 1575785
cauucacagacuuaucugu

SEQ ID NO: 1575787 - RNA, 19 nt, Artificial Sequence
  Description of Artificial Sequence: Synthetic oligonucleotide
  Sense strand starting at position 368 of SEQ ID NO: 1560094
cagauaagucugugaauga

SEQ ID NO: 1575788 - RNA, 19 nt, Artificial Sequence
  Description of Artificial Sequence: Synthetic oligonucleotide
  Antisense strand to SEQ ID NO: 1575787
ucauucacagacuuaucug

SEQ ID NO: 1575789 - RNA, 19 nt, Artificial Sequence
  Description of Artificial Sequence: Synthetic oligonucleotide
  Sense strand starting at position 416 of SEQ ID NO: 1560094
agcucagauaauugggaua

SEQ ID NO: 1575790 - RNA, 19 nt, Artificial Sequence
  Description of Artificial Sequence: Synthetic oligonucleotide
  Antisense strand to SEQ ID NO: 1575789
uaucccaauuaucugagcu

SEQ ID NO: 1575791 - RNA, 19 nt, Artificial Sequence
  Description of Artificial Sequence: Synthetic oligonucleotide
  Sense strand starting at position 427 of SEQ ID NO: 1560094
uugggauaauucgcauucu

SEQ ID NO: 1575792 - RNA, 19 nt, Artificial Sequence
  Description of Artificial Sequence: Synthetic oligonucleotide
  Antisense strand to SEQ ID NO: 1575791
agaaugcgaauuaucccaa

SEQ ID NO: 1575793 - RNA, 19 nt, Artificial Sequence
  Description of Artificial Sequence: Synthetic oligonucleotide
  Sense strand starting at position 572 of SEQ ID NO: 1560094
aaauaucugcagggaggua

SEQ ID NO: 1575794 - RNA, 19 nt, Artificial Sequence
  Description of Artificial Sequence: Synthetic oligonucleotide
  Antisense strand to SEQ ID NO: 1575793
uaccucccugcagauauuu

SEQ ID NO: 1575795 - RNA, 19 nt, Artificial Sequence
  Description of Artificial Sequence: Synthetic oligonucleotide
  Sense strand starting at position 1004 of SEQ ID NO: 1560094
agugaaggaucugcucuaa

SEQ ID NO: 1575796 - RNA, 19 nt, Artificial Sequence
  Description of Artificial Sequence: Synthetic oligonucleotide
  Antisense strand to SEQ ID NO: 1575795
uuagagcagauccuucacu

SEQ ID NO: 1575797 - RNA, 19 nt, Artificial Sequence
  Description of Artificial Sequence: Synthetic oligonucleotide
  Sense strand starting at position 2417 of SEQ ID NO: 1560094
ccuguuucugauuauguua

SEQ ID NO: 1575798 - RNA, 19 nt, Artificial Sequence
  Description of Artificial Sequence: Synthetic oligonucleotide
  Antisense strand to SEQ ID NO: 1575797
uaacauaaucagaaacagg

SEQ ID NO: 1575799 - RNA, 19 nt, Artificial Sequence
  Description of Artificial Sequence: Synthetic oligonucleotide
  Sense strand starting at position 2426 of SEQ ID NO: 1560094
gauuauguuagugaaggca

SEQ ID NO: 1575800 - RNA, 19 nt, Artificial Sequence
  Description of Artificial Sequence: Synthetic oligonucleotide
  Antisense strand to SEQ ID NO: 1575799
ugccuucacuaacauaauc

SEQ ID NO: 1575801 - RNA, 19 nt, Artificial Sequence
  Description of Artificial Sequence: Synthetic oligonucleotide
  Sense strand starting at position 2444 of SEQ ID NO: 1560094
acaagaauaugagugucuu

SEQ ID NO: 1575802 - RNA, 19 nt, Artificial Sequence
  Description of Artificial Sequence: Synthetic oligonucleotide
  Antisense strand to SEQ ID NO: 1575801
aagacacucauauucuugu

SEQ ID NO: 1575803 - RNA, 19 nt, Artificial Sequence
  Description of Artificial Sequence: Synthetic oligonucleotide
  Sense strand starting at position 2445 of SEQ ID NO: 1560094
caagaauaugagugucuuc

SEQ ID NO: 1575804 - RNA, 19 nt, Artificial Sequence
  Description of Artificial Sequence: Synthetic oligonucleotide
  Antisense strand to SEQ ID NO: 1575803
gaagacacucauauucuug

SEQ ID NO: 1575805 - RNA, 19 nt, Artificial Sequence
  Description of Artificial Sequence: Synthetic oligonucleotide
  Sense strand starting at position 2466 of SEQ ID NO: 1560094
aucuguguaucucugaaua

SEQ ID NO: 1575806 - RNA, 19 nt, Artificial Sequence
  Description of Artificial Sequence: Synthetic oligonucleotide
  Antisense strand to SEQ ID NO: 1575805
uauucagagauacacagau

SEQ ID NO: 1575807 - RNA, 19 nt, Artificial Sequence
  Description of Artificial Sequence: Synthetic oligonucleotide
  Sense strand starting at position 2570 of SEQ ID NO: 1560094
uuaauuuguuguguguaca

SEQ ID NO: 1575808 - RNA, 19 nt, Artificial Sequence
  Description of Artificial Sequence: Synthetic oligonucleotide
  Antisense strand to SEQ ID NO: 1575807
uguacacacaacaaauuaa

SEQ ID NO: 1575809 - RNA, 19 nt, Artificial Sequence
  Description of Artificial Sequence: Synthetic oligonucleotide
  Sense strand starting at position 2571 of SEQ ID NO: 1560094
uaauuuguuguguguacaa

SEQ ID NO: 1575810 - RNA, 19 nt, Artificial Sequence
  Description of Artificial Sequence: Synthetic oligonucleotide
  Antisense strand to SEQ ID NO: 1575809
uuguacacacaacaaauua

SEQ ID NO: 1575811 - RNA, 19 nt, Artificial Sequence
  Description of Artificial Sequence: Synthetic oligonucleotide
  Sense strand starting at position 2578 of SEQ ID NO: 1560094
uuguguguacaaggauaug

SEQ ID NO: 1575812 - RNA, 19 nt, Artificial Sequence
  Description of Artificial Sequence: Synthetic oligonucleotide
  Antisense strand to SEQ ID NO: 1575811
cauauccuuguacacacaa

SEQ ID NO: 1575813 - RNA, 19 nt, Artificial Sequence
  Description of Artificial Sequence: Synthetic oligonucleotide
  Sense strand starting at position 2581 of SEQ ID NO: 1560094
uguguacaaggauauguau

SEQ ID NO: 1575814 - RNA, 19 nt, Artificial Sequence
  Description of Artificial Sequence: Synthetic oligonucleotide
  Antisense strand to SEQ ID NO: 1575813
auacauauccuuguacaca

SEQ ID NO: 1575815 - RNA, 19 nt, Artificial Sequence
  Description of Artificial Sequence: Synthetic oligonucleotide
  Sense strand starting at position 2584 of SEQ ID NO: 1560094
guacaaggauauguauuau

SEQ ID NO: 1575816 - RNA, 19 nt, Artificial Sequence
  Description of Artificial Sequence: Synthetic oligonucleotide
  Antisense strand to SEQ ID NO: 1575815
auaauacauauccuuguac

SEQ ID NO: 1575817 - RNA, 19 nt, Artificial Sequence
  Description of Artificial Sequence: Synthetic oligonucleotide
  Sense strand starting at position 2602 of SEQ ID NO: 1560094
uauagaugucuguauccug

SEQ ID NO: 1575818 - RNA, 19 nt, Artificial Sequence
  Description of Artificial Sequence: Synthetic oligonucleotide
  Antisense strand to SEQ ID NO: 1575817
caggauacagacaucuaua

SEQ ID NO: 1575819 - RNA, 19 nt, Artificial Sequence
  Description of Artificial Sequence: Synthetic oligonucleotide
  Sense strand starting at position 2980 of SEQ ID NO: 1560094
uggagugcugugaguaugu

SEQ ID NO: 1575820 - RNA, 19 nt, Artificial Sequence
  Description of Artificial Sequence: Synthetic oligonucleotide
  Antisense strand to SEQ ID NO: 1575819
acauacucacagcacucca

SEQ ID NO: 1575821 - RNA, 19 nt, Artificial Sequence
  Description of Artificial Sequence: Synthetic oligonucleotide
  Sense strand starting at position 3045 of SEQ ID NO: 1560094
auugaugccucugucaaug

SEQ ID NO: 1575822 - RNA, 19 nt, Artificial Sequence
  Description of Artificial Sequence: Synthetic oligonucleotide
  Antisense strand to SEQ ID NO: 1575821
cauugacagaggcaucaau

SEQ ID NO: 1575823 - RNA, 19 nt, Artificial Sequence
  Description of Artificial Sequence: Synthetic oligonucleotide
  Sense strand starting at position 3395 of SEQ ID NO: 1560094
guguguauauuucugcaag

SEQ ID NO: 1575824 - RNA, 19 nt, Artificial Sequence
  Description of Artificial Sequence: Synthetic oligonucleotide
  Antisense strand to SEQ ID NO: 1575823
cuugcagaaauauacacac

SEQ ID NO: 1575825 - RNA, 19 nt, Artificial Sequence
  Description of Artificial Sequence: Synthetic oligonucleotide
  Sense strand starting at position 3417 of SEQ ID NO: 1560094
gugacuauuugugucuaug

SEQ ID NO: 1575826 - RNA, 19 nt, Artificial Sequence
  Description of Artificial Sequence: Synthetic oligonucleotide
  Antisense strand to SEQ ID NO: 1575825
cauagacacaaauagucac

SEQ ID NO: 1575827 - RNA, 19 nt, Artificial Sequence
  Description of Artificial Sequence: Synthetic oligonucleotide
  Sense strand starting at position 3449 of SEQ ID NO: 1560094
agcuguacuggguguauuu

SEQ ID NO: 1575828 - RNA, 19 nt, Artificial Sequence
  Description of Artificial Sequence: Synthetic oligonucleotide
  Antisense strand to SEQ ID NO: 1575827
aaauacacccaguacagcu

SEQ ID NO: 1575829 - RNA, 19 nt, Artificial Sequence
  Description of Artificial Sequence: Synthetic oligonucleotide
  Sense strand starting at position 3458 of SEQ ID NO: 1560094
ggguguauuugcaaguguc

SEQ ID NO: 1575830 - RNA, 19 nt, Artificial Sequence
  Description of Artificial Sequence: Synthetic oligonucleotide
  Antisense strand to SEQ ID NO: 1575829
gacacuugcaaauacaccc

SEQ ID NO: 1575831 - RNA, 19 nt, Artificial Sequence
  Description of Artificial Sequence: Synthetic oligonucleotide
  Sense strand starting at position 3461 of SEQ ID NO: 1560094
uguauuugcaagugucuuu

SEQ ID NO: 1575832 - RNA, 19 nt, Artificial Sequence
  Description of Artificial Sequence: Synthetic oligonucleotide
  Antisense strand to SEQ ID NO: 1575831
aaagacacuugcaaauaca

SEQ ID NO: 1575833 - RNA, 19 nt, Artificial Sequence
  Description of Artificial Sequence: Synthetic oligonucleotide
  Sense strand starting at position 3550 of SEQ ID NO: 1560094
guggguuuguauuugagua

SEQ ID NO: 1575834 - RNA, 19 nt, Artificial Sequence
  Description of Artificial Sequence: Synthetic oligonucleotide
  Antisense strand to SEQ ID NO: 1575833
uacucaaauacaaacccac

SEQ ID NO: 1575835 - RNA, 19 nt, Artificial Sequence
  Description of Artificial Sequence: Synthetic oligonucleotide
  Sense strand starting at position 3551 of SEQ ID NO: 1560094
uggguuuguauuugaguau

SEQ ID NO: 1575836 - RNA, 19 nt, Artificial Sequence
  Description of Artificial Sequence: Synthetic oligonucleotide
  Antisense strand to SEQ ID NO: 1575835
auacucaaauacaaaccca

SEQ ID NO: 1575837 - RNA, 19 nt, Artificial Sequence
  Description of Artificial Sequence: Synthetic oligonucleotide
  Sense strand starting at position 3577 of SEQ ID NO: 1560094
uggcuauaugcacauggau

SEQ ID NO: 1575838 - RNA, 19 nt, Artificial Sequence
  Description of Artificial Sequence: Synthetic oligonucleotide
  Antisense strand to SEQ ID NO: 1575837
auccaugugcauauagcca

SEQ ID NO: 1575839 - RNA, 19 nt, Artificial Sequence
  Description of Artificial Sequence: Synthetic oligonucleotide
  Sense strand starting at position 3592 of SEQ ID NO: 1560094
ggaugugugauugauugau

SEQ ID NO: 1575840 - RNA, 19 nt, Artificial Sequence
  Description of Artificial Sequence: Synthetic oligonucleotide
  Antisense strand to SEQ ID NO: 1575839
aucaaucaaucacacaucc

SEQ ID NO: 1575841 - RNA, 19 nt, Artificial Sequence
  Description of Artificial Sequence: Synthetic oligonucleotide
  Sense strand starting at position 3594 of SEQ ID NO: 1560094
augugugauugauugauug

SEQ ID NO: 1575842 - RNA, 19 nt, Artificial Sequence
  Description of Artificial Sequence: Synthetic oligonucleotide
  Antisense strand to SEQ ID NO: 1575841
caaucaaucaaucacacau

SEQ ID NO: 1575843 - RNA, 19 nt, Artificial Sequence
  Description of Artificial Sequence: Synthetic oligonucleotide
  Sense strand starting at position 3926 of SEQ ID NO: 1560094
ugagcaguuccugacuaua

SEQ ID NO: 1575844 - RNA, 19 nt, Artificial Sequence
  Description of Artificial Sequence: Synthetic oligonucleotide
  Antisense strand to SEQ ID NO: 1575843
uauagucaggaacugcuca

SEQ ID NO: 1575845 - RNA, 19 nt, Artificial Sequence
  Description of Artificial Sequence: Synthetic oligonucleotide
  Sense strand starting at position 3928 of SEQ ID NO: 1560094
agcaguuccugacuauauu

SEQ ID NO: 1575846 - RNA, 19 nt, Artificial Sequence
  Description of Artificial Sequence: Synthetic oligonucleotide
  Antisense strand to SEQ ID NO: 1575845
aauauagucaggaacugcu

SEQ ID NO: 1575847 - RNA, 19 nt, Artificial Sequence
  Description of Artificial Sequence: Synthetic oligonucleotide
  Sense strand starting at position 3970 of SEQ ID NO: 1560094
augugaguaucuuugugga

SEQ ID NO: 1575848 - RNA, 19 nt, Artificial Sequence
  Description of Artificial Sequence: Synthetic oligonucleotide
  Antisense strand to SEQ ID NO: 1575847
uccacaaagauacucacau

SEQ ID NO: 1575849 - RNA, 19 nt, Artificial Sequence
  Description of Artificial Sequence: Synthetic oligonucleotide
  Sense strand starting at position 3980 of SEQ ID NO: 1560094
cuuuguggauuugaauaua

SEQ ID NO: 1575850 - RNA, 19 nt, Artificial Sequence
  Description of Artificial Sequence: Synthetic oligonucleotide
  Antisense strand to SEQ ID NO: 1575849
uauauucaaauccacaaag

SEQ ID NO: 1575851 - RNA, 19 nt, Artificial Sequence
  Description of Artificial Sequence: Synthetic oligonucleotide
  Sense strand starting at position 47 of SEQ ID NO: 1560095
gcaguuaccugggaggaga

SEQ ID NO: 1575852 - RNA, 19 nt, Artificial Sequence
  Description of Artificial Sequence: Synthetic oligonucleotide
  Antisense strand to SEQ ID NO: 1575851
ucuccucccagguaacugc

SEQ ID NO: 1575853 - RNA, 19 nt, Artificial Sequence
  Description of Artificial Sequence: Synthetic oligonucleotide
  Sense strand starting at position 151 of SEQ ID NO: 1560095
gaaagaucacgugagccua

SEQ ID NO: 1575854 - RNA, 19 nt, Artificial Sequence
  Description of Artificial Sequence: Synthetic oligonucleotide
  Antisense strand to SEQ ID NO: 1575853
uaggcucacgugaucuuuc

SEQ ID NO: 1575855 - RNA, 19 nt, Artificial Sequence
  Description of Artificial Sequence: Synthetic oligonucleotide
  Sense strand starting at position 649 of SEQ ID NO: 1560095
caggccucagccugagaaa

SEQ ID NO: 1575856 - RNA, 19 nt, Artificial Sequence
  Description of Artificial Sequence: Synthetic oligonucleotide
  Antisense strand to SEQ ID NO: 1575855
uuucucaggcugaggccug

SEQ ID NO: 1575857 - RNA, 19 nt, Artificial Sequence
  Description of Artificial Sequence: Synthetic oligonucleotide
  Sense strand starting at position 670 of SEQ ID NO: 1560095
gaggaaaggucucauccag

SEQ ID NO: 1575858 - RNA, 19 nt, Artificial Sequence
  Description of Artificial Sequence: Synthetic oligonucleotide
  Antisense strand to SEQ ID NO: 1575857
cuggaugagaccuuuccuc

SEQ ID NO: 1575859 - RNA, 19 nt, Artificial Sequence
  Description of Artificial Sequence: Synthetic oligonucleotide
  Sense strand starting at position 676 of SEQ ID NO: 1560095
aggucucauccagaggagu

SEQ ID NO: 1575860 - RNA, 19 nt, Artificial Sequence
  Description of Artificial Sequence: Synthetic oligonucleotide
  Antisense strand to SEQ ID NO: 1575859
acuccucuggaugagaccu

SEQ ID NO: 1575861 - RNA, 19 nt, Artificial Sequence
  Description of Artificial Sequence: Synthetic oligonucleotide
  Sense strand starting at position 678 of SEQ ID NO: 1560095
gucucauccagaggaguga

SEQ ID NO: 1575862 - RNA, 19 nt, Artificial Sequence
  Description of Artificial Sequence: Synthetic oligonucleotide
  Antisense strand to SEQ ID NO: 1575861
ucacuccucuggaugagac

SEQ ID NO: 1575863 - RNA, 19 nt, Artificial Sequence
  Description of Artificial Sequence: Synthetic oligonucleotide
  Sense strand starting at position 1170 of SEQ ID NO: 1560095
uccagaaguccagguccaa

SEQ ID NO: 1575864 - RNA, 19 nt, Artificial Sequence
  Description of Artificial Sequence: Synthetic oligonucleotide
  Antisense strand to SEQ ID NO: 1575863
uuggaccuggacuucugga

SEQ ID NO: 1575865 - RNA, 19 nt, Artificial Sequence
  Description of Artificial Sequence: Synthetic oligonucleotide
  Sense strand starting at position 1583 of SEQ ID NO: 1560095
cccgaauugccucauagcu

SEQ ID NO: 1575866 - RNA, 19 nt, Artificial Sequence
  Description of Artificial Sequence: Synthetic oligonucleotide
  Antisense strand to SEQ ID NO: 1575865
agcuaugaggcaauucggg

SEQ ID NO: 1575867 - RNA, 19 nt, Artificial Sequence
  Description of Artificial Sequence: Synthetic oligonucleotide
  Sense strand starting at position 1796 of SEQ ID NO: 1560095
ggagccuucccucguuaau

SEQ ID NO: 1575868 - RNA, 19 nt, Artificial Sequence
  Description of Artificial Sequence: Synthetic oligonucleotide
  Antisense strand to SEQ ID NO: 1575867
auuaacgagggaaggcucc

SEQ ID NO: 1575869 - RNA, 19 nt, Artificial Sequence
  Description of Artificial Sequence: Synthetic oligonucleotide
  Sense strand starting at position 1798 of SEQ ID NO: 1560095
agccuucccucguuaauau

SEQ ID NO: 1575870 - RNA, 19 nt, Artificial Sequence
  Description of Artificial Sequence: Synthetic oligonucleotide
  Antisense strand to SEQ ID NO: 1575869
auauuaacgagggaaggcu

SEQ ID NO: 1575871 - RNA, 19 nt, Artificial Sequence
  Description of Artificial Sequence: Synthetic oligonucleotide
  Sense strand starting at position 1799 of SEQ ID NO: 1560095
gccuucccucguuaauauu

SEQ ID NO: 1575872 - RNA, 19 nt, Artificial Sequence
  Description of Artificial Sequence: Synthetic oligonucleotide
  Antisense strand to SEQ ID NO: 1575871
aauauuaacgagggaaggc

SEQ ID NO: 1575873 - RNA, 19 nt, Artificial Sequence
  Description of Artificial Sequence: Synthetic oligonucleotide
  Sense strand starting at position 1805 of SEQ ID NO: 1560095
ccucguuaauauuaauuga

SEQ ID NO: 1575874 - RNA, 19 nt, Artificial Sequence
  Description of Artificial Sequence: Synthetic oligonucleotide
  Antisense strand to SEQ ID NO: 1575873
ucaauuaauauuaacgagg

SEQ ID NO: 1575875 - RNA, 19 nt, Artificial Sequence
  Description of Artificial Sequence: Synthetic oligonucleotide
  Sense strand starting at position 1887 of SEQ ID NO: 1560095
uucaguuguggccaaggua

SEQ ID NO: 1575876 - RNA, 19 nt, Artificial Sequence
  Description of Artificial Sequence: Synthetic oligonucleotide
  Antisense strand to SEQ ID NO: 1575875
uaccuuggccacaacugaa

SEQ ID NO: 1575877 - RNA, 19 nt, Artificial Sequence
  Description of Artificial Sequence: Synthetic oligonucleotide
  Sense strand starting at position 2005 of SEQ ID NO: 1560095
gggugagcuucugccuacu

SEQ ID NO: 1575878 - RNA, 19 nt, Artificial Sequence
  Description of Artificial Sequence: Synthetic oligonucleotide
  Antisense strand to SEQ ID NO: 1575877
aguaggcagaagcucaccc

SEQ ID NO: 1575879 - RNA, 19 nt, Artificial Sequence
  Description of Artificial Sequence: Synthetic oligonucleotide
  Sense strand starting at position 2007 of SEQ ID NO: 1560095
gugagcuucugccuacuua

SEQ ID NO: 1575880 - RNA, 19 nt, Artificial Sequence
  Description of Artificial Sequence: Synthetic oligonucleotide
  Antisense strand to SEQ ID NO: 1575879
uaaguaggcagaagcucac

SEQ ID NO: 1575881 - RNA, 19 nt, Artificial Sequence
  Description of Artificial Sequence: Synthetic oligonucleotide
  Sense strand starting at position 2008 of SEQ ID NO: 1560095
ugagcuucugccuacuuau

SEQ ID NO: 1575882 - RNA, 19 nt, Artificial Sequence
  Description of Artificial Sequence: Synthetic oligonucleotide
  Antisense strand to SEQ ID NO: 1575881
auaaguaggcagaagcuca

SEQ ID NO: 1575883 - RNA, 19 nt, Artificial Sequence
  Description of Artificial Sequence: Synthetic oligonucleotide
  Sense strand starting at position 2592 of SEQ ID NO: 1560095
uggcaauauuugugucucu

SEQ ID NO: 1575884 - RNA, 19 nt, Artificial Sequence
  Description of Artificial Sequence: Synthetic oligonucleotide
  Antisense strand to SEQ ID NO: 1575883
agagacacaaauauugcca

SEQ ID NO: 1575885 - RNA, 19 nt, Artificial Sequence
  Description of Artificial Sequence: Synthetic oligonucleotide
  Sense strand starting at position 2597 of SEQ ID NO: 1560095
auauuugugucucuguauu

SEQ ID NO: 1575886 - RNA, 19 nt, Artificial Sequence
  Description of Artificial Sequence: Synthetic oligonucleotide
  Antisense strand to SEQ ID NO: 1575885
aauacagagacacaaauau

SEQ ID NO: 1575887 - RNA, 19 nt, Artificial Sequence
  Description of Artificial Sequence: Synthetic oligonucleotide
  Sense strand starting at position 2825 of SEQ ID NO: 1560095
gugucuguuccucucugua

SEQ ID NO: 1575888 - RNA, 19 nt, Artificial Sequence
  Description of Artificial Sequence: Synthetic oligonucleotide
  Antisense strand to SEQ ID NO: 1575887
uacagagaggaacagacac

SEQ ID NO: 1575889 - RNA, 19 nt, Artificial Sequence
  Description of Artificial Sequence: Synthetic oligonucleotide
  Sense strand starting at position 3094 of SEQ ID NO: 1560095
gagggauggcucuguaccu

SEQ ID NO: 1575890 - RNA, 19 nt, Artificial Sequence
  Description of Artificial Sequence: Synthetic oligonucleotide
  Antisense strand to SEQ ID NO: 1575889
agguacagagccaucccuc

SEQ ID NO: 1575891 - RNA, 19 nt, Artificial Sequence
  Description of Artificial Sequence: Synthetic oligonucleotide
  Sense strand starting at position 3124 of SEQ ID NO: 1560095
ggagccaucuggugaccau

SEQ ID NO: 1575892 - RNA, 19 nt, Artificial Sequence
  Description of Artificial Sequence: Synthetic oligonucleotide
  Antisense strand to SEQ ID NO: 1575891
auggucaccagauggcucc

SEQ ID NO: 1575893 - RNA, 19 nt, Artificial Sequence
  Description of Artificial Sequence: Synthetic oligonucleotide
  Sense strand starting at position 3540 of SEQ ID NO: 1560095
aggccaauguagugaaacu

SEQ ID NO: 1575894 - RNA, 19 nt, Artificial Sequence
  Description of Artificial Sequence: Synthetic oligonucleotide
  Antisense strand to SEQ ID NO: 1575893
aguuucacuacauuggccu

SEQ ID NO: 1575895 - RNA, 19 nt, Artificial Sequence
  Description of Artificial Sequence: Synthetic oligonucleotide
  Sense strand starting at position 3897 of SEQ ID NO: 1560095
guaguuuacuacgccugua

SEQ ID NO: 1575896 - RNA, 19 nt, Artificial Sequence
  Description of Artificial Sequence: Synthetic oligonucleotide
  Antisense strand to SEQ ID NO: 1575895
uacaggcguaguaaacuac

SEQ ID NO: 1575897 - RNA, 19 nt, Artificial Sequence
  Description of Artificial Sequence: Synthetic oligonucleotide
  Sense strand starting at position 3900 of SEQ ID NO: 1560095
guuuacuacgccuguaauc

SEQ ID NO: 1575898 - RNA, 19 nt, Artificial Sequence
  Description of Artificial Sequence: Synthetic oligonucleotide
  Antisense strand to SEQ ID NO: 1575897
gauuacaggcguaguaaac

SEQ ID NO: 1575899 - RNA, 19 nt, Artificial Sequence
  Description of Artificial Sequence: Synthetic oligonucleotide
  Sense strand starting at position 267 of SEQ ID NO: 1560096
gggcucaccuccucauuaa

SEQ ID NO: 1575900 - RNA, 19 nt, Artificial Sequence
  Description of Artificial Sequence: Synthetic oligonucleotide
  Antisense strand to SEQ ID NO: 1575899
uuaaugaggaggugagccc

SEQ ID NO: 1575901 - RNA, 19 nt, Artificial Sequence
  Description of Artificial Sequence: Synthetic oligonucleotide
  Sense strand starting at position 333 of SEQ ID NO: 1560096
aaaugucacucagacgcau

SEQ ID NO: 1575902 - RNA, 19 nt, Artificial Sequence
  Description of Artificial Sequence: Synthetic oligonucleotide
  Antisense strand to SEQ ID NO: 1575901
augcgucugagugacauuu

SEQ ID NO: 1575903 - RNA, 19 nt, Artificial Sequence
  Description of Artificial Sequence: Synthetic oligonucleotide
  Sense strand starting at position 591 of SEQ ID NO: 1560096
cagguuagccuccagguua

SEQ ID NO: 1575904 - RNA, 19 nt, Artificial Sequence
  Description of Artificial Sequence: Synthetic oligonucleotide
  Antisense strand to SEQ ID NO: 1575903
uaaccuggaggcuaaccug

SEQ ID NO: 1575905 - RNA, 19 nt, Artificial Sequence
  Description of Artificial Sequence: Synthetic oligonucleotide
  Sense strand starting at position 687 of SEQ ID NO: 1560096
ucugauagucuccgccuua

SEQ ID NO: 1575906 - RNA, 19 nt, Artificial Sequence
  Description of Artificial Sequence: Synthetic oligonucleotide
  Antisense strand to SEQ ID NO: 1575905
uaaggcggagacuaucaga

SEQ ID NO: 1575907 - RNA, 19 nt, Artificial Sequence
  Description of Artificial Sequence: Synthetic oligonucleotide
  Sense strand starting at position 1106 of SEQ ID NO: 1560096
gcaaccuccucaggucuaa

SEQ ID NO: 1575908 - RNA, 19 nt, Artificial Sequence
  Description of Artificial Sequence: Synthetic oligonucleotide
  Antisense strand to SEQ ID NO: 1575907
uuagaccugaggagguugc

SEQ ID NO: 1575909 - RNA, 19 nt, Artificial Sequence
  Description of Artificial Sequence: Synthetic oligonucleotide
  Sense strand starting at position 1228 of SEQ ID NO: 1560096
aggcguucccgacaugucu

SEQ ID NO: 1575910 - RNA, 19 nt, Artificial Sequence
  Description of Artificial Sequence: Synthetic oligonucleotide
  Antisense strand to SEQ ID NO: 1575909
agacaugucgggaacgccu

SEQ ID NO: 1575911 - RNA, 19 nt, Artificial Sequence
  Description of Artificial Sequence: Synthetic oligonucleotide
  Sense strand starting at position 1236 of SEQ ID NO: 1560096
ccgacaugucugggcgcua

SEQ ID NO: 1575912 - RNA, 19 nt, Artificial Sequence
  Description of Artificial Sequence: Synthetic oligonucleotide
  Antisense strand to SEQ ID NO: 1575911
uagcgcccagacaugucgg

SEQ ID NO: 1575913 - RNA, 19 nt, Artificial Sequence
  Description of Artificial Sequence: Synthetic oligonucleotide
  Sense strand starting at position 1398 of SEQ ID NO: 1560096
gcaggauuccagugucacc

SEQ ID NO: 1575914 - RNA, 19 nt, Artificial Sequence
  Description of Artificial Sequence: Synthetic oligonucleotide
  Antisense strand to SEQ ID NO: 1575913
ggugacacuggaauccugc

SEQ ID NO: 1575915 - RNA, 19 nt, Artificial Sequence
  Description of Artificial Sequence: Synthetic oligonucleotide
  Sense strand starting at position 1435 of SEQ ID NO: 1560096
ggucuaagaucguggcugu

SEQ ID NO: 1575916 - RNA, 19 nt, Artificial Sequence
  Description of Artificial Sequence: Synthetic oligonucleotide
  Antisense strand to SEQ ID NO: 1575915
acagccacgaucuuagacc

SEQ ID NO: 1575917 - RNA, 19 nt, Artificial Sequence
  Description of Artificial Sequence: Synthetic oligonucleotide
  Sense strand starting at position 1545 of SEQ ID NO: 1560096
caggguaucucugaaaccu

SEQ ID NO: 1575918 - RNA, 19 nt, Artificial Sequence
  Description of Artificial Sequence: Synthetic oligonucleotide
  Antisense strand to SEQ ID NO: 1575917
agguuucagagauacccug

SEQ ID NO: 1575919 - RNA, 19 nt, Artificial Sequence
  Description of Artificial Sequence: Synthetic oligonucleotide
  Sense strand starting at position 1647 of SEQ ID NO: 1560096
guucgaaucugagaccaug

SEQ ID NO: 1575920 - RNA, 19 nt, Artificial Sequence
  Description of Artificial Sequence: Synthetic oligonucleotide
  Antisense strand to SEQ ID NO: 1575919
cauggucucagauucgaac

SEQ ID NO: 1575921 - RNA, 19 nt, Artificial Sequence
  Description of Artificial Sequence: Synthetic oligonucleotide
  Sense strand starting at position 2115 of SEQ ID NO: 1560096
ccgagugucguagugugaa

SEQ ID NO: 1575922 - RNA, 19 nt, Artificial Sequence
  Description of Artificial Sequence: Synthetic oligonucleotide
  Antisense strand to SEQ ID NO: 1575921
uucacacuacgacacucgg

SEQ ID NO: 1575923 - RNA, 19 nt, Artificial Sequence
  Description of Artificial Sequence: Synthetic oligonucleotide
  Sense strand starting at position 2116 of SEQ ID NO: 1560096
cgagugucguagugugaau

SEQ ID NO: 1575924 - RNA, 19 nt, Artificial Sequence
  Description of Artificial Sequence: Synthetic oligonucleotide
  Antisense strand to SEQ ID NO: 1575923
auucacacuacgacacucg

SEQ ID NO: 1575925 - RNA, 19 nt, Artificial Sequence
  Description of Artificial Sequence: Synthetic oligonucleotide
  Sense strand starting at position 2118 of SEQ ID NO: 1560096
agugucguagugugaauuu

SEQ ID NO: 1575926 - RNA, 19 nt, Artificial Sequence
  Description of Artificial Sequence: Synthetic oligonucleotide
  Antisense strand to SEQ ID NO: 1575925
aaauucacacuacgacacu

SEQ ID NO: 1575927 - RNA, 19 nt, Artificial Sequence
  Description of Artificial Sequence: Synthetic oligonucleotide
  Sense strand starting at position 2214 of SEQ ID NO: 1560096
ugcagguguugucgcgaca

SEQ ID NO: 1575928 - RNA, 19 nt, Artificial Sequence
  Description of Artificial Sequence: Synthetic oligonucleotide
  Antisense strand to SEQ ID NO: 1575927
ugucgcgacaacaccugca

SEQ ID NO: 1575929 - RNA, 19 nt, Artificial Sequence
  Description of Artificial Sequence: Synthetic oligonucleotide
  Sense strand starting at position 2215 of SEQ ID NO: 1560096
gcagguguugucgcgacaa

SEQ ID NO: 1575930 - RNA, 19 nt, Artificial Sequence
  Description of Artificial Sequence: Synthetic oligonucleotide
  Antisense strand to SEQ ID NO: 1575929
uugucgcgacaacaccugc

SEQ ID NO: 1575931 - RNA, 19 nt, Artificial Sequence
  Description of Artificial Sequence: Synthetic oligonucleotide
  Sense strand starting at position 2217 of SEQ ID NO: 1560096
agguguugucgcgacaaac

SEQ ID NO: 1575932 - RNA, 19 nt, Artificial Sequence
  Description of Artificial Sequence: Synthetic oligonucleotide
  Antisense strand to SEQ ID NO: 1575931
guuugucgcgacaacaccu

SEQ ID NO: 1575933 - RNA, 19 nt, Artificial Sequence
  Description of Artificial Sequence: Synthetic oligonucleotide
  Sense strand starting at position 2248 of SEQ ID NO: 1560096
ccuggaguaugguuugacu

SEQ ID NO: 1575934 - RNA, 19 nt, Artificial Sequence
  Description of Artificial Sequence: Synthetic oligonucleotide
  Antisense strand to SEQ ID NO: 1575933
agucaaaccauacuccagg

SEQ ID NO: 1575935 - RNA, 19 nt, Artificial Sequence
  Description of Artificial Sequence: Synthetic oligonucleotide
  Sense strand starting at position 2250 of SEQ ID NO: 1560096
uggaguaugguuugacuca

SEQ ID NO: 1575936 - RNA, 19 nt, Artificial Sequence
  Description of Artificial Sequence: Synthetic oligonucleotide
  Antisense strand to SEQ ID NO: 1575935
ugagucaaaccauacucca

SEQ ID NO: 1575937 - RNA, 19 nt, Artificial Sequence
  Description of Artificial Sequence: Synthetic oligonucleotide
  Sense strand starting at position 2251 of SEQ ID NO: 1560096
ggaguaugguuugacucac

SEQ ID NO: 1575938 - RNA, 19 nt, Artificial Sequence
  Description of Artificial Sequence: Synthetic oligonucleotide
  Antisense strand to SEQ ID NO: 1575937
gugagucaaaccauacucc

SEQ ID NO: 1575939 - RNA, 19 nt, Artificial Sequence
  Description of Artificial Sequence: Synthetic oligonucleotide
  Sense strand starting at position 2289 of SEQ ID NO: 1560096
cgugucuguggcgaggauu

SEQ ID NO: 1575940 - RNA, 19 nt, Artificial Sequence
  Description of Artificial Sequence: Synthetic oligonucleotide
  Antisense strand to SEQ ID NO: 1575939
aauccucgccacagacacg

SEQ ID NO: 1575941 - RNA, 19 nt, Artificial Sequence
  Description of Artificial Sequence: Synthetic oligonucleotide
  Sense strand starting at position 2291 of SEQ ID NO: 1560096
ugucuguggcgaggauuga

SEQ ID NO: 1575942 - RNA, 19 nt, Artificial Sequence
  Description of Artificial Sequence: Synthetic oligonucleotide
  Antisense strand to SEQ ID NO: 1575941
ucaauccucgccacagaca

SEQ ID NO: 1575943 - RNA, 19 nt, Artificial Sequence
  Description of Artificial Sequence: Synthetic oligonucleotide
  Sense strand starting at position 2450 of SEQ ID NO: 1560096
cccaaagaguguccucagu

SEQ ID NO: 1575944 - RNA, 19 nt, Artificial Sequence
  Description of Artificial Sequence: Synthetic oligonucleotide
  Antisense strand to SEQ ID NO: 1575943
acugaggacacucuuuggg

SEQ ID NO: 1575945 - RNA, 19 nt, Artificial Sequence
  Description of Artificial Sequence: Synthetic oligonucleotide
  Sense strand starting at position 2452 of SEQ ID NO: 1560096
caaagaguguccucaguau

SEQ ID NO: 1575946 - RNA, 19 nt, Artificial Sequence
  Description of Artificial Sequence: Synthetic oligonucleotide
  Antisense strand to SEQ ID NO: 1575945
auacugaggacacucuuug

SEQ ID NO: 1575947 - RNA, 19 nt, Artificial Sequence
  Description of Artificial Sequence: Synthetic oligonucleotide
  Sense strand starting at position 2456 of SEQ ID NO: 1560096
gaguguccucaguaugcua

SEQ ID NO: 1575948 - RNA, 19 nt, Artificial Sequence
  Description of Artificial Sequence: Synthetic oligonucleotide
  Antisense strand to SEQ ID NO: 1575947
uagcauacugaggacacuc

SEQ ID NO: 1575949 - RNA, 19 nt, Artificial Sequence
  Description of Artificial Sequence: Synthetic oligonucleotide
  Sense strand starting at position 2464 of SEQ ID NO: 1560096
ucaguaugcuagccucuaa

SEQ ID NO: 1575950 - RNA, 19 nt, Artificial Sequence
  Description of Artificial Sequence: Synthetic oligonucleotide
  Antisense strand to SEQ ID NO: 1575949
uuagaggcuagcauacuga

SEQ ID NO: 1575951 - RNA, 19 nt, Artificial Sequence
  Description of Artificial Sequence: Synthetic oligonucleotide
  Sense strand starting at position 2642 of SEQ ID NO: 1560096
cccaaaguacugugaggua

SEQ ID NO: 1575952 - RNA, 19 nt, Artificial Sequence
  Description of Artificial Sequence: Synthetic oligonucleotide
  Antisense strand to SEQ ID NO: 1575951
uaccucacaguacuuuggg

SEQ ID NO: 1575953 - RNA, 19 nt, Artificial Sequence
  Description of Artificial Sequence: Synthetic oligonucleotide
  Sense strand starting at position 2651 of SEQ ID NO: 1560096
cugugagguacugggauua

SEQ ID NO: 1575954 - RNA, 19 nt, Artificial Sequence
  Description of Artificial Sequence: Synthetic oligonucleotide
  Antisense strand to SEQ ID NO: 1575953
uaaucccaguaccucacag

SEQ ID NO: 1575955 - RNA, 19 nt, Artificial Sequence
  Description of Artificial Sequence: Synthetic oligonucleotide
  Sense strand starting at position 3149 of SEQ ID NO: 1560096
ugaguugaauccuggcugu

SEQ ID NO: 1575956 - RNA, 19 nt, Artificial Sequence
  Description of Artificial Sequence: Synthetic oligonucleotide
  Antisense strand to SEQ ID NO: 1575955
acagccaggauucaacuca

SEQ ID NO: 1575957 - RNA, 19 nt, Artificial Sequence
  Description of Artificial Sequence: Synthetic oligonucleotide
  Sense strand starting at position 3159 of SEQ ID NO: 1560096
ccuggcugugcccuguaau

SEQ ID NO: 1575958 - RNA, 19 nt, Artificial Sequence
  Description of Artificial Sequence: Synthetic oligonucleotide
  Antisense strand to SEQ ID NO: 1575957
auuacagggcacagccagg

SEQ ID NO: 1575959 - RNA, 19 nt, Artificial Sequence
  Description of Artificial Sequence: Synthetic oligonucleotide
  Sense strand starting at position 3160 of SEQ ID NO: 1560096
cuggcugugcccuguaaua

SEQ ID NO: 1575960 - RNA, 19 nt, Artificial Sequence
  Description of Artificial Sequence: Synthetic oligonucleotide
  Antisense strand to SEQ ID NO: 1575959
uauuacagggcacagccag

SEQ ID NO: 1575961 - RNA, 19 nt, Artificial Sequence
  Description of Artificial Sequence: Synthetic oligonucleotide
  Sense strand starting at position 3162 of SEQ ID NO: 1560096
ggcugugcccuguaauaac

SEQ ID NO: 1575962 - RNA, 19 nt, Artificial Sequence
  Description of Artificial Sequence: Synthetic oligonucleotide
  Antisense strand to SEQ ID NO: 1575961
guuauuacagggcacagcc

SEQ ID NO: 1575963 - RNA, 19 nt, Artificial Sequence
  Description of Artificial Sequence: Synthetic oligonucleotide
  Sense strand starting at position 3201 of SEQ ID NO: 1560096
gcuugauauuccugagcag

SEQ ID NO: 1575964 - RNA, 19 nt, Artificial Sequence
  Description of Artificial Sequence: Synthetic oligonucleotide
  Antisense strand to SEQ ID NO: 1575963
cugcucaggaauaucaagc

SEQ ID NO: 1575965 - RNA, 19 nt, Artificial Sequence
  Description of Artificial Sequence: Synthetic oligonucleotide
  Sense strand starting at position 3204 of SEQ ID NO: 1560096
ugauauuccugagcagcga

SEQ ID NO: 1575966 - RNA, 19 nt, Artificial Sequence
  Description of Artificial Sequence: Synthetic oligonucleotide
  Antisense strand to SEQ ID NO: 1575965
ucgcugcucaggaauauca

SEQ ID NO: 1575967 - RNA, 19 nt, Artificial Sequence
  Description of Artificial Sequence: Synthetic oligonucleotide
  Sense strand starting at position 3205 of SEQ ID NO: 1560096
gauauuccugagcagcgau

SEQ ID NO: 1575968 - RNA, 19 nt, Artificial Sequence
  Description of Artificial Sequence: Synthetic oligonucleotide
  Antisense strand to SEQ ID NO: 1575967
aucgcugcucaggaauauc

SEQ ID NO: 1575969 - RNA, 19 nt, Artificial Sequence
  Description of Artificial Sequence: Synthetic oligonucleotide
  Sense strand starting at position 3243 of SEQ ID NO: 1560096
gaacauggguugcuccaua

SEQ ID NO: 1575970 - RNA, 19 nt, Artificial Sequence
  Description of Artificial Sequence: Synthetic oligonucleotide
  Antisense strand to SEQ ID NO: 1575969
uauggagcaacccauguuc

SEQ ID NO: 1575971 - RNA, 19 nt, Artificial Sequence
  Description of Artificial Sequence: Synthetic oligonucleotide
  Sense strand starting at position 3288 of SEQ ID NO: 1560096
ugauaucugcagcaauacu

SEQ ID NO: 1575972 - RNA, 19 nt, Artificial Sequence
  Description of Artificial Sequence: Synthetic oligonucleotide
  Antisense strand to SEQ ID NO: 1575971
aguauugcugcagauauca

SEQ ID NO: 1575973 - RNA, 19 nt, Artificial Sequence
  Description of Artificial Sequence: Synthetic oligonucleotide
  Sense strand starting at position 3925 of SEQ ID NO: 1560096
ggugauaaaugcuuuguaa

SEQ ID NO: 1575974 - RNA, 19 nt, Artificial Sequence
  Description of Artificial Sequence: Synthetic oligonucleotide
  Antisense strand to SEQ ID NO: 1575973
uuacaaagcauuuaucacc

SEQ ID NO: 1575975 - RNA, 19 nt, Artificial Sequence
  Description of Artificial Sequence: Synthetic oligonucleotide
  Sense strand starting at position 3950 of SEQ ID NO: 1560096
ccauuagcucugugucugu

SEQ ID NO: 1575976 - RNA, 19 nt, Artificial Sequence
  Description of Artificial Sequence: Synthetic oligonucleotide
  Antisense strand to SEQ ID NO: 1575975
acagacacagagcuaaugg

SEQ ID NO: 1575977 - RNA, 19 nt, Artificial Sequence
  Description of Artificial Sequence: Synthetic oligonucleotide
  Sense strand starting at position 468 of SEQ ID NO: 1560097
gggcucaccuccucauuaa

SEQ ID NO: 1575978 - RNA, 19 nt, Artificial Sequence
  Description of Artificial Sequence: Synthetic oligonucleotide
  Antisense strand to SEQ ID NO: 1575977
uuaaugaggaggugagccc

SEQ ID NO: 1575979 - RNA, 19 nt, Artificial Sequence
  Description of Artificial Sequence: Synthetic oligonucleotide
  Sense strand starting at position 534 of SEQ ID NO: 1560097
aaaugucacucagacgcau

SEQ ID NO: 1575980 - RNA, 19 nt, Artificial Sequence
  Description of Artificial Sequence: Synthetic oligonucleotide
  Antisense strand to SEQ ID NO: 1575979
augcgucugagugacauuu

SEQ ID NO: 1575981 - RNA, 19 nt, Artificial Sequence
  Description of Artificial Sequence: Synthetic oligonucleotide
  Sense strand starting at position 792 of SEQ ID NO: 1560097
cagguuagccuccagguua

SEQ ID NO: 1575982 - RNA, 19 nt, Artificial Sequence
  Description of Artificial Sequence: Synthetic oligonucleotide
  Antisense strand to SEQ ID NO: 1575981
uaaccuggaggcuaaccug

SEQ ID NO: 1575983 - RNA, 19 nt, Artificial Sequence
  Description of Artificial Sequence: Synthetic oligonucleotide
  Sense strand starting at position 888 of SEQ ID NO: 1560097
ucugauagucuccgccuua

SEQ ID NO: 1575984 - RNA, 19 nt, Artificial Sequence
  Description of Artificial Sequence: Synthetic oligonucleotide
  Antisense strand to SEQ ID NO: 1575983
uaaggcggagacuaucaga

SEQ ID NO: 1575985 - RNA, 19 nt, Artificial Sequence
  Description of Artificial Sequence: Synthetic oligonucleotide
  Sense strand starting at position 1307 of SEQ ID NO: 1560097
gcaaccuccucaggucuaa

SEQ ID NO: 1575986 - RNA, 19 nt, Artificial Sequence
  Description of Artificial Sequence: Synthetic oligonucleotide
  Antisense strand to SEQ ID NO: 1575985
uuagaccugaggagguugc

SEQ ID NO: 1575987 - RNA, 19 nt, Artificial Sequence
  Description of Artificial Sequence: Synthetic oligonucleotide
  Sense strand starting at position 1429 of SEQ ID NO: 1560097
aggcguucccgacaugucu

SEQ ID NO: 1575988 - RNA, 19 nt, Artificial Sequence
  Description of Artificial Sequence: Synthetic oligonucleotide
  Antisense strand to SEQ ID NO: 1575987
agacaugucgggaacgccu

SEQ ID NO: 1575989 - RNA, 19 nt, Artificial Sequence
  Description of Artificial Sequence: Synthetic oligonucleotide
  Sense strand starting at position 1437 of SEQ ID NO: 1560097
ccgacaugucugggcgcua

SEQ ID NO: 1575990 - RNA, 19 nt, Artificial Sequence
  Description of Artificial Sequence: Synthetic oligonucleotide
  Antisense strand to SEQ ID NO: 1575989
uagcgcccagacaugucgg

SEQ ID NO: 1575991 - RNA, 19 nt, Artificial Sequence
  Description of Artificial Sequence: Synthetic oligonucleotide
  Sense strand starting at position 1599 of SEQ ID NO: 1560097
gcaggauuccagugucacc

SEQ ID NO: 1575992 - RNA, 19 nt, Artificial Sequence
  Description of Artificial Sequence: Synthetic oligonucleotide
  Antisense strand to SEQ ID NO: 1575991
ggugacacuggaauccugc

SEQ ID NO: 1575993 - RNA, 19 nt, Artificial Sequence
  Description of Artificial Sequence: Synthetic oligonucleotide
  Sense strand starting at position 1636 of SEQ ID NO: 1560097
ggucuaagaucguggcugu

SEQ ID NO: 1575994 - RNA, 19 nt, Artificial Sequence
  Description of Artificial Sequence: Synthetic oligonucleotide
  Antisense strand to SEQ ID NO: 1575993
acagccacgaucuuagacc

SEQ ID NO: 1575995 - RNA, 19 nt, Artificial Sequence
  Description of Artificial Sequence: Synthetic oligonucleotide
  Sense strand starting at position 1746 of SEQ ID NO: 1560097
caggguaucucugaaaccu

SEQ ID NO: 1575996 - RNA, 19 nt, Artificial Sequence
  Description of Artificial Sequence: Synthetic oligonucleotide
  Antisense strand to SEQ ID NO: 1575995
agguuucagagauacccug

SEQ ID NO: 1575997 - RNA, 19 nt, Artificial Sequence
  Description of Artificial Sequence: Synthetic oligonucleotide
  Sense strand starting at position 1848 of SEQ ID NO: 1560097
guucgaaucugagaccaug

SEQ ID NO: 1575998 - RNA, 19 nt, Artificial Sequence
  Description of Artificial Sequence: Synthetic oligonucleotide
  Antisense strand to SEQ ID NO: 1575997
cauggucucagauucgaac

SEQ ID NO: 1575999 - RNA, 19 nt, Artificial Sequence
  Description of Artificial Sequence: Synthetic oligonucleotide
  Sense strand starting at position 2316 of SEQ ID NO: 1560097
ccgagugucguagugugaa

SEQ ID NO: 1576000 - RNA, 19 nt, Artificial Sequence
  Description of Artificial Sequence: Synthetic oligonucleotide
  Antisense strand to SEQ ID NO: 1575999
uucacacuacgacacucgg

SEQ ID NO: 1576001 - RNA, 19 nt, Artificial Sequence
  Description of Artificial Sequence: Synthetic oligonucleotide
  Sense strand starting at position 2317 of SEQ ID NO: 1560097
cgagugucguagugugaau

SEQ ID NO: 1576002 - RNA, 19 nt, Artificial Sequence
  Description of Artificial Sequence: Synthetic oligonucleotide
  Antisense strand to SEQ ID NO: 1576001
auucacacuacgacacucg

SEQ ID NO: 1576003 - RNA, 19 nt, Artificial Sequence
  Description of Artificial Sequence: Synthetic oligonucleotide
  Sense strand starting at position 2319 of SEQ ID NO: 1560097
agugucguagugugaauuu

SEQ ID NO: 1576004 - RNA, 19 nt, Artificial Sequence
  Description of Artificial Sequence: Synthetic oligonucleotide
  Antisense strand to SEQ ID NO: 1576003
aaauucacacuacgacacu

SEQ ID NO: 1576005 - RNA, 19 nt, Artificial Sequence
  Description of Artificial Sequence: Synthetic oligonucleotide
  Sense strand starting at position 2415 of SEQ ID NO: 1560097
ugcagguguugucgcgaca

SEQ ID NO: 1576006 - RNA, 19 nt, Artificial Sequence
  Description of Artificial Sequence: Synthetic oligonucleotide
  Antisense strand to SEQ ID NO: 1576005
ugucgcgacaacaccugca

SEQ ID NO: 1576007 - RNA, 19 nt, Artificial Sequence
  Description of Artificial Sequence: Synthetic oligonucleotide
  Sense strand starting at position 2416 of SEQ ID NO: 1560097
gcagguguugucgcgacaa

SEQ ID NO: 1576008 - RNA, 19 nt, Artificial Sequence
  Description of Artificial Sequence: Synthetic oligonucleotide
  Antisense strand to SEQ ID NO: 1576007
uugucgcgacaacaccugc

SEQ ID NO: 1576009 - RNA, 19 nt, Artificial Sequence
  Description of Artificial Sequence: Synthetic oligonucleotide
  Sense strand starting at position 2418 of SEQ ID NO: 1560097
agguguugucgcgacaaac

SEQ ID NO: 1576010 - RNA, 19 nt, Artificial Sequence
  Description of Artificial Sequence: Synthetic oligonucleotide
  Antisense strand to SEQ ID NO: 1576009
guuugucgcgacaacaccu

SEQ ID NO: 1576011 - RNA, 19 nt, Artificial Sequence
  Description of Artificial Sequence: Synthetic oligonucleotide
  Sense strand starting at position 2449 of SEQ ID NO: 1560097
ccuggaguaugguuugacu

SEQ ID NO: 1576012 - RNA, 19 nt, Artificial Sequence
  Description of Artificial Sequence: Synthetic oligonucleotide
  Antisense strand to SEQ ID NO: 1576011
agucaaaccauacuccagg

SEQ ID NO: 1576013 - RNA, 19 nt, Artificial Sequence
  Description of Artificial Sequence: Synthetic oligonucleotide
  Sense strand starting at position 2451 of SEQ ID NO: 1560097
uggaguaugguuugacuca

SEQ ID NO: 1576014 - RNA, 19 nt, Artificial Sequence
  Description of Artificial Sequence: Synthetic oligonucleotide
  Antisense strand to SEQ ID NO: 1576013
ugagucaaaccauacucca

SEQ ID NO: 1576015 - RNA, 19 nt, Artificial Sequence
  Description of Artificial Sequence: Synthetic oligonucleotide
  Sense strand starting at position 2452 of SEQ ID NO: 1560097
ggaguaugguuugacucac

SEQ ID NO: 1576016 - RNA, 19 nt, Artificial Sequence
  Description of Artificial Sequence: Synthetic oligonucleotide
  Antisense strand to SEQ ID NO: 1576015
gugagucaaaccauacucc

SEQ ID NO: 1576017 - RNA, 19 nt, Artificial Sequence
  Description of Artificial Sequence: Synthetic oligonucleotide
  Sense strand starting at position 2490 of SEQ ID NO: 1560097
cgugucuguggcgaggauu

SEQ ID NO: 1576018 - RNA, 19 nt, Artificial Sequence
  Description of Artificial Sequence: Synthetic oligonucleotide
  Antisense strand to SEQ ID NO: 1576017
aauccucgccacagacacg

SEQ ID NO: 1576019 - RNA, 19 nt, Artificial Sequence
  Description of Artificial Sequence: Synthetic oligonucleotide
  Sense strand starting at position 2492 of SEQ ID NO: 1560097
ugucuguggcgaggauuga

SEQ ID NO: 1576020 - RNA, 19 nt, Artificial Sequence
  Description of Artificial Sequence: Synthetic oligonucleotide
  Antisense strand to SEQ ID NO: 1576019
ucaauccucgccacagaca

SEQ ID NO: 1576021 - RNA, 19 nt, Artificial Sequence
  Description of Artificial Sequence: Synthetic oligonucleotide
  Sense strand starting at position 2651 of SEQ ID NO: 1560097
cccaaagaguguccucagu

SEQ ID NO: 1576022 - RNA, 19 nt, Artificial Sequence
  Description of Artificial Sequence: Synthetic oligonucleotide
  Antisense strand to SEQ ID NO: 1576021
acugaggacacucuuuggg

SEQ ID NO: 1576023 - RNA, 19 nt, Artificial Sequence
  Description of Artificial Sequence: Synthetic oligonucleotide
  Sense strand starting at position 2653 of SEQ ID NO: 1560097
caaagaguguccucaguau

SEQ ID NO: 1576024 - RNA, 19 nt, Artificial Sequence
  Description of Artificial Sequence: Synthetic oligonucleotide
  Antisense strand to SEQ ID NO: 1576023
auacugaggacacucuuug

SEQ ID NO: 1576025 - RNA, 19 nt, Artificial Sequence
  Description of Artificial Sequence: Synthetic oligonucleotide
  Sense strand starting at position 2657 of SEQ ID NO: 1560097
gaguguccucaguaugcua

SEQ ID NO: 1576026 - RNA, 19 nt, Artificial Sequence
  Description of Artificial Sequence: Synthetic oligonucleotide
  Antisense strand to SEQ ID NO: 1576025
uagcauacugaggacacuc

SEQ ID NO: 1576027 - RNA, 19 nt, Artificial Sequence
  Description of Artificial Sequence: Synthetic oligonucleotide
  Sense strand starting at position 2665 of SEQ ID NO: 1560097
ucaguaugcuagccucuaa

SEQ ID NO: 1576028 - RNA, 19 nt, Artificial Sequence
  Description of Artificial Sequence: Synthetic oligonucleotide
  Antisense strand to SEQ ID NO: 1576027
uuagaggcuagcauacuga

SEQ ID NO: 1576029 - RNA, 19 nt, Artificial Sequence
  Description of Artificial Sequence: Synthetic oligonucleotide
  Sense strand starting at position 2843 of SEQ ID NO: 1560097
cccaaaguacugugaggua

SEQ ID NO: 1576030 - RNA, 19 nt, Artificial Sequence
  Description of Artificial Sequence: Synthetic oligonucleotide
  Antisense strand to SEQ ID NO: 1576029
uaccucacaguacuuuggg

SEQ ID NO: 1576031 - RNA, 19 nt, Artificial Sequence
  Description of Artificial Sequence: Synthetic oligonucleotide
  Sense strand starting at position 2852 of SEQ ID NO: 1560097
cugugagguacugggauua

SEQ ID NO: 1576032 - RNA, 19 nt, Artificial Sequence
  Description of Artificial Sequence: Synthetic oligonucleotide
  Antisense strand to SEQ ID NO: 1576031
uaaucccaguaccucacag

SEQ ID NO: 1576033 - RNA, 19 nt, Artificial Sequence
  Description of Artificial Sequence: Synthetic oligonucleotide
  Sense strand starting at position 3350 of SEQ ID NO: 1560097
ugaguugaauccuggcugu

SEQ ID NO: 1576034 - RNA, 19 nt, Artificial Sequence
  Description of Artificial Sequence: Synthetic oligonucleotide
  Antisense strand to SEQ ID NO: 1576033
acagccaggauucaacuca

SEQ ID NO: 1576035 - RNA, 19 nt, Artificial Sequence
  Description of Artificial Sequence: Synthetic oligonucleotide
  Sense strand starting at position 3360 of SEQ ID NO: 1560097
ccuggcugugcccuguaau

SEQ ID NO: 1576036 - RNA, 19 nt, Artificial Sequence
  Description of Artificial Sequence: Synthetic oligonucleotide
  Antisense strand to SEQ ID NO: 1576035
auuacagggcacagccagg

SEQ ID NO: 1576037 - RNA, 19 nt, Artificial Sequence
  Description of Artificial Sequence: Synthetic oligonucleotide
  Sense strand starting at position 3361 of SEQ ID NO: 1560097
cuggcugugcccuguaaua

SEQ ID NO: 1576038 - RNA, 19 nt, Artificial Sequence
  Description of Artificial Sequence: Synthetic oligonucleotide
  Antisense strand to SEQ ID NO: 1576037
uauuacagggcacagccag

SEQ ID NO: 1576039 - RNA, 19 nt, Artificial Sequence
  Description of Artificial Sequence: Synthetic oligonucleotide
  Sense strand starting at position 3363 of SEQ ID NO: 1560097
ggcugugcccuguaauaac

SEQ ID NO: 1576040 - RNA, 19 nt, Artificial Sequence
  Description of Artificial Sequence: Synthetic oligonucleotide
  Antisense strand to SEQ ID NO: 1576039
guuauuacagggcacagcc

SEQ ID NO: 1576041 - RNA, 19 nt, Artificial Sequence
  Description of Artificial Sequence: Synthetic oligonucleotide
  Sense strand starting at position 3402 of SEQ ID NO: 1560097
gcuugauauuccugagcag

SEQ ID NO: 1576042 - RNA, 19 nt, Artificial Sequence
  Description of Artificial Sequence: Synthetic oligonucleotide
  Antisense strand to SEQ ID NO: 1576041
cugcucaggaauaucaagc

SEQ ID NO: 1576043 - RNA, 19 nt, Artificial Sequence
  Description of Artificial Sequence: Synthetic oligonucleotide
  Sense strand starting at position 3405 of SEQ ID NO: 1560097
ugauauuccugagcagcga

SEQ ID NO: 1576044 - RNA, 19 nt, Artificial Sequence
  Description of Artificial Sequence: Synthetic oligonucleotide
  Antisense strand to SEQ ID NO: 1576043
ucgcugcucaggaauauca

SEQ ID NO: 1576045 - RNA, 19 nt, Artificial Sequence
  Description of Artificial Sequence: Synthetic oligonucleotide
  Sense strand starting at position 3406 of SEQ ID NO: 1560097
gauauuccugagcagcgau

SEQ ID NO: 1576046 - RNA, 19 nt, Artificial Sequence
  Description of Artificial Sequence: Synthetic oligonucleotide
  Antisense strand to SEQ ID NO: 1576045
aucgcugcucaggaauauc

SEQ ID NO: 1576047 - RNA, 19 nt, Artificial Sequence
  Description of Artificial Sequence: Synthetic oligonucleotide
  Sense strand starting at position 3444 of SEQ ID NO: 1560097
gaacauggguugcuccaua

SEQ ID NO: 1576048 - RNA, 19 nt, Artificial Sequence
  Description of Artificial Sequence: Synthetic oligonucleotide
  Antisense strand to SEQ ID NO: 1576047
uauggagcaacccauguuc

SEQ ID NO: 1576049 - RNA, 19 nt, Artificial Sequence
  Description of Artificial Sequence: Synthetic oligonucleotide
  Sense strand starting at position 3489 of SEQ ID NO: 1560097
ugauaucugcagcaauacu

SEQ ID NO: 1576050 - RNA, 19 nt, Artificial Sequence
  Description of Artificial Sequence: Synthetic oligonucleotide
  Antisense strand to SEQ ID NO: 1576049
aguauugcugcagauauca

SEQ ID NO: 1576051 - RNA, 19 nt, Artificial Sequence
  Description of Artificial Sequence: Synthetic oligonucleotide
  Sense strand starting at position 87 of SEQ ID NO: 1560098
acgguucggucacuuuaua

SEQ ID NO: 1576052 - RNA, 19 nt, Artificial Sequence
  Description of Artificial Sequence: Synthetic oligonucleotide
  Antisense strand to SEQ ID NO: 1576051
uauaaagugaccgaaccgu

SEQ ID NO: 1576053 - RNA, 19 nt, Artificial Sequence
  Description of Artificial Sequence: Synthetic oligonucleotide
  Sense strand starting at position 92 of SEQ ID NO: 1560098
ucggucacuuuauauaauu

SEQ ID NO: 1576054 - RNA, 19 nt, Artificial Sequence
  Description of Artificial Sequence: Synthetic oligonucleotide
  Antisense strand to SEQ ID NO: 1576053
aauuauauaaagugaccga

SEQ ID NO: 1576055 - RNA, 19 nt, Artificial Sequence
  Description of Artificial Sequence: Synthetic oligonucleotide
  Sense strand starting at position 119 of SEQ ID NO: 1560098
agcugugacagcuggcauu

SEQ ID NO: 1576056 - RNA, 19 nt, Artificial Sequence
  Description of Artificial Sequence: Synthetic oligonucleotide
  Antisense strand to SEQ ID NO: 1576055
aaugccagcugucacagcu

SEQ ID NO: 1576057 - RNA, 19 nt, Artificial Sequence
  Description of Artificial Sequence: Synthetic oligonucleotide
  Sense strand starting at position 130 of SEQ ID NO: 1560098
cuggcauuguuaugauuua

SEQ ID NO: 1576058 - RNA, 19 nt, Artificial Sequence
  Description of Artificial Sequence: Synthetic oligonucleotide
  Antisense strand to SEQ ID NO: 1576057
uaaaucauaacaaugccag

SEQ ID NO: 1576059 - RNA, 19 nt, Artificial Sequence
  Description of Artificial Sequence: Synthetic oligonucleotide
  Sense strand starting at position 151 of SEQ ID NO: 1560098
gccacaugucugcagguga

SEQ ID NO: 1576060 - RNA, 19 nt, Artificial Sequence
  Description of Artificial Sequence: Synthetic oligonucleotide
  Antisense strand to SEQ ID NO: 1576059
ucaccugcagacauguggc

SEQ ID NO: 1576061 - RNA, 19 nt, Artificial Sequence
  Description of Artificial Sequence: Synthetic oligonucleotide
  Sense strand starting at position 162 of SEQ ID NO: 1560098
gcaggugacuguguucuga

SEQ ID NO: 1576062 - RNA, 19 nt, Artificial Sequence
  Description of Artificial Sequence: Synthetic oligonucleotide
  Antisense strand to SEQ ID NO: 1576061
ucagaacacagucaccugc

SEQ ID NO: 1576063 - RNA, 19 nt, Artificial Sequence
  Description of Artificial Sequence: Synthetic oligonucleotide
  Sense strand starting at position 164 of SEQ ID NO: 1560098
aggugacuguguucugaug

SEQ ID NO: 1576064 - RNA, 19 nt, Artificial Sequence
  Description of Artificial Sequence: Synthetic oligonucleotide
  Antisense strand to SEQ ID NO: 1576063
caucagaacacagucaccu

SEQ ID NO: 1576065 - RNA, 19 nt, Artificial Sequence
  Description of Artificial Sequence: Synthetic oligonucleotide
  Sense strand starting at position 189 of SEQ ID NO: 1560098
uuuccacaucuguggauau

SEQ ID NO: 1576066 - RNA, 19 nt, Artificial Sequence
  Description of Artificial Sequence: Synthetic oligonucleotide
  Antisense strand to SEQ ID NO: 1576065
auauccacagauguggaaa

SEQ ID NO: 1576067 - RNA, 19 nt, Artificial Sequence
  Description of Artificial Sequence: Synthetic oligonucleotide
  Sense strand starting at position 361 of SEQ ID NO: 1560098
uggguaacagguugaaagu

SEQ ID NO: 1576068 - RNA, 19 nt, Artificial Sequence
  Description of Artificial Sequence: Synthetic oligonucleotide
  Antisense strand to SEQ ID NO: 1576067
acuuucaaccuguuaccca

SEQ ID NO: 1576069 - RNA, 19 nt, Artificial Sequence
  Description of Artificial Sequence: Synthetic oligonucleotide
  Sense strand starting at position 389 of SEQ ID NO: 1560098
gaggucaaauccucucuga

SEQ ID NO: 1576070 - RNA, 19 nt, Artificial Sequence
  Description of Artificial Sequence: Synthetic oligonucleotide
  Antisense strand to SEQ ID NO: 1576069
ucagagaggauuugaccuc

SEQ ID NO: 1576071 - RNA, 19 nt, Artificial Sequence
  Description of Artificial Sequence: Synthetic oligonucleotide
  Sense strand starting at position 558 of SEQ ID NO: 1560098
cugagaaugucauggagaa

SEQ ID NO: 1576072 - RNA, 19 nt, Artificial Sequence
  Description of Artificial Sequence: Synthetic oligonucleotide
  Antisense strand to SEQ ID NO: 1576071
uucuccaugacauucucag

SEQ ID NO: 1576073 - RNA, 19 nt, Artificial Sequence
  Description of Artificial Sequence: Synthetic oligonucleotide
  Sense strand starting at position 585 of SEQ ID NO: 1560098
cugggauugucauggucaa

SEQ ID NO: 1576074 - RNA, 19 nt, Artificial Sequence
  Description of Artificial Sequence: Synthetic oligonucleotide
  Antisense strand to SEQ ID NO: 1576073
uugaccaugacaaucccag

SEQ ID NO: 1576075 - RNA, 19 nt, Artificial Sequence
  Description of Artificial Sequence: Synthetic oligonucleotide
  Sense strand starting at position 586 of SEQ ID NO: 1560098
ugggauugucauggucaag

SEQ ID NO: 1576076 - RNA, 19 nt, Artificial Sequence
  Description of Artificial Sequence: Synthetic oligonucleotide
  Antisense strand to SEQ ID NO: 1576075
cuugaccaugacaauccca

SEQ ID NO: 1576077 - RNA, 19 nt, Artificial Sequence
  Description of Artificial Sequence: Synthetic oligonucleotide
  Sense strand starting at position 589 of SEQ ID NO: 1560098
gauugucauggucaagggu

SEQ ID NO: 1576078 - RNA, 19 nt, Artificial Sequence
  Description of Artificial Sequence: Synthetic oligonucleotide
  Antisense strand to SEQ ID NO: 1576077
acccuugaccaugacaauc

SEQ ID NO: 1576079 - RNA, 19 nt, Artificial Sequence
  Description of Artificial Sequence: Synthetic oligonucleotide
  Sense strand starting at position 1115 of SEQ ID NO: 1560098
cgccucgcugcgaagagau

SEQ ID NO: 1576080 - RNA, 19 nt, Artificial Sequence
  Description of Artificial Sequence: Synthetic oligonucleotide
  Antisense strand to SEQ ID NO: 1576079
aucucuucgcagcgaggcg

SEQ ID NO: 1576081 - RNA, 19 nt, Artificial Sequence
  Description of Artificial Sequence: Synthetic oligonucleotide
  Sense strand starting at position 1215 of SEQ ID NO: 1560098
gccguuaucuuccuuacuu

SEQ ID NO: 1576082 - RNA, 19 nt, Artificial Sequence
  Description of Artificial Sequence: Synthetic oligonucleotide
  Antisense strand to SEQ ID NO: 1576081
aaguaaggaagauaacggc

SEQ ID NO: 1576083 - RNA, 19 nt, Artificial Sequence
  Description of Artificial Sequence: Synthetic oligonucleotide
  Sense strand starting at position 1216 of SEQ ID NO: 1560098
ccguuaucuuccuuacuug

SEQ ID NO: 1576084 - RNA, 19 nt, Artificial Sequence
  Description of Artificial Sequence: Synthetic oligonucleotide
  Antisense strand to SEQ ID NO: 1576083
caaguaaggaagauaacgg

SEQ ID NO: 1576085 - RNA, 19 nt, Artificial Sequence
  Description of Artificial Sequence: Synthetic oligonucleotide
  Sense strand starting at position 1761 of SEQ ID NO: 1560098
gggcucaccuccucauuaa

SEQ ID NO: 1576086 - RNA, 19 nt, Artificial Sequence
  Description of Artificial Sequence: Synthetic oligonucleotide
  Antisense strand to SEQ ID NO: 1576085
uuaaugaggaggugagccc

SEQ ID NO: 1576087 - RNA, 19 nt, Artificial Sequence
  Description of Artificial Sequence: Synthetic oligonucleotide
  Sense strand starting at position 1827 of SEQ ID NO: 1560098
aaaugucacucagacgcau

SEQ ID NO: 1576088 - RNA, 19 nt, Artificial Sequence
  Description of Artificial Sequence: Synthetic oligonucleotide
  Antisense strand to SEQ ID NO: 1576087
augcgucugagugacauuu

SEQ ID NO: 1576089 - RNA, 19 nt, Artificial Sequence
  Description of Artificial Sequence: Synthetic oligonucleotide
  Sense strand starting at position 2085 of SEQ ID NO: 1560098
cagguuagccuccagguua

SEQ ID NO: 1576090 - RNA, 19 nt, Artificial Sequence
  Description of Artificial Sequence: Synthetic oligonucleotide
  Antisense strand to SEQ ID NO: 1576089
uaaccuggaggcuaaccug

SEQ ID NO: 1576091 - RNA, 19 nt, Artificial Sequence
  Description of Artificial Sequence: Synthetic oligonucleotide
  Sense strand starting at position 2181 of SEQ ID NO: 1560098
ucugauagucuccgccuua

SEQ ID NO: 1576092 - RNA, 19 nt, Artificial Sequence
  Description of Artificial Sequence: Synthetic oligonucleotide
  Antisense strand to SEQ ID NO: 1576091
uaaggcggagacuaucaga

SEQ ID NO: 1576093 - RNA, 19 nt, Artificial Sequence
  Description of Artificial Sequence: Synthetic oligonucleotide
  Sense strand starting at position 2600 of SEQ ID NO: 1560098
gcaaccuccucaggucuaa

SEQ ID NO: 1576094 - RNA, 19 nt, Artificial Sequence
  Description of Artificial Sequence: Synthetic oligonucleotide
  Antisense strand to SEQ ID NO: 1576093
uuagaccugaggagguugc

SEQ ID NO: 1576095 - RNA, 19 nt, Artificial Sequence
  Description of Artificial Sequence: Synthetic oligonucleotide
  Sense strand starting at position 2722 of SEQ ID NO: 1560098
aggcguucccgacaugucu

SEQ ID NO: 1576096 - RNA, 19 nt, Artificial Sequence
  Description of Artificial Sequence: Synthetic oligonucleotide
  Antisense strand to SEQ ID NO: 1576095
agacaugucgggaacgccu

SEQ ID NO: 1576097 - RNA, 19 nt, Artificial Sequence
  Description of Artificial Sequence: Synthetic oligonucleotide
  Sense strand starting at position 2730 of SEQ ID NO: 1560098
ccgacaugucugggcgcua

SEQ ID NO: 1576098 - RNA, 19 nt, Artificial Sequence
  Description of Artificial Sequence: Synthetic oligonucleotide
  Antisense strand to SEQ ID NO: 1576097
uagcgcccagacaugucgg

SEQ ID NO: 1576099 - RNA, 19 nt, Artificial Sequence
  Description of Artificial Sequence: Synthetic oligonucleotide
  Sense strand starting at position 2892 of SEQ ID NO: 1560098
gcaggauuccagugucacc

SEQ ID NO: 1576100 - RNA, 19 nt, Artificial Sequence
  Description of Artificial Sequence: Synthetic oligonucleotide
  Antisense strand to SEQ ID NO: 1576099
ggugacacuggaauccugc

SEQ ID NO: 1576101 - RNA, 19 nt, Artificial Sequence
  Description of Artificial Sequence: Synthetic oligonucleotide
  Sense strand starting at position 3039 of SEQ ID NO: 1560098
caggguaucucugaaaccu

SEQ ID NO: 1576102 - RNA, 19 nt, Artificial Sequence
  Description of Artificial Sequence: Synthetic oligonucleotide
  Antisense strand to SEQ ID NO: 1576101
agguuucagagauacccug

SEQ ID NO: 1576103 - RNA, 19 nt, Artificial Sequence
  Description of Artificial Sequence: Synthetic oligonucleotide
  Sense strand starting at position 3141 of SEQ ID NO: 1560098
guucgaaucugagaccaug

SEQ ID NO: 1576104 - RNA, 19 nt, Artificial Sequence
  Description of Artificial Sequence: Synthetic oligonucleotide
  Antisense strand to SEQ ID NO: 1576103
cauggucucagauucgaac

SEQ ID NO: 1576105 - RNA, 19 nt, Artificial Sequence
  Description of Artificial Sequence: Synthetic oligonucleotide
  Sense strand starting at position 3609 of SEQ ID NO: 1560098
ccgagugucguagugugaa

SEQ ID NO: 1576106 - RNA, 19 nt, Artificial Sequence
  Description of Artificial Sequence: Synthetic oligonucleotide
  Antisense strand to SEQ ID NO: 1576105
uucacacuacgacacucgg

SEQ ID NO: 1576107 - RNA, 19 nt, Artificial Sequence
  Description of Artificial Sequence: Synthetic oligonucleotide
  Sense strand starting at position 3612 of SEQ ID NO: 1560098
agugucguagugugaauuu

SEQ ID NO: 1576108 - RNA, 19 nt, Artificial Sequence
  Description of Artificial Sequence: Synthetic oligonucleotide
  Antisense strand to SEQ ID NO: 1576107
aaauucacacuacgacacu

SEQ ID NO: 1576109 - RNA, 19 nt, Artificial Sequence
  Description of Artificial Sequence: Synthetic oligonucleotide
  Sense strand starting at position 3709 of SEQ ID NO: 1560098
gcagguguugucgcgacaa

SEQ ID NO: 1576110 - RNA, 19 nt, Artificial Sequence
  Description of Artificial Sequence: Synthetic oligonucleotide
  Antisense strand to SEQ ID NO: 1576109
uugucgcgacaacaccugc

SEQ ID NO: 1576111 - RNA, 19 nt, Artificial Sequence
  Description of Artificial Sequence: Synthetic oligonucleotide
  Sense strand starting at position 3711 of SEQ ID NO: 1560098
agguguugucgcgacaaac

SEQ ID NO: 1576112 - RNA, 19 nt, Artificial Sequence
  Description of Artificial Sequence: Synthetic oligonucleotide
  Antisense strand to SEQ ID NO: 1576111
guuugucgcgacaacaccu

SEQ ID NO: 1576113 - RNA, 19 nt, Artificial Sequence
  Description of Artificial Sequence: Synthetic oligonucleotide
  Sense strand starting at position 3742 of SEQ ID NO: 1560098
ccuggaguaugguuugacu

SEQ ID NO: 1576114 - RNA, 19 nt, Artificial Sequence
  Description of Artificial Sequence: Synthetic oligonucleotide
  Antisense strand to SEQ ID NO: 1576113
agucaaaccauacuccagg

SEQ ID NO: 1576115 - RNA, 19 nt, Artificial Sequence
  Description of Artificial Sequence: Synthetic oligonucleotide
  Sense strand starting at position 3744 of SEQ ID NO: 1560098
uggaguaugguuugacuca

SEQ ID NO: 1576116 - RNA, 19 nt, Artificial Sequence
  Description of Artificial Sequence: Synthetic oligonucleotide
  Antisense strand to SEQ ID NO: 1576115
ugagucaaaccauacucca

SEQ ID NO: 1576117 - RNA, 19 nt, Artificial Sequence
  Description of Artificial Sequence: Synthetic oligonucleotide
  Sense strand starting at position 3745 of SEQ ID NO: 1560098
ggaguaugguuugacucac

SEQ ID NO: 1576118 - RNA, 19 nt, Artificial Sequence
  Description of Artificial Sequence: Synthetic oligonucleotide
  Antisense strand to SEQ ID NO: 1576117
gugagucaaaccauacucc

SEQ ID NO: 1576119 - RNA, 19 nt, Artificial Sequence
  Description of Artificial Sequence: Synthetic oligonucleotide
  Sense strand starting at position 3783 of SEQ ID NO: 1560098
cgugucuguggcgaggauu

SEQ ID NO: 1576120 - RNA, 19 nt, Artificial Sequence
  Description of Artificial Sequence: Synthetic oligonucleotide
  Antisense strand to SEQ ID NO: 1576119
aauccucgccacagacacg

SEQ ID NO: 1576121 - RNA, 19 nt, Artificial Sequence
  Description of Artificial Sequence: Synthetic oligonucleotide
  Sense strand starting at position 3785 of SEQ ID NO: 1560098
ugucuguggcgaggauuga

SEQ ID NO: 1576122 - RNA, 19 nt, Artificial Sequence
  Description of Artificial Sequence: Synthetic oligonucleotide
  Antisense strand to SEQ ID NO: 1576121
ucaauccucgccacagaca

SEQ ID NO: 1576123 - RNA, 19 nt, Artificial Sequence
  Description of Artificial Sequence: Synthetic oligonucleotide
  Sense strand starting at position 3944 of SEQ ID NO: 1560098
cccaaagaguguccucagu

SEQ ID NO: 1576124 - RNA, 19 nt, Artificial Sequence
  Description of Artificial Sequence: Synthetic oligonucleotide
  Antisense strand to SEQ ID NO: 1576123
acugaggacacucuuuggg

SEQ ID NO: 1576125 - RNA, 19 nt, Artificial Sequence
  Description of Artificial Sequence: Synthetic oligonucleotide
  Sense strand starting at position 3946 of SEQ ID NO: 1560098
caaagaguguccucaguau

SEQ ID NO: 1576126 - RNA, 19 nt, Artificial Sequence
  Description of Artificial Sequence: Synthetic oligonucleotide
  Antisense strand to SEQ ID NO: 1576125
auacugaggacacucuuug

SEQ ID NO: 1576127 - RNA, 19 nt, Artificial Sequence
  Description of Artificial Sequence: Synthetic oligonucleotide
  Sense strand starting at position 3950 of SEQ ID NO: 1560098
gaguguccucaguaugcua

SEQ ID NO: 1576128 - RNA, 19 nt, Artificial Sequence
  Description of Artificial Sequence: Synthetic oligonucleotide
  Antisense strand to SEQ ID NO: 1576127
uagcauacugaggacacuc

SEQ ID NO: 1576129 - RNA, 19 nt, Artificial Sequence
  Description of Artificial Sequence: Synthetic oligonucleotide
  Sense strand starting at position 3958 of SEQ ID NO: 1560098
ucaguaugcuagccucuaa

SEQ ID NO: 1576130 - RNA, 19 nt, Artificial Sequence
  Description of Artificial Sequence: Synthetic oligonucleotide
  Antisense strand to SEQ ID NO: 1576129
uuagaggcuagcauacuga

SEQ ID NO: 1576131 - RNA, 19 nt, Artificial Sequence
  Description of Artificial Sequence: Synthetic oligonucleotide
  Sense strand starting at position 2085 of SEQ ID NO: 1560099
gagccagaucccuguggca

SEQ ID NO: 1576132 - RNA, 19 nt, Artificial Sequence
  Description of Artificial Sequence: Synthetic oligonucleotide
  Antisense strand to SEQ ID NO: 1576131
ugccacagggaucuggcuc

SEQ ID NO: 1576133 - RNA, 19 nt, Artificial Sequence
  Description of Artificial Sequence: Synthetic oligonucleotide
  Sense strand starting at position 2157 of SEQ ID NO: 1560099
cugaaaugcccuggaugga

SEQ ID NO: 1576134 - RNA, 19 nt, Artificial Sequence
  Description of Artificial Sequence: Synthetic oligonucleotide
  Antisense strand to SEQ ID NO: 1576133
uccauccagggcauuucag

SEQ ID NO: 1576135 - RNA, 19 nt, Artificial Sequence
  Description of Artificial Sequence: Synthetic oligonucleotide
  Sense strand starting at position 2193 of SEQ ID NO: 1560099
ggaggcuugacgcaugauu

SEQ ID NO: 1576136 - RNA, 19 nt, Artificial Sequence
  Description of Artificial Sequence: Synthetic oligonucleotide
  Antisense strand to SEQ ID NO: 1576135
aaucaugcgucaagccucc

SEQ ID NO: 1576137 - RNA, 19 nt, Artificial Sequence
  Description of Artificial Sequence: Synthetic oligonucleotide
  Sense strand starting at position 2202 of SEQ ID NO: 1560099
acgcaugauuccuguguga

SEQ ID NO: 1576138 - RNA, 19 nt, Artificial Sequence
  Description of Artificial Sequence: Synthetic oligonucleotide
  Antisense strand to SEQ ID NO: 1576137
ucacacaggaaucaugcgu

SEQ ID NO: 1576139 - RNA, 19 nt, Artificial Sequence
  Description of Artificial Sequence: Synthetic oligonucleotide
  Sense strand starting at position 2204 of SEQ ID NO: 1560099
gcaugauuccugugugacc

SEQ ID NO: 1576140 - RNA, 19 nt, Artificial Sequence
  Description of Artificial Sequence: Synthetic oligonucleotide
  Antisense strand to SEQ ID NO: 1576139
ggucacacaggaaucaugc

SEQ ID NO: 1576141 - RNA, 19 nt, Artificial Sequence
  Description of Artificial Sequence: Synthetic oligonucleotide
  Sense strand starting at position 2337 of SEQ ID NO: 1560099
ugcggcucaugccugaaau

SEQ ID NO: 1576142 - RNA, 19 nt, Artificial Sequence
  Description of Artificial Sequence: Synthetic oligonucleotide
  Antisense strand to SEQ ID NO: 1576141
auuucaggcaugagccgca

SEQ ID NO: 1576143 - RNA, 19 nt, Artificial Sequence
  Description of Artificial Sequence: Synthetic oligonucleotide
  Sense strand starting at position 2429 of SEQ ID NO: 1560099
gagaacuuguuucuauugu

SEQ ID NO: 1576144 - RNA, 19 nt, Artificial Sequence
  Description of Artificial Sequence: Synthetic oligonucleotide
  Antisense strand to SEQ ID NO: 1576143
acaauagaaacaaguucuc

SEQ ID NO: 1576145 - RNA, 19 nt, Artificial Sequence
  Description of Artificial Sequence: Synthetic oligonucleotide
  Sense strand starting at position 2430 of SEQ ID NO: 1560099
agaacuuguuucuauugua

SEQ ID NO: 1576146 - RNA, 19 nt, Artificial Sequence
  Description of Artificial Sequence: Synthetic oligonucleotide
  Antisense strand to SEQ ID NO: 1576145
uacaauagaaacaaguucu

SEQ ID NO: 1576147 - RNA, 19 nt, Artificial Sequence
  Description of Artificial Sequence: Synthetic oligonucleotide
  Sense strand starting at position 2968 of SEQ ID NO: 1560099
aggccugaaacgugacuua

SEQ ID NO: 1576148 - RNA, 19 nt, Artificial Sequence
  Description of Artificial Sequence: Synthetic oligonucleotide
  Antisense strand to SEQ ID NO: 1576147
uaagucacguuucaggccu

SEQ ID NO: 1576149 - RNA, 19 nt, Artificial Sequence
  Description of Artificial Sequence: Synthetic oligonucleotide
  Sense strand starting at position 3044 of SEQ ID NO: 1560099
agcccugauccuggacaua

SEQ ID NO: 1576150 - RNA, 19 nt, Artificial Sequence
  Description of Artificial Sequence: Synthetic oligonucleotide
  Antisense strand to SEQ ID NO: 1576149
uauguccaggaucagggcu

SEQ ID NO: 1576151 - RNA, 19 nt, Artificial Sequence
  Description of Artificial Sequence: Synthetic oligonucleotide
  Sense strand starting at position 3100 of SEQ ID NO: 1560099
aacggagacaucggauaua

SEQ ID NO: 1576152 - RNA, 19 nt, Artificial Sequence
  Description of Artificial Sequence: Synthetic oligonucleotide
  Antisense strand to SEQ ID NO: 1576151
uauauccgaugucuccguu

SEQ ID NO: 1576153 - RNA, 19 nt, Artificial Sequence
  Description of Artificial Sequence: Synthetic oligonucleotide
  Sense strand starting at position 3112 of SEQ ID NO: 1560099
ggauauaccugcccgcuaa

SEQ ID NO: 1576154 - RNA, 19 nt, Artificial Sequence
  Description of Artificial Sequence: Synthetic oligonucleotide
  Antisense strand to SEQ ID NO: 1576153
uuagcgggcagguauaucc

SEQ ID NO: 1576155 - RNA, 19 nt, Artificial Sequence
  Description of Artificial Sequence: Synthetic oligonucleotide
  Sense strand starting at position 3116 of SEQ ID NO: 1560099
auaccugcccgcuaagaua

SEQ ID NO: 1576156 - RNA, 19 nt, Artificial Sequence
  Description of Artificial Sequence: Synthetic oligonucleotide
  Antisense strand to SEQ ID NO: 1576155
uaucuuagcgggcagguau

SEQ ID NO: 1576157 - RNA, 19 nt, Artificial Sequence
  Description of Artificial Sequence: Synthetic oligonucleotide
  Sense strand starting at position 3125 of SEQ ID NO: 1560099
cgcuaagauagguggguuu

SEQ ID NO: 1576158 - RNA, 19 nt, Artificial Sequence
  Description of Artificial Sequence: Synthetic oligonucleotide
  Antisense strand to SEQ ID NO: 1576157
aaacccaccuaucuuagcg

SEQ ID NO: 1576159 - RNA, 19 nt, Artificial Sequence
  Description of Artificial Sequence: Synthetic oligonucleotide
  Sense strand starting at position 3247 of SEQ ID NO: 1560099
gcacaauuauauugucaga

SEQ ID NO: 1576160 - RNA, 19 nt, Artificial Sequence
  Description of Artificial Sequence: Synthetic oligonucleotide
  Antisense strand to SEQ ID NO: 1576159
ucugacaauauaauugugc

SEQ ID NO: 1576161 - RNA, 19 nt, Artificial Sequence
  Description of Artificial Sequence: Synthetic oligonucleotide
  Sense strand starting at position 3252 of SEQ ID NO: 1560099
auuauauugucagaaguug

SEQ ID NO: 1576162 - RNA, 19 nt, Artificial Sequence
  Description of Artificial Sequence: Synthetic oligonucleotide
  Antisense strand to SEQ ID NO: 1576161
caacuucugacaauauaau

SEQ ID NO: 1576163 - RNA, 19 nt, Artificial Sequence
  Description of Artificial Sequence: Synthetic oligonucleotide
  Sense strand starting at position 48 of SEQ ID NO: 1560100
agaugaaguuguuugcaca

SEQ ID NO: 1576164 - RNA, 19 nt, Artificial Sequence
  Description of Artificial Sequence: Synthetic oligonucleotide
  Antisense strand to SEQ ID NO: 1576163
ugugcaaacaacuucaucu

SEQ ID NO: 1576165 - RNA, 19 nt, Artificial Sequence
  Description of Artificial Sequence: Synthetic oligonucleotide
  Sense strand starting at position 92 of SEQ ID NO: 1560100
aagguaggaucucuuuauu

SEQ ID NO: 1576166 - RNA, 19 nt, Artificial Sequence
  Description of Artificial Sequence: Synthetic oligonucleotide
  Antisense strand to SEQ ID NO: 1576165
aauaaagagauccuaccuu

SEQ ID NO: 1576167 - RNA, 19 nt, Artificial Sequence
  Description of Artificial Sequence: Synthetic oligonucleotide
  Sense strand starting at position 117 of SEQ ID NO: 1560100
gagcgugucagggaugaug

SEQ ID NO: 1576168 - RNA, 19 nt, Artificial Sequence
  Description of Artificial Sequence: Synthetic oligonucleotide
  Antisense strand to SEQ ID NO: 1576167
caucaucccugacacgcuc

SEQ ID NO: 1576169 - RNA, 19 nt, Artificial Sequence
  Description of Artificial Sequence: Synthetic oligonucleotide
  Sense strand starting at position 137 of SEQ ID NO: 1560100
acacuagagugaucugcau

SEQ ID NO: 1576170 - RNA, 19 nt, Artificial Sequence
  Description of Artificial Sequence: Synthetic oligonucleotide
  Antisense strand to SEQ ID NO: 1576169
augcagaucacucuagugu

SEQ ID NO: 1576171 - RNA, 19 nt, Artificial Sequence
  Description of Artificial Sequence: Synthetic oligonucleotide
  Sense strand starting at position 170 of SEQ ID NO: 1560100
agacaucacucagcaguga

SEQ ID NO: 1576172 - RNA, 19 nt, Artificial Sequence
  Description of Artificial Sequence: Synthetic oligonucleotide
  Antisense strand to SEQ ID NO: 1576171
ucacugcugagugaugucu

SEQ ID NO: 1576173 - RNA, 19 nt, Artificial Sequence
  Description of Artificial Sequence: Synthetic oligonucleotide
  Sense strand starting at position 271 of SEQ ID NO: 1560100
aauccuuguggugauuaau

SEQ ID NO: 1576174 - RNA, 19 nt, Artificial Sequence
  Description of Artificial Sequence: Synthetic oligonucleotide
  Antisense strand to SEQ ID NO: 1576173
auuaaucaccacaaggauu

SEQ ID NO: 1576175 - RNA, 19 nt, Artificial Sequence
  Description of Artificial Sequence: Synthetic oligonucleotide
  Sense strand starting at position 274 of SEQ ID NO: 1560100
ccuuguggugauuaaucau

SEQ ID NO: 1576176 - RNA, 19 nt, Artificial Sequence
  Description of Artificial Sequence: Synthetic oligonucleotide
  Antisense strand to SEQ ID NO: 1576175
augauuaaucaccacaagg

SEQ ID NO: 1576177 - RNA, 19 nt, Artificial Sequence
  Description of Artificial Sequence: Synthetic oligonucleotide
  Sense strand starting at position 277 of SEQ ID NO: 1560100
uguggugauuaaucauaga

SEQ ID NO: 1576178 - RNA, 19 nt, Artificial Sequence
  Description of Artificial Sequence: Synthetic oligonucleotide
  Antisense strand to SEQ ID NO: 1576177
ucuaugauuaaucaccaca

SEQ ID NO: 1576179 - RNA, 19 nt, Artificial Sequence
  Description of Artificial Sequence: Synthetic oligonucleotide
  Sense strand starting at position 303 of SEQ ID NO: 1560100
aauuacuuagcgcaagagu

SEQ ID NO: 1576180 - RNA, 19 nt, Artificial Sequence
  Description of Artificial Sequence: Synthetic oligonucleotide
  Antisense strand to SEQ ID NO: 1576179
acucuugcgcuaaguaauu

SEQ ID NO: 1576181 - RNA, 19 nt, Artificial Sequence
  Description of Artificial Sequence: Synthetic oligonucleotide
  Sense strand starting at position 386 of SEQ ID NO: 1560100
ucaucugucucagucauuu

SEQ ID NO: 1576182 - RNA, 19 nt, Artificial Sequence
  Description of Artificial Sequence: Synthetic oligonucleotide
  Antisense strand to SEQ ID NO: 1576181
aaaugacugagacagauga

SEQ ID NO: 1576183 - RNA, 19 nt, Artificial Sequence
  Description of Artificial Sequence: Synthetic oligonucleotide
  Sense strand starting at position 747 of SEQ ID NO: 1560100
gcuugugaacaauauaaau

SEQ ID NO: 1576184 - RNA, 19 nt, Artificial Sequence
  Description of Artificial Sequence: Synthetic oligonucleotide
  Antisense strand to SEQ ID NO: 1576183
auuuauauuguucacaagc

SEQ ID NO: 1576185 - RNA, 19 nt, Artificial Sequence
  Description of Artificial Sequence: Synthetic oligonucleotide
  Sense strand starting at position 882 of SEQ ID NO: 1560100
aaaggagcucuccaggguu

SEQ ID NO: 1576186 - RNA, 19 nt, Artificial Sequence
  Description of Artificial Sequence: Synthetic oligonucleotide
  Antisense strand to SEQ ID NO: 1576185
aacccuggagagcuccuuu

SEQ ID NO: 1576187 - RNA, 19 nt, Artificial Sequence
  Description of Artificial Sequence: Synthetic oligonucleotide
  Sense strand starting at position 1051 of SEQ ID NO: 1560100
gucugaauugcauacauga

SEQ ID NO: 1576188 - RNA, 19 nt, Artificial Sequence
  Description of Artificial Sequence: Synthetic oligonucleotide
  Antisense strand to SEQ ID NO: 1576187
ucauguaugcaauucagac

SEQ ID NO: 1576189 - RNA, 19 nt, Artificial Sequence
  Description of Artificial Sequence: Synthetic oligonucleotide
  Sense strand starting at position 1235 of SEQ ID NO: 1560100
augcuaugggauugucaag

SEQ ID NO: 1576190 - RNA, 19 nt, Artificial Sequence
  Description of Artificial Sequence: Synthetic oligonucleotide
  Antisense strand to SEQ ID NO: 1576189
cuugacaaucccauagcau

SEQ ID NO: 1576191 - RNA, 19 nt, Artificial Sequence
  Description of Artificial Sequence: Synthetic oligonucleotide
  Sense strand starting at position 1757 of SEQ ID NO: 1560100
caugcagagaugggugaau

SEQ ID NO: 1576192 - RNA, 19 nt, Artificial Sequence
  Description of Artificial Sequence: Synthetic oligonucleotide
  Antisense strand to SEQ ID NO: 1576191
auucacccaucucugcaug

SEQ ID NO: 1576193 - RNA, 19 nt, Artificial Sequence
  Description of Artificial Sequence: Synthetic oligonucleotide
  Sense strand starting at position 1759 of SEQ ID NO: 1560100
ugcagagaugggugaauga

SEQ ID NO: 1576194 - RNA, 19 nt, Artificial Sequence
  Description of Artificial Sequence: Synthetic oligonucleotide
  Antisense strand to SEQ ID NO: 1576193
ucauucacccaucucugca

SEQ ID NO: 1576195 - RNA, 19 nt, Artificial Sequence
  Description of Artificial Sequence: Synthetic oligonucleotide
  Sense strand starting at position 1789 of SEQ ID NO: 1560100
gcagaaccuuucuuccaga

SEQ ID NO: 1576196 - RNA, 19 nt, Artificial Sequence
  Description of Artificial Sequence: Synthetic oligonucleotide
  Antisense strand to SEQ ID NO: 1576195
ucuggaagaaagguucugc

SEQ ID NO: 1576197 - RNA, 19 nt, Artificial Sequence
  Description of Artificial Sequence: Synthetic oligonucleotide
  Sense strand starting at position 1966 of SEQ ID NO: 1560100
ugugguauuuaugucuuua

SEQ ID NO: 1576198 - RNA, 19 nt, Artificial Sequence
  Description of Artificial Sequence: Synthetic oligonucleotide
  Antisense strand to SEQ ID NO: 1576197
uaaagacauaaauaccaca

SEQ ID NO: 1576199 - RNA, 19 nt, Artificial Sequence
  Description of Artificial Sequence: Synthetic oligonucleotide
  Sense strand starting at position 1968 of SEQ ID NO: 1560100
ugguauuuaugucuuuacu

SEQ ID NO: 1576200 - RNA, 19 nt, Artificial Sequence
  Description of Artificial Sequence: Synthetic oligonucleotide
  Antisense strand to SEQ ID NO: 1576199
aguaaagacauaaauacca

SEQ ID NO: 1576201 - RNA, 19 nt, Artificial Sequence
  Description of Artificial Sequence: Synthetic oligonucleotide
  Sense strand starting at position 1970 of SEQ ID NO: 1560100
guauuuaugucuuuacugu

SEQ ID NO: 1576202 - RNA, 19 nt, Artificial Sequence
  Description of Artificial Sequence: Synthetic oligonucleotide
  Antisense strand to SEQ ID NO: 1576201
acaguaaagacauaaauac

SEQ ID NO: 1576203 - RNA, 19 nt, Artificial Sequence
  Description of Artificial Sequence: Synthetic oligonucleotide
  Sense strand starting at position 2049 of SEQ ID NO: 1560100
agauaaaucuuagcuucug

SEQ ID NO: 1576204 - RNA, 19 nt, Artificial Sequence
  Description of Artificial Sequence: Synthetic oligonucleotide
  Antisense strand to SEQ ID NO: 1576203
cagaagcuaagauuuaucu

SEQ ID NO: 1576205 - RNA, 19 nt, Artificial Sequence
  Description of Artificial Sequence: Synthetic oligonucleotide
  Sense strand starting at position 2070 of SEQ ID NO: 1560100
ucucucaaagguugacaaa

SEQ ID NO: 1576206 - RNA, 19 nt, Artificial Sequence
  Description of Artificial Sequence: Synthetic oligonucleotide
  Antisense strand to SEQ ID NO: 1576205
uuugucaaccuuugagaga

SEQ ID NO: 1576207 - RNA, 19 nt, Artificial Sequence
  Description of Artificial Sequence: Synthetic oligonucleotide
  Sense strand starting at position 2110 of SEQ ID NO: 1560100
agagaugcaucaguggaau

SEQ ID NO: 1576208 - RNA, 19 nt, Artificial Sequence
  Description of Artificial Sequence: Synthetic oligonucleotide
  Antisense strand to SEQ ID NO: 1576207
auuccacugaugcaucucu

SEQ ID NO: 1576209 - RNA, 19 nt, Artificial Sequence
  Description of Artificial Sequence: Synthetic oligonucleotide
  Sense strand starting at position 2252 of SEQ ID NO: 1560100
gcgagaucuugacucacag

SEQ ID NO: 1576210 - RNA, 19 nt, Artificial Sequence
  Description of Artificial Sequence: Synthetic oligonucleotide
  Antisense strand to SEQ ID NO: 1576209
cugugagucaagaucucgc

SEQ ID NO: 1576211 - RNA, 19 nt, Artificial Sequence
  Description of Artificial Sequence: Synthetic oligonucleotide
  Sense strand starting at position 2528 of SEQ ID NO: 1560100
gggucugcaaguuaaguua

SEQ ID NO: 1576212 - RNA, 19 nt, Artificial Sequence
  Description of Artificial Sequence: Synthetic oligonucleotide
  Antisense strand to SEQ ID NO: 1576211
uaacuuaacuugcagaccc

SEQ ID NO: 1576213 - RNA, 19 nt, Artificial Sequence
  Description of Artificial Sequence: Synthetic oligonucleotide
  Sense strand starting at position 2536 of SEQ ID NO: 1560100
aaguuaaguuaugcagaac

SEQ ID NO: 1576214 - RNA, 19 nt, Artificial Sequence
  Description of Artificial Sequence: Synthetic oligonucleotide
  Antisense strand to SEQ ID NO: 1576213
guucugcauaacuuaacuu

SEQ ID NO: 1576215 - RNA, 19 nt, Artificial Sequence
  Description of Artificial Sequence: Synthetic oligonucleotide
  Sense strand starting at position 2692 of SEQ ID NO: 1560100
ggaaccguugucuaaucca

SEQ ID NO: 1576216 - RNA, 19 nt, Artificial Sequence
  Description of Artificial Sequence: Synthetic oligonucleotide
  Antisense strand to SEQ ID NO: 1576215
uggauuagacaacgguucc

SEQ ID NO: 1576217 - RNA, 19 nt, Artificial Sequence
  Description of Artificial Sequence: Synthetic oligonucleotide
  Sense strand starting at position 2983 of SEQ ID NO: 1560100
uagguugacucauucugga

SEQ ID NO: 1576218 - RNA, 19 nt, Artificial Sequence
  Description of Artificial Sequence: Synthetic oligonucleotide
  Antisense strand to SEQ ID NO: 1576217
uccagaaugagucaaccua

SEQ ID NO: 1576219 - RNA, 19 nt, Artificial Sequence
  Description of Artificial Sequence: Synthetic oligonucleotide
  Sense strand starting at position 3009 of SEQ ID NO: 1560100
uuuaauaggaguuguuaug

SEQ ID NO: 1576220 - RNA, 19 nt, Artificial Sequence
  Description of Artificial Sequence: Synthetic oligonucleotide
  Antisense strand to SEQ ID NO: 1576219
cauaacaacuccuauuaaa

SEQ ID NO: 1576221 - RNA, 19 nt, Artificial Sequence
  Description of Artificial Sequence: Synthetic oligonucleotide
  Sense strand starting at position 3016 of SEQ ID NO: 1560100
ggaguuguuauggaccgaa

SEQ ID NO: 1576222 - RNA, 19 nt, Artificial Sequence
  Description of Artificial Sequence: Synthetic oligonucleotide
  Antisense strand to SEQ ID NO: 1576221
uucgguccauaacaacucc

SEQ ID NO: 1576223 - RNA, 19 nt, Artificial Sequence
  Description of Artificial Sequence: Synthetic oligonucleotide
  Sense strand starting at position 3020 of SEQ ID NO: 1560100
uuguuauggaccgaaugua

SEQ ID NO: 1576224 - RNA, 19 nt, Artificial Sequence
  Description of Artificial Sequence: Synthetic oligonucleotide
  Antisense strand to SEQ ID NO: 1576223
uacauucgguccauaacaa

SEQ ID NO: 1576225 - RNA, 19 nt, Artificial Sequence
  Description of Artificial Sequence: Synthetic oligonucleotide
  Sense strand starting at position 3139 of SEQ ID NO: 1560100
ccucaugaauggucucaac

SEQ ID NO: 1576226 - RNA, 19 nt, Artificial Sequence
  Description of Artificial Sequence: Synthetic oligonucleotide
  Antisense strand to SEQ ID NO: 1576225
guugagaccauucaugagg

SEQ ID NO: 1576227 - RNA, 19 nt, Artificial Sequence
  Description of Artificial Sequence: Synthetic oligonucleotide
  Sense strand starting at position 3221 of SEQ ID NO: 1560100
aagucagccgucuaugaac

SEQ ID NO: 1576228 - RNA, 19 nt, Artificial Sequence
  Description of Artificial Sequence: Synthetic oligonucleotide
  Antisense strand to SEQ ID NO: 1576227
guucauagacggcugacuu

SEQ ID NO: 1576229 - RNA, 19 nt, Artificial Sequence
  Description of Artificial Sequence: Synthetic oligonucleotide
  Sense strand starting at position 3335 of SEQ ID NO: 1560100
agccacauagucuaugaua

SEQ ID NO: 1576230 - RNA, 19 nt, Artificial Sequence
  Description of Artificial Sequence: Synthetic oligonucleotide
  Antisense strand to SEQ ID NO: 1576229
uaucauagacuauguggcu

SEQ ID NO: 1576231 - RNA, 19 nt, Artificial Sequence
  Description of Artificial Sequence: Synthetic oligonucleotide
  Sense strand starting at position 3337 of SEQ ID NO: 1560100
ccacauagucuaugauacu

SEQ ID NO: 1576232 - RNA, 19 nt, Artificial Sequence
  Description of Artificial Sequence: Synthetic oligonucleotide
  Antisense strand to SEQ ID NO: 1576231
aguaucauagacuaugugg

SEQ ID NO: 1576233 - RNA, 19 nt, Artificial Sequence
  Description of Artificial Sequence: Synthetic oligonucleotide
  Sense strand starting at position 3642 of SEQ ID NO: 1560100
uccuucucuuggguacaua

SEQ ID NO: 1576234 - RNA, 19 nt, Artificial Sequence
  Description of Artificial Sequence: Synthetic oligonucleotide
  Antisense strand to SEQ ID NO: 1576233
uauguacccaagagaagga

SEQ ID NO: 1576235 - RNA, 19 nt, Artificial Sequence
  Description of Artificial Sequence: Synthetic oligonucleotide
  Sense strand starting at position 3657 of SEQ ID NO: 1560100
cauacuuaggaguggaguu

SEQ ID NO: 1576236 - RNA, 19 nt, Artificial Sequence
  Description of Artificial Sequence: Synthetic oligonucleotide
  Antisense strand to SEQ ID NO: 1576235
aacuccacuccuaaguaug

SEQ ID NO: 1576237 - RNA, 19 nt, Artificial Sequence
  Description of Artificial Sequence: Synthetic oligonucleotide
  Sense strand starting at position 3868 of SEQ ID NO: 1560100
gccauucuaguacauguaa

SEQ ID NO: 1576238 - RNA, 19 nt, Artificial Sequence
  Description of Artificial Sequence: Synthetic oligonucleotide
  Antisense strand to SEQ ID NO: 1576237
uuacauguacuagaauggc

SEQ ID NO: 1576239 - RNA, 19 nt, Artificial Sequence
  Description of Artificial Sequence: Synthetic oligonucleotide
  Sense strand starting at position 3877 of SEQ ID NO: 1560100
guacauguaaagugauaag

SEQ ID NO: 1576240 - RNA, 19 nt, Artificial Sequence
  Description of Artificial Sequence: Synthetic oligonucleotide
  Antisense strand to SEQ ID NO: 1576239
cuuaucacuuuacauguac

SEQ ID NO: 1576241 - RNA, 19 nt, Artificial Sequence
  Description of Artificial Sequence: Synthetic oligonucleotide
  Sense strand starting at position 3887 of SEQ ID NO: 1560100
agugauaaguuauugugau

SEQ ID NO: 1576242 - RNA, 19 nt, Artificial Sequence
  Description of Artificial Sequence: Synthetic oligonucleotide
  Antisense strand to SEQ ID NO: 1576241
aucacaauaacuuaucacu

SEQ ID NO: 1576243 - RNA, 19 nt, Artificial Sequence
  Description of Artificial Sequence: Synthetic oligonucleotide
  Sense strand starting at position 35 of SEQ ID NO: 1560101
ugugauacacauuguauca

SEQ ID NO: 1576244 - RNA, 19 nt, Artificial Sequence
  Description of Artificial Sequence: Synthetic oligonucleotide
  Antisense strand to SEQ ID NO: 1576243
ugauacaauguguaucaca

SEQ ID NO: 1576245 - RNA, 19 nt, Artificial Sequence
  Description of Artificial Sequence: Synthetic oligonucleotide
  Sense strand starting at position 442 of SEQ ID NO: 1560101
aggaucacuuggguccaaa

SEQ ID NO: 1576246 - RNA, 19 nt, Artificial Sequence
  Description of Artificial Sequence: Synthetic oligonucleotide
  Antisense strand to SEQ ID NO: 1576245
uuuggacccaagugauccu

SEQ ID NO: 1576247 - RNA, 19 nt, Artificial Sequence
  Description of Artificial Sequence: Synthetic oligonucleotide
  Sense strand starting at position 745 of SEQ ID NO: 1560101
ugugaauaugaauguguag

SEQ ID NO: 1576248 - RNA, 19 nt, Artificial Sequence
  Description of Artificial Sequence: Synthetic oligonucleotide
  Antisense strand to SEQ ID NO: 1576247
cuacacauucauauucaca

SEQ ID NO: 1576249 - RNA, 19 nt, Artificial Sequence
  Description of Artificial Sequence: Synthetic oligonucleotide
  Sense strand starting at position 748 of SEQ ID NO: 1560101
gaauaugaauguguagcaa

SEQ ID NO: 1576250 - RNA, 19 nt, Artificial Sequence
  Description of Artificial Sequence: Synthetic oligonucleotide
  Antisense strand to SEQ ID NO: 1576249
uugcuacacauucauauuc

SEQ ID NO: 1576251 - RNA, 19 nt, Artificial Sequence
  Description of Artificial Sequence: Synthetic oligonucleotide
  Sense strand starting at position 773 of SEQ ID NO: 1560101
cucguaaaccaguagugga

SEQ ID NO: 1576252 - RNA, 19 nt, Artificial Sequence
  Description of Artificial Sequence: Synthetic oligonucleotide
  Antisense strand to SEQ ID NO: 1576251
uccacuacugguuuacgag

SEQ ID NO: 1576253 - RNA, 19 nt, Artificial Sequence
  Description of Artificial Sequence: Synthetic oligonucleotide
  Sense strand starting at position 807 of SEQ ID NO: 1560101
agccgcuuuggagaauaaa

SEQ ID NO: 1576254 - RNA, 19 nt, Artificial Sequence
  Description of Artificial Sequence: Synthetic oligonucleotide
  Antisense strand to SEQ ID NO: 1576253
uuuauucuccaaagcggcu

SEQ ID NO: 1576255 - RNA, 19 nt, Artificial Sequence
  Description of Artificial Sequence: Synthetic oligonucleotide
  Sense strand starting at position 816 of SEQ ID NO: 1560101
ggagaauaaacuggcugua

SEQ ID NO: 1576256 - RNA, 19 nt, Artificial Sequence
  Description of Artificial Sequence: Synthetic oligonucleotide
  Antisense strand to SEQ ID NO: 1576255
uacagccaguuuauucucc

SEQ ID NO: 1576257 - RNA, 19 nt, Artificial Sequence
  Description of Artificial Sequence: Synthetic oligonucleotide
  Sense strand starting at position 859 of SEQ ID NO: 1560101
cuugaaauuauguguggac

SEQ ID NO: 1576258 - RNA, 19 nt, Artificial Sequence
  Description of Artificial Sequence: Synthetic oligonucleotide
  Antisense strand to SEQ ID NO: 1576257
guccacacauaauuucaag

SEQ ID NO: 1576259 - RNA, 19 nt, Artificial Sequence
  Description of Artificial Sequence: Synthetic oligonucleotide
  Sense strand starting at position 860 of SEQ ID NO: 1560101
uugaaauuauguguggaca

SEQ ID NO: 1576260 - RNA, 19 nt, Artificial Sequence
  Description of Artificial Sequence: Synthetic oligonucleotide
  Antisense strand to SEQ ID NO: 1576259
uguccacacauaauuucaa

SEQ ID NO: 1576261 - RNA, 19 nt, Artificial Sequence
  Description of Artificial Sequence: Synthetic oligonucleotide
  Sense strand starting at position 861 of SEQ ID NO: 1560101
ugaaauuauguguggacaa

SEQ ID NO: 1576262 - RNA, 19 nt, Artificial Sequence
  Description of Artificial Sequence: Synthetic oligonucleotide
  Antisense strand to SEQ ID NO: 1576261
uuguccacacauaauuuca

SEQ ID NO: 1576263 - RNA, 19 nt, Artificial Sequence
  Description of Artificial Sequence: Synthetic oligonucleotide
  Sense strand starting at position 1517 of SEQ ID NO: 1560101
ccgagaguggcuggaugaa

SEQ ID NO: 1576264 - RNA, 19 nt, Artificial Sequence
  Description of Artificial Sequence: Synthetic oligonucleotide
  Antisense strand to SEQ ID NO: 1576263
uucauccagccacucucgg

SEQ ID NO: 1576265 - RNA, 19 nt, Artificial Sequence
  Description of Artificial Sequence: Synthetic oligonucleotide
  Sense strand starting at position 1628 of SEQ ID NO: 1560101
auuauaaacucugcagaag

SEQ ID NO: 1576266 - RNA, 19 nt, Artificial Sequence
  Description of Artificial Sequence: Synthetic oligonucleotide
  Antisense strand to SEQ ID NO: 1576265
cuucugcagaguuuauaau

SEQ ID NO: 1576267 - RNA, 19 nt, Artificial Sequence
  Description of Artificial Sequence: Synthetic oligonucleotide
  Sense strand starting at position 1629 of SEQ ID NO: 1560101
uuauaaacucugcagaagu

SEQ ID NO: 1576268 - RNA, 19 nt, Artificial Sequence
  Description of Artificial Sequence: Synthetic oligonucleotide
  Antisense strand to SEQ ID NO: 1576267
acuucugcagaguuuauaa

SEQ ID NO: 1576269 - RNA, 19 nt, Artificial Sequence
  Description of Artificial Sequence: Synthetic oligonucleotide
  Sense strand starting at position 1895 of SEQ ID NO: 1560101
agcgcuuaccaugugaguu

SEQ ID NO: 1576270 - RNA, 19 nt, Artificial Sequence
  Description of Artificial Sequence: Synthetic oligonucleotide
  Antisense strand to SEQ ID NO: 1576269
aacucacaugguaagcgcu

SEQ ID NO: 1576271 - RNA, 19 nt, Artificial Sequence
  Description of Artificial Sequence: Synthetic oligonucleotide
  Sense strand starting at position 2130 of SEQ ID NO: 1560101
caaugacuuggcugggaca

SEQ ID NO: 1576272 - RNA, 19 nt, Artificial Sequence
  Description of Artificial Sequence: Synthetic oligonucleotide
  Antisense strand to SEQ ID NO: 1576271
ugucccagccaagucauug

SEQ ID NO: 1576273 - RNA, 19 nt, Artificial Sequence
  Description of Artificial Sequence: Synthetic oligonucleotide
  Sense strand starting at position 2325 of SEQ ID NO: 1560101
ggaauagagcauugcaauu

SEQ ID NO: 1576274 - RNA, 19 nt, Artificial Sequence
  Description of Artificial Sequence: Synthetic oligonucleotide
  Antisense strand to SEQ ID NO: 1576273
aauugcaaugcucuauucc

SEQ ID NO: 1576275 - RNA, 19 nt, Artificial Sequence
  Description of Artificial Sequence: Synthetic oligonucleotide
  Sense strand starting at position 2343 of SEQ ID NO: 1560101
ugggaauagauaugccaua

SEQ ID NO: 1576276 - RNA, 19 nt, Artificial Sequence
  Description of Artificial Sequence: Synthetic oligonucleotide
  Antisense strand to SEQ ID NO: 1576275
uauggcauaucuauuccca

SEQ ID NO: 1576277 - RNA, 19 nt, Artificial Sequence
  Description of Artificial Sequence: Synthetic oligonucleotide
  Sense strand starting at position 2344 of SEQ ID NO: 1560101
gggaauagauaugccauau

SEQ ID NO: 1576278 - RNA, 19 nt, Artificial Sequence
  Description of Artificial Sequence: Synthetic oligonucleotide
  Antisense strand to SEQ ID NO: 1576277
auauggcauaucuauuccc

SEQ ID NO: 1576279 - RNA, 19 nt, Artificial Sequence
  Description of Artificial Sequence: Synthetic oligonucleotide
  Sense strand starting at position 2503 of SEQ ID NO: 1560101
gcauuccuugcagaaauau

SEQ ID NO: 1576280 - RNA, 19 nt, Artificial Sequence
  Description of Artificial Sequence: Synthetic oligonucleotide
  Antisense strand to SEQ ID NO: 1576279
auauuucugcaaggaaugc

SEQ ID NO: 1576281 - RNA, 19 nt, Artificial Sequence
  Description of Artificial Sequence: Synthetic oligonucleotide
  Sense strand starting at position 2628 of SEQ ID NO: 1560101
uggcuuuauuugucagggu

SEQ ID NO: 1576282 - RNA, 19 nt, Artificial Sequence
  Description of Artificial Sequence: Synthetic oligonucleotide
  Antisense strand to SEQ ID NO: 1576281
acccugacaaauaaagcca

SEQ ID NO: 1576283 - RNA, 19 nt, Artificial Sequence
  Description of Artificial Sequence: Synthetic oligonucleotide
  Sense strand starting at position 2692 of SEQ ID NO: 1560101
uucuccuugugaucaagaa

SEQ ID NO: 1576284 - RNA, 19 nt, Artificial Sequence
  Description of Artificial Sequence: Synthetic oligonucleotide
  Antisense strand to SEQ ID NO: 1576283
uucuugaucacaaggagaa

SEQ ID NO: 1576285 - RNA, 19 nt, Artificial Sequence
  Description of Artificial Sequence: Synthetic oligonucleotide
  Sense strand starting at position 2693 of SEQ ID NO: 1560101
ucuccuugugaucaagaac

SEQ ID NO: 1576286 - RNA, 19 nt, Artificial Sequence
  Description of Artificial Sequence: Synthetic oligonucleotide
  Antisense strand to SEQ ID NO: 1576285
guucuugaucacaaggaga

SEQ ID NO: 1576287 - RNA, 19 nt, Artificial Sequence
  Description of Artificial Sequence: Synthetic oligonucleotide
  Sense strand starting at position 2696 of SEQ ID NO: 1560101
ccuugugaucaagaacuuu

SEQ ID NO: 1576288 - RNA, 19 nt, Artificial Sequence
  Description of Artificial Sequence: Synthetic oligonucleotide
  Antisense strand to SEQ ID NO: 1576287
aaaguucuugaucacaagg

SEQ ID NO: 1576289 - RNA, 19 nt, Artificial Sequence
  Description of Artificial Sequence: Synthetic oligonucleotide
  Sense strand starting at position 2904 of SEQ ID NO: 1560101
ccuggaguccauuaguaag

SEQ ID NO: 1576290 - RNA, 19 nt, Artificial Sequence
  Description of Artificial Sequence: Synthetic oligonucleotide
  Antisense strand to SEQ ID NO: 1576289
cuuacuaauggacuccagg

SEQ ID NO: 1576291 - RNA, 19 nt, Artificial Sequence
  Description of Artificial Sequence: Synthetic oligonucleotide
  Sense strand starting at position 2949 of SEQ ID NO: 1560101
uugcuaucccuuuaaagug

SEQ ID NO: 1576292 - RNA, 19 nt, Artificial Sequence
  Description of Artificial Sequence: Synthetic oligonucleotide
  Antisense strand to SEQ ID NO: 1576291
cacuuuaaagggauagcaa

SEQ ID NO: 1576293 - RNA, 19 nt, Artificial Sequence
  Description of Artificial Sequence: Synthetic oligonucleotide
  Sense strand starting at position 3113 of SEQ ID NO: 1560101
gccauaaaccuagguuuaa

SEQ ID NO: 1576294 - RNA, 19 nt, Artificial Sequence
  Description of Artificial Sequence: Synthetic oligonucleotide
  Antisense strand to SEQ ID NO: 1576293
uuaaaccuagguuuauggc

SEQ ID NO: 1576295 - RNA, 19 nt, Artificial Sequence
  Description of Artificial Sequence: Synthetic oligonucleotide
  Sense strand starting at position 3150 of SEQ ID NO: 1560101
cucaaacaguuauucgaga

SEQ ID NO: 1576296 - RNA, 19 nt, Artificial Sequence
  Description of Artificial Sequence: Synthetic oligonucleotide
  Antisense strand to SEQ ID NO: 1576295
ucucgaauaacuguuugag

SEQ ID NO: 1576297 - RNA, 19 nt, Artificial Sequence
  Description of Artificial Sequence: Synthetic oligonucleotide
  Sense strand starting at position 3155 of SEQ ID NO: 1560101
acaguuauucgagacagca

SEQ ID NO: 1576298 - RNA, 19 nt, Artificial Sequence
  Description of Artificial Sequence: Synthetic oligonucleotide
  Antisense strand to SEQ ID NO: 1576297
ugcugucucgaauaacugu

SEQ ID NO: 1576299 - RNA, 19 nt, Artificial Sequence
  Description of Artificial Sequence: Synthetic oligonucleotide
  Sense strand starting at position 3274 of SEQ ID NO: 1560101
ucguauuagcaacaucaca

SEQ ID NO: 1576300 - RNA, 19 nt, Artificial Sequence
  Description of Artificial Sequence: Synthetic oligonucleotide
  Antisense strand to SEQ ID NO: 1576299
ugugauguugcuaauacga

SEQ ID NO: 1576301 - RNA, 19 nt, Artificial Sequence
  Description of Artificial Sequence: Synthetic oligonucleotide
  Sense strand starting at position 3394 of SEQ ID NO: 1560101
uuauucugcuaaguagaaa

SEQ ID NO: 1576302 - RNA, 19 nt, Artificial Sequence
  Description of Artificial Sequence: Synthetic oligonucleotide
  Antisense strand to SEQ ID NO: 1576301
uuucuacuuagcagaauaa

SEQ ID NO: 1576303 - RNA, 19 nt, Artificial Sequence
  Description of Artificial Sequence: Synthetic oligonucleotide
  Sense strand starting at position 3414 of SEQ ID NO: 1560101
ggucgaauuaagugagaug

SEQ ID NO: 1576304 - RNA, 19 nt, Artificial Sequence
  Description of Artificial Sequence: Synthetic oligonucleotide
  Antisense strand to SEQ ID NO: 1576303
caucucacuuaauucgacc

SEQ ID NO: 1576305 - RNA, 19 nt, Artificial Sequence
  Description of Artificial Sequence: Synthetic oligonucleotide
  Sense strand starting at position 3415 of SEQ ID NO: 1560101
gucgaauuaagugagauga

SEQ ID NO: 1576306 - RNA, 19 nt, Artificial Sequence
  Description of Artificial Sequence: Synthetic oligonucleotide
  Antisense strand to SEQ ID NO: 1576305
ucaucucacuuaauucgac

SEQ ID NO: 1576307 - RNA, 19 nt, Artificial Sequence
  Description of Artificial Sequence: Synthetic oligonucleotide
  Sense strand starting at position 3463 of SEQ ID NO: 1560101
cagcaucuugcagaaaguu

SEQ ID NO: 1576308 - RNA, 19 nt, Artificial Sequence
  Description of Artificial Sequence: Synthetic oligonucleotide
  Antisense strand to SEQ ID NO: 1576307
aacuuucugcaagaugcug

SEQ ID NO: 1576309 - RNA, 19 nt, Artificial Sequence
  Description of Artificial Sequence: Synthetic oligonucleotide
  Sense strand starting at position 3476 of SEQ ID NO: 1560101
aaaguuauacagugugaaa

SEQ ID NO: 1576310 - RNA, 19 nt, Artificial Sequence
  Description of Artificial Sequence: Synthetic oligonucleotide
  Antisense strand to SEQ ID NO: 1576309
uuucacacuguauaacuuu

SEQ ID NO: 1576311 - RNA, 19 nt, Artificial Sequence
  Description of Artificial Sequence: Synthetic oligonucleotide
  Sense strand starting at position 3514 of SEQ ID NO: 1560101
guuuguagugugaacgucu

SEQ ID NO: 1576312 - RNA, 19 nt, Artificial Sequence
  Description of Artificial Sequence: Synthetic oligonucleotide
  Antisense strand to SEQ ID NO: 1576311
agacguucacacuacaaac

SEQ ID NO: 1576313 - RNA, 19 nt, Artificial Sequence
  Description of Artificial Sequence: Synthetic oligonucleotide
  Sense strand starting at position 3526 of SEQ ID NO: 1560101
aacgucucugguuaugaua

SEQ ID NO: 1576314 - RNA, 19 nt, Artificial Sequence
  Description of Artificial Sequence: Synthetic oligonucleotide
  Antisense strand to SEQ ID NO: 1576313
uaucauaaccagagacguu

SEQ ID NO: 1576315 - RNA, 19 nt, Artificial Sequence
  Description of Artificial Sequence: Synthetic oligonucleotide
  Sense strand starting at position 3847 of SEQ ID NO: 1560101
gguacuauuuaauggauuu

SEQ ID NO: 1576316 - RNA, 19 nt, Artificial Sequence
  Description of Artificial Sequence: Synthetic oligonucleotide
  Antisense strand to SEQ ID NO: 1576315
aaauccauuaaauaguacc

SEQ ID NO: 1576317 - RNA, 19 nt, Artificial Sequence
  Description of Artificial Sequence: Synthetic oligonucleotide
  Sense strand starting at position 3867 of SEQ ID NO: 1560101
gcauacauccgugaucuaa

SEQ ID NO: 1576318 - RNA, 19 nt, Artificial Sequence
  Description of Artificial Sequence: Synthetic oligonucleotide
  Antisense strand to SEQ ID NO: 1576317
uuagaucacggauguaugc

SEQ ID NO: 1576319 - RNA, 19 nt, Artificial Sequence
  Description of Artificial Sequence: Synthetic oligonucleotide
  Sense strand starting at position 3869 of SEQ ID NO: 1560101
auacauccgugaucuaaac

SEQ ID NO: 1576320 - RNA, 19 nt, Artificial Sequence
  Description of Artificial Sequence: Synthetic oligonucleotide
  Antisense strand to SEQ ID NO: 1576319
guuuagaucacggauguau

SEQ ID NO: 1576321 - RNA, 19 nt, Artificial Sequence
  Description of Artificial Sequence: Synthetic oligonucleotide
  Sense strand starting at position 3913 of SEQ ID NO: 1560101
uauaaaugucauggugauu

SEQ ID NO: 1576322 - RNA, 19 nt, Artificial Sequence
  Description of Artificial Sequence: Synthetic oligonucleotide
  Antisense strand to SEQ ID NO: 1576321
aaucaccaugacauuuaua

SEQ ID NO: 1576323 - RNA, 19 nt, Artificial Sequence
  Description of Artificial Sequence: Synthetic oligonucleotide
  Sense strand starting at position 1 of SEQ ID NO: 1560102
ucacacagccauugaagaa

SEQ ID NO: 1576324 - RNA, 19 nt, Artificial Sequence
  Description of Artificial Sequence: Synthetic oligonucleotide
  Antisense strand to SEQ ID NO: 1576323
uucuucaauggcuguguga

SEQ ID NO: 1576325 - RNA, 19 nt, Artificial Sequence
  Description of Artificial Sequence: Synthetic oligonucleotide
  Sense strand starting at position 60 of SEQ ID NO: 1560102
auacauauguagccacaua

SEQ ID NO: 1576326 - RNA, 19 nt, Artificial Sequence
  Description of Artificial Sequence: Synthetic oligonucleotide
  Antisense strand to SEQ ID NO: 1576325
uauguggcuacauauguau

SEQ ID NO: 1576327 - RNA, 19 nt, Artificial Sequence
  Description of Artificial Sequence: Synthetic oligonucleotide
  Sense strand starting at position 105 of SEQ ID NO: 1560102
aguggaagaguuuaaugca

SEQ ID NO: 1576328 - RNA, 19 nt, Artificial Sequence
  Description of Artificial Sequence: Synthetic oligonucleotide
  Antisense strand to SEQ ID NO: 1576327
ugcauuaaacucuuccacu

SEQ ID NO: 1576329 - RNA, 19 nt, Artificial Sequence
  Description of Artificial Sequence: Synthetic oligonucleotide
  Sense strand starting at position 108 of SEQ ID NO: 1560102
ggaagaguuuaaugcacag

SEQ ID NO: 1576330 - RNA, 19 nt, Artificial Sequence
  Description of Artificial Sequence: Synthetic oligonucleotide
  Antisense strand to SEQ ID NO: 1576329
cugugcauuaaacucuucc

SEQ ID NO: 1576331 - RNA, 19 nt, Artificial Sequence
  Description of Artificial Sequence: Synthetic oligonucleotide
  Sense strand starting at position 112 of SEQ ID NO: 1560102
gaguuuaaugcacagauua

SEQ ID NO: 1576332 - RNA, 19 nt, Artificial Sequence
  Description of Artificial Sequence: Synthetic oligonucleotide
  Antisense strand to SEQ ID NO: 1576331
uaaucugugcauuaaacuc

SEQ ID NO: 1576333 - RNA, 19 nt, Artificial Sequence
  Description of Artificial Sequence: Synthetic oligonucleotide
  Sense strand starting at position 170 of SEQ ID NO: 1560102
auaauugagccaggugaag

SEQ ID NO: 1576334 - RNA, 19 nt, Artificial Sequence
  Description of Artificial Sequence: Synthetic oligonucleotide
  Antisense strand to SEQ ID NO: 1576333
cuucaccuggcucaauuau

SEQ ID NO: 1576335 - RNA, 19 nt, Artificial Sequence
  Description of Artificial Sequence: Synthetic oligonucleotide
  Sense strand starting at position 437 of SEQ ID NO: 1560102
guaaauaaaugugaagacu

SEQ ID NO: 1576336 - RNA, 19 nt, Artificial Sequence
  Description of Artificial Sequence: Synthetic oligonucleotide
  Antisense strand to SEQ ID NO: 1576335
agucuucacauuuauuuac

SEQ ID NO: 1576337 - RNA, 19 nt, Artificial Sequence
  Description of Artificial Sequence: Synthetic oligonucleotide
  Sense strand starting at position 711 of SEQ ID NO: 1560102
gcaggagagugcuuucaga

SEQ ID NO: 1576338 - RNA, 19 nt, Artificial Sequence
  Description of Artificial Sequence: Synthetic oligonucleotide
  Antisense strand to SEQ ID NO: 1576337
ucugaaagcacucuccugc

SEQ ID NO: 1576339 - RNA, 19 nt, Artificial Sequence
  Description of Artificial Sequence: Synthetic oligonucleotide
  Sense strand starting at position 727 of SEQ ID NO: 1560102
agagaaacuucuugaucac

SEQ ID NO: 1576340 - RNA, 19 nt, Artificial Sequence
  Description of Artificial Sequence: Synthetic oligonucleotide
  Antisense strand to SEQ ID NO: 1576339
gugaucaagaaguuucucu

SEQ ID NO: 1576341 - RNA, 19 nt, Artificial Sequence
  Description of Artificial Sequence: Synthetic oligonucleotide
  Sense strand starting at position 754 of SEQ ID NO: 1560102
aucugaaaguugucagaac

SEQ ID NO: 1576342 - RNA, 19 nt, Artificial Sequence
  Description of Artificial Sequence: Synthetic oligonucleotide
  Antisense strand to SEQ ID NO: 1576341
guucugacaacuuucagau

SEQ ID NO: 1576343 - RNA, 19 nt, Artificial Sequence
  Description of Artificial Sequence: Synthetic oligonucleotide
  Sense strand starting at position 755 of SEQ ID NO: 1560102
ucugaaaguugucagaaca

SEQ ID NO: 1576344 - RNA, 19 nt, Artificial Sequence
  Description of Artificial Sequence: Synthetic oligonucleotide
  Antisense strand to SEQ ID NO: 1576343
uguucugacaacuuucaga

SEQ ID NO: 1576345 - RNA, 19 nt, Artificial Sequence
  Description of Artificial Sequence: Synthetic oligonucleotide
  Sense strand starting at position 778 of SEQ ID NO: 1560102
ggagucacuuauguuaaga

SEQ ID NO: 1576346 - RNA, 19 nt, Artificial Sequence
  Description of Artificial Sequence: Synthetic oligonucleotide
  Antisense strand to SEQ ID NO: 1576345
ucuuaacauaagugacucc

SEQ ID NO: 1576347 - RNA, 19 nt, Artificial Sequence
  Description of Artificial Sequence: Synthetic oligonucleotide
  Sense strand starting at position 780 of SEQ ID NO: 1560102
agucacuuauguuaagaua

SEQ ID NO: 1576348 - RNA, 19 nt, Artificial Sequence
  Description of Artificial Sequence: Synthetic oligonucleotide
  Antisense strand to SEQ ID NO: 1576347
uaucuuaacauaagugacu

SEQ ID NO: 1576349 - RNA, 19 nt, Artificial Sequence
  Description of Artificial Sequence: Synthetic oligonucleotide
  Sense strand starting at position 794 of SEQ ID NO: 1560102
agauaacccugacaaauag

SEQ ID NO: 1576350 - RNA, 19 nt, Artificial Sequence
  Description of Artificial Sequence: Synthetic oligonucleotide
  Antisense strand to SEQ ID NO: 1576349
cuauuugucaggguuaucu

SEQ ID NO: 1576351 - RNA, 19 nt, Artificial Sequence
  Description of Artificial Sequence: Synthetic oligonucleotide
  Sense strand starting at position 958 of SEQ ID NO: 1560102
gguccaaccuaggacuaau

SEQ ID NO: 1576352 - RNA, 19 nt, Artificial Sequence
  Description of Artificial Sequence: Synthetic oligonucleotide
  Antisense strand to SEQ ID NO: 1576351
auuaguccuagguuggacc

SEQ ID NO: 1576353 - RNA, 19 nt, Artificial Sequence
  Description of Artificial Sequence: Synthetic oligonucleotide
  Sense strand starting at position 969 of SEQ ID NO: 1560102
ggacuaaugucacccuugu

SEQ ID NO: 1576354 - RNA, 19 nt, Artificial Sequence
  Description of Artificial Sequence: Synthetic oligonucleotide
  Antisense strand to SEQ ID NO: 1576353
acaagggugacauuagucc

SEQ ID NO: 1576355 - RNA, 19 nt, Artificial Sequence
  Description of Artificial Sequence: Synthetic oligonucleotide
  Sense strand starting at position 1080 of SEQ ID NO: 1560102
uuuaauacggcaugucuau

SEQ ID NO: 1576356 - RNA, 19 nt, Artificial Sequence
  Description of Artificial Sequence: Synthetic oligonucleotide
  Antisense strand to SEQ ID NO: 1576355
auagacaugccguauuaaa

SEQ ID NO: 1576357 - RNA, 19 nt, Artificial Sequence
  Description of Artificial Sequence: Synthetic oligonucleotide
  Sense strand starting at position 1087 of SEQ ID NO: 1560102
cggcaugucuauucccaau

SEQ ID NO: 1576358 - RNA, 19 nt, Artificial Sequence
  Description of Artificial Sequence: Synthetic oligonucleotide
  Antisense strand to SEQ ID NO: 1576357
auugggaauagacaugccg

SEQ ID NO: 1576359 - RNA, 19 nt, Artificial Sequence
  Description of Artificial Sequence: Synthetic oligonucleotide
  Sense strand starting at position 1089 of SEQ ID NO: 1560102
gcaugucuauucccaauug

SEQ ID NO: 1576360 - RNA, 19 nt, Artificial Sequence
  Description of Artificial Sequence: Synthetic oligonucleotide
  Antisense strand to SEQ ID NO: 1576359
caauugggaauagacaugc

SEQ ID NO: 1576361 - RNA, 19 nt, Artificial Sequence
  Description of Artificial Sequence: Synthetic oligonucleotide
  Sense strand starting at position 1456 of SEQ ID NO: 1560102
auauguuuguuaguuaggu

SEQ ID NO: 1576362 - RNA, 19 nt, Artificial Sequence
  Description of Artificial Sequence: Synthetic oligonucleotide
  Antisense strand to SEQ ID NO: 1576361
accuaacuaacaaacauau

SEQ ID NO: 1576363 - RNA, 19 nt, Artificial Sequence
  Description of Artificial Sequence: Synthetic oligonucleotide
  Sense strand starting at position 1457 of SEQ ID NO: 1560102
uauguuuguuaguuagguu

SEQ ID NO: 1576364 - RNA, 19 nt, Artificial Sequence
  Description of Artificial Sequence: Synthetic oligonucleotide
  Antisense strand to SEQ ID NO: 1576363
aaccuaacuaacaaacaua

SEQ ID NO: 1576365 - RNA, 19 nt, Artificial Sequence
  Description of Artificial Sequence: Synthetic oligonucleotide
  Sense strand starting at position 1458 of SEQ ID NO: 1560102
auguuuguuaguuagguua

SEQ ID NO: 1576366 - RNA, 19 nt, Artificial Sequence
  Description of Artificial Sequence: Synthetic oligonucleotide
  Antisense strand to SEQ ID NO: 1576365
uaaccuaacuaacaaacau

SEQ ID NO: 1576367 - RNA, 19 nt, Artificial Sequence
  Description of Artificial Sequence: Synthetic oligonucleotide
  Sense strand starting at position 1461 of SEQ ID NO: 1560102
uuuguuaguuagguuaaca

SEQ ID NO: 1576368 - RNA, 19 nt, Artificial Sequence
  Description of Artificial Sequence: Synthetic oligonucleotide
  Antisense strand to SEQ ID NO: 1576367
uguuaaccuaacuaacaaa

SEQ ID NO: 1576369 - RNA, 19 nt, Artificial Sequence
  Description of Artificial Sequence: Synthetic oligonucleotide
  Sense strand starting at position 1631 of SEQ ID NO: 1560102
aauuuaaguuaugacagga

SEQ ID NO: 1576370 - RNA, 19 nt, Artificial Sequence
  Description of Artificial Sequence: Synthetic oligonucleotide
  Antisense strand to SEQ ID NO: 1576369
uccugucauaacuuaaauu

SEQ ID NO: 1576371 - RNA, 19 nt, Artificial Sequence
  Description of Artificial Sequence: Synthetic oligonucleotide
  Sense strand starting at position 1833 of SEQ ID NO: 1560102
uccugaaacucaccuggua

SEQ ID NO: 1576372 - RNA, 19 nt, Artificial Sequence
  Description of Artificial Sequence: Synthetic oligonucleotide
  Antisense strand to SEQ ID NO: 1576371
uaccaggugaguuucagga

SEQ ID NO: 1576373 - RNA, 19 nt, Artificial Sequence
  Description of Artificial Sequence: Synthetic oligonucleotide
  Sense strand starting at position 1921 of SEQ ID NO: 1560102
cgguuucucugguucucaa

SEQ ID NO: 1576374 - RNA, 19 nt, Artificial Sequence
  Description of Artificial Sequence: Synthetic oligonucleotide
  Antisense strand to SEQ ID NO: 1576373
uugagaaccagagaaaccg

SEQ ID NO: 1576375 - RNA, 19 nt, Artificial Sequence
  Description of Artificial Sequence: Synthetic oligonucleotide
  Sense strand starting at position 1970 of SEQ ID NO: 1560102
ugggcuuucugagaacuga

SEQ ID NO: 1576376 - RNA, 19 nt, Artificial Sequence
  Description of Artificial Sequence: Synthetic oligonucleotide
  Antisense strand to SEQ ID NO: 1576375
ucaguucucagaaagccca

SEQ ID NO: 1576377 - RNA, 19 nt, Artificial Sequence
  Description of Artificial Sequence: Synthetic oligonucleotide
  Sense strand starting at position 1991 of SEQ ID NO: 1560102
gaaguaagcucucaggacu

SEQ ID NO: 1576378 - RNA, 19 nt, Artificial Sequence
  Description of Artificial Sequence: Synthetic oligonucleotide
  Antisense strand to SEQ ID NO: 1576377
aguccugagagcuuacuuc

SEQ ID NO: 1576379 - RNA, 19 nt, Artificial Sequence
  Description of Artificial Sequence: Synthetic oligonucleotide
  Sense strand starting at position 2067 of SEQ ID NO: 1560102
ucuuuaaugugggcaggaa

SEQ ID NO: 1576380 - RNA, 19 nt, Artificial Sequence
  Description of Artificial Sequence: Synthetic oligonucleotide
  Antisense strand to SEQ ID NO: 1576379
uuccugcccacauuaaaga

SEQ ID NO: 1576381 - RNA, 19 nt, Artificial Sequence
  Description of Artificial Sequence: Synthetic oligonucleotide
  Sense strand starting at position 2098 of SEQ ID NO: 1560102
acacuuacuucugcagagu

SEQ ID NO: 1576382 - RNA, 19 nt, Artificial Sequence
  Description of Artificial Sequence: Synthetic oligonucleotide
  Antisense strand to SEQ ID NO: 1576381
acucugcagaaguaagugu

SEQ ID NO: 1576383 - RNA, 19 nt, Artificial Sequence
  Description of Artificial Sequence: Synthetic oligonucleotide
  Sense strand starting at position 2101 of SEQ ID NO: 1560102
cuuacuucugcagaguuua

SEQ ID NO: 1576384 - RNA, 19 nt, Artificial Sequence
  Description of Artificial Sequence: Synthetic oligonucleotide
  Antisense strand to SEQ ID NO: 1576383
uaaacucugcagaaguaag

SEQ ID NO: 1576385 - RNA, 19 nt, Artificial Sequence
  Description of Artificial Sequence: Synthetic oligonucleotide
  Sense strand starting at position 2106 of SEQ ID NO: 1560102
uucugcagaguuuauaaua

SEQ ID NO: 1576386 - RNA, 19 nt, Artificial Sequence
  Description of Artificial Sequence: Synthetic oligonucleotide
  Antisense strand to SEQ ID NO: 1576385
uauuauaaacucugcagaa

SEQ ID NO: 1576387 - RNA, 19 nt, Artificial Sequence
  Description of Artificial Sequence: Synthetic oligonucleotide
  Sense strand starting at position 2156 of SEQ ID NO: 1560102
agacauagguaauaguaua

SEQ ID NO: 1576388 - RNA, 19 nt, Artificial Sequence
  Description of Artificial Sequence: Synthetic oligonucleotide
  Antisense strand to SEQ ID NO: 1576387
uauacuauuaccuaugucu

SEQ ID NO: 1576389 - RNA, 19 nt, Artificial Sequence
  Description of Artificial Sequence: Synthetic oligonucleotide
  Sense strand starting at position 2200 of SEQ ID NO: 1560102
ugaaauuucucuggaauuc

SEQ ID NO: 1576390 - RNA, 19 nt, Artificial Sequence
  Description of Artificial Sequence: Synthetic oligonucleotide
  Antisense strand to SEQ ID NO: 1576389
gaauuccagagaaauuuca

SEQ ID NO: 1576391 - RNA, 19 nt, Artificial Sequence
  Description of Artificial Sequence: Synthetic oligonucleotide
  Sense strand starting at position 2255 of SEQ ID NO: 1560102
cgucuuaauccgccugcau

SEQ ID NO: 1576392 - RNA, 19 nt, Artificial Sequence
  Description of Artificial Sequence: Synthetic oligonucleotide
  Antisense strand to SEQ ID NO: 1576391
augcaggcggauuaagacg

SEQ ID NO: 1576393 - RNA, 19 nt, Artificial Sequence
  Description of Artificial Sequence: Synthetic oligonucleotide
  Sense strand starting at position 2257 of SEQ ID NO: 1560102
ucuuaauccgccugcauga

SEQ ID NO: 1576394 - RNA, 19 nt, Artificial Sequence
  Description of Artificial Sequence: Synthetic oligonucleotide
  Antisense strand to SEQ ID NO: 1576393
ucaugcaggcggauuaaga

SEQ ID NO: 1576395 - RNA, 19 nt, Artificial Sequence
  Description of Artificial Sequence: Synthetic oligonucleotide
  Sense strand starting at position 2259 of SEQ ID NO: 1560102
uuaauccgccugcaugauu

SEQ ID NO: 1576396 - RNA, 19 nt, Artificial Sequence
  Description of Artificial Sequence: Synthetic oligonucleotide
  Antisense strand to SEQ ID NO: 1576395
aaucaugcaggcggauuaa

SEQ ID NO: 1576397 - RNA, 19 nt, Artificial Sequence
  Description of Artificial Sequence: Synthetic oligonucleotide
  Sense strand starting at position 2268 of SEQ ID NO: 1560102
cugcaugauuuauguauuu

SEQ ID NO: 1576398 - RNA, 19 nt, Artificial Sequence
  Description of Artificial Sequence: Synthetic oligonucleotide
  Antisense strand to SEQ ID NO: 1576397
aaauacauaaaucaugcag

SEQ ID NO: 1576399 - RNA, 19 nt, Artificial Sequence
  Description of Artificial Sequence: Synthetic oligonucleotide
  Sense strand starting at position 2325 of SEQ ID NO: 1560102
aguuguauuugcuugguau

SEQ ID NO: 1576400 - RNA, 19 nt, Artificial Sequence
  Description of Artificial Sequence: Synthetic oligonucleotide
  Antisense strand to SEQ ID NO: 1576399
auaccaagcaaauacaacu

SEQ ID NO: 1576401 - RNA, 19 nt, Artificial Sequence
  Description of Artificial Sequence: Synthetic oligonucleotide
  Sense strand starting at position 2326 of SEQ ID NO: 1560102
guuguauuugcuugguauc

SEQ ID NO: 1576402 - RNA, 19 nt, Artificial Sequence
  Description of Artificial Sequence: Synthetic oligonucleotide
  Antisense strand to SEQ ID NO: 1576401
gauaccaagcaaauacaac

SEQ ID NO: 1576403 - RNA, 19 nt, Artificial Sequence
  Description of Artificial Sequence: Synthetic oligonucleotide
  Sense strand starting at position 304 of SEQ ID NO: 1560103
cuggaacuccuuugaggau

SEQ ID NO: 1576404 - RNA, 19 nt, Artificial Sequence
  Description of Artificial Sequence: Synthetic oligonucleotide
  Antisense strand to SEQ ID NO: 1576403
auccucaaaggaguuccag

SEQ ID NO: 1576405 - RNA, 19 nt, Artificial Sequence
  Description of Artificial Sequence: Synthetic oligonucleotide
  Sense strand starting at position 305 of SEQ ID NO: 1560103
uggaacuccuuugaggaua

SEQ ID NO: 1576406 - RNA, 19 nt, Artificial Sequence
  Description of Artificial Sequence: Synthetic oligonucleotide
  Antisense strand to SEQ ID NO: 1576405
uauccucaaaggaguucca

SEQ ID NO: 1576407 - RNA, 19 nt, Artificial Sequence
  Description of Artificial Sequence: Synthetic oligonucleotide
  Sense strand starting at position 374 of SEQ ID NO: 1560103
gacaaaguuggcuaccaau

SEQ ID NO: 1576408 - RNA, 19 nt, Artificial Sequence
  Description of Artificial Sequence: Synthetic oligonucleotide
  Antisense strand to SEQ ID NO: 1576407
auugguagccaacuuuguc

SEQ ID NO: 1576409 - RNA, 19 nt, Artificial Sequence
  Description of Artificial Sequence: Synthetic oligonucleotide
  Sense strand starting at position 391 of SEQ ID NO: 1560103
augcuugcccagugaauag

SEQ ID NO: 1576410 - RNA, 19 nt, Artificial Sequence
  Description of Artificial Sequence: Synthetic oligonucleotide
  Antisense strand to SEQ ID NO: 1576409
cuauucacugggcaagcau

SEQ ID NO: 1576411 - RNA, 19 nt, Artificial Sequence
  Description of Artificial Sequence: Synthetic oligonucleotide
  Sense strand starting at position 427 of SEQ ID NO: 1560103
ggguucuguugagcugagu

SEQ ID NO: 1576412 - RNA, 19 nt, Artificial Sequence
  Description of Artificial Sequence: Synthetic oligonucleotide
  Antisense strand to SEQ ID NO: 1576411
acucagcucaacagaaccc

SEQ ID NO: 1576413 - RNA, 19 nt, Artificial Sequence
  Description of Artificial Sequence: Synthetic oligonucleotide
  Sense strand starting at position 440 of SEQ ID NO: 1560103
cugagugucugccuugaac

SEQ ID NO: 1576414 - RNA, 19 nt, Artificial Sequence
  Description of Artificial Sequence: Synthetic oligonucleotide
  Antisense strand to SEQ ID NO: 1576413
guucaaggcagacacucag

SEQ ID NO: 1576415 - RNA, 19 nt, Artificial Sequence
  Description of Artificial Sequence: Synthetic oligonucleotide
  Sense strand starting at position 442 of SEQ ID NO: 1560103
gagugucugccuugaacuc

SEQ ID NO: 1576416 - RNA, 19 nt, Artificial Sequence
  Description of Artificial Sequence: Synthetic oligonucleotide
  Antisense strand to SEQ ID NO: 1576415
gaguucaaggcagacacuc

SEQ ID NO: 1576417 - RNA, 19 nt, Artificial Sequence
  Description of Artificial Sequence: Synthetic oligonucleotide
  Sense strand starting at position 490 of SEQ ID NO: 1560103
ccucucaucugguccaaga

SEQ ID NO: 1576418 - RNA, 19 nt, Artificial Sequence
  Description of Artificial Sequence: Synthetic oligonucleotide
  Antisense strand to SEQ ID NO: 1576417
ucuuggaccagaugagagg

SEQ ID NO: 1576419 - RNA, 19 nt, Artificial Sequence
  Description of Artificial Sequence: Synthetic oligonucleotide
  Sense strand starting at position 862 of SEQ ID NO: 1560103
ggcaaacgcauuugugauu

SEQ ID NO: 1576420 - RNA, 19 nt, Artificial Sequence
  Description of Artificial Sequence: Synthetic oligonucleotide
  Antisense strand to SEQ ID NO: 1576419
aaucacaaaugcguuugcc

SEQ ID NO: 1576421 - RNA, 19 nt, Artificial Sequence
  Description of Artificial Sequence: Synthetic oligonucleotide
  Sense strand starting at position 2830 of SEQ ID NO: 1560103
ucuccuuucgcacaagaua

SEQ ID NO: 1576422 - RNA, 19 nt, Artificial Sequence
  Description of Artificial Sequence: Synthetic oligonucleotide
  Antisense strand to SEQ ID NO: 1576421
uaucuugugcgaaaggaga

SEQ ID NO: 1576423 - RNA, 19 nt, Artificial Sequence
  Description of Artificial Sequence: Synthetic oligonucleotide
  Sense strand starting at position 2838 of SEQ ID NO: 1560103
cgcacaagauauccuuuga

SEQ ID NO: 1576424 - RNA, 19 nt, Artificial Sequence
  Description of Artificial Sequence: Synthetic oligonucleotide
  Antisense strand to SEQ ID NO: 1576423
ucaaaggauaucuugugcg

SEQ ID NO: 1576425 - RNA, 19 nt, Artificial Sequence
  Description of Artificial Sequence: Synthetic oligonucleotide
  Sense strand starting at position 3666 of SEQ ID NO: 1560103
ccugacugcccuugagaga

SEQ ID NO: 1576426 - RNA, 19 nt, Artificial Sequence
  Description of Artificial Sequence: Synthetic oligonucleotide
  Antisense strand to SEQ ID NO: 1576425
ucucucaagggcagucagg

SEQ ID NO: 1576427 - RNA, 19 nt, Artificial Sequence
  Description of Artificial Sequence: Synthetic oligonucleotide
  Sense strand starting at position 3667 of SEQ ID NO: 1560103
cugacugcccuugagagau

SEQ ID NO: 1576428 - RNA, 19 nt, Artificial Sequence
  Description of Artificial Sequence: Synthetic oligonucleotide
  Antisense strand to SEQ ID NO: 1576427
aucucucaagggcagucag

SEQ ID NO: 1576429 - RNA, 19 nt, Artificial Sequence
  Description of Artificial Sequence: Synthetic oligonucleotide
  Sense strand starting at position 3790 of SEQ ID NO: 1560103
caccuugacccguguuaua

SEQ ID NO: 1576430 - RNA, 19 nt, Artificial Sequence
  Description of Artificial Sequence: Synthetic oligonucleotide
  Antisense strand to SEQ ID NO: 1576429
uauaacacgggucaaggug

SEQ ID NO: 1576431 - RNA, 19 nt, Artificial Sequence
  Description of Artificial Sequence: Synthetic oligonucleotide
  Sense strand starting at position 3793 of SEQ ID NO: 1560103
cuugacccguguuauaauu

SEQ ID NO: 1576432 - RNA, 19 nt, Artificial Sequence
  Description of Artificial Sequence: Synthetic oligonucleotide
  Antisense strand to SEQ ID NO: 1576431
aauuauaacacgggucaag

SEQ ID NO: 1576433 - RNA, 19 nt, Artificial Sequence
  Description of Artificial Sequence: Synthetic oligonucleotide
  Sense strand starting at position 3795 of SEQ ID NO: 1560103
ugacccguguuauaauuaa

SEQ ID NO: 1576434 - RNA, 19 nt, Artificial Sequence
  Description of Artificial Sequence: Synthetic oligonucleotide
  Antisense strand to SEQ ID NO: 1576433
uuaauuauaacacggguca

SEQ ID NO: 1576435 - RNA, 19 nt, Artificial Sequence
  Description of Artificial Sequence: Synthetic oligonucleotide
  Sense strand starting at position 3888 of SEQ ID NO: 1560103
ggaggaauuccacgggugu

SEQ ID NO: 1576436 - RNA, 19 nt, Artificial Sequence
  Description of Artificial Sequence: Synthetic oligonucleotide
  Antisense strand to SEQ ID NO: 1576435
acacccguggaauuccucc

SEQ ID NO: 1576437 - RNA, 19 nt, Artificial Sequence
  Description of Artificial Sequence: Synthetic oligonucleotide
  Sense strand starting at position 3889 of SEQ ID NO: 1560103
gaggaauuccacgggugug

SEQ ID NO: 1576438 - RNA, 19 nt, Artificial Sequence
  Description of Artificial Sequence: Synthetic oligonucleotide
  Antisense strand to SEQ ID NO: 1576437
cacacccguggaauuccuc

SEQ ID NO: 1576439 - RNA, 19 nt, Artificial Sequence
  Description of Artificial Sequence: Synthetic oligonucleotide
  Sense strand starting at position 312 of SEQ ID NO: 1560104
guggcauaauaucugcuau

SEQ ID NO: 1576440 - RNA, 19 nt, Artificial Sequence
  Description of Artificial Sequence: Synthetic oligonucleotide
  Antisense strand to SEQ ID NO: 1576439
auagcagauauuaugccac

SEQ ID NO: 1576441 - RNA, 19 nt, Artificial Sequence
  Description of Artificial Sequence: Synthetic oligonucleotide
  Sense strand starting at position 1029 of SEQ ID NO: 1560104
gguaucuauuauguguuau

SEQ ID NO: 1576442 - RNA, 19 nt, Artificial Sequence
  Description of Artificial Sequence: Synthetic oligonucleotide
  Antisense strand to SEQ ID NO: 1576441
auaacacauaauagauacc

SEQ ID NO: 1576443 - RNA, 19 nt, Artificial Sequence
  Description of Artificial Sequence: Synthetic oligonucleotide
  Sense strand starting at position 1030 of SEQ ID NO: 1560104
guaucuauuauguguuaug

SEQ ID NO: 1576444 - RNA, 19 nt, Artificial Sequence
  Description of Artificial Sequence: Synthetic oligonucleotide
  Antisense strand to SEQ ID NO: 1576443
cauaacacauaauagauac

SEQ ID NO: 1576445 - RNA, 19 nt, Artificial Sequence
  Description of Artificial Sequence: Synthetic oligonucleotide
  Sense strand starting at position 1073 of SEQ ID NO: 1560104
agacaugcucccugacuuu

SEQ ID NO: 1576446 - RNA, 19 nt, Artificial Sequence
  Description of Artificial Sequence: Synthetic oligonucleotide
  Antisense strand to SEQ ID NO: 1576445
aaagucagggagcaugucu

SEQ ID NO: 1576447 - RNA, 19 nt, Artificial Sequence
  Description of Artificial Sequence: Synthetic oligonucleotide
  Sense strand starting at position 1104 of SEQ ID NO: 1560104
agcucuagucugugacaga

SEQ ID NO: 1576448 - RNA, 19 nt, Artificial Sequence
  Description of Artificial Sequence: Synthetic oligonucleotide
  Antisense strand to SEQ ID NO: 1576447
ucugucacagacuagagcu

SEQ ID NO: 1576449 - RNA, 19 nt, Artificial Sequence
  Description of Artificial Sequence: Synthetic oligonucleotide
  Sense strand starting at position 1353 of SEQ ID NO: 1560104
gggagagcucuaggugcuu

SEQ ID NO: 1576450 - RNA, 19 nt, Artificial Sequence
  Description of Artificial Sequence: Synthetic oligonucleotide
  Antisense strand to SEQ ID NO: 1576449
aagcaccuagagcucuccc

SEQ ID NO: 1576451 - RNA, 19 nt, Artificial Sequence
  Description of Artificial Sequence: Synthetic oligonucleotide
  Sense strand starting at position 1469 of SEQ ID NO: 1560104
cuugaauuacagcaguguu

SEQ ID NO: 1576452 - RNA, 19 nt, Artificial Sequence
  Description of Artificial Sequence: Synthetic oligonucleotide
  Antisense strand to SEQ ID NO: 1576451
aacacugcuguaauucaag

SEQ ID NO: 1576453 - RNA, 19 nt, Artificial Sequence
  Description of Artificial Sequence: Synthetic oligonucleotide
  Sense strand starting at position 1597 of SEQ ID NO: 1560104
ggugguguuggagagaauu

SEQ ID NO: 1576454 - RNA, 19 nt, Artificial Sequence
  Description of Artificial Sequence: Synthetic oligonucleotide
  Antisense strand to SEQ ID NO: 1576453
aauucucuccaacaccacc

SEQ ID NO: 1576455 - RNA, 19 nt, Artificial Sequence
  Description of Artificial Sequence: Synthetic oligonucleotide
  Sense strand starting at position 1607 of SEQ ID NO: 1560104
gagagaauuugcugaguaa

SEQ ID NO: 1576456 - RNA, 19 nt, Artificial Sequence
  Description of Artificial Sequence: Synthetic oligonucleotide
  Antisense strand to SEQ ID NO: 1576455
uuacucagcaaauucucuc

SEQ ID NO: 1576457 - RNA, 19 nt, Artificial Sequence
  Description of Artificial Sequence: Synthetic oligonucleotide
  Sense strand starting at position 1985 of SEQ ID NO: 1560104
ugagaagccuggucuauga

SEQ ID NO: 1576458 - RNA, 19 nt, Artificial Sequence
  Description of Artificial Sequence: Synthetic oligonucleotide
  Antisense strand to SEQ ID NO: 1576457
ucauagaccaggcuucuca

SEQ ID NO: 1576459 - RNA, 19 nt, Artificial Sequence
  Description of Artificial Sequence: Synthetic oligonucleotide
  Sense strand starting at position 1987 of SEQ ID NO: 1560104
agaagccuggucuaugaau

SEQ ID NO: 1576460 - RNA, 19 nt, Artificial Sequence
  Description of Artificial Sequence: Synthetic oligonucleotide
  Antisense strand to SEQ ID NO: 1576459
auucauagaccaggcuucu

SEQ ID NO: 1576461 - RNA, 19 nt, Artificial Sequence
  Description of Artificial Sequence: Synthetic oligonucleotide
  Sense strand starting at position 1998 of SEQ ID NO: 1560104
cuaugaaucggguggcaca

SEQ ID NO: 1576462 - RNA, 19 nt, Artificial Sequence
  Description of Artificial Sequence: Synthetic oligonucleotide
  Antisense strand to SEQ ID NO: 1576461
ugugccacccgauucauag

SEQ ID NO: 1576463 - RNA, 19 nt, Artificial Sequence
  Description of Artificial Sequence: Synthetic oligonucleotide
  Sense strand starting at position 2085 of SEQ ID NO: 1560104
acagcugugguguggaaau

SEQ ID NO: 1576464 - RNA, 19 nt, Artificial Sequence
  Description of Artificial Sequence: Synthetic oligonucleotide
  Antisense strand to SEQ ID NO: 1576463
auuuccacaccacagcugu

SEQ ID NO: 1576465 - RNA, 19 nt, Artificial Sequence
  Description of Artificial Sequence: Synthetic oligonucleotide
  Sense strand starting at position 2112 of SEQ ID NO: 1560104
cgccaaugggaugagugau

SEQ ID NO: 1576466 - RNA, 19 nt, Artificial Sequence
  Description of Artificial Sequence: Synthetic oligonucleotide
  Antisense strand to SEQ ID NO: 1576465
aucacucaucccauuggcg

SEQ ID NO: 1576467 - RNA, 19 nt, Artificial Sequence
  Description of Artificial Sequence: Synthetic oligonucleotide
  Sense strand starting at position 2118 of SEQ ID NO: 1560104
ugggaugagugaucgcaag

SEQ ID NO: 1576468 - RNA, 19 nt, Artificial Sequence
  Description of Artificial Sequence: Synthetic oligonucleotide
  Antisense strand to SEQ ID NO: 1576467
cuugcgaucacucauccca

SEQ ID NO: 1576469 - RNA, 19 nt, Artificial Sequence
  Description of Artificial Sequence: Synthetic oligonucleotide
  Sense strand starting at position 2176 of SEQ ID NO: 1560104
gagucuaaaugagucagau

SEQ ID NO: 1576470 - RNA, 19 nt, Artificial Sequence
  Description of Artificial Sequence: Synthetic oligonucleotide
  Antisense strand to SEQ ID NO: 1576469
aucugacucauuuagacuc

SEQ ID NO: 1576471 - RNA, 19 nt, Artificial Sequence
  Description of Artificial Sequence: Synthetic oligonucleotide
  Sense strand starting at position 2178 of SEQ ID NO: 1560104
gucuaaaugagucagaugu

SEQ ID NO: 1576472 - RNA, 19 nt, Artificial Sequence
  Description of Artificial Sequence: Synthetic oligonucleotide
  Antisense strand to SEQ ID NO: 1576471
acaucugacucauuuagac

SEQ ID NO: 1576473 - RNA, 19 nt, Artificial Sequence
  Description of Artificial Sequence: Synthetic oligonucleotide
  Sense strand starting at position 2252 of SEQ ID NO: 1560104
gguuauuaccaucaucauu

SEQ ID NO: 1576474 - RNA, 19 nt, Artificial Sequence
  Description of Artificial Sequence: Synthetic oligonucleotide
  Antisense strand to SEQ ID NO: 1576473
aaugaugaugguaauaacc

SEQ ID NO: 1576475 - RNA, 19 nt, Artificial Sequence
  Description of Artificial Sequence: Synthetic oligonucleotide
  Sense strand starting at position 2263 of SEQ ID NO: 1560104
ucaucauuaugccuaguuu

SEQ ID NO: 1576476 - RNA, 19 nt, Artificial Sequence
  Description of Artificial Sequence: Synthetic oligonucleotide
  Antisense strand to SEQ ID NO: 1576475
aaacuaggcauaaugauga

SEQ ID NO: 1576477 - RNA, 19 nt, Artificial Sequence
  Description of Artificial Sequence: Synthetic oligonucleotide
  Sense strand starting at position 2291 of SEQ ID NO: 1560104
accuuccacuguguagaua

SEQ ID NO: 1576478 - RNA, 19 nt, Artificial Sequence
  Description of Artificial Sequence: Synthetic oligonucleotide
  Antisense strand to SEQ ID NO: 1576477
uaucuacacaguggaaggu

SEQ ID NO: 1576479 - RNA, 19 nt, Artificial Sequence
  Description of Artificial Sequence: Synthetic oligonucleotide
  Sense strand starting at position 2292 of SEQ ID NO: 1560104
ccuuccacuguguagauaa

SEQ ID NO: 1576480 - RNA, 19 nt, Artificial Sequence
  Description of Artificial Sequence: Synthetic oligonucleotide
  Antisense strand to SEQ ID NO: 1576479
uuaucuacacaguggaagg

SEQ ID NO: 1576481 - RNA, 19 nt, Artificial Sequence
  Description of Artificial Sequence: Synthetic oligonucleotide
  Sense strand starting at position 2327 of SEQ ID NO: 1560104
uuauuaucucaucgagucu

SEQ ID NO: 1576482 - RNA, 19 nt, Artificial Sequence
  Description of Artificial Sequence: Synthetic oligonucleotide
  Antisense strand to SEQ ID NO: 1576481
agacucgaugagauaauaa

SEQ ID NO: 1576483 - RNA, 19 nt, Artificial Sequence
  Description of Artificial Sequence: Synthetic oligonucleotide
  Sense strand starting at position 2400 of SEQ ID NO: 1560104
gaggcucauagaggugaaa

SEQ ID NO: 1576484 - RNA, 19 nt, Artificial Sequence
  Description of Artificial Sequence: Synthetic oligonucleotide
  Antisense strand to SEQ ID NO: 1576483
uuucaccucuaugagccuc

SEQ ID NO: 1576485 - RNA, 19 nt, Artificial Sequence
  Description of Artificial Sequence: Synthetic oligonucleotide
  Sense strand starting at position 2402 of SEQ ID NO: 1560104
ggcucauagaggugaaaug

SEQ ID NO: 1576486 - RNA, 19 nt, Artificial Sequence
  Description of Artificial Sequence: Synthetic oligonucleotide
  Antisense strand to SEQ ID NO: 1576485
cauuucaccucuaugagcc

SEQ ID NO: 1576487 - RNA, 19 nt, Artificial Sequence
  Description of Artificial Sequence: Synthetic oligonucleotide
  Sense strand starting at position 2411 of SEQ ID NO: 1560104
aggugaaaugacugcccaa

SEQ ID NO: 1576488 - RNA, 19 nt, Artificial Sequence
  Description of Artificial Sequence: Synthetic oligonucleotide
  Antisense strand to SEQ ID NO: 1576487
uugggcagucauuucaccu

SEQ ID NO: 1576489 - RNA, 19 nt, Artificial Sequence
  Description of Artificial Sequence: Synthetic oligonucleotide
  Sense strand starting at position 2920 of SEQ ID NO: 1560104
aucugccuugcguuuaauu

SEQ ID NO: 1576490 - RNA, 19 nt, Artificial Sequence
  Description of Artificial Sequence: Synthetic oligonucleotide
  Antisense strand to SEQ ID NO: 1576489
aauuaaacgcaaggcagau

SEQ ID NO: 1576491 - RNA, 19 nt, Artificial Sequence
  Description of Artificial Sequence: Synthetic oligonucleotide
  Sense strand starting at position 2930 of SEQ ID NO: 1560104
cguuuaauugcuuacuuac

SEQ ID NO: 1576492 - RNA, 19 nt, Artificial Sequence
  Description of Artificial Sequence: Synthetic oligonucleotide
  Antisense strand to SEQ ID NO: 1576491
guaaguaagcaauuaaacg

SEQ ID NO: 1576493 - RNA, 19 nt, Artificial Sequence
  Description of Artificial Sequence: Synthetic oligonucleotide
  Sense strand starting at position 2991 of SEQ ID NO: 1560104
caagucacguagccaaaua

SEQ ID NO: 1576494 - RNA, 19 nt, Artificial Sequence
  Description of Artificial Sequence: Synthetic oligonucleotide
  Antisense strand to SEQ ID NO: 1576493
uauuuggcuacgugacuug

SEQ ID NO: 1576495 - RNA, 19 nt, Artificial Sequence
  Description of Artificial Sequence: Synthetic oligonucleotide
  Sense strand starting at position 3068 of SEQ ID NO: 1560104
uauaguaaugggugcuuaa

SEQ ID NO: 1576496 - RNA, 19 nt, Artificial Sequence
  Description of Artificial Sequence: Synthetic oligonucleotide
  Antisense strand to SEQ ID NO: 1576495
uuaagcacccauuacuaua

SEQ ID NO: 1576497 - RNA, 19 nt, Artificial Sequence
  Description of Artificial Sequence: Synthetic oligonucleotide
  Sense strand starting at position 3071 of SEQ ID NO: 1560104
aguaaugggugcuuaaagu

SEQ ID NO: 1576498 - RNA, 19 nt, Artificial Sequence
  Description of Artificial Sequence: Synthetic oligonucleotide
  Antisense strand to SEQ ID NO: 1576497
acuuuaagcacccauuacu

SEQ ID NO: 1576499 - RNA, 19 nt, Artificial Sequence
  Description of Artificial Sequence: Synthetic oligonucleotide
  Sense strand starting at position 3119 of SEQ ID NO: 1560104
ucuuguuuaguuuaagcca

SEQ ID NO: 1576500 - RNA, 19 nt, Artificial Sequence
  Description of Artificial Sequence: Synthetic oligonucleotide
  Antisense strand to SEQ ID NO: 1576499
uggcuuaaacuaaacaaga

SEQ ID NO: 1576501 - RNA, 19 nt, Artificial Sequence
  Description of Artificial Sequence: Synthetic oligonucleotide
  Sense strand starting at position 3127 of SEQ ID NO: 1560104
aguuuaagccaguggagau

SEQ ID NO: 1576502 - RNA, 19 nt, Artificial Sequence
  Description of Artificial Sequence: Synthetic oligonucleotide
  Antisense strand to SEQ ID NO: 1576501
aucuccacuggcuuaaacu

SEQ ID NO: 1576503 - RNA, 19 nt, Artificial Sequence
  Description of Artificial Sequence: Synthetic oligonucleotide
  Sense strand starting at position 3128 of SEQ ID NO: 1560104
guuuaagccaguggagauc

SEQ ID NO: 1576504 - RNA, 19 nt, Artificial Sequence
  Description of Artificial Sequence: Synthetic oligonucleotide
  Antisense strand to SEQ ID NO: 1576503
gaucuccacuggcuuaaac

SEQ ID NO: 1576505 - RNA, 19 nt, Artificial Sequence
  Description of Artificial Sequence: Synthetic oligonucleotide
  Sense strand starting at position 3319 of SEQ ID NO: 1560104
cuuucuccguacuuuagau

SEQ ID NO: 1576506 - RNA, 19 nt, Artificial Sequence
  Description of Artificial Sequence: Synthetic oligonucleotide
  Antisense strand to SEQ ID NO: 1576505
aucuaaaguacggagaaag

SEQ ID NO: 1576507 - RNA, 19 nt, Artificial Sequence
  Description of Artificial Sequence: Synthetic oligonucleotide
  Sense strand starting at position 3385 of SEQ ID NO: 1560104
aggagaauuugagaccugu

SEQ ID NO: 1576508 - RNA, 19 nt, Artificial Sequence
  Description of Artificial Sequence: Synthetic oligonucleotide
  Antisense strand to SEQ ID NO: 1576507
acaggucucaaauucuccu

SEQ ID NO: 1576509 - RNA, 19 nt, Artificial Sequence
  Description of Artificial Sequence: Synthetic oligonucleotide
  Sense strand starting at position 3418 of SEQ ID NO: 1560104
gcuuaauugccucaugaac

SEQ ID NO: 1576510 - RNA, 19 nt, Artificial Sequence
  Description of Artificial Sequence: Synthetic oligonucleotide
  Antisense strand to SEQ ID NO: 1576509
guucaugaggcaauuaagc

SEQ ID NO: 1576511 - RNA, 19 nt, Artificial Sequence
  Description of Artificial Sequence: Synthetic oligonucleotide
  Sense strand starting at position 3495 of SEQ ID NO: 1560104
agaacaaacucgguucgau

SEQ ID NO: 1576512 - RNA, 19 nt, Artificial Sequence
  Description of Artificial Sequence: Synthetic oligonucleotide
  Antisense strand to SEQ ID NO: 1576511
aucgaaccgaguuuguucu

SEQ ID NO: 1576513 - RNA, 19 nt, Artificial Sequence
  Description of Artificial Sequence: Synthetic oligonucleotide
  Sense strand starting at position 3507 of SEQ ID NO: 1560104
guucgauagcaacagcuua

SEQ ID NO: 1576514 - RNA, 19 nt, Artificial Sequence
  Description of Artificial Sequence: Synthetic oligonucleotide
  Antisense strand to SEQ ID NO: 1576513
uaagcuguugcuaucgaac

SEQ ID NO: 1576515 - RNA, 19 nt, Artificial Sequence
  Description of Artificial Sequence: Synthetic oligonucleotide
  Sense strand starting at position 3561 of SEQ ID NO: 1560104
accugaagugugcaaucca

SEQ ID NO: 1576516 - RNA, 19 nt, Artificial Sequence
  Description of Artificial Sequence: Synthetic oligonucleotide
  Antisense strand to SEQ ID NO: 1576515
uggauugcacacuucaggu

SEQ ID NO: 1576517 - RNA, 19 nt, Artificial Sequence
  Description of Artificial Sequence: Synthetic oligonucleotide
  Sense strand starting at position 3972 of SEQ ID NO: 1560104
cccaguacccuuuagcuau

SEQ ID NO: 1576518 - RNA, 19 nt, Artificial Sequence
  Description of Artificial Sequence: Synthetic oligonucleotide
  Antisense strand to SEQ ID NO: 1576517
auagcuaaaggguacuggg

SEQ ID NO: 1576519 - RNA, 19 nt, Artificial Sequence
  Description of Artificial Sequence: Synthetic oligonucleotide
  Sense strand starting at position 35 of SEQ ID NO: 1560105
aauuccaggugaucuugau

SEQ ID NO: 1576520 - RNA, 19 nt, Artificial Sequence
  Description of Artificial Sequence: Synthetic oligonucleotide
  Antisense strand to SEQ ID NO: 1576519
aucaagaucaccuggaauu

SEQ ID NO: 1576521 - RNA, 19 nt, Artificial Sequence
  Description of Artificial Sequence: Synthetic oligonucleotide
  Sense strand starting at position 187 of SEQ ID NO: 1560105
guauguguuguuaggcaag

SEQ ID NO: 1576522 - RNA, 19 nt, Artificial Sequence
  Description of Artificial Sequence: Synthetic oligonucleotide
  Antisense strand to SEQ ID NO: 1576521
cuugccuaacaacacauac

SEQ ID NO: 1576523 - RNA, 19 nt, Artificial Sequence
  Description of Artificial Sequence: Synthetic oligonucleotide
  Sense strand starting at position 199 of SEQ ID NO: 1560105
aggcaagugugucuuuaac

SEQ ID NO: 1576524 - RNA, 19 nt, Artificial Sequence
  Description of Artificial Sequence: Synthetic oligonucleotide
  Antisense strand to SEQ ID NO: 1576523
guuaaagacacacuugccu

SEQ ID NO: 1576525 - RNA, 19 nt, Artificial Sequence
  Description of Artificial Sequence: Synthetic oligonucleotide
  Sense strand starting at position 224 of SEQ ID NO: 1560105
aaguaugcuuucguaucua

SEQ ID NO: 1576526 - RNA, 19 nt, Artificial Sequence
  Description of Artificial Sequence: Synthetic oligonucleotide
  Antisense strand to SEQ ID NO: 1576525
uagauacgaaagcauacuu

SEQ ID NO: 1576527 - RNA, 19 nt, Artificial Sequence
  Description of Artificial Sequence: Synthetic oligonucleotide
  Sense strand starting at position 228 of SEQ ID NO: 1560105
augcuuucguaucuauaaa

SEQ ID NO: 1576528 - RNA, 19 nt, Artificial Sequence
  Description of Artificial Sequence: Synthetic oligonucleotide
  Antisense strand to SEQ ID NO: 1576527
uuuauagauacgaaagcau

SEQ ID NO: 1576529 - RNA, 19 nt, Artificial Sequence
  Description of Artificial Sequence: Synthetic oligonucleotide
  Sense strand starting at position 1029 of SEQ ID NO: 1560105
aggaaucauuaugaaucuu

SEQ ID NO: 1576530 - RNA, 19 nt, Artificial Sequence
  Description of Artificial Sequence: Synthetic oligonucleotide
  Antisense strand to SEQ ID NO: 1576529
aagauucauaaugauuccu

SEQ ID NO: 1576531 - RNA, 19 nt, Artificial Sequence
  Description of Artificial Sequence: Synthetic oligonucleotide
  Sense strand starting at position 1096 of SEQ ID NO: 1560105
gucccuacugaaugugaca

SEQ ID NO: 1576532 - RNA, 19 nt, Artificial Sequence
  Description of Artificial Sequence: Synthetic oligonucleotide
  Antisense strand to SEQ ID NO: 1576531
ugucacauucaguagggac

SEQ ID NO: 1576533 - RNA, 19 nt, Artificial Sequence
  Description of Artificial Sequence: Synthetic oligonucleotide
  Sense strand starting at position 1109 of SEQ ID NO: 1560105
gugacaguuuaguccagau

SEQ ID NO: 1576534 - RNA, 19 nt, Artificial Sequence
  Description of Artificial Sequence: Synthetic oligonucleotide
  Antisense strand to SEQ ID NO: 1576533
aucuggacuaaacugucac

SEQ ID NO: 1576535 - RNA, 19 nt, Artificial Sequence
  Description of Artificial Sequence: Synthetic oligonucleotide
  Sense strand starting at position 1182 of SEQ ID NO: 1560105
uggaguaugcacuaaccua

SEQ ID NO: 1576536 - RNA, 19 nt, Artificial Sequence
  Description of Artificial Sequence: Synthetic oligonucleotide
  Antisense strand to SEQ ID NO: 1576535
uagguuagugcauacucca

SEQ ID NO: 1576537 - RNA, 19 nt, Artificial Sequence
  Description of Artificial Sequence: Synthetic oligonucleotide
  Sense strand starting at position 1731 of SEQ ID NO: 1560105
cgaggcgucaaguucgauu

SEQ ID NO: 1576538 - RNA, 19 nt, Artificial Sequence
  Description of Artificial Sequence: Synthetic oligonucleotide
  Antisense strand to SEQ ID NO: 1576537
aaucgaacuugacgccucg

SEQ ID NO: 1576539 - RNA, 19 nt, Artificial Sequence
  Description of Artificial Sequence: Synthetic oligonucleotide
  Sense strand starting at position 2025 of SEQ ID NO: 1560105
ugcgcaugcgcaucaauga

SEQ ID NO: 1576540 - RNA, 19 nt, Artificial Sequence
  Description of Artificial Sequence: Synthetic oligonucleotide
  Antisense strand to SEQ ID NO: 1576539
ucauugaugcgcaugcgca

SEQ ID NO: 1576541 - RNA, 19 nt, Artificial Sequence
  Description of Artificial Sequence: Synthetic oligonucleotide
  Sense strand starting at position 2095 of SEQ ID NO: 1560105
ugagcaugcgcagacgaau

SEQ ID NO: 1576542 - RNA, 19 nt, Artificial Sequence
  Description of Artificial Sequence: Synthetic oligonucleotide
  Antisense strand to SEQ ID NO: 1576541
auucgucugcgcaugcuca

SEQ ID NO: 1576543 - RNA, 19 nt, Artificial Sequence
  Description of Artificial Sequence: Synthetic oligonucleotide
  Sense strand starting at position 2239 of SEQ ID NO: 1560105
ggcugcucaugaguuccua

SEQ ID NO: 1576544 - RNA, 19 nt, Artificial Sequence
  Description of Artificial Sequence: Synthetic oligonucleotide
  Antisense strand to SEQ ID NO: 1576543
uaggaacucaugagcagcc

SEQ ID NO: 1576545 - RNA, 19 nt, Artificial Sequence
  Description of Artificial Sequence: Synthetic oligonucleotide
  Sense strand starting at position 2255 of SEQ ID NO: 1560105
cuaaacguugcguuugcaa

SEQ ID NO: 1576546 - RNA, 19 nt, Artificial Sequence
  Description of Artificial Sequence: Synthetic oligonucleotide
  Antisense strand to SEQ ID NO: 1576545
uugcaaacgcaacguuuag

SEQ ID NO: 1576547 - RNA, 19 nt, Artificial Sequence
  Description of Artificial Sequence: Synthetic oligonucleotide
  Sense strand starting at position 2503 of SEQ ID NO: 1560105
cggaaaugacgcgaguugu

SEQ ID NO: 1576548 - RNA, 19 nt, Artificial Sequence
  Description of Artificial Sequence: Synthetic oligonucleotide
  Antisense strand to SEQ ID NO: 1576547
acaacucgcgucauuuccg

SEQ ID NO: 1576549 - RNA, 19 nt, Artificial Sequence
  Description of Artificial Sequence: Synthetic oligonucleotide
  Sense strand starting at position 2504 of SEQ ID NO: 1560105
ggaaaugacgcgaguugug

SEQ ID NO: 1576550 - RNA, 19 nt, Artificial Sequence
  Description of Artificial Sequence: Synthetic oligonucleotide
  Antisense strand to SEQ ID NO: 1576549
cacaacucgcgucauuucc

SEQ ID NO: 1576551 - RNA, 19 nt, Artificial Sequence
  Description of Artificial Sequence: Synthetic oligonucleotide
  Sense strand starting at position 2943 of SEQ ID NO: 1560105
cgguguucccgcgcuuuau

SEQ ID NO: 1576552 - RNA, 19 nt, Artificial Sequence
  Description of Artificial Sequence: Synthetic oligonucleotide
  Antisense strand to SEQ ID NO: 1576551
auaaagcgcgggaacaccg

SEQ ID NO: 1576553 - RNA, 19 nt, Artificial Sequence
  Description of Artificial Sequence: Synthetic oligonucleotide
  Sense strand starting at position 2953 of SEQ ID NO: 1560105
gcgcuuuaucaagauuauc

SEQ ID NO: 1576554 - RNA, 19 nt, Artificial Sequence
  Description of Artificial Sequence: Synthetic oligonucleotide
  Antisense strand to SEQ ID NO: 1576553
gauaaucuugauaaagcgc

SEQ ID NO: 1576555 - RNA, 19 nt, Artificial Sequence
  Description of Artificial Sequence: Synthetic oligonucleotide
  Sense strand starting at position 2962 of SEQ ID NO: 1560105
caagauuaucgagguaaug

SEQ ID NO: 1576556 - RNA, 19 nt, Artificial Sequence
  Description of Artificial Sequence: Synthetic oligonucleotide
  Antisense strand to SEQ ID NO: 1576555
cauuaccucgauaaucuug

SEQ ID NO: 1576557 - RNA, 19 nt, Artificial Sequence
  Description of Artificial Sequence: Synthetic oligonucleotide
  Sense strand starting at position 3080 of SEQ ID NO: 1560105
ugaaguuucucgaagggug

SEQ ID NO: 1576558 - RNA, 19 nt, Artificial Sequence
  Description of Artificial Sequence: Synthetic oligonucleotide
  Antisense strand to SEQ ID NO: 1576557
cacccuucgagaaacuuca

SEQ ID NO: 1576559 - RNA, 19 nt, Artificial Sequence
  Description of Artificial Sequence: Synthetic oligonucleotide
  Sense strand starting at position 3101 of SEQ ID NO: 1560105
guucgaauccuugucugcu

SEQ ID NO: 1576560 - RNA, 19 nt, Artificial Sequence
  Description of Artificial Sequence: Synthetic oligonucleotide
  Antisense strand to SEQ ID NO: 1576559
agcagacaaggauucgaac

SEQ ID NO: 1576561 - RNA, 19 nt, Artificial Sequence
  Description of Artificial Sequence: Synthetic oligonucleotide
  Sense strand starting at position 3166 of SEQ ID NO: 1560105
uuucuuaggauccguuaga

SEQ ID NO: 1576562 - RNA, 19 nt, Artificial Sequence
  Description of Artificial Sequence: Synthetic oligonucleotide
  Antisense strand to SEQ ID NO: 1576561
ucuaacggauccuaagaaa

SEQ ID NO: 1576563 - RNA, 19 nt, Artificial Sequence
  Description of Artificial Sequence: Synthetic oligonucleotide
  Sense strand starting at position 3167 of SEQ ID NO: 1560105
uucuuaggauccguuagau

SEQ ID NO: 1576564 - RNA, 19 nt, Artificial Sequence
  Description of Artificial Sequence: Synthetic oligonucleotide
  Antisense strand to SEQ ID NO: 1576563
aucuaacggauccuaagaa

SEQ ID NO: 1576565 - RNA, 19 nt, Artificial Sequence
  Description of Artificial Sequence: Synthetic oligonucleotide
  Sense strand starting at position 3198 of SEQ ID NO: 1560105
acccgaugagccuaggauu

SEQ ID NO: 1576566 - RNA, 19 nt, Artificial Sequence
  Description of Artificial Sequence: Synthetic oligonucleotide
  Antisense strand to SEQ ID NO: 1576565
aauccuaggcucaucgggu

SEQ ID NO: 1576567 - RNA, 19 nt, Artificial Sequence
  Description of Artificial Sequence: Synthetic oligonucleotide
  Sense strand starting at position 3256 of SEQ ID NO: 1560105
gagggaccugaguaguguu

SEQ ID NO: 1576568 - RNA, 19 nt, Artificial Sequence
  Description of Artificial Sequence: Synthetic oligonucleotide
  Antisense strand to SEQ ID NO: 1576567
aacacuacucaggucccuc

SEQ ID NO: 1576569 - RNA, 19 nt, Artificial Sequence
  Description of Artificial Sequence: Synthetic oligonucleotide
  Sense strand starting at position 3268 of SEQ ID NO: 1560105
uaguguuacggcgcuguua

SEQ ID NO: 1576570 - RNA, 19 nt, Artificial Sequence
  Description of Artificial Sequence: Synthetic oligonucleotide
  Antisense strand to SEQ ID NO: 1576569
uaacagcgccguaacacua

SEQ ID NO: 1576571 - RNA, 19 nt, Artificial Sequence
  Description of Artificial Sequence: Synthetic oligonucleotide
  Sense strand starting at position 3294 of SEQ ID NO: 1560105
ccuuacuuggcacgaguuu

SEQ ID NO: 1576572 - RNA, 19 nt, Artificial Sequence
  Description of Artificial Sequence: Synthetic oligonucleotide
  Antisense strand to SEQ ID NO: 1576571
aaacucgugccaaguaagg

SEQ ID NO: 1576573 - RNA, 19 nt, Artificial Sequence
  Description of Artificial Sequence: Synthetic oligonucleotide
  Sense strand starting at position 3408 of SEQ ID NO: 1560105
cuuauuauuugccagagag

SEQ ID NO: 1576574 - RNA, 19 nt, Artificial Sequence
  Description of Artificial Sequence: Synthetic oligonucleotide
  Antisense strand to SEQ ID NO: 1576573
cucucuggcaaauaauaag

SEQ ID NO: 1576575 - RNA, 19 nt, Artificial Sequence
  Description of Artificial Sequence: Synthetic oligonucleotide
  Sense strand starting at position 3415 of SEQ ID NO: 1560105
uuugccagagaguguucua

SEQ ID NO: 1576576 - RNA, 19 nt, Artificial Sequence
  Description of Artificial Sequence: Synthetic oligonucleotide
  Antisense strand to SEQ ID NO: 1576575
uagaacacucucuggcaaa

SEQ ID NO: 1576577 - RNA, 19 nt, Artificial Sequence
  Description of Artificial Sequence: Synthetic oligonucleotide
  Sense strand starting at position 3418 of SEQ ID NO: 1560105
gccagagaguguucuaggu

SEQ ID NO: 1576578 - RNA, 19 nt, Artificial Sequence
  Description of Artificial Sequence: Synthetic oligonucleotide
  Antisense strand to SEQ ID NO: 1576577
accuagaacacucucuggc

SEQ ID NO: 1576579 - RNA, 19 nt, Artificial Sequence
  Description of Artificial Sequence: Synthetic oligonucleotide
  Sense strand starting at position 3422 of SEQ ID NO: 1560105
gagaguguucuagguucug

SEQ ID NO: 1576580 - RNA, 19 nt, Artificial Sequence
  Description of Artificial Sequence: Synthetic oligonucleotide
  Antisense strand to SEQ ID NO: 1576579
cagaaccuagaacacucuc

SEQ ID NO: 1576581 - RNA, 19 nt, Artificial Sequence
  Description of Artificial Sequence: Synthetic oligonucleotide
  Sense strand starting at position 3535 of SEQ ID NO: 1560105
guggaaggauuguuggaaa

SEQ ID NO: 1576582 - RNA, 19 nt, Artificial Sequence
  Description of Artificial Sequence: Synthetic oligonucleotide
  Antisense strand to SEQ ID NO: 1576581
uuuccaacaauccuuccac

SEQ ID NO: 1576583 - RNA, 19 nt, Artificial Sequence
  Description of Artificial Sequence: Synthetic oligonucleotide
  Sense strand starting at position 3538 of SEQ ID NO: 1560105
gaaggauuguuggaaaccu

SEQ ID NO: 1576584 - RNA, 19 nt, Artificial Sequence
  Description of Artificial Sequence: Synthetic oligonucleotide
  Antisense strand to SEQ ID NO: 1576583
agguuuccaacaauccuuc

SEQ ID NO: 1576585 - RNA, 19 nt, Artificial Sequence
  Description of Artificial Sequence: Synthetic oligonucleotide
  Sense strand starting at position 3647 of SEQ ID NO: 1560105
uaaagauguuuaguaacga

SEQ ID NO: 1576586 - RNA, 19 nt, Artificial Sequence
  Description of Artificial Sequence: Synthetic oligonucleotide
  Antisense strand to SEQ ID NO: 1576585
ucguuacuaaacaucuuua

SEQ ID NO: 1576587 - RNA, 19 nt, Artificial Sequence
  Description of Artificial Sequence: Synthetic oligonucleotide
  Sense strand starting at position 3667 of SEQ ID NO: 1560105
auuguauuagaaggcaaua

SEQ ID NO: 1576588 - RNA, 19 nt, Artificial Sequence
  Description of Artificial Sequence: Synthetic oligonucleotide
  Antisense strand to SEQ ID NO: 1576587
uauugccuucuaauacaau

SEQ ID NO: 1576589 - RNA, 19 nt, Artificial Sequence
  Description of Artificial Sequence: Synthetic oligonucleotide
  Sense strand starting at position 3733 of SEQ ID NO: 1560105
ugggaagagguggguuauu

SEQ ID NO: 1576590 - RNA, 19 nt, Artificial Sequence
  Description of Artificial Sequence: Synthetic oligonucleotide
  Antisense strand to SEQ ID NO: 1576589
aauaacccaccucuuccca

SEQ ID NO: 1576591 - RNA, 19 nt, Artificial Sequence
  Description of Artificial Sequence: Synthetic oligonucleotide
  Sense strand starting at position 3754 of SEQ ID NO: 1560105
guguguucuugaccuccua

SEQ ID NO: 1576592 - RNA, 19 nt, Artificial Sequence
  Description of Artificial Sequence: Synthetic oligonucleotide
  Antisense strand to SEQ ID NO: 1576591
uaggaggucaagaacacac

SEQ ID NO: 1576593 - RNA, 19 nt, Artificial Sequence
  Description of Artificial Sequence: Synthetic oligonucleotide
  Sense strand starting at position 3807 of SEQ ID NO: 1560105
aagucauuccggugguaga

SEQ ID NO: 1576594 - RNA, 19 nt, Artificial Sequence
  Description of Artificial Sequence: Synthetic oligonucleotide
  Antisense strand to SEQ ID NO: 1576593
ucuaccaccggaaugacuu

SEQ ID NO: 1576595 - RNA, 19 nt, Artificial Sequence
  Description of Artificial Sequence: Synthetic oligonucleotide
  Sense strand starting at position 3808 of SEQ ID NO: 1560105
agucauuccggugguagaa

SEQ ID NO: 1576596 - RNA, 19 nt, Artificial Sequence
  Description of Artificial Sequence: Synthetic oligonucleotide
  Antisense strand to SEQ ID NO: 1576595
uucuaccaccggaaugacu

SEQ ID NO: 1576597 - RNA, 19 nt, Artificial Sequence
  Description of Artificial Sequence: Synthetic oligonucleotide
  Sense strand starting at position 3900 of SEQ ID NO: 1560105
guguaaggaacuugagcuu

SEQ ID NO: 1576598 - RNA, 19 nt, Artificial Sequence
  Description of Artificial Sequence: Synthetic oligonucleotide
  Antisense strand to SEQ ID NO: 1576597
aagcucaaguuccuuacac

SEQ ID NO: 1576599 - RNA, 19 nt, Artificial Sequence
  Description of Artificial Sequence: Synthetic oligonucleotide
  Sense strand starting at position 227 of SEQ ID NO: 1560106
aggccacacguccagaaau

SEQ ID NO: 1576600 - RNA, 19 nt, Artificial Sequence
  Description of Artificial Sequence: Synthetic oligonucleotide
  Antisense strand to SEQ ID NO: 1576599
auuucuggacguguggccu

SEQ ID NO: 1576601 - RNA, 19 nt, Artificial Sequence
  Description of Artificial Sequence: Synthetic oligonucleotide
  Sense strand starting at position 229 of SEQ ID NO: 1560106
gccacacguccagaaauga

SEQ ID NO: 1576602 - RNA, 19 nt, Artificial Sequence
  Description of Artificial Sequence: Synthetic oligonucleotide
  Antisense strand to SEQ ID NO: 1576601
ucauuucuggacguguggc

SEQ ID NO: 1576603 - RNA, 19 nt, Artificial Sequence
  Description of Artificial Sequence: Synthetic oligonucleotide
  Sense strand starting at position 573 of SEQ ID NO: 1560106
guggcuagaaccuggagaa

SEQ ID NO: 1576604 - RNA, 19 nt, Artificial Sequence
  Description of Artificial Sequence: Synthetic oligonucleotide
  Antisense strand to SEQ ID NO: 1576603
uucuccagguucuagccac

SEQ ID NO: 1576605 - RNA, 19 nt, Artificial Sequence
  Description of Artificial Sequence: Synthetic oligonucleotide
  Sense strand starting at position 912 of SEQ ID NO: 1560106
acuaauguuucuggccaca

SEQ ID NO: 1576606 - RNA, 19 nt, Artificial Sequence
  Description of Artificial Sequence: Synthetic oligonucleotide
  Antisense strand to SEQ ID NO: 1576605
uguggccagaaacauuagu

SEQ ID NO: 1576607 - RNA, 19 nt, Artificial Sequence
  Description of Artificial Sequence: Synthetic oligonucleotide
  Sense strand starting at position 1058 of SEQ ID NO: 1560106
uauuucucgcuuugacagu

SEQ ID NO: 1576608 - RNA, 19 nt, Artificial Sequence
  Description of Artificial Sequence: Synthetic oligonucleotide
  Antisense strand to SEQ ID NO: 1576607
acugucaaagcgagaaaua

SEQ ID NO: 1576609 - RNA, 19 nt, Artificial Sequence
  Description of Artificial Sequence: Synthetic oligonucleotide
  Sense strand starting at position 1369 of SEQ ID NO: 1560106
uccacuuggucuuuaugga

SEQ ID NO: 1576610 - RNA, 19 nt, Artificial Sequence
  Description of Artificial Sequence: Synthetic oligonucleotide
  Antisense strand to SEQ ID NO: 1576609
uccauaaagaccaagugga

SEQ ID NO: 1576611 - RNA, 19 nt, Artificial Sequence
  Description of Artificial Sequence: Synthetic oligonucleotide
  Sense strand starting at position 2158 of SEQ ID NO: 1560106
cuacguuugugccaggaag

SEQ ID NO: 1576612 - RNA, 19 nt, Artificial Sequence
  Description of Artificial Sequence: Synthetic oligonucleotide
  Antisense strand to SEQ ID NO: 1576611
cuuccuggcacaaacguag

SEQ ID NO: 1576613 - RNA, 19 nt, Artificial Sequence
  Description of Artificial Sequence: Synthetic oligonucleotide
  Sense strand starting at position 2184 of SEQ ID NO: 1560106
aggaguuucuauugguugu

SEQ ID NO: 1576614 - RNA, 19 nt, Artificial Sequence
  Description of Artificial Sequence: Synthetic oligonucleotide
  Antisense strand to SEQ ID NO: 1576613
acaaccaauagaaacuccu

SEQ ID NO: 1576615 - RNA, 19 nt, Artificial Sequence
  Description of Artificial Sequence: Synthetic oligonucleotide
  Sense strand starting at position 2185 of SEQ ID NO: 1560106
ggaguuucuauugguuguu

SEQ ID NO: 1576616 - RNA, 19 nt, Artificial Sequence
  Description of Artificial Sequence: Synthetic oligonucleotide
  Antisense strand to SEQ ID NO: 1576615
aacaaccaauagaaacucc

SEQ ID NO: 1576617 - RNA, 19 nt, Artificial Sequence
  Description of Artificial Sequence: Synthetic oligonucleotide
  Sense strand starting at position 2591 of SEQ ID NO: 1560106
ugugguuuccuggagaccu

SEQ ID NO: 1576618 - RNA, 19 nt, Artificial Sequence
  Description of Artificial Sequence: Synthetic oligonucleotide
  Antisense strand to SEQ ID NO: 1576617
aggucuccaggaaaccaca

SEQ ID NO: 1576619 - RNA, 19 nt, Artificial Sequence
  Description of Artificial Sequence: Synthetic oligonucleotide
  Sense strand starting at position 2601 of SEQ ID NO: 1560106
uggagaccuugugagaaug

SEQ ID NO: 1576620 - RNA, 19 nt, Artificial Sequence
  Description of Artificial Sequence: Synthetic oligonucleotide
  Antisense strand to SEQ ID NO: 1576619
cauucucacaaggucucca

SEQ ID NO: 1576621 - RNA, 19 nt, Artificial Sequence
  Description of Artificial Sequence: Synthetic oligonucleotide
  Sense strand starting at position 2603 of SEQ ID NO: 1560106
gagaccuugugagaaugaa

SEQ ID NO: 1576622 - RNA, 19 nt, Artificial Sequence
  Description of Artificial Sequence: Synthetic oligonucleotide
  Antisense strand to SEQ ID NO: 1576621
uucauucucacaaggucuc

SEQ ID NO: 1576623 - RNA, 19 nt, Artificial Sequence
  Description of Artificial Sequence: Synthetic oligonucleotide
  Sense strand starting at position 2667 of SEQ ID NO: 1560106
auccuauacuguuguggga

SEQ ID NO: 1576624 - RNA, 19 nt, Artificial Sequence
  Description of Artificial Sequence: Synthetic oligonucleotide
  Antisense strand to SEQ ID NO: 1576623
ucccacaacaguauaggau

SEQ ID NO: 1576625 - RNA, 19 nt, Artificial Sequence
  Description of Artificial Sequence: Synthetic oligonucleotide
  Sense strand starting at position 2683 of SEQ ID NO: 1560106
ggaagugugcccggcucaa

SEQ ID NO: 1576626 - RNA, 19 nt, Artificial Sequence
  Description of Artificial Sequence: Synthetic oligonucleotide
  Antisense strand to SEQ ID NO: 1576625
uugagccgggcacacuucc

SEQ ID NO: 1576627 - RNA, 19 nt, Artificial Sequence
  Description of Artificial Sequence: Synthetic oligonucleotide
  Sense strand starting at position 2729 of SEQ ID NO: 1560106
uuugcauucugaugccuua

SEQ ID NO: 1576628 - RNA, 19 nt, Artificial Sequence
  Description of Artificial Sequence: Synthetic oligonucleotide
  Antisense strand to SEQ ID NO: 1576627
uaaggcaucagaaugcaaa

SEQ ID NO: 1576629 - RNA, 19 nt, Artificial Sequence
  Description of Artificial Sequence: Synthetic oligonucleotide
  Sense strand starting at position 2736 of SEQ ID NO: 1560106
ucugaugccuuacagguaa

SEQ ID NO: 1576630 - RNA, 19 nt, Artificial Sequence
  Description of Artificial Sequence: Synthetic oligonucleotide
  Antisense strand to SEQ ID NO: 1576629
uuaccuguaaggcaucaga

SEQ ID NO: 1576631 - RNA, 19 nt, Artificial Sequence
  Description of Artificial Sequence: Synthetic oligonucleotide
  Sense strand starting at position 2740 of SEQ ID NO: 1560106
augccuuacagguaaggau

SEQ ID NO: 1576632 - RNA, 19 nt, Artificial Sequence
  Description of Artificial Sequence: Synthetic oligonucleotide
  Antisense strand to SEQ ID NO: 1576631
auccuuaccuguaaggcau

SEQ ID NO: 1576633 - RNA, 19 nt, Artificial Sequence
  Description of Artificial Sequence: Synthetic oligonucleotide
  Sense strand starting at position 3305 of SEQ ID NO: 1560106
agacccuguugcuaacaau

SEQ ID NO: 1576634 - RNA, 19 nt, Artificial Sequence
  Description of Artificial Sequence: Synthetic oligonucleotide
  Antisense strand to SEQ ID NO: 1576633
auuguuagcaacagggucu

SEQ ID NO: 1576635 - RNA, 19 nt, Artificial Sequence
  Description of Artificial Sequence: Synthetic oligonucleotide
  Sense strand starting at position 3420 of SEQ ID NO: 1560106
ugcagugagcucugaaaua

SEQ ID NO: 1576636 - RNA, 19 nt, Artificial Sequence
  Description of Artificial Sequence: Synthetic oligonucleotide
  Antisense strand to SEQ ID NO: 1576635
uauuucagagcucacugca

SEQ ID NO: 1576637 - RNA, 19 nt, Artificial Sequence
  Description of Artificial Sequence: Synthetic oligonucleotide
  Sense strand starting at position 3569 of SEQ ID NO: 1560106
ccuggcuacuuccagaauu

SEQ ID NO: 1576638 - RNA, 19 nt, Artificial Sequence
  Description of Artificial Sequence: Synthetic oligonucleotide
  Antisense strand to SEQ ID NO: 1576637
aauucuggaaguagccagg

SEQ ID NO: 1576639 - RNA, 19 nt, Artificial Sequence
  Description of Artificial Sequence: Synthetic oligonucleotide
  Sense strand starting at position 3621 of SEQ ID NO: 1560106
auuuguauuucuggcaagu

SEQ ID NO: 1576640 - RNA, 19 nt, Artificial Sequence
  Description of Artificial Sequence: Synthetic oligonucleotide
  Antisense strand to SEQ ID NO: 1576639
acuugccagaaauacaaau

SEQ ID NO: 1576641 - RNA, 19 nt, Artificial Sequence
  Description of Artificial Sequence: Synthetic oligonucleotide
  Sense strand starting at position 3631 of SEQ ID NO: 1560106
cuggcaaguuccuagguga

SEQ ID NO: 1576642 - RNA, 19 nt, Artificial Sequence
  Description of Artificial Sequence: Synthetic oligonucleotide
  Antisense strand to SEQ ID NO: 1576641
ucaccuaggaacuugccag

SEQ ID NO: 1576643 - RNA, 19 nt, Artificial Sequence
  Description of Artificial Sequence: Synthetic oligonucleotide
  Sense strand starting at position 3642 of SEQ ID NO: 1560106
cuaggugaugcugauacua

SEQ ID NO: 1576644 - RNA, 19 nt, Artificial Sequence
  Description of Artificial Sequence: Synthetic oligonucleotide
  Antisense strand to SEQ ID NO: 1576643
uaguaucagcaucaccuag

SEQ ID NO: 1576645 - RNA, 19 nt, Artificial Sequence
  Description of Artificial Sequence: Synthetic oligonucleotide
  Sense strand starting at position 3644 of SEQ ID NO: 1560106
aggugaugcugauacuagu

SEQ ID NO: 1576646 - RNA, 19 nt, Artificial Sequence
  Description of Artificial Sequence: Synthetic oligonucleotide
  Antisense strand to SEQ ID NO: 1576645
acuaguaucagcaucaccu

SEQ ID NO: 1576647 - RNA, 19 nt, Artificial Sequence
  Description of Artificial Sequence: Synthetic oligonucleotide
  Sense strand starting at position 3655 of SEQ ID NO: 1560106
auacuaguggucuggagac

SEQ ID NO: 1576648 - RNA, 19 nt, Artificial Sequence
  Description of Artificial Sequence: Synthetic oligonucleotide
  Antisense strand to SEQ ID NO: 1576647
gucuccagaccacuaguau

SEQ ID NO: 1576649 - RNA, 19 nt, Artificial Sequence
  Description of Artificial Sequence: Synthetic oligonucleotide
  Sense strand starting at position 3686 of SEQ ID NO: 1560106
accagugcucuagaaccuu

SEQ ID NO: 1576650 - RNA, 19 nt, Artificial Sequence
  Description of Artificial Sequence: Synthetic oligonucleotide
  Antisense strand to SEQ ID NO: 1576649
aagguucuagagcacuggu

SEQ ID NO: 1576651 - RNA, 19 nt, Artificial Sequence
  Description of Artificial Sequence: Synthetic oligonucleotide
  Sense strand starting at position 3712 of SEQ ID NO: 1560106
ccucuaggcccucaggaaa

SEQ ID NO: 1576652 - RNA, 19 nt, Artificial Sequence
  Description of Artificial Sequence: Synthetic oligonucleotide
  Antisense strand to SEQ ID NO: 1576651
uuuccugagggccuagagg

SEQ ID NO: 1576653 - RNA, 19 nt, Artificial Sequence
  Description of Artificial Sequence: Synthetic oligonucleotide
  Sense strand starting at position 3843 of SEQ ID NO: 1560106
gagcgacuugaauauccuu

SEQ ID NO: 1576654 - RNA, 19 nt, Artificial Sequence
  Description of Artificial Sequence: Synthetic oligonucleotide
  Antisense strand to SEQ ID NO: 1576653
aaggauauucaagucgcuc

SEQ ID NO: 1576655 - RNA, 19 nt, Artificial Sequence
  Description of Artificial Sequence: Synthetic oligonucleotide
  Sense strand starting at position 3848 of SEQ ID NO: 1560106
acuugaauauccuugguca

SEQ ID NO: 1576656 - RNA, 19 nt, Artificial Sequence
  Description of Artificial Sequence: Synthetic oligonucleotide
  Antisense strand to SEQ ID NO: 1576655
ugaccaaggauauucaagu

SEQ ID NO: 1576657 - RNA, 19 nt, Artificial Sequence
  Description of Artificial Sequence: Synthetic oligonucleotide
  Sense strand starting at position 3849 of SEQ ID NO: 1560106
cuugaauauccuuggucag

SEQ ID NO: 1576658 - RNA, 19 nt, Artificial Sequence
  Description of Artificial Sequence: Synthetic oligonucleotide
  Antisense strand to SEQ ID NO: 1576657
cugaccaaggauauucaag

SEQ ID NO: 1576659 - RNA, 19 nt, Artificial Sequence
  Description of Artificial Sequence: Synthetic oligonucleotide
  Sense strand starting at position 3851 of SEQ ID NO: 1560106
ugaauauccuuggucaggu

SEQ ID NO: 1576660 - RNA, 19 nt, Artificial Sequence
  Description of Artificial Sequence: Synthetic oligonucleotide
  Antisense strand to SEQ ID NO: 1576659
accugaccaaggauauuca

SEQ ID NO: 1576661 - RNA, 19 nt, Artificial Sequence
  Description of Artificial Sequence: Synthetic oligonucleotide
  Sense strand starting at position 3855 of SEQ ID NO: 1560106
uauccuuggucagguguga

SEQ ID NO: 1576662 - RNA, 19 nt, Artificial Sequence
  Description of Artificial Sequence: Synthetic oligonucleotide
  Antisense strand to SEQ ID NO: 1576661
ucacaccugaccaaggaua

SEQ ID NO: 1576663 - RNA, 19 nt, Artificial Sequence
  Description of Artificial Sequence: Synthetic oligonucleotide
  Sense strand starting at position 3864 of SEQ ID NO: 1560106
ucaggugugagccaugcau

SEQ ID NO: 1576664 - RNA, 19 nt, Artificial Sequence
  Description of Artificial Sequence: Synthetic oligonucleotide
  Antisense strand to SEQ ID NO: 1576663
augcauggcucacaccuga

SEQ ID NO: 1576665 - RNA, 19 nt, Artificial Sequence
  Description of Artificial Sequence: Synthetic oligonucleotide
  Sense strand starting at position 3904 of SEQ ID NO: 1560106
aguaaugcccucuggaaua

SEQ ID NO: 1576666 - RNA, 19 nt, Artificial Sequence
  Description of Artificial Sequence: Synthetic oligonucleotide
  Antisense strand to SEQ ID NO: 1576665
uauuccagagggcauuacu

SEQ ID NO: 1576667 - RNA, 19 nt, Artificial Sequence
  Description of Artificial Sequence: Synthetic oligonucleotide
  Sense strand starting at position 3964 of SEQ ID NO: 1560106
uuaggucuucucugugaua

SEQ ID NO: 1576668 - RNA, 19 nt, Artificial Sequence
  Description of Artificial Sequence: Synthetic oligonucleotide
  Antisense strand to SEQ ID NO: 1576667
uaucacagagaagaccuaa

SEQ ID NO: 1576669 - RNA, 19 nt, Artificial Sequence
  Description of Artificial Sequence: Synthetic oligonucleotide
  Sense strand starting at position 3965 of SEQ ID NO: 1560106
uaggucuucucugugauac

SEQ ID NO: 1576670 - RNA, 19 nt, Artificial Sequence
  Description of Artificial Sequence: Synthetic oligonucleotide
  Antisense strand to SEQ ID NO: 1576669
guaucacagagaagaccua

SEQ ID NO: 1576671 - RNA, 19 nt, Artificial Sequence
  Description of Artificial Sequence: Synthetic oligonucleotide
  Sense strand starting at position 3966 of SEQ ID NO: 1560106
aggucuucucugugauaca

SEQ ID NO: 1576672 - RNA, 19 nt, Artificial Sequence
  Description of Artificial Sequence: Synthetic oligonucleotide
  Antisense strand to SEQ ID NO: 1576671
uguaucacagagaagaccu

SEQ ID NO: 1576673 - RNA, 19 nt, Artificial Sequence
  Description of Artificial Sequence: Synthetic oligonucleotide
  Sense strand starting at position 3967 of SEQ ID NO: 1560106
ggucuucucugugauacau

SEQ ID NO: 1576674 - RNA, 19 nt, Artificial Sequence
  Description of Artificial Sequence: Synthetic oligonucleotide
  Antisense strand to SEQ ID NO: 1576673
auguaucacagagaagacc

SEQ ID NO: 1576675 - RNA, 19 nt, Artificial Sequence
  Description of Artificial Sequence: Synthetic oligonucleotide
  Sense strand starting at position 3969 of SEQ ID NO: 1560106
ucuucucugugauacauga

SEQ ID NO: 1576676 - RNA, 19 nt, Artificial Sequence
  Description of Artificial Sequence: Synthetic oligonucleotide
  Antisense strand to SEQ ID NO: 1576675
ucauguaucacagagaaga

SEQ ID NO: 1576677 - RNA, 19 nt, Artificial Sequence
  Description of Artificial Sequence: Synthetic oligonucleotide
  Sense strand starting at position 9 of SEQ ID NO: 1560107
gaaacacuuggcuggacau

SEQ ID NO: 1576678 - RNA, 19 nt, Artificial Sequence
  Description of Artificial Sequence: Synthetic oligonucleotide
  Antisense strand to SEQ ID NO: 1576677
auguccagccaaguguuuc

SEQ ID NO: 1576679 - RNA, 19 nt, Artificial Sequence
  Description of Artificial Sequence: Synthetic oligonucleotide
  Sense strand starting at position 149 of SEQ ID NO: 1560107
agauuagucuggcauggug

SEQ ID NO: 1576680 - RNA, 19 nt, Artificial Sequence
  Description of Artificial Sequence: Synthetic oligonucleotide
  Antisense strand to SEQ ID NO: 1576679
caccaugccagacuaaucu

SEQ ID NO: 1576681 - RNA, 19 nt, Artificial Sequence
  Description of Artificial Sequence: Synthetic oligonucleotide
  Sense strand starting at position 405 of SEQ ID NO: 1560107
ccuggucacucugagauuc

SEQ ID NO: 1576682 - RNA, 19 nt, Artificial Sequence
  Description of Artificial Sequence: Synthetic oligonucleotide
  Antisense strand to SEQ ID NO: 1576681
gaaucucagagugaccagg

SEQ ID NO: 1576683 - RNA, 19 nt, Artificial Sequence
  Description of Artificial Sequence: Synthetic oligonucleotide
  Sense strand starting at position 416 of SEQ ID NO: 1560107
ugagauuccuuccucagug

SEQ ID NO: 1576684 - RNA, 19 nt, Artificial Sequence
  Description of Artificial Sequence: Synthetic oligonucleotide
  Antisense strand to SEQ ID NO: 1576683
cacugaggaaggaaucuca

SEQ ID NO: 1576685 - RNA, 19 nt, Artificial Sequence
  Description of Artificial Sequence: Synthetic oligonucleotide
  Sense strand starting at position 479 of SEQ ID NO: 1560107
gccagcuguuccucaggaa

SEQ ID NO: 1576686 - RNA, 19 nt, Artificial Sequence
  Description of Artificial Sequence: Synthetic oligonucleotide
  Antisense strand to SEQ ID NO: 1576685
uuccugaggaacagcuggc

SEQ ID NO: 1576687 - RNA, 19 nt, Artificial Sequence
  Description of Artificial Sequence: Synthetic oligonucleotide
  Sense strand starting at position 483 of SEQ ID NO: 1560107
gcuguuccucaggaacuaa

SEQ ID NO: 1576688 - RNA, 19 nt, Artificial Sequence
  Description of Artificial Sequence: Synthetic oligonucleotide
  Antisense strand to SEQ ID NO: 1576687
uuaguuccugaggaacagc

SEQ ID NO: 1576689 - RNA, 19 nt, Artificial Sequence
  Description of Artificial Sequence: Synthetic oligonucleotide
  Sense strand starting at position 509 of SEQ ID NO: 1560107
guggguaguccaggcagaa

SEQ ID NO: 1576690 - RNA, 19 nt, Artificial Sequence
  Description of Artificial Sequence: Synthetic oligonucleotide
  Antisense strand to SEQ ID NO: 1576689
uucugccuggacuacccac

SEQ ID NO: 1576691 - RNA, 19 nt, Artificial Sequence
  Description of Artificial Sequence: Synthetic oligonucleotide
  Sense strand starting at position 689 of SEQ ID NO: 1560107
aggccaaguucugaucaca

SEQ ID NO: 1576692 - RNA, 19 nt, Artificial Sequence
  Description of Artificial Sequence: Synthetic oligonucleotide
  Antisense strand to SEQ ID NO: 1576691
ugugaucagaacuuggccu

SEQ ID NO: 1576693 - RNA, 19 nt, Artificial Sequence
  Description of Artificial Sequence: Synthetic oligonucleotide
  Sense strand starting at position 768 of SEQ ID NO: 1560107
uuauccucaguguaggaaa

SEQ ID NO: 1576694 - RNA, 19 nt, Artificial Sequence
  Description of Artificial Sequence: Synthetic oligonucleotide
  Antisense strand to SEQ ID NO: 1576693
uuuccuacacugaggauaa

SEQ ID NO: 1576695 - RNA, 19 nt, Artificial Sequence
  Description of Artificial Sequence: Synthetic oligonucleotide
  Sense strand starting at position 796 of SEQ ID NO: 1560107
gucccugaauucugagaua

SEQ ID NO: 1576696 - RNA, 19 nt, Artificial Sequence
  Description of Artificial Sequence: Synthetic oligonucleotide
  Antisense strand to SEQ ID NO: 1576695
uaucucagaauucagggac

SEQ ID NO: 1576697 - RNA, 19 nt, Artificial Sequence
  Description of Artificial Sequence: Synthetic oligonucleotide
  Sense strand starting at position 799 of SEQ ID NO: 1560107
ccugaauucugagauagug

SEQ ID NO: 1576698 - RNA, 19 nt, Artificial Sequence
  Description of Artificial Sequence: Synthetic oligonucleotide
  Antisense strand to SEQ ID NO: 1576697
cacuaucucagaauucagg

SEQ ID NO: 1576699 - RNA, 19 nt, Artificial Sequence
  Description of Artificial Sequence: Synthetic oligonucleotide
  Sense strand starting at position 2086 of SEQ ID NO: 1560107
gcacgugggucuucaagag

SEQ ID NO: 1576700 - RNA, 19 nt, Artificial Sequence
  Description of Artificial Sequence: Synthetic oligonucleotide
  Antisense strand to SEQ ID NO: 1576699
cucuugaagacccacgugc

SEQ ID NO: 1576701 - RNA, 19 nt, Artificial Sequence
  Description of Artificial Sequence: Synthetic oligonucleotide
  Sense strand starting at position 2092 of SEQ ID NO: 1560107
gggucuucaagagguggga

SEQ ID NO: 1576702 - RNA, 19 nt, Artificial Sequence
  Description of Artificial Sequence: Synthetic oligonucleotide
  Antisense strand to SEQ ID NO: 1576701
ucccaccucuugaagaccc

SEQ ID NO: 1576703 - RNA, 19 nt, Artificial Sequence
  Description of Artificial Sequence: Synthetic oligonucleotide
  Sense strand starting at position 2413 of SEQ ID NO: 1560107
ggugcgguuugaguuugau

SEQ ID NO: 1576704 - RNA, 19 nt, Artificial Sequence
  Description of Artificial Sequence: Synthetic oligonucleotide
  Antisense strand to SEQ ID NO: 1576703
aucaaacucaaaccgcacc

SEQ ID NO: 1576705 - RNA, 19 nt, Artificial Sequence
  Description of Artificial Sequence: Synthetic oligonucleotide
  Sense strand starting at position 2416 of SEQ ID NO: 1560107
gcgguuugaguuugauucu

SEQ ID NO: 1576706 - RNA, 19 nt, Artificial Sequence
  Description of Artificial Sequence: Synthetic oligonucleotide
  Antisense strand to SEQ ID NO: 1576705
agaaucaaacucaaaccgc

SEQ ID NO: 1576707 - RNA, 19 nt, Artificial Sequence
  Description of Artificial Sequence: Synthetic oligonucleotide
  Sense strand starting at position 2419 of SEQ ID NO: 1560107
guuugaguuugauucucaa

SEQ ID NO: 1576708 - RNA, 19 nt, Artificial Sequence
  Description of Artificial Sequence: Synthetic oligonucleotide
  Antisense strand to SEQ ID NO: 1576707
uugagaaucaaacucaaac

SEQ ID NO: 1576709 - RNA, 19 nt, Artificial Sequence
  Description of Artificial Sequence: Synthetic oligonucleotide
  Sense strand starting at position 2512 of SEQ ID NO: 1560107
guaggauaucugggucccu

SEQ ID NO: 1576710 - RNA, 19 nt, Artificial Sequence
  Description of Artificial Sequence: Synthetic oligonucleotide
  Antisense strand to SEQ ID NO: 1576709
agggacccagauauccuac

SEQ ID NO: 1576711 - RNA, 19 nt, Artificial Sequence
  Description of Artificial Sequence: Synthetic oligonucleotide
  Sense strand starting at position 2875 of SEQ ID NO: 1560107
acgggacucuucuuggaga

SEQ ID NO: 1576712 - RNA, 19 nt, Artificial Sequence
  Description of Artificial Sequence: Synthetic oligonucleotide
  Antisense strand to SEQ ID NO: 1576711
ucuccaagaagagucccgu

SEQ ID NO: 1576713 - RNA, 19 nt, Artificial Sequence
  Description of Artificial Sequence: Synthetic oligonucleotide
  Sense strand starting at position 2940 of SEQ ID NO: 1560107
agcgccuugucgaagguau

SEQ ID NO: 1576714 - RNA, 19 nt, Artificial Sequence
  Description of Artificial Sequence: Synthetic oligonucleotide
  Antisense strand to SEQ ID NO: 1576713
auaccuucgacaaggcgcu

SEQ ID NO: 1576715 - RNA, 19 nt, Artificial Sequence
  Description of Artificial Sequence: Synthetic oligonucleotide
  Sense strand starting at position 2941 of SEQ ID NO: 1560107
gcgccuugucgaagguaug

SEQ ID NO: 1576716 - RNA, 19 nt, Artificial Sequence
  Description of Artificial Sequence: Synthetic oligonucleotide
  Antisense strand to SEQ ID NO: 1576715
cauaccuucgacaaggcgc

SEQ ID NO: 1576717 - RNA, 19 nt, Artificial Sequence
  Description of Artificial Sequence: Synthetic oligonucleotide
  Sense strand starting at position 2959 of SEQ ID NO: 1560107
gggucuuuggucguggcau

SEQ ID NO: 1576718 - RNA, 19 nt, Artificial Sequence
  Description of Artificial Sequence: Synthetic oligonucleotide
  Antisense strand to SEQ ID NO: 1576717
augccacgaccaaagaccc

SEQ ID NO: 1576719 - RNA, 19 nt, Artificial Sequence
  Description of Artificial Sequence: Synthetic oligonucleotide
  Sense strand starting at position 2967 of SEQ ID NO: 1560107
ggucguggcaugggauuaa

SEQ ID NO: 1576720 - RNA, 19 nt, Artificial Sequence
  Description of Artificial Sequence: Synthetic oligonucleotide
  Antisense strand to SEQ ID NO: 1576719
uuaaucccaugccacgacc

SEQ ID NO: 1576721 - RNA, 19 nt, Artificial Sequence
  Description of Artificial Sequence: Synthetic oligonucleotide
  Sense strand starting at position 2971 of SEQ ID NO: 1560107
guggcaugggauuaaaggu

SEQ ID NO: 1576722 - RNA, 19 nt, Artificial Sequence
  Description of Artificial Sequence: Synthetic oligonucleotide
  Antisense strand to SEQ ID NO: 1576721
accuuuaaucccaugccac

SEQ ID NO: 1576723 - RNA, 19 nt, Artificial Sequence
  Description of Artificial Sequence: Synthetic oligonucleotide
  Sense strand starting at position 2980 of SEQ ID NO: 1560107
gauuaaaggucagauaacu

SEQ ID NO: 1576724 - RNA, 19 nt, Artificial Sequence
  Description of Artificial Sequence: Synthetic oligonucleotide
  Antisense strand to SEQ ID NO: 1576723
aguuaucugaccuuuaauc

SEQ ID NO: 1576725 - RNA, 19 nt, Artificial Sequence
  Description of Artificial Sequence: Synthetic oligonucleotide
  Sense strand starting at position 3037 of SEQ ID NO: 1560107
ucucucugucuccgaggaa

SEQ ID NO: 1576726 - RNA, 19 nt, Artificial Sequence
  Description of Artificial Sequence: Synthetic oligonucleotide
  Antisense strand to SEQ ID NO: 1576725
uuccucggagacagagaga

SEQ ID NO: 1576727 - RNA, 19 nt, Artificial Sequence
  Description of Artificial Sequence: Synthetic oligonucleotide
  Sense strand starting at position 3040 of SEQ ID NO: 1560107
cucugucuccgaggaagga

SEQ ID NO: 1576728 - RNA, 19 nt, Artificial Sequence
  Description of Artificial Sequence: Synthetic oligonucleotide
  Antisense strand to SEQ ID NO: 1576727
uccuuccucggagacagag

SEQ ID NO: 1576729 - RNA, 19 nt, Artificial Sequence
  Description of Artificial Sequence: Synthetic oligonucleotide
  Sense strand starting at position 3075 of SEQ ID NO: 1560107
gcccuuggguucccuagaa

SEQ ID NO: 1576730 - RNA, 19 nt, Artificial Sequence
  Description of Artificial Sequence: Synthetic oligonucleotide
  Antisense strand to SEQ ID NO: 1576729
uucuagggaacccaagggc

SEQ ID NO: 1576731 - RNA, 19 nt, Artificial Sequence
  Description of Artificial Sequence: Synthetic oligonucleotide
  Sense strand starting at position 3079 of SEQ ID NO: 1560107
uuggguucccuagaagcaa

SEQ ID NO: 1576732 - RNA, 19 nt, Artificial Sequence
  Description of Artificial Sequence: Synthetic oligonucleotide
  Antisense strand to SEQ ID NO: 1576731
uugcuucuagggaacccaa

SEQ ID NO: 1576733 - RNA, 19 nt, Artificial Sequence
  Description of Artificial Sequence: Synthetic oligonucleotide
  Sense strand starting at position 3091 of SEQ ID NO: 1560107
gaagcaaggguuugaaagu

SEQ ID NO: 1576734 - RNA, 19 nt, Artificial Sequence
  Description of Artificial Sequence: Synthetic oligonucleotide
  Antisense strand to SEQ ID NO: 1576733
acuuucaaacccuugcuuc

SEQ ID NO: 1576735 - RNA, 19 nt, Artificial Sequence
  Description of Artificial Sequence: Synthetic oligonucleotide
  Sense strand starting at position 3101 of SEQ ID NO: 1560107
uuugaaagugggugucuga

SEQ ID NO: 1576736 - RNA, 19 nt, Artificial Sequence
  Description of Artificial Sequence: Synthetic oligonucleotide
  Antisense strand to SEQ ID NO: 1576735
ucagacacccacuuucaaa

SEQ ID NO: 1576737 - RNA, 19 nt, Artificial Sequence
  Description of Artificial Sequence: Synthetic oligonucleotide
  Sense strand starting at position 3124 of SEQ ID NO: 1560107
gcaggaauuuggcaacaag

SEQ ID NO: 1576738 - RNA, 19 nt, Artificial Sequence
  Description of Artificial Sequence: Synthetic oligonucleotide
  Antisense strand to SEQ ID NO: 1576737
cuuguugccaaauuccugc

SEQ ID NO: 1576739 - RNA, 19 nt, Artificial Sequence
  Description of Artificial Sequence: Synthetic oligonucleotide
  Sense strand starting at position 3161 of SEQ ID NO: 1560107
ugguguggcaugggagaaa

SEQ ID NO: 1576740 - RNA, 19 nt, Artificial Sequence
  Description of Artificial Sequence: Synthetic oligonucleotide
  Antisense strand to SEQ ID NO: 1576739
uuucucccaugccacacca

SEQ ID NO: 1576741 - RNA, 19 nt, Artificial Sequence
  Description of Artificial Sequence: Synthetic oligonucleotide
  Sense strand starting at position 3162 of SEQ ID NO: 1560107
gguguggcaugggagaaau

SEQ ID NO: 1576742 - RNA, 19 nt, Artificial Sequence
  Description of Artificial Sequence: Synthetic oligonucleotide
  Antisense strand to SEQ ID NO: 1576741
auuucucccaugccacacc

SEQ ID NO: 1576743 - RNA, 19 nt, Artificial Sequence
  Description of Artificial Sequence: Synthetic oligonucleotide
  Sense strand starting at position 3198 of SEQ ID NO: 1560107
acuccugagucccgaagaa

SEQ ID NO: 1576744 - RNA, 19 nt, Artificial Sequence
  Description of Artificial Sequence: Synthetic oligonucleotide
  Antisense strand to SEQ ID NO: 1576743
uucuucgggacucaggagu

SEQ ID NO: 1576745 - RNA, 19 nt, Artificial Sequence
  Description of Artificial Sequence: Synthetic oligonucleotide
  Sense strand starting at position 3226 of SEQ ID NO: 1560107
gaggauggcguucaagacu

SEQ ID NO: 1576746 - RNA, 19 nt, Artificial Sequence
  Description of Artificial Sequence: Synthetic oligonucleotide
  Antisense strand to SEQ ID NO: 1576745
agucuugaacgccauccuc

SEQ ID NO: 1576747 - RNA, 19 nt, Artificial Sequence
  Description of Artificial Sequence: Synthetic oligonucleotide
  Sense strand starting at position 3525 of SEQ ID NO: 1560107
uggaucuccugggcucaau

SEQ ID NO: 1576748 - RNA, 19 nt, Artificial Sequence
  Description of Artificial Sequence: Synthetic oligonucleotide
  Antisense strand to SEQ ID NO: 1576747
auugagcccaggagaucca

SEQ ID NO: 1576749 - RNA, 19 nt, Artificial Sequence
  Description of Artificial Sequence: Synthetic oligonucleotide
  Sense strand starting at position 3551 of SEQ ID NO: 1560107
gccugcucggccuccuaaa

SEQ ID NO: 1576750 - RNA, 19 nt, Artificial Sequence
  Description of Artificial Sequence: Synthetic oligonucleotide
  Antisense strand to SEQ ID NO: 1576749
uuuaggaggccgagcaggc

SEQ ID NO: 1576751 - RNA, 19 nt, Artificial Sequence
  Description of Artificial Sequence: Synthetic oligonucleotide
  Sense strand starting at position 3562 of SEQ ID NO: 1560107
cuccuaaagaggugggauu

SEQ ID NO: 1576752 - RNA, 19 nt, Artificial Sequence
  Description of Artificial Sequence: Synthetic oligonucleotide
  Antisense strand to SEQ ID NO: 1576751
aaucccaccucuuuaggag

SEQ ID NO: 1576753 - RNA, 19 nt, Artificial Sequence
  Description of Artificial Sequence: Synthetic oligonucleotide
  Sense strand starting at position 3615 of SEQ ID NO: 1560107
ccaaguucugaucgcaaau

SEQ ID NO: 1576754 - RNA, 19 nt, Artificial Sequence
  Description of Artificial Sequence: Synthetic oligonucleotide
  Antisense strand to SEQ ID NO: 1576753
auuugcgaucagaacuugg

SEQ ID NO: 1576755 - RNA, 19 nt, Artificial Sequence
  Description of Artificial Sequence: Synthetic oligonucleotide
  Sense strand starting at position 3895 of SEQ ID NO: 1560107
gaugucucacuguguuaca

SEQ ID NO: 1576756 - RNA, 19 nt, Artificial Sequence
  Description of Artificial Sequence: Synthetic oligonucleotide
  Antisense strand to SEQ ID NO: 1576755
uguaacacagugagacauc

SEQ ID NO: 1576757 - RNA, 19 nt, Artificial Sequence
  Description of Artificial Sequence: Synthetic oligonucleotide
  Sense strand starting at position 160 of SEQ ID NO: 1560108
gcagguuugccaugcagac

SEQ ID NO: 1576758 - RNA, 19 nt, Artificial Sequence
  Description of Artificial Sequence: Synthetic oligonucleotide
  Antisense strand to SEQ ID NO: 1576757
gucugcauggcaaaccugc

SEQ ID NO: 1576759 - RNA, 19 nt, Artificial Sequence
  Description of Artificial Sequence: Synthetic oligonucleotide
  Sense strand starting at position 184 of SEQ ID NO: 1560108
uuccuaucuuggcuaauga

SEQ ID NO: 1576760 - RNA, 19 nt, Artificial Sequence
  Description of Artificial Sequence: Synthetic oligonucleotide
  Antisense strand to SEQ ID NO: 1576759
ucauuagccaagauaggaa

SEQ ID NO: 1576761 - RNA, 19 nt, Artificial Sequence
  Description of Artificial Sequence: Synthetic oligonucleotide
  Sense strand starting at position 201 of SEQ ID NO: 1560108
gaccaaucaugaugugaua

SEQ ID NO: 1576762 - RNA, 19 nt, Artificial Sequence
  Description of Artificial Sequence: Synthetic oligonucleotide
  Antisense strand to SEQ ID NO: 1576761
uaucacaucaugauugguc

SEQ ID NO: 1576763 - RNA, 19 nt, Artificial Sequence
  Description of Artificial Sequence: Synthetic oligonucleotide
  Sense strand starting at position 212 of SEQ ID NO: 1560108
augugauaacaucguguuu

SEQ ID NO: 1576764 - RNA, 19 nt, Artificial Sequence
  Description of Artificial Sequence: Synthetic oligonucleotide
  Antisense strand to SEQ ID NO: 1576763
aaacacgauguuaucacau

SEQ ID NO: 1576765 - RNA, 19 nt, Artificial Sequence
  Description of Artificial Sequence: Synthetic oligonucleotide
  Sense strand starting at position 217 of SEQ ID NO: 1560108
auaacaucguguuuaacca

SEQ ID NO: 1576766 - RNA, 19 nt, Artificial Sequence
  Description of Artificial Sequence: Synthetic oligonucleotide
  Antisense strand to SEQ ID NO: 1576765
ugguuaaacacgauguuau

SEQ ID NO: 1576767 - RNA, 19 nt, Artificial Sequence
  Description of Artificial Sequence: Synthetic oligonucleotide
  Sense strand starting at position 221 of SEQ ID NO: 1560108
caucguguuuaaccauaug

SEQ ID NO: 1576768 - RNA, 19 nt, Artificial Sequence
  Description of Artificial Sequence: Synthetic oligonucleotide
  Antisense strand to SEQ ID NO: 1576767
cauaugguuaaacacgaug

SEQ ID NO: 1576769 - RNA, 19 nt, Artificial Sequence
  Description of Artificial Sequence: Synthetic oligonucleotide
  Sense strand starting at position 224 of SEQ ID NO: 1560108
cguguuuaaccauaugaaa

SEQ ID NO: 1576770 - RNA, 19 nt, Artificial Sequence
  Description of Artificial Sequence: Synthetic oligonucleotide
  Antisense strand to SEQ ID NO: 1576769
uuucauaugguuaaacacg

SEQ ID NO: 1576771 - RNA, 19 nt, Artificial Sequence
  Description of Artificial Sequence: Synthetic oligonucleotide
  Sense strand starting at position 243 of SEQ ID NO: 1560108
uugccuuuccuguagguaa

SEQ ID NO: 1576772 - RNA, 19 nt, Artificial Sequence
  Description of Artificial Sequence: Synthetic oligonucleotide
  Antisense strand to SEQ ID NO: 1576771
uuaccuacaggaaaggcaa

SEQ ID NO: 1576773 - RNA, 19 nt, Artificial Sequence
  Description of Artificial Sequence: Synthetic oligonucleotide
  Sense strand starting at position 267 of SEQ ID NO: 1560108
ggccaaauauuggcaauua

SEQ ID NO: 1576774 - RNA, 19 nt, Artificial Sequence
  Description of Artificial Sequence: Synthetic oligonucleotide
  Antisense strand to SEQ ID NO: 1576773
uaauugccaauauuuggcc

SEQ ID NO: 1576775 - RNA, 19 nt, Artificial Sequence
  Description of Artificial Sequence: Synthetic oligonucleotide
  Sense strand starting at position 268 of SEQ ID NO: 1560108
gccaaauauuggcaauuau

SEQ ID NO: 1576776 - RNA, 19 nt, Artificial Sequence
  Description of Artificial Sequence: Synthetic oligonucleotide
  Antisense strand to SEQ ID NO: 1576775
auaauugccaauauuuggc

SEQ ID NO: 1576777 - RNA, 19 nt, Artificial Sequence
  Description of Artificial Sequence: Synthetic oligonucleotide
  Sense strand starting at position 276 of SEQ ID NO: 1560108
uuggcaauuauguaugguu

SEQ ID NO: 1576778 - RNA, 19 nt, Artificial Sequence
  Description of Artificial Sequence: Synthetic oligonucleotide
  Antisense strand to SEQ ID NO: 1576777
aaccauacauaauugccaa

SEQ ID NO: 1576779 - RNA, 19 nt, Artificial Sequence
  Description of Artificial Sequence: Synthetic oligonucleotide
  Sense strand starting at position 328 of SEQ ID NO: 1560108
uauugagugcuauguucua

SEQ ID NO: 1576780 - RNA, 19 nt, Artificial Sequence
  Description of Artificial Sequence: Synthetic oligonucleotide
  Antisense strand to SEQ ID NO: 1576779
uagaacauagcacucaaua

SEQ ID NO: 1576781 - RNA, 19 nt, Artificial Sequence
  Description of Artificial Sequence: Synthetic oligonucleotide
  Sense strand starting at position 375 of SEQ ID NO: 1560108
cucuacaacuguccuguaa

SEQ ID NO: 1576782 - RNA, 19 nt, Artificial Sequence
  Description of Artificial Sequence: Synthetic oligonucleotide
  Antisense strand to SEQ ID NO: 1576781
uuacaggacaguuguagag

SEQ ID NO: 1576783 - RNA, 19 nt, Artificial Sequence
  Description of Artificial Sequence: Synthetic oligonucleotide
  Sense strand starting at position 379 of SEQ ID NO: 1560108
acaacuguccuguaaugua

SEQ ID NO: 1576784 - RNA, 19 nt, Artificial Sequence
  Description of Artificial Sequence: Synthetic oligonucleotide
  Antisense strand to SEQ ID NO: 1576783
uacauuacaggacaguugu

SEQ ID NO: 1576785 - RNA, 19 nt, Artificial Sequence
  Description of Artificial Sequence: Synthetic oligonucleotide
  Sense strand starting at position 766 of SEQ ID NO: 1560108
gcagaaguagcgcaaucau

SEQ ID NO: 1576786 - RNA, 19 nt, Artificial Sequence
  Description of Artificial Sequence: Synthetic oligonucleotide
  Antisense strand to SEQ ID NO: 1576785
augauugcgcuacuucugc

SEQ ID NO: 1576787 - RNA, 19 nt, Artificial Sequence
  Description of Artificial Sequence: Synthetic oligonucleotide
  Sense strand starting at position 1026 of SEQ ID NO: 1560108
gaggcucagagcuguaaag

SEQ ID NO: 1576788 - RNA, 19 nt, Artificial Sequence
  Description of Artificial Sequence: Synthetic oligonucleotide
  Antisense strand to SEQ ID NO: 1576787
cuuuacagcucugagccuc

SEQ ID NO: 1576789 - RNA, 19 nt, Artificial Sequence
  Description of Artificial Sequence: Synthetic oligonucleotide
  Sense strand starting at position 1042 of SEQ ID NO: 1560108
aagucaaguguccgaugua

SEQ ID NO: 1576790 - RNA, 19 nt, Artificial Sequence
  Description of Artificial Sequence: Synthetic oligonucleotide
  Antisense strand to SEQ ID NO: 1576789
uacaucggacacuugacuu

SEQ ID NO: 1576791 - RNA, 19 nt, Artificial Sequence
  Description of Artificial Sequence: Synthetic oligonucleotide
  Sense strand starting at position 1045 of SEQ ID NO: 1560108
ucaaguguccgauguacag

SEQ ID NO: 1576792 - RNA, 19 nt, Artificial Sequence
  Description of Artificial Sequence: Synthetic oligonucleotide
  Antisense strand to SEQ ID NO: 1576791
cuguacaucggacacuuga

SEQ ID NO: 1576793 - RNA, 19 nt, Artificial Sequence
  Description of Artificial Sequence: Synthetic oligonucleotide
  Sense strand starting at position 1088 of SEQ ID NO: 1560108
gccagacucuaauaucuga

SEQ ID NO: 1576794 - RNA, 19 nt, Artificial Sequence
  Description of Artificial Sequence: Synthetic oligonucleotide
  Antisense strand to SEQ ID NO: 1576793
ucagauauuagagucuggc

SEQ ID NO: 1576795 - RNA, 19 nt, Artificial Sequence
  Description of Artificial Sequence: Synthetic oligonucleotide
  Sense strand starting at position 1205 of SEQ ID NO: 1560108
gccacagugccauaagcuu

SEQ ID NO: 1576796 - RNA, 19 nt, Artificial Sequence
  Description of Artificial Sequence: Synthetic oligonucleotide
  Antisense strand to SEQ ID NO: 1576795
aagcuuauggcacuguggc

SEQ ID NO: 1576797 - RNA, 19 nt, Artificial Sequence
  Description of Artificial Sequence: Synthetic oligonucleotide
  Sense strand starting at position 1284 of SEQ ID NO: 1560108
ggcagaugucuucacgucu

SEQ ID NO: 1576798 - RNA, 19 nt, Artificial Sequence
  Description of Artificial Sequence: Synthetic oligonucleotide
  Antisense strand to SEQ ID NO: 1576797
agacgugaagacaucugcc

SEQ ID NO: 1576799 - RNA, 19 nt, Artificial Sequence
  Description of Artificial Sequence: Synthetic oligonucleotide
  Sense strand starting at position 1295 of SEQ ID NO: 1560108
ucacgucucugagucucaa

SEQ ID NO: 1576800 - RNA, 19 nt, Artificial Sequence
  Description of Artificial Sequence: Synthetic oligonucleotide
  Antisense strand to SEQ ID NO: 1576799
uugagacucagagacguga

SEQ ID NO: 1576801 - RNA, 19 nt, Artificial Sequence
  Description of Artificial Sequence: Synthetic oligonucleotide
  Sense strand starting at position 1346 of SEQ ID NO: 1560108
cugacauggcccgacugau

SEQ ID NO: 1576802 - RNA, 19 nt, Artificial Sequence
  Description of Artificial Sequence: Synthetic oligonucleotide
  Antisense strand to SEQ ID NO: 1576801
aucagucgggccaugucag

SEQ ID NO: 1576803 - RNA, 19 nt, Artificial Sequence
  Description of Artificial Sequence: Synthetic oligonucleotide
  Sense strand starting at position 1358 of SEQ ID NO: 1560108
gacugaugcaaggguuuga

SEQ ID NO: 1576804 - RNA, 19 nt, Artificial Sequence
  Description of Artificial Sequence: Synthetic oligonucleotide
  Antisense strand to SEQ ID NO: 1576803
ucaaacccuugcaucaguc

SEQ ID NO: 1576805 - RNA, 19 nt, Artificial Sequence
  Description of Artificial Sequence: Synthetic oligonucleotide
  Sense strand starting at position 1367 of SEQ ID NO: 1560108
aaggguuugaugugucaag

SEQ ID NO: 1576806 - RNA, 19 nt, Artificial Sequence
  Description of Artificial Sequence: Synthetic oligonucleotide
  Antisense strand to SEQ ID NO: 1576805
cuugacacaucaaacccuu

SEQ ID NO: 1576807 - RNA, 19 nt, Artificial Sequence
  Description of Artificial Sequence: Synthetic oligonucleotide
  Sense strand starting at position 1368 of SEQ ID NO: 1560108
aggguuugaugugucaagu

SEQ ID NO: 1576808 - RNA, 19 nt, Artificial Sequence
  Description of Artificial Sequence: Synthetic oligonucleotide
  Antisense strand to SEQ ID NO: 1576807
acuugacacaucaaacccu

SEQ ID NO: 1576809 - RNA, 19 nt, Artificial Sequence
  Description of Artificial Sequence: Synthetic oligonucleotide
  Sense strand starting at position 2016 of SEQ ID NO: 1560108
gcgguguuugcgucgcuca

SEQ ID NO: 1576810 - RNA, 19 nt, Artificial Sequence
  Description of Artificial Sequence: Synthetic oligonucleotide
  Antisense strand to SEQ ID NO: 1576809
ugagcgacgcaaacaccgc

SEQ ID NO: 1576811 - RNA, 19 nt, Artificial Sequence
  Description of Artificial Sequence: Synthetic oligonucleotide
  Sense strand starting at position 2289 of SEQ ID NO: 1560108
gcguucugugagggccaau

SEQ ID NO: 1576812 - RNA, 19 nt, Artificial Sequence
  Description of Artificial Sequence: Synthetic oligonucleotide
  Antisense strand to SEQ ID NO: 1576811
auuggcccucacagaacgc

SEQ ID NO: 1576813 - RNA, 19 nt, Artificial Sequence
  Description of Artificial Sequence: Synthetic oligonucleotide
  Sense strand starting at position 2330 of SEQ ID NO: 1560108
aagaguaacgcggauaauu

SEQ ID NO: 1576814 - RNA, 19 nt, Artificial Sequence
  Description of Artificial Sequence: Synthetic oligonucleotide
  Antisense strand to SEQ ID NO: 1576813
aauuauccgcguuacucuu

SEQ ID NO: 1576815 - RNA, 19 nt, Artificial Sequence
  Description of Artificial Sequence: Synthetic oligonucleotide
  Sense strand starting at position 2377 of SEQ ID NO: 1560108
cagagcucguuucugauaa

SEQ ID NO: 1576816 - RNA, 19 nt, Artificial Sequence
  Description of Artificial Sequence: Synthetic oligonucleotide
  Antisense strand to SEQ ID NO: 1576815
uuaucagaaacgagcucug

SEQ ID NO: 1576817 - RNA, 19 nt, Artificial Sequence
  Description of Artificial Sequence: Synthetic oligonucleotide
  Sense strand starting at position 2769 of SEQ ID NO: 1560108
ucacgaugcccaggcuaau

SEQ ID NO: 1576818 - RNA, 19 nt, Artificial Sequence
  Description of Artificial Sequence: Synthetic oligonucleotide
  Antisense strand to SEQ ID NO: 1576817
auuagccugggcaucguga

SEQ ID NO: 1576819 - RNA, 19 nt, Artificial Sequence
  Description of Artificial Sequence: Synthetic oligonucleotide
  Sense strand starting at position 2848 of SEQ ID NO: 1560108
ccuggagaguccucaagug

SEQ ID NO: 1576820 - RNA, 19 nt, Artificial Sequence
  Description of Artificial Sequence: Synthetic oligonucleotide
  Antisense strand to SEQ ID NO: 1576819
cacuugaggacucuccagg

SEQ ID NO: 1576821 - RNA, 19 nt, Artificial Sequence
  Description of Artificial Sequence: Synthetic oligonucleotide
  Sense strand starting at position 2858 of SEQ ID NO: 1560108
ccucaaguguccuuggaag

SEQ ID NO: 1576822 - RNA, 19 nt, Artificial Sequence
  Description of Artificial Sequence: Synthetic oligonucleotide
  Antisense strand to SEQ ID NO: 1576821
cuuccaaggacacuugagg

SEQ ID NO: 1576823 - RNA, 19 nt, Artificial Sequence
  Description of Artificial Sequence: Synthetic oligonucleotide
  Sense strand starting at position 3009 of SEQ ID NO: 1560108
agaucuucaguuuggagga

SEQ ID NO: 1576824 - RNA, 19 nt, Artificial Sequence
  Description of Artificial Sequence: Synthetic oligonucleotide
  Antisense strand to SEQ ID NO: 1576823
uccuccaaacugaagaucu

SEQ ID NO: 1576825 - RNA, 19 nt, Artificial Sequence
  Description of Artificial Sequence: Synthetic oligonucleotide
  Sense strand starting at position 3190 of SEQ ID NO: 1560108
agagacugcuuauaaugau

SEQ ID NO: 1576826 - RNA, 19 nt, Artificial Sequence
  Description of Artificial Sequence: Synthetic oligonucleotide
  Antisense strand to SEQ ID NO: 1576825
aucauuauaagcagucucu

SEQ ID NO: 1576827 - RNA, 19 nt, Artificial Sequence
  Description of Artificial Sequence: Synthetic oligonucleotide
  Sense strand starting at position 3196 of SEQ ID NO: 1560108
ugcuuauaaugaugagaga

SEQ ID NO: 1576828 - RNA, 19 nt, Artificial Sequence
  Description of Artificial Sequence: Synthetic oligonucleotide
  Antisense strand to SEQ ID NO: 1576827
ucucucaucauuauaagca

SEQ ID NO: 1576829 - RNA, 19 nt, Artificial Sequence
  Description of Artificial Sequence: Synthetic oligonucleotide
  Sense strand starting at position 3330 of SEQ ID NO: 1560108
ggaagaaugugggcuuguu

SEQ ID NO: 1576830 - RNA, 19 nt, Artificial Sequence
  Description of Artificial Sequence: Synthetic oligonucleotide
  Antisense strand to SEQ ID NO: 1576829
aacaagcccacauucuucc

SEQ ID NO: 1576831 - RNA, 19 nt, Artificial Sequence
  Description of Artificial Sequence: Synthetic oligonucleotide
  Sense strand starting at position 3339 of SEQ ID NO: 1560108
ugggcuuguuuauugcaga

SEQ ID NO: 1576832 - RNA, 19 nt, Artificial Sequence
  Description of Artificial Sequence: Synthetic oligonucleotide
  Antisense strand to SEQ ID NO: 1576831
ucugcaauaaacaagccca

SEQ ID NO: 1576833 - RNA, 19 nt, Artificial Sequence
  Description of Artificial Sequence: Synthetic oligonucleotide
  Sense strand starting at position 3608 of SEQ ID NO: 1560108
cugggaguccgauguugca

SEQ ID NO: 1576834 - RNA, 19 nt, Artificial Sequence
  Description of Artificial Sequence: Synthetic oligonucleotide
  Antisense strand to SEQ ID NO: 1576833
ugcaacaucggacucccag

SEQ ID NO: 1576835 - RNA, 19 nt, Artificial Sequence
  Description of Artificial Sequence: Synthetic oligonucleotide
  Sense strand starting at position 3847 of SEQ ID NO: 1560108
cugucucuacaauguaaag

SEQ ID NO: 1576836 - RNA, 19 nt, Artificial Sequence
  Description of Artificial Sequence: Synthetic oligonucleotide
  Antisense strand to SEQ ID NO: 1576835
cuuuacauuguagagacag

SEQ ID NO: 1576837 - RNA, 19 nt, Artificial Sequence
  Description of Artificial Sequence: Synthetic oligonucleotide
  Sense strand starting at position 30 of SEQ ID NO: 1560109
cugggagauuuggauaauu

SEQ ID NO: 1576838 - RNA, 19 nt, Artificial Sequence
  Description of Artificial Sequence: Synthetic oligonucleotide
  Antisense strand to SEQ ID NO: 1576837
aauuauccaaaucucccag

SEQ ID NO: 1576839 - RNA, 19 nt, Artificial Sequence
  Description of Artificial Sequence: Synthetic oligonucleotide
  Sense strand starting at position 138 of SEQ ID NO: 1560109
gccuguauccaucaucuuu

SEQ ID NO: 1576840 - RNA, 19 nt, Artificial Sequence
  Description of Artificial Sequence: Synthetic oligonucleotide
  Antisense strand to SEQ ID NO: 1576839
aaagaugauggauacaggc

SEQ ID NO: 1576841 - RNA, 19 nt, Artificial Sequence
  Description of Artificial Sequence: Synthetic oligonucleotide
  Sense strand starting at position 502 of SEQ ID NO: 1560109
ugcgguuggccugauuaua

SEQ ID NO: 1576842 - RNA, 19 nt, Artificial Sequence
  Description of Artificial Sequence: Synthetic oligonucleotide
  Antisense strand to SEQ ID NO: 1576841
uauaaucaggccaaccgca

SEQ ID NO: 1576843 - RNA, 19 nt, Artificial Sequence
  Description of Artificial Sequence: Synthetic oligonucleotide
  Sense strand starting at position 512 of SEQ ID NO: 1560109
cugauuauagcuuacugca

SEQ ID NO: 1576844 - RNA, 19 nt, Artificial Sequence
  Description of Artificial Sequence: Synthetic oligonucleotide
  Antisense strand to SEQ ID NO: 1576843
ugcaguaagcuauaaucag

SEQ ID NO: 1576845 - RNA, 19 nt, Artificial Sequence
  Description of Artificial Sequence: Synthetic oligonucleotide
  Sense strand starting at position 954 of SEQ ID NO: 1560109
ggguguucucucuauggaa

SEQ ID NO: 1576846 - RNA, 19 nt, Artificial Sequence
  Description of Artificial Sequence: Synthetic oligonucleotide
  Antisense strand to SEQ ID NO: 1576845
uuccauagagagaacaccc

SEQ ID NO: 1576847 - RNA, 19 nt, Artificial Sequence
  Description of Artificial Sequence: Synthetic oligonucleotide
  Sense strand starting at position 956 of SEQ ID NO: 1560109
guguucucucuauggaaau

SEQ ID NO: 1576848 - RNA, 19 nt, Artificial Sequence
  Description of Artificial Sequence: Synthetic oligonucleotide
  Antisense strand to SEQ ID NO: 1576847
auuuccauagagagaacac

SEQ ID NO: 1576849 - RNA, 19 nt, Artificial Sequence
  Description of Artificial Sequence: Synthetic oligonucleotide
  Sense strand starting at position 2066 of SEQ ID NO: 1560109
ggaguaggauggagucuuu

SEQ ID NO: 1576850 - RNA, 19 nt, Artificial Sequence
  Description of Artificial Sequence: Synthetic oligonucleotide
  Antisense strand to SEQ ID NO: 1576849
aaagacuccauccuacucc

SEQ ID NO: 1576851 - RNA, 19 nt, Artificial Sequence
  Description of Artificial Sequence: Synthetic oligonucleotide
  Sense strand starting at position 2075 of SEQ ID NO: 1560109
uggagucuuugcuuuggaa

SEQ ID NO: 1576852 - RNA, 19 nt, Artificial Sequence
  Description of Artificial Sequence: Synthetic oligonucleotide
  Antisense strand to SEQ ID NO: 1576851
uuccaaagcaaagacucca

SEQ ID NO: 1576853 - RNA, 19 nt, Artificial Sequence
  Description of Artificial Sequence: Synthetic oligonucleotide
  Sense strand starting at position 2077 of SEQ ID NO: 1560109
gagucuuugcuuuggaacu

SEQ ID NO: 1576854 - RNA, 19 nt, Artificial Sequence
  Description of Artificial Sequence: Synthetic oligonucleotide
  Antisense strand to SEQ ID NO: 1576853
aguuccaaagcaaagacuc

SEQ ID NO: 1576855 - RNA, 19 nt, Artificial Sequence
  Description of Artificial Sequence: Synthetic oligonucleotide
  Sense strand starting at position 2240 of SEQ ID NO: 1560109
gucgguaagcauggaagaa

SEQ ID NO: 1576856 - RNA, 19 nt, Artificial Sequence
  Description of Artificial Sequence: Synthetic oligonucleotide
  Antisense strand to SEQ ID NO: 1576855
uucuuccaugcuuaccgac

SEQ ID NO: 1576857 - RNA, 19 nt, Artificial Sequence
  Description of Artificial Sequence: Synthetic oligonucleotide
  Sense strand starting at position 2361 of SEQ ID NO: 1560109
gggacuugcuguucccaca

SEQ ID NO: 1576858 - RNA, 19 nt, Artificial Sequence
  Description of Artificial Sequence: Synthetic oligonucleotide
  Antisense strand to SEQ ID NO: 1576857
ugugggaacagcaaguccc

SEQ ID NO: 1576859 - RNA, 19 nt, Artificial Sequence
  Description of Artificial Sequence: Synthetic oligonucleotide
  Sense strand starting at position 2368 of SEQ ID NO: 1560109
gcuguucccacagguagaa

SEQ ID NO: 1576860 - RNA, 19 nt, Artificial Sequence
  Description of Artificial Sequence: Synthetic oligonucleotide
  Antisense strand to SEQ ID NO: 1576859
uucuaccugugggaacagc

SEQ ID NO: 1576861 - RNA, 19 nt, Artificial Sequence
  Description of Artificial Sequence: Synthetic oligonucleotide
  Sense strand starting at position 2863 of SEQ ID NO: 1560109
acucaccgcuaucugaaau

SEQ ID NO: 1576862 - RNA, 19 nt, Artificial Sequence
  Description of Artificial Sequence: Synthetic oligonucleotide
  Antisense strand to SEQ ID NO: 1576861
auuucagauagcggugagu

SEQ ID NO: 1576863 - RNA, 19 nt, Artificial Sequence
  Description of Artificial Sequence: Synthetic oligonucleotide
  Sense strand starting at position 2927 of SEQ ID NO: 1560109
ucaccugcccuagaagaau

SEQ ID NO: 1576864 - RNA, 19 nt, Artificial Sequence
  Description of Artificial Sequence: Synthetic oligonucleotide
  Antisense strand to SEQ ID NO: 1576863
auucuucuagggcagguga

SEQ ID NO: 1576865 - RNA, 19 nt, Artificial Sequence
  Description of Artificial Sequence: Synthetic oligonucleotide
  Sense strand starting at position 3217 of SEQ ID NO: 1560109
uuucuauuucucggucauu

SEQ ID NO: 1576866 - RNA, 19 nt, Artificial Sequence
  Description of Artificial Sequence: Synthetic oligonucleotide
  Antisense strand to SEQ ID NO: 1576865
aaugaccgagaaauagaaa

SEQ ID NO: 1576867 - RNA, 19 nt, Artificial Sequence
  Description of Artificial Sequence: Synthetic oligonucleotide
  Sense strand starting at position 3306 of SEQ ID NO: 1560109
cuaaguauuccacggcaua

SEQ ID NO: 1576868 - RNA, 19 nt, Artificial Sequence
  Description of Artificial Sequence: Synthetic oligonucleotide
  Antisense strand to SEQ ID NO: 1576867
uaugccguggaauacuuag

SEQ ID NO: 1576869 - RNA, 19 nt, Artificial Sequence
  Description of Artificial Sequence: Synthetic oligonucleotide
  Sense strand starting at position 3307 of SEQ ID NO: 1560109
uaaguauuccacggcauau

SEQ ID NO: 1576870 - RNA, 19 nt, Artificial Sequence
  Description of Artificial Sequence: Synthetic oligonucleotide
  Antisense strand to SEQ ID NO: 1576869
auaugccguggaauacuua

SEQ ID NO: 1576871 - RNA, 19 nt, Artificial Sequence
  Description of Artificial Sequence: Synthetic oligonucleotide
  Sense strand starting at position 3364 of SEQ ID NO: 1560109
ugugacauauaugcuauau

SEQ ID NO: 1576872 - RNA, 19 nt, Artificial Sequence
  Description of Artificial Sequence: Synthetic oligonucleotide
  Antisense strand to SEQ ID NO: 1576871
auauagcauauaugucaca

SEQ ID NO: 1576873 - RNA, 19 nt, Artificial Sequence
  Description of Artificial Sequence: Synthetic oligonucleotide
  Sense strand starting at position 3381 of SEQ ID NO: 1560109
auauaugugccauguagau

SEQ ID NO: 1576874 - RNA, 19 nt, Artificial Sequence
  Description of Artificial Sequence: Synthetic oligonucleotide
  Antisense strand to SEQ ID NO: 1576873
aucuacauggcacauauau

SEQ ID NO: 1576875 - RNA, 19 nt, Artificial Sequence
  Description of Artificial Sequence: Synthetic oligonucleotide
  Sense strand starting at position 3383 of SEQ ID NO: 1560109
auaugugccauguagauag

SEQ ID NO: 1576876 - RNA, 19 nt, Artificial Sequence
  Description of Artificial Sequence: Synthetic oligonucleotide
  Antisense strand to SEQ ID NO: 1576875
cuaucuacauggcacauau

SEQ ID NO: 1576877 - RNA, 19 nt, Artificial Sequence
  Description of Artificial Sequence: Synthetic oligonucleotide
  Sense strand starting at position 3398 of SEQ ID NO: 1560109
auaggauaucuaugugaua

SEQ ID NO: 1576878 - RNA, 19 nt, Artificial Sequence
  Description of Artificial Sequence: Synthetic oligonucleotide
  Antisense strand to SEQ ID NO: 1576877
uaucacauagauauccuau

SEQ ID NO: 1576879 - RNA, 19 nt, Artificial Sequence
  Description of Artificial Sequence: Synthetic oligonucleotide
  Sense strand starting at position 3399 of SEQ ID NO: 1560109
uaggauaucuaugugauau

SEQ ID NO: 1576880 - RNA, 19 nt, Artificial Sequence
  Description of Artificial Sequence: Synthetic oligonucleotide
  Antisense strand to SEQ ID NO: 1576879
auaucacauagauauccua

SEQ ID NO: 1576881 - RNA, 19 nt, Artificial Sequence
  Description of Artificial Sequence: Synthetic oligonucleotide
  Sense strand starting at position 3418 of SEQ ID NO: 1560109
auauguuaucuagagagca

SEQ ID NO: 1576882 - RNA, 19 nt, Artificial Sequence
  Description of Artificial Sequence: Synthetic oligonucleotide
  Antisense strand to SEQ ID NO: 1576881
ugcucucuagauaacauau

SEQ ID NO: 1576883 - RNA, 19 nt, Artificial Sequence
  Description of Artificial Sequence: Synthetic oligonucleotide
  Sense strand starting at position 3478 of SEQ ID NO: 1560109
auaugcuauuuagauagca

SEQ ID NO: 1576884 - RNA, 19 nt, Artificial Sequence
  Description of Artificial Sequence: Synthetic oligonucleotide
  Antisense strand to SEQ ID NO: 1576883
ugcuaucuaaauagcauau

SEQ ID NO: 1576885 - RNA, 19 nt, Artificial Sequence
  Description of Artificial Sequence: Synthetic oligonucleotide
  Sense strand starting at position 3491 of SEQ ID NO: 1560109
auagcauaucuaugugaua

SEQ ID NO: 1576886 - RNA, 19 nt, Artificial Sequence
  Description of Artificial Sequence: Synthetic oligonucleotide
  Antisense strand to SEQ ID NO: 1576885
uaucacauagauaugcuau

SEQ ID NO: 1576887 - RNA, 19 nt, Artificial Sequence
  Description of Artificial Sequence: Synthetic oligonucleotide
  Sense strand starting at position 3492 of SEQ ID NO: 1560109
uagcauaucuaugugauag

SEQ ID NO: 1576888 - RNA, 19 nt, Artificial Sequence
  Description of Artificial Sequence: Synthetic oligonucleotide
  Antisense strand to SEQ ID NO: 1576887
cuaucacauagauaugcua

SEQ ID NO: 1576889 - RNA, 19 nt, Artificial Sequence
  Description of Artificial Sequence: Synthetic oligonucleotide
  Sense strand starting at position 3503 of SEQ ID NO: 1560109
ugugauagauaugcuauau

SEQ ID NO: 1576890 - RNA, 19 nt, Artificial Sequence
  Description of Artificial Sequence: Synthetic oligonucleotide
  Antisense strand to SEQ ID NO: 1576889
auauagcauaucuaucaca

SEQ ID NO: 1576891 - RNA, 19 nt, Artificial Sequence
  Description of Artificial Sequence: Synthetic oligonucleotide
  Sense strand starting at position 3518 of SEQ ID NO: 1560109
auauauagggcauauguau

SEQ ID NO: 1576892 - RNA, 19 nt, Artificial Sequence
  Description of Artificial Sequence: Synthetic oligonucleotide
  Antisense strand to SEQ ID NO: 1576891
auacauaugcccuauauau

SEQ ID NO: 1576893 - RNA, 19 nt, Artificial Sequence
  Description of Artificial Sequence: Synthetic oligonucleotide
  Sense strand starting at position 3538 of SEQ ID NO: 1560109
ugguauagauaugcuauau

SEQ ID NO: 1576894 - RNA, 19 nt, Artificial Sequence
  Description of Artificial Sequence: Synthetic oligonucleotide
  Antisense strand to SEQ ID NO: 1576893
auauagcauaucuauacca

SEQ ID NO: 1576895 - RNA, 19 nt, Artificial Sequence
  Description of Artificial Sequence: Synthetic oligonucleotide
  Sense strand starting at position 3555 of SEQ ID NO: 1560109
auauaugcugucuagauag

SEQ ID NO: 1576896 - RNA, 19 nt, Artificial Sequence
  Description of Artificial Sequence: Synthetic oligonucleotide
  Antisense strand to SEQ ID NO: 1576895
cuaucuagacagcauauau

SEQ ID NO: 1576897 - RNA, 19 nt, Artificial Sequence
  Description of Artificial Sequence: Synthetic oligonucleotide
  Sense strand starting at position 3557 of SEQ ID NO: 1560109
auaugcugucuagauagca

SEQ ID NO: 1576898 - RNA, 19 nt, Artificial Sequence
  Description of Artificial Sequence: Synthetic oligonucleotide
  Antisense strand to SEQ ID NO: 1576897
ugcuaucuagacagcauau

SEQ ID NO: 1576899 - RNA, 19 nt, Artificial Sequence
  Description of Artificial Sequence: Synthetic oligonucleotide
  Sense strand starting at position 3630 of SEQ ID NO: 1560109
gggcauuuguauccgauau

SEQ ID NO: 1576900 - RNA, 19 nt, Artificial Sequence
  Description of Artificial Sequence: Synthetic oligonucleotide
  Antisense strand to SEQ ID NO: 1576899
auaucggauacaaaugccc

SEQ ID NO: 1576901 - RNA, 19 nt, Artificial Sequence
  Description of Artificial Sequence: Synthetic oligonucleotide
  Sense strand starting at position 3631 of SEQ ID NO: 1560109
ggcauuuguauccgauaua

SEQ ID NO: 1576902 - RNA, 19 nt, Artificial Sequence
  Description of Artificial Sequence: Synthetic oligonucleotide
  Antisense strand to SEQ ID NO: 1576901
uauaucggauacaaaugcc

SEQ ID NO: 1576903 - RNA, 19 nt, Artificial Sequence
  Description of Artificial Sequence: Synthetic oligonucleotide
  Sense strand starting at position 3651 of SEQ ID NO: 1560109
auaugcuaucuagauagca

SEQ ID NO: 1576904 - RNA, 19 nt, Artificial Sequence
  Description of Artificial Sequence: Synthetic oligonucleotide
  Antisense strand to SEQ ID NO: 1576903
ugcuaucuagauagcauau

SEQ ID NO: 1576905 - RNA, 19 nt, Artificial Sequence
  Description of Artificial Sequence: Synthetic oligonucleotide
  Sense strand starting at position 3664 of SEQ ID NO: 1560109
auagcauaucuaugugauc

SEQ ID NO: 1576906 - RNA, 19 nt, Artificial Sequence
  Description of Artificial Sequence: Synthetic oligonucleotide
  Antisense strand to SEQ ID NO: 1576905
gaucacauagauaugcuau

SEQ ID NO: 1576907 - RNA, 19 nt, Artificial Sequence
  Description of Artificial Sequence: Synthetic oligonucleotide
  Sense strand starting at position 3669 of SEQ ID NO: 1560109
auaucuaugugaucugugu

SEQ ID NO: 1576908 - RNA, 19 nt, Artificial Sequence
  Description of Artificial Sequence: Synthetic oligonucleotide
  Antisense strand to SEQ ID NO: 1576907
acacagaucacauagauau

SEQ ID NO: 1576909 - RNA, 19 nt, Artificial Sequence
  Description of Artificial Sequence: Synthetic oligonucleotide
  Sense strand starting at position 3671 of SEQ ID NO: 1560109
aucuaugugaucuguguag

SEQ ID NO: 1576910 - RNA, 19 nt, Artificial Sequence
  Description of Artificial Sequence: Synthetic oligonucleotide
  Antisense strand to SEQ ID NO: 1576909
cuacacagaucacauagau

SEQ ID NO: 1576911 - RNA, 19 nt, Artificial Sequence
  Description of Artificial Sequence: Synthetic oligonucleotide
  Sense strand starting at position 3673 of SEQ ID NO: 1560109
cuaugugaucuguguagau

SEQ ID NO: 1576912 - RNA, 19 nt, Artificial Sequence
  Description of Artificial Sequence: Synthetic oligonucleotide
  Antisense strand to SEQ ID NO: 1576911
aucuacacagaucacauag

SEQ ID NO: 1576913 - RNA, 19 nt, Artificial Sequence
  Description of Artificial Sequence: Synthetic oligonucleotide
  Sense strand starting at position 3675 of SEQ ID NO: 1560109
augugaucuguguagauag

SEQ ID NO: 1576914 - RNA, 19 nt, Artificial Sequence
  Description of Artificial Sequence: Synthetic oligonucleotide
  Antisense strand to SEQ ID NO: 1576913
cuaucuacacagaucacau

SEQ ID NO: 1576915 - RNA, 19 nt, Artificial Sequence
  Description of Artificial Sequence: Synthetic oligonucleotide
  Sense strand starting at position 3677 of SEQ ID NO: 1560109
gugaucuguguagauagca

SEQ ID NO: 1576916 - RNA, 19 nt, Artificial Sequence
  Description of Artificial Sequence: Synthetic oligonucleotide
  Antisense strand to SEQ ID NO: 1576915
ugcuaucuacacagaucac

SEQ ID NO: 1576917 - RNA, 19 nt, Artificial Sequence
  Description of Artificial Sequence: Synthetic oligonucleotide
  Sense strand starting at position 1202 of SEQ ID NO: 1560110
gaacgauuccagcgggaac

SEQ ID NO: 1576918 - RNA, 19 nt, Artificial Sequence
  Description of Artificial Sequence: Synthetic oligonucleotide
  Antisense strand to SEQ ID NO: 1576917
guucccgcuggaaucguuc

SEQ ID NO: 1576919 - RNA, 19 nt, Artificial Sequence
  Description of Artificial Sequence: Synthetic oligonucleotide
  Sense strand starting at position 1203 of SEQ ID NO: 1560110
aacgauuccagcgggaaca

SEQ ID NO: 1576920 - RNA, 19 nt, Artificial Sequence
  Description of Artificial Sequence: Synthetic oligonucleotide
  Antisense strand to SEQ ID NO: 1576919
uguucccgcuggaaucguu

SEQ ID NO: 1576921 - RNA, 19 nt, Artificial Sequence
  Description of Artificial Sequence: Synthetic oligonucleotide
  Sense strand starting at position 1204 of SEQ ID NO: 1560110
acgauuccagcgggaacau

SEQ ID NO: 1576922 - RNA, 19 nt, Artificial Sequence
  Description of Artificial Sequence: Synthetic oligonucleotide
  Antisense strand to SEQ ID NO: 1576921
auguucccgcuggaaucgu

SEQ ID NO: 1576923 - RNA, 19 nt, Artificial Sequence
  Description of Artificial Sequence: Synthetic oligonucleotide
  Sense strand starting at position 2041 of SEQ ID NO: 1560110
cuaaauuuauugugaggau

SEQ ID NO: 1576924 - RNA, 19 nt, Artificial Sequence
  Description of Artificial Sequence: Synthetic oligonucleotide
  Antisense strand to SEQ ID NO: 1576923
auccucacaauaaauuuag

SEQ ID NO: 1576925 - RNA, 19 nt, Artificial Sequence
  Description of Artificial Sequence: Synthetic oligonucleotide
  Sense strand starting at position 2042 of SEQ ID NO: 1560110
uaaauuuauugugaggaug

SEQ ID NO: 1576926 - RNA, 19 nt, Artificial Sequence
  Description of Artificial Sequence: Synthetic oligonucleotide
  Antisense strand to SEQ ID NO: 1576925
cauccucacaauaaauuua

SEQ ID NO: 1576927 - RNA, 19 nt, Artificial Sequence
  Description of Artificial Sequence: Synthetic oligonucleotide
  Sense strand starting at position 2044 of SEQ ID NO: 1560110
aauuuauugugaggaugca

SEQ ID NO: 1576928 - RNA, 19 nt, Artificial Sequence
  Description of Artificial Sequence: Synthetic oligonucleotide
  Antisense strand to SEQ ID NO: 1576927
ugcauccucacaauaaauu

SEQ ID NO: 1576929 - RNA, 19 nt, Artificial Sequence
  Description of Artificial Sequence: Synthetic oligonucleotide
  Sense strand starting at position 2121 of SEQ ID NO: 1560110
gagcgcugcugguauuauu

SEQ ID NO: 1576930 - RNA, 19 nt, Artificial Sequence
  Description of Artificial Sequence: Synthetic oligonucleotide
  Antisense strand to SEQ ID NO: 1576929
aauaauaccagcagcgcuc

SEQ ID NO: 1576931 - RNA, 19 nt, Artificial Sequence
  Description of Artificial Sequence: Synthetic oligonucleotide
  Sense strand starting at position 2128 of SEQ ID NO: 1560110
gcugguauuauuugagguc

SEQ ID NO: 1576932 - RNA, 19 nt, Artificial Sequence
  Description of Artificial Sequence: Synthetic oligonucleotide
  Antisense strand to SEQ ID NO: 1576931
gaccucaaauaauaccagc

SEQ ID NO: 1576933 - RNA, 19 nt, Artificial Sequence
  Description of Artificial Sequence: Synthetic oligonucleotide
  Sense strand starting at position 2129 of SEQ ID NO: 1560110
cugguauuauuugagguca

SEQ ID NO: 1576934 - RNA, 19 nt, Artificial Sequence
  Description of Artificial Sequence: Synthetic oligonucleotide
  Antisense strand to SEQ ID NO: 1576933
ugaccucaaauaauaccag

SEQ ID NO: 1576935 - RNA, 19 nt, Artificial Sequence
  Description of Artificial Sequence: Synthetic oligonucleotide
  Sense strand starting at position 2131 of SEQ ID NO: 1560110
gguauuauuugaggucaga

SEQ ID NO: 1576936 - RNA, 19 nt, Artificial Sequence
  Description of Artificial Sequence: Synthetic oligonucleotide
  Antisense strand to SEQ ID NO: 1576935
ucugaccucaaauaauacc

SEQ ID NO: 1576937 - RNA, 19 nt, Artificial Sequence
  Description of Artificial Sequence: Synthetic oligonucleotide
  Sense strand starting at position 2247 of SEQ ID NO: 1560110
gcaaaugaggccuagcaca

SEQ ID NO: 1576938 - RNA, 19 nt, Artificial Sequence
  Description of Artificial Sequence: Synthetic oligonucleotide
  Antisense strand to SEQ ID NO: 1576937
ugugcuaggccucauuugc

SEQ ID NO: 1576939 - RNA, 19 nt, Artificial Sequence
  Description of Artificial Sequence: Synthetic oligonucleotide
  Sense strand starting at position 2302 of SEQ ID NO: 1560110
uaagcagauguuuauuaag

SEQ ID NO: 1576940 - RNA, 19 nt, Artificial Sequence
  Description of Artificial Sequence: Synthetic oligonucleotide
  Antisense strand to SEQ ID NO: 1576939
cuuaauaaacaucugcuua

SEQ ID NO: 1576941 - RNA, 19 nt, Artificial Sequence
  Description of Artificial Sequence: Synthetic oligonucleotide
  Sense strand starting at position 2304 of SEQ ID NO: 1560110
agcagauguuuauuaagcu

SEQ ID NO: 1576942 - RNA, 19 nt, Artificial Sequence
  Description of Artificial Sequence: Synthetic oligonucleotide
  Antisense strand to SEQ ID NO: 1576941
agcuuaauaaacaucugcu

SEQ ID NO: 1576943 - RNA, 19 nt, Artificial Sequence
  Description of Artificial Sequence: Synthetic oligonucleotide
  Sense strand starting at position 2305 of SEQ ID NO: 1560110
gcagauguuuauuaagcuu

SEQ ID NO: 1576944 - RNA, 19 nt, Artificial Sequence
  Description of Artificial Sequence: Synthetic oligonucleotide
  Antisense strand to SEQ ID NO: 1576943
aagcuuaauaaacaucugc

SEQ ID NO: 1576945 - RNA, 19 nt, Artificial Sequence
  Description of Artificial Sequence: Synthetic oligonucleotide
  Sense strand starting at position 2379 of SEQ ID NO: 1560110
guggccagcccuuauaaga

SEQ ID NO: 1576946 - RNA, 19 nt, Artificial Sequence
  Description of Artificial Sequence: Synthetic oligonucleotide
  Antisense strand to SEQ ID NO: 1576945
ucuuauaagggcuggccac

SEQ ID NO: 1576947 - RNA, 19 nt, Artificial Sequence
  Description of Artificial Sequence: Synthetic oligonucleotide
  Sense strand starting at position 2390 of SEQ ID NO: 1560110
uuauaagagcaaggucuua

SEQ ID NO: 1576948 - RNA, 19 nt, Artificial Sequence
  Description of Artificial Sequence: Synthetic oligonucleotide
  Antisense strand to SEQ ID NO: 1576947
uaagaccuugcucuuauaa

SEQ ID NO: 1576949 - RNA, 19 nt, Artificial Sequence
  Description of Artificial Sequence: Synthetic oligonucleotide
  Sense strand starting at position 2443 of SEQ ID NO: 1560110
ccugcaaagcugugaccau

SEQ ID NO: 1576950 - RNA, 19 nt, Artificial Sequence
  Description of Artificial Sequence: Synthetic oligonucleotide
  Antisense strand to SEQ ID NO: 1576949
auggucacagcuuugcagg

SEQ ID NO: 1576951 - RNA, 19 nt, Artificial Sequence
  Description of Artificial Sequence: Synthetic oligonucleotide
  Sense strand starting at position 2518 of SEQ ID NO: 1560110
ggagccaucugcccuagau

SEQ ID NO: 1576952 - RNA, 19 nt, Artificial Sequence
  Description of Artificial Sequence: Synthetic oligonucleotide
  Antisense strand to SEQ ID NO: 1576951
aucuagggcagauggcucc

SEQ ID NO: 1576953 - RNA, 19 nt, Artificial Sequence
  Description of Artificial Sequence: Synthetic oligonucleotide
  Sense strand starting at position 2553 of SEQ ID NO: 1560110
acagguucauggguggaga

SEQ ID NO: 1576954 - RNA, 19 nt, Artificial Sequence
  Description of Artificial Sequence: Synthetic oligonucleotide
  Antisense strand to SEQ ID NO: 1576953
ucuccacccaugaaccugu

SEQ ID NO: 1576955 - RNA, 19 nt, Artificial Sequence
  Description of Artificial Sequence: Synthetic oligonucleotide
  Sense strand starting at position 2554 of SEQ ID NO: 1560110
cagguucauggguggagaa

SEQ ID NO: 1576956 - RNA, 19 nt, Artificial Sequence
  Description of Artificial Sequence: Synthetic oligonucleotide
  Antisense strand to SEQ ID NO: 1576955
uucuccacccaugaaccug

SEQ ID NO: 1576957 - RNA, 19 nt, Artificial Sequence
  Description of Artificial Sequence: Synthetic oligonucleotide
  Sense strand starting at position 2555 of SEQ ID NO: 1560110
agguucauggguggagaau

SEQ ID NO: 1576958 - RNA, 19 nt, Artificial Sequence
  Description of Artificial Sequence: Synthetic oligonucleotide
  Antisense strand to SEQ ID NO: 1576957
auucuccacccaugaaccu

SEQ ID NO: 1576959 - RNA, 19 nt, Artificial Sequence
  Description of Artificial Sequence: Synthetic oligonucleotide
  Sense strand starting at position 2574 of SEQ ID NO: 1560110
ucaauagaauaggaugaaa

SEQ ID NO: 1576960 - RNA, 19 nt, Artificial Sequence
  Description of Artificial Sequence: Synthetic oligonucleotide
  Antisense strand to SEQ ID NO: 1576959
uuucauccuauucuauuga

SEQ ID NO: 1576961 - RNA, 19 nt, Artificial Sequence
  Description of Artificial Sequence: Synthetic oligonucleotide
  Sense strand starting at position 2805 of SEQ ID NO: 1560110
agcuaacuaugguaaagaa

SEQ ID NO: 1576962 - RNA, 19 nt, Artificial Sequence
  Description of Artificial Sequence: Synthetic oligonucleotide
  Antisense strand to SEQ ID NO: 1576961
uucuuuaccauaguuagcu

SEQ ID NO: 1576963 - RNA, 19 nt, Artificial Sequence
  Description of Artificial Sequence: Synthetic oligonucleotide
  Sense strand starting at position 3727 of SEQ ID NO: 1560110
ugcuuaucuguauacucua

SEQ ID NO: 1576964 - RNA, 19 nt, Artificial Sequence
  Description of Artificial Sequence: Synthetic oligonucleotide
  Antisense strand to SEQ ID NO: 1576963
uagaguauacagauaagca

SEQ ID NO: 1576965 - RNA, 19 nt, Artificial Sequence
  Description of Artificial Sequence: Synthetic oligonucleotide
  Sense strand starting at position 3735 of SEQ ID NO: 1560110
uguauacucuauugccaua

SEQ ID NO: 1576966 - RNA, 19 nt, Artificial Sequence
  Description of Artificial Sequence: Synthetic oligonucleotide
  Antisense strand to SEQ ID NO: 1576965
uauggcaauagaguauaca

SEQ ID NO: 1576967 - RNA, 19 nt, Artificial Sequence
  Description of Artificial Sequence: Synthetic oligonucleotide
  Sense strand starting at position 3758 of SEQ ID NO: 1560110
auguguuuguaacaggaga

SEQ ID NO: 1576968 - RNA, 19 nt, Artificial Sequence
  Description of Artificial Sequence: Synthetic oligonucleotide
  Antisense strand to SEQ ID NO: 1576967
ucuccuguuacaaacacau

SEQ ID NO: 1576969 - RNA, 19 nt, Artificial Sequence
  Description of Artificial Sequence: Synthetic oligonucleotide
  Sense strand starting at position 3760 of SEQ ID NO: 1560110
guguuuguaacaggagauu

SEQ ID NO: 1576970 - RNA, 19 nt, Artificial Sequence
  Description of Artificial Sequence: Synthetic oligonucleotide
  Antisense strand to SEQ ID NO: 1576969
aaucuccuguuacaaacac

SEQ ID NO: 1576971 - RNA, 19 nt, Artificial Sequence
  Description of Artificial Sequence: Synthetic oligonucleotide
  Sense strand starting at position 3931 of SEQ ID NO: 1560110
cugagaugcugucucuaaa

SEQ ID NO: 1576972 - RNA, 19 nt, Artificial Sequence
  Description of Artificial Sequence: Synthetic oligonucleotide
  Antisense strand to SEQ ID NO: 1576971
uuuagagacagcaucucag

SEQ ID NO: 1576973 - RNA, 19 nt, Artificial Sequence
  Description of Artificial Sequence: Synthetic oligonucleotide
  Sense strand starting at position 3960 of SEQ ID NO: 1560110
gagugcucagagugggaaa

SEQ ID NO: 1576974 - RNA, 19 nt, Artificial Sequence
  Description of Artificial Sequence: Synthetic oligonucleotide
  Antisense strand to SEQ ID NO: 1576973
uuucccacucugagcacuc

SEQ ID NO: 1576975 - RNA, 19 nt, Artificial Sequence
  Description of Artificial Sequence: Synthetic oligonucleotide
  Sense strand starting at position 275 of SEQ ID NO: 1560111
guaagcaggauccguagaa

SEQ ID NO: 1576976 - RNA, 19 nt, Artificial Sequence
  Description of Artificial Sequence: Synthetic oligonucleotide
  Antisense strand to SEQ ID NO: 1576975
uucuacggauccugcuuac

SEQ ID NO: 1576977 - RNA, 19 nt, Artificial Sequence
  Description of Artificial Sequence: Synthetic oligonucleotide
  Sense strand starting at position 448 of SEQ ID NO: 1560111
cugaucugcaccuggagau

SEQ ID NO: 1576978 - RNA, 19 nt, Artificial Sequence
  Description of Artificial Sequence: Synthetic oligonucleotide
  Antisense strand to SEQ ID NO: 1576977
aucuccaggugcagaucag

SEQ ID NO: 1576979 - RNA, 19 nt, Artificial Sequence
  Description of Artificial Sequence: Synthetic oligonucleotide
  Sense strand starting at position 540 of SEQ ID NO: 1560111
ggcagaacucagcaucacu

SEQ ID NO: 1576980 - RNA, 19 nt, Artificial Sequence
  Description of Artificial Sequence: Synthetic oligonucleotide
  Antisense strand to SEQ ID NO: 1576979
agugaugcugaguucugcc

SEQ ID NO: 1576981 - RNA, 19 nt, Artificial Sequence
  Description of Artificial Sequence: Synthetic oligonucleotide
  Sense strand starting at position 633 of SEQ ID NO: 1560111
cucacaguugcuuguugau

SEQ ID NO: 1576982 - RNA, 19 nt, Artificial Sequence
  Description of Artificial Sequence: Synthetic oligonucleotide
  Antisense strand to SEQ ID NO: 1576981
aucaacaagcaacugugag

SEQ ID NO: 1576983 - RNA, 19 nt, Artificial Sequence
  Description of Artificial Sequence: Synthetic oligonucleotide
  Sense strand starting at position 657 of SEQ ID NO: 1560111
gguggacuuccuugcugua

SEQ ID NO: 1576984 - RNA, 19 nt, Artificial Sequence
  Description of Artificial Sequence: Synthetic oligonucleotide
  Antisense strand to SEQ ID NO: 1576983
uacagcaaggaaguccacc

SEQ ID NO: 1576985 - RNA, 19 nt, Artificial Sequence
  Description of Artificial Sequence: Synthetic oligonucleotide
  Sense strand starting at position 1406 of SEQ ID NO: 1560111
uuucaaucagcgggugauu

SEQ ID NO: 1576986 - RNA, 19 nt, Artificial Sequence
  Description of Artificial Sequence: Synthetic oligonucleotide
  Antisense strand to SEQ ID NO: 1576985
aaucacccgcugauugaaa

SEQ ID NO: 1576987 - RNA, 19 nt, Artificial Sequence
  Description of Artificial Sequence: Synthetic oligonucleotide
  Sense strand starting at position 1744 of SEQ ID NO: 1560111
augcucagccuagagacau

SEQ ID NO: 1576988 - RNA, 19 nt, Artificial Sequence
  Description of Artificial Sequence: Synthetic oligonucleotide
  Antisense strand to SEQ ID NO: 1576987
augucucuaggcugagcau

SEQ ID NO: 1576989 - RNA, 19 nt, Artificial Sequence
  Description of Artificial Sequence: Synthetic oligonucleotide
  Sense strand starting at position 1761 of SEQ ID NO: 1560111
auuugucauugucaugacu

SEQ ID NO: 1576990 - RNA, 19 nt, Artificial Sequence
  Description of Artificial Sequence: Synthetic oligonucleotide
  Antisense strand to SEQ ID NO: 1576989
agucaugacaaugacaaau

SEQ ID NO: 1576991 - RNA, 19 nt, Artificial Sequence
  Description of Artificial Sequence: Synthetic oligonucleotide
  Sense strand starting at position 1764 of SEQ ID NO: 1560111
ugucauugucaugacuugu

SEQ ID NO: 1576992 - RNA, 19 nt, Artificial Sequence
  Description of Artificial Sequence: Synthetic oligonucleotide
  Antisense strand to SEQ ID NO: 1576991
acaagucaugacaaugaca

SEQ ID NO: 1576993 - RNA, 19 nt, Artificial Sequence
  Description of Artificial Sequence: Synthetic oligonucleotide
  Sense strand starting at position 1770 of SEQ ID NO: 1560111
ugucaugacuuguggagaa

SEQ ID NO: 1576994 - RNA, 19 nt, Artificial Sequence
  Description of Artificial Sequence: Synthetic oligonucleotide
  Antisense strand to SEQ ID NO: 1576993
uucuccacaagucaugaca

SEQ ID NO: 1576995 - RNA, 19 nt, Artificial Sequence
  Description of Artificial Sequence: Synthetic oligonucleotide
  Sense strand starting at position 1800 of SEQ ID NO: 1560111
acugguauccagugaguag

SEQ ID NO: 1576996 - RNA, 19 nt, Artificial Sequence
  Description of Artificial Sequence: Synthetic oligonucleotide
  Antisense strand to SEQ ID NO: 1576995
cuacucacuggauaccagu

SEQ ID NO: 1576997 - RNA, 19 nt, Artificial Sequence
  Description of Artificial Sequence: Synthetic oligonucleotide
  Sense strand starting at position 1801 of SEQ ID NO: 1560111
cugguauccagugaguaga

SEQ ID NO: 1576998 - RNA, 19 nt, Artificial Sequence
  Description of Artificial Sequence: Synthetic oligonucleotide
  Antisense strand to SEQ ID NO: 1576997
ucuacucacuggauaccag

SEQ ID NO: 1576999 - RNA, 19 nt, Artificial Sequence
  Description of Artificial Sequence: Synthetic oligonucleotide
  Sense strand starting at position 1927 of SEQ ID NO: 1560111
gccacauucugucaucucu

SEQ ID NO: 1577000 - RNA, 19 nt, Artificial Sequence
  Description of Artificial Sequence: Synthetic oligonucleotide
  Antisense strand to SEQ ID NO: 1576999
agagaugacagaauguggc

SEQ ID NO: 1577001 - RNA, 19 nt, Artificial Sequence
  Description of Artificial Sequence: Synthetic oligonucleotide
  Sense strand starting at position 1933 of SEQ ID NO: 1560111
uucugucaucucuguagaa

SEQ ID NO: 1577002 - RNA, 19 nt, Artificial Sequence
  Description of Artificial Sequence: Synthetic oligonucleotide
  Antisense strand to SEQ ID NO: 1577001
uucuacagagaugacagaa

SEQ ID NO: 1577003 - RNA, 19 nt, Artificial Sequence
  Description of Artificial Sequence: Synthetic oligonucleotide
  Sense strand starting at position 1934 of SEQ ID NO: 1560111
ucugucaucucuguagaaa

SEQ ID NO: 1577004 - RNA, 19 nt, Artificial Sequence
  Description of Artificial Sequence: Synthetic oligonucleotide
  Antisense strand to SEQ ID NO: 1577003
uuucuacagagaugacaga

SEQ ID NO: 1577005 - RNA, 19 nt, Artificial Sequence
  Description of Artificial Sequence: Synthetic oligonucleotide
  Sense strand starting at position 1935 of SEQ ID NO: 1560111
cugucaucucuguagaaac

SEQ ID NO: 1577006 - RNA, 19 nt, Artificial Sequence
  Description of Artificial Sequence: Synthetic oligonucleotide
  Antisense strand to SEQ ID NO: 1577005
guuucuacagagaugacag

SEQ ID NO: 1577007 - RNA, 19 nt, Artificial Sequence
  Description of Artificial Sequence: Synthetic oligonucleotide
  Sense strand starting at position 1977 of SEQ ID NO: 1560111
gcaauuccuacagggaguu

SEQ ID NO: 1577008 - RNA, 19 nt, Artificial Sequence
  Description of Artificial Sequence: Synthetic oligonucleotide
  Antisense strand to SEQ ID NO: 1577007
aacucccuguaggaauugc

SEQ ID NO: 1577009 - RNA, 19 nt, Artificial Sequence
  Description of Artificial Sequence: Synthetic oligonucleotide
  Sense strand starting at position 2191 of SEQ ID NO: 1560111
augggugaaugauauaaag

SEQ ID NO: 1577010 - RNA, 19 nt, Artificial Sequence
  Description of Artificial Sequence: Synthetic oligonucleotide
  Antisense strand to SEQ ID NO: 1577009
cuuuauaucauucacccau

SEQ ID NO: 1577011 - RNA, 19 nt, Artificial Sequence
  Description of Artificial Sequence: Synthetic oligonucleotide
  Sense strand starting at position 2315 of SEQ ID NO: 1560111
uccuguagggauggacaua

SEQ ID NO: 1577012 - RNA, 19 nt, Artificial Sequence
  Description of Artificial Sequence: Synthetic oligonucleotide
  Antisense strand to SEQ ID NO: 1577011
uauguccaucccuacagga

SEQ ID NO: 1577013 - RNA, 19 nt, Artificial Sequence
  Description of Artificial Sequence: Synthetic oligonucleotide
  Sense strand starting at position 2432 of SEQ ID NO: 1560111
uggccucauuccuccaaga

SEQ ID NO: 1577014 - RNA, 19 nt, Artificial Sequence
  Description of Artificial Sequence: Synthetic oligonucleotide
  Antisense strand to SEQ ID NO: 1577013
ucuuggaggaaugaggcca

SEQ ID NO: 1577015 - RNA, 19 nt, Artificial Sequence
  Description of Artificial Sequence: Synthetic oligonucleotide
  Sense strand starting at position 2574 of SEQ ID NO: 1560111
gggcucucaggauaucuga

SEQ ID NO: 1577016 - RNA, 19 nt, Artificial Sequence
  Description of Artificial Sequence: Synthetic oligonucleotide
  Antisense strand to SEQ ID NO: 1577015
ucagauauccugagagccc

SEQ ID NO: 1577017 - RNA, 19 nt, Artificial Sequence
  Description of Artificial Sequence: Synthetic oligonucleotide
  Sense strand starting at position 2599 of SEQ ID NO: 1560111
gcuguuuggucgcaggaga

SEQ ID NO: 1577018 - RNA, 19 nt, Artificial Sequence
  Description of Artificial Sequence: Synthetic oligonucleotide
  Antisense strand to SEQ ID NO: 1577017
ucuccugcgaccaaacagc

SEQ ID NO: 1577019 - RNA, 19 nt, Artificial Sequence
  Description of Artificial Sequence: Synthetic oligonucleotide
  Sense strand starting at position 3459 of SEQ ID NO: 1560111
ucgagggucgcguuuggaa

SEQ ID NO: 1577020 - RNA, 19 nt, Artificial Sequence
  Description of Artificial Sequence: Synthetic oligonucleotide
  Antisense strand to SEQ ID NO: 1577019
uuccaaacgcgacccucga

SEQ ID NO: 1577021 - RNA, 19 nt, Artificial Sequence
  Description of Artificial Sequence: Synthetic oligonucleotide
  Sense strand starting at position 3637 of SEQ ID NO: 1560111
ugcggugaccuguauggaa

SEQ ID NO: 1577022 - RNA, 19 nt, Artificial Sequence
  Description of Artificial Sequence: Synthetic oligonucleotide
  Antisense strand to SEQ ID NO: 1577021
uuccauacaggucaccgca

SEQ ID NO: 1577023 - RNA, 19 nt, Artificial Sequence
  Description of Artificial Sequence: Synthetic oligonucleotide
  Sense strand starting at position 3693 of SEQ ID NO: 1560111
ccgagaggugccggucuua

SEQ ID NO: 1577024 - RNA, 19 nt, Artificial Sequence
  Description of Artificial Sequence: Synthetic oligonucleotide
  Antisense strand to SEQ ID NO: 1577023
uaagaccggcaccucucgg

SEQ ID NO: 1577025 - RNA, 19 nt, Artificial Sequence
  Description of Artificial Sequence: Synthetic oligonucleotide
  Sense strand starting at position 3718 of SEQ ID NO: 1560111
cugugaccacguuaaauua

SEQ ID NO: 1577026 - RNA, 19 nt, Artificial Sequence
  Description of Artificial Sequence: Synthetic oligonucleotide
  Antisense strand to SEQ ID NO: 1577025
uaauuuaacguggucacag

SEQ ID NO: 1577027 - RNA, 19 nt, Artificial Sequence
  Description of Artificial Sequence: Synthetic oligonucleotide
  Sense strand starting at position 134 of SEQ ID NO: 1560112
augauacaaugugguugaa

SEQ ID NO: 1577028 - RNA, 19 nt, Artificial Sequence
  Description of Artificial Sequence: Synthetic oligonucleotide
  Antisense strand to SEQ ID NO: 1577027
uucaaccacauuguaucau

SEQ ID NO: 1577029 - RNA, 19 nt, Artificial Sequence
  Description of Artificial Sequence: Synthetic oligonucleotide
  Sense strand starting at position 529 of SEQ ID NO: 1560112
ggcugaauauuccuccacu

SEQ ID NO: 1577030 - RNA, 19 nt, Artificial Sequence
  Description of Artificial Sequence: Synthetic oligonucleotide
  Antisense strand to SEQ ID NO: 1577029
aguggaggaauauucagcc

SEQ ID NO: 1577031 - RNA, 19 nt, Artificial Sequence
  Description of Artificial Sequence: Synthetic oligonucleotide
  Sense strand starting at position 530 of SEQ ID NO: 1560112
gcugaauauuccuccacug

SEQ ID NO: 1577032 - RNA, 19 nt, Artificial Sequence
  Description of Artificial Sequence: Synthetic oligonucleotide
  Antisense strand to SEQ ID NO: 1577031
caguggaggaauauucagc

SEQ ID NO: 1577033 - RNA, 19 nt, Artificial Sequence
  Description of Artificial Sequence: Synthetic oligonucleotide
  Sense strand starting at position 969 of SEQ ID NO: 1560112
cuggcaauuucugcuguuu

SEQ ID NO: 1577034 - RNA, 19 nt, Artificial Sequence
  Description of Artificial Sequence: Synthetic oligonucleotide
  Antisense strand to SEQ ID NO: 1577033
aaacagcagaaauugccag

SEQ ID NO: 1577035 - RNA, 19 nt, Artificial Sequence
  Description of Artificial Sequence: Synthetic oligonucleotide
  Sense strand starting at position 971 of SEQ ID NO: 1560112
ggcaauuucugcuguuuaa

SEQ ID NO: 1577036 - RNA, 19 nt, Artificial Sequence
  Description of Artificial Sequence: Synthetic oligonucleotide
  Antisense strand to SEQ ID NO: 1577035
uuaaacagcagaaauugcc

SEQ ID NO: 1577037 - RNA, 19 nt, Artificial Sequence
  Description of Artificial Sequence: Synthetic oligonucleotide
  Sense strand starting at position 1001 of SEQ ID NO: 1560112
ugugguauuaguuaugaca

SEQ ID NO: 1577038 - RNA, 19 nt, Artificial Sequence
  Description of Artificial Sequence: Synthetic oligonucleotide
  Antisense strand to SEQ ID NO: 1577037
ugucauaacuaauaccaca

SEQ ID NO: 1577039 - RNA, 19 nt, Artificial Sequence
  Description of Artificial Sequence: Synthetic oligonucleotide
  Sense strand starting at position 1103 of SEQ ID NO: 1560112
gcaccuaauacgugugcga

SEQ ID NO: 1577040 - RNA, 19 nt, Artificial Sequence
  Description of Artificial Sequence: Synthetic oligonucleotide
  Antisense strand to SEQ ID NO: 1577039
ucgcacacguauuaggugc

SEQ ID NO: 1577041 - RNA, 19 nt, Artificial Sequence
  Description of Artificial Sequence: Synthetic oligonucleotide
  Sense strand starting at position 1105 of SEQ ID NO: 1560112
accuaauacgugugcgaug

SEQ ID NO: 1577042 - RNA, 19 nt, Artificial Sequence
  Description of Artificial Sequence: Synthetic oligonucleotide
  Antisense strand to SEQ ID NO: 1577041
caucgcacacguauuaggu

SEQ ID NO: 1577043 - RNA, 19 nt, Artificial Sequence
  Description of Artificial Sequence: Synthetic oligonucleotide
  Sense strand starting at position 1267 of SEQ ID NO: 1560112
gggcuuccuaaaggagaca

SEQ ID NO: 1577044 - RNA, 19 nt, Artificial Sequence
  Description of Artificial Sequence: Synthetic oligonucleotide
  Antisense strand to SEQ ID NO: 1577043
ugucuccuuuaggaagccc

SEQ ID NO: 1577045 - RNA, 19 nt, Artificial Sequence
  Description of Artificial Sequence: Synthetic oligonucleotide
  Sense strand starting at position 1362 of SEQ ID NO: 1560112
cgauuuguauuccagggag

SEQ ID NO: 1577046 - RNA, 19 nt, Artificial Sequence
  Description of Artificial Sequence: Synthetic oligonucleotide
  Antisense strand to SEQ ID NO: 1577045
cucccuggaauacaaaucg

SEQ ID NO: 1577047 - RNA, 19 nt, Artificial Sequence
  Description of Artificial Sequence: Synthetic oligonucleotide
  Sense strand starting at position 1365 of SEQ ID NO: 1560112
uuuguauuccagggagaug

SEQ ID NO: 1577048 - RNA, 19 nt, Artificial Sequence
  Description of Artificial Sequence: Synthetic oligonucleotide
  Antisense strand to SEQ ID NO: 1577047
caucucccuggaauacaaa

SEQ ID NO: 1577049 - RNA, 19 nt, Artificial Sequence
  Description of Artificial Sequence: Synthetic oligonucleotide
  Sense strand starting at position 1780 of SEQ ID NO: 1560112
ucaaucgucuagucuggaa

SEQ ID NO: 1577050 - RNA, 19 nt, Artificial Sequence
  Description of Artificial Sequence: Synthetic oligonucleotide
  Antisense strand to SEQ ID NO: 1577049
uuccagacuagacgauuga

SEQ ID NO: 1577051 - RNA, 19 nt, Artificial Sequence
  Description of Artificial Sequence: Synthetic oligonucleotide
  Sense strand starting at position 1782 of SEQ ID NO: 1560112
aaucgucuagucuggaaau

SEQ ID NO: 1577052 - RNA, 19 nt, Artificial Sequence
  Description of Artificial Sequence: Synthetic oligonucleotide
  Antisense strand to SEQ ID NO: 1577051
auuuccagacuagacgauu

SEQ ID NO: 1577053 - RNA, 19 nt, Artificial Sequence
  Description of Artificial Sequence: Synthetic oligonucleotide
  Sense strand starting at position 1783 of SEQ ID NO: 1560112
aucgucuagucuggaaaug

SEQ ID NO: 1577054 - RNA, 19 nt, Artificial Sequence
  Description of Artificial Sequence: Synthetic oligonucleotide
  Antisense strand to SEQ ID NO: 1577053
cauuuccagacuagacgau

SEQ ID NO: 1577055 - RNA, 19 nt, Artificial Sequence
  Description of Artificial Sequence: Synthetic oligonucleotide
  Sense strand starting at position 2185 of SEQ ID NO: 1560112
uuaauauguugaugaacca

SEQ ID NO: 1577056 - RNA, 19 nt, Artificial Sequence
  Description of Artificial Sequence: Synthetic oligonucleotide
  Antisense strand to SEQ ID NO: 1577055
ugguucaucaacauauuaa

SEQ ID NO: 1577057 - RNA, 19 nt, Artificial Sequence
  Description of Artificial Sequence: Synthetic oligonucleotide
  Sense strand starting at position 2252 of SEQ ID NO: 1560112
ggccgaugcccggaugaaa

SEQ ID NO: 1577058 - RNA, 19 nt, Artificial Sequence
  Description of Artificial Sequence: Synthetic oligonucleotide
  Antisense strand to SEQ ID NO: 1577057
uuucauccgggcaucggcc

SEQ ID NO: 1577059 - RNA, 19 nt, Artificial Sequence
  Description of Artificial Sequence: Synthetic oligonucleotide
  Sense strand starting at position 2365 of SEQ ID NO: 1560112
ccaguauagcccugaggaa

SEQ ID NO: 1577060 - RNA, 19 nt, Artificial Sequence
  Description of Artificial Sequence: Synthetic oligonucleotide
  Antisense strand to SEQ ID NO: 1577059
uuccucagggcuauacugg

SEQ ID NO: 1577061 - RNA, 19 nt, Artificial Sequence
  Description of Artificial Sequence: Synthetic oligonucleotide
  Sense strand starting at position 2388 of SEQ ID NO: 1560112
cuccguagcucuucgcaau

SEQ ID NO: 1577062 - RNA, 19 nt, Artificial Sequence
  Description of Artificial Sequence: Synthetic oligonucleotide
  Antisense strand to SEQ ID NO: 1577061
auugcgaagagcuacggag

SEQ ID NO: 1577063 - RNA, 19 nt, Artificial Sequence
  Description of Artificial Sequence: Synthetic oligonucleotide
  Sense strand starting at position 2558 of SEQ ID NO: 1560112
aggaauugaguuuggccaa

SEQ ID NO: 1577064 - RNA, 19 nt, Artificial Sequence
  Description of Artificial Sequence: Synthetic oligonucleotide
  Antisense strand to SEQ ID NO: 1577063
uuggccaaacucaauuccu

SEQ ID NO: 1577065 - RNA, 19 nt, Artificial Sequence
  Description of Artificial Sequence: Synthetic oligonucleotide
  Sense strand starting at position 2559 of SEQ ID NO: 1560112
ggaauugaguuuggccaaa

SEQ ID NO: 1577066 - RNA, 19 nt, Artificial Sequence
  Description of Artificial Sequence: Synthetic oligonucleotide
  Antisense strand to SEQ ID NO: 1577065
uuuggccaaacucaauucc

SEQ ID NO: 1577067 - RNA, 19 nt, Artificial Sequence
  Description of Artificial Sequence: Synthetic oligonucleotide
  Sense strand starting at position 2708 of SEQ ID NO: 1560112
uuagguuugaggcgccaau

SEQ ID NO: 1577068 - RNA, 19 nt, Artificial Sequence
  Description of Artificial Sequence: Synthetic oligonucleotide
  Antisense strand to SEQ ID NO: 1577067
auuggcgccucaaaccuaa

SEQ ID NO: 1577069 - RNA, 19 nt, Artificial Sequence
  Description of Artificial Sequence: Synthetic oligonucleotide
  Sense strand starting at position 2721 of SEQ ID NO: 1560112
gccaauuugucuuaggcac

SEQ ID NO: 1577070 - RNA, 19 nt, Artificial Sequence
  Description of Artificial Sequence: Synthetic oligonucleotide
  Antisense strand to SEQ ID NO: 1577069
gugccuaagacaaauuggc

SEQ ID NO: 1577071 - RNA, 19 nt, Artificial Sequence
  Description of Artificial Sequence: Synthetic oligonucleotide
  Sense strand starting at position 2728 of SEQ ID NO: 1560112
ugucuuaggcacuauacuu

SEQ ID NO: 1577072 - RNA, 19 nt, Artificial Sequence
  Description of Artificial Sequence: Synthetic oligonucleotide
  Antisense strand to SEQ ID NO: 1577071
aaguauagugccuaagaca

SEQ ID NO: 1577073 - RNA, 19 nt, Artificial Sequence
  Description of Artificial Sequence: Synthetic oligonucleotide
  Sense strand starting at position 2772 of SEQ ID NO: 1560112
cgguguucucaacaguaaa

SEQ ID NO: 1577074 - RNA, 19 nt, Artificial Sequence
  Description of Artificial Sequence: Synthetic oligonucleotide
  Antisense strand to SEQ ID NO: 1577073
uuuacuguugagaacaccg

SEQ ID NO: 1577075 - RNA, 19 nt, Artificial Sequence
  Description of Artificial Sequence: Synthetic oligonucleotide
  Sense strand starting at position 2870 of SEQ ID NO: 1560112
guaggaguaguugaccaca

SEQ ID NO: 1577076 - RNA, 19 nt, Artificial Sequence
  Description of Artificial Sequence: Synthetic oligonucleotide
  Antisense strand to SEQ ID NO: 1577075
uguggucaacuacuccuac

SEQ ID NO: 1577077 - RNA, 19 nt, Artificial Sequence
  Description of Artificial Sequence: Synthetic oligonucleotide
  Sense strand starting at position 2984 of SEQ ID NO: 1560112
uucccauugucccgcaaga

SEQ ID NO: 1577078 - RNA, 19 nt, Artificial Sequence
  Description of Artificial Sequence: Synthetic oligonucleotide
  Antisense strand to SEQ ID NO: 1577077
ucuugcgggacaaugggaa

SEQ ID NO: 1577079 - RNA, 19 nt, Artificial Sequence
  Description of Artificial Sequence: Synthetic oligonucleotide
  Sense strand starting at position 2986 of SEQ ID NO: 1560112
cccauugucccgcaagacu

SEQ ID NO: 1577080 - RNA, 19 nt, Artificial Sequence
  Description of Artificial Sequence: Synthetic oligonucleotide
  Antisense strand to SEQ ID NO: 1577079
agucuugcgggacaauggg

SEQ ID NO: 1577081 - RNA, 19 nt, Artificial Sequence
  Description of Artificial Sequence: Synthetic oligonucleotide
  Sense strand starting at position 3103 of SEQ ID NO: 1560112
agucuugccucagggaguu

SEQ ID NO: 1577082 - RNA, 19 nt, Artificial Sequence
  Description of Artificial Sequence: Synthetic oligonucleotide
  Antisense strand to SEQ ID NO: 1577081
aacucccugaggcaagacu

SEQ ID NO: 1577083 - RNA, 19 nt, Artificial Sequence
  Description of Artificial Sequence: Synthetic oligonucleotide
  Sense strand starting at position 3125 of SEQ ID NO: 1560112
ccaggaauuucccagguuu

SEQ ID NO: 1577084 - RNA, 19 nt, Artificial Sequence
  Description of Artificial Sequence: Synthetic oligonucleotide
  Antisense strand to SEQ ID NO: 1577083
aaaccugggaaauuccugg

SEQ ID NO: 1577085 - RNA, 19 nt, Artificial Sequence
  Description of Artificial Sequence: Synthetic oligonucleotide
  Sense strand starting at position 3228 of SEQ ID NO: 1560112
gauuauuauccuggcuggu

SEQ ID NO: 1577086 - RNA, 19 nt, Artificial Sequence
  Description of Artificial Sequence: Synthetic oligonucleotide
  Antisense strand to SEQ ID NO: 1577085
accagccaggauaauaauc

SEQ ID NO: 1577087 - RNA, 19 nt, Artificial Sequence
  Description of Artificial Sequence: Synthetic oligonucleotide
  Sense strand starting at position 3439 of SEQ ID NO: 1560112
ggugcagugagguaugaua

SEQ ID NO: 1577088 - RNA, 19 nt, Artificial Sequence
  Description of Artificial Sequence: Synthetic oligonucleotide
  Antisense strand to SEQ ID NO: 1577087
uaucauaccucacugcacc

SEQ ID NO: 1577089 - RNA, 19 nt, Artificial Sequence
  Description of Artificial Sequence: Synthetic oligonucleotide
  Sense strand starting at position 3447 of SEQ ID NO: 1560112
gagguaugauagcgccacu

SEQ ID NO: 1577090 - RNA, 19 nt, Artificial Sequence
  Description of Artificial Sequence: Synthetic oligonucleotide
  Antisense strand to SEQ ID NO: 1577089
aguggcgcuaucauaccuc

SEQ ID NO: 1577091 - RNA, 19 nt, Artificial Sequence
  Description of Artificial Sequence: Synthetic oligonucleotide
  Sense strand starting at position 3450 of SEQ ID NO: 1560112
guaugauagcgccacugca

SEQ ID NO: 1577092 - RNA, 19 nt, Artificial Sequence
  Description of Artificial Sequence: Synthetic oligonucleotide
  Antisense strand to SEQ ID NO: 1577091
ugcaguggcgcuaucauac

SEQ ID NO: 1577093 - RNA, 19 nt, Artificial Sequence
  Description of Artificial Sequence: Synthetic oligonucleotide
  Sense strand starting at position 3882 of SEQ ID NO: 1560112
ggcagaucacuuggugagu

SEQ ID NO: 1577094 - RNA, 19 nt, Artificial Sequence
  Description of Artificial Sequence: Synthetic oligonucleotide
  Antisense strand to SEQ ID NO: 1577093
acucaccaagugaucugcc

SEQ ID NO: 1577095 - RNA, 19 nt, Artificial Sequence
  Description of Artificial Sequence: Synthetic oligonucleotide
  Sense strand starting at position 3883 of SEQ ID NO: 1560112
gcagaucacuuggugagua

SEQ ID NO: 1577096 - RNA, 19 nt, Artificial Sequence
  Description of Artificial Sequence: Synthetic oligonucleotide
  Antisense strand to SEQ ID NO: 1577095
uacucaccaagugaucugc

SEQ ID NO: 1577097 - RNA, 19 nt, Artificial Sequence
  Description of Artificial Sequence: Synthetic oligonucleotide
  Sense strand starting at position 3885 of SEQ ID NO: 1560112
agaucacuuggugaguagu

SEQ ID NO: 1577098 - RNA, 19 nt, Artificial Sequence
  Description of Artificial Sequence: Synthetic oligonucleotide
  Antisense strand to SEQ ID NO: 1577097
acuacucaccaagugaucu

SEQ ID NO: 1577099 - RNA, 19 nt, Artificial Sequence
  Description of Artificial Sequence: Synthetic oligonucleotide
  Sense strand starting at position 3891 of SEQ ID NO: 1560112
cuuggugaguaguucaaga

SEQ ID NO: 1577100 - RNA, 19 nt, Artificial Sequence
  Description of Artificial Sequence: Synthetic oligonucleotide
  Antisense strand to SEQ ID NO: 1577099
ucuugaacuacucaccaag

SEQ ID NO: 1577101 - RNA, 19 nt, Artificial Sequence
  Description of Artificial Sequence: Synthetic oligonucleotide
  Sense strand starting at position 791 of SEQ ID NO: 1560113
uguggccuucucuguauaa

SEQ ID NO: 1577102 - RNA, 19 nt, Artificial Sequence
  Description of Artificial Sequence: Synthetic oligonucleotide
  Antisense strand to SEQ ID NO: 1577101
uuauacagagaaggccaca

SEQ ID NO: 1577103 - RNA, 19 nt, Artificial Sequence
  Description of Artificial Sequence: Synthetic oligonucleotide
  Sense strand starting at position 792 of SEQ ID NO: 1560113
guggccuucucuguauaaa

SEQ ID NO: 1577104 - RNA, 19 nt, Artificial Sequence
  Description of Artificial Sequence: Synthetic oligonucleotide
  Antisense strand to SEQ ID NO: 1577103
uuuauacagagaaggccac

SEQ ID NO: 1577105 - RNA, 19 nt, Artificial Sequence
  Description of Artificial Sequence: Synthetic oligonucleotide
  Sense strand starting at position 825 of SEQ ID NO: 1560113
cuuagcgcucuccuuguaa

SEQ ID NO: 1577106 - RNA, 19 nt, Artificial Sequence
  Description of Artificial Sequence: Synthetic oligonucleotide
  Antisense strand to SEQ ID NO: 1577105
uuacaaggagagcgcuaag

SEQ ID NO: 1577107 - RNA, 19 nt, Artificial Sequence
  Description of Artificial Sequence: Synthetic oligonucleotide
  Sense strand starting at position 1166 of SEQ ID NO: 1560113
cuccgucucaaugaaagga

SEQ ID NO: 1577108 - RNA, 19 nt, Artificial Sequence
  Description of Artificial Sequence: Synthetic oligonucleotide
  Antisense strand to SEQ ID NO: 1577107
uccuuucauugagacggag

SEQ ID NO: 1577109 - RNA, 19 nt, Artificial Sequence
  Description of Artificial Sequence: Synthetic oligonucleotide
  Sense strand starting at position 1864 of SEQ ID NO: 1560113
aguccauaucaauggaauc

SEQ ID NO: 1577110 - RNA, 19 nt, Artificial Sequence
  Description of Artificial Sequence: Synthetic oligonucleotide
  Antisense strand to SEQ ID NO: 1577109
gauuccauugauauggacu

SEQ ID NO: 1577111 - RNA, 19 nt, Artificial Sequence
  Description of Artificial Sequence: Synthetic oligonucleotide
  Sense strand starting at position 1894 of SEQ ID NO: 1560113
gcgaucacucacguuugua

SEQ ID NO: 1577112 - RNA, 19 nt, Artificial Sequence
  Description of Artificial Sequence: Synthetic oligonucleotide
  Antisense strand to SEQ ID NO: 1577111
uacaaacgugagugaucgc

SEQ ID NO: 1577113 - RNA, 19 nt, Artificial Sequence
  Description of Artificial Sequence: Synthetic oligonucleotide
  Sense strand starting at position 1897 of SEQ ID NO: 1560113
aucacucacguuuguaauc

SEQ ID NO: 1577114 - RNA, 19 nt, Artificial Sequence
  Description of Artificial Sequence: Synthetic oligonucleotide
  Antisense strand to SEQ ID NO: 1577113
gauuacaaacgugagugau

SEQ ID NO: 1577115 - RNA, 19 nt, Artificial Sequence
  Description of Artificial Sequence: Synthetic oligonucleotide
  Sense strand starting at position 1985 of SEQ ID NO: 1560113
uagcaagaguccgucucua

SEQ ID NO: 1577116 - RNA, 19 nt, Artificial Sequence
  Description of Artificial Sequence: Synthetic oligonucleotide
  Antisense strand to SEQ ID NO: 1577115
uagagacggacucuugcua

SEQ ID NO: 1577117 - RNA, 19 nt, Artificial Sequence
  Description of Artificial Sequence: Synthetic oligonucleotide
  Sense strand starting at position 2070 of SEQ ID NO: 1560113
ggaaggaucgccugagcgu

SEQ ID NO: 1577118 - RNA, 19 nt, Artificial Sequence
  Description of Artificial Sequence: Synthetic oligonucleotide
  Antisense strand to SEQ ID NO: 1577117
acgcucaggcgauccuucc

SEQ ID NO: 1577119 - RNA, 19 nt, Artificial Sequence
  Description of Artificial Sequence: Synthetic oligonucleotide
  Sense strand starting at position 2215 of SEQ ID NO: 1560113
augauacaaugugguugaa

SEQ ID NO: 1577120 - RNA, 19 nt, Artificial Sequence
  Description of Artificial Sequence: Synthetic oligonucleotide
  Antisense strand to SEQ ID NO: 1577119
uucaaccacauuguaucau

SEQ ID NO: 1577121 - RNA, 19 nt, Artificial Sequence
  Description of Artificial Sequence: Synthetic oligonucleotide
  Sense strand starting at position 2610 of SEQ ID NO: 1560113
ggcugaauauuccuccacu

SEQ ID NO: 1577122 - RNA, 19 nt, Artificial Sequence
  Description of Artificial Sequence: Synthetic oligonucleotide
  Antisense strand to SEQ ID NO: 1577121
aguggaggaauauucagcc

SEQ ID NO: 1577123 - RNA, 19 nt, Artificial Sequence
  Description of Artificial Sequence: Synthetic oligonucleotide
  Sense strand starting at position 2611 of SEQ ID NO: 1560113
gcugaauauuccuccacug

SEQ ID NO: 1577124 - RNA, 19 nt, Artificial Sequence
  Description of Artificial Sequence: Synthetic oligonucleotide
  Antisense strand to SEQ ID NO: 1577123
caguggaggaauauucagc

SEQ ID NO: 1577125 - RNA, 19 nt, Artificial Sequence
  Description of Artificial Sequence: Synthetic oligonucleotide
  Sense strand starting at position 3050 of SEQ ID NO: 1560113
cuggcaauuucugcuguuu

SEQ ID NO: 1577126 - RNA, 19 nt, Artificial Sequence
  Description of Artificial Sequence: Synthetic oligonucleotide
  Antisense strand to SEQ ID NO: 1577125
aaacagcagaaauugccag

SEQ ID NO: 1577127 - RNA, 19 nt, Artificial Sequence
  Description of Artificial Sequence: Synthetic oligonucleotide
  Sense strand starting at position 3052 of SEQ ID NO: 1560113
ggcaauuucugcuguuuaa

SEQ ID NO: 1577128 - RNA, 19 nt, Artificial Sequence
  Description of Artificial Sequence: Synthetic oligonucleotide
  Antisense strand to SEQ ID NO: 1577127
uuaaacagcagaaauugcc

SEQ ID NO: 1577129 - RNA, 19 nt, Artificial Sequence
  Description of Artificial Sequence: Synthetic oligonucleotide
  Sense strand starting at position 3082 of SEQ ID NO: 1560113
ugugguauuaguuaugaca

SEQ ID NO: 1577130 - RNA, 19 nt, Artificial Sequence
  Description of Artificial Sequence: Synthetic oligonucleotide
  Antisense strand to SEQ ID NO: 1577129
ugucauaacuaauaccaca

SEQ ID NO: 1577131 - RNA, 19 nt, Artificial Sequence
  Description of Artificial Sequence: Synthetic oligonucleotide
  Sense strand starting at position 3184 of SEQ ID NO: 1560113
gcaccuaauacgugugcga

SEQ ID NO: 1577132 - RNA, 19 nt, Artificial Sequence
  Description of Artificial Sequence: Synthetic oligonucleotide
  Antisense strand to SEQ ID NO: 1577131
ucgcacacguauuaggugc

SEQ ID NO: 1577133 - RNA, 19 nt, Artificial Sequence
  Description of Artificial Sequence: Synthetic oligonucleotide
  Sense strand starting at position 3186 of SEQ ID NO: 1560113
accuaauacgugugcgaug

SEQ ID NO: 1577134 - RNA, 19 nt, Artificial Sequence
  Description of Artificial Sequence: Synthetic oligonucleotide
  Antisense strand to SEQ ID NO: 1577133
caucgcacacguauuaggu

SEQ ID NO: 1577135 - RNA, 19 nt, Artificial Sequence
  Description of Artificial Sequence: Synthetic oligonucleotide
  Sense strand starting at position 3348 of SEQ ID NO: 1560113
gggcuuccuaaaggagaca

SEQ ID NO: 1577136 - RNA, 19 nt, Artificial Sequence
  Description of Artificial Sequence: Synthetic oligonucleotide
  Antisense strand to SEQ ID NO: 1577135
ugucuccuuuaggaagccc

SEQ ID NO: 1577137 - RNA, 19 nt, Artificial Sequence
  Description of Artificial Sequence: Synthetic oligonucleotide
  Sense strand starting at position 3443 of SEQ ID NO: 1560113
cgauuuguauuccagggag

SEQ ID NO: 1577138 - RNA, 19 nt, Artificial Sequence
  Description of Artificial Sequence: Synthetic oligonucleotide
  Antisense strand to SEQ ID NO: 1577137
cucccuggaauacaaaucg

SEQ ID NO: 1577139 - RNA, 19 nt, Artificial Sequence
  Description of Artificial Sequence: Synthetic oligonucleotide
  Sense strand starting at position 3446 of SEQ ID NO: 1560113
uuuguauuccagggagaug

SEQ ID NO: 1577140 - RNA, 19 nt, Artificial Sequence
  Description of Artificial Sequence: Synthetic oligonucleotide
  Antisense strand to SEQ ID NO: 1577139
caucucccuggaauacaaa

SEQ ID NO: 1577141 - RNA, 19 nt, Artificial Sequence
  Description of Artificial Sequence: Synthetic oligonucleotide
  Sense strand starting at position 3861 of SEQ ID NO: 1560113
ucaaucgucuagucuggaa

SEQ ID NO: 1577142 - RNA, 19 nt, Artificial Sequence
  Description of Artificial Sequence: Synthetic oligonucleotide
  Antisense strand to SEQ ID NO: 1577141
uuccagacuagacgauuga

SEQ ID NO: 1577143 - RNA, 19 nt, Artificial Sequence
  Description of Artificial Sequence: Synthetic oligonucleotide
  Sense strand starting at position 3863 of SEQ ID NO: 1560113
aaucgucuagucuggaaau

SEQ ID NO: 1577144 - RNA, 19 nt, Artificial Sequence
  Description of Artificial Sequence: Synthetic oligonucleotide
  Antisense strand to SEQ ID NO: 1577143
auuuccagacuagacgauu

SEQ ID NO: 1577145 - RNA, 19 nt, Artificial Sequence
  Description of Artificial Sequence: Synthetic oligonucleotide
  Sense strand starting at position 3864 of SEQ ID NO: 1560113
aucgucuagucuggaaaug

SEQ ID NO: 1577146 - RNA, 19 nt, Artificial Sequence
  Description of Artificial Sequence: Synthetic oligonucleotide
  Antisense strand to SEQ ID NO: 1577145
cauuuccagacuagacgau

SEQ ID NO: 1577147 - RNA, 19 nt, Artificial Sequence
  Description of Artificial Sequence: Synthetic oligonucleotide
  Sense strand starting at position 3 of SEQ ID NO: 1560114
ggucauauagaaggaaguu

SEQ ID NO: 1577148 - RNA, 19 nt, Artificial Sequence
  Description of Artificial Sequence: Synthetic oligonucleotide
  Antisense strand to SEQ ID NO: 1577147
aacuuccuucuauaugacc

SEQ ID NO: 1577149 - RNA, 19 nt, Artificial Sequence
  Description of Artificial Sequence: Synthetic oligonucleotide
  Sense strand starting at position 347 of SEQ ID NO: 1560114
agcagugaaggguauucua

SEQ ID NO: 1577150 - RNA, 19 nt, Artificial Sequence
  Description of Artificial Sequence: Synthetic oligonucleotide
  Antisense strand to SEQ ID NO: 1577149
uagaauacccuucacugcu

SEQ ID NO: 1577151 - RNA, 19 nt, Artificial Sequence
  Description of Artificial Sequence: Synthetic oligonucleotide
  Sense strand starting at position 350 of SEQ ID NO: 1560114
agugaaggguauucuagaa

SEQ ID NO: 1577152 - RNA, 19 nt, Artificial Sequence
  Description of Artificial Sequence: Synthetic oligonucleotide
  Antisense strand to SEQ ID NO: 1577151
uucuagaauacccuucacu

SEQ ID NO: 1577153 - RNA, 19 nt, Artificial Sequence
  Description of Artificial Sequence: Synthetic oligonucleotide
  Sense strand starting at position 367 of SEQ ID NO: 1560114
aacagagauuggcaaaguu

SEQ ID NO: 1577154 - RNA, 19 nt, Artificial Sequence
  Description of Artificial Sequence: Synthetic oligonucleotide
  Antisense strand to SEQ ID NO: 1577153
aacuuugccaaucucuguu

SEQ ID NO: 1577155 - RNA, 19 nt, Artificial Sequence
  Description of Artificial Sequence: Synthetic oligonucleotide
  Sense strand starting at position 376 of SEQ ID NO: 1560114
uggcaaaguuucucuguca

SEQ ID NO: 1577156 - RNA, 19 nt, Artificial Sequence
  Description of Artificial Sequence: Synthetic oligonucleotide
  Antisense strand to SEQ ID NO: 1577155
ugacagagaaacuuugcca

SEQ ID NO: 1577157 - RNA, 19 nt, Artificial Sequence
  Description of Artificial Sequence: Synthetic oligonucleotide
  Sense strand starting at position 512 of SEQ ID NO: 1560114
gcugcaugccaauauaaau

SEQ ID NO: 1577158 - RNA, 19 nt, Artificial Sequence
  Description of Artificial Sequence: Synthetic oligonucleotide
  Antisense strand to SEQ ID NO: 1577157
auuuauauuggcaugcagc

SEQ ID NO: 1577159 - RNA, 19 nt, Artificial Sequence
  Description of Artificial Sequence: Synthetic oligonucleotide
  Sense strand starting at position 559 of SEQ ID NO: 1560114
ucacauaaucgucauguca

SEQ ID NO: 1577160 - RNA, 19 nt, Artificial Sequence
  Description of Artificial Sequence: Synthetic oligonucleotide
  Antisense strand to SEQ ID NO: 1577159
ugacaugacgauuauguga

SEQ ID NO: 1577161 - RNA, 19 nt, Artificial Sequence
  Description of Artificial Sequence: Synthetic oligonucleotide
  Sense strand starting at position 946 of SEQ ID NO: 1560114
ggaagagcuucugauggag

SEQ ID NO: 1577162 - RNA, 19 nt, Artificial Sequence
  Description of Artificial Sequence: Synthetic oligonucleotide
  Antisense strand to SEQ ID NO: 1577161
cuccaucagaagcucuucc

SEQ ID NO: 1577163 - RNA, 19 nt, Artificial Sequence
  Description of Artificial Sequence: Synthetic oligonucleotide
  Sense strand starting at position 997 of SEQ ID NO: 1560114
gugcaaagucccggauaua

SEQ ID NO: 1577164 - RNA, 19 nt, Artificial Sequence
  Description of Artificial Sequence: Synthetic oligonucleotide
  Antisense strand to SEQ ID NO: 1577163
uauauccgggacuuugcac

SEQ ID NO: 1577165 - RNA, 19 nt, Artificial Sequence
  Description of Artificial Sequence: Synthetic oligonucleotide
  Sense strand starting at position 998 of SEQ ID NO: 1560114
ugcaaagucccggauauaa

SEQ ID NO: 1577166 - RNA, 19 nt, Artificial Sequence
  Description of Artificial Sequence: Synthetic oligonucleotide
  Antisense strand to SEQ ID NO: 1577165
uuauauccgggacuuugca

SEQ ID NO: 1577167 - RNA, 19 nt, Artificial Sequence
  Description of Artificial Sequence: Synthetic oligonucleotide
  Sense strand starting at position 1034 of SEQ ID NO: 1560114
uuagucuuguauccuccaa

SEQ ID NO: 1577168 - RNA, 19 nt, Artificial Sequence
  Description of Artificial Sequence: Synthetic oligonucleotide
  Antisense strand to SEQ ID NO: 1577167
uuggaggauacaagacuaa

SEQ ID NO: 1577169 - RNA, 19 nt, Artificial Sequence
  Description of Artificial Sequence: Synthetic oligonucleotide
  Sense strand starting at position 1036 of SEQ ID NO: 1560114
agucuuguauccuccaacu

SEQ ID NO: 1577170 - RNA, 19 nt, Artificial Sequence
  Description of Artificial Sequence: Synthetic oligonucleotide
  Antisense strand to SEQ ID NO: 1577169
aguuggaggauacaagacu

SEQ ID NO: 1577171 - RNA, 19 nt, Artificial Sequence
  Description of Artificial Sequence: Synthetic oligonucleotide
  Sense strand starting at position 1052 of SEQ ID NO: 1560114
acuauaaaguguguccuuu

SEQ ID NO: 1577172 - RNA, 19 nt, Artificial Sequence
  Description of Artificial Sequence: Synthetic oligonucleotide
  Antisense strand to SEQ ID NO: 1577171
aaaggacacacuuuauagu

SEQ ID NO: 1577173 - RNA, 19 nt, Artificial Sequence
  Description of Artificial Sequence: Synthetic oligonucleotide
  Sense strand starting at position 1056 of SEQ ID NO: 1560114
uaaaguguguccuuuagau

SEQ ID NO: 1577174 - RNA, 19 nt, Artificial Sequence
  Description of Artificial Sequence: Synthetic oligonucleotide
  Antisense strand to SEQ ID NO: 1577173
aucuaaaggacacacuuua

SEQ ID NO: 1577175 - RNA, 19 nt, Artificial Sequence
  Description of Artificial Sequence: Synthetic oligonucleotide
  Sense strand starting at position 1058 of SEQ ID NO: 1560114
aaguguguccuuuagauug

SEQ ID NO: 1577176 - RNA, 19 nt, Artificial Sequence
  Description of Artificial Sequence: Synthetic oligonucleotide
  Antisense strand to SEQ ID NO: 1577175
caaucuaaaggacacacuu

SEQ ID NO: 1577177 - RNA, 19 nt, Artificial Sequence
  Description of Artificial Sequence: Synthetic oligonucleotide
  Sense strand starting at position 1063 of SEQ ID NO: 1560114
uguccuuuagauuggauua

SEQ ID NO: 1577178 - RNA, 19 nt, Artificial Sequence
  Description of Artificial Sequence: Synthetic oligonucleotide
  Antisense strand to SEQ ID NO: 1577177
uaauccaaucuaaaggaca

SEQ ID NO: 1577179 - RNA, 19 nt, Artificial Sequence
  Description of Artificial Sequence: Synthetic oligonucleotide
  Sense strand starting at position 1076 of SEQ ID NO: 1560114
ggauuauuccaaggucccu

SEQ ID NO: 1577180 - RNA, 19 nt, Artificial Sequence
  Description of Artificial Sequence: Synthetic oligonucleotide
  Antisense strand to SEQ ID NO: 1577179
agggaccuuggaauaaucc

SEQ ID NO: 1577181 - RNA, 19 nt, Artificial Sequence
  Description of Artificial Sequence: Synthetic oligonucleotide
  Sense strand starting at position 1199 of SEQ ID NO: 1560114
gggugaccuuggucaguga

SEQ ID NO: 1577182 - RNA, 19 nt, Artificial Sequence
  Description of Artificial Sequence: Synthetic oligonucleotide
  Antisense strand to SEQ ID NO: 1577181
ucacugaccaaggucaccc

SEQ ID NO: 1577183 - RNA, 19 nt, Artificial Sequence
  Description of Artificial Sequence: Synthetic oligonucleotide
  Sense strand starting at position 1235 of SEQ ID NO: 1560114
uguauuucgucaccgguaa

SEQ ID NO: 1577184 - RNA, 19 nt, Artificial Sequence
  Description of Artificial Sequence: Synthetic oligonucleotide
  Antisense strand to SEQ ID NO: 1577183
uuaccggugacgaaauaca

SEQ ID NO: 1577185 - RNA, 19 nt, Artificial Sequence
  Description of Artificial Sequence: Synthetic oligonucleotide
  Sense strand starting at position 1236 of SEQ ID NO: 1560114
guauuucgucaccgguaaa

SEQ ID NO: 1577186 - RNA, 19 nt, Artificial Sequence
  Description of Artificial Sequence: Synthetic oligonucleotide
  Antisense strand to SEQ ID NO: 1577185
uuuaccggugacgaaauac

SEQ ID NO: 1577187 - RNA, 19 nt, Artificial Sequence
  Description of Artificial Sequence: Synthetic oligonucleotide
  Sense strand starting at position 1237 of SEQ ID NO: 1560114
uauuucgucaccgguaaag

SEQ ID NO: 1577188 - RNA, 19 nt, Artificial Sequence
  Description of Artificial Sequence: Synthetic oligonucleotide
  Antisense strand to SEQ ID NO: 1577187
cuuuaccggugacgaaaua

SEQ ID NO: 1577189 - RNA, 19 nt, Artificial Sequence
  Description of Artificial Sequence: Synthetic oligonucleotide
  Sense strand starting at position 1329 of SEQ ID NO: 1560114
gagcaaauacuccguuuac

SEQ ID NO: 1577190 - RNA, 19 nt, Artificial Sequence
  Description of Artificial Sequence: Synthetic oligonucleotide
  Antisense strand to SEQ ID NO: 1577189
guaaacggaguauuugcuc

SEQ ID NO: 1577191 - RNA, 19 nt, Artificial Sequence
  Description of Artificial Sequence: Synthetic oligonucleotide
  Sense strand starting at position 1330 of SEQ ID NO: 1560114
agcaaauacuccguuuaca

SEQ ID NO: 1577192 - RNA, 19 nt, Artificial Sequence
  Description of Artificial Sequence: Synthetic oligonucleotide
  Antisense strand to SEQ ID NO: 1577191
uguaaacggaguauuugcu

SEQ ID NO: 1577193 - RNA, 19 nt, Artificial Sequence
  Description of Artificial Sequence: Synthetic oligonucleotide
  Sense strand starting at position 1416 of SEQ ID NO: 1560114
cgggugggcguguagauau

SEQ ID NO: 1577194 - RNA, 19 nt, Artificial Sequence
  Description of Artificial Sequence: Synthetic oligonucleotide
  Antisense strand to SEQ ID NO: 1577193
auaucuacacgcccacccg

SEQ ID NO: 1577195 - RNA, 19 nt, Artificial Sequence
  Description of Artificial Sequence: Synthetic oligonucleotide
  Sense strand starting at position 1426 of SEQ ID NO: 1560114
uguagauaucuccgguccu

SEQ ID NO: 1577196 - RNA, 19 nt, Artificial Sequence
  Description of Artificial Sequence: Synthetic oligonucleotide
  Antisense strand to SEQ ID NO: 1577195
aggaccggagauaucuaca

SEQ ID NO: 1577197 - RNA, 19 nt, Artificial Sequence
  Description of Artificial Sequence: Synthetic oligonucleotide
  Sense strand starting at position 1467 of SEQ ID NO: 1560114
ccuguuuguccugggcuua

SEQ ID NO: 1577198 - RNA, 19 nt, Artificial Sequence
  Description of Artificial Sequence: Synthetic oligonucleotide
  Antisense strand to SEQ ID NO: 1577197
uaagcccaggacaaacagg

SEQ ID NO: 1577199 - RNA, 19 nt, Artificial Sequence
  Description of Artificial Sequence: Synthetic oligonucleotide
  Sense strand starting at position 1620 of SEQ ID NO: 1560114
gaguuaaacguuuggcagu

SEQ ID NO: 1577200 - RNA, 19 nt, Artificial Sequence
  Description of Artificial Sequence: Synthetic oligonucleotide
  Antisense strand to SEQ ID NO: 1577199
acugccaaacguuuaacuc

SEQ ID NO: 1577201 - RNA, 19 nt, Artificial Sequence
  Description of Artificial Sequence: Synthetic oligonucleotide
  Sense strand starting at position 1699 of SEQ ID NO: 1560114
gggacuuauuggucccauu

SEQ ID NO: 1577202 - RNA, 19 nt, Artificial Sequence
  Description of Artificial Sequence: Synthetic oligonucleotide
  Antisense strand to SEQ ID NO: 1577201
aaugggaccaauaaguccc

SEQ ID NO: 1577203 - RNA, 19 nt, Artificial Sequence
  Description of Artificial Sequence: Synthetic oligonucleotide
  Sense strand starting at position 2126 of SEQ ID NO: 1560114
ggacgauacgccaagcguu

SEQ ID NO: 1577204 - RNA, 19 nt, Artificial Sequence
  Description of Artificial Sequence: Synthetic oligonucleotide
  Antisense strand to SEQ ID NO: 1577203
aacgcuuggcguaucgucc

SEQ ID NO: 1577205 - RNA, 19 nt, Artificial Sequence
  Description of Artificial Sequence: Synthetic oligonucleotide
  Sense strand starting at position 2558 of SEQ ID NO: 1560114
gcgugaaccacugcucugu

SEQ ID NO: 1577206 - RNA, 19 nt, Artificial Sequence
  Description of Artificial Sequence: Synthetic oligonucleotide
  Antisense strand to SEQ ID NO: 1577205
acagagcagugguucacgc

SEQ ID NO: 1577207 - RNA, 19 nt, Artificial Sequence
  Description of Artificial Sequence: Synthetic oligonucleotide
  Sense strand starting at position 2795 of SEQ ID NO: 1560114
gaggaaugcuuuccuacga

SEQ ID NO: 1577208 - RNA, 19 nt, Artificial Sequence
  Description of Artificial Sequence: Synthetic oligonucleotide
  Antisense strand to SEQ ID NO: 1577207
ucguaggaaagcauuccuc

SEQ ID NO: 1577209 - RNA, 19 nt, Artificial Sequence
  Description of Artificial Sequence: Synthetic oligonucleotide
  Sense strand starting at position 2796 of SEQ ID NO: 1560114
aggaaugcuuuccuacgau

SEQ ID NO: 1577210 - RNA, 19 nt, Artificial Sequence
  Description of Artificial Sequence: Synthetic oligonucleotide
  Antisense strand to SEQ ID NO: 1577209
aucguaggaaagcauuccu

SEQ ID NO: 1577211 - RNA, 19 nt, Artificial Sequence
  Description of Artificial Sequence: Synthetic oligonucleotide
  Sense strand starting at position 2811 of SEQ ID NO: 1560114
cgaucuuauuaacuaggga

SEQ ID NO: 1577212 - RNA, 19 nt, Artificial Sequence
  Description of Artificial Sequence: Synthetic oligonucleotide
  Antisense strand to SEQ ID NO: 1577211
ucccuaguuaauaagaucg

SEQ ID NO: 1577213 - RNA, 19 nt, Artificial Sequence
  Description of Artificial Sequence: Synthetic oligonucleotide
  Sense strand starting at position 2959 of SEQ ID NO: 1560114
cccauaacuuguguuacca

SEQ ID NO: 1577214 - RNA, 19 nt, Artificial Sequence
  Description of Artificial Sequence: Synthetic oligonucleotide
  Antisense strand to SEQ ID NO: 1577213
ugguaacacaaguuauggg

SEQ ID NO: 1577215 - RNA, 19 nt, Artificial Sequence
  Description of Artificial Sequence: Synthetic oligonucleotide
  Sense strand starting at position 3356 of SEQ ID NO: 1560114
ccugcauagguacauaauu

SEQ ID NO: 1577216 - RNA, 19 nt, Artificial Sequence
  Description of Artificial Sequence: Synthetic oligonucleotide
  Antisense strand to SEQ ID NO: 1577215
aauuauguaccuaugcagg

SEQ ID NO: 1577217 - RNA, 19 nt, Artificial Sequence
  Description of Artificial Sequence: Synthetic oligonucleotide
  Sense strand starting at position 3395 of SEQ ID NO: 1560114
cuguuuacaugucaauuua

SEQ ID NO: 1577218 - RNA, 19 nt, Artificial Sequence
  Description of Artificial Sequence: Synthetic oligonucleotide
  Antisense strand to SEQ ID NO: 1577217
uaaauugacauguaaacag

SEQ ID NO: 1577219 - RNA, 19 nt, Artificial Sequence
  Description of Artificial Sequence: Synthetic oligonucleotide
  Sense strand starting at position 3500 of SEQ ID NO: 1560114
auugucuaugucugcaaca

SEQ ID NO: 1577220 - RNA, 19 nt, Artificial Sequence
  Description of Artificial Sequence: Synthetic oligonucleotide
  Antisense strand to SEQ ID NO: 1577219
uguugcagacauagacaau

SEQ ID NO: 1577221 - RNA, 19 nt, Artificial Sequence
  Description of Artificial Sequence: Synthetic oligonucleotide
  Sense strand starting at position 3604 of SEQ ID NO: 1560114
gguggauacuucucuuaga

SEQ ID NO: 1577222 - RNA, 19 nt, Artificial Sequence
  Description of Artificial Sequence: Synthetic oligonucleotide
  Antisense strand to SEQ ID NO: 1577221
ucuaagagaaguauccacc

SEQ ID NO: 1577223 - RNA, 19 nt, Artificial Sequence
  Description of Artificial Sequence: Synthetic oligonucleotide
  Sense strand starting at position 3605 of SEQ ID NO: 1560114
guggauacuucucuuagag

SEQ ID NO: 1577224 - RNA, 19 nt, Artificial Sequence
  Description of Artificial Sequence: Synthetic oligonucleotide
  Antisense strand to SEQ ID NO: 1577223
cucuaagagaaguauccac

SEQ ID NO: 1577225 - RNA, 19 nt, Artificial Sequence
  Description of Artificial Sequence: Synthetic oligonucleotide
  Sense strand starting at position 3645 of SEQ ID NO: 1560114
gccuucugcacaggugaau

SEQ ID NO: 1577226 - RNA, 19 nt, Artificial Sequence
  Description of Artificial Sequence: Synthetic oligonucleotide
  Antisense strand to SEQ ID NO: 1577225
auucaccugugcagaaggc

SEQ ID NO: 1577227 - RNA, 19 nt, Artificial Sequence
  Description of Artificial Sequence: Synthetic oligonucleotide
  Sense strand starting at position 87 of SEQ ID NO: 1560115
gugaacuguuauccaacca

SEQ ID NO: 1577228 - RNA, 19 nt, Artificial Sequence
  Description of Artificial Sequence: Synthetic oligonucleotide
  Antisense strand to SEQ ID NO: 1577227
ugguuggauaacaguucac

SEQ ID NO: 1577229 - RNA, 19 nt, Artificial Sequence
  Description of Artificial Sequence: Synthetic oligonucleotide
  Sense strand starting at position 204 of SEQ ID NO: 1560115
ggccguggaucacuugaga

SEQ ID NO: 1577230 - RNA, 19 nt, Artificial Sequence
  Description of Artificial Sequence: Synthetic oligonucleotide
  Antisense strand to SEQ ID NO: 1577229
ucucaagugauccacggcc

SEQ ID NO: 1577231 - RNA, 19 nt, Artificial Sequence
  Description of Artificial Sequence: Synthetic oligonucleotide
  Sense strand starting at position 576 of SEQ ID NO: 1560115
gugaaaucccucuguacua

SEQ ID NO: 1577232 - RNA, 19 nt, Artificial Sequence
  Description of Artificial Sequence: Synthetic oligonucleotide
  Antisense strand to SEQ ID NO: 1577231
uaguacagagggauuucac

SEQ ID NO: 1577233 - RNA, 19 nt, Artificial Sequence
  Description of Artificial Sequence: Synthetic oligonucleotide
  Sense strand starting at position 812 of SEQ ID NO: 1560115
cgguucugaacccaugaga

SEQ ID NO: 1577234 - RNA, 19 nt, Artificial Sequence
  Description of Artificial Sequence: Synthetic oligonucleotide
  Antisense strand to SEQ ID NO: 1577233
ucucauggguucagaaccg

SEQ ID NO: 1577235 - RNA, 19 nt, Artificial Sequence
  Description of Artificial Sequence: Synthetic oligonucleotide
  Sense strand starting at position 858 of SEQ ID NO: 1560115
augaacuaaguaugaguuu

SEQ ID NO: 1577236 - RNA, 19 nt, Artificial Sequence
  Description of Artificial Sequence: Synthetic oligonucleotide
  Antisense strand to SEQ ID NO: 1577235
aaacucauacuuaguucau

SEQ ID NO: 1577237 - RNA, 19 nt, Artificial Sequence
  Description of Artificial Sequence: Synthetic oligonucleotide
  Sense strand starting at position 887 of SEQ ID NO: 1560115
acgguuuaccuagacucau

SEQ ID NO: 1577238 - RNA, 19 nt, Artificial Sequence
  Description of Artificial Sequence: Synthetic oligonucleotide
  Antisense strand to SEQ ID NO: 1577237
augagucuagguaaaccgu

SEQ ID NO: 1577239 - RNA, 19 nt, Artificial Sequence
  Description of Artificial Sequence: Synthetic oligonucleotide
  Sense strand starting at position 896 of SEQ ID NO: 1560115
cuagacucaugcuggagaa

SEQ ID NO: 1577240 - RNA, 19 nt, Artificial Sequence
  Description of Artificial Sequence: Synthetic oligonucleotide
  Antisense strand to SEQ ID NO: 1577239
uucuccagcaugagucuag

SEQ ID NO: 1577241 - RNA, 19 nt, Artificial Sequence
  Description of Artificial Sequence: Synthetic oligonucleotide
  Sense strand starting at position 897 of SEQ ID NO: 1560115
uagacucaugcuggagaaa

SEQ ID NO: 1577242 - RNA, 19 nt, Artificial Sequence
  Description of Artificial Sequence: Synthetic oligonucleotide
  Antisense strand to SEQ ID NO: 1577241
uuucuccagcaugagucua

SEQ ID NO: 1577243 - RNA, 19 nt, Artificial Sequence
  Description of Artificial Sequence: Synthetic oligonucleotide
  Sense strand starting at position 920 of SEQ ID NO: 1560115
uuugucacaccaugaagau

SEQ ID NO: 1577244 - RNA, 19 nt, Artificial Sequence
  Description of Artificial Sequence: Synthetic oligonucleotide
  Antisense strand to SEQ ID NO: 1577243
aucuucauggugugacaaa

SEQ ID NO: 1577245 - RNA, 19 nt, Artificial Sequence
  Description of Artificial Sequence: Synthetic oligonucleotide
  Sense strand starting at position 978 of SEQ ID NO: 1560115
ggagccaucuuaccuaaca

SEQ ID NO: 1577246 - RNA, 19 nt, Artificial Sequence
  Description of Artificial Sequence: Synthetic oligonucleotide
  Antisense strand to SEQ ID NO: 1577245
uguuagguaagauggcucc

SEQ ID NO: 1577247 - RNA, 19 nt, Artificial Sequence
  Description of Artificial Sequence: Synthetic oligonucleotide
  Sense strand starting at position 989 of SEQ ID NO: 1560115
accuaacaguuguaucuuu

SEQ ID NO: 1577248 - RNA, 19 nt, Artificial Sequence
  Description of Artificial Sequence: Synthetic oligonucleotide
  Antisense strand to SEQ ID NO: 1577247
aaagauacaacuguuaggu

SEQ ID NO: 1577249 - RNA, 19 nt, Artificial Sequence
  Description of Artificial Sequence: Synthetic oligonucleotide
  Sense strand starting at position 1147 of SEQ ID NO: 1560115
ugcccuugacccuggaaga

SEQ ID NO: 1577250 - RNA, 19 nt, Artificial Sequence
  Description of Artificial Sequence: Synthetic oligonucleotide
  Antisense strand to SEQ ID NO: 1577249
ucuuccagggucaagggca

SEQ ID NO: 1577251 - RNA, 19 nt, Artificial Sequence
  Description of Artificial Sequence: Synthetic oligonucleotide
  Sense strand starting at position 1410 of SEQ ID NO: 1560115
cacuguuuccauggagauc

SEQ ID NO: 1577252 - RNA, 19 nt, Artificial Sequence
  Description of Artificial Sequence: Synthetic oligonucleotide
  Antisense strand to SEQ ID NO: 1577251
gaucuccauggaaacagug

SEQ ID NO: 1577253 - RNA, 19 nt, Artificial Sequence
  Description of Artificial Sequence: Synthetic oligonucleotide
  Sense strand starting at position 1450 of SEQ ID NO: 1560115
cugcguucucauuggcuga

SEQ ID NO: 1577254 - RNA, 19 nt, Artificial Sequence
  Description of Artificial Sequence: Synthetic oligonucleotide
  Antisense strand to SEQ ID NO: 1577253
ucagccaaugagaacgcag

SEQ ID NO: 1577255 - RNA, 19 nt, Artificial Sequence
  Description of Artificial Sequence: Synthetic oligonucleotide
  Sense strand starting at position 2411 of SEQ ID NO: 1560115
accagugaguccuccuguu

SEQ ID NO: 1577256 - RNA, 19 nt, Artificial Sequence
  Description of Artificial Sequence: Synthetic oligonucleotide
  Antisense strand to SEQ ID NO: 1577255
aacaggaggacucacuggu

SEQ ID NO: 1577257 - RNA, 19 nt, Artificial Sequence
  Description of Artificial Sequence: Synthetic oligonucleotide
  Sense strand starting at position 2500 of SEQ ID NO: 1560115
gacucaguuucccgguagu

SEQ ID NO: 1577258 - RNA, 19 nt, Artificial Sequence
  Description of Artificial Sequence: Synthetic oligonucleotide
  Antisense strand to SEQ ID NO: 1577257
acuaccgggaaacugaguc

SEQ ID NO: 1577259 - RNA, 19 nt, Artificial Sequence
  Description of Artificial Sequence: Synthetic oligonucleotide
  Sense strand starting at position 2537 of SEQ ID NO: 1560115
ggaggacagaggugguauu

SEQ ID NO: 1577260 - RNA, 19 nt, Artificial Sequence
  Description of Artificial Sequence: Synthetic oligonucleotide
  Antisense strand to SEQ ID NO: 1577259
aauaccaccucuguccucc

SEQ ID NO: 1577261 - RNA, 19 nt, Artificial Sequence
  Description of Artificial Sequence: Synthetic oligonucleotide
  Sense strand starting at position 2547 of SEQ ID NO: 1560115
ggugguauuugguggagaa

SEQ ID NO: 1577262 - RNA, 19 nt, Artificial Sequence
  Description of Artificial Sequence: Synthetic oligonucleotide
  Antisense strand to SEQ ID NO: 1577261
uucuccaccaaauaccacc

SEQ ID NO: 1577263 - RNA, 19 nt, Artificial Sequence
  Description of Artificial Sequence: Synthetic oligonucleotide
  Sense strand starting at position 2744 of SEQ ID NO: 1560115
uccaucagauguuuauuga

SEQ ID NO: 1577264 - RNA, 19 nt, Artificial Sequence
  Description of Artificial Sequence: Synthetic oligonucleotide
  Antisense strand to SEQ ID NO: 1577263
ucaauaaacaucugaugga

SEQ ID NO: 1577265 - RNA, 19 nt, Artificial Sequence
  Description of Artificial Sequence: Synthetic oligonucleotide
  Sense strand starting at position 2747 of SEQ ID NO: 1560115
aucagauguuuauugaaca

SEQ ID NO: 1577266 - RNA, 19 nt, Artificial Sequence
  Description of Artificial Sequence: Synthetic oligonucleotide
  Antisense strand to SEQ ID NO: 1577265
uguucaauaaacaucugau

SEQ ID NO: 1577267 - RNA, 19 nt, Artificial Sequence
  Description of Artificial Sequence: Synthetic oligonucleotide
  Sense strand starting at position 2783 of SEQ ID NO: 1560115
cugucugugugaccaagau

SEQ ID NO: 1577268 - RNA, 19 nt, Artificial Sequence
  Description of Artificial Sequence: Synthetic oligonucleotide
  Antisense strand to SEQ ID NO: 1577267
aucuuggucacacagacag

SEQ ID NO: 1577269 - RNA, 19 nt, Artificial Sequence
  Description of Artificial Sequence: Synthetic oligonucleotide
  Sense strand starting at position 2787 of SEQ ID NO: 1560115
cugugugaccaagauacua

SEQ ID NO: 1577270 - RNA, 19 nt, Artificial Sequence
  Description of Artificial Sequence: Synthetic oligonucleotide
  Antisense strand to SEQ ID NO: 1577269
uaguaucuuggucacacag

SEQ ID NO: 1577271 - RNA, 19 nt, Artificial Sequence
  Description of Artificial Sequence: Synthetic oligonucleotide
  Sense strand starting at position 2819 of SEQ ID NO: 1560115
cccuuugagugggcagaaa

SEQ ID NO: 1577272 - RNA, 19 nt, Artificial Sequence
  Description of Artificial Sequence: Synthetic oligonucleotide
  Antisense strand to SEQ ID NO: 1577271
uuucugcccacucaaaggg

SEQ ID NO: 1577273 - RNA, 19 nt, Artificial Sequence
  Description of Artificial Sequence: Synthetic oligonucleotide
  Sense strand starting at position 2843 of SEQ ID NO: 1560115
ucagaagucaguggucagu

SEQ ID NO: 1577274 - RNA, 19 nt, Artificial Sequence
  Description of Artificial Sequence: Synthetic oligonucleotide
  Antisense strand to SEQ ID NO: 1577273
acugaccacugacuucuga

SEQ ID NO: 1577275 - RNA, 19 nt, Artificial Sequence
  Description of Artificial Sequence: Synthetic oligonucleotide
  Sense strand starting at position 2849 of SEQ ID NO: 1560115
gucaguggucaguguuaug

SEQ ID NO: 1577276 - RNA, 19 nt, Artificial Sequence
  Description of Artificial Sequence: Synthetic oligonucleotide
  Antisense strand to SEQ ID NO: 1577275
cauaacacugaccacugac

SEQ ID NO: 1577277 - RNA, 19 nt, Artificial Sequence
  Description of Artificial Sequence: Synthetic oligonucleotide
  Sense strand starting at position 2950 of SEQ ID NO: 1560115
ucaguugaaucccgaaggu

SEQ ID NO: 1577278 - RNA, 19 nt, Artificial Sequence
  Description of Artificial Sequence: Synthetic oligonucleotide
  Antisense strand to SEQ ID NO: 1577277
accuucgggauucaacuga

SEQ ID NO: 1577279 - RNA, 19 nt, Artificial Sequence
  Description of Artificial Sequence: Synthetic oligonucleotide
  Sense strand starting at position 61 of SEQ ID NO: 1560116
gcagaauguugggcagcau

SEQ ID NO: 1577280 - RNA, 19 nt, Artificial Sequence
  Description of Artificial Sequence: Synthetic oligonucleotide
  Antisense strand to SEQ ID NO: 1577279
augcugcccaacauucugc

SEQ ID NO: 1577281 - RNA, 19 nt, Artificial Sequence
  Description of Artificial Sequence: Synthetic oligonucleotide
  Sense strand starting at position 204 of SEQ ID NO: 1560116
gucucaaugucuuaggaca

SEQ ID NO: 1577282 - RNA, 19 nt, Artificial Sequence
  Description of Artificial Sequence: Synthetic oligonucleotide
  Antisense strand to SEQ ID NO: 1577281
uguccuaagacauugagac

SEQ ID NO: 1577283 - RNA, 19 nt, Artificial Sequence
  Description of Artificial Sequence: Synthetic oligonucleotide
  Sense strand starting at position 206 of SEQ ID NO: 1560116
cucaaugucuuaggacauu

SEQ ID NO: 1577284 - RNA, 19 nt, Artificial Sequence
  Description of Artificial Sequence: Synthetic oligonucleotide
  Antisense strand to SEQ ID NO: 1577283
aauguccuaagacauugag

SEQ ID NO: 1577285 - RNA, 19 nt, Artificial Sequence
  Description of Artificial Sequence: Synthetic oligonucleotide
  Sense strand starting at position 212 of SEQ ID NO: 1560116
gucuuaggacauugccaaa

SEQ ID NO: 1577286 - RNA, 19 nt, Artificial Sequence
  Description of Artificial Sequence: Synthetic oligonucleotide
  Antisense strand to SEQ ID NO: 1577285
uuuggcaauguccuaagac

SEQ ID NO: 1577287 - RNA, 19 nt, Artificial Sequence
  Description of Artificial Sequence: Synthetic oligonucleotide
  Sense strand starting at position 274 of SEQ ID NO: 1560116
ugguuuacaccuuauggua

SEQ ID NO: 1577288 - RNA, 19 nt, Artificial Sequence
  Description of Artificial Sequence: Synthetic oligonucleotide
  Antisense strand to SEQ ID NO: 1577287
uaccauaagguguaaacca

SEQ ID NO: 1577289 - RNA, 19 nt, Artificial Sequence
  Description of Artificial Sequence: Synthetic oligonucleotide
  Sense strand starting at position 289 of SEQ ID NO: 1560116
gguacuuugcuaugugcca

SEQ ID NO: 1577290 - RNA, 19 nt, Artificial Sequence
  Description of Artificial Sequence: Synthetic oligonucleotide
  Antisense strand to SEQ ID NO: 1577289
uggcacauagcaaaguacc

SEQ ID NO: 1577291 - RNA, 19 nt, Artificial Sequence
  Description of Artificial Sequence: Synthetic oligonucleotide
  Sense strand starting at position 377 of SEQ ID NO: 1560116
ucgagaaacugagaacaau

SEQ ID NO: 1577292 - RNA, 19 nt, Artificial Sequence
  Description of Artificial Sequence: Synthetic oligonucleotide
  Antisense strand to SEQ ID NO: 1577291
auuguucucaguuucucga

SEQ ID NO: 1577293 - RNA, 19 nt, Artificial Sequence
  Description of Artificial Sequence: Synthetic oligonucleotide
  Sense strand starting at position 710 of SEQ ID NO: 1560116
gugaacuguuauccaacca

SEQ ID NO: 1577294 - RNA, 19 nt, Artificial Sequence
  Description of Artificial Sequence: Synthetic oligonucleotide
  Antisense strand to SEQ ID NO: 1577293
ugguuggauaacaguucac

SEQ ID NO: 1577295 - RNA, 19 nt, Artificial Sequence
  Description of Artificial Sequence: Synthetic oligonucleotide
  Sense strand starting at position 827 of SEQ ID NO: 1560116
ggccguggaucacuugaga

SEQ ID NO: 1577296 - RNA, 19 nt, Artificial Sequence
  Description of Artificial Sequence: Synthetic oligonucleotide
  Antisense strand to SEQ ID NO: 1577295
ucucaagugauccacggcc

SEQ ID NO: 1577297 - RNA, 19 nt, Artificial Sequence
  Description of Artificial Sequence: Synthetic oligonucleotide
  Sense strand starting at position 1199 of SEQ ID NO: 1560116
gugaaaucccucuguacua

SEQ ID NO: 1577298 - RNA, 19 nt, Artificial Sequence
  Description of Artificial Sequence: Synthetic oligonucleotide
  Antisense strand to SEQ ID NO: 1577297
uaguacagagggauuucac

SEQ ID NO: 1577299 - RNA, 19 nt, Artificial Sequence
  Description of Artificial Sequence: Synthetic oligonucleotide
  Sense strand starting at position 1435 of SEQ ID NO: 1560116
cgguucugaacccaugaga

SEQ ID NO: 1577300 - RNA, 19 nt, Artificial Sequence
  Description of Artificial Sequence: Synthetic oligonucleotide
  Antisense strand to SEQ ID NO: 1577299
ucucauggguucagaaccg

SEQ ID NO: 1577301 - RNA, 19 nt, Artificial Sequence
  Description of Artificial Sequence: Synthetic oligonucleotide
  Sense strand starting at position 1481 of SEQ ID NO: 1560116
augaacuaaguaugaguuu

SEQ ID NO: 1577302 - RNA, 19 nt, Artificial Sequence
  Description of Artificial Sequence: Synthetic oligonucleotide
  Antisense strand to SEQ ID NO: 1577301
aaacucauacuuaguucau

SEQ ID NO: 1577303 - RNA, 19 nt, Artificial Sequence
  Description of Artificial Sequence: Synthetic oligonucleotide
  Sense strand starting at position 1510 of SEQ ID NO: 1560116
acgguuuaccuagacucau

SEQ ID NO: 1577304 - RNA, 19 nt, Artificial Sequence
  Description of Artificial Sequence: Synthetic oligonucleotide
  Antisense strand to SEQ ID NO: 1577303
augagucuagguaaaccgu

SEQ ID NO: 1577305 - RNA, 19 nt, Artificial Sequence
  Description of Artificial Sequence: Synthetic oligonucleotide
  Sense strand starting at position 1519 of SEQ ID NO: 1560116
cuagacucaugcuggagaa

SEQ ID NO: 1577306 - RNA, 19 nt, Artificial Sequence
  Description of Artificial Sequence: Synthetic oligonucleotide
  Antisense strand to SEQ ID NO: 1577305
uucuccagcaugagucuag

SEQ ID NO: 1577307 - RNA, 19 nt, Artificial Sequence
  Description of Artificial Sequence: Synthetic oligonucleotide
  Sense strand starting at position 1520 of SEQ ID NO: 1560116
uagacucaugcuggagaaa

SEQ ID NO: 1577308 - RNA, 19 nt, Artificial Sequence
  Description of Artificial Sequence: Synthetic oligonucleotide
  Antisense strand to SEQ ID NO: 1577307
uuucuccagcaugagucua

SEQ ID NO: 1577309 - RNA, 19 nt, Artificial Sequence
  Description of Artificial Sequence: Synthetic oligonucleotide
  Sense strand starting at position 1543 of SEQ ID NO: 1560116
uuugucacaccaugaagau

SEQ ID NO: 1577310 - RNA, 19 nt, Artificial Sequence
  Description of Artificial Sequence: Synthetic oligonucleotide
  Antisense strand to SEQ ID NO: 1577309
aucuucauggugugacaaa

SEQ ID NO: 1577311 - RNA, 19 nt, Artificial Sequence
  Description of Artificial Sequence: Synthetic oligonucleotide
  Sense strand starting at position 1601 of SEQ ID NO: 1560116
ggagccaucuuaccuaaca

SEQ ID NO: 1577312 - RNA, 19 nt, Artificial Sequence
  Description of Artificial Sequence: Synthetic oligonucleotide
  Antisense strand to SEQ ID NO: 1577311
uguuagguaagauggcucc

SEQ ID NO: 1577313 - RNA, 19 nt, Artificial Sequence
  Description of Artificial Sequence: Synthetic oligonucleotide
  Sense strand starting at position 1612 of SEQ ID NO: 1560116
accuaacaguuguaucuuu

SEQ ID NO: 1577314 - RNA, 19 nt, Artificial Sequence
  Description of Artificial Sequence: Synthetic oligonucleotide
  Antisense strand to SEQ ID NO: 1577313
aaagauacaacuguuaggu

SEQ ID NO: 1577315 - RNA, 19 nt, Artificial Sequence
  Description of Artificial Sequence: Synthetic oligonucleotide
  Sense strand starting at position 1770 of SEQ ID NO: 1560116
ugcccuugacccuggaaga

SEQ ID NO: 1577316 - RNA, 19 nt, Artificial Sequence
  Description of Artificial Sequence: Synthetic oligonucleotide
  Antisense strand to SEQ ID NO: 1577315
ucuuccagggucaagggca

SEQ ID NO: 1577317 - RNA, 19 nt, Artificial Sequence
  Description of Artificial Sequence: Synthetic oligonucleotide
  Sense strand starting at position 2033 of SEQ ID NO: 1560116
cacuguuuccauggagauc

SEQ ID NO: 1577318 - RNA, 19 nt, Artificial Sequence
  Description of Artificial Sequence: Synthetic oligonucleotide
  Antisense strand to SEQ ID NO: 1577317
gaucuccauggaaacagug

SEQ ID NO: 1577319 - RNA, 19 nt, Artificial Sequence
  Description of Artificial Sequence: Synthetic oligonucleotide
  Sense strand starting at position 2073 of SEQ ID NO: 1560116
cugcguucucauuggcuga

SEQ ID NO: 1577320 - RNA, 19 nt, Artificial Sequence
  Description of Artificial Sequence: Synthetic oligonucleotide
  Antisense strand to SEQ ID NO: 1577319
ucagccaaugagaacgcag

SEQ ID NO: 1577321 - RNA, 19 nt, Artificial Sequence
  Description of Artificial Sequence: Synthetic oligonucleotide
  Sense strand starting at position 3034 of SEQ ID NO: 1560116
accagugaguccuccuguu

SEQ ID NO: 1577322 - RNA, 19 nt, Artificial Sequence
  Description of Artificial Sequence: Synthetic oligonucleotide
  Antisense strand to SEQ ID NO: 1577321
aacaggaggacucacuggu

SEQ ID NO: 1577323 - RNA, 19 nt, Artificial Sequence
  Description of Artificial Sequence: Synthetic oligonucleotide
  Sense strand starting at position 3123 of SEQ ID NO: 1560116
gacucaguuucccgguagu

SEQ ID NO: 1577324 - RNA, 19 nt, Artificial Sequence
  Description of Artificial Sequence: Synthetic oligonucleotide
  Antisense strand to SEQ ID NO: 1577323
acuaccgggaaacugaguc

SEQ ID NO: 1577325 - RNA, 19 nt, Artificial Sequence
  Description of Artificial Sequence: Synthetic oligonucleotide
  Sense strand starting at position 3160 of SEQ ID NO: 1560116
ggaggacagaggugguauu

SEQ ID NO: 1577326 - RNA, 19 nt, Artificial Sequence
  Description of Artificial Sequence: Synthetic oligonucleotide
  Antisense strand to SEQ ID NO: 1577325
aauaccaccucuguccucc

SEQ ID NO: 1577327 - RNA, 19 nt, Artificial Sequence
  Description of Artificial Sequence: Synthetic oligonucleotide
  Sense strand starting at position 3170 of SEQ ID NO: 1560116
ggugguauuugguggagaa

SEQ ID NO: 1577328 - RNA, 19 nt, Artificial Sequence
  Description of Artificial Sequence: Synthetic oligonucleotide
  Antisense strand to SEQ ID NO: 1577327
uucuccaccaaauaccacc

SEQ ID NO: 1577329 - RNA, 19 nt, Artificial Sequence
  Description of Artificial Sequence: Synthetic oligonucleotide
  Sense strand starting at position 3367 of SEQ ID NO: 1560116
uccaucagauguuuauuga

SEQ ID NO: 1577330 - RNA, 19 nt, Artificial Sequence
  Description of Artificial Sequence: Synthetic oligonucleotide
  Antisense strand to SEQ ID NO: 1577329
ucaauaaacaucugaugga

SEQ ID NO: 1577331 - RNA, 19 nt, Artificial Sequence
  Description of Artificial Sequence: Synthetic oligonucleotide
  Sense strand starting at position 3370 of SEQ ID NO: 1560116
aucagauguuuauugaaca

SEQ ID NO: 1577332 - RNA, 19 nt, Artificial Sequence
  Description of Artificial Sequence: Synthetic oligonucleotide
  Antisense strand to SEQ ID NO: 1577331
uguucaauaaacaucugau

SEQ ID NO: 1577333 - RNA, 19 nt, Artificial Sequence
  Description of Artificial Sequence: Synthetic oligonucleotide
  Sense strand starting at position 3406 of SEQ ID NO: 1560116
cugucugugugaccaagau

SEQ ID NO: 1577334 - RNA, 19 nt, Artificial Sequence
  Description of Artificial Sequence: Synthetic oligonucleotide
  Antisense strand to SEQ ID NO: 1577333
aucuuggucacacagacag

SEQ ID NO: 1577335 - RNA, 19 nt, Artificial Sequence
  Description of Artificial Sequence: Synthetic oligonucleotide
  Sense strand starting at position 3410 of SEQ ID NO: 1560116
cugugugaccaagauacua

SEQ ID NO: 1577336 - RNA, 19 nt, Artificial Sequence
  Description of Artificial Sequence: Synthetic oligonucleotide
  Antisense strand to SEQ ID NO: 1577335
uaguaucuuggucacacag

SEQ ID NO: 1577337 - RNA, 19 nt, Artificial Sequence
  Description of Artificial Sequence: Synthetic oligonucleotide
  Sense strand starting at position 3442 of SEQ ID NO: 1560116
cccuuugagugggcagaaa

SEQ ID NO: 1577338 - RNA, 19 nt, Artificial Sequence
  Description of Artificial Sequence: Synthetic oligonucleotide
  Antisense strand to SEQ ID NO: 1577337
uuucugcccacucaaaggg

SEQ ID NO: 1577339 - RNA, 19 nt, Artificial Sequence
  Description of Artificial Sequence: Synthetic oligonucleotide
  Sense strand starting at position 3466 of SEQ ID NO: 1560116
ucagaagucaguggucagu

SEQ ID NO: 1577340 - RNA, 19 nt, Artificial Sequence
  Description of Artificial Sequence: Synthetic oligonucleotide
  Antisense strand to SEQ ID NO: 1577339
acugaccacugacuucuga

SEQ ID NO: 1577341 - RNA, 19 nt, Artificial Sequence
  Description of Artificial Sequence: Synthetic oligonucleotide
  Sense strand starting at position 3472 of SEQ ID NO: 1560116
gucaguggucaguguuaug

SEQ ID NO: 1577342 - RNA, 19 nt, Artificial Sequence
  Description of Artificial Sequence: Synthetic oligonucleotide
  Antisense strand to SEQ ID NO: 1577341
cauaacacugaccacugac

SEQ ID NO: 1577343 - RNA, 19 nt, Artificial Sequence
  Description of Artificial Sequence: Synthetic oligonucleotide
  Sense strand starting at position 3573 of SEQ ID NO: 1560116
ucaguugaaucccgaaggu

SEQ ID NO: 1577344 - RNA, 19 nt, Artificial Sequence
  Description of Artificial Sequence: Synthetic oligonucleotide
  Antisense strand to SEQ ID NO: 1577343
accuucgggauucaacuga

SEQ ID NO: 1577345 - RNA, 19 nt, Artificial Sequence
  Description of Artificial Sequence: Synthetic oligonucleotide
  Sense strand starting at position 56 of SEQ ID NO: 1560117
gccacaucagccuggauuu

SEQ ID NO: 1577346 - RNA, 19 nt, Artificial Sequence
  Description of Artificial Sequence: Synthetic oligonucleotide
  Antisense strand to SEQ ID NO: 1577345
aaauccaggcugauguggc

SEQ ID NO: 1577347 - RNA, 19 nt, Artificial Sequence
  Description of Artificial Sequence: Synthetic oligonucleotide
  Sense strand starting at position 81 of SEQ ID NO: 1560117
cuggcuucucaugggaguu

SEQ ID NO: 1577348 - RNA, 19 nt, Artificial Sequence
  Description of Artificial Sequence: Synthetic oligonucleotide
  Antisense strand to SEQ ID NO: 1577347
aacucccaugagaagccag

SEQ ID NO: 1577349 - RNA, 19 nt, Artificial Sequence
  Description of Artificial Sequence: Synthetic oligonucleotide
  Sense strand starting at position 82 of SEQ ID NO: 1560117
uggcuucucaugggaguuu

SEQ ID NO: 1577350 - RNA, 19 nt, Artificial Sequence
  Description of Artificial Sequence: Synthetic oligonucleotide
  Antisense strand to SEQ ID NO: 1577349
aaacucccaugagaagcca

SEQ ID NO: 1577351 - RNA, 19 nt, Artificial Sequence
  Description of Artificial Sequence: Synthetic oligonucleotide
  Sense strand starting at position 94 of SEQ ID NO: 1560117
ggaguuugauccugacuug

SEQ ID NO: 1577352 - RNA, 19 nt, Artificial Sequence
  Description of Artificial Sequence: Synthetic oligonucleotide
  Antisense strand to SEQ ID NO: 1577351
caagucaggaucaaacucc

SEQ ID NO: 1577353 - RNA, 19 nt, Artificial Sequence
  Description of Artificial Sequence: Synthetic oligonucleotide
  Sense strand starting at position 182 of SEQ ID NO: 1560117
ggcauugaguagucucuga

SEQ ID NO: 1577354 - RNA, 19 nt, Artificial Sequence
  Description of Artificial Sequence: Synthetic oligonucleotide
  Antisense strand to SEQ ID NO: 1577353
ucagagacuacucaaugcc

SEQ ID NO: 1577355 - RNA, 19 nt, Artificial Sequence
  Description of Artificial Sequence: Synthetic oligonucleotide
  Sense strand starting at position 186 of SEQ ID NO: 1560117
uugaguagucucugaagcu

SEQ ID NO: 1577356 - RNA, 19 nt, Artificial Sequence
  Description of Artificial Sequence: Synthetic oligonucleotide
  Antisense strand to SEQ ID NO: 1577355
agcuucagagacuacucaa

SEQ ID NO: 1577357 - RNA, 19 nt, Artificial Sequence
  Description of Artificial Sequence: Synthetic oligonucleotide
  Sense strand starting at position 245 of SEQ ID NO: 1560117
cuaggucucuccucaucau

SEQ ID NO: 1577358 - RNA, 19 nt, Artificial Sequence
  Description of Artificial Sequence: Synthetic oligonucleotide
  Antisense strand to SEQ ID NO: 1577357
augaugaggagagaccuag

SEQ ID NO: 1577359 - RNA, 19 nt, Artificial Sequence
  Description of Artificial Sequence: Synthetic oligonucleotide
  Sense strand starting at position 381 of SEQ ID NO: 1560117
gcagcagugacaggaguuu

SEQ ID NO: 1577360 - RNA, 19 nt, Artificial Sequence
  Description of Artificial Sequence: Synthetic oligonucleotide
  Antisense strand to SEQ ID NO: 1577359
aaacuccugucacugcugc

SEQ ID NO: 1577361 - RNA, 19 nt, Artificial Sequence
  Description of Artificial Sequence: Synthetic oligonucleotide
  Sense strand starting at position 614 of SEQ ID NO: 1560117
aaacacgggucuuugaaga

SEQ ID NO: 1577362 - RNA, 19 nt, Artificial Sequence
  Description of Artificial Sequence: Synthetic oligonucleotide
  Antisense strand to SEQ ID NO: 1577361
ucuucaaagacccguguuu

SEQ ID NO: 1577363 - RNA, 19 nt, Artificial Sequence
  Description of Artificial Sequence: Synthetic oligonucleotide
  Sense strand starting at position 718 of SEQ ID NO: 1560117
gggauggaguccugaggga

SEQ ID NO: 1577364 - RNA, 19 nt, Artificial Sequence
  Description of Artificial Sequence: Synthetic oligonucleotide
  Antisense strand to SEQ ID NO: 1577363
ucccucaggacuccauccc

SEQ ID NO: 1577365 - RNA, 19 nt, Artificial Sequence
  Description of Artificial Sequence: Synthetic oligonucleotide
  Sense strand starting at position 893 of SEQ ID NO: 1560117
gggagugucuggcuggauu

SEQ ID NO: 1577366 - RNA, 19 nt, Artificial Sequence
  Description of Artificial Sequence: Synthetic oligonucleotide
  Antisense strand to SEQ ID NO: 1577365
aauccagccagacacuccc

SEQ ID NO: 1577367 - RNA, 19 nt, Artificial Sequence
  Description of Artificial Sequence: Synthetic oligonucleotide
  Sense strand starting at position 1252 of SEQ ID NO: 1560117
ggacuucugugcucucuga

SEQ ID NO: 1577368 - RNA, 19 nt, Artificial Sequence
  Description of Artificial Sequence: Synthetic oligonucleotide
  Antisense strand to SEQ ID NO: 1577367
ucagagagcacagaagucc

SEQ ID NO: 1577369 - RNA, 19 nt, Artificial Sequence
  Description of Artificial Sequence: Synthetic oligonucleotide
  Sense strand starting at position 1256 of SEQ ID NO: 1560117
uucugugcucucugacgga

SEQ ID NO: 1577370 - RNA, 19 nt, Artificial Sequence
  Description of Artificial Sequence: Synthetic oligonucleotide
  Antisense strand to SEQ ID NO: 1577369
uccgucagagagcacagaa

SEQ ID NO: 1577371 - RNA, 19 nt, Artificial Sequence
  Description of Artificial Sequence: Synthetic oligonucleotide
  Sense strand starting at position 1405 of SEQ ID NO: 1560117
ggagaagucugacaauuuc

SEQ ID NO: 1577372 - RNA, 19 nt, Artificial Sequence
  Description of Artificial Sequence: Synthetic oligonucleotide
  Antisense strand to SEQ ID NO: 1577371
gaaauugucagacuucucc

SEQ ID NO: 1577373 - RNA, 19 nt, Artificial Sequence
  Description of Artificial Sequence: Synthetic oligonucleotide
  Sense strand starting at position 1412 of SEQ ID NO: 1560117
ucugacaauuucuagacga

SEQ ID NO: 1577374 - RNA, 19 nt, Artificial Sequence
  Description of Artificial Sequence: Synthetic oligonucleotide
  Antisense strand to SEQ ID NO: 1577373
ucgucuagaaauugucaga

SEQ ID NO: 1577375 - RNA, 19 nt, Artificial Sequence
  Description of Artificial Sequence: Synthetic oligonucleotide
  Sense strand starting at position 1425 of SEQ ID NO: 1560117
agacgauucugacaggauu

SEQ ID NO: 1577376 - RNA, 19 nt, Artificial Sequence
  Description of Artificial Sequence: Synthetic oligonucleotide
  Antisense strand to SEQ ID NO: 1577375
aauccugucagaaucgucu

SEQ ID NO: 1577377 - RNA, 19 nt, Artificial Sequence
  Description of Artificial Sequence: Synthetic oligonucleotide
  Sense strand starting at position 1459 of SEQ ID NO: 1560117
aagauuuccugguggacuc

SEQ ID NO: 1577378 - RNA, 19 nt, Artificial Sequence
  Description of Artificial Sequence: Synthetic oligonucleotide
  Antisense strand to SEQ ID NO: 1577377
gaguccaccaggaaaucuu

SEQ ID NO: 1577379 - RNA, 19 nt, Artificial Sequence
  Description of Artificial Sequence: Synthetic oligonucleotide
  Sense strand starting at position 1797 of SEQ ID NO: 1560117
ggguaucucucccacaaua

SEQ ID NO: 1577380 - RNA, 19 nt, Artificial Sequence
  Description of Artificial Sequence: Synthetic oligonucleotide
  Antisense strand to SEQ ID NO: 1577379
uauugugggagagauaccc

SEQ ID NO: 1577381 - RNA, 19 nt, Artificial Sequence
  Description of Artificial Sequence: Synthetic oligonucleotide
  Sense strand starting at position 2205 of SEQ ID NO: 1560117
cgcuucaggcuuuggugaa

SEQ ID NO: 1577382 - RNA, 19 nt, Artificial Sequence
  Description of Artificial Sequence: Synthetic oligonucleotide
  Antisense strand to SEQ ID NO: 1577381
uucaccaaagccugaagcg

SEQ ID NO: 1577383 - RNA, 19 nt, Artificial Sequence
  Description of Artificial Sequence: Synthetic oligonucleotide
  Sense strand starting at position 2218 of SEQ ID NO: 1560117
ggugaaaugggcugaggaa

SEQ ID NO: 1577384 - RNA, 19 nt, Artificial Sequence
  Description of Artificial Sequence: Synthetic oligonucleotide
  Antisense strand to SEQ ID NO: 1577383
uuccucagcccauuucacc

SEQ ID NO: 1577385 - RNA, 19 nt, Artificial Sequence
  Description of Artificial Sequence: Synthetic oligonucleotide
  Sense strand starting at position 2623 of SEQ ID NO: 1560117
cugugagaucccuguugag

SEQ ID NO: 1577386 - RNA, 19 nt, Artificial Sequence
  Description of Artificial Sequence: Synthetic oligonucleotide
  Antisense strand to SEQ ID NO: 1577385
cucaacagggaucucacag

SEQ ID NO: 1577387 - RNA, 19 nt, Artificial Sequence
  Description of Artificial Sequence: Synthetic oligonucleotide
  Sense strand starting at position 2653 of SEQ ID NO: 1560117
aggcuaugcugauauaaug

SEQ ID NO: 1577388 - RNA, 19 nt, Artificial Sequence
  Description of Artificial Sequence: Synthetic oligonucleotide
  Antisense strand to SEQ ID NO: 1577387
cauuauaucagcauagccu

SEQ ID NO: 1577389 - RNA, 19 nt, Artificial Sequence
  Description of Artificial Sequence: Synthetic oligonucleotide
  Sense strand starting at position 2661 of SEQ ID NO: 1560117
cugauauaauguguggaga

SEQ ID NO: 1577390 - RNA, 19 nt, Artificial Sequence
  Description of Artificial Sequence: Synthetic oligonucleotide
  Antisense strand to SEQ ID NO: 1577389
ucuccacacauuauaucag

SEQ ID NO: 1577391 - RNA, 19 nt, Artificial Sequence
  Description of Artificial Sequence: Synthetic oligonucleotide
  Sense strand starting at position 2662 of SEQ ID NO: 1560117
ugauauaauguguggagaa

SEQ ID NO: 1577392 - RNA, 19 nt, Artificial Sequence
  Description of Artificial Sequence: Synthetic oligonucleotide
  Antisense strand to SEQ ID NO: 1577391
uucuccacacauuauauca

SEQ ID NO: 1577393 - RNA, 19 nt, Artificial Sequence
  Description of Artificial Sequence: Synthetic oligonucleotide
  Sense strand starting at position 2663 of SEQ ID NO: 1560117
gauauaauguguggagaag

SEQ ID NO: 1577394 - RNA, 19 nt, Artificial Sequence
  Description of Artificial Sequence: Synthetic oligonucleotide
  Antisense strand to SEQ ID NO: 1577393
cuucuccacacauuauauc

SEQ ID NO: 1577395 - RNA, 19 nt, Artificial Sequence
  Description of Artificial Sequence: Synthetic oligonucleotide
  Sense strand starting at position 2664 of SEQ ID NO: 1560117
auauaauguguggagaagu

SEQ ID NO: 1577396 - RNA, 19 nt, Artificial Sequence
  Description of Artificial Sequence: Synthetic oligonucleotide
  Antisense strand to SEQ ID NO: 1577395
acuucuccacacauuauau

SEQ ID NO: 1577397 - RNA, 19 nt, Artificial Sequence
  Description of Artificial Sequence: Synthetic oligonucleotide
  Sense strand starting at position 2675 of SEQ ID NO: 1560117
ggagaaguguucucucuuu

SEQ ID NO: 1577398 - RNA, 19 nt, Artificial Sequence
  Description of Artificial Sequence: Synthetic oligonucleotide
  Antisense strand to SEQ ID NO: 1577397
aaagagagaacacuucucc

SEQ ID NO: 1577399 - RNA, 19 nt, Artificial Sequence
  Description of Artificial Sequence: Synthetic oligonucleotide
  Sense strand starting at position 2693 of SEQ ID NO: 1560117
uuucuauucuuugaaagug

SEQ ID NO: 1577400 - RNA, 19 nt, Artificial Sequence
  Description of Artificial Sequence: Synthetic oligonucleotide
  Antisense strand to SEQ ID NO: 1577399
cacuuucaaagaauagaaa

SEQ ID NO: 1577401 - RNA, 19 nt, Artificial Sequence
  Description of Artificial Sequence: Synthetic oligonucleotide
  Sense strand starting at position 2713 of SEQ ID NO: 1560117
uaguguaggauugauguua

SEQ ID NO: 1577402 - RNA, 19 nt, Artificial Sequence
  Description of Artificial Sequence: Synthetic oligonucleotide
  Antisense strand to SEQ ID NO: 1577401
uaacaucaauccuacacua

SEQ ID NO: 1577403 - RNA, 19 nt, Artificial Sequence
  Description of Artificial Sequence: Synthetic oligonucleotide
  Sense strand starting at position 2742 of SEQ ID NO: 1560117
auguguuuggaagaaguca

SEQ ID NO: 1577404 - RNA, 19 nt, Artificial Sequence
  Description of Artificial Sequence: Synthetic oligonucleotide
  Antisense strand to SEQ ID NO: 1577403
ugacuucuuccaaacacau

SEQ ID NO: 1577405 - RNA, 19 nt, Artificial Sequence
  Description of Artificial Sequence: Synthetic oligonucleotide
  Sense strand starting at position 2764 of SEQ ID NO: 1560117
gccaucuggaccuagaguu

SEQ ID NO: 1577406 - RNA, 19 nt, Artificial Sequence
  Description of Artificial Sequence: Synthetic oligonucleotide
  Antisense strand to SEQ ID NO: 1577405
aacucuagguccagauggc

SEQ ID NO: 1577407 - RNA, 19 nt, Artificial Sequence
  Description of Artificial Sequence: Synthetic oligonucleotide
  Sense strand starting at position 2973 of SEQ ID NO: 1560117
gaaacacggucuuauguua

SEQ ID NO: 1577408 - RNA, 19 nt, Artificial Sequence
  Description of Artificial Sequence: Synthetic oligonucleotide
  Antisense strand to SEQ ID NO: 1577407
uaacauaagaccguguuuc

SEQ ID NO: 1577409 - RNA, 19 nt, Artificial Sequence
  Description of Artificial Sequence: Synthetic oligonucleotide
  Sense strand starting at position 3092 of SEQ ID NO: 1560117
cuguaagaucuguggugac

SEQ ID NO: 1577410 - RNA, 19 nt, Artificial Sequence
  Description of Artificial Sequence: Synthetic oligonucleotide
  Antisense strand to SEQ ID NO: 1577409
gucaccacagaucuuacag

SEQ ID NO: 1577411 - RNA, 19 nt, Artificial Sequence
  Description of Artificial Sequence: Synthetic oligonucleotide
  Sense strand starting at position 3099 of SEQ ID NO: 1560117
aucuguggugacggauauu

SEQ ID NO: 1577412 - RNA, 19 nt, Artificial Sequence
  Description of Artificial Sequence: Synthetic oligonucleotide
  Antisense strand to SEQ ID NO: 1577411
aauauccgucaccacagau

SEQ ID NO: 1577413 - RNA, 19 nt, Artificial Sequence
  Description of Artificial Sequence: Synthetic oligonucleotide
  Sense strand starting at position 3102 of SEQ ID NO: 1560117
uguggugacggauauuaau

SEQ ID NO: 1577414 - RNA, 19 nt, Artificial Sequence
  Description of Artificial Sequence: Synthetic oligonucleotide
  Antisense strand to SEQ ID NO: 1577413
auuaauauccgucaccaca

SEQ ID NO: 1577415 - RNA, 19 nt, Artificial Sequence
  Description of Artificial Sequence: Synthetic oligonucleotide
  Sense strand starting at position 3105 of SEQ ID NO: 1560117
ggugacggauauuaauaau

SEQ ID NO: 1577416 - RNA, 19 nt, Artificial Sequence
  Description of Artificial Sequence: Synthetic oligonucleotide
  Antisense strand to SEQ ID NO: 1577415
auuauuaauauccgucacc

SEQ ID NO: 1577417 - RNA, 19 nt, Artificial Sequence
  Description of Artificial Sequence: Synthetic oligonucleotide
  Sense strand starting at position 3108 of SEQ ID NO: 1560117
gacggauauuaauaauuug

SEQ ID NO: 1577418 - RNA, 19 nt, Artificial Sequence
  Description of Artificial Sequence: Synthetic oligonucleotide
  Antisense strand to SEQ ID NO: 1577417
caaauuauuaauauccguc

SEQ ID NO: 1577419 - RNA, 19 nt, Artificial Sequence
  Description of Artificial Sequence: Synthetic oligonucleotide
  Sense strand starting at position 3525 of SEQ ID NO: 1560117
cucucuuucugagacaggu

SEQ ID NO: 1577420 - RNA, 19 nt, Artificial Sequence
  Description of Artificial Sequence: Synthetic oligonucleotide
  Antisense strand to SEQ ID NO: 1577419
accugucucagaaagagag

SEQ ID NO: 1577421 - RNA, 19 nt, Artificial Sequence
  Description of Artificial Sequence: Synthetic oligonucleotide
  Sense strand starting at position 3541 of SEQ ID NO: 1560117
gguucucacccaggauaga

SEQ ID NO: 1577422 - RNA, 19 nt, Artificial Sequence
  Description of Artificial Sequence: Synthetic oligonucleotide
  Antisense strand to SEQ ID NO: 1577421
ucuauccugggugagaacc

SEQ ID NO: 1577423 - RNA, 19 nt, Artificial Sequence
  Description of Artificial Sequence: Synthetic oligonucleotide
  Sense strand starting at position 3554 of SEQ ID NO: 1560117
gauagagugcaguaaugug

SEQ ID NO: 1577424 - RNA, 19 nt, Artificial Sequence
  Description of Artificial Sequence: Synthetic oligonucleotide
  Antisense strand to SEQ ID NO: 1577423
cacauuacugcacucuauc

SEQ ID NO: 1577425 - RNA, 19 nt, Artificial Sequence
  Description of Artificial Sequence: Synthetic oligonucleotide
  Sense strand starting at position 323 of SEQ ID NO: 1560118
ggaccuugacauuggcuua

SEQ ID NO: 1577426 - RNA, 19 nt, Artificial Sequence
  Description of Artificial Sequence: Synthetic oligonucleotide
  Antisense strand to SEQ ID NO: 1577425
uaagccaaugucaaggucc

SEQ ID NO: 1577427 - RNA, 19 nt, Artificial Sequence
  Description of Artificial Sequence: Synthetic oligonucleotide
  Sense strand starting at position 378 of SEQ ID NO: 1560118
aaagcuuggagguguggaa

SEQ ID NO: 1577428 - RNA, 19 nt, Artificial Sequence
  Description of Artificial Sequence: Synthetic oligonucleotide
  Antisense strand to SEQ ID NO: 1577427
uuccacaccuccaagcuuu

SEQ ID NO: 1577429 - RNA, 19 nt, Artificial Sequence
  Description of Artificial Sequence: Synthetic oligonucleotide
  Sense strand starting at position 401 of SEQ ID NO: 1560118
augcucuaugcugguaaau

SEQ ID NO: 1577430 - RNA, 19 nt, Artificial Sequence
  Description of Artificial Sequence: Synthetic oligonucleotide
  Antisense strand to SEQ ID NO: 1577429
auuuaccagcauagagcau

SEQ ID NO: 1577431 - RNA, 19 nt, Artificial Sequence
  Description of Artificial Sequence: Synthetic oligonucleotide
  Sense strand starting at position 713 of SEQ ID NO: 1560118
gcaggucugccuggagaaa

SEQ ID NO: 1577432 - RNA, 19 nt, Artificial Sequence
  Description of Artificial Sequence: Synthetic oligonucleotide
  Antisense strand to SEQ ID NO: 1577431
uuucuccaggcagaccugc

SEQ ID NO: 1577433 - RNA, 19 nt, Artificial Sequence
  Description of Artificial Sequence: Synthetic oligonucleotide
  Sense strand starting at position 724 of SEQ ID NO: 1560118
uggagaaacuucuagguga

SEQ ID NO: 1577434 - RNA, 19 nt, Artificial Sequence
  Description of Artificial Sequence: Synthetic oligonucleotide
  Antisense strand to SEQ ID NO: 1577433
ucaccuagaaguuucucca

SEQ ID NO: 1577435 - RNA, 19 nt, Artificial Sequence
  Description of Artificial Sequence: Synthetic oligonucleotide
  Sense strand starting at position 745 of SEQ ID NO: 1560118
ggcaccuugcccugaguca

SEQ ID NO: 1577436 - RNA, 19 nt, Artificial Sequence
  Description of Artificial Sequence: Synthetic oligonucleotide
  Antisense strand to SEQ ID NO: 1577435
ugacucagggcaaggugcc

SEQ ID NO: 1577437 - RNA, 19 nt, Artificial Sequence
  Description of Artificial Sequence: Synthetic oligonucleotide
  Sense strand starting at position 1423 of SEQ ID NO: 1560118
gcuagauggccuggguuca

SEQ ID NO: 1577438 - RNA, 19 nt, Artificial Sequence
  Description of Artificial Sequence: Synthetic oligonucleotide
  Antisense strand to SEQ ID NO: 1577437
ugaacccaggccaucuagc

SEQ ID NO: 1577439 - RNA, 19 nt, Artificial Sequence
  Description of Artificial Sequence: Synthetic oligonucleotide
  Sense strand starting at position 1424 of SEQ ID NO: 1560118
cuagauggccuggguucaa

SEQ ID NO: 1577440 - RNA, 19 nt, Artificial Sequence
  Description of Artificial Sequence: Synthetic oligonucleotide
  Antisense strand to SEQ ID NO: 1577439
uugaacccaggccaucuag

SEQ ID NO: 1577441 - RNA, 19 nt, Artificial Sequence
  Description of Artificial Sequence: Synthetic oligonucleotide
  Sense strand starting at position 1456 of SEQ ID NO: 1560118
cccuuccagcuguguaaua

SEQ ID NO: 1577442 - RNA, 19 nt, Artificial Sequence
  Description of Artificial Sequence: Synthetic oligonucleotide
  Antisense strand to SEQ ID NO: 1577441
uauuacacagcuggaaggg

SEQ ID NO: 1577443 - RNA, 19 nt, Artificial Sequence
  Description of Artificial Sequence: Synthetic oligonucleotide
  Sense strand starting at position 1458 of SEQ ID NO: 1560118
cuuccagcuguguaauacu

SEQ ID NO: 1577444 - RNA, 19 nt, Artificial Sequence
  Description of Artificial Sequence: Synthetic oligonucleotide
  Antisense strand to SEQ ID NO: 1577443
aguauuacacagcuggaag

SEQ ID NO: 1577445 - RNA, 19 nt, Artificial Sequence
  Description of Artificial Sequence: Synthetic oligonucleotide
  Sense strand starting at position 1530 of SEQ ID NO: 1560118
augucauaauagucaccuu

SEQ ID NO: 1577446 - RNA, 19 nt, Artificial Sequence
  Description of Artificial Sequence: Synthetic oligonucleotide
  Antisense strand to SEQ ID NO: 1577445
aaggugacuauuaugacau

SEQ ID NO: 1577447 - RNA, 19 nt, Artificial Sequence
  Description of Artificial Sequence: Synthetic oligonucleotide
  Sense strand starting at position 1586 of SEQ ID NO: 1560118
gugccugguauagaguaau

SEQ ID NO: 1577448 - RNA, 19 nt, Artificial Sequence
  Description of Artificial Sequence: Synthetic oligonucleotide
  Antisense strand to SEQ ID NO: 1577447
auuacucuauaccaggcac

SEQ ID NO: 1577449 - RNA, 19 nt, Artificial Sequence
  Description of Artificial Sequence: Synthetic oligonucleotide
  Sense strand starting at position 1611 of SEQ ID NO: 1560118
cuguguuugcucuggaaug

SEQ ID NO: 1577450 - RNA, 19 nt, Artificial Sequence
  Description of Artificial Sequence: Synthetic oligonucleotide
  Antisense strand to SEQ ID NO: 1577449
cauuccagagcaaacacag

SEQ ID NO: 1577451 - RNA, 19 nt, Artificial Sequence
  Description of Artificial Sequence: Synthetic oligonucleotide
  Sense strand starting at position 1613 of SEQ ID NO: 1560118
guguuugcucuggaauguc

SEQ ID NO: 1577452 - RNA, 19 nt, Artificial Sequence
  Description of Artificial Sequence: Synthetic oligonucleotide
  Antisense strand to SEQ ID NO: 1577451
gacauuccagagcaaacac

SEQ ID NO: 1577453 - RNA, 19 nt, Artificial Sequence
  Description of Artificial Sequence: Synthetic oligonucleotide
  Sense strand starting at position 1766 of SEQ ID NO: 1560118
gugucccucccgggagaau

SEQ ID NO: 1577454 - RNA, 19 nt, Artificial Sequence
  Description of Artificial Sequence: Synthetic oligonucleotide
  Antisense strand to SEQ ID NO: 1577453
auucucccgggagggacac

SEQ ID NO: 1577455 - RNA, 19 nt, Artificial Sequence
  Description of Artificial Sequence: Synthetic oligonucleotide
  Sense strand starting at position 1767 of SEQ ID NO: 1560118
ugucccucccgggagaauu

SEQ ID NO: 1577456 - RNA, 19 nt, Artificial Sequence
  Description of Artificial Sequence: Synthetic oligonucleotide
  Antisense strand to SEQ ID NO: 1577455
aauucucccgggagggaca

SEQ ID NO: 1577457 - RNA, 19 nt, Artificial Sequence
  Description of Artificial Sequence: Synthetic oligonucleotide
  Sense strand starting at position 2074 of SEQ ID NO: 1560118
uuaguagccgcggcguaau

SEQ ID NO: 1577458 - RNA, 19 nt, Artificial Sequence
  Description of Artificial Sequence: Synthetic oligonucleotide
  Antisense strand to SEQ ID NO: 1577457
auuacgccgcggcuacuaa

SEQ ID NO: 1577459 - RNA, 19 nt, Artificial Sequence
  Description of Artificial Sequence: Synthetic oligonucleotide
  Sense strand starting at position 2130 of SEQ ID NO: 1560118
gguuucuacgauuagucaa

SEQ ID NO: 1577460 - RNA, 19 nt, Artificial Sequence
  Description of Artificial Sequence: Synthetic oligonucleotide
  Antisense strand to SEQ ID NO: 1577459
uugacuaaucguagaaacc

SEQ ID NO: 1577461 - RNA, 19 nt, Artificial Sequence
  Description of Artificial Sequence: Synthetic oligonucleotide
  Sense strand starting at position 2132 of SEQ ID NO: 1560118
uuucuacgauuagucaaua

SEQ ID NO: 1577462 - RNA, 19 nt, Artificial Sequence
  Description of Artificial Sequence: Synthetic oligonucleotide
  Antisense strand to SEQ ID NO: 1577461
uauugacuaaucguagaaa

SEQ ID NO: 1577463 - RNA, 19 nt, Artificial Sequence
  Description of Artificial Sequence: Synthetic oligonucleotide
  Sense strand starting at position 2162 of SEQ ID NO: 1560118
gggauagaaaggugcagau

SEQ ID NO: 1577464 - RNA, 19 nt, Artificial Sequence
  Description of Artificial Sequence: Synthetic oligonucleotide
  Antisense strand to SEQ ID NO: 1577463
aucugcaccuuucuauccc

SEQ ID NO: 1577465 - RNA, 19 nt, Artificial Sequence
  Description of Artificial Sequence: Synthetic oligonucleotide
  Sense strand starting at position 2383 of SEQ ID NO: 1560118
ggaucgguguccucgggau

SEQ ID NO: 1577466 - RNA, 19 nt, Artificial Sequence
  Description of Artificial Sequence: Synthetic oligonucleotide
  Antisense strand to SEQ ID NO: 1577465
aucccgaggacaccgaucc

SEQ ID NO: 1577467 - RNA, 19 nt, Artificial Sequence
  Description of Artificial Sequence: Synthetic oligonucleotide
  Sense strand starting at position 2385 of SEQ ID NO: 1560118
aucgguguccucgggauga

SEQ ID NO: 1577468 - RNA, 19 nt, Artificial Sequence
  Description of Artificial Sequence: Synthetic oligonucleotide
  Antisense strand to SEQ ID NO: 1577467
ucaucccgaggacaccgau

SEQ ID NO: 1577469 - RNA, 19 nt, Artificial Sequence
  Description of Artificial Sequence: Synthetic oligonucleotide
  Sense strand starting at position 2387 of SEQ ID NO: 1560118
cgguguccucgggaugaga

SEQ ID NO: 1577470 - RNA, 19 nt, Artificial Sequence
  Description of Artificial Sequence: Synthetic oligonucleotide
  Antisense strand to SEQ ID NO: 1577469
ucucaucccgaggacaccg

SEQ ID NO: 1577471 - RNA, 19 nt, Artificial Sequence
  Description of Artificial Sequence: Synthetic oligonucleotide
  Sense strand starting at position 2389 of SEQ ID NO: 1560118
guguccucgggaugagauu

SEQ ID NO: 1577472 - RNA, 19 nt, Artificial Sequence
  Description of Artificial Sequence: Synthetic oligonucleotide
  Antisense strand to SEQ ID NO: 1577471
aaucucaucccgaggacac

SEQ ID NO: 1577473 - RNA, 19 nt, Artificial Sequence
  Description of Artificial Sequence: Synthetic oligonucleotide
  Sense strand starting at position 2396 of SEQ ID NO: 1560118
cgggaugagauuuggcguu

SEQ ID NO: 1577474 - RNA, 19 nt, Artificial Sequence
  Description of Artificial Sequence: Synthetic oligonucleotide
  Antisense strand to SEQ ID NO: 1577473
aacgccaaaucucaucccg

SEQ ID NO: 1577475 - RNA, 19 nt, Artificial Sequence
  Description of Artificial Sequence: Synthetic oligonucleotide
  Sense strand starting at position 2398 of SEQ ID NO: 1560118
ggaugagauuuggcguuuc

SEQ ID NO: 1577476 - RNA, 19 nt, Artificial Sequence
  Description of Artificial Sequence: Synthetic oligonucleotide
  Antisense strand to SEQ ID NO: 1577475
gaaacgccaaaucucaucc

SEQ ID NO: 1577477 - RNA, 19 nt, Artificial Sequence
  Description of Artificial Sequence: Synthetic oligonucleotide
  Sense strand starting at position 2488 of SEQ ID NO: 1560118
ccuaauauccgguauuauu

SEQ ID NO: 1577478 - RNA, 19 nt, Artificial Sequence
  Description of Artificial Sequence: Synthetic oligonucleotide
  Antisense strand to SEQ ID NO: 1577477
aauaauaccggauauuagg

SEQ ID NO: 1577479 - RNA, 19 nt, Artificial Sequence
  Description of Artificial Sequence: Synthetic oligonucleotide
  Sense strand starting at position 2548 of SEQ ID NO: 1560118
gggugauauuugggaauua

SEQ ID NO: 1577480 - RNA, 19 nt, Artificial Sequence
  Description of Artificial Sequence: Synthetic oligonucleotide
  Antisense strand to SEQ ID NO: 1577479
uaauucccaaauaucaccc

SEQ ID NO: 1577481 - RNA, 19 nt, Artificial Sequence
  Description of Artificial Sequence: Synthetic oligonucleotide
  Sense strand starting at position 2549 of SEQ ID NO: 1560118
ggugauauuugggaauuag

SEQ ID NO: 1577482 - RNA, 19 nt, Artificial Sequence
  Description of Artificial Sequence: Synthetic oligonucleotide
  Antisense strand to SEQ ID NO: 1577481
cuaauucccaaauaucacc

SEQ ID NO: 1577483 - RNA, 19 nt, Artificial Sequence
  Description of Artificial Sequence: Synthetic oligonucleotide
  Sense strand starting at position 2557 of SEQ ID NO: 1560118
uugggaauuaguggaguga

SEQ ID NO: 1577484 - RNA, 19 nt, Artificial Sequence
  Description of Artificial Sequence: Synthetic oligonucleotide
  Antisense strand to SEQ ID NO: 1577483
ucacuccacuaauucccaa

SEQ ID NO: 1577485 - RNA, 19 nt, Artificial Sequence
  Description of Artificial Sequence: Synthetic oligonucleotide
  Sense strand starting at position 2559 of SEQ ID NO: 1560118
gggaauuaguggagugauc

SEQ ID NO: 1577486 - RNA, 19 nt, Artificial Sequence
  Description of Artificial Sequence: Synthetic oligonucleotide
  Antisense strand to SEQ ID NO: 1577485
gaucacuccacuaauuccc

SEQ ID NO: 1577487 - RNA, 19 nt, Artificial Sequence
  Description of Artificial Sequence: Synthetic oligonucleotide
  Sense strand starting at position 2561 of SEQ ID NO: 1560118
gaauuaguggagugaucuc

SEQ ID NO: 1577488 - RNA, 19 nt, Artificial Sequence
  Description of Artificial Sequence: Synthetic oligonucleotide
  Antisense strand to SEQ ID NO: 1577487
gagaucacuccacuaauuc

SEQ ID NO: 1577489 - RNA, 19 nt, Artificial Sequence
  Description of Artificial Sequence: Synthetic oligonucleotide
  Sense strand starting at position 2605 of SEQ ID NO: 1560118
gcugcuguggcugaaauuu

SEQ ID NO: 1577490 - RNA, 19 nt, Artificial Sequence
  Description of Artificial Sequence: Synthetic oligonucleotide
  Antisense strand to SEQ ID NO: 1577489
aaauuucagccacagcagc

SEQ ID NO: 1577491 - RNA, 19 nt, Artificial Sequence
  Description of Artificial Sequence: Synthetic oligonucleotide
  Sense strand starting at position 2630 of SEQ ID NO: 1560118
ucugaaguggcauggagau

SEQ ID NO: 1577492 - RNA, 19 nt, Artificial Sequence
  Description of Artificial Sequence: Synthetic oligonucleotide
  Antisense strand to SEQ ID NO: 1577491
aucuccaugccacuucaga

SEQ ID NO: 1577493 - RNA, 19 nt, Artificial Sequence
  Description of Artificial Sequence: Synthetic oligonucleotide
  Sense strand starting at position 2912 of SEQ ID NO: 1560118
gccugauuaagauggucca

SEQ ID NO: 1577494 - RNA, 19 nt, Artificial Sequence
  Description of Artificial Sequence: Synthetic oligonucleotide
  Antisense strand to SEQ ID NO: 1577493
uggaccaucuuaaucaggc

SEQ ID NO: 1577495 - RNA, 19 nt, Artificial Sequence
  Description of Artificial Sequence: Synthetic oligonucleotide
  Sense strand starting at position 2960 of SEQ ID NO: 1560118
ugcaaaugugggugaccuu

SEQ ID NO: 1577496 - RNA, 19 nt, Artificial Sequence
  Description of Artificial Sequence: Synthetic oligonucleotide
  Antisense strand to SEQ ID NO: 1577495
aaggucacccacauuugca

SEQ ID NO: 1577497 - RNA, 19 nt, Artificial Sequence
  Description of Artificial Sequence: Synthetic oligonucleotide
  Sense strand starting at position 2967 of SEQ ID NO: 1560118
gugggugaccuucgucuca

SEQ ID NO: 1577498 - RNA, 19 nt, Artificial Sequence
  Description of Artificial Sequence: Synthetic oligonucleotide
  Antisense strand to SEQ ID NO: 1577497
ugagacgaaggucacccac

SEQ ID NO: 1577499 - RNA, 19 nt, Artificial Sequence
  Description of Artificial Sequence: Synthetic oligonucleotide
  Sense strand starting at position 3116 of SEQ ID NO: 1560118
ccgacauaccuucggacua

SEQ ID NO: 1577500 - RNA, 19 nt, Artificial Sequence
  Description of Artificial Sequence: Synthetic oligonucleotide
  Antisense strand to SEQ ID NO: 1577499
uaguccgaagguaugucgg

SEQ ID NO: 1577501 - RNA, 19 nt, Artificial Sequence
  Description of Artificial Sequence: Synthetic oligonucleotide
  Sense strand starting at position 3128 of SEQ ID NO: 1560118
cggacuagugcagagcaaa

SEQ ID NO: 1577502 - RNA, 19 nt, Artificial Sequence
  Description of Artificial Sequence: Synthetic oligonucleotide
  Antisense strand to SEQ ID NO: 1577501
uuugcucugcacuaguccg

SEQ ID NO: 1577503 - RNA, 19 nt, Artificial Sequence
  Description of Artificial Sequence: Synthetic oligonucleotide
  Sense strand starting at position 3975 of SEQ ID NO: 1560118
gcaagaaacuaucucugca

SEQ ID NO: 1577504 - RNA, 19 nt, Artificial Sequence
  Description of Artificial Sequence: Synthetic oligonucleotide
  Antisense strand to SEQ ID NO: 1577503
ugcagagauaguuucuugc

SEQ ID NO: 1577505 - RNA, 19 nt, Artificial Sequence
  Description of Artificial Sequence: Synthetic oligonucleotide
  Sense strand starting at position 150 of SEQ ID NO: 1560119
ugaguaguacuuuagcaaa

SEQ ID NO: 1577506 - RNA, 19 nt, Artificial Sequence
  Description of Artificial Sequence: Synthetic oligonucleotide
  Antisense strand to SEQ ID NO: 1577505
uuugcuaaaguacuacuca

SEQ ID NO: 1577507 - RNA, 19 nt, Artificial Sequence
  Description of Artificial Sequence: Synthetic oligonucleotide
  Sense strand starting at position 152 of SEQ ID NO: 1560119
aguaguacuuuagcaaaug

SEQ ID NO: 1577508 - RNA, 19 nt, Artificial Sequence
  Description of Artificial Sequence: Synthetic oligonucleotide
  Antisense strand to SEQ ID NO: 1577507
cauuugcuaaaguacuacu

SEQ ID NO: 1577509 - RNA, 19 nt, Artificial Sequence
  Description of Artificial Sequence: Synthetic oligonucleotide
  Sense strand starting at position 460 of SEQ ID NO: 1560119
cguggauauggugaagacu

SEQ ID NO: 1577510 - RNA, 19 nt, Artificial Sequence
  Description of Artificial Sequence: Synthetic oligonucleotide
  Antisense strand to SEQ ID NO: 1577509
agucuucaccauauccacg

SEQ ID NO: 1577511 - RNA, 19 nt, Artificial Sequence
  Description of Artificial Sequence: Synthetic oligonucleotide
  Sense strand starting at position 656 of SEQ ID NO: 1560119
ggugaggcaugguuggauu

SEQ ID NO: 1577512 - RNA, 19 nt, Artificial Sequence
  Description of Artificial Sequence: Synthetic oligonucleotide
  Antisense strand to SEQ ID NO: 1577511
aauccaaccaugccucacc

SEQ ID NO: 1577513 - RNA, 19 nt, Artificial Sequence
  Description of Artificial Sequence: Synthetic oligonucleotide
  Sense strand starting at position 702 of SEQ ID NO: 1560119
ugcgaucugcuagaccaua

SEQ ID NO: 1577514 - RNA, 19 nt, Artificial Sequence
  Description of Artificial Sequence: Synthetic oligonucleotide
  Antisense strand to SEQ ID NO: 1577513
uauggucuagcagaucgca

SEQ ID NO: 1577515 - RNA, 19 nt, Artificial Sequence
  Description of Artificial Sequence: Synthetic oligonucleotide
  Sense strand starting at position 1106 of SEQ ID NO: 1560119
aagaaaucgcaagauuggu

SEQ ID NO: 1577516 - RNA, 19 nt, Artificial Sequence
  Description of Artificial Sequence: Synthetic oligonucleotide
  Antisense strand to SEQ ID NO: 1577515
accaaucuugcgauuucuu

SEQ ID NO: 1577517 - RNA, 19 nt, Artificial Sequence
  Description of Artificial Sequence: Synthetic oligonucleotide
  Sense strand starting at position 1114 of SEQ ID NO: 1560119
gcaagauugguuugggaca

SEQ ID NO: 1577518 - RNA, 19 nt, Artificial Sequence
  Description of Artificial Sequence: Synthetic oligonucleotide
  Antisense strand to SEQ ID NO: 1577517
ugucccaaaccaaucuugc

SEQ ID NO: 1577519 - RNA, 19 nt, Artificial Sequence
  Description of Artificial Sequence: Synthetic oligonucleotide
  Sense strand starting at position 1119 of SEQ ID NO: 1560119
auugguuugggacaaguuu

SEQ ID NO: 1577520 - RNA, 19 nt, Artificial Sequence
  Description of Artificial Sequence: Synthetic oligonucleotide
  Antisense strand to SEQ ID NO: 1577519
aaacuugucccaaaccaau

SEQ ID NO: 1577521 - RNA, 19 nt, Artificial Sequence
  Description of Artificial Sequence: Synthetic oligonucleotide
  Sense strand starting at position 1128 of SEQ ID NO: 1560119
ggacaaguuuaugucugaa

SEQ ID NO: 1577522 - RNA, 19 nt, Artificial Sequence
  Description of Artificial Sequence: Synthetic oligonucleotide
  Antisense strand to SEQ ID NO: 1577521
uucagacauaaacuugucc

SEQ ID NO: 1577523 - RNA, 19 nt, Artificial Sequence
  Description of Artificial Sequence: Synthetic oligonucleotide
  Sense strand starting at position 1130 of SEQ ID NO: 1560119
acaaguuuaugucugaaug

SEQ ID NO: 1577524 - RNA, 19 nt, Artificial Sequence
  Description of Artificial Sequence: Synthetic oligonucleotide
  Antisense strand to SEQ ID NO: 1577523
cauucagacauaaacuugu

SEQ ID NO: 1577525 - RNA, 19 nt, Artificial Sequence
  Description of Artificial Sequence: Synthetic oligonucleotide
  Sense strand starting at position 1169 of SEQ ID NO: 1560119
agaagagucggccaugaua

SEQ ID NO: 1577526 - RNA, 19 nt, Artificial Sequence
  Description of Artificial Sequence: Synthetic oligonucleotide
  Antisense strand to SEQ ID NO: 1577525
uaucauggccgacucuucu

SEQ ID NO: 1577527 - RNA, 19 nt, Artificial Sequence
  Description of Artificial Sequence: Synthetic oligonucleotide
  Sense strand starting at position 1171 of SEQ ID NO: 1560119
aagagucggccaugauaug

SEQ ID NO: 1577528 - RNA, 19 nt, Artificial Sequence
  Description of Artificial Sequence: Synthetic oligonucleotide
  Antisense strand to SEQ ID NO: 1577527
cauaucauggccgacucuu

SEQ ID NO: 1577529 - RNA, 19 nt, Artificial Sequence
  Description of Artificial Sequence: Synthetic oligonucleotide
  Sense strand starting at position 1182 of SEQ ID NO: 1560119
augauaugagucuggaguu

SEQ ID NO: 1577530 - RNA, 19 nt, Artificial Sequence
  Description of Artificial Sequence: Synthetic oligonucleotide
  Antisense strand to SEQ ID NO: 1577529
aacuccagacucauaucau

SEQ ID NO: 1577531 - RNA, 19 nt, Artificial Sequence
  Description of Artificial Sequence: Synthetic oligonucleotide
  Sense strand starting at position 1338 of SEQ ID NO: 1560119
ggcccaaagccacaguaau

SEQ ID NO: 1577532 - RNA, 19 nt, Artificial Sequence
  Description of Artificial Sequence: Synthetic oligonucleotide
  Antisense strand to SEQ ID NO: 1577531
auuacuguggcuuugggcc

SEQ ID NO: 1577533 - RNA, 19 nt, Artificial Sequence
  Description of Artificial Sequence: Synthetic oligonucleotide
  Sense strand starting at position 1351 of SEQ ID NO: 1560119
aguaaugaucaguggcaga

SEQ ID NO: 1577534 - RNA, 19 nt, Artificial Sequence
  Description of Artificial Sequence: Synthetic oligonucleotide
  Antisense strand to SEQ ID NO: 1577533
ucugccacugaucauuacu

SEQ ID NO: 1577535 - RNA, 19 nt, Artificial Sequence
  Description of Artificial Sequence: Synthetic oligonucleotide
  Sense strand starting at position 1415 of SEQ ID NO: 1560119
ucuuaaccaucaguagagu

SEQ ID NO: 1577536 - RNA, 19 nt, Artificial Sequence
  Description of Artificial Sequence: Synthetic oligonucleotide
  Antisense strand to SEQ ID NO: 1577535
acucuacugaugguuaaga

SEQ ID NO: 1577537 - RNA, 19 nt, Artificial Sequence
  Description of Artificial Sequence: Synthetic oligonucleotide
  Sense strand starting at position 1416 of SEQ ID NO: 1560119
cuuaaccaucaguagagua

SEQ ID NO: 1577538 - RNA, 19 nt, Artificial Sequence
  Description of Artificial Sequence: Synthetic oligonucleotide
  Antisense strand to SEQ ID NO: 1577537
uacucuacugaugguuaag

SEQ ID NO: 1577539 - RNA, 19 nt, Artificial Sequence
  Description of Artificial Sequence: Synthetic oligonucleotide
  Sense strand starting at position 1421 of SEQ ID NO: 1560119
ccaucaguagaguaaguuu

SEQ ID NO: 1577540 - RNA, 19 nt, Artificial Sequence
  Description of Artificial Sequence: Synthetic oligonucleotide
  Antisense strand to SEQ ID NO: 1577539
aaacuuacucuacugaugg

SEQ ID NO: 1577541 - RNA, 19 nt, Artificial Sequence
  Description of Artificial Sequence: Synthetic oligonucleotide
  Sense strand starting at position 1610 of SEQ ID NO: 1560119
aagcauagugcgcuguaau

SEQ ID NO: 1577542 - RNA, 19 nt, Artificial Sequence
  Description of Artificial Sequence: Synthetic oligonucleotide
  Antisense strand to SEQ ID NO: 1577541
auuacagcgcacuaugcuu

SEQ ID NO: 1577543 - RNA, 19 nt, Artificial Sequence
  Description of Artificial Sequence: Synthetic oligonucleotide
  Sense strand starting at position 2024 of SEQ ID NO: 1560119
cggcguucucgcuucugau

SEQ ID NO: 1577544 - RNA, 19 nt, Artificial Sequence
  Description of Artificial Sequence: Synthetic oligonucleotide
  Antisense strand to SEQ ID NO: 1577543
aucagaagcgagaacgccg

SEQ ID NO: 1577545 - RNA, 19 nt, Artificial Sequence
  Description of Artificial Sequence: Synthetic oligonucleotide
  Sense strand starting at position 2025 of SEQ ID NO: 1560119
ggcguucucgcuucugauu

SEQ ID NO: 1577546 - RNA, 19 nt, Artificial Sequence
  Description of Artificial Sequence: Synthetic oligonucleotide
  Antisense strand to SEQ ID NO: 1577545
aaucagaagcgagaacgcc

SEQ ID NO: 1577547 - RNA, 19 nt, Artificial Sequence
  Description of Artificial Sequence: Synthetic oligonucleotide
  Sense strand starting at position 2138 of SEQ ID NO: 1560119
ccaauuggcuaacuaagaa

SEQ ID NO: 1577548 - RNA, 19 nt, Artificial Sequence
  Description of Artificial Sequence: Synthetic oligonucleotide
  Antisense strand to SEQ ID NO: 1577547
uucuuaguuagccaauugg

SEQ ID NO: 1577549 - RNA, 19 nt, Artificial Sequence
  Description of Artificial Sequence: Synthetic oligonucleotide
  Sense strand starting at position 2153 of SEQ ID NO: 1560119
agaagaggcugucccaaau

SEQ ID NO: 1577550 - RNA, 19 nt, Artificial Sequence
  Description of Artificial Sequence: Synthetic oligonucleotide
  Antisense strand to SEQ ID NO: 1577549
auuugggacagccucuucu

SEQ ID NO: 1577551 - RNA, 19 nt, Artificial Sequence
  Description of Artificial Sequence: Synthetic oligonucleotide
  Sense strand starting at position 2440 of SEQ ID NO: 1560119
ugagauuugucaucgcuug

SEQ ID NO: 1577552 - RNA, 19 nt, Artificial Sequence
  Description of Artificial Sequence: Synthetic oligonucleotide
  Antisense strand to SEQ ID NO: 1577551
caagcgaugacaaaucuca

SEQ ID NO: 1577553 - RNA, 19 nt, Artificial Sequence
  Description of Artificial Sequence: Synthetic oligonucleotide
  Sense strand starting at position 2521 of SEQ ID NO: 1560119
ccugcaaaguuauuaugau

SEQ ID NO: 1577554 - RNA, 19 nt, Artificial Sequence
  Description of Artificial Sequence: Synthetic oligonucleotide
  Antisense strand to SEQ ID NO: 1577553
aucauaauaacuuugcagg

SEQ ID NO: 1577555 - RNA, 19 nt, Artificial Sequence
  Description of Artificial Sequence: Synthetic oligonucleotide
  Sense strand starting at position 2853 of SEQ ID NO: 1560119
cugacacaccucugugaug

SEQ ID NO: 1577556 - RNA, 19 nt, Artificial Sequence
  Description of Artificial Sequence: Synthetic oligonucleotide
  Antisense strand to SEQ ID NO: 1577555
caucacagaggugugucag

SEQ ID NO: 1577557 - RNA, 19 nt, Artificial Sequence
  Description of Artificial Sequence: Synthetic oligonucleotide
  Sense strand starting at position 2855 of SEQ ID NO: 1560119
gacacaccucugugauguu

SEQ ID NO: 1577558 - RNA, 19 nt, Artificial Sequence
  Description of Artificial Sequence: Synthetic oligonucleotide
  Antisense strand to SEQ ID NO: 1577557
aacaucacagagguguguc

SEQ ID NO: 1577559 - RNA, 19 nt, Artificial Sequence
  Description of Artificial Sequence: Synthetic oligonucleotide
  Sense strand starting at position 2930 of SEQ ID NO: 1560119
guuaucuuuccucuagcgu

SEQ ID NO: 1577560 - RNA, 19 nt, Artificial Sequence
  Description of Artificial Sequence: Synthetic oligonucleotide
  Antisense strand to SEQ ID NO: 1577559
acgcuagaggaaagauaac

SEQ ID NO: 1577561 - RNA, 19 nt, Artificial Sequence
  Description of Artificial Sequence: Synthetic oligonucleotide
  Sense strand starting at position 3006 of SEQ ID NO: 1560119
aucaguauuggugauguua

SEQ ID NO: 1577562 - RNA, 19 nt, Artificial Sequence
  Description of Artificial Sequence: Synthetic oligonucleotide
  Antisense strand to SEQ ID NO: 1577561
uaacaucaccaauacugau

SEQ ID NO: 1577563 - RNA, 19 nt, Artificial Sequence
  Description of Artificial Sequence: Synthetic oligonucleotide
  Sense strand starting at position 3015 of SEQ ID NO: 1560119
ggugauguuauugaagucu

SEQ ID NO: 1577564 - RNA, 19 nt, Artificial Sequence
  Description of Artificial Sequence: Synthetic oligonucleotide
  Antisense strand to SEQ ID NO: 1577563
agacuucaauaacaucacc

SEQ ID NO: 1577565 - RNA, 19 nt, Artificial Sequence
  Description of Artificial Sequence: Synthetic oligonucleotide
  Sense strand starting at position 3128 of SEQ ID NO: 1560119
ccugaaccaccuggugaaa

SEQ ID NO: 1577566 - RNA, 19 nt, Artificial Sequence
  Description of Artificial Sequence: Synthetic oligonucleotide
  Antisense strand to SEQ ID NO: 1577565
uuucaccaggugguucagg

SEQ ID NO: 1577567 - RNA, 19 nt, Artificial Sequence
  Description of Artificial Sequence: Synthetic oligonucleotide
  Sense strand starting at position 3752 of SEQ ID NO: 1560119
ugacauuucuguuacacag

SEQ ID NO: 1577568 - RNA, 19 nt, Artificial Sequence
  Description of Artificial Sequence: Synthetic oligonucleotide
  Antisense strand to SEQ ID NO: 1577567
cuguguaacagaaauguca

SEQ ID NO: 1577569 - RNA, 19 nt, Artificial Sequence
  Description of Artificial Sequence: Synthetic oligonucleotide
  Sense strand starting at position 3860 of SEQ ID NO: 1560119
gaagcauuccgggaagcca

SEQ ID NO: 1577570 - RNA, 19 nt, Artificial Sequence
  Description of Artificial Sequence: Synthetic oligonucleotide
  Antisense strand to SEQ ID NO: 1577569
uggcuucccggaaugcuuc

SEQ ID NO: 1577571 - RNA, 19 nt, Artificial Sequence
  Description of Artificial Sequence: Synthetic oligonucleotide
  Sense strand starting at position 3874 of SEQ ID NO: 1560119
agccauuucuacgccauga

SEQ ID NO: 1577572 - RNA, 19 nt, Artificial Sequence
  Description of Artificial Sequence: Synthetic oligonucleotide
  Antisense strand to SEQ ID NO: 1577571
ucauggcguagaaauggcu

SEQ ID NO: 1577573 - RNA, 19 nt, Artificial Sequence
  Description of Artificial Sequence: Synthetic oligonucleotide
  Sense strand starting at position 3894 of SEQ ID NO: 1560119
aacuaauuaggugguuuaa

SEQ ID NO: 1577574 - RNA, 19 nt, Artificial Sequence
  Description of Artificial Sequence: Synthetic oligonucleotide
  Antisense strand to SEQ ID NO: 1577573
uuaaaccaccuaauuaguu

SEQ ID NO: 1577575 - RNA, 19 nt, Artificial Sequence
  Description of Artificial Sequence: Synthetic oligonucleotide
  Sense strand starting at position 3896 of SEQ ID NO: 1560119
cuaauuaggugguuuaagu

SEQ ID NO: 1577576 - RNA, 19 nt, Artificial Sequence
  Description of Artificial Sequence: Synthetic oligonucleotide
  Antisense strand to SEQ ID NO: 1577575
acuuaaaccaccuaauuag

SEQ ID NO: 1577577 - RNA, 19 nt, Artificial Sequence
  Description of Artificial Sequence: Synthetic oligonucleotide
  Sense strand starting at position 3905 of SEQ ID NO: 1560119
ugguuuaaguauccgagaa

SEQ ID NO: 1577578 - RNA, 19 nt, Artificial Sequence
  Description of Artificial Sequence: Synthetic oligonucleotide
  Antisense strand to SEQ ID NO: 1577577
uucucggauacuuaaacca

SEQ ID NO: 1577579 - RNA, 19 nt, Artificial Sequence
  Description of Artificial Sequence: Synthetic oligonucleotide
  Sense strand starting at position 3906 of SEQ ID NO: 1560119
gguuuaaguauccgagaag

SEQ ID NO: 1577580 - RNA, 19 nt, Artificial Sequence
  Description of Artificial Sequence: Synthetic oligonucleotide
  Antisense strand to SEQ ID NO: 1577579
cuucucggauacuuaaacc

SEQ ID NO: 1577581 - RNA, 19 nt, Artificial Sequence
  Description of Artificial Sequence: Synthetic oligonucleotide
  Sense strand starting at position 3909 of SEQ ID NO: 1560119
uuaaguauccgagaaguau

SEQ ID NO: 1577582 - RNA, 19 nt, Artificial Sequence
  Description of Artificial Sequence: Synthetic oligonucleotide
  Antisense strand to SEQ ID NO: 1577581
auacuucucggauacuuaa

SEQ ID NO: 1577583 - RNA, 19 nt, Artificial Sequence
  Description of Artificial Sequence: Synthetic oligonucleotide
  Sense strand starting at position 3913 of SEQ ID NO: 1560119
guauccgagaaguaucuau

SEQ ID NO: 1577584 - RNA, 19 nt, Artificial Sequence
  Description of Artificial Sequence: Synthetic oligonucleotide
  Antisense strand to SEQ ID NO: 1577583
auagauacuucucggauac

SEQ ID NO: 1577585 - RNA, 19 nt, Artificial Sequence
  Description of Artificial Sequence: Synthetic oligonucleotide
  Sense strand starting at position 2 of SEQ ID NO: 1560120
gguuaucugugcccuguga

SEQ ID NO: 1577586 - RNA, 19 nt, Artificial Sequence
  Description of Artificial Sequence: Synthetic oligonucleotide
  Antisense strand to SEQ ID NO: 1577585
ucacagggcacagauaacc

SEQ ID NO: 1577587 - RNA, 19 nt, Artificial Sequence
  Description of Artificial Sequence: Synthetic oligonucleotide
  Sense strand starting at position 37 of SEQ ID NO: 1560120
gccucugcccucugauuau

SEQ ID NO: 1577588 - RNA, 19 nt, Artificial Sequence
  Description of Artificial Sequence: Synthetic oligonucleotide
  Antisense strand to SEQ ID NO: 1577587
auaaucagagggcagaggc

SEQ ID NO: 1577589 - RNA, 19 nt, Artificial Sequence
  Description of Artificial Sequence: Synthetic oligonucleotide
  Sense strand starting at position 424 of SEQ ID NO: 1560120
cccucuggcgccgaugaua

SEQ ID NO: 1577590 - RNA, 19 nt, Artificial Sequence
  Description of Artificial Sequence: Synthetic oligonucleotide
  Antisense strand to SEQ ID NO: 1577589
uaucaucggcgccagaggg

SEQ ID NO: 1577591 - RNA, 19 nt, Artificial Sequence
  Description of Artificial Sequence: Synthetic oligonucleotide
  Sense strand starting at position 542 of SEQ ID NO: 1560120
aggacaccuggcugacaua

SEQ ID NO: 1577592 - RNA, 19 nt, Artificial Sequence
  Description of Artificial Sequence: Synthetic oligonucleotide
  Antisense strand to SEQ ID NO: 1577591
uaugucagccagguguccu

SEQ ID NO: 1577593 - RNA, 19 nt, Artificial Sequence
  Description of Artificial Sequence: Synthetic oligonucleotide
  Sense strand starting at position 596 of SEQ ID NO: 1560120
ccagguuguccucaaacau

SEQ ID NO: 1577594 - RNA, 19 nt, Artificial Sequence
  Description of Artificial Sequence: Synthetic oligonucleotide
  Antisense strand to SEQ ID NO: 1577593
auguuugaggacaaccugg

SEQ ID NO: 1577595 - RNA, 19 nt, Artificial Sequence
  Description of Artificial Sequence: Synthetic oligonucleotide
  Sense strand starting at position 688 of SEQ ID NO: 1560120
ucgaccaguuccucaucau

SEQ ID NO: 1577596 - RNA, 19 nt, Artificial Sequence
  Description of Artificial Sequence: Synthetic oligonucleotide
  Antisense strand to SEQ ID NO: 1577595
augaugaggaacuggucga

SEQ ID NO: 1577597 - RNA, 19 nt, Artificial Sequence
  Description of Artificial Sequence: Synthetic oligonucleotide
  Sense strand starting at position 689 of SEQ ID NO: 1560120
cgaccaguuccucaucauc

SEQ ID NO: 1577598 - RNA, 19 nt, Artificial Sequence
  Description of Artificial Sequence: Synthetic oligonucleotide
  Antisense strand to SEQ ID NO: 1577597
gaugaugaggaacuggucg

SEQ ID NO: 1577599 - RNA, 19 nt, Artificial Sequence
  Description of Artificial Sequence: Synthetic oligonucleotide
  Sense strand starting at position 719 of SEQ ID NO: 1560120
ggucgcuucccaggaacuu

SEQ ID NO: 1577600 - RNA, 19 nt, Artificial Sequence
  Description of Artificial Sequence: Synthetic oligonucleotide
  Antisense strand to SEQ ID NO: 1577599
aaguuccugggaagcgacc

SEQ ID NO: 1577601 - RNA, 19 nt, Artificial Sequence
  Description of Artificial Sequence: Synthetic oligonucleotide
  Sense strand starting at position 959 of SEQ ID NO: 1560120
gggugcucuucuccaugau

SEQ ID NO: 1577602 - RNA, 19 nt, Artificial Sequence
  Description of Artificial Sequence: Synthetic oligonucleotide
  Antisense strand to SEQ ID NO: 1577601
aucauggagaagagcaccc

SEQ ID NO: 1577603 - RNA, 19 nt, Artificial Sequence
  Description of Artificial Sequence: Synthetic oligonucleotide
  Sense strand starting at position 1035 of SEQ ID NO: 1560120
ccgaaauucugcuuccuug

SEQ ID NO: 1577604 - RNA, 19 nt, Artificial Sequence
  Description of Artificial Sequence: Synthetic oligonucleotide
  Antisense strand to SEQ ID NO: 1577603
caaggaagcagaauuucgg

SEQ ID NO: 1577605 - RNA, 19 nt, Artificial Sequence
  Description of Artificial Sequence: Synthetic oligonucleotide
  Sense strand starting at position 1058 of SEQ ID NO: 1560120
cgggcuuagagaugacucu

SEQ ID NO: 1577606 - RNA, 19 nt, Artificial Sequence
  Description of Artificial Sequence: Synthetic oligonucleotide
  Antisense strand to SEQ ID NO: 1577605
agagucaucucuaagcccg

SEQ ID NO: 1577607 - RNA, 19 nt, Artificial Sequence
  Description of Artificial Sequence: Synthetic oligonucleotide
  Sense strand starting at position 1181 of SEQ ID NO: 1560120
ccuugccgaucuucuuaaa

SEQ ID NO: 1577608 - RNA, 19 nt, Artificial Sequence
  Description of Artificial Sequence: Synthetic oligonucleotide
  Antisense strand to SEQ ID NO: 1577607
uuuaagaagaucggcaagg

SEQ ID NO: 1577609 - RNA, 19 nt, Artificial Sequence
  Description of Artificial Sequence: Synthetic oligonucleotide
  Sense strand starting at position 1334 of SEQ ID NO: 1560120
ucucgagagucuuuaagau

SEQ ID NO: 1577610 - RNA, 19 nt, Artificial Sequence
  Description of Artificial Sequence: Synthetic oligonucleotide
  Antisense strand to SEQ ID NO: 1577609
aucuuaaagacucucgaga

SEQ ID NO: 1577611 - RNA, 19 nt, Artificial Sequence
  Description of Artificial Sequence: Synthetic oligonucleotide
  Sense strand starting at position 1343 of SEQ ID NO: 1560120
ucuuuaagaucuccagggu

SEQ ID NO: 1577612 - RNA, 19 nt, Artificial Sequence
  Description of Artificial Sequence: Synthetic oligonucleotide
  Antisense strand to SEQ ID NO: 1577611
acccuggagaucuuaaaga

SEQ ID NO: 1577613 - RNA, 19 nt, Artificial Sequence
  Description of Artificial Sequence: Synthetic oligonucleotide
  Sense strand starting at position 1346 of SEQ ID NO: 1560120
uuaagaucuccagggugau

SEQ ID NO: 1577614 - RNA, 19 nt, Artificial Sequence
  Description of Artificial Sequence: Synthetic oligonucleotide
  Antisense strand to SEQ ID NO: 1577613
aucacccuggagaucuuaa

SEQ ID NO: 1577615 - RNA, 19 nt, Artificial Sequence
  Description of Artificial Sequence: Synthetic oligonucleotide
  Sense strand starting at position 1347 of SEQ ID NO: 1560120
uaagaucuccagggugaua

SEQ ID NO: 1577616 - RNA, 19 nt, Artificial Sequence
  Description of Artificial Sequence: Synthetic oligonucleotide
  Antisense strand to SEQ ID NO: 1577615
uaucacccuggagaucuua

SEQ ID NO: 1577617 - RNA, 19 nt, Artificial Sequence
  Description of Artificial Sequence: Synthetic oligonucleotide
  Sense strand starting at position 1500 of SEQ ID NO: 1560120
ccaaucucuucgccugcaa

SEQ ID NO: 1577618 - RNA, 19 nt, Artificial Sequence
  Description of Artificial Sequence: Synthetic oligonucleotide
  Antisense strand to SEQ ID NO: 1577617
uugcaggcgaagagauugg

SEQ ID NO: 1577619 - RNA, 19 nt, Artificial Sequence
  Description of Artificial Sequence: Synthetic oligonucleotide
  Sense strand starting at position 1643 of SEQ ID NO: 1560120
cguggugucccagcuccaa

SEQ ID NO: 1577620 - RNA, 19 nt, Artificial Sequence
  Description of Artificial Sequence: Synthetic oligonucleotide
  Antisense strand to SEQ ID NO: 1577619
uuggagcugggacaccacg

SEQ ID NO: 1577621 - RNA, 19 nt, Artificial Sequence
  Description of Artificial Sequence: Synthetic oligonucleotide
  Sense strand starting at position 2159 of SEQ ID NO: 1560120
auccgaaaugugcaaguuu

SEQ ID NO: 1577622 - RNA, 19 nt, Artificial Sequence
  Description of Artificial Sequence: Synthetic oligonucleotide
  Antisense strand to SEQ ID NO: 1577621
aaacuugcacauuucggau

SEQ ID NO: 1577623 - RNA, 19 nt, Artificial Sequence
  Description of Artificial Sequence: Synthetic oligonucleotide
  Sense strand starting at position 2282 of SEQ ID NO: 1560120
accuauaugcguggguaga

SEQ ID NO: 1577624 - RNA, 19 nt, Artificial Sequence
  Description of Artificial Sequence: Synthetic oligonucleotide
  Antisense strand to SEQ ID NO: 1577623
ucuacccacgcauauaggu

SEQ ID NO: 1577625 - RNA, 19 nt, Artificial Sequence
  Description of Artificial Sequence: Synthetic oligonucleotide
  Sense strand starting at position 2284 of SEQ ID NO: 1560120
cuauaugcguggguagaga

SEQ ID NO: 1577626 - RNA, 19 nt, Artificial Sequence
  Description of Artificial Sequence: Synthetic oligonucleotide
  Antisense strand to SEQ ID NO: 1577625
ucucuacccacgcauauag

SEQ ID NO: 1577627 - RNA, 19 nt, Artificial Sequence
  Description of Artificial Sequence: Synthetic oligonucleotide
  Sense strand starting at position 2720 of SEQ ID NO: 1560120
aguagagacugccucuauu

SEQ ID NO: 1577628 - RNA, 19 nt, Artificial Sequence
  Description of Artificial Sequence: Synthetic oligonucleotide
  Antisense strand to SEQ ID NO: 1577627
aauagaggcagucucuacu

SEQ ID NO: 1577629 - RNA, 19 nt, Artificial Sequence
  Description of Artificial Sequence: Synthetic oligonucleotide
  Sense strand starting at position 2746 of SEQ ID NO: 1560120
aguaucuuacagugaaaua

SEQ ID NO: 1577630 - RNA, 19 nt, Artificial Sequence
  Description of Artificial Sequence: Synthetic oligonucleotide
  Antisense strand to SEQ ID NO: 1577629
uauuucacuguaagauacu

SEQ ID NO: 1577631 - RNA, 19 nt, Artificial Sequence
  Description of Artificial Sequence: Synthetic oligonucleotide
  Sense strand starting at position 2796 of SEQ ID NO: 1560120
uaaggauaggcacgguuua

SEQ ID NO: 1577632 - RNA, 19 nt, Artificial Sequence
  Description of Artificial Sequence: Synthetic oligonucleotide
  Antisense strand to SEQ ID NO: 1577631
uaaaccgugccuauccuua

SEQ ID NO: 1577633 - RNA, 19 nt, Artificial Sequence
  Description of Artificial Sequence: Synthetic oligonucleotide
  Sense strand starting at position 2847 of SEQ ID NO: 1560120
cagugcuuucuaugaauga

SEQ ID NO: 1577634 - RNA, 19 nt, Artificial Sequence
  Description of Artificial Sequence: Synthetic oligonucleotide
  Antisense strand to SEQ ID NO: 1577633
ucauucauagaaagcacug

SEQ ID NO: 1577635 - RNA, 19 nt, Artificial Sequence
  Description of Artificial Sequence: Synthetic oligonucleotide
  Sense strand starting at position 2868 of SEQ ID NO: 1560120
ucaggaaauccuugcuaua

SEQ ID NO: 1577636 - RNA, 19 nt, Artificial Sequence
  Description of Artificial Sequence: Synthetic oligonucleotide
  Antisense strand to SEQ ID NO: 1577635
uauagcaaggauuuccuga

SEQ ID NO: 1577637 - RNA, 19 nt, Artificial Sequence
  Description of Artificial Sequence: Synthetic oligonucleotide
  Sense strand starting at position 2870 of SEQ ID NO: 1560120
aggaaauccuugcuauaac

SEQ ID NO: 1577638 - RNA, 19 nt, Artificial Sequence
  Description of Artificial Sequence: Synthetic oligonucleotide
  Antisense strand to SEQ ID NO: 1577637
guuauagcaaggauuuccu

SEQ ID NO: 1577639 - RNA, 19 nt, Artificial Sequence
  Description of Artificial Sequence: Synthetic oligonucleotide
  Sense strand starting at position 2895 of SEQ ID NO: 1560120
cugguagcaugaguacaau

SEQ ID NO: 1577640 - RNA, 19 nt, Artificial Sequence
  Description of Artificial Sequence: Synthetic oligonucleotide
  Antisense strand to SEQ ID NO: 1577639
auuguacucaugcuaccag

SEQ ID NO: 1577641 - RNA, 19 nt, Artificial Sequence
  Description of Artificial Sequence: Synthetic oligonucleotide
  Sense strand starting at position 2916 of SEQ ID NO: 1560120
ccauuagacagcugaggaa

SEQ ID NO: 1577642 - RNA, 19 nt, Artificial Sequence
  Description of Artificial Sequence: Synthetic oligonucleotide
  Antisense strand to SEQ ID NO: 1577641
uuccucagcugucuaaugg

SEQ ID NO: 1577643 - RNA, 19 nt, Artificial Sequence
  Description of Artificial Sequence: Synthetic oligonucleotide
  Sense strand starting at position 2982 of SEQ ID NO: 1560120
gggagugguugaguuugga

SEQ ID NO: 1577644 - RNA, 19 nt, Artificial Sequence
  Description of Artificial Sequence: Synthetic oligonucleotide
  Antisense strand to SEQ ID NO: 1577643
uccaaacucaaccacuccc

SEQ ID NO: 1577645 - RNA, 19 nt, Artificial Sequence
  Description of Artificial Sequence: Synthetic oligonucleotide
  Sense strand starting at position 2992 of SEQ ID NO: 1560120
gaguuuggauuugaaucca

SEQ ID NO: 1577646 - RNA, 19 nt, Artificial Sequence
  Description of Artificial Sequence: Synthetic oligonucleotide
  Antisense strand to SEQ ID NO: 1577645
uggauucaaauccaaacuc

SEQ ID NO: 1577647 - RNA, 19 nt, Artificial Sequence
  Description of Artificial Sequence: Synthetic oligonucleotide
  Sense strand starting at position 3007 of SEQ ID NO: 1560120
uccagaauagucugccuuu

SEQ ID NO: 1577648 - RNA, 19 nt, Artificial Sequence
  Description of Artificial Sequence: Synthetic oligonucleotide
  Antisense strand to SEQ ID NO: 1577647
aaaggcagacuauucugga

SEQ ID NO: 1577649 - RNA, 19 nt, Artificial Sequence
  Description of Artificial Sequence: Synthetic oligonucleotide
  Sense strand starting at position 3383 of SEQ ID NO: 1560120
aaccaaugcuagucgcauu

SEQ ID NO: 1577650 - RNA, 19 nt, Artificial Sequence
  Description of Artificial Sequence: Synthetic oligonucleotide
  Antisense strand to SEQ ID NO: 1577649
aaugcgacuagcauugguu

SEQ ID NO: 1577651 - RNA, 19 nt, Artificial Sequence
  Description of Artificial Sequence: Synthetic oligonucleotide
  Sense strand starting at position 3499 of SEQ ID NO: 1560120
uccuuaacccagugucuga

SEQ ID NO: 1577652 - RNA, 19 nt, Artificial Sequence
  Description of Artificial Sequence: Synthetic oligonucleotide
  Antisense strand to SEQ ID NO: 1577651
ucagacacuggguuaagga

SEQ ID NO: 1577653 - RNA, 19 nt, Artificial Sequence
  Description of Artificial Sequence: Synthetic oligonucleotide
  Sense strand starting at position 3547 of SEQ ID NO: 1560120
aggacaugcgacuagcauu

SEQ ID NO: 1577654 - RNA, 19 nt, Artificial Sequence
  Description of Artificial Sequence: Synthetic oligonucleotide
  Antisense strand to SEQ ID NO: 1577653
aaugcuagucgcauguccu

SEQ ID NO: 1577655 - RNA, 19 nt, Artificial Sequence
  Description of Artificial Sequence: Synthetic oligonucleotide
  Sense strand starting at position 3560 of SEQ ID NO: 1560120
agcauugguccacaucuuu

SEQ ID NO: 1577656 - RNA, 19 nt, Artificial Sequence
  Description of Artificial Sequence: Synthetic oligonucleotide
  Antisense strand to SEQ ID NO: 1577655
aaagauguggaccaaugcu

SEQ ID NO: 1577657 - RNA, 19 nt, Artificial Sequence
  Description of Artificial Sequence: Synthetic oligonucleotide
  Sense strand starting at position 3602 of SEQ ID NO: 1560120
uugaauaggccucguuguu

SEQ ID NO: 1577658 - RNA, 19 nt, Artificial Sequence
  Description of Artificial Sequence: Synthetic oligonucleotide
  Antisense strand to SEQ ID NO: 1577657
aacaacgaggccuauucaa

SEQ ID NO: 1577659 - RNA, 19 nt, Artificial Sequence
  Description of Artificial Sequence: Synthetic oligonucleotide
  Sense strand starting at position 3709 of SEQ ID NO: 1560120
cucugagugguggaucuaa

SEQ ID NO: 1577660 - RNA, 19 nt, Artificial Sequence
  Description of Artificial Sequence: Synthetic oligonucleotide
  Antisense strand to SEQ ID NO: 1577659
uuagauccaccacucagag

SEQ ID NO: 1577661 - RNA, 19 nt, Artificial Sequence
  Description of Artificial Sequence: Synthetic oligonucleotide
  Sense strand starting at position 3744 of SEQ ID NO: 1560120
gaucuugggcacuagcauu

SEQ ID NO: 1577662 - RNA, 19 nt, Artificial Sequence
  Description of Artificial Sequence: Synthetic oligonucleotide
  Antisense strand to SEQ ID NO: 1577661
aaugcuagugcccaagauc

SEQ ID NO: 1577663 - RNA, 19 nt, Artificial Sequence
  Description of Artificial Sequence: Synthetic oligonucleotide
  Sense strand starting at position 3860 of SEQ ID NO: 1560120
uugccuggauguguacaaa

SEQ ID NO: 1577664 - RNA, 19 nt, Artificial Sequence
  Description of Artificial Sequence: Synthetic oligonucleotide
  Antisense strand to SEQ ID NO: 1577663
uuuguacacauccaggcaa

SEQ ID NO: 1577665 - RNA, 19 nt, Artificial Sequence
  Description of Artificial Sequence: Synthetic oligonucleotide
  Sense strand starting at position 214 of SEQ ID NO: 1560121
gcgggauccucacagccau

SEQ ID NO: 1577666 - RNA, 19 nt, Artificial Sequence
  Description of Artificial Sequence: Synthetic oligonucleotide
  Antisense strand to SEQ ID NO: 1577665
auggcugugaggaucccgc

SEQ ID NO: 1577667 - RNA, 19 nt, Artificial Sequence
  Description of Artificial Sequence: Synthetic oligonucleotide
  Sense strand starting at position 438 of SEQ ID NO: 1560121
ccuccaaaggcugauucua

SEQ ID NO: 1577668 - RNA, 19 nt, Artificial Sequence
  Description of Artificial Sequence: Synthetic oligonucleotide
  Antisense strand to SEQ ID NO: 1577667
uagaaucagccuuuggagg

SEQ ID NO: 1577669 - RNA, 19 nt, Artificial Sequence
  Description of Artificial Sequence: Synthetic oligonucleotide
  Sense strand starting at position 493 of SEQ ID NO: 1560121
cggguucccuaucucaaga

SEQ ID NO: 1577670 - RNA, 19 nt, Artificial Sequence
  Description of Artificial Sequence: Synthetic oligonucleotide
  Antisense strand to SEQ ID NO: 1577669
ucuugagauagggaacccg

SEQ ID NO: 1577671 - RNA, 19 nt, Artificial Sequence
  Description of Artificial Sequence: Synthetic oligonucleotide
  Sense strand starting at position 495 of SEQ ID NO: 1560121
gguucccuaucucaagaga

SEQ ID NO: 1577672 - RNA, 19 nt, Artificial Sequence
  Description of Artificial Sequence: Synthetic oligonucleotide
  Antisense strand to SEQ ID NO: 1577671
ucucuugagauagggaacc

SEQ ID NO: 1577673 - RNA, 19 nt, Artificial Sequence
  Description of Artificial Sequence: Synthetic oligonucleotide
  Sense strand starting at position 498 of SEQ ID NO: 1560121
ucccuaucucaagagaguu

SEQ ID NO: 1577674 - RNA, 19 nt, Artificial Sequence
  Description of Artificial Sequence: Synthetic oligonucleotide
  Antisense strand to SEQ ID NO: 1577673
aacucucuugagauaggga

SEQ ID NO: 1577675 - RNA, 19 nt, Artificial Sequence
  Description of Artificial Sequence: Synthetic oligonucleotide
  Sense strand starting at position 506 of SEQ ID NO: 1560121
ucaagagaguuccaacuac

SEQ ID NO: 1577676 - RNA, 19 nt, Artificial Sequence
  Description of Artificial Sequence: Synthetic oligonucleotide
  Antisense strand to SEQ ID NO: 1577675
guaguuggaacucucuuga

SEQ ID NO: 1577677 - RNA, 19 nt, Artificial Sequence
  Description of Artificial Sequence: Synthetic oligonucleotide
  Sense strand starting at position 588 of SEQ ID NO: 1560121
cucucauauccaggcgaau

SEQ ID NO: 1577678 - RNA, 19 nt, Artificial Sequence
  Description of Artificial Sequence: Synthetic oligonucleotide
  Antisense strand to SEQ ID NO: 1577677
auucgccuggauaugagag

SEQ ID NO: 1577679 - RNA, 19 nt, Artificial Sequence
  Description of Artificial Sequence: Synthetic oligonucleotide
  Sense strand starting at position 591 of SEQ ID NO: 1560121
ucauauccaggcgaauauu

SEQ ID NO: 1577680 - RNA, 19 nt, Artificial Sequence
  Description of Artificial Sequence: Synthetic oligonucleotide
  Antisense strand to SEQ ID NO: 1577679
aauauucgccuggauauga

SEQ ID NO: 1577681 - RNA, 19 nt, Artificial Sequence
  Description of Artificial Sequence: Synthetic oligonucleotide
  Sense strand starting at position 674 of SEQ ID NO: 1560121
acucuuauuggcugcccaa

SEQ ID NO: 1577682 - RNA, 19 nt, Artificial Sequence
  Description of Artificial Sequence: Synthetic oligonucleotide
  Antisense strand to SEQ ID NO: 1577681
uugggcagccaauaagagu

SEQ ID NO: 1577683 - RNA, 19 nt, Artificial Sequence
  Description of Artificial Sequence: Synthetic oligonucleotide
  Sense strand starting at position 686 of SEQ ID NO: 1560121
ugcccaagcucucagagaa

SEQ ID NO: 1577684 - RNA, 19 nt, Artificial Sequence
  Description of Artificial Sequence: Synthetic oligonucleotide
  Antisense strand to SEQ ID NO: 1577683
uucucugagagcuugggca

SEQ ID NO: 1577685 - RNA, 19 nt, Artificial Sequence
  Description of Artificial Sequence: Synthetic oligonucleotide
  Sense strand starting at position 787 of SEQ ID NO: 1560121
ccgaaaggauucuguacac

SEQ ID NO: 1577686 - RNA, 19 nt, Artificial Sequence
  Description of Artificial Sequence: Synthetic oligonucleotide
  Antisense strand to SEQ ID NO: 1577685
guguacagaauccuuucgg

SEQ ID NO: 1577687 - RNA, 19 nt, Artificial Sequence
  Description of Artificial Sequence: Synthetic oligonucleotide
  Sense strand starting at position 928 of SEQ ID NO: 1560121
ccucaauccggcugggaau

SEQ ID NO: 1577688 - RNA, 19 nt, Artificial Sequence
  Description of Artificial Sequence: Synthetic oligonucleotide
  Antisense strand to SEQ ID NO: 1577687
auucccagccggauugagg

SEQ ID NO: 1577689 - RNA, 19 nt, Artificial Sequence
  Description of Artificial Sequence: Synthetic oligonucleotide
  Sense strand starting at position 1021 of SEQ ID NO: 1560121
cgccuuucccgccagacuu

SEQ ID NO: 1577690 - RNA, 19 nt, Artificial Sequence
  Description of Artificial Sequence: Synthetic oligonucleotide
  Antisense strand to SEQ ID NO: 1577689
aagucuggcgggaaaggcg

SEQ ID NO: 1577691 - RNA, 19 nt, Artificial Sequence
  Description of Artificial Sequence: Synthetic oligonucleotide
  Sense strand starting at position 1357 of SEQ ID NO: 1560121
gcccguggcucagacgaaa

SEQ ID NO: 1577692 - RNA, 19 nt, Artificial Sequence
  Description of Artificial Sequence: Synthetic oligonucleotide
  Antisense strand to SEQ ID NO: 1577691
uuucgucugagccacgggc

SEQ ID NO: 1577693 - RNA, 19 nt, Artificial Sequence
  Description of Artificial Sequence: Synthetic oligonucleotide
  Sense strand starting at position 1488 of SEQ ID NO: 1560121
caacgucccggccaagaau

SEQ ID NO: 1577694 - RNA, 19 nt, Artificial Sequence
  Description of Artificial Sequence: Synthetic oligonucleotide
  Antisense strand to SEQ ID NO: 1577693
auucuuggccgggacguug

SEQ ID NO: 1577695 - RNA, 19 nt, Artificial Sequence
  Description of Artificial Sequence: Synthetic oligonucleotide
  Sense strand starting at position 2194 of SEQ ID NO: 1560121
ccucauuccugguuucuau

SEQ ID NO: 1577696 - RNA, 19 nt, Artificial Sequence
  Description of Artificial Sequence: Synthetic oligonucleotide
  Antisense strand to SEQ ID NO: 1577695
auagaaaccaggaaugagg

SEQ ID NO: 1577697 - RNA, 19 nt, Artificial Sequence
  Description of Artificial Sequence: Synthetic oligonucleotide
  Sense strand starting at position 2201 of SEQ ID NO: 1560121
ccugguuucuaucaguaga

SEQ ID NO: 1577698 - RNA, 19 nt, Artificial Sequence
  Description of Artificial Sequence: Synthetic oligonucleotide
  Antisense strand to SEQ ID NO: 1577697
ucuacugauagaaaccagg

SEQ ID NO: 1577699 - RNA, 19 nt, Artificial Sequence
  Description of Artificial Sequence: Synthetic oligonucleotide
  Sense strand starting at position 2203 of SEQ ID NO: 1560121
ugguuucuaucaguagaug

SEQ ID NO: 1577700 - RNA, 19 nt, Artificial Sequence
  Description of Artificial Sequence: Synthetic oligonucleotide
  Antisense strand to SEQ ID NO: 1577699
caucuacugauagaaacca

SEQ ID NO: 1577701 - RNA, 19 nt, Artificial Sequence
  Description of Artificial Sequence: Synthetic oligonucleotide
  Sense strand starting at position 2283 of SEQ ID NO: 1560121
aaccuuagaguucgcuuua

SEQ ID NO: 1577702 - RNA, 19 nt, Artificial Sequence
  Description of Artificial Sequence: Synthetic oligonucleotide
  Antisense strand to SEQ ID NO: 1577701
uaaagcgaacucuaagguu

SEQ ID NO: 1577703 - RNA, 19 nt, Artificial Sequence
  Description of Artificial Sequence: Synthetic oligonucleotide
  Sense strand starting at position 2288 of SEQ ID NO: 1560121
uagaguucgcuuuagaagc

SEQ ID NO: 1577704 - RNA, 19 nt, Artificial Sequence
  Description of Artificial Sequence: Synthetic oligonucleotide
  Antisense strand to SEQ ID NO: 1577703
gcuucuaaagcgaacucua

SEQ ID NO: 1577705 - RNA, 19 nt, Artificial Sequence
  Description of Artificial Sequence: Synthetic oligonucleotide
  Sense strand starting at position 2290 of SEQ ID NO: 1560121
gaguucgcuuuagaagcuu

SEQ ID NO: 1577706 - RNA, 19 nt, Artificial Sequence
  Description of Artificial Sequence: Synthetic oligonucleotide
  Antisense strand to SEQ ID NO: 1577705
aagcuucuaaagcgaacuc

SEQ ID NO: 1577707 - RNA, 19 nt, Artificial Sequence
  Description of Artificial Sequence: Synthetic oligonucleotide
  Sense strand starting at position 82 of SEQ ID NO: 1560122
uggaguuauacaggacgca

SEQ ID NO: 1577708 - RNA, 19 nt, Artificial Sequence
  Description of Artificial Sequence: Synthetic oligonucleotide
  Antisense strand to SEQ ID NO: 1577707
ugcguccuguauaacucca

SEQ ID NO: 1577709 - RNA, 19 nt, Artificial Sequence
  Description of Artificial Sequence: Synthetic oligonucleotide
  Sense strand starting at position 83 of SEQ ID NO: 1560122
ggaguuauacaggacgcau

SEQ ID NO: 1577710 - RNA, 19 nt, Artificial Sequence
  Description of Artificial Sequence: Synthetic oligonucleotide
  Antisense strand to SEQ ID NO: 1577709
augcguccuguauaacucc

SEQ ID NO: 1577711 - RNA, 19 nt, Artificial Sequence
  Description of Artificial Sequence: Synthetic oligonucleotide
  Sense strand starting at position 558 of SEQ ID NO: 1560122
agcaauucuguagagggua

SEQ ID NO: 1577712 - RNA, 19 nt, Artificial Sequence
  Description of Artificial Sequence: Synthetic oligonucleotide
  Antisense strand to SEQ ID NO: 1577711
uacccucuacagaauugcu

SEQ ID NO: 1577713 - RNA, 19 nt, Artificial Sequence
  Description of Artificial Sequence: Synthetic oligonucleotide
  Sense strand starting at position 632 of SEQ ID NO: 1560122
agagucaucucccuggauc

SEQ ID NO: 1577714 - RNA, 19 nt, Artificial Sequence
  Description of Artificial Sequence: Synthetic oligonucleotide
  Antisense strand to SEQ ID NO: 1577713
gauccagggagaugacucu

SEQ ID NO: 1577715 - RNA, 19 nt, Artificial Sequence
  Description of Artificial Sequence: Synthetic oligonucleotide
  Sense strand starting at position 633 of SEQ ID NO: 1560122
gagucaucucccuggaucu

SEQ ID NO: 1577716 - RNA, 19 nt, Artificial Sequence
  Description of Artificial Sequence: Synthetic oligonucleotide
  Antisense strand to SEQ ID NO: 1577715
agauccagggagaugacuc

SEQ ID NO: 1577717 - RNA, 19 nt, Artificial Sequence
  Description of Artificial Sequence: Synthetic oligonucleotide
  Sense strand starting at position 635 of SEQ ID NO: 1560122
gucaucucccuggaucuga

SEQ ID NO: 1577718 - RNA, 19 nt, Artificial Sequence
  Description of Artificial Sequence: Synthetic oligonucleotide
  Antisense strand to SEQ ID NO: 1577717
ucagauccagggagaugac

SEQ ID NO: 1577719 - RNA, 19 nt, Artificial Sequence
  Description of Artificial Sequence: Synthetic oligonucleotide
  Sense strand starting at position 683 of SEQ ID NO: 1560122
aguuuacuccucugugaaa

SEQ ID NO: 1577720 - RNA, 19 nt, Artificial Sequence
  Description of Artificial Sequence: Synthetic oligonucleotide
  Antisense strand to SEQ ID NO: 1577719
uuucacagaggaguaaacu

SEQ ID NO: 1577721 - RNA, 19 nt, Artificial Sequence
  Description of Artificial Sequence: Synthetic oligonucleotide
  Sense strand starting at position 684 of SEQ ID NO: 1560122
guuuacuccucugugaaau

SEQ ID NO: 1577722 - RNA, 19 nt, Artificial Sequence
  Description of Artificial Sequence: Synthetic oligonucleotide
  Antisense strand to SEQ ID NO: 1577721
auuucacagaggaguaaac

SEQ ID NO: 1577723 - RNA, 19 nt, Artificial Sequence
  Description of Artificial Sequence: Synthetic oligonucleotide
  Sense strand starting at position 712 of SEQ ID NO: 1560122
guccucugucuccaagagu

SEQ ID NO: 1577724 - RNA, 19 nt, Artificial Sequence
  Description of Artificial Sequence: Synthetic oligonucleotide
  Antisense strand to SEQ ID NO: 1577723
acucuuggagacagaggac

SEQ ID NO: 1577725 - RNA, 19 nt, Artificial Sequence
  Description of Artificial Sequence: Synthetic oligonucleotide
  Sense strand starting at position 715 of SEQ ID NO: 1560122
cucugucuccaagagucuu

SEQ ID NO: 1577726 - RNA, 19 nt, Artificial Sequence
  Description of Artificial Sequence: Synthetic oligonucleotide
  Antisense strand to SEQ ID NO: 1577725
aagacucuuggagacagag

SEQ ID NO: 1577727 - RNA, 19 nt, Artificial Sequence
  Description of Artificial Sequence: Synthetic oligonucleotide
  Sense strand starting at position 736 of SEQ ID NO: 1560122
cacgcauuccuugaggcaa

SEQ ID NO: 1577728 - RNA, 19 nt, Artificial Sequence
  Description of Artificial Sequence: Synthetic oligonucleotide
  Antisense strand to SEQ ID NO: 1577727
uugccucaaggaaugcgug

SEQ ID NO: 1577729 - RNA, 19 nt, Artificial Sequence
  Description of Artificial Sequence: Synthetic oligonucleotide
  Sense strand starting at position 833 of SEQ ID NO: 1560122
aguggagguaucugucaua

SEQ ID NO: 1577730 - RNA, 19 nt, Artificial Sequence
  Description of Artificial Sequence: Synthetic oligonucleotide
  Antisense strand to SEQ ID NO: 1577729
uaugacagauaccuccacu

SEQ ID NO: 1577731 - RNA, 19 nt, Artificial Sequence
  Description of Artificial Sequence: Synthetic oligonucleotide
  Sense strand starting at position 916 of SEQ ID NO: 1560122
ugagacugcucuccuagaa

SEQ ID NO: 1577732 - RNA, 19 nt, Artificial Sequence
  Description of Artificial Sequence: Synthetic oligonucleotide
  Antisense strand to SEQ ID NO: 1577731
uucuaggagagcagucuca

SEQ ID NO: 1577733 - RNA, 19 nt, Artificial Sequence
  Description of Artificial Sequence: Synthetic oligonucleotide
  Sense strand starting at position 1253 of SEQ ID NO: 1560122
gugccaacaguauaguuua

SEQ ID NO: 1577734 - RNA, 19 nt, Artificial Sequence
  Description of Artificial Sequence: Synthetic oligonucleotide
  Antisense strand to SEQ ID NO: 1577733
uaaacuauacuguuggcac

SEQ ID NO: 1577735 - RNA, 19 nt, Artificial Sequence
  Description of Artificial Sequence: Synthetic oligonucleotide
  Sense strand starting at position 1365 of SEQ ID NO: 1560122
cacuguaaggcagagguua

SEQ ID NO: 1577736 - RNA, 19 nt, Artificial Sequence
  Description of Artificial Sequence: Synthetic oligonucleotide
  Antisense strand to SEQ ID NO: 1577735
uaaccucugccuuacagug

SEQ ID NO: 1577737 - RNA, 19 nt, Artificial Sequence
  Description of Artificial Sequence: Synthetic oligonucleotide
  Sense strand starting at position 1367 of SEQ ID NO: 1560122
cuguaaggcagagguuauc

SEQ ID NO: 1577738 - RNA, 19 nt, Artificial Sequence
  Description of Artificial Sequence: Synthetic oligonucleotide
  Antisense strand to SEQ ID NO: 1577737
gauaaccucugccuuacag

SEQ ID NO: 1577739 - RNA, 19 nt, Artificial Sequence
  Description of Artificial Sequence: Synthetic oligonucleotide
  Sense strand starting at position 1378 of SEQ ID NO: 1560122
agguuaucugcaugaccag

SEQ ID NO: 1577740 - RNA, 19 nt, Artificial Sequence
  Description of Artificial Sequence: Synthetic oligonucleotide
  Antisense strand to SEQ ID NO: 1577739
cuggucaugcagauaaccu

SEQ ID NO: 1577741 - RNA, 19 nt, Artificial Sequence
  Description of Artificial Sequence: Synthetic oligonucleotide
  Sense strand starting at position 1379 of SEQ ID NO: 1560122
gguuaucugcaugaccaga

SEQ ID NO: 1577742 - RNA, 19 nt, Artificial Sequence
  Description of Artificial Sequence: Synthetic oligonucleotide
  Antisense strand to SEQ ID NO: 1577741
ucuggucaugcagauaacc

SEQ ID NO: 1577743 - RNA, 19 nt, Artificial Sequence
  Description of Artificial Sequence: Synthetic oligonucleotide
  Sense strand starting at position 1675 of SEQ ID NO: 1560122
acccuaucugguggugauu

SEQ ID NO: 1577744 - RNA, 19 nt, Artificial Sequence
  Description of Artificial Sequence: Synthetic oligonucleotide
  Antisense strand to SEQ ID NO: 1577743
aaucaccaccagauagggu

SEQ ID NO: 1577745 - RNA, 19 nt, Artificial Sequence
  Description of Artificial Sequence: Synthetic oligonucleotide
  Sense strand starting at position 1844 of SEQ ID NO: 1560122
aaagaaggguuccaaagaa

SEQ ID NO: 1577746 - RNA, 19 nt, Artificial Sequence
  Description of Artificial Sequence: Synthetic oligonucleotide
  Antisense strand to SEQ ID NO: 1577745
uucuuuggaacccuucuuu

SEQ ID NO: 1577747 - RNA, 19 nt, Artificial Sequence
  Description of Artificial Sequence: Synthetic oligonucleotide
  Sense strand starting at position 1987 of SEQ ID NO: 1560122
ucgcaagcaccugagaaau

SEQ ID NO: 1577748 - RNA, 19 nt, Artificial Sequence
  Description of Artificial Sequence: Synthetic oligonucleotide
  Antisense strand to SEQ ID NO: 1577747
auuucucaggugcuugcga

SEQ ID NO: 1577749 - RNA, 19 nt, Artificial Sequence
  Description of Artificial Sequence: Synthetic oligonucleotide
  Sense strand starting at position 2003 of SEQ ID NO: 1560122
aaugguuaggcuggguaau

SEQ ID NO: 1577750 - RNA, 19 nt, Artificial Sequence
  Description of Artificial Sequence: Synthetic oligonucleotide
  Antisense strand to SEQ ID NO: 1577749
auuacccagccuaaccauu

SEQ ID NO: 1577751 - RNA, 19 nt, Artificial Sequence
  Description of Artificial Sequence: Synthetic oligonucleotide
  Sense strand starting at position 2004 of SEQ ID NO: 1560122
augguuaggcuggguaauu

SEQ ID NO: 1577752 - RNA, 19 nt, Artificial Sequence
  Description of Artificial Sequence: Synthetic oligonucleotide
  Antisense strand to SEQ ID NO: 1577751
aauuacccagccuaaccau

SEQ ID NO: 1577753 - RNA, 19 nt, Artificial Sequence
  Description of Artificial Sequence: Synthetic oligonucleotide
  Sense strand starting at position 2005 of SEQ ID NO: 1560122
ugguuaggcuggguaauua

SEQ ID NO: 1577754 - RNA, 19 nt, Artificial Sequence
  Description of Artificial Sequence: Synthetic oligonucleotide
  Antisense strand to SEQ ID NO: 1577753
uaauuacccagccuaacca

SEQ ID NO: 1577755 - RNA, 19 nt, Artificial Sequence
  Description of Artificial Sequence: Synthetic oligonucleotide
  Sense strand starting at position 2014 of SEQ ID NO: 1560122
uggguaauuaucgagcuuu

SEQ ID NO: 1577756 - RNA, 19 nt, Artificial Sequence
  Description of Artificial Sequence: Synthetic oligonucleotide
  Antisense strand to SEQ ID NO: 1577755
aaagcucgauaauuaccca

SEQ ID NO: 1577757 - RNA, 19 nt, Artificial Sequence
  Description of Artificial Sequence: Synthetic oligonucleotide
  Sense strand starting at position 2065 of SEQ ID NO: 1560122
uuccuucggccgcuauuau

SEQ ID NO: 1577758 - RNA, 19 nt, Artificial Sequence
  Description of Artificial Sequence: Synthetic oligonucleotide
  Antisense strand to SEQ ID NO: 1577757
auaauagcggccgaaggaa

SEQ ID NO: 1577759 - RNA, 19 nt, Artificial Sequence
  Description of Artificial Sequence: Synthetic oligonucleotide
  Sense strand starting at position 2078 of SEQ ID NO: 1560122
uauuauuggcugcagcaua

SEQ ID NO: 1577760 - RNA, 19 nt, Artificial Sequence
  Description of Artificial Sequence: Synthetic oligonucleotide
  Antisense strand to SEQ ID NO: 1577759
uaugcugcagccaauaaua

SEQ ID NO: 1577761 - RNA, 19 nt, Artificial Sequence
  Description of Artificial Sequence: Synthetic oligonucleotide
  Sense strand starting at position 2191 of SEQ ID NO: 1560122
uaaggauuccgggagccau

SEQ ID NO: 1577762 - RNA, 19 nt, Artificial Sequence
  Description of Artificial Sequence: Synthetic oligonucleotide
  Antisense strand to SEQ ID NO: 1577761
auggcucccggaauccuua

SEQ ID NO: 1577763 - RNA, 19 nt, Artificial Sequence
  Description of Artificial Sequence: Synthetic oligonucleotide
  Sense strand starting at position 2199 of SEQ ID NO: 1560122
ccgggagccauguggaauu

SEQ ID NO: 1577764 - RNA, 19 nt, Artificial Sequence
  Description of Artificial Sequence: Synthetic oligonucleotide
  Antisense strand to SEQ ID NO: 1577763
aauuccacauggcucccgg

SEQ ID NO: 1577765 - RNA, 19 nt, Artificial Sequence
  Description of Artificial Sequence: Synthetic oligonucleotide
  Sense strand starting at position 2352 of SEQ ID NO: 1560122
ugggaauccacacaucguu

SEQ ID NO: 1577766 - RNA, 19 nt, Artificial Sequence
  Description of Artificial Sequence: Synthetic oligonucleotide
  Antisense strand to SEQ ID NO: 1577765
aacgauguguggauuccca

SEQ ID NO: 1577767 - RNA, 19 nt, Artificial Sequence
  Description of Artificial Sequence: Synthetic oligonucleotide
  Sense strand starting at position 2403 of SEQ ID NO: 1560122
ccacacauagggugacuua

SEQ ID NO: 1577768 - RNA, 19 nt, Artificial Sequence
  Description of Artificial Sequence: Synthetic oligonucleotide
  Antisense strand to SEQ ID NO: 1577767
uaagucacccuaugugugg

SEQ ID NO: 1577769 - RNA, 19 nt, Artificial Sequence
  Description of Artificial Sequence: Synthetic oligonucleotide
  Sense strand starting at position 2444 of SEQ ID NO: 1560122
agucacagacauugacuua

SEQ ID NO: 1577770 - RNA, 19 nt, Artificial Sequence
  Description of Artificial Sequence: Synthetic oligonucleotide
  Antisense strand to SEQ ID NO: 1577769
uaagucaaugucugugacu

SEQ ID NO: 1577771 - RNA, 19 nt, Artificial Sequence
  Description of Artificial Sequence: Synthetic oligonucleotide
  Sense strand starting at position 2622 of SEQ ID NO: 1560122
gugucagauuguuccagga

SEQ ID NO: 1577772 - RNA, 19 nt, Artificial Sequence
  Description of Artificial Sequence: Synthetic oligonucleotide
  Antisense strand to SEQ ID NO: 1577771
uccuggaacaaucugacac

SEQ ID NO: 1577773 - RNA, 19 nt, Artificial Sequence
  Description of Artificial Sequence: Synthetic oligonucleotide
  Sense strand starting at position 2815 of SEQ ID NO: 1560122
gugauuuauugaugauaug

SEQ ID NO: 1577774 - RNA, 19 nt, Artificial Sequence
  Description of Artificial Sequence: Synthetic oligonucleotide
  Antisense strand to SEQ ID NO: 1577773
cauaucaucaauaaaucac

SEQ ID NO: 1577775 - RNA, 19 nt, Artificial Sequence
  Description of Artificial Sequence: Synthetic oligonucleotide
  Sense strand starting at position 2904 of SEQ ID NO: 1560122
ggcaauuguuuguuuauuu

SEQ ID NO: 1577776 - RNA, 19 nt, Artificial Sequence
  Description of Artificial Sequence: Synthetic oligonucleotide
  Antisense strand to SEQ ID NO: 1577775
aaauaaacaaacaauugcc

SEQ ID NO: 1577777 - RNA, 19 nt, Artificial Sequence
  Description of Artificial Sequence: Synthetic oligonucleotide
  Sense strand starting at position 3307 of SEQ ID NO: 1560122
gucauaagauguuuacaau

SEQ ID NO: 1577778 - RNA, 19 nt, Artificial Sequence
  Description of Artificial Sequence: Synthetic oligonucleotide
  Antisense strand to SEQ ID NO: 1577777
auuguaaacaucuuaugac

SEQ ID NO: 1577779 - RNA, 19 nt, Artificial Sequence
  Description of Artificial Sequence: Synthetic oligonucleotide
  Sense strand starting at position 3377 of SEQ ID NO: 1560122
agguccagauguccugaua

SEQ ID NO: 1577780 - RNA, 19 nt, Artificial Sequence
  Description of Artificial Sequence: Synthetic oligonucleotide
  Antisense strand to SEQ ID NO: 1577779
uaucaggacaucuggaccu

SEQ ID NO: 1577781 - RNA, 19 nt, Artificial Sequence
  Description of Artificial Sequence: Synthetic oligonucleotide
  Sense strand starting at position 3380 of SEQ ID NO: 1560122
uccagauguccugauauug

SEQ ID NO: 1577782 - RNA, 19 nt, Artificial Sequence
  Description of Artificial Sequence: Synthetic oligonucleotide
  Antisense strand to SEQ ID NO: 1577781
caauaucaggacaucugga

SEQ ID NO: 1577783 - RNA, 19 nt, Artificial Sequence
  Description of Artificial Sequence: Synthetic oligonucleotide
  Sense strand starting at position 3389 of SEQ ID NO: 1560122
ccugauauugcauagcaau

SEQ ID NO: 1577784 - RNA, 19 nt, Artificial Sequence
  Description of Artificial Sequence: Synthetic oligonucleotide
  Antisense strand to SEQ ID NO: 1577783
auugcuaugcaauaucagg

SEQ ID NO: 1577785 - RNA, 19 nt, Artificial Sequence
  Description of Artificial Sequence: Synthetic oligonucleotide
  Sense strand starting at position 3665 of SEQ ID NO: 1560122
gugaacugagaucgagauu

SEQ ID NO: 1577786 - RNA, 19 nt, Artificial Sequence
  Description of Artificial Sequence: Synthetic oligonucleotide
  Antisense strand to SEQ ID NO: 1577785
aaucucgaucucaguucac

SEQ ID NO: 1577787 - RNA, 19 nt, Artificial Sequence
  Description of Artificial Sequence: Synthetic oligonucleotide
  Sense strand starting at position 871 of SEQ ID NO: 1560123
ucucaaaggauucgaguga

SEQ ID NO: 1577788 - RNA, 19 nt, Artificial Sequence
  Description of Artificial Sequence: Synthetic oligonucleotide
  Antisense strand to SEQ ID NO: 1577787
ucacucgaauccuuugaga

SEQ ID NO: 1577789 - RNA, 19 nt, Artificial Sequence
  Description of Artificial Sequence: Synthetic oligonucleotide
  Sense strand starting at position 875 of SEQ ID NO: 1560123
aaaggauucgagugacacu

SEQ ID NO: 1577790 - RNA, 19 nt, Artificial Sequence
  Description of Artificial Sequence: Synthetic oligonucleotide
  Antisense strand to SEQ ID NO: 1577789
agugucacucgaauccuuu

SEQ ID NO: 1577791 - RNA, 19 nt, Artificial Sequence
  Description of Artificial Sequence: Synthetic oligonucleotide
  Sense strand starting at position 963 of SEQ ID NO: 1560123
guuuauagagaucagguuu

SEQ ID NO: 1577792 - RNA, 19 nt, Artificial Sequence
  Description of Artificial Sequence: Synthetic oligonucleotide
  Antisense strand to SEQ ID NO: 1577791
aaaccugaucucuauaaac

SEQ ID NO: 1577793 - RNA, 19 nt, Artificial Sequence
  Description of Artificial Sequence: Synthetic oligonucleotide
  Sense strand starting at position 1384 of SEQ ID NO: 1560123
guuagauugggauaaguuu

SEQ ID NO: 1577794 - RNA, 19 nt, Artificial Sequence
  Description of Artificial Sequence: Synthetic oligonucleotide
  Antisense strand to SEQ ID NO: 1577793
aaacuuaucccaaucuaac

SEQ ID NO: 1577795 - RNA, 19 nt, Artificial Sequence
  Description of Artificial Sequence: Synthetic oligonucleotide
  Sense strand starting at position 1390 of SEQ ID NO: 1560123
uugggauaaguuugcauga

SEQ ID NO: 1577796 - RNA, 19 nt, Artificial Sequence
  Description of Artificial Sequence: Synthetic oligonucleotide
  Antisense strand to SEQ ID NO: 1577795
ucaugcaaacuuaucccaa

SEQ ID NO: 1577797 - RNA, 19 nt, Artificial Sequence
  Description of Artificial Sequence: Synthetic oligonucleotide
  Sense strand starting at position 1403 of SEQ ID NO: 1560123
gcaugaggcagguagaagu

SEQ ID NO: 1577798 - RNA, 19 nt, Artificial Sequence
  Description of Artificial Sequence: Synthetic oligonucleotide
  Antisense strand to SEQ ID NO: 1577797
acuucuaccugccucaugc

SEQ ID NO: 1577799 - RNA, 19 nt, Artificial Sequence
  Description of Artificial Sequence: Synthetic oligonucleotide
  Sense strand starting at position 1414 of SEQ ID NO: 1560123
guagaaguuuagccuggaa

SEQ ID NO: 1577800 - RNA, 19 nt, Artificial Sequence
  Description of Artificial Sequence: Synthetic oligonucleotide
  Antisense strand to SEQ ID NO: 1577799
uuccaggcuaaacuucuac

SEQ ID NO: 1577801 - RNA, 19 nt, Artificial Sequence
  Description of Artificial Sequence: Synthetic oligonucleotide
  Sense strand starting at position 1416 of SEQ ID NO: 1560123
agaaguuuagccuggaaag

SEQ ID NO: 1577802 - RNA, 19 nt, Artificial Sequence
  Description of Artificial Sequence: Synthetic oligonucleotide
  Antisense strand to SEQ ID NO: 1577801
cuuuccaggcuaaacuucu

SEQ ID NO: 1577803 - RNA, 19 nt, Artificial Sequence
  Description of Artificial Sequence: Synthetic oligonucleotide
  Sense strand starting at position 1417 of SEQ ID NO: 1560123
gaaguuuagccuggaaagg

SEQ ID NO: 1577804 - RNA, 19 nt, Artificial Sequence
  Description of Artificial Sequence: Synthetic oligonucleotide
  Antisense strand to SEQ ID NO: 1577803
ccuuuccaggcuaaacuuc

SEQ ID NO: 1577805 - RNA, 19 nt, Artificial Sequence
  Description of Artificial Sequence: Synthetic oligonucleotide
  Sense strand starting at position 1418 of SEQ ID NO: 1560123
aaguuuagccuggaaaggu

SEQ ID NO: 1577806 - RNA, 19 nt, Artificial Sequence
  Description of Artificial Sequence: Synthetic oligonucleotide
  Antisense strand to SEQ ID NO: 1577805
accuuuccaggcuaaacuu

SEQ ID NO: 1577807 - RNA, 19 nt, Artificial Sequence
  Description of Artificial Sequence: Synthetic oligonucleotide
  Sense strand starting at position 1435 of SEQ ID NO: 1560123
guaggaggauucgucuaga

SEQ ID NO: 1577808 - RNA, 19 nt, Artificial Sequence
  Description of Artificial Sequence: Synthetic oligonucleotide
  Antisense strand to SEQ ID NO: 1577807
ucuagacgaauccuccuac

SEQ ID NO: 1577809 - RNA, 19 nt, Artificial Sequence
  Description of Artificial Sequence: Synthetic oligonucleotide
  Sense strand starting at position 1440 of SEQ ID NO: 1560123
aggauucgucuagagagca

SEQ ID NO: 1577810 - RNA, 19 nt, Artificial Sequence
  Description of Artificial Sequence: Synthetic oligonucleotide
  Antisense strand to SEQ ID NO: 1577809
ugcucucuagacgaauccu

SEQ ID NO: 1577811 - RNA, 19 nt, Artificial Sequence
  Description of Artificial Sequence: Synthetic oligonucleotide
  Sense strand starting at position 1495 of SEQ ID NO: 1560123
uugagaagggcuggucuga

SEQ ID NO: 1577812 - RNA, 19 nt, Artificial Sequence
  Description of Artificial Sequence: Synthetic oligonucleotide
  Antisense strand to SEQ ID NO: 1577811
ucagaccagcccuucucaa

SEQ ID NO: 1577813 - RNA, 19 nt, Artificial Sequence
  Description of Artificial Sequence: Synthetic oligonucleotide
  Sense strand starting at position 1511 of SEQ ID NO: 1560123
ugaggcaaugcaggaauua

SEQ ID NO: 1577814 - RNA, 19 nt, Artificial Sequence
  Description of Artificial Sequence: Synthetic oligonucleotide
  Antisense strand to SEQ ID NO: 1577813
uaauuccugcauugccuca

SEQ ID NO: 1577815 - RNA, 19 nt, Artificial Sequence
  Description of Artificial Sequence: Synthetic oligonucleotide
  Sense strand starting at position 1559 of SEQ ID NO: 1560123
gagaguuagccugguaagg

SEQ ID NO: 1577816 - RNA, 19 nt, Artificial Sequence
  Description of Artificial Sequence: Synthetic oligonucleotide
  Antisense strand to SEQ ID NO: 1577815
ccuuaccaggcuaacucuc

SEQ ID NO: 1577817 - RNA, 19 nt, Artificial Sequence
  Description of Artificial Sequence: Synthetic oligonucleotide
  Sense strand starting at position 1679 of SEQ ID NO: 1560123
ggaauaaucugggcaaagu

SEQ ID NO: 1577818 - RNA, 19 nt, Artificial Sequence
  Description of Artificial Sequence: Synthetic oligonucleotide
  Antisense strand to SEQ ID NO: 1577817
acuuugcccagauuauucc

SEQ ID NO: 1577819 - RNA, 19 nt, Artificial Sequence
  Description of Artificial Sequence: Synthetic oligonucleotide
  Sense strand starting at position 1769 of SEQ ID NO: 1560123
ggaaucauuuccuagagac

SEQ ID NO: 1577820 - RNA, 19 nt, Artificial Sequence
  Description of Artificial Sequence: Synthetic oligonucleotide
  Antisense strand to SEQ ID NO: 1577819
gucucuaggaaaugauucc

SEQ ID NO: 1577821 - RNA, 19 nt, Artificial Sequence
  Description of Artificial Sequence: Synthetic oligonucleotide
  Sense strand starting at position 2177 of SEQ ID NO: 1560123
gcucccagcgugcuuaauu

SEQ ID NO: 1577822 - RNA, 19 nt, Artificial Sequence
  Description of Artificial Sequence: Synthetic oligonucleotide
  Antisense strand to SEQ ID NO: 1577821
aauuaagcacgcugggagc

SEQ ID NO: 1577823 - RNA, 19 nt, Artificial Sequence
  Description of Artificial Sequence: Synthetic oligonucleotide
  Sense strand starting at position 2251 of SEQ ID NO: 1560123
ggguucgugcucucguuua

SEQ ID NO: 1577824 - RNA, 19 nt, Artificial Sequence
  Description of Artificial Sequence: Synthetic oligonucleotide
  Antisense strand to SEQ ID NO: 1577823
uaaacgagagcacgaaccc

SEQ ID NO: 1577825 - RNA, 19 nt, Artificial Sequence
  Description of Artificial Sequence: Synthetic oligonucleotide
  Sense strand starting at position 2253 of SEQ ID NO: 1560123
guucgugcucucguuuaga

SEQ ID NO: 1577826 - RNA, 19 nt, Artificial Sequence
  Description of Artificial Sequence: Synthetic oligonucleotide
  Antisense strand to SEQ ID NO: 1577825
ucuaaacgagagcacgaac

SEQ ID NO: 1577827 - RNA, 19 nt, Artificial Sequence
  Description of Artificial Sequence: Synthetic oligonucleotide
  Sense strand starting at position 2397 of SEQ ID NO: 1560123
gcgcgaucacaguucaagu

SEQ ID NO: 1577828 - RNA, 19 nt, Artificial Sequence
  Description of Artificial Sequence: Synthetic oligonucleotide
  Antisense strand to SEQ ID NO: 1577827
acuugaacugugaucgcgc

SEQ ID NO: 1577829 - RNA, 19 nt, Artificial Sequence
  Description of Artificial Sequence: Synthetic oligonucleotide
  Sense strand starting at position 2458 of SEQ ID NO: 1560123
uuuggaguacuugggacua

SEQ ID NO: 1577830 - RNA, 19 nt, Artificial Sequence
  Description of Artificial Sequence: Synthetic oligonucleotide
  Antisense strand to SEQ ID NO: 1577829
uagucccaaguacuccaaa

SEQ ID NO: 1577831 - RNA, 19 nt, Artificial Sequence
  Description of Artificial Sequence: Synthetic oligonucleotide
  Sense strand starting at position 2667 of SEQ ID NO: 1560123
cuggcaugagauggauagu

SEQ ID NO: 1577832 - RNA, 19 nt, Artificial Sequence
  Description of Artificial Sequence: Synthetic oligonucleotide
  Antisense strand to SEQ ID NO: 1577831
acuauccaucucaugccag

SEQ ID NO: 1577833 - RNA, 19 nt, Artificial Sequence
  Description of Artificial Sequence: Synthetic oligonucleotide
  Sense strand starting at position 2723 of SEQ ID NO: 1560123
aggaaaucuacagguguga

SEQ ID NO: 1577834 - RNA, 19 nt, Artificial Sequence
  Description of Artificial Sequence: Synthetic oligonucleotide
  Antisense strand to SEQ ID NO: 1577833
ucacaccuguagauuuccu

SEQ ID NO: 1577835 - RNA, 19 nt, Artificial Sequence
  Description of Artificial Sequence: Synthetic oligonucleotide
  Sense strand starting at position 2727 of SEQ ID NO: 1560123
aaucuacaggugugaaaca

SEQ ID NO: 1577836 - RNA, 19 nt, Artificial Sequence
  Description of Artificial Sequence: Synthetic oligonucleotide
  Antisense strand to SEQ ID NO: 1577835
uguuucacaccuguagauu

SEQ ID NO: 1577837 - RNA, 19 nt, Artificial Sequence
  Description of Artificial Sequence: Synthetic oligonucleotide
  Sense strand starting at position 2746 of SEQ ID NO: 1560123
agacaacucugguccuuau

SEQ ID NO: 1577838 - RNA, 19 nt, Artificial Sequence
  Description of Artificial Sequence: Synthetic oligonucleotide
  Antisense strand to SEQ ID NO: 1577837
auaaggaccagaguugucu

SEQ ID NO: 1577839 - RNA, 19 nt, Artificial Sequence
  Description of Artificial Sequence: Synthetic oligonucleotide
  Sense strand starting at position 2794 of SEQ ID NO: 1560123
agguguuaccagcagagua

SEQ ID NO: 1577840 - RNA, 19 nt, Artificial Sequence
  Description of Artificial Sequence: Synthetic oligonucleotide
  Antisense strand to SEQ ID NO: 1577839
uacucugcugguaacaccu

SEQ ID NO: 1577841 - RNA, 19 nt, Artificial Sequence
  Description of Artificial Sequence: Synthetic oligonucleotide
  Sense strand starting at position 2971 of SEQ ID NO: 1560123
ggaagagucuugaggagga

SEQ ID NO: 1577842 - RNA, 19 nt, Artificial Sequence
  Description of Artificial Sequence: Synthetic oligonucleotide
  Antisense strand to SEQ ID NO: 1577841
uccuccucaagacucuucc

SEQ ID NO: 1577843 - RNA, 19 nt, Artificial Sequence
  Description of Artificial Sequence: Synthetic oligonucleotide
  Sense strand starting at position 3068 of SEQ ID NO: 1560123
ccaugauugggcuguggag

SEQ ID NO: 1577844 - RNA, 19 nt, Artificial Sequence
  Description of Artificial Sequence: Synthetic oligonucleotide
  Antisense strand to SEQ ID NO: 1577843
cuccacagcccaaucaugg

SEQ ID NO: 1577845 - RNA, 19 nt, Artificial Sequence
  Description of Artificial Sequence: Synthetic oligonucleotide
  Sense strand starting at position 3183 of SEQ ID NO: 1560123
acuuauggcuccucagaac

SEQ ID NO: 1577846 - RNA, 19 nt, Artificial Sequence
  Description of Artificial Sequence: Synthetic oligonucleotide
  Antisense strand to SEQ ID NO: 1577845
guucugaggagccauaagu

SEQ ID NO: 1577847 - RNA, 19 nt, Artificial Sequence
  Description of Artificial Sequence: Synthetic oligonucleotide
  Sense strand starting at position 3285 of SEQ ID NO: 1560123
ccucauaagccauaguaag

SEQ ID NO: 1577848 - RNA, 19 nt, Artificial Sequence
  Description of Artificial Sequence: Synthetic oligonucleotide
  Antisense strand to SEQ ID NO: 1577847
cuuacuauggcuuaugagg

SEQ ID NO: 1577849 - RNA, 19 nt, Artificial Sequence
  Description of Artificial Sequence: Synthetic oligonucleotide
  Sense strand starting at position 3349 of SEQ ID NO: 1560123
ggagaugagacgugugaga

SEQ ID NO: 1577850 - RNA, 19 nt, Artificial Sequence
  Description of Artificial Sequence: Synthetic oligonucleotide
  Antisense strand to SEQ ID NO: 1577849
ucucacacgucucaucucc

SEQ ID NO: 1577851 - RNA, 19 nt, Artificial Sequence
  Description of Artificial Sequence: Synthetic oligonucleotide
  Sense strand starting at position 3351 of SEQ ID NO: 1560123
agaugagacgugugagaaa

SEQ ID NO: 1577852 - RNA, 19 nt, Artificial Sequence
  Description of Artificial Sequence: Synthetic oligonucleotide
  Antisense strand to SEQ ID NO: 1577851
uuucucacacgucucaucu

SEQ ID NO: 1577853 - RNA, 19 nt, Artificial Sequence
  Description of Artificial Sequence: Synthetic oligonucleotide
  Sense strand starting at position 3411 of SEQ ID NO: 1560123
ccuugaggucuggaguugu

SEQ ID NO: 1577854 - RNA, 19 nt, Artificial Sequence
  Description of Artificial Sequence: Synthetic oligonucleotide
  Antisense strand to SEQ ID NO: 1577853
acaacuccagaccucaagg

SEQ ID NO: 1577855 - RNA, 19 nt, Artificial Sequence
  Description of Artificial Sequence: Synthetic oligonucleotide
  Sense strand starting at position 3415 of SEQ ID NO: 1560123
gaggucuggaguuguggaa

SEQ ID NO: 1577856 - RNA, 19 nt, Artificial Sequence
  Description of Artificial Sequence: Synthetic oligonucleotide
  Antisense strand to SEQ ID NO: 1577855
uuccacaacuccagaccuc

SEQ ID NO: 1577857 - RNA, 19 nt, Artificial Sequence
  Description of Artificial Sequence: Synthetic oligonucleotide
  Sense strand starting at position 3462 of SEQ ID NO: 1560123
cccagauuccuaggcauua

SEQ ID NO: 1577858 - RNA, 19 nt, Artificial Sequence
  Description of Artificial Sequence: Synthetic oligonucleotide
  Antisense strand to SEQ ID NO: 1577857
uaaugccuaggaaucuggg

SEQ ID NO: 1577859 - RNA, 19 nt, Artificial Sequence
  Description of Artificial Sequence: Synthetic oligonucleotide
  Sense strand starting at position 3463 of SEQ ID NO: 1560123
ccagauuccuaggcauuac

SEQ ID NO: 1577860 - RNA, 19 nt, Artificial Sequence
  Description of Artificial Sequence: Synthetic oligonucleotide
  Antisense strand to SEQ ID NO: 1577859
guaaugccuaggaaucugg

SEQ ID NO: 1577861 - RNA, 19 nt, Artificial Sequence
  Description of Artificial Sequence: Synthetic oligonucleotide
  Sense strand starting at position 3785 of SEQ ID NO: 1560123
gcauguaugagggaacgaa

SEQ ID NO: 1577862 - RNA, 19 nt, Artificial Sequence
  Description of Artificial Sequence: Synthetic oligonucleotide
  Antisense strand to SEQ ID NO: 1577861
uucguucccucauacaugc

SEQ ID NO: 1577863 - RNA, 19 nt, Artificial Sequence
  Description of Artificial Sequence: Synthetic oligonucleotide
  Sense strand starting at position 3804 of SEQ ID NO: 1560123
gacauaagguugcuaagga

SEQ ID NO: 1577864 - RNA, 19 nt, Artificial Sequence
  Description of Artificial Sequence: Synthetic oligonucleotide
  Antisense strand to SEQ ID NO: 1577863
uccuuagcaaccuuauguc

SEQ ID NO: 1577865 - RNA, 19 nt, Artificial Sequence
  Description of Artificial Sequence: Synthetic oligonucleotide
  Sense strand starting at position 3842 of SEQ ID NO: 1560123
ggaugcaaucuggagucuu

SEQ ID NO: 1577866 - RNA, 19 nt, Artificial Sequence
  Description of Artificial Sequence: Synthetic oligonucleotide
  Antisense strand to SEQ ID NO: 1577865
aagacuccagauugcaucc

SEQ ID NO: 1577867 - RNA, 19 nt, Artificial Sequence
  Description of Artificial Sequence: Synthetic oligonucleotide
  Sense strand starting at position 91 of SEQ ID NO: 1560124
cugucugucaccuagugaa

SEQ ID NO: 1577868 - RNA, 19 nt, Artificial Sequence
  Description of Artificial Sequence: Synthetic oligonucleotide
  Antisense strand to SEQ ID NO: 1577867
uucacuaggugacagacag

SEQ ID NO: 1577869 - RNA, 19 nt, Artificial Sequence
  Description of Artificial Sequence: Synthetic oligonucleotide
  Sense strand starting at position 94 of SEQ ID NO: 1560124
ucugucaccuagugaagua

SEQ ID NO: 1577870 - RNA, 19 nt, Artificial Sequence
  Description of Artificial Sequence: Synthetic oligonucleotide
  Antisense strand to SEQ ID NO: 1577869
uacuucacuaggugacaga

SEQ ID NO: 1577871 - RNA, 19 nt, Artificial Sequence
  Description of Artificial Sequence: Synthetic oligonucleotide
  Sense strand starting at position 136 of SEQ ID NO: 1560124
uggccaacuugcuagugau

SEQ ID NO: 1577872 - RNA, 19 nt, Artificial Sequence
  Description of Artificial Sequence: Synthetic oligonucleotide
  Antisense strand to SEQ ID NO: 1577871
aucacuagcaaguuggcca

SEQ ID NO: 1577873 - RNA, 19 nt, Artificial Sequence
  Description of Artificial Sequence: Synthetic oligonucleotide
  Sense strand starting at position 139 of SEQ ID NO: 1560124
ccaacuugcuagugauggu

SEQ ID NO: 1577874 - RNA, 19 nt, Artificial Sequence
  Description of Artificial Sequence: Synthetic oligonucleotide
  Antisense strand to SEQ ID NO: 1577873
accaucacuagcaaguugg

SEQ ID NO: 1577875 - RNA, 19 nt, Artificial Sequence
  Description of Artificial Sequence: Synthetic oligonucleotide
  Sense strand starting at position 157 of SEQ ID NO: 1560124
uggcuugcuucugugcaau

SEQ ID NO: 1577876 - RNA, 19 nt, Artificial Sequence
  Description of Artificial Sequence: Synthetic oligonucleotide
  Antisense strand to SEQ ID NO: 1577875
auugcacagaagcaagcca

SEQ ID NO: 1577877 - RNA, 19 nt, Artificial Sequence
  Description of Artificial Sequence: Synthetic oligonucleotide
  Sense strand starting at position 190 of SEQ ID NO: 1560124
ugcuguaguccauacagua

SEQ ID NO: 1577878 - RNA, 19 nt, Artificial Sequence
  Description of Artificial Sequence: Synthetic oligonucleotide
  Antisense strand to SEQ ID NO: 1577877
uacuguauggacuacagca

SEQ ID NO: 1577879 - RNA, 19 nt, Artificial Sequence
  Description of Artificial Sequence: Synthetic oligonucleotide
  Sense strand starting at position 202 of SEQ ID NO: 1560124
uacaguaguguggaaguau

SEQ ID NO: 1577880 - RNA, 19 nt, Artificial Sequence
  Description of Artificial Sequence: Synthetic oligonucleotide
  Antisense strand to SEQ ID NO: 1577879
auacuuccacacuacugua

SEQ ID NO: 1577881 - RNA, 19 nt, Artificial Sequence
  Description of Artificial Sequence: Synthetic oligonucleotide
  Sense strand starting at position 278 of SEQ ID NO: 1560124
gugauccacuagugaugga

SEQ ID NO: 1577882 - RNA, 19 nt, Artificial Sequence
  Description of Artificial Sequence: Synthetic oligonucleotide
  Antisense strand to SEQ ID NO: 1577881
uccaucacuaguggaucac

SEQ ID NO: 1577883 - RNA, 19 nt, Artificial Sequence
  Description of Artificial Sequence: Synthetic oligonucleotide
  Sense strand starting at position 321 of SEQ ID NO: 1560124
guggcugugaguugugacu

SEQ ID NO: 1577884 - RNA, 19 nt, Artificial Sequence
  Description of Artificial Sequence: Synthetic oligonucleotide
  Antisense strand to SEQ ID NO: 1577883
agucacaacucacagccac

SEQ ID NO: 1577885 - RNA, 19 nt, Artificial Sequence
  Description of Artificial Sequence: Synthetic oligonucleotide
  Sense strand starting at position 332 of SEQ ID NO: 1560124
uugugacuccacugaccau

SEQ ID NO: 1577886 - RNA, 19 nt, Artificial Sequence
  Description of Artificial Sequence: Synthetic oligonucleotide
  Antisense strand to SEQ ID NO: 1577885
auggucaguggagucacaa

SEQ ID NO: 1577887 - RNA, 19 nt, Artificial Sequence
  Description of Artificial Sequence: Synthetic oligonucleotide
  Sense strand starting at position 844 of SEQ ID NO: 1560124
gccuccugcuucuugaaau

SEQ ID NO: 1577888 - RNA, 19 nt, Artificial Sequence
  Description of Artificial Sequence: Synthetic oligonucleotide
  Antisense strand to SEQ ID NO: 1577887
auuucaagaagcaggaggc

SEQ ID NO: 1577889 - RNA, 19 nt, Artificial Sequence
  Description of Artificial Sequence: Synthetic oligonucleotide
  Sense strand starting at position 918 of SEQ ID NO: 1560124
gcacaacucuggcagaaag

SEQ ID NO: 1577890 - RNA, 19 nt, Artificial Sequence
  Description of Artificial Sequence: Synthetic oligonucleotide
  Antisense strand to SEQ ID NO: 1577889
cuuucugccagaguugugc

SEQ ID NO: 1577891 - RNA, 19 nt, Artificial Sequence
  Description of Artificial Sequence: Synthetic oligonucleotide
  Sense strand starting at position 1048 of SEQ ID NO: 1560124
gaguuugaauugggaaacu

SEQ ID NO: 1577892 - RNA, 19 nt, Artificial Sequence
  Description of Artificial Sequence: Synthetic oligonucleotide
  Antisense strand to SEQ ID NO: 1577891
aguuucccaauucaaacuc

SEQ ID NO: 1577893 - RNA, 19 nt, Artificial Sequence
  Description of Artificial Sequence: Synthetic oligonucleotide
  Sense strand starting at position 1221 of SEQ ID NO: 1560124
ggcucugucaggugugaau

SEQ ID NO: 1577894 - RNA, 19 nt, Artificial Sequence
  Description of Artificial Sequence: Synthetic oligonucleotide
  Antisense strand to SEQ ID NO: 1577893
auucacaccugacagagcc

SEQ ID NO: 1577895 - RNA, 19 nt, Artificial Sequence
  Description of Artificial Sequence: Synthetic oligonucleotide
  Sense strand starting at position 1265 of SEQ ID NO: 1560124
gcaacagggcucugggaau

SEQ ID NO: 1577896 - RNA, 19 nt, Artificial Sequence
  Description of Artificial Sequence: Synthetic oligonucleotide
  Antisense strand to SEQ ID NO: 1577895
auucccagagcccuguugc

SEQ ID NO: 1577897 - RNA, 19 nt, Artificial Sequence
  Description of Artificial Sequence: Synthetic oligonucleotide
  Sense strand starting at position 1401 of SEQ ID NO: 1560124
uccuuacccuuguggagaa

SEQ ID NO: 1577898 - RNA, 19 nt, Artificial Sequence
  Description of Artificial Sequence: Synthetic oligonucleotide
  Antisense strand to SEQ ID NO: 1577897
uucuccacaaggguaagga

SEQ ID NO: 1577899 - RNA, 19 nt, Artificial Sequence
  Description of Artificial Sequence: Synthetic oligonucleotide
  Sense strand starting at position 1563 of SEQ ID NO: 1560124
guuugagggcaaugaggau

SEQ ID NO: 1577900 - RNA, 19 nt, Artificial Sequence
  Description of Artificial Sequence: Synthetic oligonucleotide
  Antisense strand to SEQ ID NO: 1577899
auccucauugcccucaaac

SEQ ID NO: 1577901 - RNA, 19 nt, Artificial Sequence
  Description of Artificial Sequence: Synthetic oligonucleotide
  Sense strand starting at position 2038 of SEQ ID NO: 1560124
aggguugcagcgccuuaua

SEQ ID NO: 1577902 - RNA, 19 nt, Artificial Sequence
  Description of Artificial Sequence: Synthetic oligonucleotide
  Antisense strand to SEQ ID NO: 1577901
uauaaggcgcugcaacccu

SEQ ID NO: 1577903 - RNA, 19 nt, Artificial Sequence
  Description of Artificial Sequence: Synthetic oligonucleotide
  Sense strand starting at position 2147 of SEQ ID NO: 1560124
gccugagacccucaauuau

SEQ ID NO: 1577904 - RNA, 19 nt, Artificial Sequence
  Description of Artificial Sequence: Synthetic oligonucleotide
  Antisense strand to SEQ ID NO: 1577903
auaauugagggucucaggc

SEQ ID NO: 1577905 - RNA, 19 nt, Artificial Sequence
  Description of Artificial Sequence: Synthetic oligonucleotide
  Sense strand starting at position 2389 of SEQ ID NO: 1560124
auaucuggcuaauaauguu

SEQ ID NO: 1577906 - RNA, 19 nt, Artificial Sequence
  Description of Artificial Sequence: Synthetic oligonucleotide
  Antisense strand to SEQ ID NO: 1577905
aacauuauuagccagauau

SEQ ID NO: 1577907 - RNA, 19 nt, Artificial Sequence
  Description of Artificial Sequence: Synthetic oligonucleotide
  Sense strand starting at position 2539 of SEQ ID NO: 1560124
gggaucucuucccagagca

SEQ ID NO: 1577908 - RNA, 19 nt, Artificial Sequence
  Description of Artificial Sequence: Synthetic oligonucleotide
  Antisense strand to SEQ ID NO: 1577907
ugcucugggaagagauccc

SEQ ID NO: 1577909 - RNA, 19 nt, Artificial Sequence
  Description of Artificial Sequence: Synthetic oligonucleotide
  Sense strand starting at position 2671 of SEQ ID NO: 1560124
cucacagggucuuguuaca

SEQ ID NO: 1577910 - RNA, 19 nt, Artificial Sequence
  Description of Artificial Sequence: Synthetic oligonucleotide
  Antisense strand to SEQ ID NO: 1577909
uguaacaagacccugugag

SEQ ID NO: 1577911 - RNA, 19 nt, Artificial Sequence
  Description of Artificial Sequence: Synthetic oligonucleotide
  Sense strand starting at position 2761 of SEQ ID NO: 1560124
gcaggcuugcauuaucaug

SEQ ID NO: 1577912 - RNA, 19 nt, Artificial Sequence
  Description of Artificial Sequence: Synthetic oligonucleotide
  Antisense strand to SEQ ID NO: 1577911
caugauaaugcaagccugc

SEQ ID NO: 1577913 - RNA, 19 nt, Artificial Sequence
  Description of Artificial Sequence: Synthetic oligonucleotide
  Sense strand starting at position 2769 of SEQ ID NO: 1560124
gcauuaucaugccacagua

SEQ ID NO: 1577914 - RNA, 19 nt, Artificial Sequence
  Description of Artificial Sequence: Synthetic oligonucleotide
  Antisense strand to SEQ ID NO: 1577913
uacuguggcaugauaaugc

SEQ ID NO: 1577915 - RNA, 19 nt, Artificial Sequence
  Description of Artificial Sequence: Synthetic oligonucleotide
  Sense strand starting at position 2912 of SEQ ID NO: 1560124
ccacuaugcuuggcugaga

SEQ ID NO: 1577916 - RNA, 19 nt, Artificial Sequence
  Description of Artificial Sequence: Synthetic oligonucleotide
  Antisense strand to SEQ ID NO: 1577915
ucucagccaagcauagugg

SEQ ID NO: 1577917 - RNA, 19 nt, Artificial Sequence
  Description of Artificial Sequence: Synthetic oligonucleotide
  Sense strand starting at position 2927 of SEQ ID NO: 1560124
gagagugggucucauaaac

SEQ ID NO: 1577918 - RNA, 19 nt, Artificial Sequence
  Description of Artificial Sequence: Synthetic oligonucleotide
  Antisense strand to SEQ ID NO: 1577917
guuuaugagacccacucuc

SEQ ID NO: 1577919 - RNA, 19 nt, Artificial Sequence
  Description of Artificial Sequence: Synthetic oligonucleotide
  Sense strand starting at position 3017 of SEQ ID NO: 1560124
aggauaaccgcuuaacuuc

SEQ ID NO: 1577920 - RNA, 19 nt, Artificial Sequence
  Description of Artificial Sequence: Synthetic oligonucleotide
  Antisense strand to SEQ ID NO: 1577919
gaaguuaagcgguuauccu

SEQ ID NO: 1577921 - RNA, 19 nt, Artificial Sequence
  Description of Artificial Sequence: Synthetic oligonucleotide
  Sense strand starting at position 3024 of SEQ ID NO: 1560124
ccgcuuaacuucucuaaga

SEQ ID NO: 1577922 - RNA, 19 nt, Artificial Sequence
  Description of Artificial Sequence: Synthetic oligonucleotide
  Antisense strand to SEQ ID NO: 1577921
ucuuagagaaguuaagcgg

SEQ ID NO: 1577923 - RNA, 19 nt, Artificial Sequence
  Description of Artificial Sequence: Synthetic oligonucleotide
  Sense strand starting at position 3025 of SEQ ID NO: 1560124
cgcuuaacuucucuaagac

SEQ ID NO: 1577924 - RNA, 19 nt, Artificial Sequence
  Description of Artificial Sequence: Synthetic oligonucleotide
  Antisense strand to SEQ ID NO: 1577923
gucuuagagaaguuaagcg

SEQ ID NO: 1577925 - RNA, 19 nt, Artificial Sequence
  Description of Artificial Sequence: Synthetic oligonucleotide
  Sense strand starting at position 3057 of SEQ ID NO: 1560124
guaaauaggguuggugaca

SEQ ID NO: 1577926 - RNA, 19 nt, Artificial Sequence
  Description of Artificial Sequence: Synthetic oligonucleotide
  Antisense strand to SEQ ID NO: 1577925
ugucaccaacccuauuuac

SEQ ID NO: 1577927 - RNA, 19 nt, Artificial Sequence
  Description of Artificial Sequence: Synthetic oligonucleotide
  Sense strand starting at position 3088 of SEQ ID NO: 1560124
guuggacagugaggauuaa

SEQ ID NO: 1577928 - RNA, 19 nt, Artificial Sequence
  Description of Artificial Sequence: Synthetic oligonucleotide
  Antisense strand to SEQ ID NO: 1577927
uuaauccucacuguccaac

SEQ ID NO: 1577929 - RNA, 19 nt, Artificial Sequence
  Description of Artificial Sequence: Synthetic oligonucleotide
  Sense strand starting at position 3100 of SEQ ID NO: 1560124
ggauuaaauaguugugugu

SEQ ID NO: 1577930 - RNA, 19 nt, Artificial Sequence
  Description of Artificial Sequence: Synthetic oligonucleotide
  Antisense strand to SEQ ID NO: 1577929
acacacaacuauuuaaucc

SEQ ID NO: 1577931 - RNA, 19 nt, Artificial Sequence
  Description of Artificial Sequence: Synthetic oligonucleotide
  Sense strand starting at position 3102 of SEQ ID NO: 1560124
auuaaauaguuguguguac

SEQ ID NO: 1577932 - RNA, 19 nt, Artificial Sequence
  Description of Artificial Sequence: Synthetic oligonucleotide
  Antisense strand to SEQ ID NO: 1577931
guacacacaacuauuuaau

SEQ ID NO: 1577933 - RNA, 19 nt, Artificial Sequence
  Description of Artificial Sequence: Synthetic oligonucleotide
  Sense strand starting at position 3103 of SEQ ID NO: 1560124
uuaaauaguuguguguaca

SEQ ID NO: 1577934 - RNA, 19 nt, Artificial Sequence
  Description of Artificial Sequence: Synthetic oligonucleotide
  Antisense strand to SEQ ID NO: 1577933
uguacacacaacuauuuaa

SEQ ID NO: 1577935 - RNA, 19 nt, Artificial Sequence
  Description of Artificial Sequence: Synthetic oligonucleotide
  Sense strand starting at position 3104 of SEQ ID NO: 1560124
uaaauaguuguguguacag

SEQ ID NO: 1577936 - RNA, 19 nt, Artificial Sequence
  Description of Artificial Sequence: Synthetic oligonucleotide
  Antisense strand to SEQ ID NO: 1577935
cuguacacacaacuauuua

SEQ ID NO: 1577937 - RNA, 19 nt, Artificial Sequence
  Description of Artificial Sequence: Synthetic oligonucleotide
  Sense strand starting at position 3115 of SEQ ID NO: 1560124
guguacaguguuuagggaa

SEQ ID NO: 1577938 - RNA, 19 nt, Artificial Sequence
  Description of Artificial Sequence: Synthetic oligonucleotide
  Antisense strand to SEQ ID NO: 1577937
uucccuaaacacuguacac

SEQ ID NO: 1577939 - RNA, 19 nt, Artificial Sequence
  Description of Artificial Sequence: Synthetic oligonucleotide
  Sense strand starting at position 3274 of SEQ ID NO: 1560124
gcugguauuugacacacau

SEQ ID NO: 1577940 - RNA, 19 nt, Artificial Sequence
  Description of Artificial Sequence: Synthetic oligonucleotide
  Antisense strand to SEQ ID NO: 1577939
augugugucaaauaccagc

SEQ ID NO: 1577941 - RNA, 19 nt, Artificial Sequence
  Description of Artificial Sequence: Synthetic oligonucleotide
  Sense strand starting at position 3713 of SEQ ID NO: 1560124
ugagcuaaggccugaguga

SEQ ID NO: 1577942 - RNA, 19 nt, Artificial Sequence
  Description of Artificial Sequence: Synthetic oligonucleotide
  Antisense strand to SEQ ID NO: 1577941
ucacucaggccuuagcuca

SEQ ID NO: 1577943 - RNA, 19 nt, Artificial Sequence
  Description of Artificial Sequence: Synthetic oligonucleotide
  Sense strand starting at position 3781 of SEQ ID NO: 1560124
gagacucaccaauguaagu

SEQ ID NO: 1577944 - RNA, 19 nt, Artificial Sequence
  Description of Artificial Sequence: Synthetic oligonucleotide
  Antisense strand to SEQ ID NO: 1577943
acuuacauuggugagucuc

SEQ ID NO: 1577945 - RNA, 19 nt, Artificial Sequence
  Description of Artificial Sequence: Synthetic oligonucleotide
  Sense strand starting at position 3810 of SEQ ID NO: 1560124
ggaaggaguuuggagaguu

SEQ ID NO: 1577946 - RNA, 19 nt, Artificial Sequence
  Description of Artificial Sequence: Synthetic oligonucleotide
  Antisense strand to SEQ ID NO: 1577945
aacucuccaaacuccuucc

SEQ ID NO: 1577947 - RNA, 19 nt, Artificial Sequence
  Description of Artificial Sequence: Synthetic oligonucleotide
  Sense strand starting at position 39 of SEQ ID NO: 1560125
ggaaacugaucucugcaga

SEQ ID NO: 1577948 - RNA, 19 nt, Artificial Sequence
  Description of Artificial Sequence: Synthetic oligonucleotide
  Antisense strand to SEQ ID NO: 1577947
ucugcagagaucaguuucc

SEQ ID NO: 1577949 - RNA, 19 nt, Artificial Sequence
  Description of Artificial Sequence: Synthetic oligonucleotide
  Sense strand starting at position 139 of SEQ ID NO: 1560125
gaaugaaugagccgaggau

SEQ ID NO: 1577950 - RNA, 19 nt, Artificial Sequence
  Description of Artificial Sequence: Synthetic oligonucleotide
  Antisense strand to SEQ ID NO: 1577949
auccucggcucauucauuc

SEQ ID NO: 1577951 - RNA, 19 nt, Artificial Sequence
  Description of Artificial Sequence: Synthetic oligonucleotide
  Sense strand starting at position 185 of SEQ ID NO: 1560125
gggugcaauucucugccua

SEQ ID NO: 1577952 - RNA, 19 nt, Artificial Sequence
  Description of Artificial Sequence: Synthetic oligonucleotide
  Antisense strand to SEQ ID NO: 1577951
uaggcagagaauugcaccc

SEQ ID NO: 1577953 - RNA, 19 nt, Artificial Sequence
  Description of Artificial Sequence: Synthetic oligonucleotide
  Sense strand starting at position 186 of SEQ ID NO: 1560125
ggugcaauucucugccuaa

SEQ ID NO: 1577954 - RNA, 19 nt, Artificial Sequence
  Description of Artificial Sequence: Synthetic oligonucleotide
  Antisense strand to SEQ ID NO: 1577953
uuaggcagagaauugcacc

SEQ ID NO: 1577955 - RNA, 19 nt, Artificial Sequence
  Description of Artificial Sequence: Synthetic oligonucleotide
  Sense strand starting at position 187 of SEQ ID NO: 1560125
gugcaauucucugccuaaa

SEQ ID NO: 1577956 - RNA, 19 nt, Artificial Sequence
  Description of Artificial Sequence: Synthetic oligonucleotide
  Antisense strand to SEQ ID NO: 1577955
uuuaggcagagaauugcac

SEQ ID NO: 1577957 - RNA, 19 nt, Artificial Sequence
  Description of Artificial Sequence: Synthetic oligonucleotide
  Sense strand starting at position 189 of SEQ ID NO: 1560125
gcaauucucugccuaaaug

SEQ ID NO: 1577958 - RNA, 19 nt, Artificial Sequence
  Description of Artificial Sequence: Synthetic oligonucleotide
  Antisense strand to SEQ ID NO: 1577957
cauuuaggcagagaauugc

SEQ ID NO: 1577959 - RNA, 19 nt, Artificial Sequence
  Description of Artificial Sequence: Synthetic oligonucleotide
  Sense strand starting at position 201 of SEQ ID NO: 1560125
cuaaauggccuuuggaguu

SEQ ID NO: 1577960 - RNA, 19 nt, Artificial Sequence
  Description of Artificial Sequence: Synthetic oligonucleotide
  Antisense strand to SEQ ID NO: 1577959
aacuccaaaggccauuuag

SEQ ID NO: 1577961 - RNA, 19 nt, Artificial Sequence
  Description of Artificial Sequence: Synthetic oligonucleotide
  Sense strand starting at position 211 of SEQ ID NO: 1560125
uuuggaguucucugcaauc

SEQ ID NO: 1577962 - RNA, 19 nt, Artificial Sequence
  Description of Artificial Sequence: Synthetic oligonucleotide
  Antisense strand to SEQ ID NO: 1577961
gauugcagagaacuccaaa

SEQ ID NO: 1577963 - RNA, 19 nt, Artificial Sequence
  Description of Artificial Sequence: Synthetic oligonucleotide
  Sense strand starting at position 213 of SEQ ID NO: 1560125
uggaguucucugcaaucuc

SEQ ID NO: 1577964 - RNA, 19 nt, Artificial Sequence
  Description of Artificial Sequence: Synthetic oligonucleotide
  Antisense strand to SEQ ID NO: 1577963
gagauugcagagaacucca

SEQ ID NO: 1577965 - RNA, 19 nt, Artificial Sequence
  Description of Artificial Sequence: Synthetic oligonucleotide
  Sense strand starting at position 261 of SEQ ID NO: 1560125
gagucugagucccugcaga

SEQ ID NO: 1577966 - RNA, 19 nt, Artificial Sequence
  Description of Artificial Sequence: Synthetic oligonucleotide
  Antisense strand to SEQ ID NO: 1577965
ucugcagggacucagacuc

SEQ ID NO: 1577967 - RNA, 19 nt, Artificial Sequence
  Description of Artificial Sequence: Synthetic oligonucleotide
  Sense strand starting at position 682 of SEQ ID NO: 1560125
ggaauuguccuuuggcgac

SEQ ID NO: 1577968 - RNA, 19 nt, Artificial Sequence
  Description of Artificial Sequence: Synthetic oligonucleotide
  Antisense strand to SEQ ID NO: 1577967
gucgccaaaggacaauucc

SEQ ID NO: 1577969 - RNA, 19 nt, Artificial Sequence
  Description of Artificial Sequence: Synthetic oligonucleotide
  Sense strand starting at position 689 of SEQ ID NO: 1560125
uccuuuggcgacugaaauc

SEQ ID NO: 1577970 - RNA, 19 nt, Artificial Sequence
  Description of Artificial Sequence: Synthetic oligonucleotide
  Antisense strand to SEQ ID NO: 1577969
gauuucagucgccaaagga

SEQ ID NO: 1577971 - RNA, 19 nt, Artificial Sequence
  Description of Artificial Sequence: Synthetic oligonucleotide
  Sense strand starting at position 711 of SEQ ID NO: 1560125
aagugcuugcucugcggua

SEQ ID NO: 1577972 - RNA, 19 nt, Artificial Sequence
  Description of Artificial Sequence: Synthetic oligonucleotide
  Antisense strand to SEQ ID NO: 1577971
uaccgcagagcaagcacuu

SEQ ID NO: 1577973 - RNA, 19 nt, Artificial Sequence
  Description of Artificial Sequence: Synthetic oligonucleotide
  Sense strand starting at position 744 of SEQ ID NO: 1560125
aggaaagaguucccuauua

SEQ ID NO: 1577974 - RNA, 19 nt, Artificial Sequence
  Description of Artificial Sequence: Synthetic oligonucleotide
  Antisense strand to SEQ ID NO: 1577973
uaauagggaacucuuuccu

SEQ ID NO: 1577975 - RNA, 19 nt, Artificial Sequence
  Description of Artificial Sequence: Synthetic oligonucleotide
  Sense strand starting at position 793 of SEQ ID NO: 1560125
agacaugaggccuagucuu

SEQ ID NO: 1577976 - RNA, 19 nt, Artificial Sequence
  Description of Artificial Sequence: Synthetic oligonucleotide
  Antisense strand to SEQ ID NO: 1577975
aagacuaggccucaugucu

SEQ ID NO: 1577977 - RNA, 19 nt, Artificial Sequence
  Description of Artificial Sequence: Synthetic oligonucleotide
  Sense strand starting at position 845 of SEQ ID NO: 1560125
gagccaugcagugggaauu

SEQ ID NO: 1577978 - RNA, 19 nt, Artificial Sequence
  Description of Artificial Sequence: Synthetic oligonucleotide
  Antisense strand to SEQ ID NO: 1577977
aauucccacugcauggcuc

SEQ ID NO: 1577979 - RNA, 19 nt, Artificial Sequence
  Description of Artificial Sequence: Synthetic oligonucleotide
  Sense strand starting at position 1267 of SEQ ID NO: 1560125
ggaauccacucuugucagu

SEQ ID NO: 1577980 - RNA, 19 nt, Artificial Sequence
  Description of Artificial Sequence: Synthetic oligonucleotide
  Antisense strand to SEQ ID NO: 1577979
acugacaagaguggauucc

SEQ ID NO: 1577981 - RNA, 19 nt, Artificial Sequence
  Description of Artificial Sequence: Synthetic oligonucleotide
  Sense strand starting at position 1326 of SEQ ID NO: 1560125
ggauuaggauucuacaaua

SEQ ID NO: 1577982 - RNA, 19 nt, Artificial Sequence
  Description of Artificial Sequence: Synthetic oligonucleotide
  Antisense strand to SEQ ID NO: 1577981
uauuguagaauccuaaucc

SEQ ID NO: 1577983 - RNA, 19 nt, Artificial Sequence
  Description of Artificial Sequence: Synthetic oligonucleotide
  Sense strand starting at position 1339 of SEQ ID NO: 1560125
acaauacaucccuggcagu

SEQ ID NO: 1577984 - RNA, 19 nt, Artificial Sequence
  Description of Artificial Sequence: Synthetic oligonucleotide
  Antisense strand to SEQ ID NO: 1577983
acugccagggauguauugu

SEQ ID NO: 1577985 - RNA, 19 nt, Artificial Sequence
  Description of Artificial Sequence: Synthetic oligonucleotide
  Sense strand starting at position 1395 of SEQ ID NO: 1560125
cccucacaucuuuaggagu

SEQ ID NO: 1577986 - RNA, 19 nt, Artificial Sequence
  Description of Artificial Sequence: Synthetic oligonucleotide
  Antisense strand to SEQ ID NO: 1577985
acuccuaaagaugugaggg

SEQ ID NO: 1577987 - RNA, 19 nt, Artificial Sequence
  Description of Artificial Sequence: Synthetic oligonucleotide
  Sense strand starting at position 1883 of SEQ ID NO: 1560125
caaguugugcuggagggaa

SEQ ID NO: 1577988 - RNA, 19 nt, Artificial Sequence
  Description of Artificial Sequence: Synthetic oligonucleotide
  Antisense strand to SEQ ID NO: 1577987
uucccuccagcacaacuug

SEQ ID NO: 1577989 - RNA, 19 nt, Artificial Sequence
  Description of Artificial Sequence: Synthetic oligonucleotide
  Sense strand starting at position 2097 of SEQ ID NO: 1560125
acucucagccucuggaauu

SEQ ID NO: 1577990 - RNA, 19 nt, Artificial Sequence
  Description of Artificial Sequence: Synthetic oligonucleotide
  Antisense strand to SEQ ID NO: 1577989
aauuccagaggcugagagu

SEQ ID NO: 1577991 - RNA, 19 nt, Artificial Sequence
  Description of Artificial Sequence: Synthetic oligonucleotide
  Sense strand starting at position 2405 of SEQ ID NO: 1560125
gguaacuuagcaugucaca

SEQ ID NO: 1577992 - RNA, 19 nt, Artificial Sequence
  Description of Artificial Sequence: Synthetic oligonucleotide
  Antisense strand to SEQ ID NO: 1577991
ugugacaugcuaaguuacc

SEQ ID NO: 1577993 - RNA, 19 nt, Artificial Sequence
  Description of Artificial Sequence: Synthetic oligonucleotide
  Sense strand starting at position 2410 of SEQ ID NO: 1560125
cuuagcaugucacagaaau

SEQ ID NO: 1577994 - RNA, 19 nt, Artificial Sequence
  Description of Artificial Sequence: Synthetic oligonucleotide
  Antisense strand to SEQ ID NO: 1577993
auuucugugacaugcuaag

SEQ ID NO: 1577995 - RNA, 19 nt, Artificial Sequence
  Description of Artificial Sequence: Synthetic oligonucleotide
  Sense strand starting at position 2421 of SEQ ID NO: 1560125
acagaaauccucugguugu

SEQ ID NO: 1577996 - RNA, 19 nt, Artificial Sequence
  Description of Artificial Sequence: Synthetic oligonucleotide
  Antisense strand to SEQ ID NO: 1577995
acaaccagaggauuucugu

SEQ ID NO: 1577997 - RNA, 19 nt, Artificial Sequence
  Description of Artificial Sequence: Synthetic oligonucleotide
  Sense strand starting at position 2422 of SEQ ID NO: 1560125
cagaaauccucugguugug

SEQ ID NO: 1577998 - RNA, 19 nt, Artificial Sequence
  Description of Artificial Sequence: Synthetic oligonucleotide
  Antisense strand to SEQ ID NO: 1577997
cacaaccagaggauuucug

SEQ ID NO: 1577999 - RNA, 19 nt, Artificial Sequence
  Description of Artificial Sequence: Synthetic oligonucleotide
  Sense strand starting at position 2424 of SEQ ID NO: 1560125
gaaauccucugguugugau

SEQ ID NO: 1578000 - RNA, 19 nt, Artificial Sequence
  Description of Artificial Sequence: Synthetic oligonucleotide
  Antisense strand to SEQ ID NO: 1577999
aucacaaccagaggauuuc

SEQ ID NO: 1578001 - RNA, 19 nt, Artificial Sequence
  Description of Artificial Sequence: Synthetic oligonucleotide
  Sense strand starting at position 2428 of SEQ ID NO: 1560125
uccucugguugugaucaca

SEQ ID NO: 1578002 - RNA, 19 nt, Artificial Sequence
  Description of Artificial Sequence: Synthetic oligonucleotide
  Antisense strand to SEQ ID NO: 1578001
ugugaucacaaccagagga

SEQ ID NO: 1578003 - RNA, 19 nt, Artificial Sequence
  Description of Artificial Sequence: Synthetic oligonucleotide
  Sense strand starting at position 2550 of SEQ ID NO: 1560125
gaaauuagaugagagugau

SEQ ID NO: 1578004 - RNA, 19 nt, Artificial Sequence
  Description of Artificial Sequence: Synthetic oligonucleotide
  Antisense strand to SEQ ID NO: 1578003
aucacucucaucuaauuuc

SEQ ID NO: 1578005 - RNA, 19 nt, Artificial Sequence
  Description of Artificial Sequence: Synthetic oligonucleotide
  Sense strand starting at position 2553 of SEQ ID NO: 1560125
auuagaugagagugauggu

SEQ ID NO: 1578006 - RNA, 19 nt, Artificial Sequence
  Description of Artificial Sequence: Synthetic oligonucleotide
  Antisense strand to SEQ ID NO: 1578005
accaucacucucaucuaau

SEQ ID NO: 1578007 - RNA, 19 nt, Artificial Sequence
  Description of Artificial Sequence: Synthetic oligonucleotide
  Sense strand starting at position 2556 of SEQ ID NO: 1560125
agaugagagugaugguuac

SEQ ID NO: 1578008 - RNA, 19 nt, Artificial Sequence
  Description of Artificial Sequence: Synthetic oligonucleotide
  Antisense strand to SEQ ID NO: 1578007
guaaccaucacucucaucu

SEQ ID NO: 1578009 - RNA, 19 nt, Artificial Sequence
  Description of Artificial Sequence: Synthetic oligonucleotide
  Sense strand starting at position 2562 of SEQ ID NO: 1560125
gagugaugguuacauaacu

SEQ ID NO: 1578010 - RNA, 19 nt, Artificial Sequence
  Description of Artificial Sequence: Synthetic oligonucleotide
  Antisense strand to SEQ ID NO: 1578009
aguuauguaaccaucacuc

SEQ ID NO: 1578011 - RNA, 19 nt, Artificial Sequence
  Description of Artificial Sequence: Synthetic oligonucleotide
  Sense strand starting at position 2755 of SEQ ID NO: 1560125
uagagagaccugcgucacu

SEQ ID NO: 1578012 - RNA, 19 nt, Artificial Sequence
  Description of Artificial Sequence: Synthetic oligonucleotide
  Antisense strand to SEQ ID NO: 1578011
agugacgcaggucucucua

SEQ ID NO: 1578013 - RNA, 19 nt, Artificial Sequence
  Description of Artificial Sequence: Synthetic oligonucleotide
  Sense strand starting at position 2760 of SEQ ID NO: 1560125
agaccugcgucacuacaaa

SEQ ID NO: 1578014 - RNA, 19 nt, Artificial Sequence
  Description of Artificial Sequence: Synthetic oligonucleotide
  Antisense strand to SEQ ID NO: 1578013
uuuguagugacgcaggucu

SEQ ID NO: 1578015 - RNA, 19 nt, Artificial Sequence
  Description of Artificial Sequence: Synthetic oligonucleotide
  Sense strand starting at position 2790 of SEQ ID NO: 1560125
aaauuagccugacguagua

SEQ ID NO: 1578016 - RNA, 19 nt, Artificial Sequence
  Description of Artificial Sequence: Synthetic oligonucleotide
  Antisense strand to SEQ ID NO: 1578015
uacuacgucaggcuaauuu

SEQ ID NO: 1578017 - RNA, 19 nt, Artificial Sequence
  Description of Artificial Sequence: Synthetic oligonucleotide
  Sense strand starting at position 3709 of SEQ ID NO: 1560125
acagcugauugcuuuaaac

SEQ ID NO: 1578018 - RNA, 19 nt, Artificial Sequence
  Description of Artificial Sequence: Synthetic oligonucleotide
  Antisense strand to SEQ ID NO: 1578017
guuuaaagcaaucagcugu

SEQ ID NO: 1578019 - RNA, 19 nt, Artificial Sequence
  Description of Artificial Sequence: Synthetic oligonucleotide
  Sense strand starting at position 3711 of SEQ ID NO: 1560125
agcugauugcuuuaaacuu

SEQ ID NO: 1578020 - RNA, 19 nt, Artificial Sequence
  Description of Artificial Sequence: Synthetic oligonucleotide
  Antisense strand to SEQ ID NO: 1578019
aaguuuaaagcaaucagcu

SEQ ID NO: 1578021 - RNA, 19 nt, Artificial Sequence
  Description of Artificial Sequence: Synthetic oligonucleotide
  Sense strand starting at position 3754 of SEQ ID NO: 1560125
aucugaccucuguggguau

SEQ ID NO: 1578022 - RNA, 19 nt, Artificial Sequence
  Description of Artificial Sequence: Synthetic oligonucleotide
  Antisense strand to SEQ ID NO: 1578021
auacccacagaggucagau

SEQ ID NO: 1578023 - RNA, 19 nt, Artificial Sequence
  Description of Artificial Sequence: Synthetic oligonucleotide
  Sense strand starting at position 3767 of SEQ ID NO: 1560125
ggguauuuaucacauccua

SEQ ID NO: 1578024 - RNA, 19 nt, Artificial Sequence
  Description of Artificial Sequence: Synthetic oligonucleotide
  Antisense strand to SEQ ID NO: 1578023
uaggaugugauaaauaccc

SEQ ID NO: 1578025 - RNA, 19 nt, Artificial Sequence
  Description of Artificial Sequence: Synthetic oligonucleotide
  Sense strand starting at position 90 of SEQ ID NO: 1560126
cagcguuuaucugugauag

SEQ ID NO: 1578026 - RNA, 19 nt, Artificial Sequence
  Description of Artificial Sequence: Synthetic oligonucleotide
  Antisense strand to SEQ ID NO: 1578025
cuaucacagauaaacgcug

SEQ ID NO: 1578027 - RNA, 19 nt, Artificial Sequence
  Description of Artificial Sequence: Synthetic oligonucleotide
  Sense strand starting at position 91 of SEQ ID NO: 1560126
agcguuuaucugugauaga

SEQ ID NO: 1578028 - RNA, 19 nt, Artificial Sequence
  Description of Artificial Sequence: Synthetic oligonucleotide
  Antisense strand to SEQ ID NO: 1578027
ucuaucacagauaaacgcu

SEQ ID NO: 1578029 - RNA, 19 nt, Artificial Sequence
  Description of Artificial Sequence: Synthetic oligonucleotide
  Sense strand starting at position 176 of SEQ ID NO: 1560126
uccagccauuucugaaagu

SEQ ID NO: 1578030 - RNA, 19 nt, Artificial Sequence
  Description of Artificial Sequence: Synthetic oligonucleotide
  Antisense strand to SEQ ID NO: 1578029
acuuucagaaauggcugga

SEQ ID NO: 1578031 - RNA, 19 nt, Artificial Sequence
  Description of Artificial Sequence: Synthetic oligonucleotide
  Sense strand starting at position 177 of SEQ ID NO: 1560126
ccagccauuucugaaagua

SEQ ID NO: 1578032 - RNA, 19 nt, Artificial Sequence
  Description of Artificial Sequence: Synthetic oligonucleotide
  Antisense strand to SEQ ID NO: 1578031
uacuuucagaaauggcugg

SEQ ID NO: 1578033 - RNA, 19 nt, Artificial Sequence
  Description of Artificial Sequence: Synthetic oligonucleotide
  Sense strand starting at position 274 of SEQ ID NO: 1560126
ggaacuccuuaaggagaga

SEQ ID NO: 1578034 - RNA, 19 nt, Artificial Sequence
  Description of Artificial Sequence: Synthetic oligonucleotide
  Antisense strand to SEQ ID NO: 1578033
ucucuccuuaaggaguucc

SEQ ID NO: 1578035 - RNA, 19 nt, Artificial Sequence
  Description of Artificial Sequence: Synthetic oligonucleotide
  Sense strand starting at position 357 of SEQ ID NO: 1560126
gauacucuugcugagguca

SEQ ID NO: 1578036 - RNA, 19 nt, Artificial Sequence
  Description of Artificial Sequence: Synthetic oligonucleotide
  Antisense strand to SEQ ID NO: 1578035
ugaccucagcaagaguauc

SEQ ID NO: 1578037 - RNA, 19 nt, Artificial Sequence
  Description of Artificial Sequence: Synthetic oligonucleotide
  Sense strand starting at position 386 of SEQ ID NO: 1560126
gggaucaaugcagguaauu

SEQ ID NO: 1578038 - RNA, 19 nt, Artificial Sequence
  Description of Artificial Sequence: Synthetic oligonucleotide
  Antisense strand to SEQ ID NO: 1578037
aauuaccugcauugauccc

SEQ ID NO: 1578039 - RNA, 19 nt, Artificial Sequence
  Description of Artificial Sequence: Synthetic oligonucleotide
  Sense strand starting at position 524 of SEQ ID NO: 1560126
gaaaguuguugcuuauaaa

SEQ ID NO: 1578040 - RNA, 19 nt, Artificial Sequence
  Description of Artificial Sequence: Synthetic oligonucleotide
  Antisense strand to SEQ ID NO: 1578039
uuuauaagcaacaacuuuc

SEQ ID NO: 1578041 - RNA, 19 nt, Artificial Sequence
  Description of Artificial Sequence: Synthetic oligonucleotide
  Sense strand starting at position 616 of SEQ ID NO: 1560126
acaggacucuggguuacuu

SEQ ID NO: 1578042 - RNA, 19 nt, Artificial Sequence
  Description of Artificial Sequence: Synthetic oligonucleotide
  Antisense strand to SEQ ID NO: 1578041
aaguaacccagaguccugu

SEQ ID NO: 1578043 - RNA, 19 nt, Artificial Sequence
  Description of Artificial Sequence: Synthetic oligonucleotide
  Sense strand starting at position 626 of SEQ ID NO: 1560126
ggguuacuuucuuccucua

SEQ ID NO: 1578044 - RNA, 19 nt, Artificial Sequence
  Description of Artificial Sequence: Synthetic oligonucleotide
  Antisense strand to SEQ ID NO: 1578043
uagaggaagaaaguaaccc

SEQ ID NO: 1578045 - RNA, 19 nt, Artificial Sequence
  Description of Artificial Sequence: Synthetic oligonucleotide
  Sense strand starting at position 654 of SEQ ID NO: 1560126
caguuuccuccugggcaga

SEQ ID NO: 1578046 - RNA, 19 nt, Artificial Sequence
  Description of Artificial Sequence: Synthetic oligonucleotide
  Antisense strand to SEQ ID NO: 1578045
ucugcccaggaggaaacug

SEQ ID NO: 1578047 - RNA, 19 nt, Artificial Sequence
  Description of Artificial Sequence: Synthetic oligonucleotide
  Sense strand starting at position 655 of SEQ ID NO: 1560126
aguuuccuccugggcagaa

SEQ ID NO: 1578048 - RNA, 19 nt, Artificial Sequence
  Description of Artificial Sequence: Synthetic oligonucleotide
  Antisense strand to SEQ ID NO: 1578047
uucugcccaggaggaaacu

SEQ ID NO: 1578049 - RNA, 19 nt, Artificial Sequence
  Description of Artificial Sequence: Synthetic oligonucleotide
  Sense strand starting at position 680 of SEQ ID NO: 1560126
gacugaauacugugauguc

SEQ ID NO: 1578050 - RNA, 19 nt, Artificial Sequence
  Description of Artificial Sequence: Synthetic oligonucleotide
  Antisense strand to SEQ ID NO: 1578049
gacaucacaguauucaguc

SEQ ID NO: 1578051 - RNA, 19 nt, Artificial Sequence
  Description of Artificial Sequence: Synthetic oligonucleotide
  Sense strand starting at position 717 of SEQ ID NO: 1560126
cuaggcacauaucuguaau

SEQ ID NO: 1578052 - RNA, 19 nt, Artificial Sequence
  Description of Artificial Sequence: Synthetic oligonucleotide
  Antisense strand to SEQ ID NO: 1578051
auuacagauaugugccuag

SEQ ID NO: 1578053 - RNA, 19 nt, Artificial Sequence
  Description of Artificial Sequence: Synthetic oligonucleotide
  Sense strand starting at position 719 of SEQ ID NO: 1560126
aggcacauaucuguaaucu

SEQ ID NO: 1578054 - RNA, 19 nt, Artificial Sequence
  Description of Artificial Sequence: Synthetic oligonucleotide
  Antisense strand to SEQ ID NO: 1578053
agauuacagauaugugccu

SEQ ID NO: 1578055 - RNA, 19 nt, Artificial Sequence
  Description of Artificial Sequence: Synthetic oligonucleotide
  Sense strand starting at position 757 of SEQ ID NO: 1560126
acaccaagcuuccuggaau

SEQ ID NO: 1578056 - RNA, 19 nt, Artificial Sequence
  Description of Artificial Sequence: Synthetic oligonucleotide
  Antisense strand to SEQ ID NO: 1578055
auuccaggaagcuuggugu

SEQ ID NO: 1578057 - RNA, 19 nt, Artificial Sequence
  Description of Artificial Sequence: Synthetic oligonucleotide
  Sense strand starting at position 861 of SEQ ID NO: 1560126
accagagugucuccagcaa

SEQ ID NO: 1578058 - RNA, 19 nt, Artificial Sequence
  Description of Artificial Sequence: Synthetic oligonucleotide
  Antisense strand to SEQ ID NO: 1578057
uugcuggagacacucuggu

SEQ ID NO: 1578059 - RNA, 19 nt, Artificial Sequence
  Description of Artificial Sequence: Synthetic oligonucleotide
  Sense strand starting at position 865 of SEQ ID NO: 1560126
gagugucuccagcaagaga

SEQ ID NO: 1578060 - RNA, 19 nt, Artificial Sequence
  Description of Artificial Sequence: Synthetic oligonucleotide
  Antisense strand to SEQ ID NO: 1578059
ucucuugcuggagacacuc

SEQ ID NO: 1578061 - RNA, 19 nt, Artificial Sequence
  Description of Artificial Sequence: Synthetic oligonucleotide
  Sense strand starting at position 1092 of SEQ ID NO: 1560126
agagaaagcugaucagguu

SEQ ID NO: 1578062 - RNA, 19 nt, Artificial Sequence
  Description of Artificial Sequence: Synthetic oligonucleotide
  Antisense strand to SEQ ID NO: 1578061
aaccugaucagcuuucucu

SEQ ID NO: 1578063 - RNA, 19 nt, Artificial Sequence
  Description of Artificial Sequence: Synthetic oligonucleotide
  Sense strand starting at position 2703 of SEQ ID NO: 1560126
agugcauugggucguucau

SEQ ID NO: 1578064 - RNA, 19 nt, Artificial Sequence
  Description of Artificial Sequence: Synthetic oligonucleotide
  Antisense strand to SEQ ID NO: 1578063
augaacgacccaaugcacu

SEQ ID NO: 1578065 - RNA, 19 nt, Artificial Sequence
  Description of Artificial Sequence: Synthetic oligonucleotide
  Sense strand starting at position 2704 of SEQ ID NO: 1560126
gugcauugggucguucauu

SEQ ID NO: 1578066 - RNA, 19 nt, Artificial Sequence
  Description of Artificial Sequence: Synthetic oligonucleotide
  Antisense strand to SEQ ID NO: 1578065
aaugaacgacccaaugcac

SEQ ID NO: 1578067 - RNA, 19 nt, Artificial Sequence
  Description of Artificial Sequence: Synthetic oligonucleotide
  Sense strand starting at position 2733 of SEQ ID NO: 1560126
aggaaucugugaguuccuu

SEQ ID NO: 1578068 - RNA, 19 nt, Artificial Sequence
  Description of Artificial Sequence: Synthetic oligonucleotide
  Antisense strand to SEQ ID NO: 1578067
aaggaacucacagauuccu

SEQ ID NO: 1578069 - RNA, 19 nt, Artificial Sequence
  Description of Artificial Sequence: Synthetic oligonucleotide
  Sense strand starting at position 2737 of SEQ ID NO: 1560126
aucugugaguuccuuccau

SEQ ID NO: 1578070 - RNA, 19 nt, Artificial Sequence
  Description of Artificial Sequence: Synthetic oligonucleotide
  Antisense strand to SEQ ID NO: 1578069
auggaaggaacucacagau

SEQ ID NO: 1578071 - RNA, 19 nt, Artificial Sequence
  Description of Artificial Sequence: Synthetic oligonucleotide
  Sense strand starting at position 2791 of SEQ ID NO: 1560126
cuuccuggcucucugaaga

SEQ ID NO: 1578072 - RNA, 19 nt, Artificial Sequence
  Description of Artificial Sequence: Synthetic oligonucleotide
  Antisense strand to SEQ ID NO: 1578071
ucuucagagagccaggaag

SEQ ID NO: 1578073 - RNA, 19 nt, Artificial Sequence
  Description of Artificial Sequence: Synthetic oligonucleotide
  Sense strand starting at position 2810 of SEQ ID NO: 1560126
ccuuucugacucugggauu

SEQ ID NO: 1578074 - RNA, 19 nt, Artificial Sequence
  Description of Artificial Sequence: Synthetic oligonucleotide
  Antisense strand to SEQ ID NO: 1578073
aaucccagagucagaaagg

SEQ ID NO: 1578075 - RNA, 19 nt, Artificial Sequence
  Description of Artificial Sequence: Synthetic oligonucleotide
  Sense strand starting at position 3001 of SEQ ID NO: 1560126
uccaguuguuucgcauaag

SEQ ID NO: 1578076 - RNA, 19 nt, Artificial Sequence
  Description of Artificial Sequence: Synthetic oligonucleotide
  Antisense strand to SEQ ID NO: 1578075
cuuaugcgaaacaacugga

SEQ ID NO: 1578077 - RNA, 19 nt, Artificial Sequence
  Description of Artificial Sequence: Synthetic oligonucleotide
  Sense strand starting at position 3004 of SEQ ID NO: 1560126
aguuguuucgcauaagggu

SEQ ID NO: 1578078 - RNA, 19 nt, Artificial Sequence
  Description of Artificial Sequence: Synthetic oligonucleotide
  Antisense strand to SEQ ID NO: 1578077
acccuuaugcgaaacaacu

SEQ ID NO: 1578079 - RNA, 19 nt, Artificial Sequence
  Description of Artificial Sequence: Synthetic oligonucleotide
  Sense strand starting at position 3343 of SEQ ID NO: 1560126
aucugucaguucuuggcau

SEQ ID NO: 1578080 - RNA, 19 nt, Artificial Sequence
  Description of Artificial Sequence: Synthetic oligonucleotide
  Antisense strand to SEQ ID NO: 1578079
augccaagaacugacagau

SEQ ID NO: 1578081 - RNA, 19 nt, Artificial Sequence
  Description of Artificial Sequence: Synthetic oligonucleotide
  Sense strand starting at position 3345 of SEQ ID NO: 1560126
cugucaguucuuggcauag

SEQ ID NO: 1578082 - RNA, 19 nt, Artificial Sequence
  Description of Artificial Sequence: Synthetic oligonucleotide
  Antisense strand to SEQ ID NO: 1578081
cuaugccaagaacugacag

SEQ ID NO: 1578083 - RNA, 19 nt, Artificial Sequence
  Description of Artificial Sequence: Synthetic oligonucleotide
  Sense strand starting at position 3357 of SEQ ID NO: 1560126
ggcauagugccuggaccaa

SEQ ID NO: 1578084 - RNA, 19 nt, Artificial Sequence
  Description of Artificial Sequence: Synthetic oligonucleotide
  Antisense strand to SEQ ID NO: 1578083
uugguccaggcacuaugcc

SEQ ID NO: 1578085 - RNA, 19 nt, Artificial Sequence
  Description of Artificial Sequence: Synthetic oligonucleotide
  Sense strand starting at position 3384 of SEQ ID NO: 1560126
cuuaaauuguuucugaaug

SEQ ID NO: 1578086 - RNA, 19 nt, Artificial Sequence
  Description of Artificial Sequence: Synthetic oligonucleotide
  Antisense strand to SEQ ID NO: 1578085
cauucagaaacaauuuaag

SEQ ID NO: 1578087 - RNA, 19 nt, Artificial Sequence
  Description of Artificial Sequence: Synthetic oligonucleotide
  Sense strand starting at position 3389 of SEQ ID NO: 1560126
auuguuucugaaugaacau

SEQ ID NO: 1578088 - RNA, 19 nt, Artificial Sequence
  Description of Artificial Sequence: Synthetic oligonucleotide
  Antisense strand to SEQ ID NO: 1578087
auguucauucagaaacaau

SEQ ID NO: 1578089 - RNA, 19 nt, Artificial Sequence
  Description of Artificial Sequence: Synthetic oligonucleotide
  Sense strand starting at position 3509 of SEQ ID NO: 1560126
ucaggaagaugugcguaaa

SEQ ID NO: 1578090 - RNA, 19 nt, Artificial Sequence
  Description of Artificial Sequence: Synthetic oligonucleotide
  Antisense strand to SEQ ID NO: 1578089
uuuacgcacaucuuccuga

SEQ ID NO: 1578091 - RNA, 19 nt, Artificial Sequence
  Description of Artificial Sequence: Synthetic oligonucleotide
  Sense strand starting at position 3730 of SEQ ID NO: 1560126
uccugugcccguuaggaau

SEQ ID NO: 1578092 - RNA, 19 nt, Artificial Sequence
  Description of Artificial Sequence: Synthetic oligonucleotide
  Antisense strand to SEQ ID NO: 1578091
auuccuaacgggcacagga

SEQ ID NO: 1578093 - RNA, 19 nt, Artificial Sequence
  Description of Artificial Sequence: Synthetic oligonucleotide
  Sense strand starting at position 3894 of SEQ ID NO: 1560126
ucccaaggaucauugugaa

SEQ ID NO: 1578094 - RNA, 19 nt, Artificial Sequence
  Description of Artificial Sequence: Synthetic oligonucleotide
  Antisense strand to SEQ ID NO: 1578093
uucacaaugauccuuggga

SEQ ID NO: 1578095 - RNA, 19 nt, Artificial Sequence
  Description of Artificial Sequence: Synthetic oligonucleotide
  Sense strand starting at position 3897 of SEQ ID NO: 1560126
caaggaucauugugaagau

SEQ ID NO: 1578096 - RNA, 19 nt, Artificial Sequence
  Description of Artificial Sequence: Synthetic oligonucleotide
  Antisense strand to SEQ ID NO: 1578095
aucuucacaaugauccuug

SEQ ID NO: 1578097 - RNA, 19 nt, Artificial Sequence
  Description of Artificial Sequence: Synthetic oligonucleotide
  Sense strand starting at position 3898 of SEQ ID NO: 1560126
aaggaucauugugaagauu

SEQ ID NO: 1578098 - RNA, 19 nt, Artificial Sequence
  Description of Artificial Sequence: Synthetic oligonucleotide
  Antisense strand to SEQ ID NO: 1578097
aaucuucacaaugauccuu

SEQ ID NO: 1578099 - RNA, 19 nt, Artificial Sequence
  Description of Artificial Sequence: Synthetic oligonucleotide
  Sense strand starting at position 3927 of SEQ ID NO: 1560126
agcugacuccuguacagua

SEQ ID NO: 1578100 - RNA, 19 nt, Artificial Sequence
  Description of Artificial Sequence: Synthetic oligonucleotide
  Antisense strand to SEQ ID NO: 1578099
uacuguacaggagucagcu

SEQ ID NO: 1578101 - RNA, 19 nt, Artificial Sequence
  Description of Artificial Sequence: Synthetic oligonucleotide
  Sense strand starting at position 3957 of SEQ ID NO: 1560126
guaaaugcucacuaaauga

SEQ ID NO: 1578102 - RNA, 19 nt, Artificial Sequence
  Description of Artificial Sequence: Synthetic oligonucleotide
  Antisense strand to SEQ ID NO: 1578101
ucauuuagugagcauuuac

SEQ ID NO: 1578103 - RNA, 19 nt, Artificial Sequence
  Description of Artificial Sequence: Synthetic oligonucleotide
  Sense strand starting at position 3980 of SEQ ID NO: 1560126
uuauaaugaugguagacaa

SEQ ID NO: 1578104 - RNA, 19 nt, Artificial Sequence
  Description of Artificial Sequence: Synthetic oligonucleotide
  Antisense strand to SEQ ID NO: 1578103
uugucuaccaucauuauaa

SEQ ID NO: 1578105 - RNA, 19 nt, Artificial Sequence
  Description of Artificial Sequence: Synthetic oligonucleotide
  Sense strand starting at position 38 of SEQ ID NO: 1560127
ggcacuggauuugaucaga

SEQ ID NO: 1578106 - RNA, 19 nt, Artificial Sequence
  Description of Artificial Sequence: Synthetic oligonucleotide
  Antisense strand to SEQ ID NO: 1578105
ucugaucaaauccagugcc

SEQ ID NO: 1578107 - RNA, 19 nt, Artificial Sequence
  Description of Artificial Sequence: Synthetic oligonucleotide
  Sense strand starting at position 43 of SEQ ID NO: 1560127
uggauuugaucagauaccu

SEQ ID NO: 1578108 - RNA, 19 nt, Artificial Sequence
  Description of Artificial Sequence: Synthetic oligonucleotide
  Antisense strand to SEQ ID NO: 1578107
agguaucugaucaaaucca

SEQ ID NO: 1578109 - RNA, 19 nt, Artificial Sequence
  Description of Artificial Sequence: Synthetic oligonucleotide
  Sense strand starting at position 514 of SEQ ID NO: 1560127
gcgagacgcuuucucagaa

SEQ ID NO: 1578110 - RNA, 19 nt, Artificial Sequence
  Description of Artificial Sequence: Synthetic oligonucleotide
  Antisense strand to SEQ ID NO: 1578109
uucugagaaagcgucucgc

SEQ ID NO: 1578111 - RNA, 19 nt, Artificial Sequence
  Description of Artificial Sequence: Synthetic oligonucleotide
  Sense strand starting at position 515 of SEQ ID NO: 1560127
cgagacgcuuucucagaaa

SEQ ID NO: 1578112 - RNA, 19 nt, Artificial Sequence
  Description of Artificial Sequence: Synthetic oligonucleotide
  Antisense strand to SEQ ID NO: 1578111
uuucugagaaagcgucucg

SEQ ID NO: 1578113 - RNA, 19 nt, Artificial Sequence
  Description of Artificial Sequence: Synthetic oligonucleotide
  Sense strand starting at position 702 of SEQ ID NO: 1560127
gaagcagacucauugguca

SEQ ID NO: 1578114 - RNA, 19 nt, Artificial Sequence
  Description of Artificial Sequence: Synthetic oligonucleotide
  Antisense strand to SEQ ID NO: 1578113
ugaccaaugagucugcuuc

SEQ ID NO: 1578115 - RNA, 19 nt, Artificial Sequence
  Description of Artificial Sequence: Synthetic oligonucleotide
  Sense strand starting at position 704 of SEQ ID NO: 1560127
agcagacucauuggucaag

SEQ ID NO: 1578116 - RNA, 19 nt, Artificial Sequence
  Description of Artificial Sequence: Synthetic oligonucleotide
  Antisense strand to SEQ ID NO: 1578115
cuugaccaaugagucugcu

SEQ ID NO: 1578117 - RNA, 19 nt, Artificial Sequence
  Description of Artificial Sequence: Synthetic oligonucleotide
  Sense strand starting at position 710 of SEQ ID NO: 1560127
cucauuggucaagggaaug

SEQ ID NO: 1578118 - RNA, 19 nt, Artificial Sequence
  Description of Artificial Sequence: Synthetic oligonucleotide
  Antisense strand to SEQ ID NO: 1578117
cauucccuugaccaaugag

SEQ ID NO: 1578119 - RNA, 19 nt, Artificial Sequence
  Description of Artificial Sequence: Synthetic oligonucleotide
  Sense strand starting at position 788 of SEQ ID NO: 1560127
acaggagacuucuguguuc

SEQ ID NO: 1578120 - RNA, 19 nt, Artificial Sequence
  Description of Artificial Sequence: Synthetic oligonucleotide
  Antisense strand to SEQ ID NO: 1578119
gaacacagaagucuccugu

SEQ ID NO: 1578121 - RNA, 19 nt, Artificial Sequence
  Description of Artificial Sequence: Synthetic oligonucleotide
  Sense strand starting at position 1011 of SEQ ID NO: 1560127
cguccuguuugcucuuaga

SEQ ID NO: 1578122 - RNA, 19 nt, Artificial Sequence
  Description of Artificial Sequence: Synthetic oligonucleotide
  Antisense strand to SEQ ID NO: 1578121
ucuaagagcaaacaggacg

SEQ ID NO: 1578123 - RNA, 19 nt, Artificial Sequence
  Description of Artificial Sequence: Synthetic oligonucleotide
  Sense strand starting at position 1014 of SEQ ID NO: 1560127
ccuguuugcucuuagaaga

SEQ ID NO: 1578124 - RNA, 19 nt, Artificial Sequence
  Description of Artificial Sequence: Synthetic oligonucleotide
  Antisense strand to SEQ ID NO: 1578123
ucuucuaagagcaaacagg

SEQ ID NO: 1578125 - RNA, 19 nt, Artificial Sequence
  Description of Artificial Sequence: Synthetic oligonucleotide
  Sense strand starting at position 1987 of SEQ ID NO: 1560127
ggaaacaaguccuuuauac

SEQ ID NO: 1578126 - RNA, 19 nt, Artificial Sequence
  Description of Artificial Sequence: Synthetic oligonucleotide
  Antisense strand to SEQ ID NO: 1578125
guauaaaggacuuguuucc

SEQ ID NO: 1578127 - RNA, 19 nt, Artificial Sequence
  Description of Artificial Sequence: Synthetic oligonucleotide
  Sense strand starting at position 2491 of SEQ ID NO: 1560127
ggcccuccauaguuagaaa

SEQ ID NO: 1578128 - RNA, 19 nt, Artificial Sequence
  Description of Artificial Sequence: Synthetic oligonucleotide
  Antisense strand to SEQ ID NO: 1578127
uuucuaacuauggagggcc

SEQ ID NO: 1578129 - RNA, 19 nt, Artificial Sequence
  Description of Artificial Sequence: Synthetic oligonucleotide
  Sense strand starting at position 2502 of SEQ ID NO: 1560127
guuagaaacuguggcaucu

SEQ ID NO: 1578130 - RNA, 19 nt, Artificial Sequence
  Description of Artificial Sequence: Synthetic oligonucleotide
  Antisense strand to SEQ ID NO: 1578129
agaugccacaguuucuaac

SEQ ID NO: 1578131 - RNA, 19 nt, Artificial Sequence
  Description of Artificial Sequence: Synthetic oligonucleotide
  Sense strand starting at position 2514 of SEQ ID NO: 1560127
ggcaucuugacccgagguu

SEQ ID NO: 1578132 - RNA, 19 nt, Artificial Sequence
  Description of Artificial Sequence: Synthetic oligonucleotide
  Antisense strand to SEQ ID NO: 1578131
aaccucgggucaagaugcc

SEQ ID NO: 1578133 - RNA, 19 nt, Artificial Sequence
  Description of Artificial Sequence: Synthetic oligonucleotide
  Sense strand starting at position 2622 of SEQ ID NO: 1560127
gcaguuuccucauuucuca

SEQ ID NO: 1578134 - RNA, 19 nt, Artificial Sequence
  Description of Artificial Sequence: Synthetic oligonucleotide
  Antisense strand to SEQ ID NO: 1578133
ugagaaaugaggaaacugc

SEQ ID NO: 1578135 - RNA, 19 nt, Artificial Sequence
  Description of Artificial Sequence: Synthetic oligonucleotide
  Sense strand starting at position 2937 of SEQ ID NO: 1560127
cugaauaucuaugaaagaa

SEQ ID NO: 1578136 - RNA, 19 nt, Artificial Sequence
  Description of Artificial Sequence: Synthetic oligonucleotide
  Antisense strand to SEQ ID NO: 1578135
uucuuucauagauauucag

SEQ ID NO: 1578137 - RNA, 19 nt, Artificial Sequence
  Description of Artificial Sequence: Synthetic oligonucleotide
  Sense strand starting at position 3063 of SEQ ID NO: 1560127
cucguaguguuggccuauu

SEQ ID NO: 1578138 - RNA, 19 nt, Artificial Sequence
  Description of Artificial Sequence: Synthetic oligonucleotide
  Antisense strand to SEQ ID NO: 1578137
aauaggccaacacuacgag

SEQ ID NO: 1578139 - RNA, 19 nt, Artificial Sequence
  Description of Artificial Sequence: Synthetic oligonucleotide
  Sense strand starting at position 3074 of SEQ ID NO: 1560127
ggccuauuucucuggugua

SEQ ID NO: 1578140 - RNA, 19 nt, Artificial Sequence
  Description of Artificial Sequence: Synthetic oligonucleotide
  Antisense strand to SEQ ID NO: 1578139
uacaccagagaaauaggcc

SEQ ID NO: 1578141 - RNA, 19 nt, Artificial Sequence
  Description of Artificial Sequence: Synthetic oligonucleotide
  Sense strand starting at position 3075 of SEQ ID NO: 1560127
gccuauuucucugguguaa

SEQ ID NO: 1578142 - RNA, 19 nt, Artificial Sequence
  Description of Artificial Sequence: Synthetic oligonucleotide
  Antisense strand to SEQ ID NO: 1578141
uuacaccagagaaauaggc

SEQ ID NO: 1578143 - RNA, 19 nt, Artificial Sequence
  Description of Artificial Sequence: Synthetic oligonucleotide
  Sense strand starting at position 3077 of SEQ ID NO: 1560127
cuauuucucugguguaaau

SEQ ID NO: 1578144 - RNA, 19 nt, Artificial Sequence
  Description of Artificial Sequence: Synthetic oligonucleotide
  Antisense strand to SEQ ID NO: 1578143
auuuacaccagagaaauag

SEQ ID NO: 1578145 - RNA, 19 nt, Artificial Sequence
  Description of Artificial Sequence: Synthetic oligonucleotide
  Sense strand starting at position 3089 of SEQ ID NO: 1560127
uguaaauacucauagcaug

SEQ ID NO: 1578146 - RNA, 19 nt, Artificial Sequence
  Description of Artificial Sequence: Synthetic oligonucleotide
  Antisense strand to SEQ ID NO: 1578145
caugcuaugaguauuuaca

SEQ ID NO: 1578147 - RNA, 19 nt, Artificial Sequence
  Description of Artificial Sequence: Synthetic oligonucleotide
  Sense strand starting at position 3094 of SEQ ID NO: 1560127
auacucauagcaugucuga

SEQ ID NO: 1578148 - RNA, 19 nt, Artificial Sequence
  Description of Artificial Sequence: Synthetic oligonucleotide
  Antisense strand to SEQ ID NO: 1578147
ucagacaugcuaugaguau

SEQ ID NO: 1578149 - RNA, 19 nt, Artificial Sequence
  Description of Artificial Sequence: Synthetic oligonucleotide
  Sense strand starting at position 3097 of SEQ ID NO: 1560127
cucauagcaugucugauuu

SEQ ID NO: 1578150 - RNA, 19 nt, Artificial Sequence
  Description of Artificial Sequence: Synthetic oligonucleotide
  Antisense strand to SEQ ID NO: 1578149
aaaucagacaugcuaugag

SEQ ID NO: 1578151 - RNA, 19 nt, Artificial Sequence
  Description of Artificial Sequence: Synthetic oligonucleotide
  Sense strand starting at position 3144 of SEQ ID NO: 1560127
ugaugaaaucccuagcuau

SEQ ID NO: 1578152 - RNA, 19 nt, Artificial Sequence
  Description of Artificial Sequence: Synthetic oligonucleotide
  Antisense strand to SEQ ID NO: 1578151
auagcuagggauuucauca

SEQ ID NO: 1578153 - RNA, 19 nt, Artificial Sequence
  Description of Artificial Sequence: Synthetic oligonucleotide
  Sense strand starting at position 3158 of SEQ ID NO: 1560127
gcuauuuaaccaugggcuu

SEQ ID NO: 1578154 - RNA, 19 nt, Artificial Sequence
  Description of Artificial Sequence: Synthetic oligonucleotide
  Antisense strand to SEQ ID NO: 1578153
aagcccaugguuaaauagc

SEQ ID NO: 1578155 - RNA, 19 nt, Artificial Sequence
  Description of Artificial Sequence: Synthetic oligonucleotide
  Sense strand starting at position 3171 of SEQ ID NO: 1560127
gggcuuguccagggcugua

SEQ ID NO: 1578156 - RNA, 19 nt, Artificial Sequence
  Description of Artificial Sequence: Synthetic oligonucleotide
  Antisense strand to SEQ ID NO: 1578155
uacagcccuggacaagccc

SEQ ID NO: 1578157 - RNA, 19 nt, Artificial Sequence
  Description of Artificial Sequence: Synthetic oligonucleotide
  Sense strand starting at position 3176 of SEQ ID NO: 1560127
uguccagggcuguacaaau

SEQ ID NO: 1578158 - RNA, 19 nt, Artificial Sequence
  Description of Artificial Sequence: Synthetic oligonucleotide
  Antisense strand to SEQ ID NO: 1578157
auuuguacagcccuggaca

SEQ ID NO: 1578159 - RNA, 19 nt, Artificial Sequence
  Description of Artificial Sequence: Synthetic oligonucleotide
  Sense strand starting at position 3185 of SEQ ID NO: 1560127
cuguacaaaucagcuguaa

SEQ ID NO: 1578160 - RNA, 19 nt, Artificial Sequence
  Description of Artificial Sequence: Synthetic oligonucleotide
  Antisense strand to SEQ ID NO: 1578159
uuacagcugauuuguacag

SEQ ID NO: 1578161 - RNA, 19 nt, Artificial Sequence
  Description of Artificial Sequence: Synthetic oligonucleotide
  Sense strand starting at position 3243 of SEQ ID NO: 1560127
ggguaucugucagugacug

SEQ ID NO: 1578162 - RNA, 19 nt, Artificial Sequence
  Description of Artificial Sequence: Synthetic oligonucleotide
  Antisense strand to SEQ ID NO: 1578161
cagucacugacagauaccc

SEQ ID NO: 1578163 - RNA, 19 nt, Artificial Sequence
  Description of Artificial Sequence: Synthetic oligonucleotide
  Sense strand starting at position 3347 of SEQ ID NO: 1560127
gaaugugacuugcaauuau

SEQ ID NO: 1578164 - RNA, 19 nt, Artificial Sequence
  Description of Artificial Sequence: Synthetic oligonucleotide
  Antisense strand to SEQ ID NO: 1578163
auaauugcaagucacauuc

SEQ ID NO: 1578165 - RNA, 19 nt, Artificial Sequence
  Description of Artificial Sequence: Synthetic oligonucleotide
  Sense strand starting at position 3396 of SEQ ID NO: 1560127
aucuuuauuugucuuugca

SEQ ID NO: 1578166 - RNA, 19 nt, Artificial Sequence
  Description of Artificial Sequence: Synthetic oligonucleotide
  Antisense strand to SEQ ID NO: 1578165
ugcaaagacaaauaaagau

SEQ ID NO: 1578167 - RNA, 19 nt, Artificial Sequence
  Description of Artificial Sequence: Synthetic oligonucleotide
  Sense strand starting at position 3398 of SEQ ID NO: 1560127
cuuuauuugucuuugcaag

SEQ ID NO: 1578168 - RNA, 19 nt, Artificial Sequence
  Description of Artificial Sequence: Synthetic oligonucleotide
  Antisense strand to SEQ ID NO: 1578167
cuugcaaagacaaauaaag

SEQ ID NO: 1578169 - RNA, 19 nt, Artificial Sequence
  Description of Artificial Sequence: Synthetic oligonucleotide
  Sense strand starting at position 3399 of SEQ ID NO: 1560127
uuuauuugucuuugcaagu

SEQ ID NO: 1578170 - RNA, 19 nt, Artificial Sequence
  Description of Artificial Sequence: Synthetic oligonucleotide
  Antisense strand to SEQ ID NO: 1578169
acuugcaaagacaaauaaa

SEQ ID NO: 1578171 - RNA, 19 nt, Artificial Sequence
  Description of Artificial Sequence: Synthetic oligonucleotide
  Sense strand starting at position 3400 of SEQ ID NO: 1560127
uuauuugucuuugcaaguu

SEQ ID NO: 1578172 - RNA, 19 nt, Artificial Sequence
  Description of Artificial Sequence: Synthetic oligonucleotide
  Antisense strand to SEQ ID NO: 1578171
aacuugcaaagacaaauaa

SEQ ID NO: 1578173 - RNA, 19 nt, Artificial Sequence
  Description of Artificial Sequence: Synthetic oligonucleotide
  Sense strand starting at position 3448 of SEQ ID NO: 1560127
cagggaaguguuugucuga

SEQ ID NO: 1578174 - RNA, 19 nt, Artificial Sequence
  Description of Artificial Sequence: Synthetic oligonucleotide
  Antisense strand to SEQ ID NO: 1578173
ucagacaaacacuucccug

SEQ ID NO: 1578175 - RNA, 19 nt, Artificial Sequence
  Description of Artificial Sequence: Synthetic oligonucleotide
  Sense strand starting at position 3449 of SEQ ID NO: 1560127
agggaaguguuugucugau

SEQ ID NO: 1578176 - RNA, 19 nt, Artificial Sequence
  Description of Artificial Sequence: Synthetic oligonucleotide
  Antisense strand to SEQ ID NO: 1578175
aucagacaaacacuucccu

SEQ ID NO: 1578177 - RNA, 19 nt, Artificial Sequence
  Description of Artificial Sequence: Synthetic oligonucleotide
  Sense strand starting at position 3451 of SEQ ID NO: 1560127
ggaaguguuugucugaucu

SEQ ID NO: 1578178 - RNA, 19 nt, Artificial Sequence
  Description of Artificial Sequence: Synthetic oligonucleotide
  Antisense strand to SEQ ID NO: 1578177
agaucagacaaacacuucc

SEQ ID NO: 1578179 - RNA, 19 nt, Artificial Sequence
  Description of Artificial Sequence: Synthetic oligonucleotide
  Sense strand starting at position 3791 of SEQ ID NO: 1560127
agcggugacucauaccagu

SEQ ID NO: 1578180 - RNA, 19 nt, Artificial Sequence
  Description of Artificial Sequence: Synthetic oligonucleotide
  Antisense strand to SEQ ID NO: 1578179
acugguaugagucaccgcu

SEQ ID NO: 1578181 - RNA, 19 nt, Artificial Sequence
  Description of Artificial Sequence: Synthetic oligonucleotide
  Sense strand starting at position 3794 of SEQ ID NO: 1560127
ggugacucauaccagucau

SEQ ID NO: 1578182 - RNA, 19 nt, Artificial Sequence
  Description of Artificial Sequence: Synthetic oligonucleotide
  Antisense strand to SEQ ID NO: 1578181
augacugguaugagucacc

SEQ ID NO: 1578183 - RNA, 19 nt, Artificial Sequence
  Description of Artificial Sequence: Synthetic oligonucleotide
  Sense strand starting at position 3838 of SEQ ID NO: 1560127
gguggaucuauugaaguca

SEQ ID NO: 1578184 - RNA, 19 nt, Artificial Sequence
  Description of Artificial Sequence: Synthetic oligonucleotide
  Antisense strand to SEQ ID NO: 1578183
ugacuucaauagauccacc

SEQ ID NO: 1578185 - RNA, 19 nt, Artificial Sequence
  Description of Artificial Sequence: Synthetic oligonucleotide
  Sense strand starting at position 114 of SEQ ID NO: 1560128
ucuccugcugcuuagauuu

SEQ ID NO: 1578186 - RNA, 19 nt, Artificial Sequence
  Description of Artificial Sequence: Synthetic oligonucleotide
  Antisense strand to SEQ ID NO: 1578185
aaaucuaagcagcaggaga

SEQ ID NO: 1578187 - RNA, 19 nt, Artificial Sequence
  Description of Artificial Sequence: Synthetic oligonucleotide
  Sense strand starting at position 178 of SEQ ID NO: 1560128
guagaucuccugcaucuua

SEQ ID NO: 1578188 - RNA, 19 nt, Artificial Sequence
  Description of Artificial Sequence: Synthetic oligonucleotide
  Antisense strand to SEQ ID NO: 1578187
uaagaugcaggagaucuac

SEQ ID NO: 1578189 - RNA, 19 nt, Artificial Sequence
  Description of Artificial Sequence: Synthetic oligonucleotide
  Sense strand starting at position 234 of SEQ ID NO: 1560128
aggucagcuccugguagau

SEQ ID NO: 1578190 - RNA, 19 nt, Artificial Sequence
  Description of Artificial Sequence: Synthetic oligonucleotide
  Antisense strand to SEQ ID NO: 1578189
aucuaccaggagcugaccu

SEQ ID NO: 1578191 - RNA, 19 nt, Artificial Sequence
  Description of Artificial Sequence: Synthetic oligonucleotide
  Sense strand starting at position 316 of SEQ ID NO: 1560128
guagaucuccugcagcuua

SEQ ID NO: 1578192 - RNA, 19 nt, Artificial Sequence
  Description of Artificial Sequence: Synthetic oligonucleotide
  Antisense strand to SEQ ID NO: 1578191
uaagcugcaggagaucuac

SEQ ID NO: 1578193 - RNA, 19 nt, Artificial Sequence
  Description of Artificial Sequence: Synthetic oligonucleotide
  Sense strand starting at position 403 of SEQ ID NO: 1560128
ggauuucucugagagcuca

SEQ ID NO: 1578194 - RNA, 19 nt, Artificial Sequence
  Description of Artificial Sequence: Synthetic oligonucleotide
  Antisense strand to SEQ ID NO: 1578193
ugagcucucagagaaaucc

SEQ ID NO: 1578195 - RNA, 19 nt, Artificial Sequence
  Description of Artificial Sequence: Synthetic oligonucleotide
  Sense strand starting at position 469 of SEQ ID NO: 1560128
ccuggauuguuccugacuu

SEQ ID NO: 1578196 - RNA, 19 nt, Artificial Sequence
  Description of Artificial Sequence: Synthetic oligonucleotide
  Antisense strand to SEQ ID NO: 1578195
aagucaggaacaauccagg

SEQ ID NO: 1578197 - RNA, 19 nt, Artificial Sequence
  Description of Artificial Sequence: Synthetic oligonucleotide
  Sense strand starting at position 471 of SEQ ID NO: 1560128
uggauuguuccugacuuau

SEQ ID NO: 1578198 - RNA, 19 nt, Artificial Sequence
  Description of Artificial Sequence: Synthetic oligonucleotide
  Antisense strand to SEQ ID NO: 1578197
auaagucaggaacaaucca

SEQ ID NO: 1578199 - RNA, 19 nt, Artificial Sequence
  Description of Artificial Sequence: Synthetic oligonucleotide
  Sense strand starting at position 587 of SEQ ID NO: 1560128
caucauuugugagagccaa

SEQ ID NO: 1578200 - RNA, 19 nt, Artificial Sequence
  Description of Artificial Sequence: Synthetic oligonucleotide
  Antisense strand to SEQ ID NO: 1578199
uuggcucucacaaaugaug

SEQ ID NO: 1578201 - RNA, 19 nt, Artificial Sequence
  Description of Artificial Sequence: Synthetic oligonucleotide
  Sense strand starting at position 600 of SEQ ID NO: 1560128
agccaaggucuugguuaau

SEQ ID NO: 1578202 - RNA, 19 nt, Artificial Sequence
  Description of Artificial Sequence: Synthetic oligonucleotide
  Antisense strand to SEQ ID NO: 1578201
auuaaccaagaccuuggcu

SEQ ID NO: 1578203 - RNA, 19 nt, Artificial Sequence
  Description of Artificial Sequence: Synthetic oligonucleotide
  Sense strand starting at position 1006 of SEQ ID NO: 1560128
cagggagagccuggucuaa

SEQ ID NO: 1578204 - RNA, 19 nt, Artificial Sequence
  Description of Artificial Sequence: Synthetic oligonucleotide
  Antisense strand to SEQ ID NO: 1578203
uuagaccaggcucucccug

SEQ ID NO: 1578205 - RNA, 19 nt, Artificial Sequence
  Description of Artificial Sequence: Synthetic oligonucleotide
  Sense strand starting at position 1008 of SEQ ID NO: 1560128
gggagagccuggucuaaau

SEQ ID NO: 1578206 - RNA, 19 nt, Artificial Sequence
  Description of Artificial Sequence: Synthetic oligonucleotide
  Antisense strand to SEQ ID NO: 1578205
auuuagaccaggcucuccc

SEQ ID NO: 1578207 - RNA, 19 nt, Artificial Sequence
  Description of Artificial Sequence: Synthetic oligonucleotide
  Sense strand starting at position 1994 of SEQ ID NO: 1560128
cugugaucuuuacuuccua

SEQ ID NO: 1578208 - RNA, 19 nt, Artificial Sequence
  Description of Artificial Sequence: Synthetic oligonucleotide
  Antisense strand to SEQ ID NO: 1578207
uaggaaguaaagaucacag

SEQ ID NO: 1578209 - RNA, 19 nt, Artificial Sequence
  Description of Artificial Sequence: Synthetic oligonucleotide
  Sense strand starting at position 2047 of SEQ ID NO: 1560128
uggguagggaucugucauc

SEQ ID NO: 1578210 - RNA, 19 nt, Artificial Sequence
  Description of Artificial Sequence: Synthetic oligonucleotide
  Antisense strand to SEQ ID NO: 1578209
gaugacagaucccuaccca

SEQ ID NO: 1578211 - RNA, 19 nt, Artificial Sequence
  Description of Artificial Sequence: Synthetic oligonucleotide
  Sense strand starting at position 2093 of SEQ ID NO: 1560128
augagaugggccggaucuu

SEQ ID NO: 1578212 - RNA, 19 nt, Artificial Sequence
  Description of Artificial Sequence: Synthetic oligonucleotide
  Antisense strand to SEQ ID NO: 1578211
aagauccggcccaucucau

SEQ ID NO: 1578213 - RNA, 19 nt, Artificial Sequence
  Description of Artificial Sequence: Synthetic oligonucleotide
  Sense strand starting at position 2094 of SEQ ID NO: 1560128
ugagaugggccggaucuuu

SEQ ID NO: 1578214 - RNA, 19 nt, Artificial Sequence
  Description of Artificial Sequence: Synthetic oligonucleotide
  Antisense strand to SEQ ID NO: 1578213
aaagauccggcccaucuca

SEQ ID NO: 1578215 - RNA, 19 nt, Artificial Sequence
  Description of Artificial Sequence: Synthetic oligonucleotide
  Sense strand starting at position 2215 of SEQ ID NO: 1560128
gauaaauuguaagagaaag

SEQ ID NO: 1578216 - RNA, 19 nt, Artificial Sequence
  Description of Artificial Sequence: Synthetic oligonucleotide
  Antisense strand to SEQ ID NO: 1578215
cuuucucuuacaauuuauc

SEQ ID NO: 1578217 - RNA, 19 nt, Artificial Sequence
  Description of Artificial Sequence: Synthetic oligonucleotide
  Sense strand starting at position 2610 of SEQ ID NO: 1560128
gcaugcuguuaaccaaaga

SEQ ID NO: 1578218 - RNA, 19 nt, Artificial Sequence
  Description of Artificial Sequence: Synthetic oligonucleotide
  Antisense strand to SEQ ID NO: 1578217
ucuuugguuaacagcaugc

SEQ ID NO: 1578219 - RNA, 19 nt, Artificial Sequence
  Description of Artificial Sequence: Synthetic oligonucleotide
  Sense strand starting at position 2711 of SEQ ID NO: 1560128
ccagcaggugaaugauaaa

SEQ ID NO: 1578220 - RNA, 19 nt, Artificial Sequence
  Description of Artificial Sequence: Synthetic oligonucleotide
  Antisense strand to SEQ ID NO: 1578219
uuuaucauucaccugcugg

SEQ ID NO: 1578221 - RNA, 19 nt, Artificial Sequence
  Description of Artificial Sequence: Synthetic oligonucleotide
  Sense strand starting at position 2844 of SEQ ID NO: 1560128
gugaguacacacuguaaga

SEQ ID NO: 1578222 - RNA, 19 nt, Artificial Sequence
  Description of Artificial Sequence: Synthetic oligonucleotide
  Antisense strand to SEQ ID NO: 1578221
ucuuacaguguguacucac

SEQ ID NO: 1578223 - RNA, 19 nt, Artificial Sequence
  Description of Artificial Sequence: Synthetic oligonucleotide
  Sense strand starting at position 2912 of SEQ ID NO: 1560128
gacucagaaugggaauuau

SEQ ID NO: 1578224 - RNA, 19 nt, Artificial Sequence
  Description of Artificial Sequence: Synthetic oligonucleotide
  Antisense strand to SEQ ID NO: 1578223
auaauucccauucugaguc

SEQ ID NO: 1578225 - RNA, 19 nt, Artificial Sequence
  Description of Artificial Sequence: Synthetic oligonucleotide
  Sense strand starting at position 2964 of SEQ ID NO: 1560128
uucuguaugcuggaaaugu

SEQ ID NO: 1578226 - RNA, 19 nt, Artificial Sequence
  Description of Artificial Sequence: Synthetic oligonucleotide
  Antisense strand to SEQ ID NO: 1578225
acauuuccagcauacagaa

SEQ ID NO: 1578227 - RNA, 19 nt, Artificial Sequence
  Description of Artificial Sequence: Synthetic oligonucleotide
  Sense strand starting at position 2968 of SEQ ID NO: 1560128
guaugcuggaaauguucua

SEQ ID NO: 1578228 - RNA, 19 nt, Artificial Sequence
  Description of Artificial Sequence: Synthetic oligonucleotide
  Antisense strand to SEQ ID NO: 1578227
uagaacauuuccagcauac

SEQ ID NO: 1578229 - RNA, 19 nt, Artificial Sequence
  Description of Artificial Sequence: Synthetic oligonucleotide
  Sense strand starting at position 2992 of SEQ ID NO: 1560128
ugaucauagagaugugcau

SEQ ID NO: 1578230 - RNA, 19 nt, Artificial Sequence
  Description of Artificial Sequence: Synthetic oligonucleotide
  Antisense strand to SEQ ID NO: 1578229
augcacaucucuaugauca

SEQ ID NO: 1578231 - RNA, 19 nt, Artificial Sequence
  Description of Artificial Sequence: Synthetic oligonucleotide
  Sense strand starting at position 3005 of SEQ ID NO: 1560128
gugcauuuaccacaugugu

SEQ ID NO: 1578232 - RNA, 19 nt, Artificial Sequence
  Description of Artificial Sequence: Synthetic oligonucleotide
  Antisense strand to SEQ ID NO: 1578231
acacaugugguaaaugcac

SEQ ID NO: 1578233 - RNA, 19 nt, Artificial Sequence
  Description of Artificial Sequence: Synthetic oligonucleotide
  Sense strand starting at position 3007 of SEQ ID NO: 1560128
gcauuuaccacaugugugu

SEQ ID NO: 1578234 - RNA, 19 nt, Artificial Sequence
  Description of Artificial Sequence: Synthetic oligonucleotide
  Antisense strand to SEQ ID NO: 1578233
acacacaugugguaaaugc

SEQ ID NO: 1578235 - RNA, 19 nt, Artificial Sequence
  Description of Artificial Sequence: Synthetic oligonucleotide
  Sense strand starting at position 3011 of SEQ ID NO: 1560128
uuaccacauguguguuaaa

SEQ ID NO: 1578236 - RNA, 19 nt, Artificial Sequence
  Description of Artificial Sequence: Synthetic oligonucleotide
  Antisense strand to SEQ ID NO: 1578235
uuuaacacacaugugguaa

SEQ ID NO: 1578237 - RNA, 19 nt, Artificial Sequence
  Description of Artificial Sequence: Synthetic oligonucleotide
  Sense strand starting at position 3083 of SEQ ID NO: 1560128
ucgaccugaucuuuacuuu

SEQ ID NO: 1578238 - RNA, 19 nt, Artificial Sequence
  Description of Artificial Sequence: Synthetic oligonucleotide
  Antisense strand to SEQ ID NO: 1578237
aaaguaaagaucaggucga

SEQ ID NO: 1578239 - RNA, 19 nt, Artificial Sequence
  Description of Artificial Sequence: Synthetic oligonucleotide
  Sense strand starting at position 3086 of SEQ ID NO: 1560128
accugaucuuuacuuugua

SEQ ID NO: 1578240 - RNA, 19 nt, Artificial Sequence
  Description of Artificial Sequence: Synthetic oligonucleotide
  Antisense strand to SEQ ID NO: 1578239
uacaaaguaaagaucaggu

SEQ ID NO: 1578241 - RNA, 19 nt, Artificial Sequence
  Description of Artificial Sequence: Synthetic oligonucleotide
  Sense strand starting at position 3087 of SEQ ID NO: 1560128
ccugaucuuuacuuuguau

SEQ ID NO: 1578242 - RNA, 19 nt, Artificial Sequence
  Description of Artificial Sequence: Synthetic oligonucleotide
  Antisense strand to SEQ ID NO: 1578241
auacaaaguaaagaucagg

SEQ ID NO: 1578243 - RNA, 19 nt, Artificial Sequence
  Description of Artificial Sequence: Synthetic oligonucleotide
  Sense strand starting at position 3155 of SEQ ID NO: 1560128
guugcaaauguaggaaaga

SEQ ID NO: 1578244 - RNA, 19 nt, Artificial Sequence
  Description of Artificial Sequence: Synthetic oligonucleotide
  Antisense strand to SEQ ID NO: 1578243
ucuuuccuacauuugcaac

SEQ ID NO: 1578245 - RNA, 19 nt, Artificial Sequence
  Description of Artificial Sequence: Synthetic oligonucleotide
  Sense strand starting at position 3250 of SEQ ID NO: 1560128
gguaaugagguaggaaacu

SEQ ID NO: 1578246 - RNA, 19 nt, Artificial Sequence
  Description of Artificial Sequence: Synthetic oligonucleotide
  Antisense strand to SEQ ID NO: 1578245
aguuuccuaccucauuacc

SEQ ID NO: 1578247 - RNA, 19 nt, Artificial Sequence
  Description of Artificial Sequence: Synthetic oligonucleotide
  Sense strand starting at position 3307 of SEQ ID NO: 1560128
uacagaaucugguccagau

SEQ ID NO: 1578248 - RNA, 19 nt, Artificial Sequence
  Description of Artificial Sequence: Synthetic oligonucleotide
  Antisense strand to SEQ ID NO: 1578247
aucuggaccagauucugua

SEQ ID NO: 1578249 - RNA, 19 nt, Artificial Sequence
  Description of Artificial Sequence: Synthetic oligonucleotide
  Sense strand starting at position 3324 of SEQ ID NO: 1560128
augagaugaugugaagaaa

SEQ ID NO: 1578250 - RNA, 19 nt, Artificial Sequence
  Description of Artificial Sequence: Synthetic oligonucleotide
  Antisense strand to SEQ ID NO: 1578249
uuucuucacaucaucucau

SEQ ID NO: 1578251 - RNA, 19 nt, Artificial Sequence
  Description of Artificial Sequence: Synthetic oligonucleotide
  Sense strand starting at position 3446 of SEQ ID NO: 1560128
ggcaaugaccuagaaguuc

SEQ ID NO: 1578252 - RNA, 19 nt, Artificial Sequence
  Description of Artificial Sequence: Synthetic oligonucleotide
  Antisense strand to SEQ ID NO: 1578251
gaacuucuaggucauugcc

SEQ ID NO: 1578253 - RNA, 19 nt, Artificial Sequence
  Description of Artificial Sequence: Synthetic oligonucleotide
  Sense strand starting at position 3557 of SEQ ID NO: 1560128
uuaacugacguauaacuga

SEQ ID NO: 1578254 - RNA, 19 nt, Artificial Sequence
  Description of Artificial Sequence: Synthetic oligonucleotide
  Antisense strand to SEQ ID NO: 1578253
ucaguuauacgucaguuaa

SEQ ID NO: 1578255 - RNA, 19 nt, Artificial Sequence
  Description of Artificial Sequence: Synthetic oligonucleotide
  Sense strand starting at position 3562 of SEQ ID NO: 1560128
ugacguauaacugaaagug

SEQ ID NO: 1578256 - RNA, 19 nt, Artificial Sequence
  Description of Artificial Sequence: Synthetic oligonucleotide
  Antisense strand to SEQ ID NO: 1578255
cacuuucaguuauacguca

SEQ ID NO: 1578257 - RNA, 19 nt, Artificial Sequence
  Description of Artificial Sequence: Synthetic oligonucleotide
  Sense strand starting at position 3570 of SEQ ID NO: 1560128
aacugaaagugaguugaca

SEQ ID NO: 1578258 - RNA, 19 nt, Artificial Sequence
  Description of Artificial Sequence: Synthetic oligonucleotide
  Antisense strand to SEQ ID NO: 1578257
ugucaacucacuuucaguu

SEQ ID NO: 1578259 - RNA, 19 nt, Artificial Sequence
  Description of Artificial Sequence: Synthetic oligonucleotide
  Sense strand starting at position 3572 of SEQ ID NO: 1560128
cugaaagugaguugacaug

SEQ ID NO: 1578260 - RNA, 19 nt, Artificial Sequence
  Description of Artificial Sequence: Synthetic oligonucleotide
  Antisense strand to SEQ ID NO: 1578259
caugucaacucacuuucag

SEQ ID NO: 1578261 - RNA, 19 nt, Artificial Sequence
  Description of Artificial Sequence: Synthetic oligonucleotide
  Sense strand starting at position 3578 of SEQ ID NO: 1560128
gugaguugacaugaguaua

SEQ ID NO: 1578262 - RNA, 19 nt, Artificial Sequence
  Description of Artificial Sequence: Synthetic oligonucleotide
  Antisense strand to SEQ ID NO: 1578261
uauacucaugucaacucac

SEQ ID NO: 1578263 - RNA, 19 nt, Artificial Sequence
  Description of Artificial Sequence: Synthetic oligonucleotide
  Sense strand starting at position 3668 of SEQ ID NO: 1560128
ggagcaguaucauuacaua

SEQ ID NO: 1578264 - RNA, 19 nt, Artificial Sequence
  Description of Artificial Sequence: Synthetic oligonucleotide
  Antisense strand to SEQ ID NO: 1578263
uauguaaugauacugcucc

SEQ ID NO: 1578265 - RNA, 19 nt, Artificial Sequence
  Description of Artificial Sequence: Synthetic oligonucleotide
  Sense strand starting at position 255 of SEQ ID NO: 1560129
auguacagagcuggucaaa

SEQ ID NO: 1578266 - RNA, 19 nt, Artificial Sequence
  Description of Artificial Sequence: Synthetic oligonucleotide
  Antisense strand to SEQ ID NO: 1578265
uuugaccagcucuguacau

SEQ ID NO: 1578267 - RNA, 19 nt, Artificial Sequence
  Description of Artificial Sequence: Synthetic oligonucleotide
  Sense strand starting at position 356 of SEQ ID NO: 1560129
cugaccucugcauagaguu

SEQ ID NO: 1578268 - RNA, 19 nt, Artificial Sequence
  Description of Artificial Sequence: Synthetic oligonucleotide
  Antisense strand to SEQ ID NO: 1578267
aacucuaugcagaggucag

SEQ ID NO: 1578269 - RNA, 19 nt, Artificial Sequence
  Description of Artificial Sequence: Synthetic oligonucleotide
  Sense strand starting at position 364 of SEQ ID NO: 1560129
ugcauagaguuauauuuac

SEQ ID NO: 1578270 - RNA, 19 nt, Artificial Sequence
  Description of Artificial Sequence: Synthetic oligonucleotide
  Antisense strand to SEQ ID NO: 1578269
guaaauauaacucuaugca

SEQ ID NO: 1578271 - RNA, 19 nt, Artificial Sequence
  Description of Artificial Sequence: Synthetic oligonucleotide
  Sense strand starting at position 370 of SEQ ID NO: 1560129
gaguuauauuuacauagag

SEQ ID NO: 1578272 - RNA, 19 nt, Artificial Sequence
  Description of Artificial Sequence: Synthetic oligonucleotide
  Antisense strand to SEQ ID NO: 1578271
cucuauguaaauauaacuc

SEQ ID NO: 1578273 - RNA, 19 nt, Artificial Sequence
  Description of Artificial Sequence: Synthetic oligonucleotide
  Sense strand starting at position 731 of SEQ ID NO: 1560129
gcagguacucaucauguca

SEQ ID NO: 1578274 - RNA, 19 nt, Artificial Sequence
  Description of Artificial Sequence: Synthetic oligonucleotide
  Antisense strand to SEQ ID NO: 1578273
ugacaugaugaguaccugc

SEQ ID NO: 1578275 - RNA, 19 nt, Artificial Sequence
  Description of Artificial Sequence: Synthetic oligonucleotide
  Sense strand starting at position 976 of SEQ ID NO: 1560129
ccgucugauuuguuuguuu

SEQ ID NO: 1578276 - RNA, 19 nt, Artificial Sequence
  Description of Artificial Sequence: Synthetic oligonucleotide
  Antisense strand to SEQ ID NO: 1578275
aaacaaacaaaucagacgg

SEQ ID NO: 1578277 - RNA, 19 nt, Artificial Sequence
  Description of Artificial Sequence: Synthetic oligonucleotide
  Sense strand starting at position 978 of SEQ ID NO: 1560129
gucugauuuguuuguuugu

SEQ ID NO: 1578278 - RNA, 19 nt, Artificial Sequence
  Description of Artificial Sequence: Synthetic oligonucleotide
  Antisense strand to SEQ ID NO: 1578277
acaaacaaacaaaucagac

SEQ ID NO: 1578279 - RNA, 19 nt, Artificial Sequence
  Description of Artificial Sequence: Synthetic oligonucleotide
  Sense strand starting at position 1135 of SEQ ID NO: 1560129
gauucuuuacugcaggacu

SEQ ID NO: 1578280 - RNA, 19 nt, Artificial Sequence
  Description of Artificial Sequence: Synthetic oligonucleotide
  Antisense strand to SEQ ID NO: 1578279
aguccugcaguaaagaauc

SEQ ID NO: 1578281 - RNA, 19 nt, Artificial Sequence
  Description of Artificial Sequence: Synthetic oligonucleotide
  Sense strand starting at position 1216 of SEQ ID NO: 1560129
aguauaauacauuguccau

SEQ ID NO: 1578282 - RNA, 19 nt, Artificial Sequence
  Description of Artificial Sequence: Synthetic oligonucleotide
  Antisense strand to SEQ ID NO: 1578281
auggacaauguauuauacu

SEQ ID NO: 1578283 - RNA, 19 nt, Artificial Sequence
  Description of Artificial Sequence: Synthetic oligonucleotide
  Sense strand starting at position 1293 of SEQ ID NO: 1560129
gagccagaguucuuugaaa

SEQ ID NO: 1578284 - RNA, 19 nt, Artificial Sequence
  Description of Artificial Sequence: Synthetic oligonucleotide
  Antisense strand to SEQ ID NO: 1578283
uuucaaagaacucuggcuc

SEQ ID NO: 1578285 - RNA, 19 nt, Artificial Sequence
  Description of Artificial Sequence: Synthetic oligonucleotide
  Sense strand starting at position 1295 of SEQ ID NO: 1560129
gccagaguucuuugaaauc

SEQ ID NO: 1578286 - RNA, 19 nt, Artificial Sequence
  Description of Artificial Sequence: Synthetic oligonucleotide
  Antisense strand to SEQ ID NO: 1578285
gauuucaaagaacucuggc

SEQ ID NO: 1578287 - RNA, 19 nt, Artificial Sequence
  Description of Artificial Sequence: Synthetic oligonucleotide
  Sense strand starting at position 1456 of SEQ ID NO: 1560129
ggagcaucccagcaugagu

SEQ ID NO: 1578288 - RNA, 19 nt, Artificial Sequence
  Description of Artificial Sequence: Synthetic oligonucleotide
  Antisense strand to SEQ ID NO: 1578287
acucaugcugggaugcucc

SEQ ID NO: 1578289 - RNA, 19 nt, Artificial Sequence
  Description of Artificial Sequence: Synthetic oligonucleotide
  Sense strand starting at position 1601 of SEQ ID NO: 1560129
agcaguuauuaugcacaga

SEQ ID NO: 1578290 - RNA, 19 nt, Artificial Sequence
  Description of Artificial Sequence: Synthetic oligonucleotide
  Antisense strand to SEQ ID NO: 1578289
ucugugcauaauaacugcu

SEQ ID NO: 1578291 - RNA, 19 nt, Artificial Sequence
  Description of Artificial Sequence: Synthetic oligonucleotide
  Sense strand starting at position 1602 of SEQ ID NO: 1560129
gcaguuauuaugcacagag

SEQ ID NO: 1578292 - RNA, 19 nt, Artificial Sequence
  Description of Artificial Sequence: Synthetic oligonucleotide
  Antisense strand to SEQ ID NO: 1578291
cucugugcauaauaacugc

SEQ ID NO: 1578293 - RNA, 19 nt, Artificial Sequence
  Description of Artificial Sequence: Synthetic oligonucleotide
  Sense strand starting at position 1665 of SEQ ID NO: 1560129
uguugagggccuugcagaa

SEQ ID NO: 1578294 - RNA, 19 nt, Artificial Sequence
  Description of Artificial Sequence: Synthetic oligonucleotide
  Antisense strand to SEQ ID NO: 1578293
uucugcaaggcccucaaca

SEQ ID NO: 1578295 - RNA, 19 nt, Artificial Sequence
  Description of Artificial Sequence: Synthetic oligonucleotide
  Sense strand starting at position 1805 of SEQ ID NO: 1560129
uguuguaacaccgguaaga

SEQ ID NO: 1578296 - RNA, 19 nt, Artificial Sequence
  Description of Artificial Sequence: Synthetic oligonucleotide
  Antisense strand to SEQ ID NO: 1578295
ucuuaccgguguuacaaca

SEQ ID NO: 1578297 - RNA, 19 nt, Artificial Sequence
  Description of Artificial Sequence: Synthetic oligonucleotide
  Sense strand starting at position 1807 of SEQ ID NO: 1560129
uuguaacaccgguaagaga

SEQ ID NO: 1578298 - RNA, 19 nt, Artificial Sequence
  Description of Artificial Sequence: Synthetic oligonucleotide
  Antisense strand to SEQ ID NO: 1578297
ucucuuaccgguguuacaa

SEQ ID NO: 1578299 - RNA, 19 nt, Artificial Sequence
  Description of Artificial Sequence: Synthetic oligonucleotide
  Sense strand starting at position 1863 of SEQ ID NO: 1560129
agguaugccuggcccauaa

SEQ ID NO: 1578300 - RNA, 19 nt, Artificial Sequence
  Description of Artificial Sequence: Synthetic oligonucleotide
  Antisense strand to SEQ ID NO: 1578299
uuaugggccaggcauaccu

SEQ ID NO: 1578301 - RNA, 19 nt, Artificial Sequence
  Description of Artificial Sequence: Synthetic oligonucleotide
  Sense strand starting at position 1881 of SEQ ID NO: 1560129
acugcuguuccguaauaac

SEQ ID NO: 1578302 - RNA, 19 nt, Artificial Sequence
  Description of Artificial Sequence: Synthetic oligonucleotide
  Antisense strand to SEQ ID NO: 1578301
guuauuacggaacagcagu

SEQ ID NO: 1578303 - RNA, 19 nt, Artificial Sequence
  Description of Artificial Sequence: Synthetic oligonucleotide
  Sense strand starting at position 1892 of SEQ ID NO: 1560129
guaauaacuugcuuguuga

SEQ ID NO: 1578304 - RNA, 19 nt, Artificial Sequence
  Description of Artificial Sequence: Synthetic oligonucleotide
  Antisense strand to SEQ ID NO: 1578303
ucaacaagcaaguuauuac

SEQ ID NO: 1578305 - RNA, 19 nt, Artificial Sequence
  Description of Artificial Sequence: Synthetic oligonucleotide
  Sense strand starting at position 1895 of SEQ ID NO: 1560129
auaacuugcuuguugaaug

SEQ ID NO: 1578306 - RNA, 19 nt, Artificial Sequence
  Description of Artificial Sequence: Synthetic oligonucleotide
  Antisense strand to SEQ ID NO: 1578305
cauucaacaagcaaguuau

SEQ ID NO: 1578307 - RNA, 19 nt, Artificial Sequence
  Description of Artificial Sequence: Synthetic oligonucleotide
  Sense strand starting at position 2002 of SEQ ID NO: 1560129
acaguaaagucucugguga

SEQ ID NO: 1578308 - RNA, 19 nt, Artificial Sequence
  Description of Artificial Sequence: Synthetic oligonucleotide
  Antisense strand to SEQ ID NO: 1578307
ucaccagagacuuuacugu

SEQ ID NO: 1578309 - RNA, 19 nt, Artificial Sequence
  Description of Artificial Sequence: Synthetic oligonucleotide
  Sense strand starting at position 2003 of SEQ ID NO: 1560129
caguaaagucucuggugac

SEQ ID NO: 1578310 - RNA, 19 nt, Artificial Sequence
  Description of Artificial Sequence: Synthetic oligonucleotide
  Antisense strand to SEQ ID NO: 1578309
gucaccagagacuuuacug

SEQ ID NO: 1578311 - RNA, 19 nt, Artificial Sequence
  Description of Artificial Sequence: Synthetic oligonucleotide
  Sense strand starting at position 2147 of SEQ ID NO: 1560129
ggaagacucgaauacguau

SEQ ID NO: 1578312 - RNA, 19 nt, Artificial Sequence
  Description of Artificial Sequence: Synthetic oligonucleotide
  Antisense strand to SEQ ID NO: 1578311
auacguauucgagucuucc

SEQ ID NO: 1578313 - RNA, 19 nt, Artificial Sequence
  Description of Artificial Sequence: Synthetic oligonucleotide
  Sense strand starting at position 2188 of SEQ ID NO: 1560129
auggguuugcaauaucaga

SEQ ID NO: 1578314 - RNA, 19 nt, Artificial Sequence
  Description of Artificial Sequence: Synthetic oligonucleotide
  Antisense strand to SEQ ID NO: 1578313
ucugauauugcaaacccau

SEQ ID NO: 1578315 - RNA, 19 nt, Artificial Sequence
  Description of Artificial Sequence: Synthetic oligonucleotide
  Sense strand starting at position 2196 of SEQ ID NO: 1560129
gcaauaucagaucaguuuc

SEQ ID NO: 1578316 - RNA, 19 nt, Artificial Sequence
  Description of Artificial Sequence: Synthetic oligonucleotide
  Antisense strand to SEQ ID NO: 1578315
gaaacugaucugauauugc

SEQ ID NO: 1578317 - RNA, 19 nt, Artificial Sequence
  Description of Artificial Sequence: Synthetic oligonucleotide
  Sense strand starting at position 2255 of SEQ ID NO: 1560129
aggaaaugcgaaugacuca

SEQ ID NO: 1578318 - RNA, 19 nt, Artificial Sequence
  Description of Artificial Sequence: Synthetic oligonucleotide
  Antisense strand to SEQ ID NO: 1578317
ugagucauucgcauuuccu

SEQ ID NO: 1578319 - RNA, 19 nt, Artificial Sequence
  Description of Artificial Sequence: Synthetic oligonucleotide
  Sense strand starting at position 3127 of SEQ ID NO: 1560129
ucuuguaggaaguguuauu

SEQ ID NO: 1578320 - RNA, 19 nt, Artificial Sequence
  Description of Artificial Sequence: Synthetic oligonucleotide
  Antisense strand to SEQ ID NO: 1578319
aauaacacuuccuacaaga

SEQ ID NO: 1578321 - RNA, 19 nt, Artificial Sequence
  Description of Artificial Sequence: Synthetic oligonucleotide
  Sense strand starting at position 3132 of SEQ ID NO: 1560129
uaggaaguguuauugaaug

SEQ ID NO: 1578322 - RNA, 19 nt, Artificial Sequence
  Description of Artificial Sequence: Synthetic oligonucleotide
  Antisense strand to SEQ ID NO: 1578321
cauucaauaacacuuccua

SEQ ID NO: 1578323 - RNA, 19 nt, Artificial Sequence
  Description of Artificial Sequence: Synthetic oligonucleotide
  Sense strand starting at position 3137 of SEQ ID NO: 1560129
aguguuauugaauggagag

SEQ ID NO: 1578324 - RNA, 19 nt, Artificial Sequence
  Description of Artificial Sequence: Synthetic oligonucleotide
  Antisense strand to SEQ ID NO: 1578323
cucuccauucaauaacacu

SEQ ID NO: 1578325 - RNA, 19 nt, Artificial Sequence
  Description of Artificial Sequence: Synthetic oligonucleotide
  Sense strand starting at position 3138 of SEQ ID NO: 1560129
guguuauugaauggagagu

SEQ ID NO: 1578326 - RNA, 19 nt, Artificial Sequence
  Description of Artificial Sequence: Synthetic oligonucleotide
  Antisense strand to SEQ ID NO: 1578325
acucuccauucaauaacac

SEQ ID NO: 1578327 - RNA, 19 nt, Artificial Sequence
  Description of Artificial Sequence: Synthetic oligonucleotide
  Sense strand starting at position 3147 of SEQ ID NO: 1560129
aauggagagucuuuaggcu

SEQ ID NO: 1578328 - RNA, 19 nt, Artificial Sequence
  Description of Artificial Sequence: Synthetic oligonucleotide
  Antisense strand to SEQ ID NO: 1578327
agccuaaagacucuccauu

SEQ ID NO: 1578329 - RNA, 19 nt, Artificial Sequence
  Description of Artificial Sequence: Synthetic oligonucleotide
  Sense strand starting at position 3151 of SEQ ID NO: 1560129
gagagucuuuaggcugaaa

SEQ ID NO: 1578330 - RNA, 19 nt, Artificial Sequence
  Description of Artificial Sequence: Synthetic oligonucleotide
  Antisense strand to SEQ ID NO: 1578329
uuucagccuaaagacucuc

SEQ ID NO: 1578331 - RNA, 19 nt, Artificial Sequence
  Description of Artificial Sequence: Synthetic oligonucleotide
  Sense strand starting at position 3153 of SEQ ID NO: 1560129
gagucuuuaggcugaaacc

SEQ ID NO: 1578332 - RNA, 19 nt, Artificial Sequence
  Description of Artificial Sequence: Synthetic oligonucleotide
  Antisense strand to SEQ ID NO: 1578331
gguuucagccuaaagacuc

SEQ ID NO: 1578333 - RNA, 19 nt, Artificial Sequence
  Description of Artificial Sequence: Synthetic oligonucleotide
  Sense strand starting at position 3382 of SEQ ID NO: 1560129
gacuuaugccuguaauacg

SEQ ID NO: 1578334 - RNA, 19 nt, Artificial Sequence
  Description of Artificial Sequence: Synthetic oligonucleotide
  Antisense strand to SEQ ID NO: 1578333
cguauuacaggcauaaguc

SEQ ID NO: 1578335 - RNA, 19 nt, Artificial Sequence
  Description of Artificial Sequence: Synthetic oligonucleotide
  Sense strand starting at position 3392 of SEQ ID NO: 1560129
uguaauacgcuuugggaga

SEQ ID NO: 1578336 - RNA, 19 nt, Artificial Sequence
  Description of Artificial Sequence: Synthetic oligonucleotide
  Antisense strand to SEQ ID NO: 1578335
ucucccaaagcguauuaca

SEQ ID NO: 1578337 - RNA, 19 nt, Artificial Sequence
  Description of Artificial Sequence: Synthetic oligonucleotide
  Sense strand starting at position 3798 of SEQ ID NO: 1560129
gaagcagacugguuaggaa

SEQ ID NO: 1578338 - RNA, 19 nt, Artificial Sequence
  Description of Artificial Sequence: Synthetic oligonucleotide
  Antisense strand to SEQ ID NO: 1578337
uuccuaaccagucugcuuc

SEQ ID NO: 1578339 - RNA, 19 nt, Artificial Sequence
  Description of Artificial Sequence: Synthetic oligonucleotide
  Sense strand starting at position 3837 of SEQ ID NO: 1560129
uggugaauucccugggauu

SEQ ID NO: 1578340 - RNA, 19 nt, Artificial Sequence
  Description of Artificial Sequence: Synthetic oligonucleotide
  Antisense strand to SEQ ID NO: 1578339
aaucccagggaauucacca

SEQ ID NO: 1578341 - RNA, 19 nt, Artificial Sequence
  Description of Artificial Sequence: Synthetic oligonucleotide
  Sense strand starting at position 3840 of SEQ ID NO: 1560129
ugaauucccugggauuucu

SEQ ID NO: 1578342 - RNA, 19 nt, Artificial Sequence
  Description of Artificial Sequence: Synthetic oligonucleotide
  Antisense strand to SEQ ID NO: 1578341
agaaaucccagggaauuca

SEQ ID NO: 1578343 - RNA, 19 nt, Artificial Sequence
  Description of Artificial Sequence: Synthetic oligonucleotide
  Sense strand starting at position 3870 of SEQ ID NO: 1560129
auaucucaggcugaauacu

SEQ ID NO: 1578344 - RNA, 19 nt, Artificial Sequence
  Description of Artificial Sequence: Synthetic oligonucleotide
  Antisense strand to SEQ ID NO: 1578343
aguauucagccugagauau

SEQ ID NO: 1578345 - RNA, 19 nt, Artificial Sequence
  Description of Artificial Sequence: Synthetic oligonucleotide
  Sense strand starting at position 252 of SEQ ID NO: 1560130
auguacagagcuggucaaa

SEQ ID NO: 1578346 - RNA, 19 nt, Artificial Sequence
  Description of Artificial Sequence: Synthetic oligonucleotide
  Antisense strand to SEQ ID NO: 1578345
uuugaccagcucuguacau

SEQ ID NO: 1578347 - RNA, 19 nt, Artificial Sequence
  Description of Artificial Sequence: Synthetic oligonucleotide
  Sense strand starting at position 353 of SEQ ID NO: 1560130
cugaccucugcauagaguu

SEQ ID NO: 1578348 - RNA, 19 nt, Artificial Sequence
  Description of Artificial Sequence: Synthetic oligonucleotide
  Antisense strand to SEQ ID NO: 1578347
aacucuaugcagaggucag

SEQ ID NO: 1578349 - RNA, 19 nt, Artificial Sequence
  Description of Artificial Sequence: Synthetic oligonucleotide
  Sense strand starting at position 361 of SEQ ID NO: 1560130
ugcauagaguuauauuuac

SEQ ID NO: 1578350 - RNA, 19 nt, Artificial Sequence
  Description of Artificial Sequence: Synthetic oligonucleotide
  Antisense strand to SEQ ID NO: 1578349
guaaauauaacucuaugca

SEQ ID NO: 1578351 - RNA, 19 nt, Artificial Sequence
  Description of Artificial Sequence: Synthetic oligonucleotide
  Sense strand starting at position 367 of SEQ ID NO: 1560130
gaguuauauuuacauagag

SEQ ID NO: 1578352 - RNA, 19 nt, Artificial Sequence
  Description of Artificial Sequence: Synthetic oligonucleotide
  Antisense strand to SEQ ID NO: 1578351
cucuauguaaauauaacuc

SEQ ID NO: 1578353 - RNA, 19 nt, Artificial Sequence
  Description of Artificial Sequence: Synthetic oligonucleotide
  Sense strand starting at position 728 of SEQ ID NO: 1560130
gcagguacucaucauguca

SEQ ID NO: 1578354 - RNA, 19 nt, Artificial Sequence
  Description of Artificial Sequence: Synthetic oligonucleotide
  Antisense strand to SEQ ID NO: 1578353
ugacaugaugaguaccugc

SEQ ID NO: 1578355 - RNA, 19 nt, Artificial Sequence
  Description of Artificial Sequence: Synthetic oligonucleotide
  Sense strand starting at position 973 of SEQ ID NO: 1560130
ccgucugauuuguuuguuu

SEQ ID NO: 1578356 - RNA, 19 nt, Artificial Sequence
  Description of Artificial Sequence: Synthetic oligonucleotide
  Antisense strand to SEQ ID NO: 1578355
aaacaaacaaaucagacgg

SEQ ID NO: 1578357 - RNA, 19 nt, Artificial Sequence
  Description of Artificial Sequence: Synthetic oligonucleotide
  Sense strand starting at position 975 of SEQ ID NO: 1560130
gucugauuuguuuguuugu

SEQ ID NO: 1578358 - RNA, 19 nt, Artificial Sequence
  Description of Artificial Sequence: Synthetic oligonucleotide
  Antisense strand to SEQ ID NO: 1578357
acaaacaaacaaaucagac

SEQ ID NO: 1578359 - RNA, 19 nt, Artificial Sequence
  Description of Artificial Sequence: Synthetic oligonucleotide
  Sense strand starting at position 1132 of SEQ ID NO: 1560130
gauucuuuacugcaggacu

SEQ ID NO: 1578360 - RNA, 19 nt, Artificial Sequence
  Description of Artificial Sequence: Synthetic oligonucleotide
  Antisense strand to SEQ ID NO: 1578359
aguccugcaguaaagaauc

SEQ ID NO: 1578361 - RNA, 19 nt, Artificial Sequence
  Description of Artificial Sequence: Synthetic oligonucleotide
  Sense strand starting at position 1213 of SEQ ID NO: 1560130
aguauaauacauuguccau

SEQ ID NO: 1578362 - RNA, 19 nt, Artificial Sequence
  Description of Artificial Sequence: Synthetic oligonucleotide
  Antisense strand to SEQ ID NO: 1578361
auggacaauguauuauacu

SEQ ID NO: 1578363 - RNA, 19 nt, Artificial Sequence
  Description of Artificial Sequence: Synthetic oligonucleotide
  Sense strand starting at position 1290 of SEQ ID NO: 1560130
gagccagaguucuuugaaa

SEQ ID NO: 1578364 - RNA, 19 nt, Artificial Sequence
  Description of Artificial Sequence: Synthetic oligonucleotide
  Antisense strand to SEQ ID NO: 1578363
uuucaaagaacucuggcuc

SEQ ID NO: 1578365 - RNA, 19 nt, Artificial Sequence
  Description of Artificial Sequence: Synthetic oligonucleotide
  Sense strand starting at position 1292 of SEQ ID NO: 1560130
gccagaguucuuugaaauc

SEQ ID NO: 1578366 - RNA, 19 nt, Artificial Sequence
  Description of Artificial Sequence: Synthetic oligonucleotide
  Antisense strand to SEQ ID NO: 1578365
gauuucaaagaacucuggc

SEQ ID NO: 1578367 - RNA, 19 nt, Artificial Sequence
  Description of Artificial Sequence: Synthetic oligonucleotide
  Sense strand starting at position 1453 of SEQ ID NO: 1560130
ggagcaucccagcaugagu

SEQ ID NO: 1578368 - RNA, 19 nt, Artificial Sequence
  Description of Artificial Sequence: Synthetic oligonucleotide
  Antisense strand to SEQ ID NO: 1578367
acucaugcugggaugcucc

SEQ ID NO: 1578369 - RNA, 19 nt, Artificial Sequence
  Description of Artificial Sequence: Synthetic oligonucleotide
  Sense strand starting at position 1598 of SEQ ID NO: 1560130
agcaguuauuaugcacaga

SEQ ID NO: 1578370 - RNA, 19 nt, Artificial Sequence
  Description of Artificial Sequence: Synthetic oligonucleotide
  Antisense strand to SEQ ID NO: 1578369
ucugugcauaauaacugcu

SEQ ID NO: 1578371 - RNA, 19 nt, Artificial Sequence
  Description of Artificial Sequence: Synthetic oligonucleotide
  Sense strand starting at position 1599 of SEQ ID NO: 1560130
gcaguuauuaugcacagag

SEQ ID NO: 1578372 - RNA, 19 nt, Artificial Sequence
  Description of Artificial Sequence: Synthetic oligonucleotide
  Antisense strand to SEQ ID NO: 1578371
cucugugcauaauaacugc

SEQ ID NO: 1578373 - RNA, 19 nt, Artificial Sequence
  Description of Artificial Sequence: Synthetic oligonucleotide
  Sense strand starting at position 1662 of SEQ ID NO: 1560130
uguugagggccuugcagaa

SEQ ID NO: 1578374 - RNA, 19 nt, Artificial Sequence
  Description of Artificial Sequence: Synthetic oligonucleotide
  Antisense strand to SEQ ID NO: 1578373
uucugcaaggcccucaaca

SEQ ID NO: 1578375 - RNA, 19 nt, Artificial Sequence
  Description of Artificial Sequence: Synthetic oligonucleotide
  Sense strand starting at position 1802 of SEQ ID NO: 1560130
uguuguaacaccgguaaga

SEQ ID NO: 1578376 - RNA, 19 nt, Artificial Sequence
  Description of Artificial Sequence: Synthetic oligonucleotide
  Antisense strand to SEQ ID NO: 1578375
ucuuaccgguguuacaaca

SEQ ID NO: 1578377 - RNA, 19 nt, Artificial Sequence
  Description of Artificial Sequence: Synthetic oligonucleotide
  Sense strand starting at position 1804 of SEQ ID NO: 1560130
uuguaacaccgguaagaga

SEQ ID NO: 1578378 - RNA, 19 nt, Artificial Sequence
  Description of Artificial Sequence: Synthetic oligonucleotide
  Antisense strand to SEQ ID NO: 1578377
ucucuuaccgguguuacaa

SEQ ID NO: 1578379 - RNA, 19 nt, Artificial Sequence
  Description of Artificial Sequence: Synthetic oligonucleotide
  Sense strand starting at position 1860 of SEQ ID NO: 1560130
agguaugccuggcccauaa

SEQ ID NO: 1578380 - RNA, 19 nt, Artificial Sequence
  Description of Artificial Sequence: Synthetic oligonucleotide
  Antisense strand to SEQ ID NO: 1578379
uuaugggccaggcauaccu

SEQ ID NO: 1578381 - RNA, 19 nt, Artificial Sequence
  Description of Artificial Sequence: Synthetic oligonucleotide
  Sense strand starting at position 1878 of SEQ ID NO: 1560130
acugcuguuccguaauaac

SEQ ID NO: 1578382 - RNA, 19 nt, Artificial Sequence
  Description of Artificial Sequence: Synthetic oligonucleotide
  Antisense strand to SEQ ID NO: 1578381
guuauuacggaacagcagu

SEQ ID NO: 1578383 - RNA, 19 nt, Artificial Sequence
  Description of Artificial Sequence: Synthetic oligonucleotide
  Sense strand starting at position 1889 of SEQ ID NO: 1560130
guaauaacuugcuuguuga

SEQ ID NO: 1578384 - RNA, 19 nt, Artificial Sequence
  Description of Artificial Sequence: Synthetic oligonucleotide
  Antisense strand to SEQ ID NO: 1578383
ucaacaagcaaguuauuac

SEQ ID NO: 1578385 - RNA, 19 nt, Artificial Sequence
  Description of Artificial Sequence: Synthetic oligonucleotide
  Sense strand starting at position 1892 of SEQ ID NO: 1560130
auaacuugcuuguugaaug

SEQ ID NO: 1578386 - RNA, 19 nt, Artificial Sequence
  Description of Artificial Sequence: Synthetic oligonucleotide
  Antisense strand to SEQ ID NO: 1578385
cauucaacaagcaaguuau

SEQ ID NO: 1578387 - RNA, 19 nt, Artificial Sequence
  Description of Artificial Sequence: Synthetic oligonucleotide
  Sense strand starting at position 1999 of SEQ ID NO: 1560130
acaguaaagucucugguga

SEQ ID NO: 1578388 - RNA, 19 nt, Artificial Sequence
  Description of Artificial Sequence: Synthetic oligonucleotide
  Antisense strand to SEQ ID NO: 1578387
ucaccagagacuuuacugu

SEQ ID NO: 1578389 - RNA, 19 nt, Artificial Sequence
  Description of Artificial Sequence: Synthetic oligonucleotide
  Sense strand starting at position 2000 of SEQ ID NO: 1560130
caguaaagucucuggugac

SEQ ID NO: 1578390 - RNA, 19 nt, Artificial Sequence
  Description of Artificial Sequence: Synthetic oligonucleotide
  Antisense strand to SEQ ID NO: 1578389
gucaccagagacuuuacug

SEQ ID NO: 1578391 - RNA, 19 nt, Artificial Sequence
  Description of Artificial Sequence: Synthetic oligonucleotide
  Sense strand starting at position 2144 of SEQ ID NO: 1560130
ggaagacucgaauacguau

SEQ ID NO: 1578392 - RNA, 19 nt, Artificial Sequence
  Description of Artificial Sequence: Synthetic oligonucleotide
  Antisense strand to SEQ ID NO: 1578391
auacguauucgagucuucc

SEQ ID NO: 1578393 - RNA, 19 nt, Artificial Sequence
  Description of Artificial Sequence: Synthetic oligonucleotide
  Sense strand starting at position 2185 of SEQ ID NO: 1560130
auggguuugcaauaucaga

SEQ ID NO: 1578394 - RNA, 19 nt, Artificial Sequence
  Description of Artificial Sequence: Synthetic oligonucleotide
  Antisense strand to SEQ ID NO: 1578393
ucugauauugcaaacccau

SEQ ID NO: 1578395 - RNA, 19 nt, Artificial Sequence
  Description of Artificial Sequence: Synthetic oligonucleotide
  Sense strand starting at position 2193 of SEQ ID NO: 1560130
gcaauaucagaucaguuuc

SEQ ID NO: 1578396 - RNA, 19 nt, Artificial Sequence
  Description of Artificial Sequence: Synthetic oligonucleotide
  Antisense strand to SEQ ID NO: 1578395
gaaacugaucugauauugc

SEQ ID NO: 1578397 - RNA, 19 nt, Artificial Sequence
  Description of Artificial Sequence: Synthetic oligonucleotide
  Sense strand starting at position 2252 of SEQ ID NO: 1560130
aggaaaugcgaaugacuca

SEQ ID NO: 1578398 - RNA, 19 nt, Artificial Sequence
  Description of Artificial Sequence: Synthetic oligonucleotide
  Antisense strand to SEQ ID NO: 1578397
ugagucauucgcauuuccu

SEQ ID NO: 1578399 - RNA, 19 nt, Artificial Sequence
  Description of Artificial Sequence: Synthetic oligonucleotide
  Sense strand starting at position 3124 of SEQ ID NO: 1560130
ucuuguaggaaguguuauu

SEQ ID NO: 1578400 - RNA, 19 nt, Artificial Sequence
  Description of Artificial Sequence: Synthetic oligonucleotide
  Antisense strand to SEQ ID NO: 1578399
aauaacacuuccuacaaga

SEQ ID NO: 1578401 - RNA, 19 nt, Artificial Sequence
  Description of Artificial Sequence: Synthetic oligonucleotide
  Sense strand starting at position 3129 of SEQ ID NO: 1560130
uaggaaguguuauugaaug

SEQ ID NO: 1578402 - RNA, 19 nt, Artificial Sequence
  Description of Artificial Sequence: Synthetic oligonucleotide
  Antisense strand to SEQ ID NO: 1578401
cauucaauaacacuuccua

SEQ ID NO: 1578403 - RNA, 19 nt, Artificial Sequence
  Description of Artificial Sequence: Synthetic oligonucleotide
  Sense strand starting at position 3134 of SEQ ID NO: 1560130
aguguuauugaauggagag

SEQ ID NO: 1578404 - RNA, 19 nt, Artificial Sequence
  Description of Artificial Sequence: Synthetic oligonucleotide
  Antisense strand to SEQ ID NO: 1578403
cucuccauucaauaacacu

SEQ ID NO: 1578405 - RNA, 19 nt, Artificial Sequence
  Description of Artificial Sequence: Synthetic oligonucleotide
  Sense strand starting at position 3135 of SEQ ID NO: 1560130
guguuauugaauggagagu

SEQ ID NO: 1578406 - RNA, 19 nt, Artificial Sequence
  Description of Artificial Sequence: Synthetic oligonucleotide
  Antisense strand to SEQ ID NO: 1578405
acucuccauucaauaacac

SEQ ID NO: 1578407 - RNA, 19 nt, Artificial Sequence
  Description of Artificial Sequence: Synthetic oligonucleotide
  Sense strand starting at position 3144 of SEQ ID NO: 1560130
aauggagagucuuuaggcu

SEQ ID NO: 1578408 - RNA, 19 nt, Artificial Sequence
  Description of Artificial Sequence: Synthetic oligonucleotide
  Antisense strand to SEQ ID NO: 1578407
agccuaaagacucuccauu

SEQ ID NO: 1578409 - RNA, 19 nt, Artificial Sequence
  Description of Artificial Sequence: Synthetic oligonucleotide
  Sense strand starting at position 3148 of SEQ ID NO: 1560130
gagagucuuuaggcugaaa

SEQ ID NO: 1578410 - RNA, 19 nt, Artificial Sequence
  Description of Artificial Sequence: Synthetic oligonucleotide
  Antisense strand to SEQ ID NO: 1578409
uuucagccuaaagacucuc

SEQ ID NO: 1578411 - RNA, 19 nt, Artificial Sequence
  Description of Artificial Sequence: Synthetic oligonucleotide
  Sense strand starting at position 3150 of SEQ ID NO: 1560130
gagucuuuaggcugaaacc

SEQ ID NO: 1578412 - RNA, 19 nt, Artificial Sequence
  Description of Artificial Sequence: Synthetic oligonucleotide
  Antisense strand to SEQ ID NO: 1578411
gguuucagccuaaagacuc

SEQ ID NO: 1578413 - RNA, 19 nt, Artificial Sequence
  Description of Artificial Sequence: Synthetic oligonucleotide
  Sense strand starting at position 3379 of SEQ ID NO: 1560130
gacuuaugccuguaauacg

SEQ ID NO: 1578414 - RNA, 19 nt, Artificial Sequence
  Description of Artificial Sequence: Synthetic oligonucleotide
  Antisense strand to SEQ ID NO: 1578413
cguauuacaggcauaaguc

SEQ ID NO: 1578415 - RNA, 19 nt, Artificial Sequence
  Description of Artificial Sequence: Synthetic oligonucleotide
  Sense strand starting at position 3389 of SEQ ID NO: 1560130
uguaauacgcuuugggaga

SEQ ID NO: 1578416 - RNA, 19 nt, Artificial Sequence
  Description of Artificial Sequence: Synthetic oligonucleotide
  Antisense strand to SEQ ID NO: 1578415
ucucccaaagcguauuaca

SEQ ID NO: 1578417 - RNA, 19 nt, Artificial Sequence
  Description of Artificial Sequence: Synthetic oligonucleotide
  Sense strand starting at position 3795 of SEQ ID NO: 1560130
gaagcagacugguuaggaa

SEQ ID NO: 1578418 - RNA, 19 nt, Artificial Sequence
  Description of Artificial Sequence: Synthetic oligonucleotide
  Antisense strand to SEQ ID NO: 1578417
uuccuaaccagucugcuuc

SEQ ID NO: 1578419 - RNA, 19 nt, Artificial Sequence
  Description of Artificial Sequence: Synthetic oligonucleotide
  Sense strand starting at position 3834 of SEQ ID NO: 1560130
uggugaauucccugggauu

SEQ ID NO: 1578420 - RNA, 19 nt, Artificial Sequence
  Description of Artificial Sequence: Synthetic oligonucleotide
  Antisense strand to SEQ ID NO: 1578419
aaucccagggaauucacca

SEQ ID NO: 1578421 - RNA, 19 nt, Artificial Sequence
  Description of Artificial Sequence: Synthetic oligonucleotide
  Sense strand starting at position 3837 of SEQ ID NO: 1560130
ugaauucccugggauuucu

SEQ ID NO: 1578422 - RNA, 19 nt, Artificial Sequence
  Description of Artificial Sequence: Synthetic oligonucleotide
  Antisense strand to SEQ ID NO: 1578421
agaaaucccagggaauuca

SEQ ID NO: 1578423 - RNA, 19 nt, Artificial Sequence
  Description of Artificial Sequence: Synthetic oligonucleotide
  Sense strand starting at position 3867 of SEQ ID NO: 1560130
auaucucaggcugaauacu

SEQ ID NO: 1578424 - RNA, 19 nt, Artificial Sequence
  Description of Artificial Sequence: Synthetic oligonucleotide
  Antisense strand to SEQ ID NO: 1578423
aguauucagccugagauau

SEQ ID NO: 1578425 - RNA, 19 nt, Artificial Sequence
  Description of Artificial Sequence: Synthetic oligonucleotide
  Sense strand starting at position 46 of SEQ ID NO: 1560131
ccuagauucugagcaggga

SEQ ID NO: 1578426 - RNA, 19 nt, Artificial Sequence
  Description of Artificial Sequence: Synthetic oligonucleotide
  Antisense strand to SEQ ID NO: 1578425
ucccugcucagaaucuagg

SEQ ID NO: 1578427 - RNA, 19 nt, Artificial Sequence
  Description of Artificial Sequence: Synthetic oligonucleotide
  Sense strand starting at position 326 of SEQ ID NO: 1560131
gucccugagcucuauggau

SEQ ID NO: 1578428 - RNA, 19 nt, Artificial Sequence
  Description of Artificial Sequence: Synthetic oligonucleotide
  Antisense strand to SEQ ID NO: 1578427
auccauagagcucagggac

SEQ ID NO: 1578429 - RNA, 19 nt, Artificial Sequence
  Description of Artificial Sequence: Synthetic oligonucleotide
  Sense strand starting at position 335 of SEQ ID NO: 1560131
cucuauggaucccagaaga

SEQ ID NO: 1578430 - RNA, 19 nt, Artificial Sequence
  Description of Artificial Sequence: Synthetic oligonucleotide
  Antisense strand to SEQ ID NO: 1578429
ucuucugggauccauagag

SEQ ID NO: 1578431 - RNA, 19 nt, Artificial Sequence
  Description of Artificial Sequence: Synthetic oligonucleotide
  Sense strand starting at position 346 of SEQ ID NO: 1560131
ccagaagagcuguggacaa

SEQ ID NO: 1578432 - RNA, 19 nt, Artificial Sequence
  Description of Artificial Sequence: Synthetic oligonucleotide
  Antisense strand to SEQ ID NO: 1578431
uuguccacagcucuucugg

SEQ ID NO: 1578433 - RNA, 19 nt, Artificial Sequence
  Description of Artificial Sequence: Synthetic oligonucleotide
  Sense strand starting at position 487 of SEQ ID NO: 1560131
uguguaucccucugcaaag

SEQ ID NO: 1578434 - RNA, 19 nt, Artificial Sequence
  Description of Artificial Sequence: Synthetic oligonucleotide
  Antisense strand to SEQ ID NO: 1578433
cuuugcagagggauacaca

SEQ ID NO: 1578435 - RNA, 19 nt, Artificial Sequence
  Description of Artificial Sequence: Synthetic oligonucleotide
  Sense strand starting at position 488 of SEQ ID NO: 1560131
guguaucccucugcaaagu

SEQ ID NO: 1578436 - RNA, 19 nt, Artificial Sequence
  Description of Artificial Sequence: Synthetic oligonucleotide
  Antisense strand to SEQ ID NO: 1578435
acuuugcagagggauacac

SEQ ID NO: 1578437 - RNA, 19 nt, Artificial Sequence
  Description of Artificial Sequence: Synthetic oligonucleotide
  Sense strand starting at position 539 of SEQ ID NO: 1560131
ggguguaagccugacagga

SEQ ID NO: 1578438 - RNA, 19 nt, Artificial Sequence
  Description of Artificial Sequence: Synthetic oligonucleotide
  Antisense strand to SEQ ID NO: 1578437
uccugucaggcuuacaccc

SEQ ID NO: 1578439 - RNA, 19 nt, Artificial Sequence
  Description of Artificial Sequence: Synthetic oligonucleotide
  Sense strand starting at position 543 of SEQ ID NO: 1560131
guaagccugacaggaguua

SEQ ID NO: 1578440 - RNA, 19 nt, Artificial Sequence
  Description of Artificial Sequence: Synthetic oligonucleotide
  Antisense strand to SEQ ID NO: 1578439
uaacuccugucaggcuuac

SEQ ID NO: 1578441 - RNA, 19 nt, Artificial Sequence
  Description of Artificial Sequence: Synthetic oligonucleotide
  Sense strand starting at position 554 of SEQ ID NO: 1560131
aggaguuacagugaccagu

SEQ ID NO: 1578442 - RNA, 19 nt, Artificial Sequence
  Description of Artificial Sequence: Synthetic oligonucleotide
  Antisense strand to SEQ ID NO: 1578441
acuggucacuguaacuccu

SEQ ID NO: 1578443 - RNA, 19 nt, Artificial Sequence
  Description of Artificial Sequence: Synthetic oligonucleotide
  Sense strand starting at position 560 of SEQ ID NO: 1560131
uacagugaccagugacuuu

SEQ ID NO: 1578444 - RNA, 19 nt, Artificial Sequence
  Description of Artificial Sequence: Synthetic oligonucleotide
  Antisense strand to SEQ ID NO: 1578443
aaagucacuggucacugua

SEQ ID NO: 1578445 - RNA, 19 nt, Artificial Sequence
  Description of Artificial Sequence: Synthetic oligonucleotide
  Sense strand starting at position 652 of SEQ ID NO: 1560131
agagacuguguauagaguu

SEQ ID NO: 1578446 - RNA, 19 nt, Artificial Sequence
  Description of Artificial Sequence: Synthetic oligonucleotide
  Antisense strand to SEQ ID NO: 1578445
aacucuauacacagucucu

SEQ ID NO: 1578447 - RNA, 19 nt, Artificial Sequence
  Description of Artificial Sequence: Synthetic oligonucleotide
  Sense strand starting at position 1007 of SEQ ID NO: 1560131
aggaacauuuaacgugaau

SEQ ID NO: 1578448 - RNA, 19 nt, Artificial Sequence
  Description of Artificial Sequence: Synthetic oligonucleotide
  Antisense strand to SEQ ID NO: 1578447
auucacguuaaauguuccu

SEQ ID NO: 1578449 - RNA, 19 nt, Artificial Sequence
  Description of Artificial Sequence: Synthetic oligonucleotide
  Sense strand starting at position 1019 of SEQ ID NO: 1560131
cgugaaugucagggacuuu

SEQ ID NO: 1578450 - RNA, 19 nt, Artificial Sequence
  Description of Artificial Sequence: Synthetic oligonucleotide
  Antisense strand to SEQ ID NO: 1578449
aaagucccugacauucacg

SEQ ID NO: 1578451 - RNA, 19 nt, Artificial Sequence
  Description of Artificial Sequence: Synthetic oligonucleotide
  Sense strand starting at position 1028 of SEQ ID NO: 1560131
cagggacuuugggaugagu

SEQ ID NO: 1578452 - RNA, 19 nt, Artificial Sequence
  Description of Artificial Sequence: Synthetic oligonucleotide
  Antisense strand to SEQ ID NO: 1578451
acucaucccaaagucccug

SEQ ID NO: 1578453 - RNA, 19 nt, Artificial Sequence
  Description of Artificial Sequence: Synthetic oligonucleotide
  Sense strand starting at position 1304 of SEQ ID NO: 1560131
ccucgcguucucuaaggau

SEQ ID NO: 1578454 - RNA, 19 nt, Artificial Sequence
  Description of Artificial Sequence: Synthetic oligonucleotide
  Antisense strand to SEQ ID NO: 1578453
auccuuagagaacgcgagg

SEQ ID NO: 1578455 - RNA, 19 nt, Artificial Sequence
  Description of Artificial Sequence: Synthetic oligonucleotide
  Sense strand starting at position 1437 of SEQ ID NO: 1560131
cgugauuagcggucggaca

SEQ ID NO: 1578456 - RNA, 19 nt, Artificial Sequence
  Description of Artificial Sequence: Synthetic oligonucleotide
  Antisense strand to SEQ ID NO: 1578455
uguccgaccgcuaaucacg

SEQ ID NO: 1578457 - RNA, 19 nt, Artificial Sequence
  Description of Artificial Sequence: Synthetic oligonucleotide
  Sense strand starting at position 1438 of SEQ ID NO: 1560131
gugauuagcggucggacaa

SEQ ID NO: 1578458 - RNA, 19 nt, Artificial Sequence
  Description of Artificial Sequence: Synthetic oligonucleotide
  Antisense strand to SEQ ID NO: 1578457
uuguccgaccgcuaaucac

SEQ ID NO: 1578459 - RNA, 19 nt, Artificial Sequence
  Description of Artificial Sequence: Synthetic oligonucleotide
  Sense strand starting at position 1439 of SEQ ID NO: 1560131
ugauuagcggucggacaau

SEQ ID NO: 1578460 - RNA, 19 nt, Artificial Sequence
  Description of Artificial Sequence: Synthetic oligonucleotide
  Antisense strand to SEQ ID NO: 1578459
auuguccgaccgcuaauca

SEQ ID NO: 1578461 - RNA, 19 nt, Artificial Sequence
  Description of Artificial Sequence: Synthetic oligonucleotide
  Sense strand starting at position 1467 of SEQ ID NO: 1560131
cuaagagcuuuccugacca

SEQ ID NO: 1578462 - RNA, 19 nt, Artificial Sequence
  Description of Artificial Sequence: Synthetic oligonucleotide
  Antisense strand to SEQ ID NO: 1578461
uggucaggaaagcucuuag

SEQ ID NO: 1578463 - RNA, 19 nt, Artificial Sequence
  Description of Artificial Sequence: Synthetic oligonucleotide
  Sense strand starting at position 1500 of SEQ ID NO: 1560131
gcggcuuggaggugacaau

SEQ ID NO: 1578464 - RNA, 19 nt, Artificial Sequence
  Description of Artificial Sequence: Synthetic oligonucleotide
  Antisense strand to SEQ ID NO: 1578463
auugucaccuccaagccgc

SEQ ID NO: 1578465 - RNA, 19 nt, Artificial Sequence
  Description of Artificial Sequence: Synthetic oligonucleotide
  Sense strand starting at position 2055 of SEQ ID NO: 1560131
gcguaccguaaaugucaga

SEQ ID NO: 1578466 - RNA, 19 nt, Artificial Sequence
  Description of Artificial Sequence: Synthetic oligonucleotide
  Antisense strand to SEQ ID NO: 1578465
ucugacauuuacgguacgc

SEQ ID NO: 1578467 - RNA, 19 nt, Artificial Sequence
  Description of Artificial Sequence: Synthetic oligonucleotide
  Sense strand starting at position 2118 of SEQ ID NO: 1560131
gugaccagaucaguugaaa

SEQ ID NO: 1578468 - RNA, 19 nt, Artificial Sequence
  Description of Artificial Sequence: Synthetic oligonucleotide
  Antisense strand to SEQ ID NO: 1578467
uuucaacugaucuggucac

SEQ ID NO: 1578469 - RNA, 19 nt, Artificial Sequence
  Description of Artificial Sequence: Synthetic oligonucleotide
  Sense strand starting at position 2177 of SEQ ID NO: 1560131
gaaggaauuuguugguguu

SEQ ID NO: 1578470 - RNA, 19 nt, Artificial Sequence
  Description of Artificial Sequence: Synthetic oligonucleotide
  Antisense strand to SEQ ID NO: 1578469
aacaccaacaaauuccuuc

SEQ ID NO: 1578471 - RNA, 19 nt, Artificial Sequence
  Description of Artificial Sequence: Synthetic oligonucleotide
  Sense strand starting at position 2180 of SEQ ID NO: 1560131
ggaauuuguugguguucau

SEQ ID NO: 1578472 - RNA, 19 nt, Artificial Sequence
  Description of Artificial Sequence: Synthetic oligonucleotide
  Antisense strand to SEQ ID NO: 1578471
augaacaccaacaaauucc

SEQ ID NO: 1578473 - RNA, 19 nt, Artificial Sequence
  Description of Artificial Sequence: Synthetic oligonucleotide
  Sense strand starting at position 2221 of SEQ ID NO: 1560131
ugaggacugcugcaaaugu

SEQ ID NO: 1578474 - RNA, 19 nt, Artificial Sequence
  Description of Artificial Sequence: Synthetic oligonucleotide
  Antisense strand to SEQ ID NO: 1578473
acauuugcagcaguccuca

SEQ ID NO: 1578475 - RNA, 19 nt, Artificial Sequence
  Description of Artificial Sequence: Synthetic oligonucleotide
  Sense strand starting at position 2234 of SEQ ID NO: 1560131
aaauguuacugccucguga

SEQ ID NO: 1578476 - RNA, 19 nt, Artificial Sequence
  Description of Artificial Sequence: Synthetic oligonucleotide
  Antisense strand to SEQ ID NO: 1578475
ucacgaggcaguaacauuu

SEQ ID NO: 1578477 - RNA, 19 nt, Artificial Sequence
  Description of Artificial Sequence: Synthetic oligonucleotide
  Sense strand starting at position 2236 of SEQ ID NO: 1560131
auguuacugccucgugauc

SEQ ID NO: 1578478 - RNA, 19 nt, Artificial Sequence
  Description of Artificial Sequence: Synthetic oligonucleotide
  Antisense strand to SEQ ID NO: 1578477
gaucacgaggcaguaacau

SEQ ID NO: 1578479 - RNA, 19 nt, Artificial Sequence
  Description of Artificial Sequence: Synthetic oligonucleotide
  Sense strand starting at position 2247 of SEQ ID NO: 1560131
ucgugaucuucuuuaauau

SEQ ID NO: 1578480 - RNA, 19 nt, Artificial Sequence
  Description of Artificial Sequence: Synthetic oligonucleotide
  Antisense strand to SEQ ID NO: 1578479
auauuaaagaagaucacga

SEQ ID NO: 1578481 - RNA, 19 nt, Artificial Sequence
  Description of Artificial Sequence: Synthetic oligonucleotide
  Sense strand starting at position 2248 of SEQ ID NO: 1560131
cgugaucuucuuuaauaug

SEQ ID NO: 1578482 - RNA, 19 nt, Artificial Sequence
  Description of Artificial Sequence: Synthetic oligonucleotide
  Antisense strand to SEQ ID NO: 1578481
cauauuaaagaagaucacg

SEQ ID NO: 1578483 - RNA, 19 nt, Artificial Sequence
  Description of Artificial Sequence: Synthetic oligonucleotide
  Sense strand starting at position 2419 of SEQ ID NO: 1560131
acugcuuuauucucaggau

SEQ ID NO: 1578484 - RNA, 19 nt, Artificial Sequence
  Description of Artificial Sequence: Synthetic oligonucleotide
  Antisense strand to SEQ ID NO: 1578483
auccugagaauaaagcagu

SEQ ID NO: 1578485 - RNA, 19 nt, Artificial Sequence
  Description of Artificial Sequence: Synthetic oligonucleotide
  Sense strand starting at position 2434 of SEQ ID NO: 1560131
ggaucugacacauagugcu

SEQ ID NO: 1578486 - RNA, 19 nt, Artificial Sequence
  Description of Artificial Sequence: Synthetic oligonucleotide
  Antisense strand to SEQ ID NO: 1578485
agcacuaugugucagaucc

SEQ ID NO: 1578487 - RNA, 19 nt, Artificial Sequence
  Description of Artificial Sequence: Synthetic oligonucleotide
  Sense strand starting at position 2441 of SEQ ID NO: 1560131
acacauagugcuugacuca

SEQ ID NO: 1578488 - RNA, 19 nt, Artificial Sequence
  Description of Artificial Sequence: Synthetic oligonucleotide
  Antisense strand to SEQ ID NO: 1578487
ugagucaagcacuaugugu

SEQ ID NO: 1578489 - RNA, 19 nt, Artificial Sequence
  Description of Artificial Sequence: Synthetic oligonucleotide
  Sense strand starting at position 2454 of SEQ ID NO: 1560131
gacucauaguaggcucuua

SEQ ID NO: 1578490 - RNA, 19 nt, Artificial Sequence
  Description of Artificial Sequence: Synthetic oligonucleotide
  Antisense strand to SEQ ID NO: 1578489
uaagagccuacuaugaguc

SEQ ID NO: 1578491 - RNA, 19 nt, Artificial Sequence
  Description of Artificial Sequence: Synthetic oligonucleotide
  Sense strand starting at position 2471 of SEQ ID NO: 1560131
uaguaaacauuuggugagu

SEQ ID NO: 1578492 - RNA, 19 nt, Artificial Sequence
  Description of Artificial Sequence: Synthetic oligonucleotide
  Antisense strand to SEQ ID NO: 1578491
acucaccaaauguuuacua

SEQ ID NO: 1578493 - RNA, 19 nt, Artificial Sequence
  Description of Artificial Sequence: Synthetic oligonucleotide
  Sense strand starting at position 2473 of SEQ ID NO: 1560131
guaaacauuuggugaguaa

SEQ ID NO: 1578494 - RNA, 19 nt, Artificial Sequence
  Description of Artificial Sequence: Synthetic oligonucleotide
  Antisense strand to SEQ ID NO: 1578493
uuacucaccaaauguuuac

SEQ ID NO: 1578495 - RNA, 19 nt, Artificial Sequence
  Description of Artificial Sequence: Synthetic oligonucleotide
  Sense strand starting at position 2722 of SEQ ID NO: 1560131
ugggcaugguggcucuaau

SEQ ID NO: 1578496 - RNA, 19 nt, Artificial Sequence
  Description of Artificial Sequence: Synthetic oligonucleotide
  Antisense strand to SEQ ID NO: 1578495
auuagagccaccaugccca

SEQ ID NO: 1578497 - RNA, 19 nt, Artificial Sequence
  Description of Artificial Sequence: Synthetic oligonucleotide
  Sense strand starting at position 2979 of SEQ ID NO: 1560131
gugguaacaugcuccugua

SEQ ID NO: 1578498 - RNA, 19 nt, Artificial Sequence
  Description of Artificial Sequence: Synthetic oligonucleotide
  Antisense strand to SEQ ID NO: 1578497
uacaggagcauguuaccac

SEQ ID NO: 1578499 - RNA, 19 nt, Artificial Sequence
  Description of Artificial Sequence: Synthetic oligonucleotide
  Sense strand starting at position 3298 of SEQ ID NO: 1560131
gguguuagccuuuguagga

SEQ ID NO: 1578500 - RNA, 19 nt, Artificial Sequence
  Description of Artificial Sequence: Synthetic oligonucleotide
  Antisense strand to SEQ ID NO: 1578499
uccuacaaaggcuaacacc

SEQ ID NO: 1578501 - RNA, 19 nt, Artificial Sequence
  Description of Artificial Sequence: Synthetic oligonucleotide
  Sense strand starting at position 3627 of SEQ ID NO: 1560131
ccugaucugcccuagguuu

SEQ ID NO: 1578502 - RNA, 19 nt, Artificial Sequence
  Description of Artificial Sequence: Synthetic oligonucleotide
  Antisense strand to SEQ ID NO: 1578501
aaaccuagggcagaucagg

SEQ ID NO: 1578503 - RNA, 19 nt, Artificial Sequence
  Description of Artificial Sequence: Synthetic oligonucleotide
  Sense strand starting at position 3752 of SEQ ID NO: 1560131
gugagaaguggcuguggga

SEQ ID NO: 1578504 - RNA, 19 nt, Artificial Sequence
  Description of Artificial Sequence: Synthetic oligonucleotide
  Antisense strand to SEQ ID NO: 1578503
ucccacagccacuucucac

SEQ ID NO: 1578505 - RNA, 19 nt, Artificial Sequence
  Description of Artificial Sequence: Synthetic oligonucleotide
  Sense strand starting at position 231 of SEQ ID NO: 1560132
guuaaaggauacuagauua

SEQ ID NO: 1578506 - RNA, 19 nt, Artificial Sequence
  Description of Artificial Sequence: Synthetic oligonucleotide
  Antisense strand to SEQ ID NO: 1578505
uaaucuaguauccuuuaac

SEQ ID NO: 1578507 - RNA, 19 nt, Artificial Sequence
  Description of Artificial Sequence: Synthetic oligonucleotide
  Sense strand starting at position 291 of SEQ ID NO: 1560132
guaggaugacuaugcuuaa

SEQ ID NO: 1578508 - RNA, 19 nt, Artificial Sequence
  Description of Artificial Sequence: Synthetic oligonucleotide
  Antisense strand to SEQ ID NO: 1578507
uuaagcauagucauccuac

SEQ ID NO: 1578509 - RNA, 19 nt, Artificial Sequence
  Description of Artificial Sequence: Synthetic oligonucleotide
  Sense strand starting at position 595 of SEQ ID NO: 1560132
gccugaugucuacccgugu

SEQ ID NO: 1578510 - RNA, 19 nt, Artificial Sequence
  Description of Artificial Sequence: Synthetic oligonucleotide
  Antisense strand to SEQ ID NO: 1578509
acacggguagacaucaggc

SEQ ID NO: 1578511 - RNA, 19 nt, Artificial Sequence
  Description of Artificial Sequence: Synthetic oligonucleotide
  Sense strand starting at position 599 of SEQ ID NO: 1560132
gaugucuacccgugucuaa

SEQ ID NO: 1578512 - RNA, 19 nt, Artificial Sequence
  Description of Artificial Sequence: Synthetic oligonucleotide
  Antisense strand to SEQ ID NO: 1578511
uuagacacggguagacauc

SEQ ID NO: 1578513 - RNA, 19 nt, Artificial Sequence
  Description of Artificial Sequence: Synthetic oligonucleotide
  Sense strand starting at position 622 of SEQ ID NO: 1560132
aggccuugccucugaacau

SEQ ID NO: 1578514 - RNA, 19 nt, Artificial Sequence
  Description of Artificial Sequence: Synthetic oligonucleotide
  Antisense strand to SEQ ID NO: 1578513
auguucagaggcaaggccu

SEQ ID NO: 1578515 - RNA, 19 nt, Artificial Sequence
  Description of Artificial Sequence: Synthetic oligonucleotide
  Sense strand starting at position 637 of SEQ ID NO: 1560132
acauuugacucugaaaguc

SEQ ID NO: 1578516 - RNA, 19 nt, Artificial Sequence
  Description of Artificial Sequence: Synthetic oligonucleotide
  Antisense strand to SEQ ID NO: 1578515
gacuuucagagucaaaugu

SEQ ID NO: 1578517 - RNA, 19 nt, Artificial Sequence
  Description of Artificial Sequence: Synthetic oligonucleotide
  Sense strand starting at position 679 of SEQ ID NO: 1560132
gacucaaugucaguaacag

SEQ ID NO: 1578518 - RNA, 19 nt, Artificial Sequence
  Description of Artificial Sequence: Synthetic oligonucleotide
  Antisense strand to SEQ ID NO: 1578517
cuguuacugacauugaguc

SEQ ID NO: 1578519 - RNA, 19 nt, Artificial Sequence
  Description of Artificial Sequence: Synthetic oligonucleotide
  Sense strand starting at position 1273 of SEQ ID NO: 1560132
caagucuagugaggagaaa

SEQ ID NO: 1578520 - RNA, 19 nt, Artificial Sequence
  Description of Artificial Sequence: Synthetic oligonucleotide
  Antisense strand to SEQ ID NO: 1578519
uuucuccucacuagacuug

SEQ ID NO: 1578521 - RNA, 19 nt, Artificial Sequence
  Description of Artificial Sequence: Synthetic oligonucleotide
  Sense strand starting at position 2378 of SEQ ID NO: 1560132
uguuuaguccagcaggaua

SEQ ID NO: 1578522 - RNA, 19 nt, Artificial Sequence
  Description of Artificial Sequence: Synthetic oligonucleotide
  Antisense strand to SEQ ID NO: 1578521
uauccugcuggacuaaaca

SEQ ID NO: 1578523 - RNA, 19 nt, Artificial Sequence
  Description of Artificial Sequence: Synthetic oligonucleotide
  Sense strand starting at position 2380 of SEQ ID NO: 1560132
uuuaguccagcaggauaua

SEQ ID NO: 1578524 - RNA, 19 nt, Artificial Sequence
  Description of Artificial Sequence: Synthetic oligonucleotide
  Antisense strand to SEQ ID NO: 1578523
uauauccugcuggacuaaa

SEQ ID NO: 1578525 - RNA, 19 nt, Artificial Sequence
  Description of Artificial Sequence: Synthetic oligonucleotide
  Sense strand starting at position 2440 of SEQ ID NO: 1560132
aaagaagaguccuagguaa

SEQ ID NO: 1578526 - RNA, 19 nt, Artificial Sequence
  Description of Artificial Sequence: Synthetic oligonucleotide
  Antisense strand to SEQ ID NO: 1578525
uuaccuaggacucuucuuu

SEQ ID NO: 1578527 - RNA, 19 nt, Artificial Sequence
  Description of Artificial Sequence: Synthetic oligonucleotide
  Sense strand starting at position 2444 of SEQ ID NO: 1560132
aagaguccuagguaaagug

SEQ ID NO: 1578528 - RNA, 19 nt, Artificial Sequence
  Description of Artificial Sequence: Synthetic oligonucleotide
  Antisense strand to SEQ ID NO: 1578527
cacuuuaccuaggacucuu

SEQ ID NO: 1578529 - RNA, 19 nt, Artificial Sequence
  Description of Artificial Sequence: Synthetic oligonucleotide
  Sense strand starting at position 2526 of SEQ ID NO: 1560132
caccgucaucucggagaaa

SEQ ID NO: 1578530 - RNA, 19 nt, Artificial Sequence
  Description of Artificial Sequence: Synthetic oligonucleotide
  Antisense strand to SEQ ID NO: 1578529
uuucuccgagaugacggug

SEQ ID NO: 1578531 - RNA, 19 nt, Artificial Sequence
  Description of Artificial Sequence: Synthetic oligonucleotide
  Sense strand starting at position 2529 of SEQ ID NO: 1560132
cgucaucucggagaaacac

SEQ ID NO: 1578532 - RNA, 19 nt, Artificial Sequence
  Description of Artificial Sequence: Synthetic oligonucleotide
  Antisense strand to SEQ ID NO: 1578531
guguuucuccgagaugacg

SEQ ID NO: 1578533 - RNA, 19 nt, Artificial Sequence
  Description of Artificial Sequence: Synthetic oligonucleotide
  Sense strand starting at position 2593 of SEQ ID NO: 1560132
ggaaaucacuucucugcua

SEQ ID NO: 1578534 - RNA, 19 nt, Artificial Sequence
  Description of Artificial Sequence: Synthetic oligonucleotide
  Antisense strand to SEQ ID NO: 1578533
uagcagagaagugauuucc

SEQ ID NO: 1578535 - RNA, 19 nt, Artificial Sequence
  Description of Artificial Sequence: Synthetic oligonucleotide
  Sense strand starting at position 2718 of SEQ ID NO: 1560132
auacaauggcccuaguaaa

SEQ ID NO: 1578536 - RNA, 19 nt, Artificial Sequence
  Description of Artificial Sequence: Synthetic oligonucleotide
  Antisense strand to SEQ ID NO: 1578535
uuuacuagggccauuguau

SEQ ID NO: 1578537 - RNA, 19 nt, Artificial Sequence
  Description of Artificial Sequence: Synthetic oligonucleotide
  Sense strand starting at position 2817 of SEQ ID NO: 1560132
ccuguagcugcagaaagau

SEQ ID NO: 1578538 - RNA, 19 nt, Artificial Sequence
  Description of Artificial Sequence: Synthetic oligonucleotide
  Antisense strand to SEQ ID NO: 1578537
aucuuucugcagcuacagg

SEQ ID NO: 1578539 - RNA, 19 nt, Artificial Sequence
  Description of Artificial Sequence: Synthetic oligonucleotide
  Sense strand starting at position 2829 of SEQ ID NO: 1560132
gaaagauguauggguacag

SEQ ID NO: 1578540 - RNA, 19 nt, Artificial Sequence
  Description of Artificial Sequence: Synthetic oligonucleotide
  Antisense strand to SEQ ID NO: 1578539
cuguacccauacaucuuuc

SEQ ID NO: 1578541 - RNA, 19 nt, Artificial Sequence
  Description of Artificial Sequence: Synthetic oligonucleotide
  Sense strand starting at position 2966 of SEQ ID NO: 1560132
cugacuuaacucggccaga

SEQ ID NO: 1578542 - RNA, 19 nt, Artificial Sequence
  Description of Artificial Sequence: Synthetic oligonucleotide
  Antisense strand to SEQ ID NO: 1578541
ucuggccgaguuaagucag

SEQ ID NO: 1578543 - RNA, 19 nt, Artificial Sequence
  Description of Artificial Sequence: Synthetic oligonucleotide
  Sense strand starting at position 2967 of SEQ ID NO: 1560132
ugacuuaacucggccagaa

SEQ ID NO: 1578544 - RNA, 19 nt, Artificial Sequence
  Description of Artificial Sequence: Synthetic oligonucleotide
  Antisense strand to SEQ ID NO: 1578543
uucuggccgaguuaaguca

SEQ ID NO: 1578545 - RNA, 19 nt, Artificial Sequence
  Description of Artificial Sequence: Synthetic oligonucleotide
  Sense strand starting at position 3070 of SEQ ID NO: 1560132
cagugagccuuuguguaua

SEQ ID NO: 1578546 - RNA, 19 nt, Artificial Sequence
  Description of Artificial Sequence: Synthetic oligonucleotide
  Antisense strand to SEQ ID NO: 1578545
uauacacaaaggcucacug

SEQ ID NO: 1578547 - RNA, 19 nt, Artificial Sequence
  Description of Artificial Sequence: Synthetic oligonucleotide
  Sense strand starting at position 3152 of SEQ ID NO: 1560132
gccucauguccucaccaca

SEQ ID NO: 1578548 - RNA, 19 nt, Artificial Sequence
  Description of Artificial Sequence: Synthetic oligonucleotide
  Antisense strand to SEQ ID NO: 1578547
uguggugaggacaugaggc

SEQ ID NO: 1578549 - RNA, 19 nt, Artificial Sequence
  Description of Artificial Sequence: Synthetic oligonucleotide
  Sense strand starting at position 3177 of SEQ ID NO: 1560132
caugcugucuggcuuuaga

SEQ ID NO: 1578550 - RNA, 19 nt, Artificial Sequence
  Description of Artificial Sequence: Synthetic oligonucleotide
  Antisense strand to SEQ ID NO: 1578549
ucuaaagccagacagcaug

SEQ ID NO: 1578551 - RNA, 19 nt, Artificial Sequence
  Description of Artificial Sequence: Synthetic oligonucleotide
  Sense strand starting at position 3186 of SEQ ID NO: 1560132
uggcuuuagagcugugaaa

SEQ ID NO: 1578552 - RNA, 19 nt, Artificial Sequence
  Description of Artificial Sequence: Synthetic oligonucleotide
  Antisense strand to SEQ ID NO: 1578551
uuucacagcucuaaagcca

SEQ ID NO: 1578553 - RNA, 19 nt, Artificial Sequence
  Description of Artificial Sequence: Synthetic oligonucleotide
  Sense strand starting at position 3207 of SEQ ID NO: 1560132
uugggaauuugccauguau

SEQ ID NO: 1578554 - RNA, 19 nt, Artificial Sequence
  Description of Artificial Sequence: Synthetic oligonucleotide
  Antisense strand to SEQ ID NO: 1578553
auacauggcaaauucccaa

SEQ ID NO: 1578555 - RNA, 19 nt, Artificial Sequence
  Description of Artificial Sequence: Synthetic oligonucleotide
  Sense strand starting at position 3229 of SEQ ID NO: 1560132
gguagcauauuggaaauuu

SEQ ID NO: 1578556 - RNA, 19 nt, Artificial Sequence
  Description of Artificial Sequence: Synthetic oligonucleotide
  Antisense strand to SEQ ID NO: 1578555
aaauuuccaauaugcuacc

SEQ ID NO: 1578557 - RNA, 19 nt, Artificial Sequence
  Description of Artificial Sequence: Synthetic oligonucleotide
  Sense strand starting at position 3293 of SEQ ID NO: 1560132
ugauuugcacagugucaau

SEQ ID NO: 1578558 - RNA, 19 nt, Artificial Sequence
  Description of Artificial Sequence: Synthetic oligonucleotide
  Antisense strand to SEQ ID NO: 1578557
auugacacugugcaaauca

SEQ ID NO: 1578559 - RNA, 19 nt, Artificial Sequence
  Description of Artificial Sequence: Synthetic oligonucleotide
  Sense strand starting at position 3334 of SEQ ID NO: 1560132
ugcagcaucuuccugugaa

SEQ ID NO: 1578560 - RNA, 19 nt, Artificial Sequence
  Description of Artificial Sequence: Synthetic oligonucleotide
  Antisense strand to SEQ ID NO: 1578559
uucacaggaagaugcugca

SEQ ID NO: 1578561 - RNA, 19 nt, Artificial Sequence
  Description of Artificial Sequence: Synthetic oligonucleotide
  Sense strand starting at position 3337 of SEQ ID NO: 1560132
agcaucuuccugugaaaca

SEQ ID NO: 1578562 - RNA, 19 nt, Artificial Sequence
  Description of Artificial Sequence: Synthetic oligonucleotide
  Antisense strand to SEQ ID NO: 1578561
uguuucacaggaagaugcu

SEQ ID NO: 1578563 - RNA, 19 nt, Artificial Sequence
  Description of Artificial Sequence: Synthetic oligonucleotide
  Sense strand starting at position 3361 of SEQ ID NO: 1560132
gagaacacauguucuauga

SEQ ID NO: 1578564 - RNA, 19 nt, Artificial Sequence
  Description of Artificial Sequence: Synthetic oligonucleotide
  Antisense strand to SEQ ID NO: 1578563
ucauagaacauguguucuc

SEQ ID NO: 1578565 - RNA, 19 nt, Artificial Sequence
  Description of Artificial Sequence: Synthetic oligonucleotide
  Sense strand starting at position 3449 of SEQ ID NO: 1560132
uuuagaggcucaucauaug

SEQ ID NO: 1578566 - RNA, 19 nt, Artificial Sequence
  Description of Artificial Sequence: Synthetic oligonucleotide
  Antisense strand to SEQ ID NO: 1578565
cauaugaugagccucuaaa

SEQ ID NO: 1578567 - RNA, 19 nt, Artificial Sequence
  Description of Artificial Sequence: Synthetic oligonucleotide
  Sense strand starting at position 3452 of SEQ ID NO: 1560132
agaggcucaucauauggau

SEQ ID NO: 1578568 - RNA, 19 nt, Artificial Sequence
  Description of Artificial Sequence: Synthetic oligonucleotide
  Antisense strand to SEQ ID NO: 1578567
auccauaugaugagccucu

SEQ ID NO: 1578569 - RNA, 19 nt, Artificial Sequence
  Description of Artificial Sequence: Synthetic oligonucleotide
  Sense strand starting at position 3597 of SEQ ID NO: 1560132
ccauaucacucuguguagu

SEQ ID NO: 1578570 - RNA, 19 nt, Artificial Sequence
  Description of Artificial Sequence: Synthetic oligonucleotide
  Antisense strand to SEQ ID NO: 1578569
acuacacagagugauaugg

SEQ ID NO: 1578571 - RNA, 19 nt, Artificial Sequence
  Description of Artificial Sequence: Synthetic oligonucleotide
  Sense strand starting at position 3598 of SEQ ID NO: 1560132
cauaucacucuguguagua

SEQ ID NO: 1578572 - RNA, 19 nt, Artificial Sequence
  Description of Artificial Sequence: Synthetic oligonucleotide
  Antisense strand to SEQ ID NO: 1578571
uacuacacagagugauaug

SEQ ID NO: 1578573 - RNA, 19 nt, Artificial Sequence
  Description of Artificial Sequence: Synthetic oligonucleotide
  Sense strand starting at position 3629 of SEQ ID NO: 1560132
accguugaucccugggaca

SEQ ID NO: 1578574 - RNA, 19 nt, Artificial Sequence
  Description of Artificial Sequence: Synthetic oligonucleotide
  Antisense strand to SEQ ID NO: 1578573
ugucccagggaucaacggu

SEQ ID NO: 1578575 - RNA, 19 nt, Artificial Sequence
  Description of Artificial Sequence: Synthetic oligonucleotide
  Sense strand starting at position 3631 of SEQ ID NO: 1560132
cguugaucccugggacaua

SEQ ID NO: 1578576 - RNA, 19 nt, Artificial Sequence
  Description of Artificial Sequence: Synthetic oligonucleotide
  Antisense strand to SEQ ID NO: 1578575
uaugucccagggaucaacg

SEQ ID NO: 1578577 - RNA, 19 nt, Artificial Sequence
  Description of Artificial Sequence: Synthetic oligonucleotide
  Sense strand starting at position 3632 of SEQ ID NO: 1560132
guugaucccugggacauau

SEQ ID NO: 1578578 - RNA, 19 nt, Artificial Sequence
  Description of Artificial Sequence: Synthetic oligonucleotide
  Antisense strand to SEQ ID NO: 1578577
auaugucccagggaucaac

SEQ ID NO: 1578579 - RNA, 19 nt, Artificial Sequence
  Description of Artificial Sequence: Synthetic oligonucleotide
  Sense strand starting at position 3737 of SEQ ID NO: 1560132
gcugcauccucauuugaua

SEQ ID NO: 1578580 - RNA, 19 nt, Artificial Sequence
  Description of Artificial Sequence: Synthetic oligonucleotide
  Antisense strand to SEQ ID NO: 1578579
uaucaaaugaggaugcagc

SEQ ID NO: 1578581 - RNA, 19 nt, Artificial Sequence
  Description of Artificial Sequence: Synthetic oligonucleotide
  Sense strand starting at position 3810 of SEQ ID NO: 1560132
uagcauguggcacguaaua

SEQ ID NO: 1578582 - RNA, 19 nt, Artificial Sequence
  Description of Artificial Sequence: Synthetic oligonucleotide
  Antisense strand to SEQ ID NO: 1578581
uauuacgugccacaugcua

SEQ ID NO: 1578583 - RNA, 19 nt, Artificial Sequence
  Description of Artificial Sequence: Synthetic oligonucleotide
  Sense strand starting at position 3812 of SEQ ID NO: 1560132
gcauguggcacguaauaga

SEQ ID NO: 1578584 - RNA, 19 nt, Artificial Sequence
  Description of Artificial Sequence: Synthetic oligonucleotide
  Antisense strand to SEQ ID NO: 1578583
ucuauuacgugccacaugc

SEQ ID NO: 1578585 - RNA, 19 nt, Artificial Sequence
  Description of Artificial Sequence: Synthetic oligonucleotide
  Sense strand starting at position 347 of SEQ ID NO: 1560133
auaggaguguuccuaggga

SEQ ID NO: 1578586 - RNA, 19 nt, Artificial Sequence
  Description of Artificial Sequence: Synthetic oligonucleotide
  Antisense strand to SEQ ID NO: 1578585
ucccuaggaacacuccuau

SEQ ID NO: 1578587 - RNA, 19 nt, Artificial Sequence
  Description of Artificial Sequence: Synthetic oligonucleotide
  Sense strand starting at position 351 of SEQ ID NO: 1560133
gaguguuccuagggacgga

SEQ ID NO: 1578588 - RNA, 19 nt, Artificial Sequence
  Description of Artificial Sequence: Synthetic oligonucleotide
  Antisense strand to SEQ ID NO: 1578587
uccgucccuaggaacacuc

SEQ ID NO: 1578589 - RNA, 19 nt, Artificial Sequence
  Description of Artificial Sequence: Synthetic oligonucleotide
  Sense strand starting at position 529 of SEQ ID NO: 1560133
gagugaugaugagcugugu

SEQ ID NO: 1578590 - RNA, 19 nt, Artificial Sequence
  Description of Artificial Sequence: Synthetic oligonucleotide
  Antisense strand to SEQ ID NO: 1578589
acacagcucaucaucacuc

SEQ ID NO: 1578591 - RNA, 19 nt, Artificial Sequence
  Description of Artificial Sequence: Synthetic oligonucleotide
  Sense strand starting at position 652 of SEQ ID NO: 1560133
gucccuguuuccuucugaa

SEQ ID NO: 1578592 - RNA, 19 nt, Artificial Sequence
  Description of Artificial Sequence: Synthetic oligonucleotide
  Antisense strand to SEQ ID NO: 1578591
uucagaaggaaacagggac

SEQ ID NO: 1578593 - RNA, 19 nt, Artificial Sequence
  Description of Artificial Sequence: Synthetic oligonucleotide
  Sense strand starting at position 777 of SEQ ID NO: 1560133
ccuaucacuuguucuguga

SEQ ID NO: 1578594 - RNA, 19 nt, Artificial Sequence
  Description of Artificial Sequence: Synthetic oligonucleotide
  Antisense strand to SEQ ID NO: 1578593
ucacagaacaagugauagg

SEQ ID NO: 1578595 - RNA, 19 nt, Artificial Sequence
  Description of Artificial Sequence: Synthetic oligonucleotide
  Sense strand starting at position 780 of SEQ ID NO: 1560133
aucacuuguucugugacau

SEQ ID NO: 1578596 - RNA, 19 nt, Artificial Sequence
  Description of Artificial Sequence: Synthetic oligonucleotide
  Antisense strand to SEQ ID NO: 1578595
augucacagaacaagugau

SEQ ID NO: 1578597 - RNA, 19 nt, Artificial Sequence
  Description of Artificial Sequence: Synthetic oligonucleotide
  Sense strand starting at position 781 of SEQ ID NO: 1560133
ucacuuguucugugacauu

SEQ ID NO: 1578598 - RNA, 19 nt, Artificial Sequence
  Description of Artificial Sequence: Synthetic oligonucleotide
  Antisense strand to SEQ ID NO: 1578597
aaugucacagaacaaguga

SEQ ID NO: 1578599 - RNA, 19 nt, Artificial Sequence
  Description of Artificial Sequence: Synthetic oligonucleotide
  Sense strand starting at position 838 of SEQ ID NO: 1560133
auaucuauuucuuaggguu

SEQ ID NO: 1578600 - RNA, 19 nt, Artificial Sequence
  Description of Artificial Sequence: Synthetic oligonucleotide
  Antisense strand to SEQ ID NO: 1578599
aacccuaagaaauagauau

SEQ ID NO: 1578601 - RNA, 19 nt, Artificial Sequence
  Description of Artificial Sequence: Synthetic oligonucleotide
  Sense strand starting at position 1206 of SEQ ID NO: 1560133
ggcaaagacuucuuaaaua

SEQ ID NO: 1578602 - RNA, 19 nt, Artificial Sequence
  Description of Artificial Sequence: Synthetic oligonucleotide
  Antisense strand to SEQ ID NO: 1578601
uauuuaagaagucuuugcc

SEQ ID NO: 1578603 - RNA, 19 nt, Artificial Sequence
  Description of Artificial Sequence: Synthetic oligonucleotide
  Sense strand starting at position 1216 of SEQ ID NO: 1560133
ucuuaaauaugagcguuua

SEQ ID NO: 1578604 - RNA, 19 nt, Artificial Sequence
  Description of Artificial Sequence: Synthetic oligonucleotide
  Antisense strand to SEQ ID NO: 1578603
uaaacgcucauauuuaaga

SEQ ID NO: 1578605 - RNA, 19 nt, Artificial Sequence
  Description of Artificial Sequence: Synthetic oligonucleotide
  Sense strand starting at position 1217 of SEQ ID NO: 1560133
cuuaaauaugagcguuuag

SEQ ID NO: 1578606 - RNA, 19 nt, Artificial Sequence
  Description of Artificial Sequence: Synthetic oligonucleotide
  Antisense strand to SEQ ID NO: 1578605
cuaaacgcucauauuuaag

SEQ ID NO: 1578607 - RNA, 19 nt, Artificial Sequence
  Description of Artificial Sequence: Synthetic oligonucleotide
  Sense strand starting at position 1224 of SEQ ID NO: 1560133
augagcguuuaggguuaua

SEQ ID NO: 1578608 - RNA, 19 nt, Artificial Sequence
  Description of Artificial Sequence: Synthetic oligonucleotide
  Antisense strand to SEQ ID NO: 1578607
uauaacccuaaacgcucau

SEQ ID NO: 1578609 - RNA, 19 nt, Artificial Sequence
  Description of Artificial Sequence: Synthetic oligonucleotide
  Sense strand starting at position 1227 of SEQ ID NO: 1560133
agcguuuaggguuauauuu

SEQ ID NO: 1578610 - RNA, 19 nt, Artificial Sequence
  Description of Artificial Sequence: Synthetic oligonucleotide
  Antisense strand to SEQ ID NO: 1578609
aaauauaacccuaaacgcu

SEQ ID NO: 1578611 - RNA, 19 nt, Artificial Sequence
  Description of Artificial Sequence: Synthetic oligonucleotide
  Sense strand starting at position 1308 of SEQ ID NO: 1560133
uuacguccuugcuguauga

SEQ ID NO: 1578612 - RNA, 19 nt, Artificial Sequence
  Description of Artificial Sequence: Synthetic oligonucleotide
  Antisense strand to SEQ ID NO: 1578611
ucauacagcaaggacguaa

SEQ ID NO: 1578613 - RNA, 19 nt, Artificial Sequence
  Description of Artificial Sequence: Synthetic oligonucleotide
  Sense strand starting at position 1310 of SEQ ID NO: 1560133
acguccuugcuguaugaca

SEQ ID NO: 1578614 - RNA, 19 nt, Artificial Sequence
  Description of Artificial Sequence: Synthetic oligonucleotide
  Antisense strand to SEQ ID NO: 1578613
ugucauacagcaaggacgu

SEQ ID NO: 1578615 - RNA, 19 nt, Artificial Sequence
  Description of Artificial Sequence: Synthetic oligonucleotide
  Sense strand starting at position 1394 of SEQ ID NO: 1560133
gccacaagucccgacagau

SEQ ID NO: 1578616 - RNA, 19 nt, Artificial Sequence
  Description of Artificial Sequence: Synthetic oligonucleotide
  Antisense strand to SEQ ID NO: 1578615
aucugucgggacuuguggc

SEQ ID NO: 1578617 - RNA, 19 nt, Artificial Sequence
  Description of Artificial Sequence: Synthetic oligonucleotide
  Sense strand starting at position 1411 of SEQ ID NO: 1560133
auaggaagugcuugagaaa

SEQ ID NO: 1578618 - RNA, 19 nt, Artificial Sequence
  Description of Artificial Sequence: Synthetic oligonucleotide
  Antisense strand to SEQ ID NO: 1578617
uuucucaagcacuuccuau

SEQ ID NO: 1578619 - RNA, 19 nt, Artificial Sequence
  Description of Artificial Sequence: Synthetic oligonucleotide
  Sense strand starting at position 1425 of SEQ ID NO: 1560133
agaaauggcucucaugauc

SEQ ID NO: 1578620 - RNA, 19 nt, Artificial Sequence
  Description of Artificial Sequence: Synthetic oligonucleotide
  Antisense strand to SEQ ID NO: 1578619
gaucaugagagccauuucu

SEQ ID NO: 1578621 - RNA, 19 nt, Artificial Sequence
  Description of Artificial Sequence: Synthetic oligonucleotide
  Sense strand starting at position 1434 of SEQ ID NO: 1560133
ucucaugaucauuguuguu

SEQ ID NO: 1578622 - RNA, 19 nt, Artificial Sequence
  Description of Artificial Sequence: Synthetic oligonucleotide
  Antisense strand to SEQ ID NO: 1578621
aacaacaaugaucaugaga

SEQ ID NO: 1578623 - RNA, 19 nt, Artificial Sequence
  Description of Artificial Sequence: Synthetic oligonucleotide
  Sense strand starting at position 1439 of SEQ ID NO: 1560133
ugaucauuguuguuuguau

SEQ ID NO: 1578624 - RNA, 19 nt, Artificial Sequence
  Description of Artificial Sequence: Synthetic oligonucleotide
  Antisense strand to SEQ ID NO: 1578623
auacaaacaacaaugauca

SEQ ID NO: 1578625 - RNA, 19 nt, Artificial Sequence
  Description of Artificial Sequence: Synthetic oligonucleotide
  Sense strand starting at position 1440 of SEQ ID NO: 1560133
gaucauuguuguuuguaug

SEQ ID NO: 1578626 - RNA, 19 nt, Artificial Sequence
  Description of Artificial Sequence: Synthetic oligonucleotide
  Antisense strand to SEQ ID NO: 1578625
cauacaaacaacaaugauc

SEQ ID NO: 1578627 - RNA, 19 nt, Artificial Sequence
  Description of Artificial Sequence: Synthetic oligonucleotide
  Sense strand starting at position 1553 of SEQ ID NO: 1560133
guaggucucccugagacaa

SEQ ID NO: 1578628 - RNA, 19 nt, Artificial Sequence
  Description of Artificial Sequence: Synthetic oligonucleotide
  Antisense strand to SEQ ID NO: 1578627
uugucucagggagaccuac

SEQ ID NO: 1578629 - RNA, 19 nt, Artificial Sequence
  Description of Artificial Sequence: Synthetic oligonucleotide
  Sense strand starting at position 1748 of SEQ ID NO: 1560133
gaagaugagggcuggguua

SEQ ID NO: 1578630 - RNA, 19 nt, Artificial Sequence
  Description of Artificial Sequence: Synthetic oligonucleotide
  Antisense strand to SEQ ID NO: 1578629
uaacccagcccucaucuuc

SEQ ID NO: 1578631 - RNA, 19 nt, Artificial Sequence
  Description of Artificial Sequence: Synthetic oligonucleotide
  Sense strand starting at position 2336 of SEQ ID NO: 1560133
ccagcugugucucccauuu

SEQ ID NO: 1578632 - RNA, 19 nt, Artificial Sequence
  Description of Artificial Sequence: Synthetic oligonucleotide
  Antisense strand to SEQ ID NO: 1578631
aaaugggagacacagcugg

SEQ ID NO: 1578633 - RNA, 19 nt, Artificial Sequence
  Description of Artificial Sequence: Synthetic oligonucleotide
  Sense strand starting at position 2711 of SEQ ID NO: 1560133
auggagugggaguguugua

SEQ ID NO: 1578634 - RNA, 19 nt, Artificial Sequence
  Description of Artificial Sequence: Synthetic oligonucleotide
  Antisense strand to SEQ ID NO: 1578633
uacaacacucccacuccau

SEQ ID NO: 1578635 - RNA, 19 nt, Artificial Sequence
  Description of Artificial Sequence: Synthetic oligonucleotide
  Sense strand starting at position 3560 of SEQ ID NO: 1560133
ugcaguuuccucugauguc

SEQ ID NO: 1578636 - RNA, 19 nt, Artificial Sequence
  Description of Artificial Sequence: Synthetic oligonucleotide
  Antisense strand to SEQ ID NO: 1578635
gacaucagaggaaacugca

SEQ ID NO: 1578637 - RNA, 19 nt, Artificial Sequence
  Description of Artificial Sequence: Synthetic oligonucleotide
  Sense strand starting at position 3621 of SEQ ID NO: 1560133
ccaucuaucuagucaugag

SEQ ID NO: 1578638 - RNA, 19 nt, Artificial Sequence
  Description of Artificial Sequence: Synthetic oligonucleotide
  Antisense strand to SEQ ID NO: 1578637
cucaugacuagauagaugg

SEQ ID NO: 1578639 - RNA, 19 nt, Artificial Sequence
  Description of Artificial Sequence: Synthetic oligonucleotide
  Sense strand starting at position 3625 of SEQ ID NO: 1560133
cuaucuagucaugagguca

SEQ ID NO: 1578640 - RNA, 19 nt, Artificial Sequence
  Description of Artificial Sequence: Synthetic oligonucleotide
  Antisense strand to SEQ ID NO: 1578639
ugaccucaugacuagauag

SEQ ID NO: 1578641 - RNA, 19 nt, Artificial Sequence
  Description of Artificial Sequence: Synthetic oligonucleotide
  Sense strand starting at position 3678 of SEQ ID NO: 1560133
aucagucucuuagccagau

SEQ ID NO: 1578642 - RNA, 19 nt, Artificial Sequence
  Description of Artificial Sequence: Synthetic oligonucleotide
  Antisense strand to SEQ ID NO: 1578641
aucuggcuaagagacugau

SEQ ID NO: 1578643 - RNA, 19 nt, Artificial Sequence
  Description of Artificial Sequence: Synthetic oligonucleotide
  Sense strand starting at position 3810 of SEQ ID NO: 1560133
ucuaguuucucccuccagu

SEQ ID NO: 1578644 - RNA, 19 nt, Artificial Sequence
  Description of Artificial Sequence: Synthetic oligonucleotide
  Antisense strand to SEQ ID NO: 1578643
acuggagggagaaacuaga

SEQ ID NO: 1578645 - RNA, 19 nt, Artificial Sequence
  Description of Artificial Sequence: Synthetic oligonucleotide
  Sense strand starting at position 3939 of SEQ ID NO: 1560133
uuuggugguuguugagaca

SEQ ID NO: 1578646 - RNA, 19 nt, Artificial Sequence
  Description of Artificial Sequence: Synthetic oligonucleotide
  Antisense strand to SEQ ID NO: 1578645
ugucucaacaaccaccaaa

SEQ ID NO: 1578647 - RNA, 19 nt, Artificial Sequence
  Description of Artificial Sequence: Synthetic oligonucleotide
  Sense strand starting at position 475 of SEQ ID NO: 1560134
aucuuaaagugaguagcua

SEQ ID NO: 1578648 - RNA, 19 nt, Artificial Sequence
  Description of Artificial Sequence: Synthetic oligonucleotide
  Antisense strand to SEQ ID NO: 1578647
uagcuacucacuuuaagau

SEQ ID NO: 1578649 - RNA, 19 nt, Artificial Sequence
  Description of Artificial Sequence: Synthetic oligonucleotide
  Sense strand starting at position 483 of SEQ ID NO: 1560134
gugaguagcuaggcacuua

SEQ ID NO: 1578650 - RNA, 19 nt, Artificial Sequence
  Description of Artificial Sequence: Synthetic oligonucleotide
  Antisense strand to SEQ ID NO: 1578649
uaagugccuagcuacucac

SEQ ID NO: 1578651 - RNA, 19 nt, Artificial Sequence
  Description of Artificial Sequence: Synthetic oligonucleotide
  Sense strand starting at position 508 of SEQ ID NO: 1560134
ucaugcuuauggccugaaa

SEQ ID NO: 1578652 - RNA, 19 nt, Artificial Sequence
  Description of Artificial Sequence: Synthetic oligonucleotide
  Antisense strand to SEQ ID NO: 1578651
uuucaggccauaagcauga

SEQ ID NO: 1578653 - RNA, 19 nt, Artificial Sequence
  Description of Artificial Sequence: Synthetic oligonucleotide
  Sense strand starting at position 609 of SEQ ID NO: 1560134
auguccaaauguccuaaga

SEQ ID NO: 1578654 - RNA, 19 nt, Artificial Sequence
  Description of Artificial Sequence: Synthetic oligonucleotide
  Antisense strand to SEQ ID NO: 1578653
ucuuaggacauuuggacau

SEQ ID NO: 1578655 - RNA, 19 nt, Artificial Sequence
  Description of Artificial Sequence: Synthetic oligonucleotide
  Sense strand starting at position 677 of SEQ ID NO: 1560134
caggauuaauggucgugga

SEQ ID NO: 1578656 - RNA, 19 nt, Artificial Sequence
  Description of Artificial Sequence: Synthetic oligonucleotide
  Antisense strand to SEQ ID NO: 1578655
uccacgaccauuaauccug

SEQ ID NO: 1578657 - RNA, 19 nt, Artificial Sequence
  Description of Artificial Sequence: Synthetic oligonucleotide
  Sense strand starting at position 678 of SEQ ID NO: 1560134
aggauuaauggucguggau

SEQ ID NO: 1578658 - RNA, 19 nt, Artificial Sequence
  Description of Artificial Sequence: Synthetic oligonucleotide
  Antisense strand to SEQ ID NO: 1578657
auccacgaccauuaauccu

SEQ ID NO: 1578659 - RNA, 19 nt, Artificial Sequence
  Description of Artificial Sequence: Synthetic oligonucleotide
  Sense strand starting at position 681 of SEQ ID NO: 1560134
auuaauggucguggauaac

SEQ ID NO: 1578660 - RNA, 19 nt, Artificial Sequence
  Description of Artificial Sequence: Synthetic oligonucleotide
  Antisense strand to SEQ ID NO: 1578659
guuauccacgaccauuaau

SEQ ID NO: 1578661 - RNA, 19 nt, Artificial Sequence
  Description of Artificial Sequence: Synthetic oligonucleotide
  Sense strand starting at position 718 of SEQ ID NO: 1560134
uagugagcuuaucugcaca

SEQ ID NO: 1578662 - RNA, 19 nt, Artificial Sequence
  Description of Artificial Sequence: Synthetic oligonucleotide
  Antisense strand to SEQ ID NO: 1578661
ugugcagauaagcucacua

SEQ ID NO: 1578663 - RNA, 19 nt, Artificial Sequence
  Description of Artificial Sequence: Synthetic oligonucleotide
  Sense strand starting at position 720 of SEQ ID NO: 1560134
gugagcuuaucugcacacu

SEQ ID NO: 1578664 - RNA, 19 nt, Artificial Sequence
  Description of Artificial Sequence: Synthetic oligonucleotide
  Antisense strand to SEQ ID NO: 1578663
agugugcagauaagcucac

SEQ ID NO: 1578665 - RNA, 19 nt, Artificial Sequence
  Description of Artificial Sequence: Synthetic oligonucleotide
  Sense strand starting at position 737 of SEQ ID NO: 1560134
cuccaaguuuaacuauagu

SEQ ID NO: 1578666 - RNA, 19 nt, Artificial Sequence
  Description of Artificial Sequence: Synthetic oligonucleotide
  Antisense strand to SEQ ID NO: 1578665
acuauaguuaaacuuggag

SEQ ID NO: 1578667 - RNA, 19 nt, Artificial Sequence
  Description of Artificial Sequence: Synthetic oligonucleotide
  Sense strand starting at position 743 of SEQ ID NO: 1560134
guuuaacuauaguuccuua

SEQ ID NO: 1578668 - RNA, 19 nt, Artificial Sequence
  Description of Artificial Sequence: Synthetic oligonucleotide
  Antisense strand to SEQ ID NO: 1578667
uaaggaacuauaguuaaac

SEQ ID NO: 1578669 - RNA, 19 nt, Artificial Sequence
  Description of Artificial Sequence: Synthetic oligonucleotide
  Sense strand starting at position 748 of SEQ ID NO: 1560134
acuauaguuccuuauaguu

SEQ ID NO: 1578670 - RNA, 19 nt, Artificial Sequence
  Description of Artificial Sequence: Synthetic oligonucleotide
  Antisense strand to SEQ ID NO: 1578669
aacuauaaggaacuauagu

SEQ ID NO: 1578671 - RNA, 19 nt, Artificial Sequence
  Description of Artificial Sequence: Synthetic oligonucleotide
  Sense strand starting at position 753 of SEQ ID NO: 1560134
aguuccuuauaguuucuua

SEQ ID NO: 1578672 - RNA, 19 nt, Artificial Sequence
  Description of Artificial Sequence: Synthetic oligonucleotide
  Antisense strand to SEQ ID NO: 1578671
uaagaaacuauaaggaacu

SEQ ID NO: 1578673 - RNA, 19 nt, Artificial Sequence
  Description of Artificial Sequence: Synthetic oligonucleotide
  Sense strand starting at position 821 of SEQ ID NO: 1560134
aggacacucuacucuguaa

SEQ ID NO: 1578674 - RNA, 19 nt, Artificial Sequence
  Description of Artificial Sequence: Synthetic oligonucleotide
  Antisense strand to SEQ ID NO: 1578673
uuacagaguagaguguccu

SEQ ID NO: 1578675 - RNA, 19 nt, Artificial Sequence
  Description of Artificial Sequence: Synthetic oligonucleotide
  Sense strand starting at position 2200 of SEQ ID NO: 1560134
ucaaaugggacuuguagau

SEQ ID NO: 1578676 - RNA, 19 nt, Artificial Sequence
  Description of Artificial Sequence: Synthetic oligonucleotide
  Antisense strand to SEQ ID NO: 1578675
aucuacaagucccauuuga

SEQ ID NO: 1578677 - RNA, 19 nt, Artificial Sequence
  Description of Artificial Sequence: Synthetic oligonucleotide
  Sense strand starting at position 2231 of SEQ ID NO: 1560134
uuagucucaugcgugggaa

SEQ ID NO: 1578678 - RNA, 19 nt, Artificial Sequence
  Description of Artificial Sequence: Synthetic oligonucleotide
  Antisense strand to SEQ ID NO: 1578677
uucccacgcaugagacuaa

SEQ ID NO: 1578679 - RNA, 19 nt, Artificial Sequence
  Description of Artificial Sequence: Synthetic oligonucleotide
  Sense strand starting at position 2232 of SEQ ID NO: 1560134
uagucucaugcgugggaaa

SEQ ID NO: 1578680 - RNA, 19 nt, Artificial Sequence
  Description of Artificial Sequence: Synthetic oligonucleotide
  Antisense strand to SEQ ID NO: 1578679
uuucccacgcaugagacua

SEQ ID NO: 1578681 - RNA, 19 nt, Artificial Sequence
  Description of Artificial Sequence: Synthetic oligonucleotide
  Sense strand starting at position 2243 of SEQ ID NO: 1560134
gugggaaaccucgaugacu

SEQ ID NO: 1578682 - RNA, 19 nt, Artificial Sequence
  Description of Artificial Sequence: Synthetic oligonucleotide
  Antisense strand to SEQ ID NO: 1578681
agucaucgagguuucccac

SEQ ID NO: 1578683 - RNA, 19 nt, Artificial Sequence
  Description of Artificial Sequence: Synthetic oligonucleotide
  Sense strand starting at position 2245 of SEQ ID NO: 1560134
gggaaaccucgaugacuuu

SEQ ID NO: 1578684 - RNA, 19 nt, Artificial Sequence
  Description of Artificial Sequence: Synthetic oligonucleotide
  Antisense strand to SEQ ID NO: 1578683
aaagucaucgagguuuccc

SEQ ID NO: 1578685 - RNA, 19 nt, Artificial Sequence
  Description of Artificial Sequence: Synthetic oligonucleotide
  Sense strand starting at position 2581 of SEQ ID NO: 1560134
ccaggaucuccagacgguu

SEQ ID NO: 1578686 - RNA, 19 nt, Artificial Sequence
  Description of Artificial Sequence: Synthetic oligonucleotide
  Antisense strand to SEQ ID NO: 1578685
aaccgucuggagauccugg

SEQ ID NO: 1578687 - RNA, 19 nt, Artificial Sequence
  Description of Artificial Sequence: Synthetic oligonucleotide
  Sense strand starting at position 2738 of SEQ ID NO: 1560134
ugaacucuugcugggacau

SEQ ID NO: 1578688 - RNA, 19 nt, Artificial Sequence
  Description of Artificial Sequence: Synthetic oligonucleotide
  Antisense strand to SEQ ID NO: 1578687
augucccagcaagaguuca

SEQ ID NO: 1578689 - RNA, 19 nt, Artificial Sequence
  Description of Artificial Sequence: Synthetic oligonucleotide
  Sense strand starting at position 2750 of SEQ ID NO: 1560134
gggacauccuuugaagauc

SEQ ID NO: 1578690 - RNA, 19 nt, Artificial Sequence
  Description of Artificial Sequence: Synthetic oligonucleotide
  Antisense strand to SEQ ID NO: 1578689
gaucuucaaaggauguccc

SEQ ID NO: 1578691 - RNA, 19 nt, Artificial Sequence
  Description of Artificial Sequence: Synthetic oligonucleotide
  Sense strand starting at position 2956 of SEQ ID NO: 1560134
gcccuuccugucugugaaa

SEQ ID NO: 1578692 - RNA, 19 nt, Artificial Sequence
  Description of Artificial Sequence: Synthetic oligonucleotide
  Antisense strand to SEQ ID NO: 1578691
uuucacagacaggaagggc

SEQ ID NO: 1578693 - RNA, 19 nt, Artificial Sequence
  Description of Artificial Sequence: Synthetic oligonucleotide
  Sense strand starting at position 2957 of SEQ ID NO: 1560134
cccuuccugucugugaaau

SEQ ID NO: 1578694 - RNA, 19 nt, Artificial Sequence
  Description of Artificial Sequence: Synthetic oligonucleotide
  Antisense strand to SEQ ID NO: 1578693
auuucacagacaggaaggg

SEQ ID NO: 1578695 - RNA, 19 nt, Artificial Sequence
  Description of Artificial Sequence: Synthetic oligonucleotide
  Sense strand starting at position 2958 of SEQ ID NO: 1560134
ccuuccugucugugaaaug

SEQ ID NO: 1578696 - RNA, 19 nt, Artificial Sequence
  Description of Artificial Sequence: Synthetic oligonucleotide
  Antisense strand to SEQ ID NO: 1578695
cauuucacagacaggaagg

SEQ ID NO: 1578697 - RNA, 19 nt, Artificial Sequence
  Description of Artificial Sequence: Synthetic oligonucleotide
  Sense strand starting at position 2970 of SEQ ID NO: 1560134
ugaaauggacucuggguga

SEQ ID NO: 1578698 - RNA, 19 nt, Artificial Sequence
  Description of Artificial Sequence: Synthetic oligonucleotide
  Antisense strand to SEQ ID NO: 1578697
ucacccagaguccauuuca

SEQ ID NO: 1578699 - RNA, 19 nt, Artificial Sequence
  Description of Artificial Sequence: Synthetic oligonucleotide
  Sense strand starting at position 2973 of SEQ ID NO: 1560134
aauggacucugggugaauc

SEQ ID NO: 1578700 - RNA, 19 nt, Artificial Sequence
  Description of Artificial Sequence: Synthetic oligonucleotide
  Antisense strand to SEQ ID NO: 1578699
gauucacccagaguccauu

SEQ ID NO: 1578701 - RNA, 19 nt, Artificial Sequence
  Description of Artificial Sequence: Synthetic oligonucleotide
  Sense strand starting at position 3098 of SEQ ID NO: 1560134
gcccaagucacgucgucua

SEQ ID NO: 1578702 - RNA, 19 nt, Artificial Sequence
  Description of Artificial Sequence: Synthetic oligonucleotide
  Antisense strand to SEQ ID NO: 1578701
uagacgacgugacuugggc

SEQ ID NO: 1578703 - RNA, 19 nt, Artificial Sequence
  Description of Artificial Sequence: Synthetic oligonucleotide
  Sense strand starting at position 3331 of SEQ ID NO: 1560134
ccuggauccuuagaaggaa

SEQ ID NO: 1578704 - RNA, 19 nt, Artificial Sequence
  Description of Artificial Sequence: Synthetic oligonucleotide
  Antisense strand to SEQ ID NO: 1578703
uuccuucuaaggauccagg

SEQ ID NO: 1578705 - RNA, 19 nt, Artificial Sequence
  Description of Artificial Sequence: Synthetic oligonucleotide
  Sense strand starting at position 3385 of SEQ ID NO: 1560134
ggguucggaugccugaauu

SEQ ID NO: 1578706 - RNA, 19 nt, Artificial Sequence
  Description of Artificial Sequence: Synthetic oligonucleotide
  Antisense strand to SEQ ID NO: 1578705
aauucaggcauccgaaccc

SEQ ID NO: 1578707 - RNA, 19 nt, Artificial Sequence
  Description of Artificial Sequence: Synthetic oligonucleotide
  Sense strand starting at position 3440 of SEQ ID NO: 1560134
agacguuggagcuggaauu

SEQ ID NO: 1578708 - RNA, 19 nt, Artificial Sequence
  Description of Artificial Sequence: Synthetic oligonucleotide
  Antisense strand to SEQ ID NO: 1578707
aauuccagcuccaacgucu

SEQ ID NO: 1578709 - RNA, 19 nt, Artificial Sequence
  Description of Artificial Sequence: Synthetic oligonucleotide
  Sense strand starting at position 3488 of SEQ ID NO: 1560134
gaagccgagucuuugggua

SEQ ID NO: 1578710 - RNA, 19 nt, Artificial Sequence
  Description of Artificial Sequence: Synthetic oligonucleotide
  Antisense strand to SEQ ID NO: 1578709
uacccaaagacucggcuuc

SEQ ID NO: 1578711 - RNA, 19 nt, Artificial Sequence
  Description of Artificial Sequence: Synthetic oligonucleotide
  Sense strand starting at position 3492 of SEQ ID NO: 1560134
ccgagucuuuggguaguau

SEQ ID NO: 1578712 - RNA, 19 nt, Artificial Sequence
  Description of Artificial Sequence: Synthetic oligonucleotide
  Antisense strand to SEQ ID NO: 1578711
auacuacccaaagacucgg

SEQ ID NO: 1578713 - RNA, 19 nt, Artificial Sequence
  Description of Artificial Sequence: Synthetic oligonucleotide
  Sense strand starting at position 3493 of SEQ ID NO: 1560134
cgagucuuuggguaguaua

SEQ ID NO: 1578714 - RNA, 19 nt, Artificial Sequence
  Description of Artificial Sequence: Synthetic oligonucleotide
  Antisense strand to SEQ ID NO: 1578713
uauacuacccaaagacucg

SEQ ID NO: 1578715 - RNA, 19 nt, Artificial Sequence
  Description of Artificial Sequence: Synthetic oligonucleotide
  Sense strand starting at position 3525 of SEQ ID NO: 1560134
ccgagucuuggucagaaau

SEQ ID NO: 1578716 - RNA, 19 nt, Artificial Sequence
  Description of Artificial Sequence: Synthetic oligonucleotide
  Antisense strand to SEQ ID NO: 1578715
auuucugaccaagacucgg

SEQ ID NO: 1578717 - RNA, 19 nt, Artificial Sequence
  Description of Artificial Sequence: Synthetic oligonucleotide
  Sense strand starting at position 3623 of SEQ ID NO: 1560134
cuaggucucugagcagaau

SEQ ID NO: 1578718 - RNA, 19 nt, Artificial Sequence
  Description of Artificial Sequence: Synthetic oligonucleotide
  Antisense strand to SEQ ID NO: 1578717
auucugcucagagaccuag

SEQ ID NO: 1578719 - RNA, 19 nt, Artificial Sequence
  Description of Artificial Sequence: Synthetic oligonucleotide
  Sense strand starting at position 3624 of SEQ ID NO: 1560134
uaggucucugagcagaauu

SEQ ID NO: 1578720 - RNA, 19 nt, Artificial Sequence
  Description of Artificial Sequence: Synthetic oligonucleotide
  Antisense strand to SEQ ID NO: 1578719
aauucugcucagagaccua

SEQ ID NO: 1578721 - RNA, 19 nt, Artificial Sequence
  Description of Artificial Sequence: Synthetic oligonucleotide
  Sense strand starting at position 3626 of SEQ ID NO: 1560134
ggucucugagcagaauuaa

SEQ ID NO: 1578722 - RNA, 19 nt, Artificial Sequence
  Description of Artificial Sequence: Synthetic oligonucleotide
  Antisense strand to SEQ ID NO: 1578721
uuaauucugcucagagacc

SEQ ID NO: 1578723 - RNA, 19 nt, Artificial Sequence
  Description of Artificial Sequence: Synthetic oligonucleotide
  Sense strand starting at position 3935 of SEQ ID NO: 1560134
cuggguuugcagagguagu

SEQ ID NO: 1578724 - RNA, 19 nt, Artificial Sequence
  Description of Artificial Sequence: Synthetic oligonucleotide
  Antisense strand to SEQ ID NO: 1578723
acuaccucugcaaacccag

SEQ ID NO: 1578725 - RNA, 19 nt, Artificial Sequence
  Description of Artificial Sequence: Synthetic oligonucleotide
  Sense strand starting at position 3936 of SEQ ID NO: 1560134
uggguuugcagagguaguu

SEQ ID NO: 1578726 - RNA, 19 nt, Artificial Sequence
  Description of Artificial Sequence: Synthetic oligonucleotide
  Antisense strand to SEQ ID NO: 1578725
aacuaccucugcaaaccca

SEQ ID NO: 1578727 - RNA, 19 nt, Artificial Sequence
  Description of Artificial Sequence: Synthetic oligonucleotide
  Sense strand starting at position 49 of SEQ ID NO: 1560135
gucucuuccucucuguuau

SEQ ID NO: 1578728 - RNA, 19 nt, Artificial Sequence
  Description of Artificial Sequence: Synthetic oligonucleotide
  Antisense strand to SEQ ID NO: 1578727
auaacagagaggaagagac

SEQ ID NO: 1578729 - RNA, 19 nt, Artificial Sequence
  Description of Artificial Sequence: Synthetic oligonucleotide
  Sense strand starting at position 942 of SEQ ID NO: 1560135
ccguguuaccugugugauu

SEQ ID NO: 1578730 - RNA, 19 nt, Artificial Sequence
  Description of Artificial Sequence: Synthetic oligonucleotide
  Antisense strand to SEQ ID NO: 1578729
aaucacacagguaacacgg

SEQ ID NO: 1578731 - RNA, 19 nt, Artificial Sequence
  Description of Artificial Sequence: Synthetic oligonucleotide
  Sense strand starting at position 943 of SEQ ID NO: 1560135
cguguuaccugugugauuc

SEQ ID NO: 1578732 - RNA, 19 nt, Artificial Sequence
  Description of Artificial Sequence: Synthetic oligonucleotide
  Antisense strand to SEQ ID NO: 1578731
gaaucacacagguaacacg

SEQ ID NO: 1578733 - RNA, 19 nt, Artificial Sequence
  Description of Artificial Sequence: Synthetic oligonucleotide
  Sense strand starting at position 944 of SEQ ID NO: 1560135
guguuaccugugugauuca

SEQ ID NO: 1578734 - RNA, 19 nt, Artificial Sequence
  Description of Artificial Sequence: Synthetic oligonucleotide
  Antisense strand to SEQ ID NO: 1578733
ugaaucacacagguaacac

SEQ ID NO: 1578735 - RNA, 19 nt, Artificial Sequence
  Description of Artificial Sequence: Synthetic oligonucleotide
  Sense strand starting at position 975 of SEQ ID NO: 1560135
cuacgucccacuggaagaa

SEQ ID NO: 1578736 - RNA, 19 nt, Artificial Sequence
  Description of Artificial Sequence: Synthetic oligonucleotide
  Antisense strand to SEQ ID NO: 1578735
uucuuccagugggacguag

SEQ ID NO: 1578737 - RNA, 19 nt, Artificial Sequence
  Description of Artificial Sequence: Synthetic oligonucleotide
  Sense strand starting at position 1209 of SEQ ID NO: 1560135
acuucuucguuucccgaau

SEQ ID NO: 1578738 - RNA, 19 nt, Artificial Sequence
  Description of Artificial Sequence: Synthetic oligonucleotide
  Antisense strand to SEQ ID NO: 1578737
auucgggaaacgaagaagu

SEQ ID NO: 1578739 - RNA, 19 nt, Artificial Sequence
  Description of Artificial Sequence: Synthetic oligonucleotide
  Sense strand starting at position 2070 of SEQ ID NO: 1560135
gucugaagauccuaaagug

SEQ ID NO: 1578740 - RNA, 19 nt, Artificial Sequence
  Description of Artificial Sequence: Synthetic oligonucleotide
  Antisense strand to SEQ ID NO: 1578739
cacuuuaggaucuucagac

SEQ ID NO: 1578741 - RNA, 19 nt, Artificial Sequence
  Description of Artificial Sequence: Synthetic oligonucleotide
  Sense strand starting at position 2123 of SEQ ID NO: 1560135
ccgggugagccucagaguu

SEQ ID NO: 1578742 - RNA, 19 nt, Artificial Sequence
  Description of Artificial Sequence: Synthetic oligonucleotide
  Antisense strand to SEQ ID NO: 1578741
aacucugaggcucacccgg

SEQ ID NO: 1578743 - RNA, 19 nt, Artificial Sequence
  Description of Artificial Sequence: Synthetic oligonucleotide
  Sense strand starting at position 2254 of SEQ ID NO: 1560135
cugcacauuuauuagggau

SEQ ID NO: 1578744 - RNA, 19 nt, Artificial Sequence
  Description of Artificial Sequence: Synthetic oligonucleotide
  Antisense strand to SEQ ID NO: 1578743
aucccuaauaaaugugcag

SEQ ID NO: 1578745 - RNA, 19 nt, Artificial Sequence
  Description of Artificial Sequence: Synthetic oligonucleotide
  Sense strand starting at position 2257 of SEQ ID NO: 1560135
cacauuuauuagggauuag

SEQ ID NO: 1578746 - RNA, 19 nt, Artificial Sequence
  Description of Artificial Sequence: Synthetic oligonucleotide
  Antisense strand to SEQ ID NO: 1578745
cuaaucccuaauaaaugug

SEQ ID NO: 1578747 - RNA, 19 nt, Artificial Sequence
  Description of Artificial Sequence: Synthetic oligonucleotide
  Sense strand starting at position 2271 of SEQ ID NO: 1560135
auuagauugugcugugcac

SEQ ID NO: 1578748 - RNA, 19 nt, Artificial Sequence
  Description of Artificial Sequence: Synthetic oligonucleotide
  Antisense strand to SEQ ID NO: 1578747
gugcacagcacaaucuaau

SEQ ID NO: 1578749 - RNA, 19 nt, Artificial Sequence
  Description of Artificial Sequence: Synthetic oligonucleotide
  Sense strand starting at position 2662 of SEQ ID NO: 1560135
ucaguuaucuccugcauuc

SEQ ID NO: 1578750 - RNA, 19 nt, Artificial Sequence
  Description of Artificial Sequence: Synthetic oligonucleotide
  Antisense strand to SEQ ID NO: 1578749
gaaugcaggagauaacuga

SEQ ID NO: 1578751 - RNA, 19 nt, Artificial Sequence
  Description of Artificial Sequence: Synthetic oligonucleotide
  Sense strand starting at position 2664 of SEQ ID NO: 1560135
aguuaucuccugcauucuu

SEQ ID NO: 1578752 - RNA, 19 nt, Artificial Sequence
  Description of Artificial Sequence: Synthetic oligonucleotide
  Antisense strand to SEQ ID NO: 1578751
aagaaugcaggagauaacu

SEQ ID NO: 1578753 - RNA, 19 nt, Artificial Sequence
  Description of Artificial Sequence: Synthetic oligonucleotide
  Sense strand starting at position 2669 of SEQ ID NO: 1560135
ucuccugcauucuuggaga

SEQ ID NO: 1578754 - RNA, 19 nt, Artificial Sequence
  Description of Artificial Sequence: Synthetic oligonucleotide
  Antisense strand to SEQ ID NO: 1578753
ucuccaagaaugcaggaga

SEQ ID NO: 1578755 - RNA, 19 nt, Artificial Sequence
  Description of Artificial Sequence: Synthetic oligonucleotide
  Sense strand starting at position 2672 of SEQ ID NO: 1560135
ccugcauucuuggagacca

SEQ ID NO: 1578756 - RNA, 19 nt, Artificial Sequence
  Description of Artificial Sequence: Synthetic oligonucleotide
  Antisense strand to SEQ ID NO: 1578755
uggucuccaagaaugcagg

SEQ ID NO: 1578757 - RNA, 19 nt, Artificial Sequence
  Description of Artificial Sequence: Synthetic oligonucleotide
  Sense strand starting at position 3247 of SEQ ID NO: 1560135
ggguguuacuauguuacca

SEQ ID NO: 1578758 - RNA, 19 nt, Artificial Sequence
  Description of Artificial Sequence: Synthetic oligonucleotide
  Antisense strand to SEQ ID NO: 1578757
ugguaacauaguaacaccc

SEQ ID NO: 1578759 - RNA, 19 nt, Artificial Sequence
  Description of Artificial Sequence: Synthetic oligonucleotide
  Sense strand starting at position 3363 of SEQ ID NO: 1560135
gcuguucucgauggcugua

SEQ ID NO: 1578760 - RNA, 19 nt, Artificial Sequence
  Description of Artificial Sequence: Synthetic oligonucleotide
  Antisense strand to SEQ ID NO: 1578759
uacagccaucgagaacagc

SEQ ID NO: 1578761 - RNA, 19 nt, Artificial Sequence
  Description of Artificial Sequence: Synthetic oligonucleotide
  Sense strand starting at position 3425 of SEQ ID NO: 1560135
ugcagaauaugaccucauu

SEQ ID NO: 1578762 - RNA, 19 nt, Artificial Sequence
  Description of Artificial Sequence: Synthetic oligonucleotide
  Antisense strand to SEQ ID NO: 1578761
aaugaggucauauucugca

SEQ ID NO: 1578763 - RNA, 19 nt, Artificial Sequence
  Description of Artificial Sequence: Synthetic oligonucleotide
  Sense strand starting at position 205 of SEQ ID NO: 1560136
uccagcacuccugggaaga

SEQ ID NO: 1578764 - RNA, 19 nt, Artificial Sequence
  Description of Artificial Sequence: Synthetic oligonucleotide
  Antisense strand to SEQ ID NO: 1578763
ucuucccaggagugcugga

SEQ ID NO: 1578765 - RNA, 19 nt, Artificial Sequence
  Description of Artificial Sequence: Synthetic oligonucleotide
  Sense strand starting at position 360 of SEQ ID NO: 1560136
aggauauccugggagagga

SEQ ID NO: 1578766 - RNA, 19 nt, Artificial Sequence
  Description of Artificial Sequence: Synthetic oligonucleotide
  Antisense strand to SEQ ID NO: 1578765
uccucucccaggauauccu

SEQ ID NO: 1578767 - RNA, 19 nt, Artificial Sequence
  Description of Artificial Sequence: Synthetic oligonucleotide
  Sense strand starting at position 665 of SEQ ID NO: 1560136
gaaguagguucucuccuua

SEQ ID NO: 1578768 - RNA, 19 nt, Artificial Sequence
  Description of Artificial Sequence: Synthetic oligonucleotide
  Antisense strand to SEQ ID NO: 1578767
uaaggagagaaccuacuuc

SEQ ID NO: 1578769 - RNA, 19 nt, Artificial Sequence
  Description of Artificial Sequence: Synthetic oligonucleotide
  Sense strand starting at position 853 of SEQ ID NO: 1560136
gcccucauucucuguaagu

SEQ ID NO: 1578770 - RNA, 19 nt, Artificial Sequence
  Description of Artificial Sequence: Synthetic oligonucleotide
  Antisense strand to SEQ ID NO: 1578769
acuuacagagaaugagggc

SEQ ID NO: 1578771 - RNA, 19 nt, Artificial Sequence
  Description of Artificial Sequence: Synthetic oligonucleotide
  Sense strand starting at position 854 of SEQ ID NO: 1560136
cccucauucucuguaaguu

SEQ ID NO: 1578772 - RNA, 19 nt, Artificial Sequence
  Description of Artificial Sequence: Synthetic oligonucleotide
  Antisense strand to SEQ ID NO: 1578771
aacuuacagagaaugaggg

SEQ ID NO: 1578773 - RNA, 19 nt, Artificial Sequence
  Description of Artificial Sequence: Synthetic oligonucleotide
  Sense strand starting at position 866 of SEQ ID NO: 1560136
guaaguuguaugugucaac

SEQ ID NO: 1578774 - RNA, 19 nt, Artificial Sequence
  Description of Artificial Sequence: Synthetic oligonucleotide
  Antisense strand to SEQ ID NO: 1578773
guugacacauacaacuuac

SEQ ID NO: 1578775 - RNA, 19 nt, Artificial Sequence
  Description of Artificial Sequence: Synthetic oligonucleotide
  Sense strand starting at position 962 of SEQ ID NO: 1560136
gggugucucugagugagac

SEQ ID NO: 1578776 - RNA, 19 nt, Artificial Sequence
  Description of Artificial Sequence: Synthetic oligonucleotide
  Antisense strand to SEQ ID NO: 1578775
gucucacucagagacaccc

SEQ ID NO: 1578777 - RNA, 19 nt, Artificial Sequence
  Description of Artificial Sequence: Synthetic oligonucleotide
  Sense strand starting at position 1154 of SEQ ID NO: 1560136
gggcuuaagacucagacgu

SEQ ID NO: 1578778 - RNA, 19 nt, Artificial Sequence
  Description of Artificial Sequence: Synthetic oligonucleotide
  Antisense strand to SEQ ID NO: 1578777
acgucugagucuuaagccc

SEQ ID NO: 1578779 - RNA, 19 nt, Artificial Sequence
  Description of Artificial Sequence: Synthetic oligonucleotide
  Sense strand starting at position 1158 of SEQ ID NO: 1560136
uuaagacucagacgugaac

SEQ ID NO: 1578780 - RNA, 19 nt, Artificial Sequence
  Description of Artificial Sequence: Synthetic oligonucleotide
  Antisense strand to SEQ ID NO: 1578779
guucacgucugagucuuaa

SEQ ID NO: 1578781 - RNA, 19 nt, Artificial Sequence
  Description of Artificial Sequence: Synthetic oligonucleotide
  Sense strand starting at position 1506 of SEQ ID NO: 1560136
ccugccucccugugugaga

SEQ ID NO: 1578782 - RNA, 19 nt, Artificial Sequence
  Description of Artificial Sequence: Synthetic oligonucleotide
  Antisense strand to SEQ ID NO: 1578781
ucucacacagggaggcagg

SEQ ID NO: 1578783 - RNA, 19 nt, Artificial Sequence
  Description of Artificial Sequence: Synthetic oligonucleotide
  Sense strand starting at position 1592 of SEQ ID NO: 1560136
cgauuucuauaggcaucuu

SEQ ID NO: 1578784 - RNA, 19 nt, Artificial Sequence
  Description of Artificial Sequence: Synthetic oligonucleotide
  Antisense strand to SEQ ID NO: 1578783
aagaugccuauagaaaucg

SEQ ID NO: 1578785 - RNA, 19 nt, Artificial Sequence
  Description of Artificial Sequence: Synthetic oligonucleotide
  Sense strand starting at position 2264 of SEQ ID NO: 1560136
gguugucacaugcacagaa

SEQ ID NO: 1578786 - RNA, 19 nt, Artificial Sequence
  Description of Artificial Sequence: Synthetic oligonucleotide
  Antisense strand to SEQ ID NO: 1578785
uucugugcaugugacaacc

SEQ ID NO: 1578787 - RNA, 19 nt, Artificial Sequence
  Description of Artificial Sequence: Synthetic oligonucleotide
  Sense strand starting at position 2266 of SEQ ID NO: 1560136
uugucacaugcacagaaau

SEQ ID NO: 1578788 - RNA, 19 nt, Artificial Sequence
  Description of Artificial Sequence: Synthetic oligonucleotide
  Antisense strand to SEQ ID NO: 1578787
auuucugugcaugugacaa

SEQ ID NO: 1578789 - RNA, 19 nt, Artificial Sequence
  Description of Artificial Sequence: Synthetic oligonucleotide
  Sense strand starting at position 2386 of SEQ ID NO: 1560136
gcacuuugauccuucgaag

SEQ ID NO: 1578790 - RNA, 19 nt, Artificial Sequence
  Description of Artificial Sequence: Synthetic oligonucleotide
  Antisense strand to SEQ ID NO: 1578789
cuucgaaggaucaaagugc

SEQ ID NO: 1578791 - RNA, 19 nt, Artificial Sequence
  Description of Artificial Sequence: Synthetic oligonucleotide
  Sense strand starting at position 2395 of SEQ ID NO: 1560136
uccuucgaagcuugacauu

SEQ ID NO: 1578792 - RNA, 19 nt, Artificial Sequence
  Description of Artificial Sequence: Synthetic oligonucleotide
  Antisense strand to SEQ ID NO: 1578791
aaugucaagcuucgaagga

SEQ ID NO: 1578793 - RNA, 19 nt, Artificial Sequence
  Description of Artificial Sequence: Synthetic oligonucleotide
  Sense strand starting at position 2439 of SEQ ID NO: 1560136
augucucccugucucauua

SEQ ID NO: 1578794 - RNA, 19 nt, Artificial Sequence
  Description of Artificial Sequence: Synthetic oligonucleotide
  Antisense strand to SEQ ID NO: 1578793
uaaugagacagggagacau

SEQ ID NO: 1578795 - RNA, 19 nt, Artificial Sequence
  Description of Artificial Sequence: Synthetic oligonucleotide
  Sense strand starting at position 2458 of SEQ ID NO: 1560136
ugugauacgagaugguguu

SEQ ID NO: 1578796 - RNA, 19 nt, Artificial Sequence
  Description of Artificial Sequence: Synthetic oligonucleotide
  Antisense strand to SEQ ID NO: 1578795
aacaccaucucguaucaca

SEQ ID NO: 1578797 - RNA, 19 nt, Artificial Sequence
  Description of Artificial Sequence: Synthetic oligonucleotide
  Sense strand starting at position 2468 of SEQ ID NO: 1560136
gaugguguuccugguauuc

SEQ ID NO: 1578798 - RNA, 19 nt, Artificial Sequence
  Description of Artificial Sequence: Synthetic oligonucleotide
  Antisense strand to SEQ ID NO: 1578797
gaauaccaggaacaccauc

SEQ ID NO: 1578799 - RNA, 19 nt, Artificial Sequence
  Description of Artificial Sequence: Synthetic oligonucleotide
  Sense strand starting at position 2477 of SEQ ID NO: 1560136
ccugguauucaaggaguga

SEQ ID NO: 1578800 - RNA, 19 nt, Artificial Sequence
  Description of Artificial Sequence: Synthetic oligonucleotide
  Antisense strand to SEQ ID NO: 1578799
ucacuccuugaauaccagg

SEQ ID NO: 1578801 - RNA, 19 nt, Artificial Sequence
  Description of Artificial Sequence: Synthetic oligonucleotide
  Sense strand starting at position 2481 of SEQ ID NO: 1560136
guauucaaggagugagaac

SEQ ID NO: 1578802 - RNA, 19 nt, Artificial Sequence
  Description of Artificial Sequence: Synthetic oligonucleotide
  Antisense strand to SEQ ID NO: 1578801
guucucacuccuugaauac

SEQ ID NO: 1578803 - RNA, 19 nt, Artificial Sequence
  Description of Artificial Sequence: Synthetic oligonucleotide
  Sense strand starting at position 2502 of SEQ ID NO: 1560136
ugaucagcucuuuacugga

SEQ ID NO: 1578804 - RNA, 19 nt, Artificial Sequence
  Description of Artificial Sequence: Synthetic oligonucleotide
  Antisense strand to SEQ ID NO: 1578803
uccaguaaagagcugauca

SEQ ID NO: 1578805 - RNA, 19 nt, Artificial Sequence
  Description of Artificial Sequence: Synthetic oligonucleotide
  Sense strand starting at position 2504 of SEQ ID NO: 1560136
aucagcucuuuacuggaau

SEQ ID NO: 1578806 - RNA, 19 nt, Artificial Sequence
  Description of Artificial Sequence: Synthetic oligonucleotide
  Antisense strand to SEQ ID NO: 1578805
auuccaguaaagagcugau

SEQ ID NO: 1578807 - RNA, 19 nt, Artificial Sequence
  Description of Artificial Sequence: Synthetic oligonucleotide
  Sense strand starting at position 2507 of SEQ ID NO: 1560136
agcucuuuacuggaauucu

SEQ ID NO: 1578808 - RNA, 19 nt, Artificial Sequence
  Description of Artificial Sequence: Synthetic oligonucleotide
  Antisense strand to SEQ ID NO: 1578807
agaauuccaguaaagagcu

SEQ ID NO: 1578809 - RNA, 19 nt, Artificial Sequence
  Description of Artificial Sequence: Synthetic oligonucleotide
  Sense strand starting at position 3093 of SEQ ID NO: 1560136
gcgggugucauacagucua

SEQ ID NO: 1578810 - RNA, 19 nt, Artificial Sequence
  Description of Artificial Sequence: Synthetic oligonucleotide
  Antisense strand to SEQ ID NO: 1578809
uagacuguaugacacccgc

SEQ ID NO: 1578811 - RNA, 19 nt, Artificial Sequence
  Description of Artificial Sequence: Synthetic oligonucleotide
  Sense strand starting at position 3131 of SEQ ID NO: 1560136
caaagucaucuuuguguug

SEQ ID NO: 1578812 - RNA, 19 nt, Artificial Sequence
  Description of Artificial Sequence: Synthetic oligonucleotide
  Antisense strand to SEQ ID NO: 1578811
caacacaaagaugacuuug

SEQ ID NO: 1578813 - RNA, 19 nt, Artificial Sequence
  Description of Artificial Sequence: Synthetic oligonucleotide
  Sense strand starting at position 3140 of SEQ ID NO: 1560136
cuuuguguugcucccaguu

SEQ ID NO: 1578814 - RNA, 19 nt, Artificial Sequence
  Description of Artificial Sequence: Synthetic oligonucleotide
  Antisense strand to SEQ ID NO: 1578813
aacugggagcaacacaaag

SEQ ID NO: 1578815 - RNA, 19 nt, Artificial Sequence
  Description of Artificial Sequence: Synthetic oligonucleotide
  Sense strand starting at position 3152 of SEQ ID NO: 1560136
cccaguuuccuuugagcau

SEQ ID NO: 1578816 - RNA, 19 nt, Artificial Sequence
  Description of Artificial Sequence: Synthetic oligonucleotide
  Antisense strand to SEQ ID NO: 1578815
augcucaaaggaaacuggg

SEQ ID NO: 1578817 - RNA, 19 nt, Artificial Sequence
  Description of Artificial Sequence: Synthetic oligonucleotide
  Sense strand starting at position 3206 of SEQ ID NO: 1560136
ggcggaguugcugagauau

SEQ ID NO: 1578818 - RNA, 19 nt, Artificial Sequence
  Description of Artificial Sequence: Synthetic oligonucleotide
  Antisense strand to SEQ ID NO: 1578817
auaucucagcaacuccgcc

SEQ ID NO: 1578819 - RNA, 19 nt, Artificial Sequence
  Description of Artificial Sequence: Synthetic oligonucleotide
  Sense strand starting at position 3208 of SEQ ID NO: 1560136
cggaguugcugagauauuu

SEQ ID NO: 1578820 - RNA, 19 nt, Artificial Sequence
  Description of Artificial Sequence: Synthetic oligonucleotide
  Antisense strand to SEQ ID NO: 1578819
aaauaucucagcaacuccg

SEQ ID NO: 1578821 - RNA, 19 nt, Artificial Sequence
  Description of Artificial Sequence: Synthetic oligonucleotide
  Sense strand starting at position 3216 of SEQ ID NO: 1560136
cugagauauuugugagcag

SEQ ID NO: 1578822 - RNA, 19 nt, Artificial Sequence
  Description of Artificial Sequence: Synthetic oligonucleotide
  Antisense strand to SEQ ID NO: 1578821
cugcucacaaauaucucag

SEQ ID NO: 1578823 - RNA, 19 nt, Artificial Sequence
  Description of Artificial Sequence: Synthetic oligonucleotide
  Sense strand starting at position 3217 of SEQ ID NO: 1560136
ugagauauuugugagcagu

SEQ ID NO: 1578824 - RNA, 19 nt, Artificial Sequence
  Description of Artificial Sequence: Synthetic oligonucleotide
  Antisense strand to SEQ ID NO: 1578823
acugcucacaaauaucuca

SEQ ID NO: 1578825 - RNA, 19 nt, Artificial Sequence
  Description of Artificial Sequence: Synthetic oligonucleotide
  Sense strand starting at position 3325 of SEQ ID NO: 1560136
aaguccauuugugggagaa

SEQ ID NO: 1578826 - RNA, 19 nt, Artificial Sequence
  Description of Artificial Sequence: Synthetic oligonucleotide
  Antisense strand to SEQ ID NO: 1578825
uucucccacaaauggacuu

SEQ ID NO: 1578827 - RNA, 19 nt, Artificial Sequence
  Description of Artificial Sequence: Synthetic oligonucleotide
  Sense strand starting at position 3327 of SEQ ID NO: 1560136
guccauuugugggagaaug

SEQ ID NO: 1578828 - RNA, 19 nt, Artificial Sequence
  Description of Artificial Sequence: Synthetic oligonucleotide
  Antisense strand to SEQ ID NO: 1578827
cauucucccacaaauggac

SEQ ID NO: 1578829 - RNA, 19 nt, Artificial Sequence
  Description of Artificial Sequence: Synthetic oligonucleotide
  Sense strand starting at position 3335 of SEQ ID NO: 1560136
gugggagaaugggugcaua

SEQ ID NO: 1578830 - RNA, 19 nt, Artificial Sequence
  Description of Artificial Sequence: Synthetic oligonucleotide
  Antisense strand to SEQ ID NO: 1578829
uaugcacccauucucccac

SEQ ID NO: 1578831 - RNA, 19 nt, Artificial Sequence
  Description of Artificial Sequence: Synthetic oligonucleotide
  Sense strand starting at position 3347 of SEQ ID NO: 1560136
gugcauacacuguggcaaa

SEQ ID NO: 1578832 - RNA, 19 nt, Artificial Sequence
  Description of Artificial Sequence: Synthetic oligonucleotide
  Antisense strand to SEQ ID NO: 1578831
uuugccacaguguaugcac

SEQ ID NO: 1578833 - RNA, 19 nt, Artificial Sequence
  Description of Artificial Sequence: Synthetic oligonucleotide
  Sense strand starting at position 3399 of SEQ ID NO: 1560136
gugucauaaggcugucuca

SEQ ID NO: 1578834 - RNA, 19 nt, Artificial Sequence
  Description of Artificial Sequence: Synthetic oligonucleotide
  Antisense strand to SEQ ID NO: 1578833
ugagacagccuuaugacac

SEQ ID NO: 1578835 - RNA, 19 nt, Artificial Sequence
  Description of Artificial Sequence: Synthetic oligonucleotide
  Sense strand starting at position 3402 of SEQ ID NO: 1560136
ucauaaggcugucucagaa

SEQ ID NO: 1578836 - RNA, 19 nt, Artificial Sequence
  Description of Artificial Sequence: Synthetic oligonucleotide
  Antisense strand to SEQ ID NO: 1578835
uucugagacagccuuauga

SEQ ID NO: 1578837 - RNA, 19 nt, Artificial Sequence
  Description of Artificial Sequence: Synthetic oligonucleotide
  Sense strand starting at position 3441 of SEQ ID NO: 1560136
aauaucguagcaugauaca

SEQ ID NO: 1578838 - RNA, 19 nt, Artificial Sequence
  Description of Artificial Sequence: Synthetic oligonucleotide
  Antisense strand to SEQ ID NO: 1578837
uguaucaugcuacgauauu

SEQ ID NO: 1578839 - RNA, 19 nt, Artificial Sequence
  Description of Artificial Sequence: Synthetic oligonucleotide
  Sense strand starting at position 3450 of SEQ ID NO: 1560136
gcaugauacaguugacuug

SEQ ID NO: 1578840 - RNA, 19 nt, Artificial Sequence
  Description of Artificial Sequence: Synthetic oligonucleotide
  Antisense strand to SEQ ID NO: 1578839
caagucaacuguaucaugc

SEQ ID NO: 1578841 - RNA, 19 nt, Artificial Sequence
  Description of Artificial Sequence: Synthetic oligonucleotide
  Sense strand starting at position 3637 of SEQ ID NO: 1560136
uuuauuuccuguguuacuu

SEQ ID NO: 1578842 - RNA, 19 nt, Artificial Sequence
  Description of Artificial Sequence: Synthetic oligonucleotide
  Antisense strand to SEQ ID NO: 1578841
aaguaacacaggaaauaaa

SEQ ID NO: 1578843 - RNA, 19 nt, Artificial Sequence
  Description of Artificial Sequence: Synthetic oligonucleotide
  Sense strand starting at position 607 of SEQ ID NO: 1560137
aggaauaguuuguguccua

SEQ ID NO: 1578844 - RNA, 19 nt, Artificial Sequence
  Description of Artificial Sequence: Synthetic oligonucleotide
  Antisense strand to SEQ ID NO: 1578843
uaggacacaaacuauuccu

SEQ ID NO: 1578845 - RNA, 19 nt, Artificial Sequence
  Description of Artificial Sequence: Synthetic oligonucleotide
  Sense strand starting at position 608 of SEQ ID NO: 1560137
ggaauaguuuguguccuaa

SEQ ID NO: 1578846 - RNA, 19 nt, Artificial Sequence
  Description of Artificial Sequence: Synthetic oligonucleotide
  Antisense strand to SEQ ID NO: 1578845
uuaggacacaaacuauucc

SEQ ID NO: 1578847 - RNA, 19 nt, Artificial Sequence
  Description of Artificial Sequence: Synthetic oligonucleotide
  Sense strand starting at position 698 of SEQ ID NO: 1560137
cgcagaggcucucugacuu

SEQ ID NO: 1578848 - RNA, 19 nt, Artificial Sequence
  Description of Artificial Sequence: Synthetic oligonucleotide
  Antisense strand to SEQ ID NO: 1578847
aagucagagagccucugcg

SEQ ID NO: 1578849 - RNA, 19 nt, Artificial Sequence
  Description of Artificial Sequence: Synthetic oligonucleotide
  Sense strand starting at position 711 of SEQ ID NO: 1560137
ugacuuggcccuggugaca

SEQ ID NO: 1578850 - RNA, 19 nt, Artificial Sequence
  Description of Artificial Sequence: Synthetic oligonucleotide
  Antisense strand to SEQ ID NO: 1578849
ugucaccagggccaaguca

SEQ ID NO: 1578851 - RNA, 19 nt, Artificial Sequence
  Description of Artificial Sequence: Synthetic oligonucleotide
  Sense strand starting at position 894 of SEQ ID NO: 1560137
cccugugguccaggaaguu

SEQ ID NO: 1578852 - RNA, 19 nt, Artificial Sequence
  Description of Artificial Sequence: Synthetic oligonucleotide
  Antisense strand to SEQ ID NO: 1578851
aacuuccuggaccacaggg

SEQ ID NO: 1578853 - RNA, 19 nt, Artificial Sequence
  Description of Artificial Sequence: Synthetic oligonucleotide
  Sense strand starting at position 1065 of SEQ ID NO: 1560137
caggcaaagucccuucgau

SEQ ID NO: 1578854 - RNA, 19 nt, Artificial Sequence
  Description of Artificial Sequence: Synthetic oligonucleotide
  Antisense strand to SEQ ID NO: 1578853
aucgaagggacuuugccug

SEQ ID NO: 1578855 - RNA, 19 nt, Artificial Sequence
  Description of Artificial Sequence: Synthetic oligonucleotide
  Sense strand starting at position 1176 of SEQ ID NO: 1560137
gguaccuugcaguggagaa

SEQ ID NO: 1578856 - RNA, 19 nt, Artificial Sequence
  Description of Artificial Sequence: Synthetic oligonucleotide
  Antisense strand to SEQ ID NO: 1578855
uucuccacugcaagguacc

SEQ ID NO: 1578857 - RNA, 19 nt, Artificial Sequence
  Description of Artificial Sequence: Synthetic oligonucleotide
  Sense strand starting at position 1225 of SEQ ID NO: 1560137
cauguccuucuaugcguua

SEQ ID NO: 1578858 - RNA, 19 nt, Artificial Sequence
  Description of Artificial Sequence: Synthetic oligonucleotide
  Antisense strand to SEQ ID NO: 1578857
uaacgcauagaaggacaug

SEQ ID NO: 1578859 - RNA, 19 nt, Artificial Sequence
  Description of Artificial Sequence: Synthetic oligonucleotide
  Sense strand starting at position 1228 of SEQ ID NO: 1560137
guccuucuaugcguuauau

SEQ ID NO: 1578860 - RNA, 19 nt, Artificial Sequence
  Description of Artificial Sequence: Synthetic oligonucleotide
  Antisense strand to SEQ ID NO: 1578859
auauaacgcauagaaggac

SEQ ID NO: 1578861 - RNA, 19 nt, Artificial Sequence
  Description of Artificial Sequence: Synthetic oligonucleotide
  Sense strand starting at position 1230 of SEQ ID NO: 1560137
ccuucuaugcguuauauua

SEQ ID NO: 1578862 - RNA, 19 nt, Artificial Sequence
  Description of Artificial Sequence: Synthetic oligonucleotide
  Antisense strand to SEQ ID NO: 1578861
uaauauaacgcauagaagg

SEQ ID NO: 1578863 - RNA, 19 nt, Artificial Sequence
  Description of Artificial Sequence: Synthetic oligonucleotide
  Sense strand starting at position 1232 of SEQ ID NO: 1560137
uucuaugcguuauauuaag

SEQ ID NO: 1578864 - RNA, 19 nt, Artificial Sequence
  Description of Artificial Sequence: Synthetic oligonucleotide
  Antisense strand to SEQ ID NO: 1578863
cuuaauauaacgcauagaa

SEQ ID NO: 1578865 - RNA, 19 nt, Artificial Sequence
  Description of Artificial Sequence: Synthetic oligonucleotide
  Sense strand starting at position 1588 of SEQ ID NO: 1560137
caaaguacuuaccgagaaa

SEQ ID NO: 1578866 - RNA, 19 nt, Artificial Sequence
  Description of Artificial Sequence: Synthetic oligonucleotide
  Antisense strand to SEQ ID NO: 1578865
uuucucgguaaguacuuug

SEQ ID NO: 1578867 - RNA, 19 nt, Artificial Sequence
  Description of Artificial Sequence: Synthetic oligonucleotide
  Sense strand starting at position 2120 of SEQ ID NO: 1560137
agagcuuuggcaugccaga

SEQ ID NO: 1578868 - RNA, 19 nt, Artificial Sequence
  Description of Artificial Sequence: Synthetic oligonucleotide
  Antisense strand to SEQ ID NO: 1578867
ucuggcaugccaaagcucu

SEQ ID NO: 1578869 - RNA, 19 nt, Artificial Sequence
  Description of Artificial Sequence: Synthetic oligonucleotide
  Sense strand starting at position 2303 of SEQ ID NO: 1560137
gcgaaacucuuguuucuac

SEQ ID NO: 1578870 - RNA, 19 nt, Artificial Sequence
  Description of Artificial Sequence: Synthetic oligonucleotide
  Antisense strand to SEQ ID NO: 1578869
guagaaacaagaguuucgc

SEQ ID NO: 1578871 - RNA, 19 nt, Artificial Sequence
  Description of Artificial Sequence: Synthetic oligonucleotide
  Sense strand starting at position 2304 of SEQ ID NO: 1560137
cgaaacucuuguuucuaca

SEQ ID NO: 1578872 - RNA, 19 nt, Artificial Sequence
  Description of Artificial Sequence: Synthetic oligonucleotide
  Antisense strand to SEQ ID NO: 1578871
uguagaaacaagaguuucg

SEQ ID NO: 1578873 - RNA, 19 nt, Artificial Sequence
  Description of Artificial Sequence: Synthetic oligonucleotide
  Sense strand starting at position 2614 of SEQ ID NO: 1560137
agcagaccuccuggaucuu

SEQ ID NO: 1578874 - RNA, 19 nt, Artificial Sequence
  Description of Artificial Sequence: Synthetic oligonucleotide
  Antisense strand to SEQ ID NO: 1578873
aagauccaggaggucugcu

SEQ ID NO: 1578875 - RNA, 19 nt, Artificial Sequence
  Description of Artificial Sequence: Synthetic oligonucleotide
  Sense strand starting at position 2620 of SEQ ID NO: 1560137
ccuccuggaucuuucugau

SEQ ID NO: 1578876 - RNA, 19 nt, Artificial Sequence
  Description of Artificial Sequence: Synthetic oligonucleotide
  Antisense strand to SEQ ID NO: 1578875
aucagaaagauccaggagg

SEQ ID NO: 1578877 - RNA, 19 nt, Artificial Sequence
  Description of Artificial Sequence: Synthetic oligonucleotide
  Sense strand starting at position 2623 of SEQ ID NO: 1560137
ccuggaucuuucugaucuu

SEQ ID NO: 1578878 - RNA, 19 nt, Artificial Sequence
  Description of Artificial Sequence: Synthetic oligonucleotide
  Antisense strand to SEQ ID NO: 1578877
aagaucagaaagauccagg

SEQ ID NO: 1578879 - RNA, 19 nt, Artificial Sequence
  Description of Artificial Sequence: Synthetic oligonucleotide
  Sense strand starting at position 2624 of SEQ ID NO: 1560137
cuggaucuuucugaucuuu

SEQ ID NO: 1578880 - RNA, 19 nt, Artificial Sequence
  Description of Artificial Sequence: Synthetic oligonucleotide
  Antisense strand to SEQ ID NO: 1578879
aaagaucagaaagauccag

SEQ ID NO: 1578881 - RNA, 19 nt, Artificial Sequence
  Description of Artificial Sequence: Synthetic oligonucleotide
  Sense strand starting at position 2626 of SEQ ID NO: 1560137
ggaucuuucugaucuuucu

SEQ ID NO: 1578882 - RNA, 19 nt, Artificial Sequence
  Description of Artificial Sequence: Synthetic oligonucleotide
  Antisense strand to SEQ ID NO: 1578881
agaaagaucagaaagaucc

SEQ ID NO: 1578883 - RNA, 19 nt, Artificial Sequence
  Description of Artificial Sequence: Synthetic oligonucleotide
  Sense strand starting at position 2635 of SEQ ID NO: 1560137
ugaucuuucuaagccaguu

SEQ ID NO: 1578884 - RNA, 19 nt, Artificial Sequence
  Description of Artificial Sequence: Synthetic oligonucleotide
  Antisense strand to SEQ ID NO: 1578883
aacuggcuuagaaagauca

SEQ ID NO: 1578885 - RNA, 19 nt, Artificial Sequence
  Description of Artificial Sequence: Synthetic oligonucleotide
  Sense strand starting at position 2680 of SEQ ID NO: 1560137
gaggccucuucguuaauca

SEQ ID NO: 1578886 - RNA, 19 nt, Artificial Sequence
  Description of Artificial Sequence: Synthetic oligonucleotide
  Antisense strand to SEQ ID NO: 1578885
ugauuaacgaagaggccuc

SEQ ID NO: 1578887 - RNA, 19 nt, Artificial Sequence
  Description of Artificial Sequence: Synthetic oligonucleotide
  Sense strand starting at position 2681 of SEQ ID NO: 1560137
aggccucuucguuaaucaa

SEQ ID NO: 1578888 - RNA, 19 nt, Artificial Sequence
  Description of Artificial Sequence: Synthetic oligonucleotide
  Antisense strand to SEQ ID NO: 1578887
uugauuaacgaagaggccu

SEQ ID NO: 1578889 - RNA, 19 nt, Artificial Sequence
  Description of Artificial Sequence: Synthetic oligonucleotide
  Sense strand starting at position 2701 of SEQ ID NO: 1560137
agagaaucaugugauagga

SEQ ID NO: 1578890 - RNA, 19 nt, Artificial Sequence
  Description of Artificial Sequence: Synthetic oligonucleotide
  Antisense strand to SEQ ID NO: 1578889
uccuaucacaugauucucu

SEQ ID NO: 1578891 - RNA, 19 nt, Artificial Sequence
  Description of Artificial Sequence: Synthetic oligonucleotide
  Sense strand starting at position 2709 of SEQ ID NO: 1560137
augugauaggaggguucuu

SEQ ID NO: 1578892 - RNA, 19 nt, Artificial Sequence
  Description of Artificial Sequence: Synthetic oligonucleotide
  Antisense strand to SEQ ID NO: 1578891
aagaacccuccuaucacau

SEQ ID NO: 1578893 - RNA, 19 nt, Artificial Sequence
  Description of Artificial Sequence: Synthetic oligonucleotide
  Sense strand starting at position 2734 of SEQ ID NO: 1560137
cuggauaaaucacaugauu

SEQ ID NO: 1578894 - RNA, 19 nt, Artificial Sequence
  Description of Artificial Sequence: Synthetic oligonucleotide
  Antisense strand to SEQ ID NO: 1578893
aaucaugugauuuauccag

SEQ ID NO: 1578895 - RNA, 19 nt, Artificial Sequence
  Description of Artificial Sequence: Synthetic oligonucleotide
  Sense strand starting at position 2745 of SEQ ID NO: 1560137
acaugauuagcuugucucu

SEQ ID NO: 1578896 - RNA, 19 nt, Artificial Sequence
  Description of Artificial Sequence: Synthetic oligonucleotide
  Antisense strand to SEQ ID NO: 1578895
agagacaagcuaaucaugu

SEQ ID NO: 1578897 - RNA, 19 nt, Artificial Sequence
  Description of Artificial Sequence: Synthetic oligonucleotide
  Sense strand starting at position 2748 of SEQ ID NO: 1560137
ugauuagcuugucucuuga

SEQ ID NO: 1578898 - RNA, 19 nt, Artificial Sequence
  Description of Artificial Sequence: Synthetic oligonucleotide
  Antisense strand to SEQ ID NO: 1578897
ucaagagacaagcuaauca

SEQ ID NO: 1578899 - RNA, 19 nt, Artificial Sequence
  Description of Artificial Sequence: Synthetic oligonucleotide
  Sense strand starting at position 3301 of SEQ ID NO: 1560137
ucgcuaugcugccaagaaa

SEQ ID NO: 1578900 - RNA, 19 nt, Artificial Sequence
  Description of Artificial Sequence: Synthetic oligonucleotide
  Antisense strand to SEQ ID NO: 1578899
uuucuuggcagcauagcga

SEQ ID NO: 1578901 - RNA, 19 nt, Artificial Sequence
  Description of Artificial Sequence: Synthetic oligonucleotide
  Sense strand starting at position 3352 of SEQ ID NO: 1560137
caggccuggucauaaguuu

SEQ ID NO: 1578902 - RNA, 19 nt, Artificial Sequence
  Description of Artificial Sequence: Synthetic oligonucleotide
  Antisense strand to SEQ ID NO: 1578901
aaacuuaugaccaggccug

SEQ ID NO: 1578903 - RNA, 19 nt, Artificial Sequence
  Description of Artificial Sequence: Synthetic oligonucleotide
  Sense strand starting at position 3415 of SEQ ID NO: 1560137
cugcaaugauguugucauu

SEQ ID NO: 1578904 - RNA, 19 nt, Artificial Sequence
  Description of Artificial Sequence: Synthetic oligonucleotide
  Antisense strand to SEQ ID NO: 1578903
aaugacaacaucauugcag

SEQ ID NO: 1578905 - RNA, 19 nt, Artificial Sequence
  Description of Artificial Sequence: Synthetic oligonucleotide
  Sense strand starting at position 3424 of SEQ ID NO: 1560137
uguugucauucccauuuga

SEQ ID NO: 1578906 - RNA, 19 nt, Artificial Sequence
  Description of Artificial Sequence: Synthetic oligonucleotide
  Antisense strand to SEQ ID NO: 1578905
ucaaaugggaaugacaaca

SEQ ID NO: 1578907 - RNA, 19 nt, Artificial Sequence
  Description of Artificial Sequence: Synthetic oligonucleotide
  Sense strand starting at position 3719 of SEQ ID NO: 1560137
gucuccuuguuacaugaau

SEQ ID NO: 1578908 - RNA, 19 nt, Artificial Sequence
  Description of Artificial Sequence: Synthetic oligonucleotide
  Antisense strand to SEQ ID NO: 1578907
auucauguaacaaggagac

SEQ ID NO: 1578909 - RNA, 19 nt, Artificial Sequence
  Description of Artificial Sequence: Synthetic oligonucleotide
  Sense strand starting at position 3754 of SEQ ID NO: 1560137
agugaugaaugcuaagcaa

SEQ ID NO: 1578910 - RNA, 19 nt, Artificial Sequence
  Description of Artificial Sequence: Synthetic oligonucleotide
  Antisense strand to SEQ ID NO: 1578909
uugcuuagcauucaucacu

SEQ ID NO: 1578911 - RNA, 19 nt, Artificial Sequence
  Description of Artificial Sequence: Synthetic oligonucleotide
  Sense strand starting at position 3822 of SEQ ID NO: 1560137
agucacuaaucacugaagu

SEQ ID NO: 1578912 - RNA, 19 nt, Artificial Sequence
  Description of Artificial Sequence: Synthetic oligonucleotide
  Antisense strand to SEQ ID NO: 1578911
acuucagugauuagugacu

SEQ ID NO: 1578913 - RNA, 19 nt, Artificial Sequence
  Description of Artificial Sequence: Synthetic oligonucleotide
  Sense strand starting at position 3823 of SEQ ID NO: 1560137
gucacuaaucacugaaguc

SEQ ID NO: 1578914 - RNA, 19 nt, Artificial Sequence
  Description of Artificial Sequence: Synthetic oligonucleotide
  Antisense strand to SEQ ID NO: 1578913
gacuucagugauuagugac

SEQ ID NO: 1578915 - RNA, 19 nt, Artificial Sequence
  Description of Artificial Sequence: Synthetic oligonucleotide
  Sense strand starting at position 3843 of SEQ ID NO: 1560137
cagaacuauuguccuggga

SEQ ID NO: 1578916 - RNA, 19 nt, Artificial Sequence
  Description of Artificial Sequence: Synthetic oligonucleotide
  Antisense strand to SEQ ID NO: 1578915
ucccaggacaauaguucug

SEQ ID NO: 1578917 - RNA, 19 nt, Artificial Sequence
  Description of Artificial Sequence: Synthetic oligonucleotide
  Sense strand starting at position 3845 of SEQ ID NO: 1560137
gaacuauuguccugggaau

SEQ ID NO: 1578918 - RNA, 19 nt, Artificial Sequence
  Description of Artificial Sequence: Synthetic oligonucleotide
  Antisense strand to SEQ ID NO: 1578917
auucccaggacaauaguuc

SEQ ID NO: 1578919 - RNA, 19 nt, Artificial Sequence
  Description of Artificial Sequence: Synthetic oligonucleotide
  Sense strand starting at position 3846 of SEQ ID NO: 1560137
aacuauuguccugggaaua

SEQ ID NO: 1578920 - RNA, 19 nt, Artificial Sequence
  Description of Artificial Sequence: Synthetic oligonucleotide
  Antisense strand to SEQ ID NO: 1578919
uauucccaggacaauaguu

SEQ ID NO: 1578921 - RNA, 19 nt, Artificial Sequence
  Description of Artificial Sequence: Synthetic oligonucleotide
  Sense strand starting at position 3847 of SEQ ID NO: 1560137
acuauuguccugggaauaa

SEQ ID NO: 1578922 - RNA, 19 nt, Artificial Sequence
  Description of Artificial Sequence: Synthetic oligonucleotide
  Antisense strand to SEQ ID NO: 1578921
uuauucccaggacaauagu

SEQ ID NO: 1578923 - RNA, 19 nt, Artificial Sequence
  Description of Artificial Sequence: Synthetic oligonucleotide
  Sense strand starting at position 282 of SEQ ID NO: 1560138
ccacucucugcucaggaau

SEQ ID NO: 1578924 - RNA, 19 nt, Artificial Sequence
  Description of Artificial Sequence: Synthetic oligonucleotide
  Antisense strand to SEQ ID NO: 1578923
auuccugagcagagagugg

SEQ ID NO: 1578925 - RNA, 19 nt, Artificial Sequence
  Description of Artificial Sequence: Synthetic oligonucleotide
  Sense strand starting at position 357 of SEQ ID NO: 1560138
cacuaauuagcucggagag

SEQ ID NO: 1578926 - RNA, 19 nt, Artificial Sequence
  Description of Artificial Sequence: Synthetic oligonucleotide
  Antisense strand to SEQ ID NO: 1578925
cucuccgagcuaauuagug

SEQ ID NO: 1578927 - RNA, 19 nt, Artificial Sequence
  Description of Artificial Sequence: Synthetic oligonucleotide
  Sense strand starting at position 359 of SEQ ID NO: 1560138
cuaauuagcucggagagca

SEQ ID NO: 1578928 - RNA, 19 nt, Artificial Sequence
  Description of Artificial Sequence: Synthetic oligonucleotide
  Antisense strand to SEQ ID NO: 1578927
ugcucuccgagcuaauuag

SEQ ID NO: 1578929 - RNA, 19 nt, Artificial Sequence
  Description of Artificial Sequence: Synthetic oligonucleotide
  Sense strand starting at position 611 of SEQ ID NO: 1560138
ucacgucuggaucgugaga

SEQ ID NO: 1578930 - RNA, 19 nt, Artificial Sequence
  Description of Artificial Sequence: Synthetic oligonucleotide
  Antisense strand to SEQ ID NO: 1578929
ucucacgauccagacguga

SEQ ID NO: 1578931 - RNA, 19 nt, Artificial Sequence
  Description of Artificial Sequence: Synthetic oligonucleotide
  Sense strand starting at position 613 of SEQ ID NO: 1560138
acgucuggaucgugagauc

SEQ ID NO: 1578932 - RNA, 19 nt, Artificial Sequence
  Description of Artificial Sequence: Synthetic oligonucleotide
  Antisense strand to SEQ ID NO: 1578931
gaucucacgauccagacgu

SEQ ID NO: 1578933 - RNA, 19 nt, Artificial Sequence
  Description of Artificial Sequence: Synthetic oligonucleotide
  Sense strand starting at position 616 of SEQ ID NO: 1560138
ucuggaucgugagaucaag

SEQ ID NO: 1578934 - RNA, 19 nt, Artificial Sequence
  Description of Artificial Sequence: Synthetic oligonucleotide
  Antisense strand to SEQ ID NO: 1578933
cuugaucucacgauccaga

SEQ ID NO: 1578935 - RNA, 19 nt, Artificial Sequence
  Description of Artificial Sequence: Synthetic oligonucleotide
  Sense strand starting at position 714 of SEQ ID NO: 1560138
uccagaaacugcuuggaau

SEQ ID NO: 1578936 - RNA, 19 nt, Artificial Sequence
  Description of Artificial Sequence: Synthetic oligonucleotide
  Antisense strand to SEQ ID NO: 1578935
auuccaagcaguuucugga

SEQ ID NO: 1578937 - RNA, 19 nt, Artificial Sequence
  Description of Artificial Sequence: Synthetic oligonucleotide
  Sense strand starting at position 715 of SEQ ID NO: 1560138
ccagaaacugcuuggaauu

SEQ ID NO: 1578938 - RNA, 19 nt, Artificial Sequence
  Description of Artificial Sequence: Synthetic oligonucleotide
  Antisense strand to SEQ ID NO: 1578937
aauuccaagcaguuucugg

SEQ ID NO: 1578939 - RNA, 19 nt, Artificial Sequence
  Description of Artificial Sequence: Synthetic oligonucleotide
  Sense strand starting at position 717 of SEQ ID NO: 1560138
agaaacugcuuggaauuaa

SEQ ID NO: 1578940 - RNA, 19 nt, Artificial Sequence
  Description of Artificial Sequence: Synthetic oligonucleotide
  Antisense strand to SEQ ID NO: 1578939
uuaauuccaagcaguuucu

SEQ ID NO: 1578941 - RNA, 19 nt, Artificial Sequence
  Description of Artificial Sequence: Synthetic oligonucleotide
  Sense strand starting at position 771 of SEQ ID NO: 1560138
ggguuugggucccaagaag

SEQ ID NO: 1578942 - RNA, 19 nt, Artificial Sequence
  Description of Artificial Sequence: Synthetic oligonucleotide
  Antisense strand to SEQ ID NO: 1578941
cuucuugggacccaaaccc

SEQ ID NO: 1578943 - RNA, 19 nt, Artificial Sequence
  Description of Artificial Sequence: Synthetic oligonucleotide
  Sense strand starting at position 1616 of SEQ ID NO: 1560138
ccgcgcucaccuugaagua

SEQ ID NO: 1578944 - RNA, 19 nt, Artificial Sequence
  Description of Artificial Sequence: Synthetic oligonucleotide
  Antisense strand to SEQ ID NO: 1578943
uacuucaaggugagcgcgg

SEQ ID NO: 1578945 - RNA, 19 nt, Artificial Sequence
  Description of Artificial Sequence: Synthetic oligonucleotide
  Sense strand starting at position 2868 of SEQ ID NO: 1560138
ugaccuuuguccuacccga

SEQ ID NO: 1578946 - RNA, 19 nt, Artificial Sequence
  Description of Artificial Sequence: Synthetic oligonucleotide
  Antisense strand to SEQ ID NO: 1578945
ucggguaggacaaagguca

SEQ ID NO: 1578947 - RNA, 19 nt, Artificial Sequence
  Description of Artificial Sequence: Synthetic oligonucleotide
  Sense strand starting at position 3117 of SEQ ID NO: 1560138
gaccucaaguguguuguua

SEQ ID NO: 1578948 - RNA, 19 nt, Artificial Sequence
  Description of Artificial Sequence: Synthetic oligonucleotide
  Antisense strand to SEQ ID NO: 1578947
uaacaacacacuugagguc

SEQ ID NO: 1578949 - RNA, 19 nt, Artificial Sequence
  Description of Artificial Sequence: Synthetic oligonucleotide
  Sense strand starting at position 3121 of SEQ ID NO: 1560138
ucaaguguguuguuagguu

SEQ ID NO: 1578950 - RNA, 19 nt, Artificial Sequence
  Description of Artificial Sequence: Synthetic oligonucleotide
  Antisense strand to SEQ ID NO: 1578949
aaccuaacaacacacuuga

SEQ ID NO: 1578951 - RNA, 19 nt, Artificial Sequence
  Description of Artificial Sequence: Synthetic oligonucleotide
  Sense strand starting at position 3155 of SEQ ID NO: 1560138
ggaugcaguuuggacuaau

SEQ ID NO: 1578952 - RNA, 19 nt, Artificial Sequence
  Description of Artificial Sequence: Synthetic oligonucleotide
  Antisense strand to SEQ ID NO: 1578951
auuaguccaaacugcaucc

SEQ ID NO: 1578953 - RNA, 19 nt, Artificial Sequence
  Description of Artificial Sequence: Synthetic oligonucleotide
  Sense strand starting at position 3158 of SEQ ID NO: 1560138
ugcaguuuggacuaauaaa

SEQ ID NO: 1578954 - RNA, 19 nt, Artificial Sequence
  Description of Artificial Sequence: Synthetic oligonucleotide
  Antisense strand to SEQ ID NO: 1578953
uuuauuaguccaaacugca

SEQ ID NO: 1578955 - RNA, 19 nt, Artificial Sequence
  Description of Artificial Sequence: Synthetic oligonucleotide
  Sense strand starting at position 3259 of SEQ ID NO: 1560138
gcugauuccgggcaucacu

SEQ ID NO: 1578956 - RNA, 19 nt, Artificial Sequence
  Description of Artificial Sequence: Synthetic oligonucleotide
  Antisense strand to SEQ ID NO: 1578955
agugaugcccggaaucagc

SEQ ID NO: 1578957 - RNA, 19 nt, Artificial Sequence
  Description of Artificial Sequence: Synthetic oligonucleotide
  Sense strand starting at position 3330 of SEQ ID NO: 1560138
gcuccuugcugugaagcuu

SEQ ID NO: 1578958 - RNA, 19 nt, Artificial Sequence
  Description of Artificial Sequence: Synthetic oligonucleotide
  Antisense strand to SEQ ID NO: 1578957
aagcuucacagcaaggagc

SEQ ID NO: 1578959 - RNA, 19 nt, Artificial Sequence
  Description of Artificial Sequence: Synthetic oligonucleotide
  Sense strand starting at position 3341 of SEQ ID NO: 1560138
ugaagcuuggucgggagaa

SEQ ID NO: 1578960 - RNA, 19 nt, Artificial Sequence
  Description of Artificial Sequence: Synthetic oligonucleotide
  Antisense strand to SEQ ID NO: 1578959
uucucccgaccaagcuuca

SEQ ID NO: 1578961 - RNA, 19 nt, Artificial Sequence
  Description of Artificial Sequence: Synthetic oligonucleotide
  Sense strand starting at position 3342 of SEQ ID NO: 1560138
gaagcuuggucgggagaac

SEQ ID NO: 1578962 - RNA, 19 nt, Artificial Sequence
  Description of Artificial Sequence: Synthetic oligonucleotide
  Antisense strand to SEQ ID NO: 1578961
guucucccgaccaagcuuc

SEQ ID NO: 1578963 - RNA, 19 nt, Artificial Sequence
  Description of Artificial Sequence: Synthetic oligonucleotide
  Sense strand starting at position 3343 of SEQ ID NO: 1560138
aagcuuggucgggagaacu

SEQ ID NO: 1578964 - RNA, 19 nt, Artificial Sequence
  Description of Artificial Sequence: Synthetic oligonucleotide
  Antisense strand to SEQ ID NO: 1578963
aguucucccgaccaagcuu

SEQ ID NO: 1578965 - RNA, 19 nt, Artificial Sequence
  Description of Artificial Sequence: Synthetic oligonucleotide
  Sense strand starting at position 3449 of SEQ ID NO: 1560138
uugcuaugcccuggguaca

SEQ ID NO: 1578966 - RNA, 19 nt, Artificial Sequence
  Description of Artificial Sequence: Synthetic oligonucleotide
  Antisense strand to SEQ ID NO: 1578965
uguacccagggcauagcaa

SEQ ID NO: 1578967 - RNA, 19 nt, Artificial Sequence
  Description of Artificial Sequence: Synthetic oligonucleotide
  Sense strand starting at position 60 of SEQ ID NO: 1560139
ccaggagacucaggauuua

SEQ ID NO: 1578968 - RNA, 19 nt, Artificial Sequence
  Description of Artificial Sequence: Synthetic oligonucleotide
  Antisense strand to SEQ ID NO: 1578967
uaaauccugagucuccugg

SEQ ID NO: 1578969 - RNA, 19 nt, Artificial Sequence
  Description of Artificial Sequence: Synthetic oligonucleotide
  Sense strand starting at position 78 of SEQ ID NO: 1560139
aaggaauaggucuggaagu

SEQ ID NO: 1578970 - RNA, 19 nt, Artificial Sequence
  Description of Artificial Sequence: Synthetic oligonucleotide
  Antisense strand to SEQ ID NO: 1578969
acuuccagaccuauuccuu

SEQ ID NO: 1578971 - RNA, 19 nt, Artificial Sequence
  Description of Artificial Sequence: Synthetic oligonucleotide
  Sense strand starting at position 118 of SEQ ID NO: 1560139
agacuaaugccguauucca

SEQ ID NO: 1578972 - RNA, 19 nt, Artificial Sequence
  Description of Artificial Sequence: Synthetic oligonucleotide
  Antisense strand to SEQ ID NO: 1578971
uggaauacggcauuagucu

SEQ ID NO: 1578973 - RNA, 19 nt, Artificial Sequence
  Description of Artificial Sequence: Synthetic oligonucleotide
  Sense strand starting at position 125 of SEQ ID NO: 1560139
ugccguauuccagaguauu

SEQ ID NO: 1578974 - RNA, 19 nt, Artificial Sequence
  Description of Artificial Sequence: Synthetic oligonucleotide
  Antisense strand to SEQ ID NO: 1578973
aauacucuggaauacggca

SEQ ID NO: 1578975 - RNA, 19 nt, Artificial Sequence
  Description of Artificial Sequence: Synthetic oligonucleotide
  Sense strand starting at position 131 of SEQ ID NO: 1560139
auuccagaguauucuggaa

SEQ ID NO: 1578976 - RNA, 19 nt, Artificial Sequence
  Description of Artificial Sequence: Synthetic oligonucleotide
  Antisense strand to SEQ ID NO: 1578975
uuccagaauacucuggaau

SEQ ID NO: 1578977 - RNA, 19 nt, Artificial Sequence
  Description of Artificial Sequence: Synthetic oligonucleotide
  Sense strand starting at position 171 of SEQ ID NO: 1560139
guuguuucuggauaaauga

SEQ ID NO: 1578978 - RNA, 19 nt, Artificial Sequence
  Description of Artificial Sequence: Synthetic oligonucleotide
  Antisense strand to SEQ ID NO: 1578977
ucauuuauccagaaacaac

SEQ ID NO: 1578979 - RNA, 19 nt, Artificial Sequence
  Description of Artificial Sequence: Synthetic oligonucleotide
  Sense strand starting at position 235 of SEQ ID NO: 1560139
aagguucugagagguauau

SEQ ID NO: 1578980 - RNA, 19 nt, Artificial Sequence
  Description of Artificial Sequence: Synthetic oligonucleotide
  Antisense strand to SEQ ID NO: 1578979
auauaccucucagaaccuu

SEQ ID NO: 1578981 - RNA, 19 nt, Artificial Sequence
  Description of Artificial Sequence: Synthetic oligonucleotide
  Sense strand starting at position 248 of SEQ ID NO: 1560139
guauaugcccuucguuuaa

SEQ ID NO: 1578982 - RNA, 19 nt, Artificial Sequence
  Description of Artificial Sequence: Synthetic oligonucleotide
  Antisense strand to SEQ ID NO: 1578981
uuaaacgaagggcauauac

SEQ ID NO: 1578983 - RNA, 19 nt, Artificial Sequence
  Description of Artificial Sequence: Synthetic oligonucleotide
  Sense strand starting at position 250 of SEQ ID NO: 1560139
auaugcccuucguuuaaga

SEQ ID NO: 1578984 - RNA, 19 nt, Artificial Sequence
  Description of Artificial Sequence: Synthetic oligonucleotide
  Antisense strand to SEQ ID NO: 1578983
ucuuaaacgaagggcauau

SEQ ID NO: 1578985 - RNA, 19 nt, Artificial Sequence
  Description of Artificial Sequence: Synthetic oligonucleotide
  Sense strand starting at position 546 of SEQ ID NO: 1560139
gaaggaaacuucgucucaa

SEQ ID NO: 1578986 - RNA, 19 nt, Artificial Sequence
  Description of Artificial Sequence: Synthetic oligonucleotide
  Antisense strand to SEQ ID NO: 1578985
uugagacgaaguuuccuuc

SEQ ID NO: 1578987 - RNA, 19 nt, Artificial Sequence
  Description of Artificial Sequence: Synthetic oligonucleotide
  Sense strand starting at position 595 of SEQ ID NO: 1560139
aacagacacugguauguaa

SEQ ID NO: 1578988 - RNA, 19 nt, Artificial Sequence
  Description of Artificial Sequence: Synthetic oligonucleotide
  Antisense strand to SEQ ID NO: 1578987
uuacauaccagugucuguu

SEQ ID NO: 1578989 - RNA, 19 nt, Artificial Sequence
  Description of Artificial Sequence: Synthetic oligonucleotide
  Sense strand starting at position 642 of SEQ ID NO: 1560139
agguuaaaccuuuaagucu

SEQ ID NO: 1578990 - RNA, 19 nt, Artificial Sequence
  Description of Artificial Sequence: Synthetic oligonucleotide
  Antisense strand to SEQ ID NO: 1578989
agacuuaaagguuuaaccu

SEQ ID NO: 1578991 - RNA, 19 nt, Artificial Sequence
  Description of Artificial Sequence: Synthetic oligonucleotide
  Sense strand starting at position 747 of SEQ ID NO: 1560139
cucuguuguggucagauag

SEQ ID NO: 1578992 - RNA, 19 nt, Artificial Sequence
  Description of Artificial Sequence: Synthetic oligonucleotide
  Antisense strand to SEQ ID NO: 1578991
cuaucugaccacaacagag

SEQ ID NO: 1578993 - RNA, 19 nt, Artificial Sequence
  Description of Artificial Sequence: Synthetic oligonucleotide
  Sense strand starting at position 794 of SEQ ID NO: 1560139
ccaggagagucccuggaua

SEQ ID NO: 1578994 - RNA, 19 nt, Artificial Sequence
  Description of Artificial Sequence: Synthetic oligonucleotide
  Antisense strand to SEQ ID NO: 1578993
uauccagggacucuccugg

SEQ ID NO: 1578995 - RNA, 19 nt, Artificial Sequence
  Description of Artificial Sequence: Synthetic oligonucleotide
  Sense strand starting at position 823 of SEQ ID NO: 1560139
caauuugggucacagagua

SEQ ID NO: 1578996 - RNA, 19 nt, Artificial Sequence
  Description of Artificial Sequence: Synthetic oligonucleotide
  Antisense strand to SEQ ID NO: 1578995
uacucugugacccaaauug

SEQ ID NO: 1578997 - RNA, 19 nt, Artificial Sequence
  Description of Artificial Sequence: Synthetic oligonucleotide
  Sense strand starting at position 878 of SEQ ID NO: 1560139
ggguucugggcuugaguua

SEQ ID NO: 1578998 - RNA, 19 nt, Artificial Sequence
  Description of Artificial Sequence: Synthetic oligonucleotide
  Antisense strand to SEQ ID NO: 1578997
uaacucaagcccagaaccc

SEQ ID NO: 1578999 - RNA, 19 nt, Artificial Sequence
  Description of Artificial Sequence: Synthetic oligonucleotide
  Sense strand starting at position 955 of SEQ ID NO: 1560139
ggugacagggucugcaaua

SEQ ID NO: 1579000 - RNA, 19 nt, Artificial Sequence
  Description of Artificial Sequence: Synthetic oligonucleotide
  Antisense strand to SEQ ID NO: 1578999
uauugcagacccugucacc

SEQ ID NO: 1579001 - RNA, 19 nt, Artificial Sequence
  Description of Artificial Sequence: Synthetic oligonucleotide
  Sense strand starting at position 1019 of SEQ ID NO: 1560139
aggauuuccugguauaaug

SEQ ID NO: 1579002 - RNA, 19 nt, Artificial Sequence
  Description of Artificial Sequence: Synthetic oligonucleotide
  Antisense strand to SEQ ID NO: 1579001
cauuauaccaggaaauccu

SEQ ID NO: 1579003 - RNA, 19 nt, Artificial Sequence
  Description of Artificial Sequence: Synthetic oligonucleotide
  Sense strand starting at position 1135 of SEQ ID NO: 1560139
acccaaguacucggugaga

SEQ ID NO: 1579004 - RNA, 19 nt, Artificial Sequence
  Description of Artificial Sequence: Synthetic oligonucleotide
  Antisense strand to SEQ ID NO: 1579003
ucucaccgaguacuugggu

SEQ ID NO: 1579005 - RNA, 19 nt, Artificial Sequence
  Description of Artificial Sequence: Synthetic oligonucleotide
  Sense strand starting at position 1137 of SEQ ID NO: 1560139
ccaaguacucggugagacu

SEQ ID NO: 1579006 - RNA, 19 nt, Artificial Sequence
  Description of Artificial Sequence: Synthetic oligonucleotide
  Antisense strand to SEQ ID NO: 1579005
agucucaccgaguacuugg

SEQ ID NO: 1579007 - RNA, 19 nt, Artificial Sequence
  Description of Artificial Sequence: Synthetic oligonucleotide
  Sense strand starting at position 1138 of SEQ ID NO: 1560139
caaguacucggugagacua

SEQ ID NO: 1579008 - RNA, 19 nt, Artificial Sequence
  Description of Artificial Sequence: Synthetic oligonucleotide
  Antisense strand to SEQ ID NO: 1579007
uagucucaccgaguacuug

SEQ ID NO: 1579009 - RNA, 19 nt, Artificial Sequence
  Description of Artificial Sequence: Synthetic oligonucleotide
  Sense strand starting at position 1296 of SEQ ID NO: 1560139
gaucaagaucccggaaagu

SEQ ID NO: 1579010 - RNA, 19 nt, Artificial Sequence
  Description of Artificial Sequence: Synthetic oligonucleotide
  Antisense strand to SEQ ID NO: 1579009
acuuuccgggaucuugauc

SEQ ID NO: 1579011 - RNA, 19 nt, Artificial Sequence
  Description of Artificial Sequence: Synthetic oligonucleotide
  Sense strand starting at position 1387 of SEQ ID NO: 1560139
ggaagugaauacccgaaua

SEQ ID NO: 1579012 - RNA, 19 nt, Artificial Sequence
  Description of Artificial Sequence: Synthetic oligonucleotide
  Antisense strand to SEQ ID NO: 1579011
uauucggguauucacuucc

SEQ ID NO: 1579013 - RNA, 19 nt, Artificial Sequence
  Description of Artificial Sequence: Synthetic oligonucleotide
  Sense strand starting at position 1448 of SEQ ID NO: 1560139
ggcagaguucuggguauaa

SEQ ID NO: 1579014 - RNA, 19 nt, Artificial Sequence
  Description of Artificial Sequence: Synthetic oligonucleotide
  Antisense strand to SEQ ID NO: 1579013
uuauacccagaacucugcc

SEQ ID NO: 1579015 - RNA, 19 nt, Artificial Sequence
  Description of Artificial Sequence: Synthetic oligonucleotide
  Sense strand starting at position 1452 of SEQ ID NO: 1560139
gaguucuggguauaaaugu

SEQ ID NO: 1579016 - RNA, 19 nt, Artificial Sequence
  Description of Artificial Sequence: Synthetic oligonucleotide
  Antisense strand to SEQ ID NO: 1579015
acauuuauacccagaacuc

SEQ ID NO: 1579017 - RNA, 19 nt, Artificial Sequence
  Description of Artificial Sequence: Synthetic oligonucleotide
  Sense strand starting at position 1467 of SEQ ID NO: 1560139
auguuaacugccgaacaga

SEQ ID NO: 1579018 - RNA, 19 nt, Artificial Sequence
  Description of Artificial Sequence: Synthetic oligonucleotide
  Antisense strand to SEQ ID NO: 1579017
ucuguucggcaguuaacau

SEQ ID NO: 1579019 - RNA, 19 nt, Artificial Sequence
  Description of Artificial Sequence: Synthetic oligonucleotide
  Sense strand starting at position 1470 of SEQ ID NO: 1560139
uuaacugccgaacagaauu

SEQ ID NO: 1579020 - RNA, 19 nt, Artificial Sequence
  Description of Artificial Sequence: Synthetic oligonucleotide
  Antisense strand to SEQ ID NO: 1579019
aauucuguucggcaguuaa

SEQ ID NO: 1579021 - RNA, 19 nt, Artificial Sequence
  Description of Artificial Sequence: Synthetic oligonucleotide
  Sense strand starting at position 1678 of SEQ ID NO: 1560139
gugagaauccuagguguga

SEQ ID NO: 1579022 - RNA, 19 nt, Artificial Sequence
  Description of Artificial Sequence: Synthetic oligonucleotide
  Antisense strand to SEQ ID NO: 1579021
ucacaccuaggauucucac

SEQ ID NO: 1579023 - RNA, 19 nt, Artificial Sequence
  Description of Artificial Sequence: Synthetic oligonucleotide
  Sense strand starting at position 1825 of SEQ ID NO: 1560139
gugcgucucgucuucauca

SEQ ID NO: 1579024 - RNA, 19 nt, Artificial Sequence
  Description of Artificial Sequence: Synthetic oligonucleotide
  Antisense strand to SEQ ID NO: 1579023
ugaugaagacgagacgcac

SEQ ID NO: 1579025 - RNA, 19 nt, Artificial Sequence
  Description of Artificial Sequence: Synthetic oligonucleotide
  Sense strand starting at position 2007 of SEQ ID NO: 1560139
gacgucacaucccuaguaa

SEQ ID NO: 1579026 - RNA, 19 nt, Artificial Sequence
  Description of Artificial Sequence: Synthetic oligonucleotide
  Antisense strand to SEQ ID NO: 1579025
uuacuagggaugugacguc

SEQ ID NO: 1579027 - RNA, 19 nt, Artificial Sequence
  Description of Artificial Sequence: Synthetic oligonucleotide
  Sense strand starting at position 2008 of SEQ ID NO: 1560139
acgucacaucccuaguaac

SEQ ID NO: 1579028 - RNA, 19 nt, Artificial Sequence
  Description of Artificial Sequence: Synthetic oligonucleotide
  Antisense strand to SEQ ID NO: 1579027
guuacuagggaugugacgu

SEQ ID NO: 1579029 - RNA, 19 nt, Artificial Sequence
  Description of Artificial Sequence: Synthetic oligonucleotide
  Sense strand starting at position 2152 of SEQ ID NO: 1560139
auaugagugcgcgcuucaa

SEQ ID NO: 1579030 - RNA, 19 nt, Artificial Sequence
  Description of Artificial Sequence: Synthetic oligonucleotide
  Antisense strand to SEQ ID NO: 1579029
uugaagcgcgcacucauau

SEQ ID NO: 1579031 - RNA, 19 nt, Artificial Sequence
  Description of Artificial Sequence: Synthetic oligonucleotide
  Sense strand starting at position 2154 of SEQ ID NO: 1560139
augagugcgcgcuucaacu

SEQ ID NO: 1579032 - RNA, 19 nt, Artificial Sequence
  Description of Artificial Sequence: Synthetic oligonucleotide
  Antisense strand to SEQ ID NO: 1579031
aguugaagcgcgcacucau

SEQ ID NO: 1579033 - RNA, 19 nt, Artificial Sequence
  Description of Artificial Sequence: Synthetic oligonucleotide
  Sense strand starting at position 2364 of SEQ ID NO: 1560139
ccugaugacuccucggacu

SEQ ID NO: 1579034 - RNA, 19 nt, Artificial Sequence
  Description of Artificial Sequence: Synthetic oligonucleotide
  Antisense strand to SEQ ID NO: 1579033
aguccgaggagucaucagg

SEQ ID NO: 1579035 - RNA, 19 nt, Artificial Sequence
  Description of Artificial Sequence: Synthetic oligonucleotide
  Sense strand starting at position 2366 of SEQ ID NO: 1560139
ugaugacuccucggacuuu

SEQ ID NO: 1579036 - RNA, 19 nt, Artificial Sequence
  Description of Artificial Sequence: Synthetic oligonucleotide
  Antisense strand to SEQ ID NO: 1579035
aaaguccgaggagucauca

SEQ ID NO: 1579037 - RNA, 19 nt, Artificial Sequence
  Description of Artificial Sequence: Synthetic oligonucleotide
  Sense strand starting at position 2930 of SEQ ID NO: 1560139
gauaauaggccguguugca

SEQ ID NO: 1579038 - RNA, 19 nt, Artificial Sequence
  Description of Artificial Sequence: Synthetic oligonucleotide
  Antisense strand to SEQ ID NO: 1579037
ugcaacacggccuauuauc

SEQ ID NO: 1579039 - RNA, 19 nt, Artificial Sequence
  Description of Artificial Sequence: Synthetic oligonucleotide
  Sense strand starting at position 2957 of SEQ ID NO: 1560139
ccaggauuaucucagauua

SEQ ID NO: 1579040 - RNA, 19 nt, Artificial Sequence
  Description of Artificial Sequence: Synthetic oligonucleotide
  Antisense strand to SEQ ID NO: 1579039
uaaucugagauaauccugg

SEQ ID NO: 1579041 - RNA, 19 nt, Artificial Sequence
  Description of Artificial Sequence: Synthetic oligonucleotide
  Sense strand starting at position 2959 of SEQ ID NO: 1560139
aggauuaucucagauuaaa

SEQ ID NO: 1579042 - RNA, 19 nt, Artificial Sequence
  Description of Artificial Sequence: Synthetic oligonucleotide
  Antisense strand to SEQ ID NO: 1579041
uuuaaucugagauaauccu

SEQ ID NO: 1579043 - RNA, 19 nt, Artificial Sequence
  Description of Artificial Sequence: Synthetic oligonucleotide
  Sense strand starting at position 3091 of SEQ ID NO: 1560139
gagcgaaguucuccagaag

SEQ ID NO: 1579044 - RNA, 19 nt, Artificial Sequence
  Description of Artificial Sequence: Synthetic oligonucleotide
  Antisense strand to SEQ ID NO: 1579043
cuucuggagaacuucgcuc

SEQ ID NO: 1579045 - RNA, 19 nt, Artificial Sequence
  Description of Artificial Sequence: Synthetic oligonucleotide
  Sense strand starting at position 3571 of SEQ ID NO: 1560139
ccguaugcccuuuagggau

SEQ ID NO: 1579046 - RNA, 19 nt, Artificial Sequence
  Description of Artificial Sequence: Synthetic oligonucleotide
  Antisense strand to SEQ ID NO: 1579045
aucccuaaagggcauacgg

SEQ ID NO: 1579047 - RNA, 19 nt, Artificial Sequence
  Description of Artificial Sequence: Synthetic oligonucleotide
  Sense strand starting at position 385 of SEQ ID NO: 1560140
cggguucucaccugguaag

SEQ ID NO: 1579048 - RNA, 19 nt, Artificial Sequence
  Description of Artificial Sequence: Synthetic oligonucleotide
  Antisense strand to SEQ ID NO: 1579047
cuuaccaggugagaacccg

SEQ ID NO: 1579049 - RNA, 19 nt, Artificial Sequence
  Description of Artificial Sequence: Synthetic oligonucleotide
  Sense strand starting at position 388 of SEQ ID NO: 1560140
guucucaccugguaaggaa

SEQ ID NO: 1579050 - RNA, 19 nt, Artificial Sequence
  Description of Artificial Sequence: Synthetic oligonucleotide
  Antisense strand to SEQ ID NO: 1579049
uuccuuaccaggugagaac

SEQ ID NO: 1579051 - RNA, 19 nt, Artificial Sequence
  Description of Artificial Sequence: Synthetic oligonucleotide
  Sense strand starting at position 402 of SEQ ID NO: 1560140
aggaaagugucauguggaa

SEQ ID NO: 1579052 - RNA, 19 nt, Artificial Sequence
  Description of Artificial Sequence: Synthetic oligonucleotide
  Antisense strand to SEQ ID NO: 1579051
uuccacaugacacuuuccu

SEQ ID NO: 1579053 - RNA, 19 nt, Artificial Sequence
  Description of Artificial Sequence: Synthetic oligonucleotide
  Sense strand starting at position 404 of SEQ ID NO: 1560140
gaaagugucauguggaacc

SEQ ID NO: 1579054 - RNA, 19 nt, Artificial Sequence
  Description of Artificial Sequence: Synthetic oligonucleotide
  Antisense strand to SEQ ID NO: 1579053
gguuccacaugacacuuuc

SEQ ID NO: 1579055 - RNA, 19 nt, Artificial Sequence
  Description of Artificial Sequence: Synthetic oligonucleotide
  Sense strand starting at position 496 of SEQ ID NO: 1560140
ccuagaucuucgcuuucuu

SEQ ID NO: 1579056 - RNA, 19 nt, Artificial Sequence
  Description of Artificial Sequence: Synthetic oligonucleotide
  Antisense strand to SEQ ID NO: 1579055
aagaaagcgaagaucuagg

SEQ ID NO: 1579057 - RNA, 19 nt, Artificial Sequence
  Description of Artificial Sequence: Synthetic oligonucleotide
  Sense strand starting at position 1906 of SEQ ID NO: 1560140
aaaguuugccucuaggagu

SEQ ID NO: 1579058 - RNA, 19 nt, Artificial Sequence
  Description of Artificial Sequence: Synthetic oligonucleotide
  Antisense strand to SEQ ID NO: 1579057
acuccuagaggcaaacuuu

SEQ ID NO: 1579059 - RNA, 19 nt, Artificial Sequence
  Description of Artificial Sequence: Synthetic oligonucleotide
  Sense strand starting at position 1909 of SEQ ID NO: 1560140
guuugccucuaggaguuaa

SEQ ID NO: 1579060 - RNA, 19 nt, Artificial Sequence
  Description of Artificial Sequence: Synthetic oligonucleotide
  Antisense strand to SEQ ID NO: 1579059
uuaacuccuagaggcaaac

SEQ ID NO: 1579061 - RNA, 19 nt, Artificial Sequence
  Description of Artificial Sequence: Synthetic oligonucleotide
  Sense strand starting at position 2077 of SEQ ID NO: 1560140
cuuggaauuuccugaaacu

SEQ ID NO: 1579062 - RNA, 19 nt, Artificial Sequence
  Description of Artificial Sequence: Synthetic oligonucleotide
  Antisense strand to SEQ ID NO: 1579061
aguuucaggaaauuccaag

SEQ ID NO: 1579063 - RNA, 19 nt, Artificial Sequence
  Description of Artificial Sequence: Synthetic oligonucleotide
  Sense strand starting at position 2106 of SEQ ID NO: 1560140
ggcuguuuagaagaguaau

SEQ ID NO: 1579064 - RNA, 19 nt, Artificial Sequence
  Description of Artificial Sequence: Synthetic oligonucleotide
  Antisense strand to SEQ ID NO: 1579063
auuacucuucuaaacagcc

SEQ ID NO: 1579065 - RNA, 19 nt, Artificial Sequence
  Description of Artificial Sequence: Synthetic oligonucleotide
  Sense strand starting at position 2119 of SEQ ID NO: 1560140
aguaauuucuuccagauug

SEQ ID NO: 1579066 - RNA, 19 nt, Artificial Sequence
  Description of Artificial Sequence: Synthetic oligonucleotide
  Antisense strand to SEQ ID NO: 1579065
caaucuggaagaaauuacu

SEQ ID NO: 1579067 - RNA, 19 nt, Artificial Sequence
  Description of Artificial Sequence: Synthetic oligonucleotide
  Sense strand starting at position 2298 of SEQ ID NO: 1560140
gagccacuccgucauagaa

SEQ ID NO: 1579068 - RNA, 19 nt, Artificial Sequence
  Description of Artificial Sequence: Synthetic oligonucleotide
  Antisense strand to SEQ ID NO: 1579067
uucuaugacggaguggcuc

SEQ ID NO: 1579069 - RNA, 19 nt, Artificial Sequence
  Description of Artificial Sequence: Synthetic oligonucleotide
  Sense strand starting at position 2300 of SEQ ID NO: 1560140
gccacuccgucauagaaag

SEQ ID NO: 1579070 - RNA, 19 nt, Artificial Sequence
  Description of Artificial Sequence: Synthetic oligonucleotide
  Antisense strand to SEQ ID NO: 1579069
cuuucuaugacggaguggc

SEQ ID NO: 1579071 - RNA, 19 nt, Artificial Sequence
  Description of Artificial Sequence: Synthetic oligonucleotide
  Sense strand starting at position 2338 of SEQ ID NO: 1560140
accagugucuauugaugac

SEQ ID NO: 1579072 - RNA, 19 nt, Artificial Sequence
  Description of Artificial Sequence: Synthetic oligonucleotide
  Antisense strand to SEQ ID NO: 1579071
gucaucaauagacacuggu

SEQ ID NO: 1579073 - RNA, 19 nt, Artificial Sequence
  Description of Artificial Sequence: Synthetic oligonucleotide
  Sense strand starting at position 2341 of SEQ ID NO: 1560140
agugucuauugaugacaag

SEQ ID NO: 1579074 - RNA, 19 nt, Artificial Sequence
  Description of Artificial Sequence: Synthetic oligonucleotide
  Antisense strand to SEQ ID NO: 1579073
cuugucaucaauagacacu

SEQ ID NO: 1579075 - RNA, 19 nt, Artificial Sequence
  Description of Artificial Sequence: Synthetic oligonucleotide
  Sense strand starting at position 2344 of SEQ ID NO: 1560140
gucuauugaugacaagaga

SEQ ID NO: 1579076 - RNA, 19 nt, Artificial Sequence
  Description of Artificial Sequence: Synthetic oligonucleotide
  Antisense strand to SEQ ID NO: 1579075
ucucuugucaucaauagac

SEQ ID NO: 1579077 - RNA, 19 nt, Artificial Sequence
  Description of Artificial Sequence: Synthetic oligonucleotide
  Sense strand starting at position 2359 of SEQ ID NO: 1560140
gagagugagguuugagugu

SEQ ID NO: 1579078 - RNA, 19 nt, Artificial Sequence
  Description of Artificial Sequence: Synthetic oligonucleotide
  Antisense strand to SEQ ID NO: 1579077
acacucaaaccucacucuc

SEQ ID NO: 1579079 - RNA, 19 nt, Artificial Sequence
  Description of Artificial Sequence: Synthetic oligonucleotide
  Sense strand starting at position 2687 of SEQ ID NO: 1560140
gguuguagugcuggagaga

SEQ ID NO: 1579080 - RNA, 19 nt, Artificial Sequence
  Description of Artificial Sequence: Synthetic oligonucleotide
  Antisense strand to SEQ ID NO: 1579079
ucucuccagcacuacaacc

SEQ ID NO: 1579081 - RNA, 19 nt, Artificial Sequence
  Description of Artificial Sequence: Synthetic oligonucleotide
  Sense strand starting at position 2688 of SEQ ID NO: 1560140
guuguagugcuggagagaa

SEQ ID NO: 1579082 - RNA, 19 nt, Artificial Sequence
  Description of Artificial Sequence: Synthetic oligonucleotide
  Antisense strand to SEQ ID NO: 1579081
uucucuccagcacuacaac

SEQ ID NO: 1579083 - RNA, 19 nt, Artificial Sequence
  Description of Artificial Sequence: Synthetic oligonucleotide
  Sense strand starting at position 2690 of SEQ ID NO: 1560140
uguagugcuggagagaaga

SEQ ID NO: 1579084 - RNA, 19 nt, Artificial Sequence
  Description of Artificial Sequence: Synthetic oligonucleotide
  Antisense strand to SEQ ID NO: 1579083
ucuucucuccagcacuaca

SEQ ID NO: 1579085 - RNA, 19 nt, Artificial Sequence
  Description of Artificial Sequence: Synthetic oligonucleotide
  Sense strand starting at position 2708 of SEQ ID NO: 1560140
acagucaauuugcgauaac

SEQ ID NO: 1579086 - RNA, 19 nt, Artificial Sequence
  Description of Artificial Sequence: Synthetic oligonucleotide
  Antisense strand to SEQ ID NO: 1579085
guuaucgcaaauugacugu

SEQ ID NO: 1579087 - RNA, 19 nt, Artificial Sequence
  Description of Artificial Sequence: Synthetic oligonucleotide
  Sense strand starting at position 2709 of SEQ ID NO: 1560140
cagucaauuugcgauaaca

SEQ ID NO: 1579088 - RNA, 19 nt, Artificial Sequence
  Description of Artificial Sequence: Synthetic oligonucleotide
  Antisense strand to SEQ ID NO: 1579087
uguuaucgcaaauugacug

SEQ ID NO: 1579089 - RNA, 19 nt, Artificial Sequence
  Description of Artificial Sequence: Synthetic oligonucleotide
  Sense strand starting at position 2734 of SEQ ID NO: 1560140
agccuugagcugggucuua

SEQ ID NO: 1579090 - RNA, 19 nt, Artificial Sequence
  Description of Artificial Sequence: Synthetic oligonucleotide
  Antisense strand to SEQ ID NO: 1579089
uaagacccagcucaaggcu

SEQ ID NO: 1579091 - RNA, 19 nt, Artificial Sequence
  Description of Artificial Sequence: Synthetic oligonucleotide
  Sense strand starting at position 2745 of SEQ ID NO: 1560140
gggucuuaaggaugaguga

SEQ ID NO: 1579092 - RNA, 19 nt, Artificial Sequence
  Description of Artificial Sequence: Synthetic oligonucleotide
  Antisense strand to SEQ ID NO: 1579091
ucacucauccuuaagaccc

SEQ ID NO: 1579093 - RNA, 19 nt, Artificial Sequence
  Description of Artificial Sequence: Synthetic oligonucleotide
  Sense strand starting at position 2756 of SEQ ID NO: 1560140
augagugagaguugaugga

SEQ ID NO: 1579094 - RNA, 19 nt, Artificial Sequence
  Description of Artificial Sequence: Synthetic oligonucleotide
  Antisense strand to SEQ ID NO: 1579093
uccaucaacucucacucau

SEQ ID NO: 1579095 - RNA, 19 nt, Artificial Sequence
  Description of Artificial Sequence: Synthetic oligonucleotide
  Sense strand starting at position 2824 of SEQ ID NO: 1560140
ggcagaggguucucagaca

SEQ ID NO: 1579096 - RNA, 19 nt, Artificial Sequence
  Description of Artificial Sequence: Synthetic oligonucleotide
  Antisense strand to SEQ ID NO: 1579095
ugucugagaacccucugcc

SEQ ID NO: 1579097 - RNA, 19 nt, Artificial Sequence
  Description of Artificial Sequence: Synthetic oligonucleotide
  Sense strand starting at position 2939 of SEQ ID NO: 1560140
gggaaagauccagguguua

SEQ ID NO: 1579098 - RNA, 19 nt, Artificial Sequence
  Description of Artificial Sequence: Synthetic oligonucleotide
  Antisense strand to SEQ ID NO: 1579097
uaacaccuggaucuuuccc

SEQ ID NO: 1579099 - RNA, 19 nt, Artificial Sequence
  Description of Artificial Sequence: Synthetic oligonucleotide
  Sense strand starting at position 2941 of SEQ ID NO: 1560140
gaaagauccagguguuaga

SEQ ID NO: 1579100 - RNA, 19 nt, Artificial Sequence
  Description of Artificial Sequence: Synthetic oligonucleotide
  Antisense strand to SEQ ID NO: 1579099
ucuaacaccuggaucuuuc

SEQ ID NO: 1579101 - RNA, 19 nt, Artificial Sequence
  Description of Artificial Sequence: Synthetic oligonucleotide
  Sense strand starting at position 3042 of SEQ ID NO: 1560140
ggcaguggucaccagaaac

SEQ ID NO: 1579102 - RNA, 19 nt, Artificial Sequence
  Description of Artificial Sequence: Synthetic oligonucleotide
  Antisense strand to SEQ ID NO: 1579101
guuucuggugaccacugcc

SEQ ID NO: 1579103 - RNA, 19 nt, Artificial Sequence
  Description of Artificial Sequence: Synthetic oligonucleotide
  Sense strand starting at position 3291 of SEQ ID NO: 1560140
uguugaguagccgggauua

SEQ ID NO: 1579104 - RNA, 19 nt, Artificial Sequence
  Description of Artificial Sequence: Synthetic oligonucleotide
  Antisense strand to SEQ ID NO: 1579103
uaaucccggcuacucaaca

SEQ ID NO: 1579105 - RNA, 19 nt, Artificial Sequence
  Description of Artificial Sequence: Synthetic oligonucleotide
  Sense strand starting at position 3455 of SEQ ID NO: 1560140
acugcaucgggccagaauu

SEQ ID NO: 1579106 - RNA, 19 nt, Artificial Sequence
  Description of Artificial Sequence: Synthetic oligonucleotide
  Antisense strand to SEQ ID NO: 1579105
aauucuggcccgaugcagu

SEQ ID NO: 1579107 - RNA, 19 nt, Artificial Sequence
  Description of Artificial Sequence: Synthetic oligonucleotide
  Sense strand starting at position 3457 of SEQ ID NO: 1560140
ugcaucgggccagaauuaa

SEQ ID NO: 1579108 - RNA, 19 nt, Artificial Sequence
  Description of Artificial Sequence: Synthetic oligonucleotide
  Antisense strand to SEQ ID NO: 1579107
uuaauucuggcccgaugca

SEQ ID NO: 1579109 - RNA, 19 nt, Artificial Sequence
  Description of Artificial Sequence: Synthetic oligonucleotide
  Sense strand starting at position 3505 of SEQ ID NO: 1560140
uuaguacauucccaaugga

SEQ ID NO: 1579110 - RNA, 19 nt, Artificial Sequence
  Description of Artificial Sequence: Synthetic oligonucleotide
  Antisense strand to SEQ ID NO: 1579109
uccauugggaauguacuaa

SEQ ID NO: 1579111 - RNA, 19 nt, Artificial Sequence
  Description of Artificial Sequence: Synthetic oligonucleotide
  Sense strand starting at position 3508 of SEQ ID NO: 1560140
guacauucccaauggaaca

SEQ ID NO: 1579112 - RNA, 19 nt, Artificial Sequence
  Description of Artificial Sequence: Synthetic oligonucleotide
  Antisense strand to SEQ ID NO: 1579111
uguuccauugggaauguac

SEQ ID NO: 1579113 - RNA, 19 nt, Artificial Sequence
  Description of Artificial Sequence: Synthetic oligonucleotide
  Sense strand starting at position 3537 of SEQ ID NO: 1560140
guacacugguaauugugua

SEQ ID NO: 1579114 - RNA, 19 nt, Artificial Sequence
  Description of Artificial Sequence: Synthetic oligonucleotide
  Antisense strand to SEQ ID NO: 1579113
uacacaauuaccaguguac

SEQ ID NO: 1579115 - RNA, 19 nt, Artificial Sequence
  Description of Artificial Sequence: Synthetic oligonucleotide
  Sense strand starting at position 3542 of SEQ ID NO: 1560140
cugguaauuguguagccau

SEQ ID NO: 1579116 - RNA, 19 nt, Artificial Sequence
  Description of Artificial Sequence: Synthetic oligonucleotide
  Antisense strand to SEQ ID NO: 1579115
auggcuacacaauuaccag

SEQ ID NO: 1579117 - RNA, 19 nt, Artificial Sequence
  Description of Artificial Sequence: Synthetic oligonucleotide
  Sense strand starting at position 3690 of SEQ ID NO: 1560140
ucuggacauucgcauaaau

SEQ ID NO: 1579118 - RNA, 19 nt, Artificial Sequence
  Description of Artificial Sequence: Synthetic oligonucleotide
  Antisense strand to SEQ ID NO: 1579117
auuuaugcgaauguccaga

SEQ ID NO: 1579119 - RNA, 19 nt, Artificial Sequence
  Description of Artificial Sequence: Synthetic oligonucleotide
  Sense strand starting at position 3756 of SEQ ID NO: 1560140
gcagguucauccgugugca

SEQ ID NO: 1579120 - RNA, 19 nt, Artificial Sequence
  Description of Artificial Sequence: Synthetic oligonucleotide
  Antisense strand to SEQ ID NO: 1579119
ugcacacggaugaaccugc

SEQ ID NO: 1579121 - RNA, 19 nt, Artificial Sequence
  Description of Artificial Sequence: Synthetic oligonucleotide
  Sense strand starting at position 3759 of SEQ ID NO: 1560140
gguucauccgugugcagca

SEQ ID NO: 1579122 - RNA, 19 nt, Artificial Sequence
  Description of Artificial Sequence: Synthetic oligonucleotide
  Antisense strand to SEQ ID NO: 1579121
ugcugcacacggaugaacc

SEQ ID NO: 1579123 - RNA, 19 nt, Artificial Sequence
  Description of Artificial Sequence: Synthetic oligonucleotide
  Sense strand starting at position 3799 of SEQ ID NO: 1560140
guauuauguacauacguua

SEQ ID NO: 1579124 - RNA, 19 nt, Artificial Sequence
  Description of Artificial Sequence: Synthetic oligonucleotide
  Antisense strand to SEQ ID NO: 1579123
uaacguauguacauaauac

SEQ ID NO: 1579125 - RNA, 19 nt, Artificial Sequence
  Description of Artificial Sequence: Synthetic oligonucleotide
  Sense strand starting at position 3804 of SEQ ID NO: 1560140
auguacauacguuaagaua

SEQ ID NO: 1579126 - RNA, 19 nt, Artificial Sequence
  Description of Artificial Sequence: Synthetic oligonucleotide
  Antisense strand to SEQ ID NO: 1579125
uaucuuaacguauguacau

SEQ ID NO: 1579127 - RNA, 19 nt, Artificial Sequence
  Description of Artificial Sequence: Synthetic oligonucleotide
  Sense strand starting at position 385 of SEQ ID NO: 1560141
ggagguguccuggacauug

SEQ ID NO: 1579128 - RNA, 19 nt, Artificial Sequence
  Description of Artificial Sequence: Synthetic oligonucleotide
  Antisense strand to SEQ ID NO: 1579127
caauguccaggacaccucc

SEQ ID NO: 1579129 - RNA, 19 nt, Artificial Sequence
  Description of Artificial Sequence: Synthetic oligonucleotide
  Sense strand starting at position 548 of SEQ ID NO: 1560141
agaggcaucucccagaaac

SEQ ID NO: 1579130 - RNA, 19 nt, Artificial Sequence
  Description of Artificial Sequence: Synthetic oligonucleotide
  Antisense strand to SEQ ID NO: 1579129
guuucugggagaugccucu

SEQ ID NO: 1579131 - RNA, 19 nt, Artificial Sequence
  Description of Artificial Sequence: Synthetic oligonucleotide
  Sense strand starting at position 620 of SEQ ID NO: 1560141
caggaaaguucuucuggga

SEQ ID NO: 1579132 - RNA, 19 nt, Artificial Sequence
  Description of Artificial Sequence: Synthetic oligonucleotide
  Antisense strand to SEQ ID NO: 1579131
ucccagaagaacuuuccug

SEQ ID NO: 1579133 - RNA, 19 nt, Artificial Sequence
  Description of Artificial Sequence: Synthetic oligonucleotide
  Sense strand starting at position 623 of SEQ ID NO: 1560141
gaaaguucuucugggaaua

SEQ ID NO: 1579134 - RNA, 19 nt, Artificial Sequence
  Description of Artificial Sequence: Synthetic oligonucleotide
  Antisense strand to SEQ ID NO: 1579133
uauucccagaagaacuuuc

SEQ ID NO: 1579135 - RNA, 19 nt, Artificial Sequence
  Description of Artificial Sequence: Synthetic oligonucleotide
  Sense strand starting at position 624 of SEQ ID NO: 1560141
aaaguucuucugggaauag

SEQ ID NO: 1579136 - RNA, 19 nt, Artificial Sequence
  Description of Artificial Sequence: Synthetic oligonucleotide
  Antisense strand to SEQ ID NO: 1579135
cuauucccagaagaacuuu

SEQ ID NO: 1579137 - RNA, 19 nt, Artificial Sequence
  Description of Artificial Sequence: Synthetic oligonucleotide
  Sense strand starting at position 658 of SEQ ID NO: 1560141
gcuggucacucccuuaaga

SEQ ID NO: 1579138 - RNA, 19 nt, Artificial Sequence
  Description of Artificial Sequence: Synthetic oligonucleotide
  Antisense strand to SEQ ID NO: 1579137
ucuuaagggagugaccagc

SEQ ID NO: 1579139 - RNA, 19 nt, Artificial Sequence
  Description of Artificial Sequence: Synthetic oligonucleotide
  Sense strand starting at position 660 of SEQ ID NO: 1560141
uggucacucccuuaagaau

SEQ ID NO: 1579140 - RNA, 19 nt, Artificial Sequence
  Description of Artificial Sequence: Synthetic oligonucleotide
  Antisense strand to SEQ ID NO: 1579139
auucuuaagggagugacca

SEQ ID NO: 1579141 - RNA, 19 nt, Artificial Sequence
  Description of Artificial Sequence: Synthetic oligonucleotide
  Sense strand starting at position 912 of SEQ ID NO: 1560141
cuacauaauggugauguca

SEQ ID NO: 1579142 - RNA, 19 nt, Artificial Sequence
  Description of Artificial Sequence: Synthetic oligonucleotide
  Antisense strand to SEQ ID NO: 1579141
ugacaucaccauuauguag

SEQ ID NO: 1579143 - RNA, 19 nt, Artificial Sequence
  Description of Artificial Sequence: Synthetic oligonucleotide
  Sense strand starting at position 991 of SEQ ID NO: 1560141
aaacgagacuucccuguaa

SEQ ID NO: 1579144 - RNA, 19 nt, Artificial Sequence
  Description of Artificial Sequence: Synthetic oligonucleotide
  Antisense strand to SEQ ID NO: 1579143
uuacagggaagucucguuu

SEQ ID NO: 1579145 - RNA, 19 nt, Artificial Sequence
  Description of Artificial Sequence: Synthetic oligonucleotide
  Sense strand starting at position 1009 of SEQ ID NO: 1560141
aaaugucucccagggaaua

SEQ ID NO: 1579146 - RNA, 19 nt, Artificial Sequence
  Description of Artificial Sequence: Synthetic oligonucleotide
  Antisense strand to SEQ ID NO: 1579145
uauucccugggagacauuu

SEQ ID NO: 1579147 - RNA, 19 nt, Artificial Sequence
  Description of Artificial Sequence: Synthetic oligonucleotide
  Sense strand starting at position 1010 of SEQ ID NO: 1560141
aaugucucccagggaauau

SEQ ID NO: 1579148 - RNA, 19 nt, Artificial Sequence
  Description of Artificial Sequence: Synthetic oligonucleotide
  Antisense strand to SEQ ID NO: 1579147
auauucccugggagacauu

SEQ ID NO: 1579149 - RNA, 19 nt, Artificial Sequence
  Description of Artificial Sequence: Synthetic oligonucleotide
  Sense strand starting at position 1022 of SEQ ID NO: 1560141
ggaauauagggaugucuug

SEQ ID NO: 1579150 - RNA, 19 nt, Artificial Sequence
  Description of Artificial Sequence: Synthetic oligonucleotide
  Antisense strand to SEQ ID NO: 1579149
caagacaucccuauauucc

SEQ ID NO: 1579151 - RNA, 19 nt, Artificial Sequence
  Description of Artificial Sequence: Synthetic oligonucleotide
  Sense strand starting at position 1029 of SEQ ID NO: 1560141
agggaugucuugcaaucug

SEQ ID NO: 1579152 - RNA, 19 nt, Artificial Sequence
  Description of Artificial Sequence: Synthetic oligonucleotide
  Antisense strand to SEQ ID NO: 1579151
cagauugcaagacaucccu

SEQ ID NO: 1579153 - RNA, 19 nt, Artificial Sequence
  Description of Artificial Sequence: Synthetic oligonucleotide
  Sense strand starting at position 1037 of SEQ ID NO: 1560141
cuugcaaucugacauuguu

SEQ ID NO: 1579154 - RNA, 19 nt, Artificial Sequence
  Description of Artificial Sequence: Synthetic oligonucleotide
  Antisense strand to SEQ ID NO: 1579153
aacaaugucagauugcaag

SEQ ID NO: 1579155 - RNA, 19 nt, Artificial Sequence
  Description of Artificial Sequence: Synthetic oligonucleotide
  Sense strand starting at position 1045 of SEQ ID NO: 1560141
cugacauuguuccuccauu

SEQ ID NO: 1579156 - RNA, 19 nt, Artificial Sequence
  Description of Artificial Sequence: Synthetic oligonucleotide
  Antisense strand to SEQ ID NO: 1579155
aauggaggaacaaugucag

SEQ ID NO: 1579157 - RNA, 19 nt, Artificial Sequence
  Description of Artificial Sequence: Synthetic oligonucleotide
  Sense strand starting at position 1046 of SEQ ID NO: 1560141
ugacauuguuccuccauug

SEQ ID NO: 1579158 - RNA, 19 nt, Artificial Sequence
  Description of Artificial Sequence: Synthetic oligonucleotide
  Antisense strand to SEQ ID NO: 1579157
caauggaggaacaauguca

SEQ ID NO: 1579159 - RNA, 19 nt, Artificial Sequence
  Description of Artificial Sequence: Synthetic oligonucleotide
  Sense strand starting at position 1089 of SEQ ID NO: 1560141
ccgcauaaccuuuaggaau

SEQ ID NO: 1579160 - RNA, 19 nt, Artificial Sequence
  Description of Artificial Sequence: Synthetic oligonucleotide
  Antisense strand to SEQ ID NO: 1579159
auuccuaaagguuaugcgg

SEQ ID NO: 1579161 - RNA, 19 nt, Artificial Sequence
  Description of Artificial Sequence: Synthetic oligonucleotide
  Sense strand starting at position 1091 of SEQ ID NO: 1560141
gcauaaccuuuaggaauga

SEQ ID NO: 1579162 - RNA, 19 nt, Artificial Sequence
  Description of Artificial Sequence: Synthetic oligonucleotide
  Antisense strand to SEQ ID NO: 1579161
ucauuccuaaagguuaugc

SEQ ID NO: 1579163 - RNA, 19 nt, Artificial Sequence
  Description of Artificial Sequence: Synthetic oligonucleotide
  Sense strand starting at position 1129 of SEQ ID NO: 1560141
ccagauuugucucagagag

SEQ ID NO: 1579164 - RNA, 19 nt, Artificial Sequence
  Description of Artificial Sequence: Synthetic oligonucleotide
  Antisense strand to SEQ ID NO: 1579163
cucucugagacaaaucugg

SEQ ID NO: 1579165 - RNA, 19 nt, Artificial Sequence
  Description of Artificial Sequence: Synthetic oligonucleotide
  Sense strand starting at position 1184 of SEQ ID NO: 1560141
ucuccuuccagagaucgga

SEQ ID NO: 1579166 - RNA, 19 nt, Artificial Sequence
  Description of Artificial Sequence: Synthetic oligonucleotide
  Antisense strand to SEQ ID NO: 1579165
uccgaucucuggaaggaga

SEQ ID NO: 1579167 - RNA, 19 nt, Artificial Sequence
  Description of Artificial Sequence: Synthetic oligonucleotide
  Sense strand starting at position 2095 of SEQ ID NO: 1560141
gaacgcaacugauuuguuu

SEQ ID NO: 1579168 - RNA, 19 nt, Artificial Sequence
  Description of Artificial Sequence: Synthetic oligonucleotide
  Antisense strand to SEQ ID NO: 1579167
aaacaaaucaguugcguuc

SEQ ID NO: 1579169 - RNA, 19 nt, Artificial Sequence
  Description of Artificial Sequence: Synthetic oligonucleotide
  Sense strand starting at position 2247 of SEQ ID NO: 1560141
gcuccugauuggucagagu

SEQ ID NO: 1579170 - RNA, 19 nt, Artificial Sequence
  Description of Artificial Sequence: Synthetic oligonucleotide
  Antisense strand to SEQ ID NO: 1579169
acucugaccaaucaggagc

SEQ ID NO: 1579171 - RNA, 19 nt, Artificial Sequence
  Description of Artificial Sequence: Synthetic oligonucleotide
  Sense strand starting at position 2250 of SEQ ID NO: 1560141
ccugauuggucagagugug

SEQ ID NO: 1579172 - RNA, 19 nt, Artificial Sequence
  Description of Artificial Sequence: Synthetic oligonucleotide
  Antisense strand to SEQ ID NO: 1579171
cacacucugaccaaucagg

SEQ ID NO: 1579173 - RNA, 19 nt, Artificial Sequence
  Description of Artificial Sequence: Synthetic oligonucleotide
  Sense strand starting at position 2328 of SEQ ID NO: 1560141
gggaaagaaggcugguuua

SEQ ID NO: 1579174 - RNA, 19 nt, Artificial Sequence
  Description of Artificial Sequence: Synthetic oligonucleotide
  Antisense strand to SEQ ID NO: 1579173
uaaaccagccuucuuuccc

SEQ ID NO: 1579175 - RNA, 19 nt, Artificial Sequence
  Description of Artificial Sequence: Synthetic oligonucleotide
  Sense strand starting at position 2331 of SEQ ID NO: 1560141
aaagaaggcugguuuaacu

SEQ ID NO: 1579176 - RNA, 19 nt, Artificial Sequence
  Description of Artificial Sequence: Synthetic oligonucleotide
  Antisense strand to SEQ ID NO: 1579175
aguuaaaccagccuucuuu

SEQ ID NO: 1579177 - RNA, 19 nt, Artificial Sequence
  Description of Artificial Sequence: Synthetic oligonucleotide
  Sense strand starting at position 2448 of SEQ ID NO: 1560141
agguuccacuacuaauaga

SEQ ID NO: 1579178 - RNA, 19 nt, Artificial Sequence
  Description of Artificial Sequence: Synthetic oligonucleotide
  Antisense strand to SEQ ID NO: 1579177
ucuauuaguaguggaaccu

SEQ ID NO: 1579179 - RNA, 19 nt, Artificial Sequence
  Description of Artificial Sequence: Synthetic oligonucleotide
  Sense strand starting at position 2576 of SEQ ID NO: 1560141
aauauuagauagugucaag

SEQ ID NO: 1579180 - RNA, 19 nt, Artificial Sequence
  Description of Artificial Sequence: Synthetic oligonucleotide
  Antisense strand to SEQ ID NO: 1579179
cuugacacuaucuaauauu

SEQ ID NO: 1579181 - RNA, 19 nt, Artificial Sequence
  Description of Artificial Sequence: Synthetic oligonucleotide
  Sense strand starting at position 2588 of SEQ ID NO: 1560141
ugucaagcaccgugaagaa

SEQ ID NO: 1579182 - RNA, 19 nt, Artificial Sequence
  Description of Artificial Sequence: Synthetic oligonucleotide
  Antisense strand to SEQ ID NO: 1579181
uucuucacggugcuugaca

SEQ ID NO: 1579183 - RNA, 19 nt, Artificial Sequence
  Description of Artificial Sequence: Synthetic oligonucleotide
  Sense strand starting at position 3089 of SEQ ID NO: 1560141
uguuauuuguguuuggcuu

SEQ ID NO: 1579184 - RNA, 19 nt, Artificial Sequence
  Description of Artificial Sequence: Synthetic oligonucleotide
  Antisense strand to SEQ ID NO: 1579183
aagccaaacacaaauaaca

SEQ ID NO: 1579185 - RNA, 19 nt, Artificial Sequence
  Description of Artificial Sequence: Synthetic oligonucleotide
  Sense strand starting at position 3090 of SEQ ID NO: 1560141
guuauuuguguuuggcuuu

SEQ ID NO: 1579186 - RNA, 19 nt, Artificial Sequence
  Description of Artificial Sequence: Synthetic oligonucleotide
  Antisense strand to SEQ ID NO: 1579185
aaagccaaacacaaauaac

SEQ ID NO: 1579187 - RNA, 19 nt, Artificial Sequence
  Description of Artificial Sequence: Synthetic oligonucleotide
  Sense strand starting at position 3165 of SEQ ID NO: 1560141
ccgaauuccugggcucaac

SEQ ID NO: 1579188 - RNA, 19 nt, Artificial Sequence
  Description of Artificial Sequence: Synthetic oligonucleotide
  Antisense strand to SEQ ID NO: 1579187
guugagcccaggaauucgg

SEQ ID NO: 1579189 - RNA, 19 nt, Artificial Sequence
  Description of Artificial Sequence: Synthetic oligonucleotide
  Sense strand starting at position 3237 of SEQ ID NO: 1560141
gcucuccgccaauaguuaa

SEQ ID NO: 1579190 - RNA, 19 nt, Artificial Sequence
  Description of Artificial Sequence: Synthetic oligonucleotide
  Antisense strand to SEQ ID NO: 1579189
uuaacuauuggcggagagc

SEQ ID NO: 1579191 - RNA, 19 nt, Artificial Sequence
  Description of Artificial Sequence: Synthetic oligonucleotide
  Sense strand starting at position 3868 of SEQ ID NO: 1560141
gagggagacuugugguuau

SEQ ID NO: 1579192 - RNA, 19 nt, Artificial Sequence
  Description of Artificial Sequence: Synthetic oligonucleotide
  Antisense strand to SEQ ID NO: 1579191
auaaccacaagucucccuc

SEQ ID NO: 1579193 - RNA, 19 nt, Artificial Sequence
  Description of Artificial Sequence: Synthetic oligonucleotide
  Sense strand starting at position 3871 of SEQ ID NO: 1560141
ggagacuugugguuauaug

SEQ ID NO: 1579194 - RNA, 19 nt, Artificial Sequence
  Description of Artificial Sequence: Synthetic oligonucleotide
  Antisense strand to SEQ ID NO: 1579193
cauauaaccacaagucucc

SEQ ID NO: 1579195 - RNA, 19 nt, Artificial Sequence
  Description of Artificial Sequence: Synthetic oligonucleotide
  Sense strand starting at position 361 of SEQ ID NO: 1560142
ggagguguccuggacauug

SEQ ID NO: 1579196 - RNA, 19 nt, Artificial Sequence
  Description of Artificial Sequence: Synthetic oligonucleotide
  Antisense strand to SEQ ID NO: 1579195
caauguccaggacaccucc

SEQ ID NO: 1579197 - RNA, 19 nt, Artificial Sequence
  Description of Artificial Sequence: Synthetic oligonucleotide
  Sense strand starting at position 524 of SEQ ID NO: 1560142
agaggcaucucccagaaac

SEQ ID NO: 1579198 - RNA, 19 nt, Artificial Sequence
  Description of Artificial Sequence: Synthetic oligonucleotide
  Antisense strand to SEQ ID NO: 1579197
guuucugggagaugccucu

SEQ ID NO: 1579199 - RNA, 19 nt, Artificial Sequence
  Description of Artificial Sequence: Synthetic oligonucleotide
  Sense strand starting at position 596 of SEQ ID NO: 1560142
caggaaaguucuucuggga

SEQ ID NO: 1579200 - RNA, 19 nt, Artificial Sequence
  Description of Artificial Sequence: Synthetic oligonucleotide
  Antisense strand to SEQ ID NO: 1579199
ucccagaagaacuuuccug

SEQ ID NO: 1579201 - RNA, 19 nt, Artificial Sequence
  Description of Artificial Sequence: Synthetic oligonucleotide
  Sense strand starting at position 599 of SEQ ID NO: 1560142
gaaaguucuucugggaaua

SEQ ID NO: 1579202 - RNA, 19 nt, Artificial Sequence
  Description of Artificial Sequence: Synthetic oligonucleotide
  Antisense strand to SEQ ID NO: 1579201
uauucccagaagaacuuuc

SEQ ID NO: 1579203 - RNA, 19 nt, Artificial Sequence
  Description of Artificial Sequence: Synthetic oligonucleotide
  Sense strand starting at position 600 of SEQ ID NO: 1560142
aaaguucuucugggaauag

SEQ ID NO: 1579204 - RNA, 19 nt, Artificial Sequence
  Description of Artificial Sequence: Synthetic oligonucleotide
  Antisense strand to SEQ ID NO: 1579203
cuauucccagaagaacuuu

SEQ ID NO: 1579205 - RNA, 19 nt, Artificial Sequence
  Description of Artificial Sequence: Synthetic oligonucleotide
  Sense strand starting at position 634 of SEQ ID NO: 1560142
gcuggucacucccuuaaga

SEQ ID NO: 1579206 - RNA, 19 nt, Artificial Sequence
  Description of Artificial Sequence: Synthetic oligonucleotide
  Antisense strand to SEQ ID NO: 1579205
ucuuaagggagugaccagc

SEQ ID NO: 1579207 - RNA, 19 nt, Artificial Sequence
  Description of Artificial Sequence: Synthetic oligonucleotide
  Sense strand starting at position 636 of SEQ ID NO: 1560142
uggucacucccuuaagaau

SEQ ID NO: 1579208 - RNA, 19 nt, Artificial Sequence
  Description of Artificial Sequence: Synthetic oligonucleotide
  Antisense strand to SEQ ID NO: 1579207
auucuuaagggagugacca

SEQ ID NO: 1579209 - RNA, 19 nt, Artificial Sequence
  Description of Artificial Sequence: Synthetic oligonucleotide
  Sense strand starting at position 888 of SEQ ID NO: 1560142
cuacauaauggugauguca

SEQ ID NO: 1579210 - RNA, 19 nt, Artificial Sequence
  Description of Artificial Sequence: Synthetic oligonucleotide
  Antisense strand to SEQ ID NO: 1579209
ugacaucaccauuauguag

SEQ ID NO: 1579211 - RNA, 19 nt, Artificial Sequence
  Description of Artificial Sequence: Synthetic oligonucleotide
  Sense strand starting at position 967 of SEQ ID NO: 1560142
aaacgagacuucccuguaa

SEQ ID NO: 1579212 - RNA, 19 nt, Artificial Sequence
  Description of Artificial Sequence: Synthetic oligonucleotide
  Antisense strand to SEQ ID NO: 1579211
uuacagggaagucucguuu

SEQ ID NO: 1579213 - RNA, 19 nt, Artificial Sequence
  Description of Artificial Sequence: Synthetic oligonucleotide
  Sense strand starting at position 985 of SEQ ID NO: 1560142
aaaugucucccagggaaua

SEQ ID NO: 1579214 - RNA, 19 nt, Artificial Sequence
  Description of Artificial Sequence: Synthetic oligonucleotide
  Antisense strand to SEQ ID NO: 1579213
uauucccugggagacauuu

SEQ ID NO: 1579215 - RNA, 19 nt, Artificial Sequence
  Description of Artificial Sequence: Synthetic oligonucleotide
  Sense strand starting at position 986 of SEQ ID NO: 1560142
aaugucucccagggaauau

SEQ ID NO: 1579216 - RNA, 19 nt, Artificial Sequence
  Description of Artificial Sequence: Synthetic oligonucleotide
  Antisense strand to SEQ ID NO: 1579215
auauucccugggagacauu

SEQ ID NO: 1579217 - RNA, 19 nt, Artificial Sequence
  Description of Artificial Sequence: Synthetic oligonucleotide
  Sense strand starting at position 998 of SEQ ID NO: 1560142
ggaauauagggaugucuug

SEQ ID NO: 1579218 - RNA, 19 nt, Artificial Sequence
  Description of Artificial Sequence: Synthetic oligonucleotide
  Antisense strand to SEQ ID NO: 1579217
caagacaucccuauauucc

SEQ ID NO: 1579219 - RNA, 19 nt, Artificial Sequence
  Description of Artificial Sequence: Synthetic oligonucleotide
  Sense strand starting at position 1005 of SEQ ID NO: 1560142
agggaugucuugcaaucug

SEQ ID NO: 1579220 - RNA, 19 nt, Artificial Sequence
  Description of Artificial Sequence: Synthetic oligonucleotide
  Antisense strand to SEQ ID NO: 1579219
cagauugcaagacaucccu

SEQ ID NO: 1579221 - RNA, 19 nt, Artificial Sequence
  Description of Artificial Sequence: Synthetic oligonucleotide
  Sense strand starting at position 1013 of SEQ ID NO: 1560142
cuugcaaucugacauuguu

SEQ ID NO: 1579222 - RNA, 19 nt, Artificial Sequence
  Description of Artificial Sequence: Synthetic oligonucleotide
  Antisense strand to SEQ ID NO: 1579221
aacaaugucagauugcaag

SEQ ID NO: 1579223 - RNA, 19 nt, Artificial Sequence
  Description of Artificial Sequence: Synthetic oligonucleotide
  Sense strand starting at position 1021 of SEQ ID NO: 1560142
cugacauuguuccuccauu

SEQ ID NO: 1579224 - RNA, 19 nt, Artificial Sequence
  Description of Artificial Sequence: Synthetic oligonucleotide
  Antisense strand to SEQ ID NO: 1579223
aauggaggaacaaugucag

SEQ ID NO: 1579225 - RNA, 19 nt, Artificial Sequence
  Description of Artificial Sequence: Synthetic oligonucleotide
  Sense strand starting at position 1022 of SEQ ID NO: 1560142
ugacauuguuccuccauug

SEQ ID NO: 1579226 - RNA, 19 nt, Artificial Sequence
  Description of Artificial Sequence: Synthetic oligonucleotide
  Antisense strand to SEQ ID NO: 1579225
caauggaggaacaauguca

SEQ ID NO: 1579227 - RNA, 19 nt, Artificial Sequence
  Description of Artificial Sequence: Synthetic oligonucleotide
  Sense strand starting at position 1065 of SEQ ID NO: 1560142
ccgcauaaccuuuaggaau

SEQ ID NO: 1579228 - RNA, 19 nt, Artificial Sequence
  Description of Artificial Sequence: Synthetic oligonucleotide
  Antisense strand to SEQ ID NO: 1579227
auuccuaaagguuaugcgg

SEQ ID NO: 1579229 - RNA, 19 nt, Artificial Sequence
  Description of Artificial Sequence: Synthetic oligonucleotide
  Sense strand starting at position 1067 of SEQ ID NO: 1560142
gcauaaccuuuaggaauga

SEQ ID NO: 1579230 - RNA, 19 nt, Artificial Sequence
  Description of Artificial Sequence: Synthetic oligonucleotide
  Antisense strand to SEQ ID NO: 1579229
ucauuccuaaagguuaugc

SEQ ID NO: 1579231 - RNA, 19 nt, Artificial Sequence
  Description of Artificial Sequence: Synthetic oligonucleotide
  Sense strand starting at position 1105 of SEQ ID NO: 1560142
ccagauuugucucagagag

SEQ ID NO: 1579232 - RNA, 19 nt, Artificial Sequence
  Description of Artificial Sequence: Synthetic oligonucleotide
  Antisense strand to SEQ ID NO: 1579231
cucucugagacaaaucugg

SEQ ID NO: 1579233 - RNA, 19 nt, Artificial Sequence
  Description of Artificial Sequence: Synthetic oligonucleotide
  Sense strand starting at position 1160 of SEQ ID NO: 1560142
ucuccuuccagagaucgga

SEQ ID NO: 1579234 - RNA, 19 nt, Artificial Sequence
  Description of Artificial Sequence: Synthetic oligonucleotide
  Antisense strand to SEQ ID NO: 1579233
uccgaucucuggaaggaga

SEQ ID NO: 1579235 - RNA, 19 nt, Artificial Sequence
  Description of Artificial Sequence: Synthetic oligonucleotide
  Sense strand starting at position 2071 of SEQ ID NO: 1560142
gaacgcaacugauuuguuu

SEQ ID NO: 1579236 - RNA, 19 nt, Artificial Sequence
  Description of Artificial Sequence: Synthetic oligonucleotide
  Antisense strand to SEQ ID NO: 1579235
aaacaaaucaguugcguuc

SEQ ID NO: 1579237 - RNA, 19 nt, Artificial Sequence
  Description of Artificial Sequence: Synthetic oligonucleotide
  Sense strand starting at position 2223 of SEQ ID NO: 1560142
gcuccugauuggucagagu

SEQ ID NO: 1579238 - RNA, 19 nt, Artificial Sequence
  Description of Artificial Sequence: Synthetic oligonucleotide
  Antisense strand to SEQ ID NO: 1579237
acucugaccaaucaggagc

SEQ ID NO: 1579239 - RNA, 19 nt, Artificial Sequence
  Description of Artificial Sequence: Synthetic oligonucleotide
  Sense strand starting at position 2226 of SEQ ID NO: 1560142
ccugauuggucagagugug

SEQ ID NO: 1579240 - RNA, 19 nt, Artificial Sequence
  Description of Artificial Sequence: Synthetic oligonucleotide
  Antisense strand to SEQ ID NO: 1579239
cacacucugaccaaucagg

SEQ ID NO: 1579241 - RNA, 19 nt, Artificial Sequence
  Description of Artificial Sequence: Synthetic oligonucleotide
  Sense strand starting at position 2304 of SEQ ID NO: 1560142
gggaaagaaggcugguuua

SEQ ID NO: 1579242 - RNA, 19 nt, Artificial Sequence
  Description of Artificial Sequence: Synthetic oligonucleotide
  Antisense strand to SEQ ID NO: 1579241
uaaaccagccuucuuuccc

SEQ ID NO: 1579243 - RNA, 19 nt, Artificial Sequence
  Description of Artificial Sequence: Synthetic oligonucleotide
  Sense strand starting at position 2307 of SEQ ID NO: 1560142
aaagaaggcugguuuaacu

SEQ ID NO: 1579244 - RNA, 19 nt, Artificial Sequence
  Description of Artificial Sequence: Synthetic oligonucleotide
  Antisense strand to SEQ ID NO: 1579243
aguuaaaccagccuucuuu

SEQ ID NO: 1579245 - RNA, 19 nt, Artificial Sequence
  Description of Artificial Sequence: Synthetic oligonucleotide
  Sense strand starting at position 2424 of SEQ ID NO: 1560142
agguuccacuacuaauaga

SEQ ID NO: 1579246 - RNA, 19 nt, Artificial Sequence
  Description of Artificial Sequence: Synthetic oligonucleotide
  Antisense strand to SEQ ID NO: 1579245
ucuauuaguaguggaaccu

SEQ ID NO: 1579247 - RNA, 19 nt, Artificial Sequence
  Description of Artificial Sequence: Synthetic oligonucleotide
  Sense strand starting at position 2552 of SEQ ID NO: 1560142
aauauuagauagugucaag

SEQ ID NO: 1579248 - RNA, 19 nt, Artificial Sequence
  Description of Artificial Sequence: Synthetic oligonucleotide
  Antisense strand to SEQ ID NO: 1579247
cuugacacuaucuaauauu

SEQ ID NO: 1579249 - RNA, 19 nt, Artificial Sequence
  Description of Artificial Sequence: Synthetic oligonucleotide
  Sense strand starting at position 2564 of SEQ ID NO: 1560142
ugucaagcaccgugaagaa

SEQ ID NO: 1579250 - RNA, 19 nt, Artificial Sequence
  Description of Artificial Sequence: Synthetic oligonucleotide
  Antisense strand to SEQ ID NO: 1579249
uucuucacggugcuugaca

SEQ ID NO: 1579251 - RNA, 19 nt, Artificial Sequence
  Description of Artificial Sequence: Synthetic oligonucleotide
  Sense strand starting at position 3065 of SEQ ID NO: 1560142
uguuauuuguguuuggcuu

SEQ ID NO: 1579252 - RNA, 19 nt, Artificial Sequence
  Description of Artificial Sequence: Synthetic oligonucleotide
  Antisense strand to SEQ ID NO: 1579251
aagccaaacacaaauaaca

SEQ ID NO: 1579253 - RNA, 19 nt, Artificial Sequence
  Description of Artificial Sequence: Synthetic oligonucleotide
  Sense strand starting at position 3066 of SEQ ID NO: 1560142
guuauuuguguuuggcuuu

SEQ ID NO: 1579254 - RNA, 19 nt, Artificial Sequence
  Description of Artificial Sequence: Synthetic oligonucleotide
  Antisense strand to SEQ ID NO: 1579253
aaagccaaacacaaauaac

SEQ ID NO: 1579255 - RNA, 19 nt, Artificial Sequence
  Description of Artificial Sequence: Synthetic oligonucleotide
  Sense strand starting at position 3141 of SEQ ID NO: 1560142
ccgaauuccugggcucaac

SEQ ID NO: 1579256 - RNA, 19 nt, Artificial Sequence
  Description of Artificial Sequence: Synthetic oligonucleotide
  Antisense strand to SEQ ID NO: 1579255
guugagcccaggaauucgg

SEQ ID NO: 1579257 - RNA, 19 nt, Artificial Sequence
  Description of Artificial Sequence: Synthetic oligonucleotide
  Sense strand starting at position 3213 of SEQ ID NO: 1560142
gcucuccgccaauaguuaa

SEQ ID NO: 1579258 - RNA, 19 nt, Artificial Sequence
  Description of Artificial Sequence: Synthetic oligonucleotide
  Antisense strand to SEQ ID NO: 1579257
uuaacuauuggcggagagc

SEQ ID NO: 1579259 - RNA, 19 nt, Artificial Sequence
  Description of Artificial Sequence: Synthetic oligonucleotide
  Sense strand starting at position 3844 of SEQ ID NO: 1560142
gagggagacuugugguuau

SEQ ID NO: 1579260 - RNA, 19 nt, Artificial Sequence
  Description of Artificial Sequence: Synthetic oligonucleotide
  Antisense strand to SEQ ID NO: 1579259
auaaccacaagucucccuc

SEQ ID NO: 1579261 - RNA, 19 nt, Artificial Sequence
  Description of Artificial Sequence: Synthetic oligonucleotide
  Sense strand starting at position 3847 of SEQ ID NO: 1560142
ggagacuugugguuauaug

SEQ ID NO: 1579262 - RNA, 19 nt, Artificial Sequence
  Description of Artificial Sequence: Synthetic oligonucleotide
  Antisense strand to SEQ ID NO: 1579261
cauauaaccacaagucucc

SEQ ID NO: 1579263 - RNA, 19 nt, Artificial Sequence
  Description of Artificial Sequence: Synthetic oligonucleotide
  Sense strand starting at position 3962 of SEQ ID NO: 1560142
ggguaucaggauggcaauu

SEQ ID NO: 1579264 - RNA, 19 nt, Artificial Sequence
  Description of Artificial Sequence: Synthetic oligonucleotide
  Antisense strand to SEQ ID NO: 1579263
aauugccauccugauaccc

SEQ ID NO: 1579265 - RNA, 19 nt, Artificial Sequence
  Description of Artificial Sequence: Synthetic oligonucleotide
  Sense strand starting at position 3972 of SEQ ID NO: 1560142
auggcaauugugcaaauca

SEQ ID NO: 1579266 - RNA, 19 nt, Artificial Sequence
  Description of Artificial Sequence: Synthetic oligonucleotide
  Antisense strand to SEQ ID NO: 1579265
ugauuugcacaauugccau

SEQ ID NO: 1579267 - RNA, 19 nt, Artificial Sequence
  Description of Artificial Sequence: Synthetic oligonucleotide
  Sense strand starting at position 41 of SEQ ID NO: 1560143
ucaaauucuuguuccuagu

SEQ ID NO: 1579268 - RNA, 19 nt, Artificial Sequence
  Description of Artificial Sequence: Synthetic oligonucleotide
  Antisense strand to SEQ ID NO: 1579267
acuaggaacaagaauuuga

SEQ ID NO: 1579269 - RNA, 19 nt, Artificial Sequence
  Description of Artificial Sequence: Synthetic oligonucleotide
  Sense strand starting at position 164 of SEQ ID NO: 1560143
cugagcuugucugugagga

SEQ ID NO: 1579270 - RNA, 19 nt, Artificial Sequence
  Description of Artificial Sequence: Synthetic oligonucleotide
  Antisense strand to SEQ ID NO: 1579269
uccucacagacaagcucag

SEQ ID NO: 1579271 - RNA, 19 nt, Artificial Sequence
  Description of Artificial Sequence: Synthetic oligonucleotide
  Sense strand starting at position 227 of SEQ ID NO: 1560143
gucuuucuuagggacaugu

SEQ ID NO: 1579272 - RNA, 19 nt, Artificial Sequence
  Description of Artificial Sequence: Synthetic oligonucleotide
  Antisense strand to SEQ ID NO: 1579271
acaugucccuaagaaagac

SEQ ID NO: 1579273 - RNA, 19 nt, Artificial Sequence
  Description of Artificial Sequence: Synthetic oligonucleotide
  Sense strand starting at position 289 of SEQ ID NO: 1560143
cucgauaaguuacccacau

SEQ ID NO: 1579274 - RNA, 19 nt, Artificial Sequence
  Description of Artificial Sequence: Synthetic oligonucleotide
  Antisense strand to SEQ ID NO: 1579273
auguggguaacuuaucgag

SEQ ID NO: 1579275 - RNA, 19 nt, Artificial Sequence
  Description of Artificial Sequence: Synthetic oligonucleotide
  Sense strand starting at position 290 of SEQ ID NO: 1560143
ucgauaaguuacccacauc

SEQ ID NO: 1579276 - RNA, 19 nt, Artificial Sequence
  Description of Artificial Sequence: Synthetic oligonucleotide
  Antisense strand to SEQ ID NO: 1579275
gauguggguaacuuaucga

SEQ ID NO: 1579277 - RNA, 19 nt, Artificial Sequence
  Description of Artificial Sequence: Synthetic oligonucleotide
  Sense strand starting at position 306 of SEQ ID NO: 1560143
aucagauuguccuuccucu

SEQ ID NO: 1579278 - RNA, 19 nt, Artificial Sequence
  Description of Artificial Sequence: Synthetic oligonucleotide
  Antisense strand to SEQ ID NO: 1579277
agaggaaggacaaucugau

SEQ ID NO: 1579279 - RNA, 19 nt, Artificial Sequence
  Description of Artificial Sequence: Synthetic oligonucleotide
  Sense strand starting at position 310 of SEQ ID NO: 1560143
gauuguccuuccucugaag

SEQ ID NO: 1579280 - RNA, 19 nt, Artificial Sequence
  Description of Artificial Sequence: Synthetic oligonucleotide
  Antisense strand to SEQ ID NO: 1579279
cuucagaggaaggacaauc

SEQ ID NO: 1579281 - RNA, 19 nt, Artificial Sequence
  Description of Artificial Sequence: Synthetic oligonucleotide
  Sense strand starting at position 325 of SEQ ID NO: 1560143
gaagcaaaugucugcagga

SEQ ID NO: 1579282 - RNA, 19 nt, Artificial Sequence
  Description of Artificial Sequence: Synthetic oligonucleotide
  Antisense strand to SEQ ID NO: 1579281
uccugcagacauuugcuuc

SEQ ID NO: 1579283 - RNA, 19 nt, Artificial Sequence
  Description of Artificial Sequence: Synthetic oligonucleotide
  Sense strand starting at position 326 of SEQ ID NO: 1560143
aagcaaaugucugcaggau

SEQ ID NO: 1579284 - RNA, 19 nt, Artificial Sequence
  Description of Artificial Sequence: Synthetic oligonucleotide
  Antisense strand to SEQ ID NO: 1579283
auccugcagacauuugcuu

SEQ ID NO: 1579285 - RNA, 19 nt, Artificial Sequence
  Description of Artificial Sequence: Synthetic oligonucleotide
  Sense strand starting at position 327 of SEQ ID NO: 1560143
agcaaaugucugcaggauc

SEQ ID NO: 1579286 - RNA, 19 nt, Artificial Sequence
  Description of Artificial Sequence: Synthetic oligonucleotide
  Antisense strand to SEQ ID NO: 1579285
gauccugcagacauuugcu

SEQ ID NO: 1579287 - RNA, 19 nt, Artificial Sequence
  Description of Artificial Sequence: Synthetic oligonucleotide
  Sense strand starting at position 355 of SEQ ID NO: 1560143
gaguaagacauucgguauu

SEQ ID NO: 1579288 - RNA, 19 nt, Artificial Sequence
  Description of Artificial Sequence: Synthetic oligonucleotide
  Antisense strand to SEQ ID NO: 1579287
aauaccgaaugucuuacuc

SEQ ID NO: 1579289 - RNA, 19 nt, Artificial Sequence
  Description of Artificial Sequence: Synthetic oligonucleotide
  Sense strand starting at position 389 of SEQ ID NO: 1560143
uaguguguccugcacuaga

SEQ ID NO: 1579290 - RNA, 19 nt, Artificial Sequence
  Description of Artificial Sequence: Synthetic oligonucleotide
  Antisense strand to SEQ ID NO: 1579289
ucuagugcaggacacacua

SEQ ID NO: 1579291 - RNA, 19 nt, Artificial Sequence
  Description of Artificial Sequence: Synthetic oligonucleotide
  Sense strand starting at position 400 of SEQ ID NO: 1560143
gcacuagaugcucaaaccu

SEQ ID NO: 1579292 - RNA, 19 nt, Artificial Sequence
  Description of Artificial Sequence: Synthetic oligonucleotide
  Antisense strand to SEQ ID NO: 1579291
agguuugagcaucuagugc

SEQ ID NO: 1579293 - RNA, 19 nt, Artificial Sequence
  Description of Artificial Sequence: Synthetic oligonucleotide
  Sense strand starting at position 470 of SEQ ID NO: 1560143
aucccaugugugggaagua

SEQ ID NO: 1579294 - RNA, 19 nt, Artificial Sequence
  Description of Artificial Sequence: Synthetic oligonucleotide
  Antisense strand to SEQ ID NO: 1579293
uacuucccacacaugggau

SEQ ID NO: 1579295 - RNA, 19 nt, Artificial Sequence
  Description of Artificial Sequence: Synthetic oligonucleotide
  Sense strand starting at position 520 of SEQ ID NO: 1560143
ggaaauacucacgguauac

SEQ ID NO: 1579296 - RNA, 19 nt, Artificial Sequence
  Description of Artificial Sequence: Synthetic oligonucleotide
  Antisense strand to SEQ ID NO: 1579295
guauaccgugaguauuucc

SEQ ID NO: 1579297 - RNA, 19 nt, Artificial Sequence
  Description of Artificial Sequence: Synthetic oligonucleotide
  Sense strand starting at position 583 of SEQ ID NO: 1560143
ugacuuguaggguguagaa

SEQ ID NO: 1579298 - RNA, 19 nt, Artificial Sequence
  Description of Artificial Sequence: Synthetic oligonucleotide
  Antisense strand to SEQ ID NO: 1579297
uucuacacccuacaaguca

SEQ ID NO: 1579299 - RNA, 19 nt, Artificial Sequence
  Description of Artificial Sequence: Synthetic oligonucleotide
  Sense strand starting at position 596 of SEQ ID NO: 1560143
guagaauccugugucauuc

SEQ ID NO: 1579300 - RNA, 19 nt, Artificial Sequence
  Description of Artificial Sequence: Synthetic oligonucleotide
  Antisense strand to SEQ ID NO: 1579299
gaaugacacaggauucuac

SEQ ID NO: 1579301 - RNA, 19 nt, Artificial Sequence
  Description of Artificial Sequence: Synthetic oligonucleotide
  Sense strand starting at position 699 of SEQ ID NO: 1560143
guuccuauugcauauccua

SEQ ID NO: 1579302 - RNA, 19 nt, Artificial Sequence
  Description of Artificial Sequence: Synthetic oligonucleotide
  Antisense strand to SEQ ID NO: 1579301
uaggauaugcaauaggaac

SEQ ID NO: 1579303 - RNA, 19 nt, Artificial Sequence
  Description of Artificial Sequence: Synthetic oligonucleotide
  Sense strand starting at position 863 of SEQ ID NO: 1560143
gggcggguuccagaagguu

SEQ ID NO: 1579304 - RNA, 19 nt, Artificial Sequence
  Description of Artificial Sequence: Synthetic oligonucleotide
  Antisense strand to SEQ ID NO: 1579303
aaccuucuggaacccgccc

SEQ ID NO: 1579305 - RNA, 19 nt, Artificial Sequence
  Description of Artificial Sequence: Synthetic oligonucleotide
  Sense strand starting at position 869 of SEQ ID NO: 1560143
guuccagaagguuagaagu

SEQ ID NO: 1579306 - RNA, 19 nt, Artificial Sequence
  Description of Artificial Sequence: Synthetic oligonucleotide
  Antisense strand to SEQ ID NO: 1579305
acuucuaaccuucuggaac

SEQ ID NO: 1579307 - RNA, 19 nt, Artificial Sequence
  Description of Artificial Sequence: Synthetic oligonucleotide
  Sense strand starting at position 925 of SEQ ID NO: 1560143
ggaccuaugcauuagggua

SEQ ID NO: 1579308 - RNA, 19 nt, Artificial Sequence
  Description of Artificial Sequence: Synthetic oligonucleotide
  Antisense strand to SEQ ID NO: 1579307
uacccuaaugcauaggucc

SEQ ID NO: 1579309 - RNA, 19 nt, Artificial Sequence
  Description of Artificial Sequence: Synthetic oligonucleotide
  Sense strand starting at position 1169 of SEQ ID NO: 1560143
cagggugcucuugggagau

SEQ ID NO: 1579310 - RNA, 19 nt, Artificial Sequence
  Description of Artificial Sequence: Synthetic oligonucleotide
  Antisense strand to SEQ ID NO: 1579309
aucucccaagagcacccug

SEQ ID NO: 1579311 - RNA, 19 nt, Artificial Sequence
  Description of Artificial Sequence: Synthetic oligonucleotide
  Sense strand starting at position 1181 of SEQ ID NO: 1560143
gggagauccuuucccugac

SEQ ID NO: 1579312 - RNA, 19 nt, Artificial Sequence
  Description of Artificial Sequence: Synthetic oligonucleotide
  Antisense strand to SEQ ID NO: 1579311
gucagggaaaggaucuccc

SEQ ID NO: 1579313 - RNA, 19 nt, Artificial Sequence
  Description of Artificial Sequence: Synthetic oligonucleotide
  Sense strand starting at position 1182 of SEQ ID NO: 1560143
ggagauccuuucccugaca

SEQ ID NO: 1579314 - RNA, 19 nt, Artificial Sequence
  Description of Artificial Sequence: Synthetic oligonucleotide
  Antisense strand to SEQ ID NO: 1579313
ugucagggaaaggaucucc

SEQ ID NO: 1579315 - RNA, 19 nt, Artificial Sequence
  Description of Artificial Sequence: Synthetic oligonucleotide
  Sense strand starting at position 1206 of SEQ ID NO: 1560143
ccuagagacccuggguauu

SEQ ID NO: 1579316 - RNA, 19 nt, Artificial Sequence
  Description of Artificial Sequence: Synthetic oligonucleotide
  Antisense strand to SEQ ID NO: 1579315
aauacccagggucucuagg

SEQ ID NO: 1579317 - RNA, 19 nt, Artificial Sequence
  Description of Artificial Sequence: Synthetic oligonucleotide
  Sense strand starting at position 1395 of SEQ ID NO: 1560143
gacuccuguggaugaguua

SEQ ID NO: 1579318 - RNA, 19 nt, Artificial Sequence
  Description of Artificial Sequence: Synthetic oligonucleotide
  Antisense strand to SEQ ID NO: 1579317
uaacucauccacaggaguc

SEQ ID NO: 1579319 - RNA, 19 nt, Artificial Sequence
  Description of Artificial Sequence: Synthetic oligonucleotide
  Sense strand starting at position 1404 of SEQ ID NO: 1560143
ggaugaguuagugagcauu

SEQ ID NO: 1579320 - RNA, 19 nt, Artificial Sequence
  Description of Artificial Sequence: Synthetic oligonucleotide
  Antisense strand to SEQ ID NO: 1579319
aaugcucacuaacucaucc

SEQ ID NO: 1579321 - RNA, 19 nt, Artificial Sequence
  Description of Artificial Sequence: Synthetic oligonucleotide
  Sense strand starting at position 1516 of SEQ ID NO: 1560143
aauugucacgcugacuuaa

SEQ ID NO: 1579322 - RNA, 19 nt, Artificial Sequence
  Description of Artificial Sequence: Synthetic oligonucleotide
  Antisense strand to SEQ ID NO: 1579321
uuaagucagcgugacaauu

SEQ ID NO: 1579323 - RNA, 19 nt, Artificial Sequence
  Description of Artificial Sequence: Synthetic oligonucleotide
  Sense strand starting at position 1564 of SEQ ID NO: 1560143
uuuauugcucauugaugau

SEQ ID NO: 1579324 - RNA, 19 nt, Artificial Sequence
  Description of Artificial Sequence: Synthetic oligonucleotide
  Antisense strand to SEQ ID NO: 1579323
aucaucaaugagcaauaaa

SEQ ID NO: 1579325 - RNA, 19 nt, Artificial Sequence
  Description of Artificial Sequence: Synthetic oligonucleotide
  Sense strand starting at position 1884 of SEQ ID NO: 1560143
ugucuucaccuguggagga

SEQ ID NO: 1579326 - RNA, 19 nt, Artificial Sequence
  Description of Artificial Sequence: Synthetic oligonucleotide
  Antisense strand to SEQ ID NO: 1579325
uccuccacaggugaagaca

SEQ ID NO: 1579327 - RNA, 19 nt, Artificial Sequence
  Description of Artificial Sequence: Synthetic oligonucleotide
  Sense strand starting at position 1990 of SEQ ID NO: 1560143
cccagagcuuugucugauc

SEQ ID NO: 1579328 - RNA, 19 nt, Artificial Sequence
  Description of Artificial Sequence: Synthetic oligonucleotide
  Antisense strand to SEQ ID NO: 1579327
gaucagacaaagcucuggg

SEQ ID NO: 1579329 - RNA, 19 nt, Artificial Sequence
  Description of Artificial Sequence: Synthetic oligonucleotide
  Sense strand starting at position 1992 of SEQ ID NO: 1560143
cagagcuuugucugaucau

SEQ ID NO: 1579330 - RNA, 19 nt, Artificial Sequence
  Description of Artificial Sequence: Synthetic oligonucleotide
  Antisense strand to SEQ ID NO: 1579329
augaucagacaaagcucug

SEQ ID NO: 1579331 - RNA, 19 nt, Artificial Sequence
  Description of Artificial Sequence: Synthetic oligonucleotide
  Sense strand starting at position 2103 of SEQ ID NO: 1560143
uuugguuucccagaccaca

SEQ ID NO: 1579332 - RNA, 19 nt, Artificial Sequence
  Description of Artificial Sequence: Synthetic oligonucleotide
  Antisense strand to SEQ ID NO: 1579331
uguggucugggaaaccaaa

SEQ ID NO: 1579333 - RNA, 19 nt, Artificial Sequence
  Description of Artificial Sequence: Synthetic oligonucleotide
  Sense strand starting at position 2242 of SEQ ID NO: 1560143
ggcauauccaaauguggua

SEQ ID NO: 1579334 - RNA, 19 nt, Artificial Sequence
  Description of Artificial Sequence: Synthetic oligonucleotide
  Antisense strand to SEQ ID NO: 1579333
uaccacauuuggauaugcc

SEQ ID NO: 1579335 - RNA, 19 nt, Artificial Sequence
  Description of Artificial Sequence: Synthetic oligonucleotide
  Sense strand starting at position 2636 of SEQ ID NO: 1560143
ccauguucucccugaccau

SEQ ID NO: 1579336 - RNA, 19 nt, Artificial Sequence
  Description of Artificial Sequence: Synthetic oligonucleotide
  Antisense strand to SEQ ID NO: 1579335
auggucagggagaacaugg

SEQ ID NO: 1579337 - RNA, 19 nt, Artificial Sequence
  Description of Artificial Sequence: Synthetic oligonucleotide
  Sense strand starting at position 3137 of SEQ ID NO: 1560143
ggacgugaguuguccagag

SEQ ID NO: 1579338 - RNA, 19 nt, Artificial Sequence
  Description of Artificial Sequence: Synthetic oligonucleotide
  Antisense strand to SEQ ID NO: 1579337
cucuggacaacucacgucc

SEQ ID NO: 1579339 - RNA, 19 nt, Artificial Sequence
  Description of Artificial Sequence: Synthetic oligonucleotide
  Sense strand starting at position 3139 of SEQ ID NO: 1560143
acgugaguuguccagagga

SEQ ID NO: 1579340 - RNA, 19 nt, Artificial Sequence
  Description of Artificial Sequence: Synthetic oligonucleotide
  Antisense strand to SEQ ID NO: 1579339
uccucuggacaacucacgu

SEQ ID NO: 1579341 - RNA, 19 nt, Artificial Sequence
  Description of Artificial Sequence: Synthetic oligonucleotide
  Sense strand starting at position 3141 of SEQ ID NO: 1560143
gugaguuguccagaggacu

SEQ ID NO: 1579342 - RNA, 19 nt, Artificial Sequence
  Description of Artificial Sequence: Synthetic oligonucleotide
  Antisense strand to SEQ ID NO: 1579341
aguccucuggacaacucac

SEQ ID NO: 1579343 - RNA, 19 nt, Artificial Sequence
  Description of Artificial Sequence: Synthetic oligonucleotide
  Sense strand starting at position 3215 of SEQ ID NO: 1560143
ccaucugucccagagguuu

SEQ ID NO: 1579344 - RNA, 19 nt, Artificial Sequence
  Description of Artificial Sequence: Synthetic oligonucleotide
  Antisense strand to SEQ ID NO: 1579343
aaaccucugggacagaugg

SEQ ID NO: 1579345 - RNA, 19 nt, Artificial Sequence
  Description of Artificial Sequence: Synthetic oligonucleotide
  Sense strand starting at position 3479 of SEQ ID NO: 1560143
agauguguuaaaggauaua

SEQ ID NO: 1579346 - RNA, 19 nt, Artificial Sequence
  Description of Artificial Sequence: Synthetic oligonucleotide
  Antisense strand to SEQ ID NO: 1579345
uauauccuuuaacacaucu

SEQ ID NO: 1579347 - RNA, 19 nt, Artificial Sequence
  Description of Artificial Sequence: Synthetic oligonucleotide
  Sense strand starting at position 34 of SEQ ID NO: 1560144
ucggguaguucuuaccaac

SEQ ID NO: 1579348 - RNA, 19 nt, Artificial Sequence
  Description of Artificial Sequence: Synthetic oligonucleotide
  Antisense strand to SEQ ID NO: 1579347
guugguaagaacuacccga

SEQ ID NO: 1579349 - RNA, 19 nt, Artificial Sequence
  Description of Artificial Sequence: Synthetic oligonucleotide
  Sense strand starting at position 158 of SEQ ID NO: 1560144
agguguugucucagcggau

SEQ ID NO: 1579350 - RNA, 19 nt, Artificial Sequence
  Description of Artificial Sequence: Synthetic oligonucleotide
  Antisense strand to SEQ ID NO: 1579349
auccgcugagacaacaccu

SEQ ID NO: 1579351 - RNA, 19 nt, Artificial Sequence
  Description of Artificial Sequence: Synthetic oligonucleotide
  Sense strand starting at position 159 of SEQ ID NO: 1560144
gguguugucucagcggaug

SEQ ID NO: 1579352 - RNA, 19 nt, Artificial Sequence
  Description of Artificial Sequence: Synthetic oligonucleotide
  Antisense strand to SEQ ID NO: 1579351
cauccgcugagacaacacc

SEQ ID NO: 1579353 - RNA, 19 nt, Artificial Sequence
  Description of Artificial Sequence: Synthetic oligonucleotide
  Sense strand starting at position 258 of SEQ ID NO: 1560144
ccggguuccugcagggaga

SEQ ID NO: 1579354 - RNA, 19 nt, Artificial Sequence
  Description of Artificial Sequence: Synthetic oligonucleotide
  Antisense strand to SEQ ID NO: 1579353
ucucccugcaggaacccgg

SEQ ID NO: 1579355 - RNA, 19 nt, Artificial Sequence
  Description of Artificial Sequence: Synthetic oligonucleotide
  Sense strand starting at position 362 of SEQ ID NO: 1560144
cuuguuggcuuccugcaaa

SEQ ID NO: 1579356 - RNA, 19 nt, Artificial Sequence
  Description of Artificial Sequence: Synthetic oligonucleotide
  Antisense strand to SEQ ID NO: 1579355
uuugcaggaagccaacaag

SEQ ID NO: 1579357 - RNA, 19 nt, Artificial Sequence
  Description of Artificial Sequence: Synthetic oligonucleotide
  Sense strand starting at position 446 of SEQ ID NO: 1560144
gggcguauucggaggcuuu

SEQ ID NO: 1579358 - RNA, 19 nt, Artificial Sequence
  Description of Artificial Sequence: Synthetic oligonucleotide
  Antisense strand to SEQ ID NO: 1579357
aaagccuccgaauacgccc

SEQ ID NO: 1579359 - RNA, 19 nt, Artificial Sequence
  Description of Artificial Sequence: Synthetic oligonucleotide
  Sense strand starting at position 522 of SEQ ID NO: 1560144
gggacagucccuuguugag

SEQ ID NO: 1579360 - RNA, 19 nt, Artificial Sequence
  Description of Artificial Sequence: Synthetic oligonucleotide
  Antisense strand to SEQ ID NO: 1579359
cucaacaagggacuguccc

SEQ ID NO: 1579361 - RNA, 19 nt, Artificial Sequence
  Description of Artificial Sequence: Synthetic oligonucleotide
  Sense strand starting at position 532 of SEQ ID NO: 1560144
cuuguugagucuccauuua

SEQ ID NO: 1579362 - RNA, 19 nt, Artificial Sequence
  Description of Artificial Sequence: Synthetic oligonucleotide
  Antisense strand to SEQ ID NO: 1579361
uaaauggagacucaacaag

SEQ ID NO: 1579363 - RNA, 19 nt, Artificial Sequence
  Description of Artificial Sequence: Synthetic oligonucleotide
  Sense strand starting at position 946 of SEQ ID NO: 1560144
ggugaaaccucguauguac

SEQ ID NO: 1579364 - RNA, 19 nt, Artificial Sequence
  Description of Artificial Sequence: Synthetic oligonucleotide
  Antisense strand to SEQ ID NO: 1579363
guacauacgagguuucacc

SEQ ID NO: 1579365 - RNA, 19 nt, Artificial Sequence
  Description of Artificial Sequence: Synthetic oligonucleotide
  Sense strand starting at position 948 of SEQ ID NO: 1560144
ugaaaccucguauguacua

SEQ ID NO: 1579366 - RNA, 19 nt, Artificial Sequence
  Description of Artificial Sequence: Synthetic oligonucleotide
  Antisense strand to SEQ ID NO: 1579365
uaguacauacgagguuuca

SEQ ID NO: 1579367 - RNA, 19 nt, Artificial Sequence
  Description of Artificial Sequence: Synthetic oligonucleotide
  Sense strand starting at position 949 of SEQ ID NO: 1560144
gaaaccucguauguacuaa

SEQ ID NO: 1579368 - RNA, 19 nt, Artificial Sequence
  Description of Artificial Sequence: Synthetic oligonucleotide
  Antisense strand to SEQ ID NO: 1579367
uuaguacauacgagguuuc

SEQ ID NO: 1579369 - RNA, 19 nt, Artificial Sequence
  Description of Artificial Sequence: Synthetic oligonucleotide
  Sense strand starting at position 1362 of SEQ ID NO: 1560144
agcaguuagugagaggcua

SEQ ID NO: 1579370 - RNA, 19 nt, Artificial Sequence
  Description of Artificial Sequence: Synthetic oligonucleotide
  Antisense strand to SEQ ID NO: 1579369
uagccucucacuaacugcu

SEQ ID NO: 1579371 - RNA, 19 nt, Artificial Sequence
  Description of Artificial Sequence: Synthetic oligonucleotide
  Sense strand starting at position 1376 of SEQ ID NO: 1560144
ggcuacaagucagggauuu

SEQ ID NO: 1579372 - RNA, 19 nt, Artificial Sequence
  Description of Artificial Sequence: Synthetic oligonucleotide
  Antisense strand to SEQ ID NO: 1579371
aaaucccugacuuguagcc

SEQ ID NO: 1579373 - RNA, 19 nt, Artificial Sequence
  Description of Artificial Sequence: Synthetic oligonucleotide
  Sense strand starting at position 1418 of SEQ ID NO: 1560144
gucugauugguaugccugu

SEQ ID NO: 1579374 - RNA, 19 nt, Artificial Sequence
  Description of Artificial Sequence: Synthetic oligonucleotide
  Antisense strand to SEQ ID NO: 1579373
acaggcauaccaaucagac

SEQ ID NO: 1579375 - RNA, 19 nt, Artificial Sequence
  Description of Artificial Sequence: Synthetic oligonucleotide
  Sense strand starting at position 1719 of SEQ ID NO: 1560144
aaguauaggcucuggacau

SEQ ID NO: 1579376 - RNA, 19 nt, Artificial Sequence
  Description of Artificial Sequence: Synthetic oligonucleotide
  Antisense strand to SEQ ID NO: 1579375
auguccagagccuauacuu

SEQ ID NO: 1579377 - RNA, 19 nt, Artificial Sequence
  Description of Artificial Sequence: Synthetic oligonucleotide
  Sense strand starting at position 1720 of SEQ ID NO: 1560144
aguauaggcucuggacaua

SEQ ID NO: 1579378 - RNA, 19 nt, Artificial Sequence
  Description of Artificial Sequence: Synthetic oligonucleotide
  Antisense strand to SEQ ID NO: 1579377
uauguccagagccuauacu

SEQ ID NO: 1579379 - RNA, 19 nt, Artificial Sequence
  Description of Artificial Sequence: Synthetic oligonucleotide
  Sense strand starting at position 1731 of SEQ ID NO: 1560144
uggacauaguuccacuguu

SEQ ID NO: 1579380 - RNA, 19 nt, Artificial Sequence
  Description of Artificial Sequence: Synthetic oligonucleotide
  Antisense strand to SEQ ID NO: 1579379
aacaguggaacuaugucca

SEQ ID NO: 1579381 - RNA, 19 nt, Artificial Sequence
  Description of Artificial Sequence: Synthetic oligonucleotide
  Sense strand starting at position 1861 of SEQ ID NO: 1560144
aguagauacacaugugaag

SEQ ID NO: 1579382 - RNA, 19 nt, Artificial Sequence
  Description of Artificial Sequence: Synthetic oligonucleotide
  Antisense strand to SEQ ID NO: 1579381
cuucacauguguaucuacu

SEQ ID NO: 1579383 - RNA, 19 nt, Artificial Sequence
  Description of Artificial Sequence: Synthetic oligonucleotide
  Sense strand starting at position 1868 of SEQ ID NO: 1560144
acacaugugaaguacagua

SEQ ID NO: 1579384 - RNA, 19 nt, Artificial Sequence
  Description of Artificial Sequence: Synthetic oligonucleotide
  Antisense strand to SEQ ID NO: 1579383
uacuguacuucacaugugu

SEQ ID NO: 1579385 - RNA, 19 nt, Artificial Sequence
  Description of Artificial Sequence: Synthetic oligonucleotide
  Sense strand starting at position 2006 of SEQ ID NO: 1560144
gcacaagacggaugaaauc

SEQ ID NO: 1579386 - RNA, 19 nt, Artificial Sequence
  Description of Artificial Sequence: Synthetic oligonucleotide
  Antisense strand to SEQ ID NO: 1579385
gauuucauccgucuugugc

SEQ ID NO: 1579387 - RNA, 19 nt, Artificial Sequence
  Description of Artificial Sequence: Synthetic oligonucleotide
  Sense strand starting at position 2038 of SEQ ID NO: 1560144
ggccgacauuugcggagua

SEQ ID NO: 1579388 - RNA, 19 nt, Artificial Sequence
  Description of Artificial Sequence: Synthetic oligonucleotide
  Antisense strand to SEQ ID NO: 1579387
uacuccgcaaaugucggcc

SEQ ID NO: 1579389 - RNA, 19 nt, Artificial Sequence
  Description of Artificial Sequence: Synthetic oligonucleotide
  Sense strand starting at position 2039 of SEQ ID NO: 1560144
gccgacauuugcggaguaa

SEQ ID NO: 1579390 - RNA, 19 nt, Artificial Sequence
  Description of Artificial Sequence: Synthetic oligonucleotide
  Antisense strand to SEQ ID NO: 1579389
uuacuccgcaaaugucggc

SEQ ID NO: 1579391 - RNA, 19 nt, Artificial Sequence
  Description of Artificial Sequence: Synthetic oligonucleotide
  Sense strand starting at position 2067 of SEQ ID NO: 1560144
agguaaauaucuuccacgu

SEQ ID NO: 1579392 - RNA, 19 nt, Artificial Sequence
  Description of Artificial Sequence: Synthetic oligonucleotide
  Antisense strand to SEQ ID NO: 1579391
acguggaagauauuuaccu

SEQ ID NO: 1579393 - RNA, 19 nt, Artificial Sequence
  Description of Artificial Sequence: Synthetic oligonucleotide
  Sense strand starting at position 2069 of SEQ ID NO: 1560144
guaaauaucuuccacguca

SEQ ID NO: 1579394 - RNA, 19 nt, Artificial Sequence
  Description of Artificial Sequence: Synthetic oligonucleotide
  Antisense strand to SEQ ID NO: 1579393
ugacguggaagauauuuac

SEQ ID NO: 1579395 - RNA, 19 nt, Artificial Sequence
  Description of Artificial Sequence: Synthetic oligonucleotide
  Sense strand starting at position 2076 of SEQ ID NO: 1560144
ucuuccacgucagauugaa

SEQ ID NO: 1579396 - RNA, 19 nt, Artificial Sequence
  Description of Artificial Sequence: Synthetic oligonucleotide
  Antisense strand to SEQ ID NO: 1579395
uucaaucugacguggaaga

SEQ ID NO: 1579397 - RNA, 19 nt, Artificial Sequence
  Description of Artificial Sequence: Synthetic oligonucleotide
  Sense strand starting at position 2251 of SEQ ID NO: 1560144
cugguuugcuacuuuaaau

SEQ ID NO: 1579398 - RNA, 19 nt, Artificial Sequence
  Description of Artificial Sequence: Synthetic oligonucleotide
  Antisense strand to SEQ ID NO: 1579397
auuuaaaguagcaaaccag

SEQ ID NO: 1579399 - RNA, 19 nt, Artificial Sequence
  Description of Artificial Sequence: Synthetic oligonucleotide
  Sense strand starting at position 2293 of SEQ ID NO: 1560144
gaaggugucucugagauga

SEQ ID NO: 1579400 - RNA, 19 nt, Artificial Sequence
  Description of Artificial Sequence: Synthetic oligonucleotide
  Antisense strand to SEQ ID NO: 1579399
ucaucucagagacaccuuc

SEQ ID NO: 1579401 - RNA, 19 nt, Artificial Sequence
  Description of Artificial Sequence: Synthetic oligonucleotide
  Sense strand starting at position 2295 of SEQ ID NO: 1560144
aggugucucugagaugaug

SEQ ID NO: 1579402 - RNA, 19 nt, Artificial Sequence
  Description of Artificial Sequence: Synthetic oligonucleotide
  Antisense strand to SEQ ID NO: 1579401
caucaucucagagacaccu

SEQ ID NO: 1579403 - RNA, 19 nt, Artificial Sequence
  Description of Artificial Sequence: Synthetic oligonucleotide
  Sense strand starting at position 2297 of SEQ ID NO: 1560144
gugucucugagaugaugcu

SEQ ID NO: 1579404 - RNA, 19 nt, Artificial Sequence
  Description of Artificial Sequence: Synthetic oligonucleotide
  Antisense strand to SEQ ID NO: 1579403
agcaucaucucagagacac

SEQ ID NO: 1579405 - RNA, 19 nt, Artificial Sequence
  Description of Artificial Sequence: Synthetic oligonucleotide
  Sense strand starting at position 2349 of SEQ ID NO: 1560144
ugcugauagcuguguucuu

SEQ ID NO: 1579406 - RNA, 19 nt, Artificial Sequence
  Description of Artificial Sequence: Synthetic oligonucleotide
  Antisense strand to SEQ ID NO: 1579405
aagaacacagcuaucagca

SEQ ID NO: 1579407 - RNA, 19 nt, Artificial Sequence
  Description of Artificial Sequence: Synthetic oligonucleotide
  Sense strand starting at position 2350 of SEQ ID NO: 1560144
gcugauagcuguguucuua

SEQ ID NO: 1579408 - RNA, 19 nt, Artificial Sequence
  Description of Artificial Sequence: Synthetic oligonucleotide
  Antisense strand to SEQ ID NO: 1579407
uaagaacacagcuaucagc

SEQ ID NO: 1579409 - RNA, 19 nt, Artificial Sequence
  Description of Artificial Sequence: Synthetic oligonucleotide
  Sense strand starting at position 2360 of SEQ ID NO: 1560144
guguucuuaugaccugcau

SEQ ID NO: 1579410 - RNA, 19 nt, Artificial Sequence
  Description of Artificial Sequence: Synthetic oligonucleotide
  Antisense strand to SEQ ID NO: 1579409
augcaggucauaagaacac

SEQ ID NO: 1579411 - RNA, 19 nt, Artificial Sequence
  Description of Artificial Sequence: Synthetic oligonucleotide
  Sense strand starting at position 2788 of SEQ ID NO: 1560144
ccaccucaucgcugggaaa

SEQ ID NO: 1579412 - RNA, 19 nt, Artificial Sequence
  Description of Artificial Sequence: Synthetic oligonucleotide
  Antisense strand to SEQ ID NO: 1579411
uuucccagcgaugaggugg

SEQ ID NO: 1579413 - RNA, 19 nt, Artificial Sequence
  Description of Artificial Sequence: Synthetic oligonucleotide
  Sense strand starting at position 2867 of SEQ ID NO: 1560144
ggcaacugacucuacguau

SEQ ID NO: 1579414 - RNA, 19 nt, Artificial Sequence
  Description of Artificial Sequence: Synthetic oligonucleotide
  Antisense strand to SEQ ID NO: 1579413
auacguagagucaguugcc

SEQ ID NO: 1579415 - RNA, 19 nt, Artificial Sequence
  Description of Artificial Sequence: Synthetic oligonucleotide
  Sense strand starting at position 3332 of SEQ ID NO: 1560144
ccuggaauucccugucuca

SEQ ID NO: 1579416 - RNA, 19 nt, Artificial Sequence
  Description of Artificial Sequence: Synthetic oligonucleotide
  Antisense strand to SEQ ID NO: 1579415
ugagacagggaauuccagg

SEQ ID NO: 1579417 - RNA, 19 nt, Artificial Sequence
  Description of Artificial Sequence: Synthetic oligonucleotide
  Sense strand starting at position 3826 of SEQ ID NO: 1560144
ggguguucaugacauugac

SEQ ID NO: 1579418 - RNA, 19 nt, Artificial Sequence
  Description of Artificial Sequence: Synthetic oligonucleotide
  Antisense strand to SEQ ID NO: 1579417
gucaaugucaugaacaccc

SEQ ID NO: 1579419 - RNA, 19 nt, Artificial Sequence
  Description of Artificial Sequence: Synthetic oligonucleotide
  Sense strand starting at position 3838 of SEQ ID NO: 1560144
cauugacuucccugggacu

SEQ ID NO: 1579420 - RNA, 19 nt, Artificial Sequence
  Description of Artificial Sequence: Synthetic oligonucleotide
  Antisense strand to SEQ ID NO: 1579419
agucccagggaagucaaug

SEQ ID NO: 1579421 - RNA, 19 nt, Artificial Sequence
  Description of Artificial Sequence: Synthetic oligonucleotide
  Sense strand starting at position 3849 of SEQ ID NO: 1560144
cugggacucuucugaggau

SEQ ID NO: 1579422 - RNA, 19 nt, Artificial Sequence
  Description of Artificial Sequence: Synthetic oligonucleotide
  Antisense strand to SEQ ID NO: 1579421
auccucagaagagucccag

SEQ ID NO: 1579423 - RNA, 19 nt, Artificial Sequence
  Description of Artificial Sequence: Synthetic oligonucleotide
  Sense strand starting at position 3852 of SEQ ID NO: 1560144
ggacucuucugaggaucaa

SEQ ID NO: 1579424 - RNA, 19 nt, Artificial Sequence
  Description of Artificial Sequence: Synthetic oligonucleotide
  Antisense strand to SEQ ID NO: 1579423
uugauccucagaagagucc

SEQ ID NO: 1579425 - RNA, 19 nt, Artificial Sequence
  Description of Artificial Sequence: Synthetic oligonucleotide
  Sense strand starting at position 3953 of SEQ ID NO: 1560144
gacaaauguuuauggagca

SEQ ID NO: 1579426 - RNA, 19 nt, Artificial Sequence
  Description of Artificial Sequence: Synthetic oligonucleotide
  Antisense strand to SEQ ID NO: 1579425
ugcuccauaaacauuuguc

SEQ ID NO: 1579427 - RNA, 19 nt, Artificial Sequence
  Description of Artificial Sequence: Synthetic oligonucleotide
  Sense strand starting at position 396 of SEQ ID NO: 1560145
cgggaacgauucccagaga

SEQ ID NO: 1579428 - RNA, 19 nt, Artificial Sequence
  Description of Artificial Sequence: Synthetic oligonucleotide
  Antisense strand to SEQ ID NO: 1579427
ucucugggaaucguucccg

SEQ ID NO: 1579429 - RNA, 19 nt, Artificial Sequence
  Description of Artificial Sequence: Synthetic oligonucleotide
  Sense strand starting at position 567 of SEQ ID NO: 1560145
aucacaguuacguaaaugu

SEQ ID NO: 1579430 - RNA, 19 nt, Artificial Sequence
  Description of Artificial Sequence: Synthetic oligonucleotide
  Antisense strand to SEQ ID NO: 1579429
acauuuacguaacugugau

SEQ ID NO: 1579431 - RNA, 19 nt, Artificial Sequence
  Description of Artificial Sequence: Synthetic oligonucleotide
  Sense strand starting at position 665 of SEQ ID NO: 1560145
aaacucuuagguggguaua

SEQ ID NO: 1579432 - RNA, 19 nt, Artificial Sequence
  Description of Artificial Sequence: Synthetic oligonucleotide
  Antisense strand to SEQ ID NO: 1579431
uauacccaccuaagaguuu

SEQ ID NO: 1579433 - RNA, 19 nt, Artificial Sequence
  Description of Artificial Sequence: Synthetic oligonucleotide
  Sense strand starting at position 666 of SEQ ID NO: 1560145
aacucuuagguggguauau

SEQ ID NO: 1579434 - RNA, 19 nt, Artificial Sequence
  Description of Artificial Sequence: Synthetic oligonucleotide
  Antisense strand to SEQ ID NO: 1579433
auauacccaccuaagaguu

SEQ ID NO: 1579435 - RNA, 19 nt, Artificial Sequence
  Description of Artificial Sequence: Synthetic oligonucleotide
  Sense strand starting at position 668 of SEQ ID NO: 1560145
cucuuagguggguauauga

SEQ ID NO: 1579436 - RNA, 19 nt, Artificial Sequence
  Description of Artificial Sequence: Synthetic oligonucleotide
  Antisense strand to SEQ ID NO: 1579435
ucauauacccaccuaagag

SEQ ID NO: 1579437 - RNA, 19 nt, Artificial Sequence
  Description of Artificial Sequence: Synthetic oligonucleotide
  Sense strand starting at position 707 of SEQ ID NO: 1560145
guguuugugacucaucgag

SEQ ID NO: 1579438 - RNA, 19 nt, Artificial Sequence
  Description of Artificial Sequence: Synthetic oligonucleotide
  Antisense strand to SEQ ID NO: 1579437
cucgaugagucacaaacac

SEQ ID NO: 1579439 - RNA, 19 nt, Artificial Sequence
  Description of Artificial Sequence: Synthetic oligonucleotide
  Sense strand starting at position 790 of SEQ ID NO: 1560145
guaguuauuuaucagaaga

SEQ ID NO: 1579440 - RNA, 19 nt, Artificial Sequence
  Description of Artificial Sequence: Synthetic oligonucleotide
  Antisense strand to SEQ ID NO: 1579439
ucuucugauaaauaacuac

SEQ ID NO: 1579441 - RNA, 19 nt, Artificial Sequence
  Description of Artificial Sequence: Synthetic oligonucleotide
  Sense strand starting at position 792 of SEQ ID NO: 1560145
aguuauuuaucagaagaca

SEQ ID NO: 1579442 - RNA, 19 nt, Artificial Sequence
  Description of Artificial Sequence: Synthetic oligonucleotide
  Antisense strand to SEQ ID NO: 1579441
ugucuucugauaaauaacu

SEQ ID NO: 1579443 - RNA, 19 nt, Artificial Sequence
  Description of Artificial Sequence: Synthetic oligonucleotide
  Sense strand starting at position 1085 of SEQ ID NO: 1560145
cucagagucugggcacaua

SEQ ID NO: 1579444 - RNA, 19 nt, Artificial Sequence
  Description of Artificial Sequence: Synthetic oligonucleotide
  Antisense strand to SEQ ID NO: 1579443
uaugugcccagacucugag

SEQ ID NO: 1579445 - RNA, 19 nt, Artificial Sequence
  Description of Artificial Sequence: Synthetic oligonucleotide
  Sense strand starting at position 1211 of SEQ ID NO: 1560145
caguaaugauugucugggu

SEQ ID NO: 1579446 - RNA, 19 nt, Artificial Sequence
  Description of Artificial Sequence: Synthetic oligonucleotide
  Antisense strand to SEQ ID NO: 1579445
acccagacaaucauuacug

SEQ ID NO: 1579447 - RNA, 19 nt, Artificial Sequence
  Description of Artificial Sequence: Synthetic oligonucleotide
  Sense strand starting at position 1215 of SEQ ID NO: 1560145
aaugauugucugggugaga

SEQ ID NO: 1579448 - RNA, 19 nt, Artificial Sequence
  Description of Artificial Sequence: Synthetic oligonucleotide
  Antisense strand to SEQ ID NO: 1579447
ucucacccagacaaucauu

SEQ ID NO: 1579449 - RNA, 19 nt, Artificial Sequence
  Description of Artificial Sequence: Synthetic oligonucleotide
  Sense strand starting at position 1216 of SEQ ID NO: 1560145
augauugucugggugagaa

SEQ ID NO: 1579450 - RNA, 19 nt, Artificial Sequence
  Description of Artificial Sequence: Synthetic oligonucleotide
  Antisense strand to SEQ ID NO: 1579449
uucucacccagacaaucau

SEQ ID NO: 1579451 - RNA, 19 nt, Artificial Sequence
  Description of Artificial Sequence: Synthetic oligonucleotide
  Sense strand starting at position 1431 of SEQ ID NO: 1560145
ggaccuguucaaggacagu

SEQ ID NO: 1579452 - RNA, 19 nt, Artificial Sequence
  Description of Artificial Sequence: Synthetic oligonucleotide
  Antisense strand to SEQ ID NO: 1579451
acuguccuugaacaggucc

SEQ ID NO: 1579453 - RNA, 19 nt, Artificial Sequence
  Description of Artificial Sequence: Synthetic oligonucleotide
  Sense strand starting at position 1523 of SEQ ID NO: 1560145
ggaaucuggccugagaggu

SEQ ID NO: 1579454 - RNA, 19 nt, Artificial Sequence
  Description of Artificial Sequence: Synthetic oligonucleotide
  Antisense strand to SEQ ID NO: 1579453
accucucaggccagauucc

SEQ ID NO: 1579455 - RNA, 19 nt, Artificial Sequence
  Description of Artificial Sequence: Synthetic oligonucleotide
  Sense strand starting at position 1615 of SEQ ID NO: 1560145
uccugauuccugggcguag

SEQ ID NO: 1579456 - RNA, 19 nt, Artificial Sequence
  Description of Artificial Sequence: Synthetic oligonucleotide
  Antisense strand to SEQ ID NO: 1579455
cuacgcccaggaaucagga

SEQ ID NO: 1579457 - RNA, 19 nt, Artificial Sequence
  Description of Artificial Sequence: Synthetic oligonucleotide
  Sense strand starting at position 1616 of SEQ ID NO: 1560145
ccugauuccugggcguaga

SEQ ID NO: 1579458 - RNA, 19 nt, Artificial Sequence
  Description of Artificial Sequence: Synthetic oligonucleotide
  Antisense strand to SEQ ID NO: 1579457
ucuacgcccaggaaucagg

SEQ ID NO: 1579459 - RNA, 19 nt, Artificial Sequence
  Description of Artificial Sequence: Synthetic oligonucleotide
  Sense strand starting at position 1617 of SEQ ID NO: 1560145
cugauuccugggcguagau

SEQ ID NO: 1579460 - RNA, 19 nt, Artificial Sequence
  Description of Artificial Sequence: Synthetic oligonucleotide
  Antisense strand to SEQ ID NO: 1579459
aucuacgcccaggaaucag

SEQ ID NO: 1579461 - RNA, 19 nt, Artificial Sequence
  Description of Artificial Sequence: Synthetic oligonucleotide
  Sense strand starting at position 1770 of SEQ ID NO: 1560145
gugugagcucaugaaaguu

SEQ ID NO: 1579462 - RNA, 19 nt, Artificial Sequence
  Description of Artificial Sequence: Synthetic oligonucleotide
  Antisense strand to SEQ ID NO: 1579461
aacuuucaugagcucacac

SEQ ID NO: 1579463 - RNA, 19 nt, Artificial Sequence
  Description of Artificial Sequence: Synthetic oligonucleotide
  Sense strand starting at position 1941 of SEQ ID NO: 1560145
aucucuuacccaugaggaa

SEQ ID NO: 1579464 - RNA, 19 nt, Artificial Sequence
  Description of Artificial Sequence: Synthetic oligonucleotide
  Antisense strand to SEQ ID NO: 1579463
uuccucauggguaagagau

SEQ ID NO: 1579465 - RNA, 19 nt, Artificial Sequence
  Description of Artificial Sequence: Synthetic oligonucleotide
  Sense strand starting at position 2339 of SEQ ID NO: 1560145
agccaagugccucaaagau

SEQ ID NO: 1579466 - RNA, 19 nt, Artificial Sequence
  Description of Artificial Sequence: Synthetic oligonucleotide
  Antisense strand to SEQ ID NO: 1579465
aucuuugaggcacuuggcu

SEQ ID NO: 1579467 - RNA, 19 nt, Artificial Sequence
  Description of Artificial Sequence: Synthetic oligonucleotide
  Sense strand starting at position 2818 of SEQ ID NO: 1560145
ucccaugaccauugugaau

SEQ ID NO: 1579468 - RNA, 19 nt, Artificial Sequence
  Description of Artificial Sequence: Synthetic oligonucleotide
  Antisense strand to SEQ ID NO: 1579467
auucacaauggucauggga

SEQ ID NO: 1579469 - RNA, 19 nt, Artificial Sequence
  Description of Artificial Sequence: Synthetic oligonucleotide
  Sense strand starting at position 2843 of SEQ ID NO: 1560145
agggaaugcucuucuagac

SEQ ID NO: 1579470 - RNA, 19 nt, Artificial Sequence
  Description of Artificial Sequence: Synthetic oligonucleotide
  Antisense strand to SEQ ID NO: 1579469
gucuagaagagcauucccu

SEQ ID NO: 1579471 - RNA, 19 nt, Artificial Sequence
  Description of Artificial Sequence: Synthetic oligonucleotide
  Sense strand starting at position 2881 of SEQ ID NO: 1560145
accagaucccuuugugaaa

SEQ ID NO: 1579472 - RNA, 19 nt, Artificial Sequence
  Description of Artificial Sequence: Synthetic oligonucleotide
  Antisense strand to SEQ ID NO: 1579471
uuucacaaagggaucuggu

SEQ ID NO: 1579473 - RNA, 19 nt, Artificial Sequence
  Description of Artificial Sequence: Synthetic oligonucleotide
  Sense strand starting at position 2882 of SEQ ID NO: 1560145
ccagaucccuuugugaaag

SEQ ID NO: 1579474 - RNA, 19 nt, Artificial Sequence
  Description of Artificial Sequence: Synthetic oligonucleotide
  Antisense strand to SEQ ID NO: 1579473
cuuucacaaagggaucugg

SEQ ID NO: 1579475 - RNA, 19 nt, Artificial Sequence
  Description of Artificial Sequence: Synthetic oligonucleotide
  Sense strand starting at position 2892 of SEQ ID NO: 1560145
uugugaaagugcucacaag

SEQ ID NO: 1579476 - RNA, 19 nt, Artificial Sequence
  Description of Artificial Sequence: Synthetic oligonucleotide
  Antisense strand to SEQ ID NO: 1579475
cuugugagcacuuucacaa

SEQ ID NO: 1579477 - RNA, 19 nt, Artificial Sequence
  Description of Artificial Sequence: Synthetic oligonucleotide
  Sense strand starting at position 2955 of SEQ ID NO: 1560145
agggcucucugacaacaaa

SEQ ID NO: 1579478 - RNA, 19 nt, Artificial Sequence
  Description of Artificial Sequence: Synthetic oligonucleotide
  Antisense strand to SEQ ID NO: 1579477
uuuguugucagagagcccu

SEQ ID NO: 1579479 - RNA, 19 nt, Artificial Sequence
  Description of Artificial Sequence: Synthetic oligonucleotide
  Sense strand starting at position 3115 of SEQ ID NO: 1560145
ccuuguagccuaggguaau

SEQ ID NO: 1579480 - RNA, 19 nt, Artificial Sequence
  Description of Artificial Sequence: Synthetic oligonucleotide
  Antisense strand to SEQ ID NO: 1579479
auuacccuaggcuacaagg

SEQ ID NO: 1579481 - RNA, 19 nt, Artificial Sequence
  Description of Artificial Sequence: Synthetic oligonucleotide
  Sense strand starting at position 3127 of SEQ ID NO: 1560145
ggguaauuaucucaaacca

SEQ ID NO: 1579482 - RNA, 19 nt, Artificial Sequence
  Description of Artificial Sequence: Synthetic oligonucleotide
  Antisense strand to SEQ ID NO: 1579481
ugguuugagauaauuaccc

SEQ ID NO: 1579483 - RNA, 19 nt, Artificial Sequence
  Description of Artificial Sequence: Synthetic oligonucleotide
  Sense strand starting at position 3230 of SEQ ID NO: 1560145
ccagauucccauugcaaug

SEQ ID NO: 1579484 - RNA, 19 nt, Artificial Sequence
  Description of Artificial Sequence: Synthetic oligonucleotide
  Antisense strand to SEQ ID NO: 1579483
cauugcaaugggaaucugg

SEQ ID NO: 1579485 - RNA, 19 nt, Artificial Sequence
  Description of Artificial Sequence: Synthetic oligonucleotide
  Sense strand starting at position 3328 of SEQ ID NO: 1560145
gggucaggcuguuucuaaa

SEQ ID NO: 1579486 - RNA, 19 nt, Artificial Sequence
  Description of Artificial Sequence: Synthetic oligonucleotide
  Antisense strand to SEQ ID NO: 1579485
uuuagaaacagccugaccc

SEQ ID NO: 1579487 - RNA, 19 nt, Artificial Sequence
  Description of Artificial Sequence: Synthetic oligonucleotide
  Sense strand starting at position 3365 of SEQ ID NO: 1560145
gggaguugugcacagaagu

SEQ ID NO: 1579488 - RNA, 19 nt, Artificial Sequence
  Description of Artificial Sequence: Synthetic oligonucleotide
  Antisense strand to SEQ ID NO: 1579487
acuucugugcacaacuccc

SEQ ID NO: 1579489 - RNA, 19 nt, Artificial Sequence
  Description of Artificial Sequence: Synthetic oligonucleotide
  Sense strand starting at position 3532 of SEQ ID NO: 1560145
uugacaaggucuuucuaac

SEQ ID NO: 1579490 - RNA, 19 nt, Artificial Sequence
  Description of Artificial Sequence: Synthetic oligonucleotide
  Antisense strand to SEQ ID NO: 1579489
guuagaaagaccuugucaa

SEQ ID NO: 1579491 - RNA, 19 nt, Artificial Sequence
  Description of Artificial Sequence: Synthetic oligonucleotide
  Sense strand starting at position 3551 of SEQ ID NO: 1560145
cguacuugggaauguguuu

SEQ ID NO: 1579492 - RNA, 19 nt, Artificial Sequence
  Description of Artificial Sequence: Synthetic oligonucleotide
  Antisense strand to SEQ ID NO: 1579491
aaacacauucccaaguacg

SEQ ID NO: 1579493 - RNA, 19 nt, Artificial Sequence
  Description of Artificial Sequence: Synthetic oligonucleotide
  Sense strand starting at position 3556 of SEQ ID NO: 1560145
uugggaauguguuugucuu

SEQ ID NO: 1579494 - RNA, 19 nt, Artificial Sequence
  Description of Artificial Sequence: Synthetic oligonucleotide
  Antisense strand to SEQ ID NO: 1579493
aagacaaacacauucccaa

SEQ ID NO: 1579495 - RNA, 19 nt, Artificial Sequence
  Description of Artificial Sequence: Synthetic oligonucleotide
  Sense strand starting at position 3557 of SEQ ID NO: 1560145
ugggaauguguuugucuuu

SEQ ID NO: 1579496 - RNA, 19 nt, Artificial Sequence
  Description of Artificial Sequence: Synthetic oligonucleotide
  Antisense strand to SEQ ID NO: 1579495
aaagacaaacacauuccca

SEQ ID NO: 1579497 - RNA, 19 nt, Artificial Sequence
  Description of Artificial Sequence: Synthetic oligonucleotide
  Sense strand starting at position 3822 of SEQ ID NO: 1560145
ucaguuuggguauguuaua

SEQ ID NO: 1579498 - RNA, 19 nt, Artificial Sequence
  Description of Artificial Sequence: Synthetic oligonucleotide
  Antisense strand to SEQ ID NO: 1579497
uauaacauacccaaacuga

SEQ ID NO: 1579499 - RNA, 19 nt, Artificial Sequence
  Description of Artificial Sequence: Synthetic oligonucleotide
  Sense strand starting at position 3831 of SEQ ID NO: 1560145
guauguuauagcuggcaua

SEQ ID NO: 1579500 - RNA, 19 nt, Artificial Sequence
  Description of Artificial Sequence: Synthetic oligonucleotide
  Antisense strand to SEQ ID NO: 1579499
uaugccagcuauaacauac

SEQ ID NO: 1579501 - RNA, 19 nt, Artificial Sequence
  Description of Artificial Sequence: Synthetic oligonucleotide
  Sense strand starting at position 3877 of SEQ ID NO: 1560145
agagcagaauuauaucauu

SEQ ID NO: 1579502 - RNA, 19 nt, Artificial Sequence
  Description of Artificial Sequence: Synthetic oligonucleotide
  Antisense strand to SEQ ID NO: 1579501
aaugauauaauucugcucu

SEQ ID NO: 1579503 - RNA, 19 nt, Artificial Sequence
  Description of Artificial Sequence: Synthetic oligonucleotide
  Sense strand starting at position 3943 of SEQ ID NO: 1560145
gucagaguaaggugaauau

SEQ ID NO: 1579504 - RNA, 19 nt, Artificial Sequence
  Description of Artificial Sequence: Synthetic oligonucleotide
  Antisense strand to SEQ ID NO: 1579503
auauucaccuuacucugac

SEQ ID NO: 1579505 - RNA, 19 nt, Artificial Sequence
  Description of Artificial Sequence: Synthetic oligonucleotide
  Sense strand starting at position 3971 of SEQ ID NO: 1560145
gaugucuacugguuuagaa

SEQ ID NO: 1579506 - RNA, 19 nt, Artificial Sequence
  Description of Artificial Sequence: Synthetic oligonucleotide
  Antisense strand to SEQ ID NO: 1579505
uucuaaaccaguagacauc

SEQ ID NO: 1579507 - RNA, 19 nt, Artificial Sequence
  Description of Artificial Sequence: Synthetic oligonucleotide
  Sense strand starting at position 12 of SEQ ID NO: 1560146
cugagaaacuaugcuuuag

SEQ ID NO: 1579508 - RNA, 19 nt, Artificial Sequence
  Description of Artificial Sequence: Synthetic oligonucleotide
  Antisense strand to SEQ ID NO: 1579507
cuaaagcauaguuucucag

SEQ ID NO: 1579509 - RNA, 19 nt, Artificial Sequence
  Description of Artificial Sequence: Synthetic oligonucleotide
  Sense strand starting at position 44 of SEQ ID NO: 1560146
gauggugccuggcucuuaa

SEQ ID NO: 1579510 - RNA, 19 nt, Artificial Sequence
  Description of Artificial Sequence: Synthetic oligonucleotide
  Antisense strand to SEQ ID NO: 1579509
uuaagagccaggcaccauc

SEQ ID NO: 1579511 - RNA, 19 nt, Artificial Sequence
  Description of Artificial Sequence: Synthetic oligonucleotide
  Sense strand starting at position 55 of SEQ ID NO: 1560146
gcucuuaacgaucacccaa

SEQ ID NO: 1579512 - RNA, 19 nt, Artificial Sequence
  Description of Artificial Sequence: Synthetic oligonucleotide
  Antisense strand to SEQ ID NO: 1579511
uugggugaucguuaagagc

SEQ ID NO: 1579513 - RNA, 19 nt, Artificial Sequence
  Description of Artificial Sequence: Synthetic oligonucleotide
  Sense strand starting at position 139 of SEQ ID NO: 1560146
aguaaauacucgcuuuaua

SEQ ID NO: 1579514 - RNA, 19 nt, Artificial Sequence
  Description of Artificial Sequence: Synthetic oligonucleotide
  Antisense strand to SEQ ID NO: 1579513
uauaaagcgaguauuuacu

SEQ ID NO: 1579515 - RNA, 19 nt, Artificial Sequence
  Description of Artificial Sequence: Synthetic oligonucleotide
  Sense strand starting at position 171 of SEQ ID NO: 1560146
agggaugcauuccucacaa

SEQ ID NO: 1579516 - RNA, 19 nt, Artificial Sequence
  Description of Artificial Sequence: Synthetic oligonucleotide
  Antisense strand to SEQ ID NO: 1579515
uugugaggaaugcaucccu

SEQ ID NO: 1579517 - RNA, 19 nt, Artificial Sequence
  Description of Artificial Sequence: Synthetic oligonucleotide
  Sense strand starting at position 197 of SEQ ID NO: 1560146
uacaguaagugcucgauaa

SEQ ID NO: 1579518 - RNA, 19 nt, Artificial Sequence
  Description of Artificial Sequence: Synthetic oligonucleotide
  Antisense strand to SEQ ID NO: 1579517
uuaucgagcacuuacugua

SEQ ID NO: 1579519 - RNA, 19 nt, Artificial Sequence
  Description of Artificial Sequence: Synthetic oligonucleotide
  Sense strand starting at position 226 of SEQ ID NO: 1560146
aauguuagugcaugugaaa

SEQ ID NO: 1579520 - RNA, 19 nt, Artificial Sequence
  Description of Artificial Sequence: Synthetic oligonucleotide
  Antisense strand to SEQ ID NO: 1579519
uuucacaugcacuaacauu

SEQ ID NO: 1579521 - RNA, 19 nt, Artificial Sequence
  Description of Artificial Sequence: Synthetic oligonucleotide
  Sense strand starting at position 233 of SEQ ID NO: 1560146
gugcaugugaaagguaaau

SEQ ID NO: 1579522 - RNA, 19 nt, Artificial Sequence
  Description of Artificial Sequence: Synthetic oligonucleotide
  Antisense strand to SEQ ID NO: 1579521
auuuaccuuucacaugcac

SEQ ID NO: 1579523 - RNA, 19 nt, Artificial Sequence
  Description of Artificial Sequence: Synthetic oligonucleotide
  Sense strand starting at position 309 of SEQ ID NO: 1560146
aguuaaugcaugugagggu

SEQ ID NO: 1579524 - RNA, 19 nt, Artificial Sequence
  Description of Artificial Sequence: Synthetic oligonucleotide
  Antisense strand to SEQ ID NO: 1579523
acccucacaugcauuaacu

SEQ ID NO: 1579525 - RNA, 19 nt, Artificial Sequence
  Description of Artificial Sequence: Synthetic oligonucleotide
  Sense strand starting at position 316 of SEQ ID NO: 1560146
gcaugugaggguuaaagac

SEQ ID NO: 1579526 - RNA, 19 nt, Artificial Sequence
  Description of Artificial Sequence: Synthetic oligonucleotide
  Antisense strand to SEQ ID NO: 1579525
gucuuuaacccucacaugc

SEQ ID NO: 1579527 - RNA, 19 nt, Artificial Sequence
  Description of Artificial Sequence: Synthetic oligonucleotide
  Sense strand starting at position 354 of SEQ ID NO: 1560146
acaguagaugcucaauaug

SEQ ID NO: 1579528 - RNA, 19 nt, Artificial Sequence
  Description of Artificial Sequence: Synthetic oligonucleotide
  Antisense strand to SEQ ID NO: 1579527
cauauugagcaucuacugu

SEQ ID NO: 1579529 - RNA, 19 nt, Artificial Sequence
  Description of Artificial Sequence: Synthetic oligonucleotide
  Sense strand starting at position 357 of SEQ ID NO: 1560146
guagaugcucaauaugugu

SEQ ID NO: 1579530 - RNA, 19 nt, Artificial Sequence
  Description of Artificial Sequence: Synthetic oligonucleotide
  Antisense strand to SEQ ID NO: 1579529
acacauauugagcaucuac

SEQ ID NO: 1579531 - RNA, 19 nt, Artificial Sequence
  Description of Artificial Sequence: Synthetic oligonucleotide
  Sense strand starting at position 362 of SEQ ID NO: 1560146
ugcucaauaugugucaagu

SEQ ID NO: 1579532 - RNA, 19 nt, Artificial Sequence
  Description of Artificial Sequence: Synthetic oligonucleotide
  Antisense strand to SEQ ID NO: 1579531
acuugacacauauugagca

SEQ ID NO: 1579533 - RNA, 19 nt, Artificial Sequence
  Description of Artificial Sequence: Synthetic oligonucleotide
  Sense strand starting at position 400 of SEQ ID NO: 1560146
augaaaugguguuugcaca

SEQ ID NO: 1579534 - RNA, 19 nt, Artificial Sequence
  Description of Artificial Sequence: Synthetic oligonucleotide
  Antisense strand to SEQ ID NO: 1579533
ugugcaaacaccauuucau

SEQ ID NO: 1579535 - RNA, 19 nt, Artificial Sequence
  Description of Artificial Sequence: Synthetic oligonucleotide
  Sense strand starting at position 891 of SEQ ID NO: 1560146
ggguguugccagggaccau

SEQ ID NO: 1579536 - RNA, 19 nt, Artificial Sequence
  Description of Artificial Sequence: Synthetic oligonucleotide
  Antisense strand to SEQ ID NO: 1579535
auggucccuggcaacaccc

SEQ ID NO: 1579537 - RNA, 19 nt, Artificial Sequence
  Description of Artificial Sequence: Synthetic oligonucleotide
  Sense strand starting at position 911 of SEQ ID NO: 1560146
gcaugcuccucucuagaua

SEQ ID NO: 1579538 - RNA, 19 nt, Artificial Sequence
  Description of Artificial Sequence: Synthetic oligonucleotide
  Antisense strand to SEQ ID NO: 1579537
uaucuagagaggagcaugc

SEQ ID NO: 1579539 - RNA, 19 nt, Artificial Sequence
  Description of Artificial Sequence: Synthetic oligonucleotide
  Sense strand starting at position 956 of SEQ ID NO: 1560146
cugagugcugcucauugga

SEQ ID NO: 1579540 - RNA, 19 nt, Artificial Sequence
  Description of Artificial Sequence: Synthetic oligonucleotide
  Antisense strand to SEQ ID NO: 1579539
uccaaugagcagcacucag

SEQ ID NO: 1579541 - RNA, 19 nt, Artificial Sequence
  Description of Artificial Sequence: Synthetic oligonucleotide
  Sense strand starting at position 958 of SEQ ID NO: 1560146
gagugcugcucauuggaaa

SEQ ID NO: 1579542 - RNA, 19 nt, Artificial Sequence
  Description of Artificial Sequence: Synthetic oligonucleotide
  Antisense strand to SEQ ID NO: 1579541
uuuccaaugagcagcacuc

SEQ ID NO: 1579543 - RNA, 19 nt, Artificial Sequence
  Description of Artificial Sequence: Synthetic oligonucleotide
  Sense strand starting at position 959 of SEQ ID NO: 1560146
agugcugcucauuggaaac

SEQ ID NO: 1579544 - RNA, 19 nt, Artificial Sequence
  Description of Artificial Sequence: Synthetic oligonucleotide
  Antisense strand to SEQ ID NO: 1579543
guuuccaaugagcagcacu

SEQ ID NO: 1579545 - RNA, 19 nt, Artificial Sequence
  Description of Artificial Sequence: Synthetic oligonucleotide
  Sense strand starting at position 1055 of SEQ ID NO: 1560146
ccuguugauccagagguuu

SEQ ID NO: 1579546 - RNA, 19 nt, Artificial Sequence
  Description of Artificial Sequence: Synthetic oligonucleotide
  Antisense strand to SEQ ID NO: 1579545
aaaccucuggaucaacagg

SEQ ID NO: 1579547 - RNA, 19 nt, Artificial Sequence
  Description of Artificial Sequence: Synthetic oligonucleotide
  Sense strand starting at position 1089 of SEQ ID NO: 1560146
cuguguggccugcuucuaa

SEQ ID NO: 1579548 - RNA, 19 nt, Artificial Sequence
  Description of Artificial Sequence: Synthetic oligonucleotide
  Antisense strand to SEQ ID NO: 1579547
uuagaagcaggccacacag

SEQ ID NO: 1579549 - RNA, 19 nt, Artificial Sequence
  Description of Artificial Sequence: Synthetic oligonucleotide
  Sense strand starting at position 1315 of SEQ ID NO: 1560146
uggcaaugaggcugugauu

SEQ ID NO: 1579550 - RNA, 19 nt, Artificial Sequence
  Description of Artificial Sequence: Synthetic oligonucleotide
  Antisense strand to SEQ ID NO: 1579549
aaucacagccucauugcca

SEQ ID NO: 1579551 - RNA, 19 nt, Artificial Sequence
  Description of Artificial Sequence: Synthetic oligonucleotide
  Sense strand starting at position 1385 of SEQ ID NO: 1560146
cccuacuucuaagaggaaa

SEQ ID NO: 1579552 - RNA, 19 nt, Artificial Sequence
  Description of Artificial Sequence: Synthetic oligonucleotide
  Antisense strand to SEQ ID NO: 1579551
uuuccucuuagaaguaggg

SEQ ID NO: 1579553 - RNA, 19 nt, Artificial Sequence
  Description of Artificial Sequence: Synthetic oligonucleotide
  Sense strand starting at position 2705 of SEQ ID NO: 1560146
augaacauugguugucuua

SEQ ID NO: 1579554 - RNA, 19 nt, Artificial Sequence
  Description of Artificial Sequence: Synthetic oligonucleotide
  Antisense strand to SEQ ID NO: 1579553
uaagacaaccaauguucau

SEQ ID NO: 1579555 - RNA, 19 nt, Artificial Sequence
  Description of Artificial Sequence: Synthetic oligonucleotide
  Sense strand starting at position 2712 of SEQ ID NO: 1560146
uugguugucuuaccauuua

SEQ ID NO: 1579556 - RNA, 19 nt, Artificial Sequence
  Description of Artificial Sequence: Synthetic oligonucleotide
  Antisense strand to SEQ ID NO: 1579555
uaaaugguaagacaaccaa

SEQ ID NO: 1579557 - RNA, 19 nt, Artificial Sequence
  Description of Artificial Sequence: Synthetic oligonucleotide
  Sense strand starting at position 3087 of SEQ ID NO: 1560146
ggaucauguuuauuccaag

SEQ ID NO: 1579558 - RNA, 19 nt, Artificial Sequence
  Description of Artificial Sequence: Synthetic oligonucleotide
  Antisense strand to SEQ ID NO: 1579557
cuuggaauaaacaugaucc

SEQ ID NO: 1579559 - RNA, 19 nt, Artificial Sequence
  Description of Artificial Sequence: Synthetic oligonucleotide
  Sense strand starting at position 3096 of SEQ ID NO: 1560146
uuauuccaaguguguuauu

SEQ ID NO: 1579560 - RNA, 19 nt, Artificial Sequence
  Description of Artificial Sequence: Synthetic oligonucleotide
  Antisense strand to SEQ ID NO: 1579559
aauaacacacuuggaauaa

SEQ ID NO: 1579561 - RNA, 19 nt, Artificial Sequence
  Description of Artificial Sequence: Synthetic oligonucleotide
  Sense strand starting at position 3169 of SEQ ID NO: 1560146
guugcaugaucauugcuca

SEQ ID NO: 1579562 - RNA, 19 nt, Artificial Sequence
  Description of Artificial Sequence: Synthetic oligonucleotide
  Antisense strand to SEQ ID NO: 1579561
ugagcaaugaucaugcaac

SEQ ID NO: 1579563 - RNA, 19 nt, Artificial Sequence
  Description of Artificial Sequence: Synthetic oligonucleotide
  Sense strand starting at position 3262 of SEQ ID NO: 1560146
gcuaccaucccuggucaau

SEQ ID NO: 1579564 - RNA, 19 nt, Artificial Sequence
  Description of Artificial Sequence: Synthetic oligonucleotide
  Antisense strand to SEQ ID NO: 1579563
auugaccagggaugguagc

SEQ ID NO: 1579565 - RNA, 19 nt, Artificial Sequence
  Description of Artificial Sequence: Synthetic oligonucleotide
  Sense strand starting at position 3492 of SEQ ID NO: 1560146
uggugacacagugaugauu

SEQ ID NO: 1579566 - RNA, 19 nt, Artificial Sequence
  Description of Artificial Sequence: Synthetic oligonucleotide
  Antisense strand to SEQ ID NO: 1579565
aaucaucacugugucacca

SEQ ID NO: 1579567 - RNA, 19 nt, Artificial Sequence
  Description of Artificial Sequence: Synthetic oligonucleotide
  Sense strand starting at position 3548 of SEQ ID NO: 1560146
cacacaauccuguaggguu

SEQ ID NO: 1579568 - RNA, 19 nt, Artificial Sequence
  Description of Artificial Sequence: Synthetic oligonucleotide
  Antisense strand to SEQ ID NO: 1579567
aacccuacaggauugugug

SEQ ID NO: 1579569 - RNA, 19 nt, Artificial Sequence
  Description of Artificial Sequence: Synthetic oligonucleotide
  Sense strand starting at position 3710 of SEQ ID NO: 1560146
ugagcugagaccuggagua

SEQ ID NO: 1579570 - RNA, 19 nt, Artificial Sequence
  Description of Artificial Sequence: Synthetic oligonucleotide
  Antisense strand to SEQ ID NO: 1579569
uacuccaggucucagcuca

SEQ ID NO: 1579571 - RNA, 19 nt, Artificial Sequence
  Description of Artificial Sequence: Synthetic oligonucleotide
  Sense strand starting at position 3811 of SEQ ID NO: 1560146
cugagauagucaucaaggu

SEQ ID NO: 1579572 - RNA, 19 nt, Artificial Sequence
  Description of Artificial Sequence: Synthetic oligonucleotide
  Antisense strand to SEQ ID NO: 1579571
accuugaugacuaucucag

SEQ ID NO: 1579573 - RNA, 19 nt, Artificial Sequence
  Description of Artificial Sequence: Synthetic oligonucleotide
  Sense strand starting at position 3815 of SEQ ID NO: 1560146
gauagucaucaagguguau

SEQ ID NO: 1579574 - RNA, 19 nt, Artificial Sequence
  Description of Artificial Sequence: Synthetic oligonucleotide
  Antisense strand to SEQ ID NO: 1579573
auacaccuugaugacuauc

SEQ ID NO: 1579575 - RNA, 19 nt, Artificial Sequence
  Description of Artificial Sequence: Synthetic oligonucleotide
  Sense strand starting at position 3831 of SEQ ID NO: 1560146
uauugaggagguugcaaua

SEQ ID NO: 1579576 - RNA, 19 nt, Artificial Sequence
  Description of Artificial Sequence: Synthetic oligonucleotide
  Antisense strand to SEQ ID NO: 1579575
uauugcaaccuccucaaua

SEQ ID NO: 1579577 - RNA, 19 nt, Artificial Sequence
  Description of Artificial Sequence: Synthetic oligonucleotide
  Sense strand starting at position 3844 of SEQ ID NO: 1560146
gcaauaucuugggugagug

SEQ ID NO: 1579578 - RNA, 19 nt, Artificial Sequence
  Description of Artificial Sequence: Synthetic oligonucleotide
  Antisense strand to SEQ ID NO: 1579577
cacucacccaagauauugc

SEQ ID NO: 1579579 - RNA, 19 nt, Artificial Sequence
  Description of Artificial Sequence: Synthetic oligonucleotide
  Sense strand starting at position 3916 of SEQ ID NO: 1560146
gaucaaaugugcucuguug

SEQ ID NO: 1579580 - RNA, 19 nt, Artificial Sequence
  Description of Artificial Sequence: Synthetic oligonucleotide
  Antisense strand to SEQ ID NO: 1579579
caacagagcacauuugauc

SEQ ID NO: 1579581 - RNA, 19 nt, Artificial Sequence
  Description of Artificial Sequence: Synthetic oligonucleotide
  Sense strand starting at position 3940 of SEQ ID NO: 1560146
aucaacagagcuuggauaa

SEQ ID NO: 1579582 - RNA, 19 nt, Artificial Sequence
  Description of Artificial Sequence: Synthetic oligonucleotide
  Antisense strand to SEQ ID NO: 1579581
uuauccaagcucuguugau

SEQ ID NO: 1579583 - RNA, 19 nt, Artificial Sequence
  Description of Artificial Sequence: Synthetic oligonucleotide
  Sense strand starting at position 3941 of SEQ ID NO: 1560146
ucaacagagcuuggauaau

SEQ ID NO: 1579584 - RNA, 19 nt, Artificial Sequence
  Description of Artificial Sequence: Synthetic oligonucleotide
  Antisense strand to SEQ ID NO: 1579583
auuauccaagcucuguuga

SEQ ID NO: 1579585 - RNA, 19 nt, Artificial Sequence
  Description of Artificial Sequence: Synthetic oligonucleotide
  Sense strand starting at position 3971 of SEQ ID NO: 1560146
uguuaugcuguuuaauauc

SEQ ID NO: 1579586 - RNA, 19 nt, Artificial Sequence
  Description of Artificial Sequence: Synthetic oligonucleotide
  Antisense strand to SEQ ID NO: 1579585
gauauuaaacagcauaaca

SEQ ID NO: 1579587 - RNA, 19 nt, Artificial Sequence
  Description of Artificial Sequence: Synthetic oligonucleotide
  Sense strand starting at position 37 of SEQ ID NO: 1560147
ggaagccucucuguggaaa

SEQ ID NO: 1579588 - RNA, 19 nt, Artificial Sequence
  Description of Artificial Sequence: Synthetic oligonucleotide
  Antisense strand to SEQ ID NO: 1579587
uuuccacagagaggcuucc

SEQ ID NO: 1579589 - RNA, 19 nt, Artificial Sequence
  Description of Artificial Sequence: Synthetic oligonucleotide
  Sense strand starting at position 143 of SEQ ID NO: 1560147
guggaugcggcugauaacu

SEQ ID NO: 1579590 - RNA, 19 nt, Artificial Sequence
  Description of Artificial Sequence: Synthetic oligonucleotide
  Antisense strand to SEQ ID NO: 1579589
aguuaucagccgcauccac

SEQ ID NO: 1579591 - RNA, 19 nt, Artificial Sequence
  Description of Artificial Sequence: Synthetic oligonucleotide
  Sense strand starting at position 366 of SEQ ID NO: 1560147
agaugccuucuaggcagaa

SEQ ID NO: 1579592 - RNA, 19 nt, Artificial Sequence
  Description of Artificial Sequence: Synthetic oligonucleotide
  Antisense strand to SEQ ID NO: 1579591
uucugccuagaaggcaucu

SEQ ID NO: 1579593 - RNA, 19 nt, Artificial Sequence
  Description of Artificial Sequence: Synthetic oligonucleotide
  Sense strand starting at position 367 of SEQ ID NO: 1560147
gaugccuucuaggcagaaa

SEQ ID NO: 1579594 - RNA, 19 nt, Artificial Sequence
  Description of Artificial Sequence: Synthetic oligonucleotide
  Antisense strand to SEQ ID NO: 1579593
uuucugccuagaaggcauc

SEQ ID NO: 1579595 - RNA, 19 nt, Artificial Sequence
  Description of Artificial Sequence: Synthetic oligonucleotide
  Sense strand starting at position 456 of SEQ ID NO: 1560147
cucucaucugcuugucuga

SEQ ID NO: 1579596 - RNA, 19 nt, Artificial Sequence
  Description of Artificial Sequence: Synthetic oligonucleotide
  Antisense strand to SEQ ID NO: 1579595
ucagacaagcagaugagag

SEQ ID NO: 1579597 - RNA, 19 nt, Artificial Sequence
  Description of Artificial Sequence: Synthetic oligonucleotide
  Sense strand starting at position 458 of SEQ ID NO: 1560147
cucaucugcuugucugaau

SEQ ID NO: 1579598 - RNA, 19 nt, Artificial Sequence
  Description of Artificial Sequence: Synthetic oligonucleotide
  Antisense strand to SEQ ID NO: 1579597
auucagacaagcagaugag

SEQ ID NO: 1579599 - RNA, 19 nt, Artificial Sequence
  Description of Artificial Sequence: Synthetic oligonucleotide
  Sense strand starting at position 469 of SEQ ID NO: 1560147
gucugaaucucugugauac

SEQ ID NO: 1579600 - RNA, 19 nt, Artificial Sequence
  Description of Artificial Sequence: Synthetic oligonucleotide
  Antisense strand to SEQ ID NO: 1579599
guaucacagagauucagac

SEQ ID NO: 1579601 - RNA, 19 nt, Artificial Sequence
  Description of Artificial Sequence: Synthetic oligonucleotide
  Sense strand starting at position 470 of SEQ ID NO: 1560147
ucugaaucucugugauacu

SEQ ID NO: 1579602 - RNA, 19 nt, Artificial Sequence
  Description of Artificial Sequence: Synthetic oligonucleotide
  Antisense strand to SEQ ID NO: 1579601
aguaucacagagauucaga

SEQ ID NO: 1579603 - RNA, 19 nt, Artificial Sequence
  Description of Artificial Sequence: Synthetic oligonucleotide
  Sense strand starting at position 513 of SEQ ID NO: 1560147
aucuauuucuggcugugua

SEQ ID NO: 1579604 - RNA, 19 nt, Artificial Sequence
  Description of Artificial Sequence: Synthetic oligonucleotide
  Antisense strand to SEQ ID NO: 1579603
uacacagccagaaauagau

SEQ ID NO: 1579605 - RNA, 19 nt, Artificial Sequence
  Description of Artificial Sequence: Synthetic oligonucleotide
  Sense strand starting at position 514 of SEQ ID NO: 1560147
ucuauuucuggcuguguau

SEQ ID NO: 1579606 - RNA, 19 nt, Artificial Sequence
  Description of Artificial Sequence: Synthetic oligonucleotide
  Antisense strand to SEQ ID NO: 1579605
auacacagccagaaauaga

SEQ ID NO: 1579607 - RNA, 19 nt, Artificial Sequence
  Description of Artificial Sequence: Synthetic oligonucleotide
  Sense strand starting at position 1286 of SEQ ID NO: 1560147
gucacucuuuccucaagua

SEQ ID NO: 1579608 - RNA, 19 nt, Artificial Sequence
  Description of Artificial Sequence: Synthetic oligonucleotide
  Antisense strand to SEQ ID NO: 1579607
uacuugaggaaagagugac

SEQ ID NO: 1579609 - RNA, 19 nt, Artificial Sequence
  Description of Artificial Sequence: Synthetic oligonucleotide
  Sense strand starting at position 1368 of SEQ ID NO: 1560147
cuguuuaugucuccuucua

SEQ ID NO: 1579610 - RNA, 19 nt, Artificial Sequence
  Description of Artificial Sequence: Synthetic oligonucleotide
  Antisense strand to SEQ ID NO: 1579609
uagaaggagacauaaacag

SEQ ID NO: 1579611 - RNA, 19 nt, Artificial Sequence
  Description of Artificial Sequence: Synthetic oligonucleotide
  Sense strand starting at position 1370 of SEQ ID NO: 1560147
guuuaugucuccuucuauc

SEQ ID NO: 1579612 - RNA, 19 nt, Artificial Sequence
  Description of Artificial Sequence: Synthetic oligonucleotide
  Antisense strand to SEQ ID NO: 1579611
gauagaaggagacauaaac

SEQ ID NO: 1579613 - RNA, 19 nt, Artificial Sequence
  Description of Artificial Sequence: Synthetic oligonucleotide
  Sense strand starting at position 1748 of SEQ ID NO: 1560147
auaucuguaucugucuuua

SEQ ID NO: 1579614 - RNA, 19 nt, Artificial Sequence
  Description of Artificial Sequence: Synthetic oligonucleotide
  Antisense strand to SEQ ID NO: 1579613
uaaagacagauacagauau

SEQ ID NO: 1579615 - RNA, 19 nt, Artificial Sequence
  Description of Artificial Sequence: Synthetic oligonucleotide
  Sense strand starting at position 1750 of SEQ ID NO: 1560147
aucuguaucugucuuuauu

SEQ ID NO: 1579616 - RNA, 19 nt, Artificial Sequence
  Description of Artificial Sequence: Synthetic oligonucleotide
  Antisense strand to SEQ ID NO: 1579615
aauaaagacagauacagau

SEQ ID NO: 1579617 - RNA, 19 nt, Artificial Sequence
  Description of Artificial Sequence: Synthetic oligonucleotide
  Sense strand starting at position 2263 of SEQ ID NO: 1560147
gggaacugcgauuacgaua

SEQ ID NO: 1579618 - RNA, 19 nt, Artificial Sequence
  Description of Artificial Sequence: Synthetic oligonucleotide
  Antisense strand to SEQ ID NO: 1579617
uaucguaaucgcaguuccc

SEQ ID NO: 1579619 - RNA, 19 nt, Artificial Sequence
  Description of Artificial Sequence: Synthetic oligonucleotide
  Sense strand starting at position 2268 of SEQ ID NO: 1560147
cugcgauuacgauagucaa

SEQ ID NO: 1579620 - RNA, 19 nt, Artificial Sequence
  Description of Artificial Sequence: Synthetic oligonucleotide
  Antisense strand to SEQ ID NO: 1579619
uugacuaucguaaucgcag

SEQ ID NO: 1579621 - RNA, 19 nt, Artificial Sequence
  Description of Artificial Sequence: Synthetic oligonucleotide
  Sense strand starting at position 2271 of SEQ ID NO: 1560147
cgauuacgauagucaauag

SEQ ID NO: 1579622 - RNA, 19 nt, Artificial Sequence
  Description of Artificial Sequence: Synthetic oligonucleotide
  Antisense strand to SEQ ID NO: 1579621
cuauugacuaucguaaucg

SEQ ID NO: 1579623 - RNA, 19 nt, Artificial Sequence
  Description of Artificial Sequence: Synthetic oligonucleotide
  Sense strand starting at position 2275 of SEQ ID NO: 1560147
uacgauagucaauagcaau

SEQ ID NO: 1579624 - RNA, 19 nt, Artificial Sequence
  Description of Artificial Sequence: Synthetic oligonucleotide
  Antisense strand to SEQ ID NO: 1579623
auugcuauugacuaucgua

SEQ ID NO: 1579625 - RNA, 19 nt, Artificial Sequence
  Description of Artificial Sequence: Synthetic oligonucleotide
  Sense strand starting at position 2281 of SEQ ID NO: 1560147
agucaauagcaaugauaau

SEQ ID NO: 1579626 - RNA, 19 nt, Artificial Sequence
  Description of Artificial Sequence: Synthetic oligonucleotide
  Antisense strand to SEQ ID NO: 1579625
auuaucauugcuauugacu

SEQ ID NO: 1579627 - RNA, 19 nt, Artificial Sequence
  Description of Artificial Sequence: Synthetic oligonucleotide
  Sense strand starting at position 2384 of SEQ ID NO: 1560147
auuaaaugagccggaauca

SEQ ID NO: 1579628 - RNA, 19 nt, Artificial Sequence
  Description of Artificial Sequence: Synthetic oligonucleotide
  Antisense strand to SEQ ID NO: 1579627
ugauuccggcucauuuaau

SEQ ID NO: 1579629 - RNA, 19 nt, Artificial Sequence
  Description of Artificial Sequence: Synthetic oligonucleotide
  Sense strand starting at position 2385 of SEQ ID NO: 1560147
uuaaaugagccggaaucau

SEQ ID NO: 1579630 - RNA, 19 nt, Artificial Sequence
  Description of Artificial Sequence: Synthetic oligonucleotide
  Antisense strand to SEQ ID NO: 1579629
augauuccggcucauuuaa

SEQ ID NO: 1579631 - RNA, 19 nt, Artificial Sequence
  Description of Artificial Sequence: Synthetic oligonucleotide
  Sense strand starting at position 2394 of SEQ ID NO: 1560147
ccggaaucaugcuugugau

SEQ ID NO: 1579632 - RNA, 19 nt, Artificial Sequence
  Description of Artificial Sequence: Synthetic oligonucleotide
  Antisense strand to SEQ ID NO: 1579631
aucacaagcaugauuccgg

SEQ ID NO: 1579633 - RNA, 19 nt, Artificial Sequence
  Description of Artificial Sequence: Synthetic oligonucleotide
  Sense strand starting at position 2395 of SEQ ID NO: 1560147
cggaaucaugcuugugaua

SEQ ID NO: 1579634 - RNA, 19 nt, Artificial Sequence
  Description of Artificial Sequence: Synthetic oligonucleotide
  Antisense strand to SEQ ID NO: 1579633
uaucacaagcaugauuccg

SEQ ID NO: 1579635 - RNA, 19 nt, Artificial Sequence
  Description of Artificial Sequence: Synthetic oligonucleotide
  Sense strand starting at position 2410 of SEQ ID NO: 1560147
gauauagauccuggucaua

SEQ ID NO: 1579636 - RNA, 19 nt, Artificial Sequence
  Description of Artificial Sequence: Synthetic oligonucleotide
  Antisense strand to SEQ ID NO: 1579635
uaugaccaggaucuauauc

SEQ ID NO: 1579637 - RNA, 19 nt, Artificial Sequence
  Description of Artificial Sequence: Synthetic oligonucleotide
  Sense strand starting at position 2415 of SEQ ID NO: 1560147
agauccuggucauaaacaa

SEQ ID NO: 1579638 - RNA, 19 nt, Artificial Sequence
  Description of Artificial Sequence: Synthetic oligonucleotide
  Antisense strand to SEQ ID NO: 1579637
uuguuuaugaccaggaucu

SEQ ID NO: 1579639 - RNA, 19 nt, Artificial Sequence
  Description of Artificial Sequence: Synthetic oligonucleotide
  Sense strand starting at position 2442 of SEQ ID NO: 1560147
gagucagaccggcaggaau

SEQ ID NO: 1579640 - RNA, 19 nt, Artificial Sequence
  Description of Artificial Sequence: Synthetic oligonucleotide
  Antisense strand to SEQ ID NO: 1579639
auuccugccggucugacuc

SEQ ID NO: 1579641 - RNA, 19 nt, Artificial Sequence
  Description of Artificial Sequence: Synthetic oligonucleotide
  Sense strand starting at position 2500 of SEQ ID NO: 1560147
ugacguggucuugggagaa

SEQ ID NO: 1579642 - RNA, 19 nt, Artificial Sequence
  Description of Artificial Sequence: Synthetic oligonucleotide
  Antisense strand to SEQ ID NO: 1579641
uucucccaagaccacguca

SEQ ID NO: 1579643 - RNA, 19 nt, Artificial Sequence
  Description of Artificial Sequence: Synthetic oligonucleotide
  Sense strand starting at position 2544 of SEQ ID NO: 1560147
guggacaucugagcugaaa

SEQ ID NO: 1579644 - RNA, 19 nt, Artificial Sequence
  Description of Artificial Sequence: Synthetic oligonucleotide
  Antisense strand to SEQ ID NO: 1579643
uuucagcucagauguccac

SEQ ID NO: 1579645 - RNA, 19 nt, Artificial Sequence
  Description of Artificial Sequence: Synthetic oligonucleotide
  Sense strand starting at position 2546 of SEQ ID NO: 1560147
ggacaucugagcugaaacu

SEQ ID NO: 1579646 - RNA, 19 nt, Artificial Sequence
  Description of Artificial Sequence: Synthetic oligonucleotide
  Antisense strand to SEQ ID NO: 1579645
aguuucagcucagaugucc

SEQ ID NO: 1579647 - RNA, 19 nt, Artificial Sequence
  Description of Artificial Sequence: Synthetic oligonucleotide
  Sense strand starting at position 2636 of SEQ ID NO: 1560147
ggucuuugacaguguauag

SEQ ID NO: 1579648 - RNA, 19 nt, Artificial Sequence
  Description of Artificial Sequence: Synthetic oligonucleotide
  Antisense strand to SEQ ID NO: 1579647
cuauacacugucaaagacc

SEQ ID NO: 1579649 - RNA, 19 nt, Artificial Sequence
  Description of Artificial Sequence: Synthetic oligonucleotide
  Sense strand starting at position 3095 of SEQ ID NO: 1560147
gggacacagcucugacuaa

SEQ ID NO: 1579650 - RNA, 19 nt, Artificial Sequence
  Description of Artificial Sequence: Synthetic oligonucleotide
  Antisense strand to SEQ ID NO: 1579649
uuagucagagcuguguccc

SEQ ID NO: 1579651 - RNA, 19 nt, Artificial Sequence
  Description of Artificial Sequence: Synthetic oligonucleotide
  Sense strand starting at position 3280 of SEQ ID NO: 1560147
guagcugagaccugaacaa

SEQ ID NO: 1579652 - RNA, 19 nt, Artificial Sequence
  Description of Artificial Sequence: Synthetic oligonucleotide
  Antisense strand to SEQ ID NO: 1579651
uuguucaggucucagcuac

SEQ ID NO: 1579653 - RNA, 19 nt, Artificial Sequence
  Description of Artificial Sequence: Synthetic oligonucleotide
  Sense strand starting at position 3430 of SEQ ID NO: 1560147
ggaacuguuacuuagggua

SEQ ID NO: 1579654 - RNA, 19 nt, Artificial Sequence
  Description of Artificial Sequence: Synthetic oligonucleotide
  Antisense strand to SEQ ID NO: 1579653
uacccuaaguaacaguucc

SEQ ID NO: 1579655 - RNA, 19 nt, Artificial Sequence
  Description of Artificial Sequence: Synthetic oligonucleotide
  Sense strand starting at position 3469 of SEQ ID NO: 1560147
caagaaagagaucgugacu

SEQ ID NO: 1579656 - RNA, 19 nt, Artificial Sequence
  Description of Artificial Sequence: Synthetic oligonucleotide
  Antisense strand to SEQ ID NO: 1579655
agucacgaucucuuucuug

SEQ ID NO: 1579657 - RNA, 19 nt, Artificial Sequence
  Description of Artificial Sequence: Synthetic oligonucleotide
  Sense strand starting at position 3549 of SEQ ID NO: 1560147
aguaucugcccugauaaag

SEQ ID NO: 1579658 - RNA, 19 nt, Artificial Sequence
  Description of Artificial Sequence: Synthetic oligonucleotide
  Antisense strand to SEQ ID NO: 1579657
cuuuaucagggcagauacu

SEQ ID NO: 1579659 - RNA, 19 nt, Artificial Sequence
  Description of Artificial Sequence: Synthetic oligonucleotide
  Sense strand starting at position 3868 of SEQ ID NO: 1560147
cuaggaagcucugugguua

SEQ ID NO: 1579660 - RNA, 19 nt, Artificial Sequence
  Description of Artificial Sequence: Synthetic oligonucleotide
  Antisense strand to SEQ ID NO: 1579659
uaaccacagagcuuccuag

SEQ ID NO: 1579661 - RNA, 19 nt, Artificial Sequence
  Description of Artificial Sequence: Synthetic oligonucleotide
  Sense strand starting at position 3869 of SEQ ID NO: 1560147
uaggaagcucugugguuau

SEQ ID NO: 1579662 - RNA, 19 nt, Artificial Sequence
  Description of Artificial Sequence: Synthetic oligonucleotide
  Antisense strand to SEQ ID NO: 1579661
auaaccacagagcuuccua

SEQ ID NO: 1579663 - RNA, 19 nt, Artificial Sequence
  Description of Artificial Sequence: Synthetic oligonucleotide
  Sense strand starting at position 3872 of SEQ ID NO: 1560147
gaagcucugugguuaugag

SEQ ID NO: 1579664 - RNA, 19 nt, Artificial Sequence
  Description of Artificial Sequence: Synthetic oligonucleotide
  Antisense strand to SEQ ID NO: 1579663
cucauaaccacagagcuuc

SEQ ID NO: 1579665 - RNA, 19 nt, Artificial Sequence
  Description of Artificial Sequence: Synthetic oligonucleotide
  Sense strand starting at position 3976 of SEQ ID NO: 1560147
gcaagacaguccuuuacau

SEQ ID NO: 1579666 - RNA, 19 nt, Artificial Sequence
  Description of Artificial Sequence: Synthetic oligonucleotide
  Antisense strand to SEQ ID NO: 1579665
auguaaaggacugucuugc

SEQ ID NO: 1579667 - RNA, 19 nt, Artificial Sequence
  Description of Artificial Sequence: Synthetic oligonucleotide
  Sense strand starting at position 34 of SEQ ID NO: 1560148
cugacucucaggugaaaga

SEQ ID NO: 1579668 - RNA, 19 nt, Artificial Sequence
  Description of Artificial Sequence: Synthetic oligonucleotide
  Antisense strand to SEQ ID NO: 1579667
ucuuucaccugagagucag

SEQ ID NO: 1579669 - RNA, 19 nt, Artificial Sequence
  Description of Artificial Sequence: Synthetic oligonucleotide
  Sense strand starting at position 139 of SEQ ID NO: 1560148
gguaaauccuugcucacaa

SEQ ID NO: 1579670 - RNA, 19 nt, Artificial Sequence
  Description of Artificial Sequence: Synthetic oligonucleotide
  Antisense strand to SEQ ID NO: 1579669
uugugagcaaggauuuacc

SEQ ID NO: 1579671 - RNA, 19 nt, Artificial Sequence
  Description of Artificial Sequence: Synthetic oligonucleotide
  Sense strand starting at position 308 of SEQ ID NO: 1560148
auaagaucuuucucagguc

SEQ ID NO: 1579672 - RNA, 19 nt, Artificial Sequence
  Description of Artificial Sequence: Synthetic oligonucleotide
  Antisense strand to SEQ ID NO: 1579671
gaccugagaaagaucuuau

SEQ ID NO: 1579673 - RNA, 19 nt, Artificial Sequence
  Description of Artificial Sequence: Synthetic oligonucleotide
  Sense strand starting at position 322 of SEQ ID NO: 1560148
aggucaugucuaugaggag

SEQ ID NO: 1579674 - RNA, 19 nt, Artificial Sequence
  Description of Artificial Sequence: Synthetic oligonucleotide
  Antisense strand to SEQ ID NO: 1579673
cuccucauagacaugaccu

SEQ ID NO: 1579675 - RNA, 19 nt, Artificial Sequence
  Description of Artificial Sequence: Synthetic oligonucleotide
  Sense strand starting at position 445 of SEQ ID NO: 1560148
aaggaauucugaucuguua

SEQ ID NO: 1579676 - RNA, 19 nt, Artificial Sequence
  Description of Artificial Sequence: Synthetic oligonucleotide
  Antisense strand to SEQ ID NO: 1579675
uaacagaucagaauuccuu

SEQ ID NO: 1579677 - RNA, 19 nt, Artificial Sequence
  Description of Artificial Sequence: Synthetic oligonucleotide
  Sense strand starting at position 479 of SEQ ID NO: 1560148
ggguguguccugcacuaaa

SEQ ID NO: 1579678 - RNA, 19 nt, Artificial Sequence
  Description of Artificial Sequence: Synthetic oligonucleotide
  Antisense strand to SEQ ID NO: 1579677
uuuagugcaggacacaccc

SEQ ID NO: 1579679 - RNA, 19 nt, Artificial Sequence
  Description of Artificial Sequence: Synthetic oligonucleotide
  Sense strand starting at position 556 of SEQ ID NO: 1560148
gacaauccugcguauguga

SEQ ID NO: 1579680 - RNA, 19 nt, Artificial Sequence
  Description of Artificial Sequence: Synthetic oligonucleotide
  Antisense strand to SEQ ID NO: 1579679
ucacauacgcaggauuguc

SEQ ID NO: 1579681 - RNA, 19 nt, Artificial Sequence
  Description of Artificial Sequence: Synthetic oligonucleotide
  Sense strand starting at position 567 of SEQ ID NO: 1560148
guaugugaagcagaacuga

SEQ ID NO: 1579682 - RNA, 19 nt, Artificial Sequence
  Description of Artificial Sequence: Synthetic oligonucleotide
  Antisense strand to SEQ ID NO: 1579681
ucaguucugcuucacauac

SEQ ID NO: 1579683 - RNA, 19 nt, Artificial Sequence
  Description of Artificial Sequence: Synthetic oligonucleotide
  Sense strand starting at position 608 of SEQ ID NO: 1560148
aggaaucacucaccguaua

SEQ ID NO: 1579684 - RNA, 19 nt, Artificial Sequence
  Description of Artificial Sequence: Synthetic oligonucleotide
  Antisense strand to SEQ ID NO: 1579683
uauacggugagugauuccu

SEQ ID NO: 1579685 - RNA, 19 nt, Artificial Sequence
  Description of Artificial Sequence: Synthetic oligonucleotide
  Sense strand starting at position 1017 of SEQ ID NO: 1560148
uaugcauuggcauggaaag

SEQ ID NO: 1579686 - RNA, 19 nt, Artificial Sequence
  Description of Artificial Sequence: Synthetic oligonucleotide
  Antisense strand to SEQ ID NO: 1579685
cuuuccaugccaaugcaua

SEQ ID NO: 1579687 - RNA, 19 nt, Artificial Sequence
  Description of Artificial Sequence: Synthetic oligonucleotide
  Sense strand starting at position 1018 of SEQ ID NO: 1560148
augcauuggcauggaaaga

SEQ ID NO: 1579688 - RNA, 19 nt, Artificial Sequence
  Description of Artificial Sequence: Synthetic oligonucleotide
  Antisense strand to SEQ ID NO: 1579687
ucuuuccaugccaaugcau

SEQ ID NO: 1579689 - RNA, 19 nt, Artificial Sequence
  Description of Artificial Sequence: Synthetic oligonucleotide
  Sense strand starting at position 1153 of SEQ ID NO: 1560148
uuggcauuuccuuguguga

SEQ ID NO: 1579690 - RNA, 19 nt, Artificial Sequence
  Description of Artificial Sequence: Synthetic oligonucleotide
  Antisense strand to SEQ ID NO: 1579689
ucacacaaggaaaugccaa

SEQ ID NO: 1579691 - RNA, 19 nt, Artificial Sequence
  Description of Artificial Sequence: Synthetic oligonucleotide
  Sense strand starting at position 1407 of SEQ ID NO: 1560148
cauggacuugagugauguu

SEQ ID NO: 1579692 - RNA, 19 nt, Artificial Sequence
  Description of Artificial Sequence: Synthetic oligonucleotide
  Antisense strand to SEQ ID NO: 1579691
aacaucacucaaguccaug

SEQ ID NO: 1579693 - RNA, 19 nt, Artificial Sequence
  Description of Artificial Sequence: Synthetic oligonucleotide
  Sense strand starting at position 1408 of SEQ ID NO: 1560148
auggacuugagugauguua

SEQ ID NO: 1579694 - RNA, 19 nt, Artificial Sequence
  Description of Artificial Sequence: Synthetic oligonucleotide
  Antisense strand to SEQ ID NO: 1579693
uaacaucacucaaguccau

SEQ ID NO: 1579695 - RNA, 19 nt, Artificial Sequence
  Description of Artificial Sequence: Synthetic oligonucleotide
  Sense strand starting at position 1453 of SEQ ID NO: 1560148
ugcagacuccuguggauga

SEQ ID NO: 1579696 - RNA, 19 nt, Artificial Sequence
  Description of Artificial Sequence: Synthetic oligonucleotide
  Antisense strand to SEQ ID NO: 1579695
ucauccacaggagucugca

SEQ ID NO: 1579697 - RNA, 19 nt, Artificial Sequence
  Description of Artificial Sequence: Synthetic oligonucleotide
  Sense strand starting at position 1573 of SEQ ID NO: 1560148
uuuaaauugucacugugau

SEQ ID NO: 1579698 - RNA, 19 nt, Artificial Sequence
  Description of Artificial Sequence: Synthetic oligonucleotide
  Antisense strand to SEQ ID NO: 1579697
aucacagugacaauuuaaa

SEQ ID NO: 1579699 - RNA, 19 nt, Artificial Sequence
  Description of Artificial Sequence: Synthetic oligonucleotide
  Sense strand starting at position 1574 of SEQ ID NO: 1560148
uuaaauugucacugugaua

SEQ ID NO: 1579700 - RNA, 19 nt, Artificial Sequence
  Description of Artificial Sequence: Synthetic oligonucleotide
  Antisense strand to SEQ ID NO: 1579699
uaucacagugacaauuuaa

SEQ ID NO: 1579701 - RNA, 19 nt, Artificial Sequence
  Description of Artificial Sequence: Synthetic oligonucleotide
  Sense strand starting at position 2142 of SEQ ID NO: 1560148
gccuauauuugguucccua

SEQ ID NO: 1579702 - RNA, 19 nt, Artificial Sequence
  Description of Artificial Sequence: Synthetic oligonucleotide
  Antisense strand to SEQ ID NO: 1579701
uagggaaccaaauauaggc

SEQ ID NO: 1579703 - RNA, 19 nt, Artificial Sequence
  Description of Artificial Sequence: Synthetic oligonucleotide
  Sense strand starting at position 2255 of SEQ ID NO: 1560148
ugucacagccgguagauua

SEQ ID NO: 1579704 - RNA, 19 nt, Artificial Sequence
  Description of Artificial Sequence: Synthetic oligonucleotide
  Antisense strand to SEQ ID NO: 1579703
uaaucuaccggcugugaca

SEQ ID NO: 1579705 - RNA, 19 nt, Artificial Sequence
  Description of Artificial Sequence: Synthetic oligonucleotide
  Sense strand starting at position 2266 of SEQ ID NO: 1560148
guagauuauuucccuuugu

SEQ ID NO: 1579706 - RNA, 19 nt, Artificial Sequence
  Description of Artificial Sequence: Synthetic oligonucleotide
  Antisense strand to SEQ ID NO: 1579705
acaaagggaaauaaucuac

SEQ ID NO: 1579707 - RNA, 19 nt, Artificial Sequence
  Description of Artificial Sequence: Synthetic oligonucleotide
  Sense strand starting at position 2404 of SEQ ID NO: 1560148
gggugauggcugggaagga

SEQ ID NO: 1579708 - RNA, 19 nt, Artificial Sequence
  Description of Artificial Sequence: Synthetic oligonucleotide
  Antisense strand to SEQ ID NO: 1579707
uccuucccagccaucaccc

SEQ ID NO: 1579709 - RNA, 19 nt, Artificial Sequence
  Description of Artificial Sequence: Synthetic oligonucleotide
  Sense strand starting at position 2704 of SEQ ID NO: 1560148
acugucucaugucccuaaa

SEQ ID NO: 1579710 - RNA, 19 nt, Artificial Sequence
  Description of Artificial Sequence: Synthetic oligonucleotide
  Antisense strand to SEQ ID NO: 1579709
uuuagggacaugagacagu

SEQ ID NO: 1579711 - RNA, 19 nt, Artificial Sequence
  Description of Artificial Sequence: Synthetic oligonucleotide
  Sense strand starting at position 2707 of SEQ ID NO: 1560148
gucucaugucccuaaaucu

SEQ ID NO: 1579712 - RNA, 19 nt, Artificial Sequence
  Description of Artificial Sequence: Synthetic oligonucleotide
  Antisense strand to SEQ ID NO: 1579711
agauuuagggacaugagac

SEQ ID NO: 1579713 - RNA, 19 nt, Artificial Sequence
  Description of Artificial Sequence: Synthetic oligonucleotide
  Sense strand starting at position 2748 of SEQ ID NO: 1560148
ucaggaaggguguguacau

SEQ ID NO: 1579714 - RNA, 19 nt, Artificial Sequence
  Description of Artificial Sequence: Synthetic oligonucleotide
  Antisense strand to SEQ ID NO: 1579713
auguacacacccuuccuga

SEQ ID NO: 1579715 - RNA, 19 nt, Artificial Sequence
  Description of Artificial Sequence: Synthetic oligonucleotide
  Sense strand starting at position 2782 of SEQ ID NO: 1560148
cugaucagggcgaguguuu

SEQ ID NO: 1579716 - RNA, 19 nt, Artificial Sequence
  Description of Artificial Sequence: Synthetic oligonucleotide
  Antisense strand to SEQ ID NO: 1579715
aaacacucgcccugaucag

SEQ ID NO: 1579717 - RNA, 19 nt, Artificial Sequence
  Description of Artificial Sequence: Synthetic oligonucleotide
  Sense strand starting at position 2794 of SEQ ID NO: 1560148
aguguuuguuucccaaaga

SEQ ID NO: 1579718 - RNA, 19 nt, Artificial Sequence
  Description of Artificial Sequence: Synthetic oligonucleotide
  Antisense strand to SEQ ID NO: 1579717
ucuuugggaaacaaacacu

SEQ ID NO: 1579719 - RNA, 19 nt, Artificial Sequence
  Description of Artificial Sequence: Synthetic oligonucleotide
  Sense strand starting at position 3007 of SEQ ID NO: 1560148
acugguagccucugauacu

SEQ ID NO: 1579720 - RNA, 19 nt, Artificial Sequence
  Description of Artificial Sequence: Synthetic oligonucleotide
  Antisense strand to SEQ ID NO: 1579719
aguaucagaggcuaccagu

SEQ ID NO: 1579721 - RNA, 19 nt, Artificial Sequence
  Description of Artificial Sequence: Synthetic oligonucleotide
  Sense strand starting at position 3034 of SEQ ID NO: 1560148
cugugaauuugccuaguuu

SEQ ID NO: 1579722 - RNA, 19 nt, Artificial Sequence
  Description of Artificial Sequence: Synthetic oligonucleotide
  Antisense strand to SEQ ID NO: 1579721
aaacuaggcaaauucacag

SEQ ID NO: 1579723 - RNA, 19 nt, Artificial Sequence
  Description of Artificial Sequence: Synthetic oligonucleotide
  Sense strand starting at position 3070 of SEQ ID NO: 1560148
aggaauuauauacguguau

SEQ ID NO: 1579724 - RNA, 19 nt, Artificial Sequence
  Description of Artificial Sequence: Synthetic oligonucleotide
  Antisense strand to SEQ ID NO: 1579723
auacacguauauaauuccu

SEQ ID NO: 1579725 - RNA, 19 nt, Artificial Sequence
  Description of Artificial Sequence: Synthetic oligonucleotide
  Sense strand starting at position 3071 of SEQ ID NO: 1560148
ggaauuauauacguguauu

SEQ ID NO: 1579726 - RNA, 19 nt, Artificial Sequence
  Description of Artificial Sequence: Synthetic oligonucleotide
  Antisense strand to SEQ ID NO: 1579725
aauacacguauauaauucc

SEQ ID NO: 1579727 - RNA, 19 nt, Artificial Sequence
  Description of Artificial Sequence: Synthetic oligonucleotide
  Sense strand starting at position 3101 of SEQ ID NO: 1560148
gauuauuucucuuagggua

SEQ ID NO: 1579728 - RNA, 19 nt, Artificial Sequence
  Description of Artificial Sequence: Synthetic oligonucleotide
  Antisense strand to SEQ ID NO: 1579727
uacccuaagagaaauaauc

SEQ ID NO: 1579729 - RNA, 19 nt, Artificial Sequence
  Description of Artificial Sequence: Synthetic oligonucleotide
  Sense strand starting at position 3182 of SEQ ID NO: 1560148
guaauaucccaauauaugu

SEQ ID NO: 1579730 - RNA, 19 nt, Artificial Sequence
  Description of Artificial Sequence: Synthetic oligonucleotide
  Antisense strand to SEQ ID NO: 1579729
acauauauugggauauuac

SEQ ID NO: 1579731 - RNA, 19 nt, Artificial Sequence
  Description of Artificial Sequence: Synthetic oligonucleotide
  Sense strand starting at position 3285 of SEQ ID NO: 1560148
gaacuuacacuuggaagua

SEQ ID NO: 1579732 - RNA, 19 nt, Artificial Sequence
  Description of Artificial Sequence: Synthetic oligonucleotide
  Antisense strand to SEQ ID NO: 1579731
uacuuccaaguguaaguuc

SEQ ID NO: 1579733 - RNA, 19 nt, Artificial Sequence
  Description of Artificial Sequence: Synthetic oligonucleotide
  Sense strand starting at position 3297 of SEQ ID NO: 1560148
ggaaguaucuguuuggguu

SEQ ID NO: 1579734 - RNA, 19 nt, Artificial Sequence
  Description of Artificial Sequence: Synthetic oligonucleotide
  Antisense strand to SEQ ID NO: 1579733
aacccaaacagauacuucc

SEQ ID NO: 1579735 - RNA, 19 nt, Artificial Sequence
  Description of Artificial Sequence: Synthetic oligonucleotide
  Sense strand starting at position 3413 of SEQ ID NO: 1560148
ccaguuugcugugcuauuu

SEQ ID NO: 1579736 - RNA, 19 nt, Artificial Sequence
  Description of Artificial Sequence: Synthetic oligonucleotide
  Antisense strand to SEQ ID NO: 1579735
aaauagcacagcaaacugg

SEQ ID NO: 1579737 - RNA, 19 nt, Artificial Sequence
  Description of Artificial Sequence: Synthetic oligonucleotide
  Sense strand starting at position 3576 of SEQ ID NO: 1560148
ggcugaugaaguugagcau

SEQ ID NO: 1579738 - RNA, 19 nt, Artificial Sequence
  Description of Artificial Sequence: Synthetic oligonucleotide
  Antisense strand to SEQ ID NO: 1579737
augcucaacuucaucagcc

SEQ ID NO: 1579739 - RNA, 19 nt, Artificial Sequence
  Description of Artificial Sequence: Synthetic oligonucleotide
  Sense strand starting at position 3857 of SEQ ID NO: 1560148
acuuaugcucuugauguca

SEQ ID NO: 1579740 - RNA, 19 nt, Artificial Sequence
  Description of Artificial Sequence: Synthetic oligonucleotide
  Antisense strand to SEQ ID NO: 1579739
ugacaucaagagcauaagu

SEQ ID NO: 1579741 - RNA, 19 nt, Artificial Sequence
  Description of Artificial Sequence: Synthetic oligonucleotide
  Sense strand starting at position 3879 of SEQ ID NO: 1560148
ugaagaaaccauugcccaa

SEQ ID NO: 1579742 - RNA, 19 nt, Artificial Sequence
  Description of Artificial Sequence: Synthetic oligonucleotide
  Antisense strand to SEQ ID NO: 1579741
uugggcaaugguuucuuca

SEQ ID NO: 1579743 - RNA, 19 nt, Artificial Sequence
  Description of Artificial Sequence: Synthetic oligonucleotide
  Sense strand starting at position 3928 of SEQ ID NO: 1560148
uucuucuaaugguuugaua

SEQ ID NO: 1579744 - RNA, 19 nt, Artificial Sequence
  Description of Artificial Sequence: Synthetic oligonucleotide
  Antisense strand to SEQ ID NO: 1579743
uaucaaaccauuagaagaa

SEQ ID NO: 1579745 - RNA, 19 nt, Artificial Sequence
  Description of Artificial Sequence: Synthetic oligonucleotide
  Sense strand starting at position 3930 of SEQ ID NO: 1560148
cuucuaaugguuugauaag

SEQ ID NO: 1579746 - RNA, 19 nt, Artificial Sequence
  Description of Artificial Sequence: Synthetic oligonucleotide
  Antisense strand to SEQ ID NO: 1579745
cuuaucaaaccauuagaag

SEQ ID NO: 1579747 - RNA, 19 nt, Artificial Sequence
  Description of Artificial Sequence: Synthetic oligonucleotide
  Sense strand starting at position 432 of SEQ ID NO: 1560149
gucuuucucagguaaguga

SEQ ID NO: 1579748 - RNA, 19 nt, Artificial Sequence
  Description of Artificial Sequence: Synthetic oligonucleotide
  Antisense strand to SEQ ID NO: 1579747
ucacuuaccugagaaagac

SEQ ID NO: 1579749 - RNA, 19 nt, Artificial Sequence
  Description of Artificial Sequence: Synthetic oligonucleotide
  Sense strand starting at position 490 of SEQ ID NO: 1560149
augggcauugcugagauca

SEQ ID NO: 1579750 - RNA, 19 nt, Artificial Sequence
  Description of Artificial Sequence: Synthetic oligonucleotide
  Antisense strand to SEQ ID NO: 1579749
ugaucucagcaaugcccau

SEQ ID NO: 1579751 - RNA, 19 nt, Artificial Sequence
  Description of Artificial Sequence: Synthetic oligonucleotide
  Sense strand starting at position 538 of SEQ ID NO: 1560149
uaguaaauuucucaggaug

SEQ ID NO: 1579752 - RNA, 19 nt, Artificial Sequence
  Description of Artificial Sequence: Synthetic oligonucleotide
  Antisense strand to SEQ ID NO: 1579751
cauccugagaaauuuacua

SEQ ID NO: 1579753 - RNA, 19 nt, Artificial Sequence
  Description of Artificial Sequence: Synthetic oligonucleotide
  Sense strand starting at position 593 of SEQ ID NO: 1560149
ugaugcucaguccaucaua

SEQ ID NO: 1579754 - RNA, 19 nt, Artificial Sequence
  Description of Artificial Sequence: Synthetic oligonucleotide
  Antisense strand to SEQ ID NO: 1579753
uaugauggacugagcauca

SEQ ID NO: 1579755 - RNA, 19 nt, Artificial Sequence
  Description of Artificial Sequence: Synthetic oligonucleotide
  Sense strand starting at position 694 of SEQ ID NO: 1560149
cguaacauauaggauuuau

SEQ ID NO: 1579756 - RNA, 19 nt, Artificial Sequence
  Description of Artificial Sequence: Synthetic oligonucleotide
  Antisense strand to SEQ ID NO: 1579755
auaaauccuauauguuacg

SEQ ID NO: 1579757 - RNA, 19 nt, Artificial Sequence
  Description of Artificial Sequence: Synthetic oligonucleotide
  Sense strand starting at position 791 of SEQ ID NO: 1560149
gcgaucugggcacacuauu

SEQ ID NO: 1579758 - RNA, 19 nt, Artificial Sequence
  Description of Artificial Sequence: Synthetic oligonucleotide
  Antisense strand to SEQ ID NO: 1579757
aauagugugcccagaucgc

SEQ ID NO: 1579759 - RNA, 19 nt, Artificial Sequence
  Description of Artificial Sequence: Synthetic oligonucleotide
  Sense strand starting at position 1053 of SEQ ID NO: 1560149
uccacaaacuggguucuua

SEQ ID NO: 1579760 - RNA, 19 nt, Artificial Sequence
  Description of Artificial Sequence: Synthetic oligonucleotide
  Antisense strand to SEQ ID NO: 1579759
uaagaacccaguuugugga

SEQ ID NO: 1579761 - RNA, 19 nt, Artificial Sequence
  Description of Artificial Sequence: Synthetic oligonucleotide
  Sense strand starting at position 1098 of SEQ ID NO: 1560149
aggagagauaucugugcau

SEQ ID NO: 1579762 - RNA, 19 nt, Artificial Sequence
  Description of Artificial Sequence: Synthetic oligonucleotide
  Antisense strand to SEQ ID NO: 1579761
augcacagauaucucuccu

SEQ ID NO: 1579763 - RNA, 19 nt, Artificial Sequence
  Description of Artificial Sequence: Synthetic oligonucleotide
  Sense strand starting at position 1100 of SEQ ID NO: 1560149
gagagauaucugugcauau

SEQ ID NO: 1579764 - RNA, 19 nt, Artificial Sequence
  Description of Artificial Sequence: Synthetic oligonucleotide
  Antisense strand to SEQ ID NO: 1579763
auaugcacagauaucucuc

SEQ ID NO: 1579765 - RNA, 19 nt, Artificial Sequence
  Description of Artificial Sequence: Synthetic oligonucleotide
  Sense strand starting at position 1101 of SEQ ID NO: 1560149
agagauaucugugcauauu

SEQ ID NO: 1579766 - RNA, 19 nt, Artificial Sequence
  Description of Artificial Sequence: Synthetic oligonucleotide
  Antisense strand to SEQ ID NO: 1579765
aauaugcacagauaucucu

SEQ ID NO: 1579767 - RNA, 19 nt, Artificial Sequence
  Description of Artificial Sequence: Synthetic oligonucleotide
  Sense strand starting at position 1102 of SEQ ID NO: 1560149
gagauaucugugcauauuc

SEQ ID NO: 1579768 - RNA, 19 nt, Artificial Sequence
  Description of Artificial Sequence: Synthetic oligonucleotide
  Antisense strand to SEQ ID NO: 1579767
gaauaugcacagauaucuc

SEQ ID NO: 1579769 - RNA, 19 nt, Artificial Sequence
  Description of Artificial Sequence: Synthetic oligonucleotide
  Sense strand starting at position 1342 of SEQ ID NO: 1560149
gccagucaugcauccuguu

SEQ ID NO: 1579770 - RNA, 19 nt, Artificial Sequence
  Description of Artificial Sequence: Synthetic oligonucleotide
  Antisense strand to SEQ ID NO: 1579769
aacaggaugcaugacuggc

SEQ ID NO: 1579771 - RNA, 19 nt, Artificial Sequence
  Description of Artificial Sequence: Synthetic oligonucleotide
  Sense strand starting at position 1374 of SEQ ID NO: 1560149
acauacaacugguugugua

SEQ ID NO: 1579772 - RNA, 19 nt, Artificial Sequence
  Description of Artificial Sequence: Synthetic oligonucleotide
  Antisense strand to SEQ ID NO: 1579771
uacacaaccaguuguaugu

SEQ ID NO: 1579773 - RNA, 19 nt, Artificial Sequence
  Description of Artificial Sequence: Synthetic oligonucleotide
  Sense strand starting at position 1375 of SEQ ID NO: 1560149
cauacaacugguuguguaa

SEQ ID NO: 1579774 - RNA, 19 nt, Artificial Sequence
  Description of Artificial Sequence: Synthetic oligonucleotide
  Antisense strand to SEQ ID NO: 1579773
uuacacaaccaguuguaug

SEQ ID NO: 1579775 - RNA, 19 nt, Artificial Sequence
  Description of Artificial Sequence: Synthetic oligonucleotide
  Sense strand starting at position 1421 of SEQ ID NO: 1560149
caucaacaguugguugauu

SEQ ID NO: 1579776 - RNA, 19 nt, Artificial Sequence
  Description of Artificial Sequence: Synthetic oligonucleotide
  Antisense strand to SEQ ID NO: 1579775
aaucaaccaacuguugaug

SEQ ID NO: 1579777 - RNA, 19 nt, Artificial Sequence
  Description of Artificial Sequence: Synthetic oligonucleotide
  Sense strand starting at position 1422 of SEQ ID NO: 1560149
aucaacaguugguugauua

SEQ ID NO: 1579778 - RNA, 19 nt, Artificial Sequence
  Description of Artificial Sequence: Synthetic oligonucleotide
  Antisense strand to SEQ ID NO: 1579777
uaaucaaccaacuguugau

SEQ ID NO: 1579779 - RNA, 19 nt, Artificial Sequence
  Description of Artificial Sequence: Synthetic oligonucleotide
  Sense strand starting at position 1426 of SEQ ID NO: 1560149
acaguugguugauuagauu

SEQ ID NO: 1579780 - RNA, 19 nt, Artificial Sequence
  Description of Artificial Sequence: Synthetic oligonucleotide
  Antisense strand to SEQ ID NO: 1579779
aaucuaaucaaccaacugu

SEQ ID NO: 1579781 - RNA, 19 nt, Artificial Sequence
  Description of Artificial Sequence: Synthetic oligonucleotide
  Sense strand starting at position 1495 of SEQ ID NO: 1560149
uuaauugcugugggaggaa

SEQ ID NO: 1579782 - RNA, 19 nt, Artificial Sequence
  Description of Artificial Sequence: Synthetic oligonucleotide
  Antisense strand to SEQ ID NO: 1579781
uuccucccacagcaauuaa

SEQ ID NO: 1579783 - RNA, 19 nt, Artificial Sequence
  Description of Artificial Sequence: Synthetic oligonucleotide
  Sense strand starting at position 1498 of SEQ ID NO: 1560149
auugcugugggaggaaauu

SEQ ID NO: 1579784 - RNA, 19 nt, Artificial Sequence
  Description of Artificial Sequence: Synthetic oligonucleotide
  Antisense strand to SEQ ID NO: 1579783
aauuuccucccacagcaau

SEQ ID NO: 1579785 - RNA, 19 nt, Artificial Sequence
  Description of Artificial Sequence: Synthetic oligonucleotide
  Sense strand starting at position 1517 of SEQ ID NO: 1560149
uguuauguucccuaugaga

SEQ ID NO: 1579786 - RNA, 19 nt, Artificial Sequence
  Description of Artificial Sequence: Synthetic oligonucleotide
  Antisense strand to SEQ ID NO: 1579785
ucucauagggaacauaaca

SEQ ID NO: 1579787 - RNA, 19 nt, Artificial Sequence
  Description of Artificial Sequence: Synthetic oligonucleotide
  Sense strand starting at position 1519 of SEQ ID NO: 1560149
uuauguucccuaugagagg

SEQ ID NO: 1579788 - RNA, 19 nt, Artificial Sequence
  Description of Artificial Sequence: Synthetic oligonucleotide
  Antisense strand to SEQ ID NO: 1579787
ccucucauagggaacauaa

SEQ ID NO: 1579789 - RNA, 19 nt, Artificial Sequence
  Description of Artificial Sequence: Synthetic oligonucleotide
  Sense strand starting at position 1525 of SEQ ID NO: 1560149
ucccuaugagaggguguau

SEQ ID NO: 1579790 - RNA, 19 nt, Artificial Sequence
  Description of Artificial Sequence: Synthetic oligonucleotide
  Antisense strand to SEQ ID NO: 1579789
auacacccucucauaggga

SEQ ID NO: 1579791 - RNA, 19 nt, Artificial Sequence
  Description of Artificial Sequence: Synthetic oligonucleotide
  Sense strand starting at position 1566 of SEQ ID NO: 1560149
acgacaauggacuguauaa

SEQ ID NO: 1579792 - RNA, 19 nt, Artificial Sequence
  Description of Artificial Sequence: Synthetic oligonucleotide
  Antisense strand to SEQ ID NO: 1579791
uuauacaguccauugucgu

SEQ ID NO: 1579793 - RNA, 19 nt, Artificial Sequence
  Description of Artificial Sequence: Synthetic oligonucleotide
  Sense strand starting at position 1736 of SEQ ID NO: 1560149
gaauaaguuggaggcugua

SEQ ID NO: 1579794 - RNA, 19 nt, Artificial Sequence
  Description of Artificial Sequence: Synthetic oligonucleotide
  Antisense strand to SEQ ID NO: 1579793
uacagccuccaacuuauuc

SEQ ID NO: 1579795 - RNA, 19 nt, Artificial Sequence
  Description of Artificial Sequence: Synthetic oligonucleotide
  Sense strand starting at position 2056 of SEQ ID NO: 1560149
gacagacagucuucuguca

SEQ ID NO: 1579796 - RNA, 19 nt, Artificial Sequence
  Description of Artificial Sequence: Synthetic oligonucleotide
  Antisense strand to SEQ ID NO: 1579795
ugacagaagacugucuguc

SEQ ID NO: 1579797 - RNA, 19 nt, Artificial Sequence
  Description of Artificial Sequence: Synthetic oligonucleotide
  Sense strand starting at position 2145 of SEQ ID NO: 1560149
ugucuaagagugcaaaugu

SEQ ID NO: 1579798 - RNA, 19 nt, Artificial Sequence
  Description of Artificial Sequence: Synthetic oligonucleotide
  Antisense strand to SEQ ID NO: 1579797
acauuugcacucuuagaca

SEQ ID NO: 1579799 - RNA, 19 nt, Artificial Sequence
  Description of Artificial Sequence: Synthetic oligonucleotide
  Sense strand starting at position 2381 of SEQ ID NO: 1560149
ugugaaugugaggaaguua

SEQ ID NO: 1579800 - RNA, 19 nt, Artificial Sequence
  Description of Artificial Sequence: Synthetic oligonucleotide
  Antisense strand to SEQ ID NO: 1579799
uaacuuccucacauucaca

SEQ ID NO: 1579801 - RNA, 19 nt, Artificial Sequence
  Description of Artificial Sequence: Synthetic oligonucleotide
  Sense strand starting at position 2389 of SEQ ID NO: 1560149
ugaggaaguuaauuaucuu

SEQ ID NO: 1579802 - RNA, 19 nt, Artificial Sequence
  Description of Artificial Sequence: Synthetic oligonucleotide
  Antisense strand to SEQ ID NO: 1579801
aagauaauuaacuuccuca

SEQ ID NO: 1579803 - RNA, 19 nt, Artificial Sequence
  Description of Artificial Sequence: Synthetic oligonucleotide
  Sense strand starting at position 2392 of SEQ ID NO: 1560149
ggaaguuaauuaucuuaac

SEQ ID NO: 1579804 - RNA, 19 nt, Artificial Sequence
  Description of Artificial Sequence: Synthetic oligonucleotide
  Antisense strand to SEQ ID NO: 1579803
guuaagauaauuaacuucc

SEQ ID NO: 1579805 - RNA, 19 nt, Artificial Sequence
  Description of Artificial Sequence: Synthetic oligonucleotide
  Sense strand starting at position 2454 of SEQ ID NO: 1560149
ucccaaguguccuuaggaa

SEQ ID NO: 1579806 - RNA, 19 nt, Artificial Sequence
  Description of Artificial Sequence: Synthetic oligonucleotide
  Antisense strand to SEQ ID NO: 1579805
uuccuaaggacacuuggga

SEQ ID NO: 1579807 - RNA, 19 nt, Artificial Sequence
  Description of Artificial Sequence: Synthetic oligonucleotide
  Sense strand starting at position 2709 of SEQ ID NO: 1560149
ugcugugggcuccaaauaa

SEQ ID NO: 1579808 - RNA, 19 nt, Artificial Sequence
  Description of Artificial Sequence: Synthetic oligonucleotide
  Antisense strand to SEQ ID NO: 1579807
uuauuuggagcccacagca

SEQ ID NO: 1579809 - RNA, 19 nt, Artificial Sequence
  Description of Artificial Sequence: Synthetic oligonucleotide
  Sense strand starting at position 2724 of SEQ ID NO: 1560149
auaauugcaccagggaaau

SEQ ID NO: 1579810 - RNA, 19 nt, Artificial Sequence
  Description of Artificial Sequence: Synthetic oligonucleotide
  Antisense strand to SEQ ID NO: 1579809
auuucccuggugcaauuau

SEQ ID NO: 1579811 - RNA, 19 nt, Artificial Sequence
  Description of Artificial Sequence: Synthetic oligonucleotide
  Sense strand starting at position 2848 of SEQ ID NO: 1560149
agaugagucauguguauau

SEQ ID NO: 1579812 - RNA, 19 nt, Artificial Sequence
  Description of Artificial Sequence: Synthetic oligonucleotide
  Antisense strand to SEQ ID NO: 1579811
auauacacaugacucaucu

SEQ ID NO: 1579813 - RNA, 19 nt, Artificial Sequence
  Description of Artificial Sequence: Synthetic oligonucleotide
  Sense strand starting at position 2850 of SEQ ID NO: 1560149
augagucauguguauauag

SEQ ID NO: 1579814 - RNA, 19 nt, Artificial Sequence
  Description of Artificial Sequence: Synthetic oligonucleotide
  Antisense strand to SEQ ID NO: 1579813
cuauauacacaugacucau

SEQ ID NO: 1579815 - RNA, 19 nt, Artificial Sequence
  Description of Artificial Sequence: Synthetic oligonucleotide
  Sense strand starting at position 2859 of SEQ ID NO: 1560149
guguauauagcguuucacu

SEQ ID NO: 1579816 - RNA, 19 nt, Artificial Sequence
  Description of Artificial Sequence: Synthetic oligonucleotide
  Antisense strand to SEQ ID NO: 1579815
agugaaacgcuauauacac

SEQ ID NO: 1579817 - RNA, 19 nt, Artificial Sequence
  Description of Artificial Sequence: Synthetic oligonucleotide
  Sense strand starting at position 2950 of SEQ ID NO: 1560149
uugaaacguuaacucaauu

SEQ ID NO: 1579818 - RNA, 19 nt, Artificial Sequence
  Description of Artificial Sequence: Synthetic oligonucleotide
  Antisense strand to SEQ ID NO: 1579817
aauugaguuaacguuucaa

SEQ ID NO: 1579819 - RNA, 19 nt, Artificial Sequence
  Description of Artificial Sequence: Synthetic oligonucleotide
  Sense strand starting at position 3085 of SEQ ID NO: 1560149
ugugaaauauugccauuac

SEQ ID NO: 1579820 - RNA, 19 nt, Artificial Sequence
  Description of Artificial Sequence: Synthetic oligonucleotide
  Antisense strand to SEQ ID NO: 1579819
guaauggcaauauuucaca

SEQ ID NO: 1579821 - RNA, 19 nt, Artificial Sequence
  Description of Artificial Sequence: Synthetic oligonucleotide
  Sense strand starting at position 3232 of SEQ ID NO: 1560149
ugggaagagucagacauuu

SEQ ID NO: 1579822 - RNA, 19 nt, Artificial Sequence
  Description of Artificial Sequence: Synthetic oligonucleotide
  Antisense strand to SEQ ID NO: 1579821
aaaugucugacucuuccca

SEQ ID NO: 1579823 - RNA, 19 nt, Artificial Sequence
  Description of Artificial Sequence: Synthetic oligonucleotide
  Sense strand starting at position 3351 of SEQ ID NO: 1560149
acauuauacugaguauaug

SEQ ID NO: 1579824 - RNA, 19 nt, Artificial Sequence
  Description of Artificial Sequence: Synthetic oligonucleotide
  Antisense strand to SEQ ID NO: 1579823
cauauacucaguauaaugu

SEQ ID NO: 1579825 - RNA, 19 nt, Artificial Sequence
  Description of Artificial Sequence: Synthetic oligonucleotide
  Sense strand starting at position 3559 of SEQ ID NO: 1560149
cuugauuaugucuacuaag

SEQ ID NO: 1579826 - RNA, 19 nt, Artificial Sequence
  Description of Artificial Sequence: Synthetic oligonucleotide
  Antisense strand to SEQ ID NO: 1579825
cuuaguagacauaaucaag

SEQ ID NO: 1579827 - RNA, 19 nt, Artificial Sequence
  Description of Artificial Sequence: Synthetic oligonucleotide
  Sense strand starting at position 256 of SEQ ID NO: 1560150
ggcucaguucugggaagag

SEQ ID NO: 1579828 - RNA, 19 nt, Artificial Sequence
  Description of Artificial Sequence: Synthetic oligonucleotide
  Antisense strand to SEQ ID NO: 1579827
cucuucccagaacugagcc

SEQ ID NO: 1579829 - RNA, 19 nt, Artificial Sequence
  Description of Artificial Sequence: Synthetic oligonucleotide
  Sense strand starting at position 275 of SEQ ID NO: 1560150
uugagcuucucucugagaa

SEQ ID NO: 1579830 - RNA, 19 nt, Artificial Sequence
  Description of Artificial Sequence: Synthetic oligonucleotide
  Antisense strand to SEQ ID NO: 1579829
uucucagagagaagcucaa

SEQ ID NO: 1579831 - RNA, 19 nt, Artificial Sequence
  Description of Artificial Sequence: Synthetic oligonucleotide
  Sense strand starting at position 276 of SEQ ID NO: 1560150
ugagcuucucucugagaau

SEQ ID NO: 1579832 - RNA, 19 nt, Artificial Sequence
  Description of Artificial Sequence: Synthetic oligonucleotide
  Antisense strand to SEQ ID NO: 1579831
auucucagagagaagcuca

SEQ ID NO: 1579833 - RNA, 19 nt, Artificial Sequence
  Description of Artificial Sequence: Synthetic oligonucleotide
  Sense strand starting at position 582 of SEQ ID NO: 1560150
aucccauaugugggaagua

SEQ ID NO: 1579834 - RNA, 19 nt, Artificial Sequence
  Description of Artificial Sequence: Synthetic oligonucleotide
  Antisense strand to SEQ ID NO: 1579833
uacuucccacauaugggau

SEQ ID NO: 1579835 - RNA, 19 nt, Artificial Sequence
  Description of Artificial Sequence: Synthetic oligonucleotide
  Sense strand starting at position 1011 of SEQ ID NO: 1560150
gagaaagcaucagucaaua

SEQ ID NO: 1579836 - RNA, 19 nt, Artificial Sequence
  Description of Artificial Sequence: Synthetic oligonucleotide
  Antisense strand to SEQ ID NO: 1579835
uauugacugaugcuuucuc

SEQ ID NO: 1579837 - RNA, 19 nt, Artificial Sequence
  Description of Artificial Sequence: Synthetic oligonucleotide
  Sense strand starting at position 1251 of SEQ ID NO: 1560150
cagggcauccuugggagau

SEQ ID NO: 1579838 - RNA, 19 nt, Artificial Sequence
  Description of Artificial Sequence: Synthetic oligonucleotide
  Antisense strand to SEQ ID NO: 1579837
aucucccaaggaugcccug

SEQ ID NO: 1579839 - RNA, 19 nt, Artificial Sequence
  Description of Artificial Sequence: Synthetic oligonucleotide
  Sense strand starting at position 1372 of SEQ ID NO: 1560150
agaucucuuugggugucua

SEQ ID NO: 1579840 - RNA, 19 nt, Artificial Sequence
  Description of Artificial Sequence: Synthetic oligonucleotide
  Antisense strand to SEQ ID NO: 1579839
uagacacccaaagagaucu

SEQ ID NO: 1579841 - RNA, 19 nt, Artificial Sequence
  Description of Artificial Sequence: Synthetic oligonucleotide
  Sense strand starting at position 1394 of SEQ ID NO: 1560150
ucaucucugcaagagugua

SEQ ID NO: 1579842 - RNA, 19 nt, Artificial Sequence
  Description of Artificial Sequence: Synthetic oligonucleotide
  Antisense strand to SEQ ID NO: 1579841
uacacucuugcagagauga

SEQ ID NO: 1579843 - RNA, 19 nt, Artificial Sequence
  Description of Artificial Sequence: Synthetic oligonucleotide
  Sense strand starting at position 1424 of SEQ ID NO: 1560150
cacagagacuugucugaua

SEQ ID NO: 1579844 - RNA, 19 nt, Artificial Sequence
  Description of Artificial Sequence: Synthetic oligonucleotide
  Antisense strand to SEQ ID NO: 1579843
uaucagacaagucucugug

SEQ ID NO: 1579845 - RNA, 19 nt, Artificial Sequence
  Description of Artificial Sequence: Synthetic oligonucleotide
  Sense strand starting at position 1426 of SEQ ID NO: 1560150
cagagacuugucugauauu

SEQ ID NO: 1579846 - RNA, 19 nt, Artificial Sequence
  Description of Artificial Sequence: Synthetic oligonucleotide
  Antisense strand to SEQ ID NO: 1579845
aauaucagacaagucucug

SEQ ID NO: 1579847 - RNA, 19 nt, Artificial Sequence
  Description of Artificial Sequence: Synthetic oligonucleotide
  Sense strand starting at position 1427 of SEQ ID NO: 1560150
agagacuugucugauauuu

SEQ ID NO: 1579848 - RNA, 19 nt, Artificial Sequence
  Description of Artificial Sequence: Synthetic oligonucleotide
  Antisense strand to SEQ ID NO: 1579847
aaauaucagacaagucucu

SEQ ID NO: 1579849 - RNA, 19 nt, Artificial Sequence
  Description of Artificial Sequence: Synthetic oligonucleotide
  Sense strand starting at position 1433 of SEQ ID NO: 1560150
uugucugauauuuguugua

SEQ ID NO: 1579850 - RNA, 19 nt, Artificial Sequence
  Description of Artificial Sequence: Synthetic oligonucleotide
  Antisense strand to SEQ ID NO: 1579849
uacaacaaauaucagacaa

SEQ ID NO: 1579851 - RNA, 19 nt, Artificial Sequence
  Description of Artificial Sequence: Synthetic oligonucleotide
  Sense strand starting at position 1477 of SEQ ID NO: 1560150
aauacugguggaugaguua

SEQ ID NO: 1579852 - RNA, 19 nt, Artificial Sequence
  Description of Artificial Sequence: Synthetic oligonucleotide
  Antisense strand to SEQ ID NO: 1579851
uaacucauccaccaguauu

SEQ ID NO: 1579853 - RNA, 19 nt, Artificial Sequence
  Description of Artificial Sequence: Synthetic oligonucleotide
  Sense strand starting at position 1612 of SEQ ID NO: 1560150
aauuguaguggccaguaau

SEQ ID NO: 1579854 - RNA, 19 nt, Artificial Sequence
  Description of Artificial Sequence: Synthetic oligonucleotide
  Antisense strand to SEQ ID NO: 1579853
auuacuggccacuacaauu

SEQ ID NO: 1579855 - RNA, 19 nt, Artificial Sequence
  Description of Artificial Sequence: Synthetic oligonucleotide
  Sense strand starting at position 1615 of SEQ ID NO: 1560150
uguaguggccaguaaugau

SEQ ID NO: 1579856 - RNA, 19 nt, Artificial Sequence
  Description of Artificial Sequence: Synthetic oligonucleotide
  Antisense strand to SEQ ID NO: 1579855
aucauuacuggccacuaca

SEQ ID NO: 1579857 - RNA, 19 nt, Artificial Sequence
  Description of Artificial Sequence: Synthetic oligonucleotide
  Sense strand starting at position 2044 of SEQ ID NO: 1560150
gagcacuuuccagggucau

SEQ ID NO: 1579858 - RNA, 19 nt, Artificial Sequence
  Description of Artificial Sequence: Synthetic oligonucleotide
  Antisense strand to SEQ ID NO: 1579857
augacccuggaaagugcuc

SEQ ID NO: 1579859 - RNA, 19 nt, Artificial Sequence
  Description of Artificial Sequence: Synthetic oligonucleotide
  Sense strand starting at position 2311 of SEQ ID NO: 1560150
uuucucugugacggagaaa

SEQ ID NO: 1579860 - RNA, 19 nt, Artificial Sequence
  Description of Artificial Sequence: Synthetic oligonucleotide
  Antisense strand to SEQ ID NO: 1579859
uuucuccgucacagagaaa

SEQ ID NO: 1579861 - RNA, 19 nt, Artificial Sequence
  Description of Artificial Sequence: Synthetic oligonucleotide
  Sense strand starting at position 2359 of SEQ ID NO: 1560150
guucucacaugucugggaa

SEQ ID NO: 1579862 - RNA, 19 nt, Artificial Sequence
  Description of Artificial Sequence: Synthetic oligonucleotide
  Antisense strand to SEQ ID NO: 1579861
uucccagacaugugagaac

SEQ ID NO: 1579863 - RNA, 19 nt, Artificial Sequence
  Description of Artificial Sequence: Synthetic oligonucleotide
  Sense strand starting at position 2362 of SEQ ID NO: 1560150
cucacaugucugggaaggu

SEQ ID NO: 1579864 - RNA, 19 nt, Artificial Sequence
  Description of Artificial Sequence: Synthetic oligonucleotide
  Antisense strand to SEQ ID NO: 1579863
accuucccagacaugugag

SEQ ID NO: 1579865 - RNA, 19 nt, Artificial Sequence
  Description of Artificial Sequence: Synthetic oligonucleotide
  Sense strand starting at position 2381 of SEQ ID NO: 1560150
uggauuuacucccagcaag

SEQ ID NO: 1579866 - RNA, 19 nt, Artificial Sequence
  Description of Artificial Sequence: Synthetic oligonucleotide
  Antisense strand to SEQ ID NO: 1579865
cuugcugggaguaaaucca

SEQ ID NO: 1579867 - RNA, 19 nt, Artificial Sequence
  Description of Artificial Sequence: Synthetic oligonucleotide
  Sense strand starting at position 2419 of SEQ ID NO: 1560150
ggguccuacaaauggauau

SEQ ID NO: 1579868 - RNA, 19 nt, Artificial Sequence
  Description of Artificial Sequence: Synthetic oligonucleotide
  Antisense strand to SEQ ID NO: 1579867
auauccauuuguaggaccc

SEQ ID NO: 1579869 - RNA, 19 nt, Artificial Sequence
  Description of Artificial Sequence: Synthetic oligonucleotide
  Sense strand starting at position 2431 of SEQ ID NO: 1560150
uggauauaucuagggcuaa

SEQ ID NO: 1579870 - RNA, 19 nt, Artificial Sequence
  Description of Artificial Sequence: Synthetic oligonucleotide
  Antisense strand to SEQ ID NO: 1579869
uuagcccuagauauaucca

SEQ ID NO: 1579871 - RNA, 19 nt, Artificial Sequence
  Description of Artificial Sequence: Synthetic oligonucleotide
  Sense strand starting at position 2444 of SEQ ID NO: 1560150
ggcuaaagcccggaucuaa

SEQ ID NO: 1579872 - RNA, 19 nt, Artificial Sequence
  Description of Artificial Sequence: Synthetic oligonucleotide
  Antisense strand to SEQ ID NO: 1579871
uuagauccgggcuuuagcc

SEQ ID NO: 1579873 - RNA, 19 nt, Artificial Sequence
  Description of Artificial Sequence: Synthetic oligonucleotide
  Sense strand starting at position 2485 of SEQ ID NO: 1560150
agcauuaugugacucuaau

SEQ ID NO: 1579874 - RNA, 19 nt, Artificial Sequence
  Description of Artificial Sequence: Synthetic oligonucleotide
  Antisense strand to SEQ ID NO: 1579873
auuagagucacauaaugcu

SEQ ID NO: 1579875 - RNA, 19 nt, Artificial Sequence
  Description of Artificial Sequence: Synthetic oligonucleotide
  Sense strand starting at position 2573 of SEQ ID NO: 1560150
cuaggcugacuuuaugauu

SEQ ID NO: 1579876 - RNA, 19 nt, Artificial Sequence
  Description of Artificial Sequence: Synthetic oligonucleotide
  Antisense strand to SEQ ID NO: 1579875
aaucauaaagucagccuag

SEQ ID NO: 1579877 - RNA, 19 nt, Artificial Sequence
  Description of Artificial Sequence: Synthetic oligonucleotide
  Sense strand starting at position 2798 of SEQ ID NO: 1560150
acagauuugaugugugcuu

SEQ ID NO: 1579878 - RNA, 19 nt, Artificial Sequence
  Description of Artificial Sequence: Synthetic oligonucleotide
  Antisense strand to SEQ ID NO: 1579877
aagcacacaucaaaucugu

SEQ ID NO: 1579879 - RNA, 19 nt, Artificial Sequence
  Description of Artificial Sequence: Synthetic oligonucleotide
  Sense strand starting at position 2799 of SEQ ID NO: 1560150
cagauuugaugugugcuua

SEQ ID NO: 1579880 - RNA, 19 nt, Artificial Sequence
  Description of Artificial Sequence: Synthetic oligonucleotide
  Antisense strand to SEQ ID NO: 1579879
uaagcacacaucaaaucug

SEQ ID NO: 1579881 - RNA, 19 nt, Artificial Sequence
  Description of Artificial Sequence: Synthetic oligonucleotide
  Sense strand starting at position 2932 of SEQ ID NO: 1560150
ugaacuuuauguccagaug

SEQ ID NO: 1579882 - RNA, 19 nt, Artificial Sequence
  Description of Artificial Sequence: Synthetic oligonucleotide
  Antisense strand to SEQ ID NO: 1579881
caucuggacauaaaguuca

SEQ ID NO: 1579883 - RNA, 19 nt, Artificial Sequence
  Description of Artificial Sequence: Synthetic oligonucleotide
  Sense strand starting at position 2933 of SEQ ID NO: 1560150
gaacuuuauguccagaugu

SEQ ID NO: 1579884 - RNA, 19 nt, Artificial Sequence
  Description of Artificial Sequence: Synthetic oligonucleotide
  Antisense strand to SEQ ID NO: 1579883
acaucuggacauaaaguuc

SEQ ID NO: 1579885 - RNA, 19 nt, Artificial Sequence
  Description of Artificial Sequence: Synthetic oligonucleotide
  Sense strand starting at position 2935 of SEQ ID NO: 1560150
acuuuauguccagauguac

SEQ ID NO: 1579886 - RNA, 19 nt, Artificial Sequence
  Description of Artificial Sequence: Synthetic oligonucleotide
  Antisense strand to SEQ ID NO: 1579885
guacaucuggacauaaagu

SEQ ID NO: 1579887 - RNA, 19 nt, Artificial Sequence
  Description of Artificial Sequence: Synthetic oligonucleotide
  Sense strand starting at position 3070 of SEQ ID NO: 1560150
aguuguugggaauaaguga

SEQ ID NO: 1579888 - RNA, 19 nt, Artificial Sequence
  Description of Artificial Sequence: Synthetic oligonucleotide
  Antisense strand to SEQ ID NO: 1579887
ucacuuauucccaacaacu

SEQ ID NO: 1579889 - RNA, 19 nt, Artificial Sequence
  Description of Artificial Sequence: Synthetic oligonucleotide
  Sense strand starting at position 3318 of SEQ ID NO: 1560150
ggucaaguugccuaacuuu

SEQ ID NO: 1579890 - RNA, 19 nt, Artificial Sequence
  Description of Artificial Sequence: Synthetic oligonucleotide
  Antisense strand to SEQ ID NO: 1579889
aaaguuaggcaacuugacc

SEQ ID NO: 1579891 - RNA, 19 nt, Artificial Sequence
  Description of Artificial Sequence: Synthetic oligonucleotide
  Sense strand starting at position 3615 of SEQ ID NO: 1560150
auguguggaaaguaucaca

SEQ ID NO: 1579892 - RNA, 19 nt, Artificial Sequence
  Description of Artificial Sequence: Synthetic oligonucleotide
  Antisense strand to SEQ ID NO: 1579891
ugugauacuuuccacacau

SEQ ID NO: 1579893 - RNA, 19 nt, Artificial Sequence
  Description of Artificial Sequence: Synthetic oligonucleotide
  Sense strand starting at position 3716 of SEQ ID NO: 1560150
ccgauaaauacuugagagu

SEQ ID NO: 1579894 - RNA, 19 nt, Artificial Sequence
  Description of Artificial Sequence: Synthetic oligonucleotide
  Antisense strand to SEQ ID NO: 1579893
acucucaaguauuuaucgg

SEQ ID NO: 1579895 - RNA, 19 nt, Artificial Sequence
  Description of Artificial Sequence: Synthetic oligonucleotide
  Sense strand starting at position 3730 of SEQ ID NO: 1560150
agaguccaugcugauauau

SEQ ID NO: 1579896 - RNA, 19 nt, Artificial Sequence
  Description of Artificial Sequence: Synthetic oligonucleotide
  Antisense strand to SEQ ID NO: 1579895
auauaucagcauggacucu

SEQ ID NO: 1579897 - RNA, 19 nt, Artificial Sequence
  Description of Artificial Sequence: Synthetic oligonucleotide
  Sense strand starting at position 3804 of SEQ ID NO: 1560150
agcagcguuccaguuaauc

SEQ ID NO: 1579898 - RNA, 19 nt, Artificial Sequence
  Description of Artificial Sequence: Synthetic oligonucleotide
  Antisense strand to SEQ ID NO: 1579897
gauuaacuggaacgcugcu

SEQ ID NO: 1579899 - RNA, 19 nt, Artificial Sequence
  Description of Artificial Sequence: Synthetic oligonucleotide
  Sense strand starting at position 3812 of SEQ ID NO: 1560150
uccaguuaaucaguguaga

SEQ ID NO: 1579900 - RNA, 19 nt, Artificial Sequence
  Description of Artificial Sequence: Synthetic oligonucleotide
  Antisense strand to SEQ ID NO: 1579899
ucuacacugauuaacugga

SEQ ID NO: 1579901 - RNA, 19 nt, Artificial Sequence
  Description of Artificial Sequence: Synthetic oligonucleotide
  Sense strand starting at position 3813 of SEQ ID NO: 1560150
ccaguuaaucaguguagaa

SEQ ID NO: 1579902 - RNA, 19 nt, Artificial Sequence
  Description of Artificial Sequence: Synthetic oligonucleotide
  Antisense strand to SEQ ID NO: 1579901
uucuacacugauuaacugg

SEQ ID NO: 1579903 - RNA, 19 nt, Artificial Sequence
  Description of Artificial Sequence: Synthetic oligonucleotide
  Sense strand starting at position 3879 of SEQ ID NO: 1560150
guuuaucggcuacaauuau

SEQ ID NO: 1579904 - RNA, 19 nt, Artificial Sequence
  Description of Artificial Sequence: Synthetic oligonucleotide
  Antisense strand to SEQ ID NO: 1579903
auaauuguagccgauaaac

SEQ ID NO: 1579905 - RNA, 19 nt, Artificial Sequence
  Description of Artificial Sequence: Synthetic oligonucleotide
  Sense strand starting at position 3965 of SEQ ID NO: 1560150
aguaccuguccacaagaua

SEQ ID NO: 1579906 - RNA, 19 nt, Artificial Sequence
  Description of Artificial Sequence: Synthetic oligonucleotide
  Antisense strand to SEQ ID NO: 1579905
uaucuuguggacagguacu

SEQ ID NO: 1579907 - RNA, 19 nt, Artificial Sequence
  Description of Artificial Sequence: Synthetic oligonucleotide
  Sense strand starting at position 2 of SEQ ID NO: 1560151
uguccuugucuagaugaga

SEQ ID NO: 1579908 - RNA, 19 nt, Artificial Sequence
  Description of Artificial Sequence: Synthetic oligonucleotide
  Antisense strand to SEQ ID NO: 1579907
ucucaucuagacaaggaca

SEQ ID NO: 1579909 - RNA, 19 nt, Artificial Sequence
  Description of Artificial Sequence: Synthetic oligonucleotide
  Sense strand starting at position 67 of SEQ ID NO: 1560151
cccgcagacaucugguaaa

SEQ ID NO: 1579910 - RNA, 19 nt, Artificial Sequence
  Description of Artificial Sequence: Synthetic oligonucleotide
  Antisense strand to SEQ ID NO: 1579909
uuuaccagaugucugcggg

SEQ ID NO: 1579911 - RNA, 19 nt, Artificial Sequence
  Description of Artificial Sequence: Synthetic oligonucleotide
  Sense strand starting at position 366 of SEQ ID NO: 1560151
guugaaguuuaccuaccau

SEQ ID NO: 1579912 - RNA, 19 nt, Artificial Sequence
  Description of Artificial Sequence: Synthetic oligonucleotide
  Antisense strand to SEQ ID NO: 1579911
augguagguaaacuucaac

SEQ ID NO: 1579913 - RNA, 19 nt, Artificial Sequence
  Description of Artificial Sequence: Synthetic oligonucleotide
  Sense strand starting at position 557 of SEQ ID NO: 1560151
cagagucguaacuggcauu

SEQ ID NO: 1579914 - RNA, 19 nt, Artificial Sequence
  Description of Artificial Sequence: Synthetic oligonucleotide
  Antisense strand to SEQ ID NO: 1579913
aaugccaguuacgacucug

SEQ ID NO: 1579915 - RNA, 19 nt, Artificial Sequence
  Description of Artificial Sequence: Synthetic oligonucleotide
  Sense strand starting at position 572 of SEQ ID NO: 1560151
cauuuaugguucguagggu

SEQ ID NO: 1579916 - RNA, 19 nt, Artificial Sequence
  Description of Artificial Sequence: Synthetic oligonucleotide
  Antisense strand to SEQ ID NO: 1579915
acccuacgaaccauaaaug

SEQ ID NO: 1579917 - RNA, 19 nt, Artificial Sequence
  Description of Artificial Sequence: Synthetic oligonucleotide
  Sense strand starting at position 758 of SEQ ID NO: 1560151
aggcuugaauaguuucuga

SEQ ID NO: 1579918 - RNA, 19 nt, Artificial Sequence
  Description of Artificial Sequence: Synthetic oligonucleotide
  Antisense strand to SEQ ID NO: 1579917
ucagaaacuauucaagccu

SEQ ID NO: 1579919 - RNA, 19 nt, Artificial Sequence
  Description of Artificial Sequence: Synthetic oligonucleotide
  Sense strand starting at position 761 of SEQ ID NO: 1560151
cuugaauaguuucugaaau

SEQ ID NO: 1579920 - RNA, 19 nt, Artificial Sequence
  Description of Artificial Sequence: Synthetic oligonucleotide
  Antisense strand to SEQ ID NO: 1579919
auuucagaaacuauucaag

SEQ ID NO: 1579921 - RNA, 19 nt, Artificial Sequence
  Description of Artificial Sequence: Synthetic oligonucleotide
  Sense strand starting at position 907 of SEQ ID NO: 1560151
cagucaauacugggaccua

SEQ ID NO: 1579922 - RNA, 19 nt, Artificial Sequence
  Description of Artificial Sequence: Synthetic oligonucleotide
  Antisense strand to SEQ ID NO: 1579921
uaggucccaguauugacug

SEQ ID NO: 1579923 - RNA, 19 nt, Artificial Sequence
  Description of Artificial Sequence: Synthetic oligonucleotide
  Sense strand starting at position 1294 of SEQ ID NO: 1560151
ucuagaucucuuuaggugu

SEQ ID NO: 1579924 - RNA, 19 nt, Artificial Sequence
  Description of Artificial Sequence: Synthetic oligonucleotide
  Antisense strand to SEQ ID NO: 1579923
acaccuaaagagaucuaga

SEQ ID NO: 1579925 - RNA, 19 nt, Artificial Sequence
  Description of Artificial Sequence: Synthetic oligonucleotide
  Sense strand starting at position 1354 of SEQ ID NO: 1560151
ggacuugugugaucuuggu

SEQ ID NO: 1579926 - RNA, 19 nt, Artificial Sequence
  Description of Artificial Sequence: Synthetic oligonucleotide
  Antisense strand to SEQ ID NO: 1579925
accaagaucacacaagucc

SEQ ID NO: 1579927 - RNA, 19 nt, Artificial Sequence
  Description of Artificial Sequence: Synthetic oligonucleotide
  Sense strand starting at position 1397 of SEQ ID NO: 1560151
ugcagacuccuguagauga

SEQ ID NO: 1579928 - RNA, 19 nt, Artificial Sequence
  Description of Artificial Sequence: Synthetic oligonucleotide
  Antisense strand to SEQ ID NO: 1579927
ucaucuacaggagucugca

SEQ ID NO: 1579929 - RNA, 19 nt, Artificial Sequence
  Description of Artificial Sequence: Synthetic oligonucleotide
  Sense strand starting at position 1436 of SEQ ID NO: 1560151
ccuccaaguccugagguuu

SEQ ID NO: 1579930 - RNA, 19 nt, Artificial Sequence
  Description of Artificial Sequence: Synthetic oligonucleotide
  Antisense strand to SEQ ID NO: 1579929
aaaccucaggacuuggagg

SEQ ID NO: 1579931 - RNA, 19 nt, Artificial Sequence
  Description of Artificial Sequence: Synthetic oligonucleotide
  Sense strand starting at position 1448 of SEQ ID NO: 1560151
gagguuuauuucccagugu

SEQ ID NO: 1579932 - RNA, 19 nt, Artificial Sequence
  Description of Artificial Sequence: Synthetic oligonucleotide
  Antisense strand to SEQ ID NO: 1579931
acacugggaaauaaaccuc

SEQ ID NO: 1579933 - RNA, 19 nt, Artificial Sequence
  Description of Artificial Sequence: Synthetic oligonucleotide
  Sense strand starting at position 1518 of SEQ ID NO: 1560151
ugaagugucaucugguaua

SEQ ID NO: 1579934 - RNA, 19 nt, Artificial Sequence
  Description of Artificial Sequence: Synthetic oligonucleotide
  Antisense strand to SEQ ID NO: 1579933
uauaccagaugacacuuca

SEQ ID NO: 1579935 - RNA, 19 nt, Artificial Sequence
  Description of Artificial Sequence: Synthetic oligonucleotide
  Sense strand starting at position 1523 of SEQ ID NO: 1560151
ugucaucugguauaguuau

SEQ ID NO: 1579936 - RNA, 19 nt, Artificial Sequence
  Description of Artificial Sequence: Synthetic oligonucleotide
  Antisense strand to SEQ ID NO: 1579935
auaacuauaccagaugaca

SEQ ID NO: 1579937 - RNA, 19 nt, Artificial Sequence
  Description of Artificial Sequence: Synthetic oligonucleotide
  Sense strand starting at position 1529 of SEQ ID NO: 1560151
cugguauaguuauuaucau

SEQ ID NO: 1579938 - RNA, 19 nt, Artificial Sequence
  Description of Artificial Sequence: Synthetic oligonucleotide
  Antisense strand to SEQ ID NO: 1579937
augauaauaacuauaccag

SEQ ID NO: 1579939 - RNA, 19 nt, Artificial Sequence
  Description of Artificial Sequence: Synthetic oligonucleotide
  Sense strand starting at position 2120 of SEQ ID NO: 1560151
uucucuucuguguacauua

SEQ ID NO: 1579940 - RNA, 19 nt, Artificial Sequence
  Description of Artificial Sequence: Synthetic oligonucleotide
  Antisense strand to SEQ ID NO: 1579939
uaauguacacagaagagaa

SEQ ID NO: 1579941 - RNA, 19 nt, Artificial Sequence
  Description of Artificial Sequence: Synthetic oligonucleotide
  Sense strand starting at position 2225 of SEQ ID NO: 1560151
uugggaaugucaccacaaa

SEQ ID NO: 1579942 - RNA, 19 nt, Artificial Sequence
  Description of Artificial Sequence: Synthetic oligonucleotide
  Antisense strand to SEQ ID NO: 1579941
uuuguggugacauucccaa

SEQ ID NO: 1579943 - RNA, 19 nt, Artificial Sequence
  Description of Artificial Sequence: Synthetic oligonucleotide
  Sense strand starting at position 2381 of SEQ ID NO: 1560151
gguggcucugugggauaga

SEQ ID NO: 1579944 - RNA, 19 nt, Artificial Sequence
  Description of Artificial Sequence: Synthetic oligonucleotide
  Antisense strand to SEQ ID NO: 1579943
ucuaucccacagagccacc

SEQ ID NO: 1579945 - RNA, 19 nt, Artificial Sequence
  Description of Artificial Sequence: Synthetic oligonucleotide
  Sense strand starting at position 2533 of SEQ ID NO: 1560151
ccugcauguccugggaaga

SEQ ID NO: 1579946 - RNA, 19 nt, Artificial Sequence
  Description of Artificial Sequence: Synthetic oligonucleotide
  Antisense strand to SEQ ID NO: 1579945
ucuucccaggacaugcagg

SEQ ID NO: 1579947 - RNA, 19 nt, Artificial Sequence
  Description of Artificial Sequence: Synthetic oligonucleotide
  Sense strand starting at position 2698 of SEQ ID NO: 1560151
guccucugugaaggugauu

SEQ ID NO: 1579948 - RNA, 19 nt, Artificial Sequence
  Description of Artificial Sequence: Synthetic oligonucleotide
  Antisense strand to SEQ ID NO: 1579947
aaucaccuucacagaggac

SEQ ID NO: 1579949 - RNA, 19 nt, Artificial Sequence
  Description of Artificial Sequence: Synthetic oligonucleotide
  Sense strand starting at position 2946 of SEQ ID NO: 1560151
uguugucugcgugcaaugu

SEQ ID NO: 1579950 - RNA, 19 nt, Artificial Sequence
  Description of Artificial Sequence: Synthetic oligonucleotide
  Antisense strand to SEQ ID NO: 1579949
acauugcacgcagacaaca

SEQ ID NO: 1579951 - RNA, 19 nt, Artificial Sequence
  Description of Artificial Sequence: Synthetic oligonucleotide
  Sense strand starting at position 2980 of SEQ ID NO: 1560151
agaggaacccugugguaaa

SEQ ID NO: 1579952 - RNA, 19 nt, Artificial Sequence
  Description of Artificial Sequence: Synthetic oligonucleotide
  Antisense strand to SEQ ID NO: 1579951
uuuaccacaggguuccucu

SEQ ID NO: 1579953 - RNA, 19 nt, Artificial Sequence
  Description of Artificial Sequence: Synthetic oligonucleotide
  Sense strand starting at position 3175 of SEQ ID NO: 1560151
ggacgagaguuguccagag

SEQ ID NO: 1579954 - RNA, 19 nt, Artificial Sequence
  Description of Artificial Sequence: Synthetic oligonucleotide
  Antisense strand to SEQ ID NO: 1579953
cucuggacaacucucgucc

SEQ ID NO: 1579955 - RNA, 19 nt, Artificial Sequence
  Description of Artificial Sequence: Synthetic oligonucleotide
  Sense strand starting at position 3177 of SEQ ID NO: 1560151
acgagaguuguccagagca

SEQ ID NO: 1579956 - RNA, 19 nt, Artificial Sequence
  Description of Artificial Sequence: Synthetic oligonucleotide
  Antisense strand to SEQ ID NO: 1579955
ugcucuggacaacucucgu

SEQ ID NO: 1579957 - RNA, 19 nt, Artificial Sequence
  Description of Artificial Sequence: Synthetic oligonucleotide
  Sense strand starting at position 3179 of SEQ ID NO: 1560151
gagaguuguccagagcacu

SEQ ID NO: 1579958 - RNA, 19 nt, Artificial Sequence
  Description of Artificial Sequence: Synthetic oligonucleotide
  Antisense strand to SEQ ID NO: 1579957
agugcucuggacaacucuc

SEQ ID NO: 1579959 - RNA, 19 nt, Artificial Sequence
  Description of Artificial Sequence: Synthetic oligonucleotide
  Sense strand starting at position 3200 of SEQ ID NO: 1560151
ugguccugauuugggagaa

SEQ ID NO: 1579960 - RNA, 19 nt, Artificial Sequence
  Description of Artificial Sequence: Synthetic oligonucleotide
  Antisense strand to SEQ ID NO: 1579959
uucucccaaaucaggacca

SEQ ID NO: 1579961 - RNA, 19 nt, Artificial Sequence
  Description of Artificial Sequence: Synthetic oligonucleotide
  Sense strand starting at position 3201 of SEQ ID NO: 1560151
gguccugauuugggagaac

SEQ ID NO: 1579962 - RNA, 19 nt, Artificial Sequence
  Description of Artificial Sequence: Synthetic oligonucleotide
  Antisense strand to SEQ ID NO: 1579961
guucucccaaaucaggacc

SEQ ID NO: 1579963 - RNA, 19 nt, Artificial Sequence
  Description of Artificial Sequence: Synthetic oligonucleotide
  Sense strand starting at position 3476 of SEQ ID NO: 1560151
gauaccugguuccuguauu

SEQ ID NO: 1579964 - RNA, 19 nt, Artificial Sequence
  Description of Artificial Sequence: Synthetic oligonucleotide
  Antisense strand to SEQ ID NO: 1579963
aauacaggaaccagguauc

SEQ ID NO: 1579965 - RNA, 19 nt, Artificial Sequence
  Description of Artificial Sequence: Synthetic oligonucleotide
  Sense strand starting at position 3522 of SEQ ID NO: 1560151
gucccucugagauggaaac

SEQ ID NO: 1579966 - RNA, 19 nt, Artificial Sequence
  Description of Artificial Sequence: Synthetic oligonucleotide
  Antisense strand to SEQ ID NO: 1579965
guuuccaucucagagggac

SEQ ID NO: 1579967 - RNA, 19 nt, Artificial Sequence
  Description of Artificial Sequence: Synthetic oligonucleotide
  Sense strand starting at position 3600 of SEQ ID NO: 1560151
ggugaaaugucugcaggga

SEQ ID NO: 1579968 - RNA, 19 nt, Artificial Sequence
  Description of Artificial Sequence: Synthetic oligonucleotide
  Antisense strand to SEQ ID NO: 1579967
ucccugcagacauuucacc

SEQ ID NO: 1579969 - RNA, 19 nt, Artificial Sequence
  Description of Artificial Sequence: Synthetic oligonucleotide
  Sense strand starting at position 3601 of SEQ ID NO: 1560151
gugaaaugucugcagggac

SEQ ID NO: 1579970 - RNA, 19 nt, Artificial Sequence
  Description of Artificial Sequence: Synthetic oligonucleotide
  Antisense strand to SEQ ID NO: 1579969
gucccugcagacauuucac

SEQ ID NO: 1579971 - RNA, 19 nt, Artificial Sequence
  Description of Artificial Sequence: Synthetic oligonucleotide
  Sense strand starting at position 3659 of SEQ ID NO: 1560151
gggaaucacucccugacuu

SEQ ID NO: 1579972 - RNA, 19 nt, Artificial Sequence
  Description of Artificial Sequence: Synthetic oligonucleotide
  Antisense strand to SEQ ID NO: 1579971
aagucagggagugauuccc

SEQ ID NO: 1579973 - RNA, 19 nt, Artificial Sequence
  Description of Artificial Sequence: Synthetic oligonucleotide
  Sense strand starting at position 3660 of SEQ ID NO: 1560151
ggaaucacucccugacuuu

SEQ ID NO: 1579974 - RNA, 19 nt, Artificial Sequence
  Description of Artificial Sequence: Synthetic oligonucleotide
  Antisense strand to SEQ ID NO: 1579973
aaagucagggagugauucc

SEQ ID NO: 1579975 - RNA, 19 nt, Artificial Sequence
  Description of Artificial Sequence: Synthetic oligonucleotide
  Sense strand starting at position 3686 of SEQ ID NO: 1560151
ucauucugcccugguggaa

SEQ ID NO: 1579976 - RNA, 19 nt, Artificial Sequence
  Description of Artificial Sequence: Synthetic oligonucleotide
  Antisense strand to SEQ ID NO: 1579975
uuccaccagggcagaauga

SEQ ID NO: 1579977 - RNA, 19 nt, Artificial Sequence
  Description of Artificial Sequence: Synthetic oligonucleotide
  Sense strand starting at position 3717 of SEQ ID NO: 1560151
aucgaauauccggaguuug

SEQ ID NO: 1579978 - RNA, 19 nt, Artificial Sequence
  Description of Artificial Sequence: Synthetic oligonucleotide
  Antisense strand to SEQ ID NO: 1579977
caaacuccggauauucgau

SEQ ID NO: 1579979 - RNA, 19 nt, Artificial Sequence
  Description of Artificial Sequence: Synthetic oligonucleotide
  Sense strand starting at position 3743 of SEQ ID NO: 1560151
uuugguguguuugugagaa

SEQ ID NO: 1579980 - RNA, 19 nt, Artificial Sequence
  Description of Artificial Sequence: Synthetic oligonucleotide
  Antisense strand to SEQ ID NO: 1579979
uucucacaaacacaccaaa

SEQ ID NO: 1579981 - RNA, 19 nt, Artificial Sequence
  Description of Artificial Sequence: Synthetic oligonucleotide
  Sense strand starting at position 3804 of SEQ ID NO: 1560151
cagggaaugaauuggguuu

SEQ ID NO: 1579982 - RNA, 19 nt, Artificial Sequence
  Description of Artificial Sequence: Synthetic oligonucleotide
  Antisense strand to SEQ ID NO: 1579981
aaacccaauucauucccug

SEQ ID NO: 1579983 - RNA, 19 nt, Artificial Sequence
  Description of Artificial Sequence: Synthetic oligonucleotide
  Sense strand starting at position 3878 of SEQ ID NO: 1560151
ccauguucuuaugcucauu

SEQ ID NO: 1579984 - RNA, 19 nt, Artificial Sequence
  Description of Artificial Sequence: Synthetic oligonucleotide
  Antisense strand to SEQ ID NO: 1579983
aaugagcauaagaacaugg

SEQ ID NO: 1579985 - RNA, 19 nt, Artificial Sequence
  Description of Artificial Sequence: Synthetic oligonucleotide
  Sense strand starting at position 3928 of SEQ ID NO: 1560151
ggcguuucuggccaacuaa

SEQ ID NO: 1579986 - RNA, 19 nt, Artificial Sequence
  Description of Artificial Sequence: Synthetic oligonucleotide
  Antisense strand to SEQ ID NO: 1579985
uuaguuggccagaaacgcc

SEQ ID NO: 1579987 - RNA, 19 nt, Artificial Sequence
  Description of Artificial Sequence: Synthetic oligonucleotide
  Sense strand starting at position 38 of SEQ ID NO: 1560152
gaacaaguguggccagaaa

SEQ ID NO: 1579988 - RNA, 19 nt, Artificial Sequence
  Description of Artificial Sequence: Synthetic oligonucleotide
  Antisense strand to SEQ ID NO: 1579987
uuucuggccacacuuguuc

SEQ ID NO: 1579989 - RNA, 19 nt, Artificial Sequence
  Description of Artificial Sequence: Synthetic oligonucleotide
  Sense strand starting at position 203 of SEQ ID NO: 1560152
ggcugagcuucucugugaa

SEQ ID NO: 1579990 - RNA, 19 nt, Artificial Sequence
  Description of Artificial Sequence: Synthetic oligonucleotide
  Antisense strand to SEQ ID NO: 1579989
uucacagagaagcucagcc

SEQ ID NO: 1579991 - RNA, 19 nt, Artificial Sequence
  Description of Artificial Sequence: Synthetic oligonucleotide
  Sense strand starting at position 205 of SEQ ID NO: 1560152
cugagcuucucugugaaua

SEQ ID NO: 1579992 - RNA, 19 nt, Artificial Sequence
  Description of Artificial Sequence: Synthetic oligonucleotide
  Antisense strand to SEQ ID NO: 1579991
uauucacagagaagcucag

SEQ ID NO: 1579993 - RNA, 19 nt, Artificial Sequence
  Description of Artificial Sequence: Synthetic oligonucleotide
  Sense strand starting at position 206 of SEQ ID NO: 1560152
ugagcuucucugugaauau

SEQ ID NO: 1579994 - RNA, 19 nt, Artificial Sequence
  Description of Artificial Sequence: Synthetic oligonucleotide
  Antisense strand to SEQ ID NO: 1579993
auauucacagagaagcuca

SEQ ID NO: 1579995 - RNA, 19 nt, Artificial Sequence
  Description of Artificial Sequence: Synthetic oligonucleotide
  Sense strand starting at position 254 of SEQ ID NO: 1560152
gcaguucuccagggucuuu

SEQ ID NO: 1579996 - RNA, 19 nt, Artificial Sequence
  Description of Artificial Sequence: Synthetic oligonucleotide
  Antisense strand to SEQ ID NO: 1579995
aaagacccuggagaacugc

SEQ ID NO: 1579997 - RNA, 19 nt, Artificial Sequence
  Description of Artificial Sequence: Synthetic oligonucleotide
  Sense strand starting at position 396 of SEQ ID NO: 1560152
aaggaauucugaucuguug

SEQ ID NO: 1579998 - RNA, 19 nt, Artificial Sequence
  Description of Artificial Sequence: Synthetic oligonucleotide
  Antisense strand to SEQ ID NO: 1579997
caacagaucagaauuccuu

SEQ ID NO: 1579999 - RNA, 19 nt, Artificial Sequence
  Description of Artificial Sequence: Synthetic oligonucleotide
  Sense strand starting at position 398 of SEQ ID NO: 1560152
ggaauucugaucuguugaa

SEQ ID NO: 1580000 - RNA, 19 nt, Artificial Sequence
  Description of Artificial Sequence: Synthetic oligonucleotide
  Antisense strand to SEQ ID NO: 1579999
uucaacagaucagaauucc

SEQ ID NO: 1580001 - RNA, 19 nt, Artificial Sequence
  Description of Artificial Sequence: Synthetic oligonucleotide
  Sense strand starting at position 399 of SEQ ID NO: 1560152
gaauucugaucuguugaag

SEQ ID NO: 1580002 - RNA, 19 nt, Artificial Sequence
  Description of Artificial Sequence: Synthetic oligonucleotide
  Antisense strand to SEQ ID NO: 1580001
cuucaacagaucagaauuc

SEQ ID NO: 1580003 - RNA, 19 nt, Artificial Sequence
  Description of Artificial Sequence: Synthetic oligonucleotide
  Sense strand starting at position 402 of SEQ ID NO: 1560152
uucugaucuguugaaguuu

SEQ ID NO: 1580004 - RNA, 19 nt, Artificial Sequence
  Description of Artificial Sequence: Synthetic oligonucleotide
  Antisense strand to SEQ ID NO: 1580003
aaacuucaacagaucagaa

SEQ ID NO: 1580005 - RNA, 19 nt, Artificial Sequence
  Description of Artificial Sequence: Synthetic oligonucleotide
  Sense strand starting at position 413 of SEQ ID NO: 1560152
ugaaguuugucucuucugu

SEQ ID NO: 1580006 - RNA, 19 nt, Artificial Sequence
  Description of Artificial Sequence: Synthetic oligonucleotide
  Antisense strand to SEQ ID NO: 1580005
acagaagagacaaacuuca

SEQ ID NO: 1580007 - RNA, 19 nt, Artificial Sequence
  Description of Artificial Sequence: Synthetic oligonucleotide
  Sense strand starting at position 430 of SEQ ID NO: 1560152
guguguauccugcacuaaa

SEQ ID NO: 1580008 - RNA, 19 nt, Artificial Sequence
  Description of Artificial Sequence: Synthetic oligonucleotide
  Antisense strand to SEQ ID NO: 1580007
uuuagugcaggauacacac

SEQ ID NO: 1580009 - RNA, 19 nt, Artificial Sequence
  Description of Artificial Sequence: Synthetic oligonucleotide
  Sense strand starting at position 944 of SEQ ID NO: 1560152
cagagagcaucggucaaua

SEQ ID NO: 1580010 - RNA, 19 nt, Artificial Sequence
  Description of Artificial Sequence: Synthetic oligonucleotide
  Antisense strand to SEQ ID NO: 1580009
uauugaccgaugcucucug

SEQ ID NO: 1580011 - RNA, 19 nt, Artificial Sequence
  Description of Artificial Sequence: Synthetic oligonucleotide
  Sense strand starting at position 1092 of SEQ ID NO: 1560152
agcagugugucuccuauuu

SEQ ID NO: 1580012 - RNA, 19 nt, Artificial Sequence
  Description of Artificial Sequence: Synthetic oligonucleotide
  Antisense strand to SEQ ID NO: 1580011
aaauaggagacacacugcu

SEQ ID NO: 1580013 - RNA, 19 nt, Artificial Sequence
  Description of Artificial Sequence: Synthetic oligonucleotide
  Sense strand starting at position 1097 of SEQ ID NO: 1560152
ugugucuccuauuuccuua

SEQ ID NO: 1580014 - RNA, 19 nt, Artificial Sequence
  Description of Artificial Sequence: Synthetic oligonucleotide
  Antisense strand to SEQ ID NO: 1580013
uaaggaaauaggagacaca

SEQ ID NO: 1580015 - RNA, 19 nt, Artificial Sequence
  Description of Artificial Sequence: Synthetic oligonucleotide
  Sense strand starting at position 1384 of SEQ ID NO: 1560152
agggauuugugugaucuug

SEQ ID NO: 1580016 - RNA, 19 nt, Artificial Sequence
  Description of Artificial Sequence: Synthetic oligonucleotide
  Antisense strand to SEQ ID NO: 1580015
caagaucacacaaaucccu

SEQ ID NO: 1580017 - RNA, 19 nt, Artificial Sequence
  Description of Artificial Sequence: Synthetic oligonucleotide
  Sense strand starting at position 1386 of SEQ ID NO: 1560152
ggauuugugugaucuuggu

SEQ ID NO: 1580018 - RNA, 19 nt, Artificial Sequence
  Description of Artificial Sequence: Synthetic oligonucleotide
  Antisense strand to SEQ ID NO: 1580017
accaagaucacacaaaucc

SEQ ID NO: 1580019 - RNA, 19 nt, Artificial Sequence
  Description of Artificial Sequence: Synthetic oligonucleotide
  Sense strand starting at position 1429 of SEQ ID NO: 1560152
ugcagauuccuguggauga

SEQ ID NO: 1580020 - RNA, 19 nt, Artificial Sequence
  Description of Artificial Sequence: Synthetic oligonucleotide
  Antisense strand to SEQ ID NO: 1580019
ucauccacaggaaucugca

SEQ ID NO: 1580021 - RNA, 19 nt, Artificial Sequence
  Description of Artificial Sequence: Synthetic oligonucleotide
  Sense strand starting at position 1431 of SEQ ID NO: 1560152
cagauuccuguggaugagu

SEQ ID NO: 1580022 - RNA, 19 nt, Artificial Sequence
  Description of Artificial Sequence: Synthetic oligonucleotide
  Antisense strand to SEQ ID NO: 1580021
acucauccacaggaaucug

SEQ ID NO: 1580023 - RNA, 19 nt, Artificial Sequence
  Description of Artificial Sequence: Synthetic oligonucleotide
  Sense strand starting at position 1511 of SEQ ID NO: 1560152
ggaugaggacaguguuuca

SEQ ID NO: 1580024 - RNA, 19 nt, Artificial Sequence
  Description of Artificial Sequence: Synthetic oligonucleotide
  Antisense strand to SEQ ID NO: 1580023
ugaaacacuguccucaucc

SEQ ID NO: 1580025 - RNA, 19 nt, Artificial Sequence
  Description of Artificial Sequence: Synthetic oligonucleotide
  Sense strand starting at position 1549 of SEQ ID NO: 1560152
uuuaaagugucaucugaug

SEQ ID NO: 1580026 - RNA, 19 nt, Artificial Sequence
  Description of Artificial Sequence: Synthetic oligonucleotide
  Antisense strand to SEQ ID NO: 1580025
caucagaugacacuuuaaa

SEQ ID NO: 1580027 - RNA, 19 nt, Artificial Sequence
  Description of Artificial Sequence: Synthetic oligonucleotide
  Sense strand starting at position 1590 of SEQ ID NO: 1560152
cguaguggccagugacaau

SEQ ID NO: 1580028 - RNA, 19 nt, Artificial Sequence
  Description of Artificial Sequence: Synthetic oligonucleotide
  Antisense strand to SEQ ID NO: 1580027
auugucacuggccacuacg

SEQ ID NO: 1580029 - RNA, 19 nt, Artificial Sequence
  Description of Artificial Sequence: Synthetic oligonucleotide
  Sense strand starting at position 2032 of SEQ ID NO: 1560152
gggucauggguguggucuu

SEQ ID NO: 1580030 - RNA, 19 nt, Artificial Sequence
  Description of Artificial Sequence: Synthetic oligonucleotide
  Antisense strand to SEQ ID NO: 1580029
aagaccacacccaugaccc

SEQ ID NO: 1580031 - RNA, 19 nt, Artificial Sequence
  Description of Artificial Sequence: Synthetic oligonucleotide
  Sense strand starting at position 2039 of SEQ ID NO: 1560152
ggguguggucuuuauucag

SEQ ID NO: 1580032 - RNA, 19 nt, Artificial Sequence
  Description of Artificial Sequence: Synthetic oligonucleotide
  Antisense strand to SEQ ID NO: 1580031
cugaauaaagaccacaccc

SEQ ID NO: 1580033 - RNA, 19 nt, Artificial Sequence
  Description of Artificial Sequence: Synthetic oligonucleotide
  Sense strand starting at position 2219 of SEQ ID NO: 1560152
uguccuugggucugucaca

SEQ ID NO: 1580034 - RNA, 19 nt, Artificial Sequence
  Description of Artificial Sequence: Synthetic oligonucleotide
  Antisense strand to SEQ ID NO: 1580033
ugugacagacccaaggaca

SEQ ID NO: 1580035 - RNA, 19 nt, Artificial Sequence
  Description of Artificial Sequence: Synthetic oligonucleotide
  Sense strand starting at position 2504 of SEQ ID NO: 1560152
gugucuuguguguccugga

SEQ ID NO: 1580036 - RNA, 19 nt, Artificial Sequence
  Description of Artificial Sequence: Synthetic oligonucleotide
  Antisense strand to SEQ ID NO: 1580035
uccaggacacacaagacac

SEQ ID NO: 1580037 - RNA, 19 nt, Artificial Sequence
  Description of Artificial Sequence: Synthetic oligonucleotide
  Sense strand starting at position 2505 of SEQ ID NO: 1560152
ugucuuguguguccuggaa

SEQ ID NO: 1580038 - RNA, 19 nt, Artificial Sequence
  Description of Artificial Sequence: Synthetic oligonucleotide
  Antisense strand to SEQ ID NO: 1580037
uuccaggacacacaagaca

SEQ ID NO: 1580039 - RNA, 19 nt, Artificial Sequence
  Description of Artificial Sequence: Synthetic oligonucleotide
  Sense strand starting at position 2509 of SEQ ID NO: 1560152
uuguguguccuggaaagag

SEQ ID NO: 1580040 - RNA, 19 nt, Artificial Sequence
  Description of Artificial Sequence: Synthetic oligonucleotide
  Antisense strand to SEQ ID NO: 1580039
cucuuuccaggacacacaa

SEQ ID NO: 1580041 - RNA, 19 nt, Artificial Sequence
  Description of Artificial Sequence: Synthetic oligonucleotide
  Sense strand starting at position 2686 of SEQ ID NO: 1560152
cugacuguccugugaucac

SEQ ID NO: 1580042 - RNA, 19 nt, Artificial Sequence
  Description of Artificial Sequence: Synthetic oligonucleotide
  Antisense strand to SEQ ID NO: 1580041
gugaucacaggacagucag

SEQ ID NO: 1580043 - RNA, 19 nt, Artificial Sequence
  Description of Artificial Sequence: Synthetic oligonucleotide
  Sense strand starting at position 2816 of SEQ ID NO: 1560152
aucagaagggucuguugga

SEQ ID NO: 1580044 - RNA, 19 nt, Artificial Sequence
  Description of Artificial Sequence: Synthetic oligonucleotide
  Antisense strand to SEQ ID NO: 1580043
uccaacagacccuucugau

SEQ ID NO: 1580045 - RNA, 19 nt, Artificial Sequence
  Description of Artificial Sequence: Synthetic oligonucleotide
  Sense strand starting at position 2895 of SEQ ID NO: 1560152
gggaauccguuuccugagu

SEQ ID NO: 1580046 - RNA, 19 nt, Artificial Sequence
  Description of Artificial Sequence: Synthetic oligonucleotide
  Antisense strand to SEQ ID NO: 1580045
acucaggaaacggauuccc

SEQ ID NO: 1580047 - RNA, 19 nt, Artificial Sequence
  Description of Artificial Sequence: Synthetic oligonucleotide
  Sense strand starting at position 2910 of SEQ ID NO: 1560152
gagugaugucugugugcaa

SEQ ID NO: 1580048 - RNA, 19 nt, Artificial Sequence
  Description of Artificial Sequence: Synthetic oligonucleotide
  Antisense strand to SEQ ID NO: 1580047
uugcacacagacaucacuc

SEQ ID NO: 1580049 - RNA, 19 nt, Artificial Sequence
  Description of Artificial Sequence: Synthetic oligonucleotide
  Sense strand starting at position 3253 of SEQ ID NO: 1560152
accaguauuuauggagcau

SEQ ID NO: 1580050 - RNA, 19 nt, Artificial Sequence
  Description of Artificial Sequence: Synthetic oligonucleotide
  Antisense strand to SEQ ID NO: 1580049
augcuccauaaauacuggu

SEQ ID NO: 1580051 - RNA, 19 nt, Artificial Sequence
  Description of Artificial Sequence: Synthetic oligonucleotide
  Sense strand starting at position 3325 of SEQ ID NO: 1560152
agacguggucccugucaca

SEQ ID NO: 1580052 - RNA, 19 nt, Artificial Sequence
  Description of Artificial Sequence: Synthetic oligonucleotide
  Antisense strand to SEQ ID NO: 1580051
ugugacagggaccacgucu

SEQ ID NO: 1580053 - RNA, 19 nt, Artificial Sequence
  Description of Artificial Sequence: Synthetic oligonucleotide
  Sense strand starting at position 3392 of SEQ ID NO: 1560152
ugaggaguuaaugguaaug

SEQ ID NO: 1580054 - RNA, 19 nt, Artificial Sequence
  Description of Artificial Sequence: Synthetic oligonucleotide
  Antisense strand to SEQ ID NO: 1580053
cauuaccauuaacuccuca

SEQ ID NO: 1580055 - RNA, 19 nt, Artificial Sequence
  Description of Artificial Sequence: Synthetic oligonucleotide
  Sense strand starting at position 3394 of SEQ ID NO: 1560152
aggaguuaaugguaaugac

SEQ ID NO: 1580056 - RNA, 19 nt, Artificial Sequence
  Description of Artificial Sequence: Synthetic oligonucleotide
  Antisense strand to SEQ ID NO: 1580055
gucauuaccauuaacuccu

SEQ ID NO: 1580057 - RNA, 19 nt, Artificial Sequence
  Description of Artificial Sequence: Synthetic oligonucleotide
  Sense strand starting at position 3459 of SEQ ID NO: 1560152
cugagcuguccuggagauc

SEQ ID NO: 1580058 - RNA, 19 nt, Artificial Sequence
  Description of Artificial Sequence: Synthetic oligonucleotide
  Antisense strand to SEQ ID NO: 1580057
gaucuccaggacagcucag

SEQ ID NO: 1580059 - RNA, 19 nt, Artificial Sequence
  Description of Artificial Sequence: Synthetic oligonucleotide
  Sense strand starting at position 3460 of SEQ ID NO: 1560152
ugagcuguccuggagauca

SEQ ID NO: 1580060 - RNA, 19 nt, Artificial Sequence
  Description of Artificial Sequence: Synthetic oligonucleotide
  Antisense strand to SEQ ID NO: 1580059
ugaucuccaggacagcuca

SEQ ID NO: 1580061 - RNA, 19 nt, Artificial Sequence
  Description of Artificial Sequence: Synthetic oligonucleotide
  Sense strand starting at position 3462 of SEQ ID NO: 1560152
agcuguccuggagaucaca

SEQ ID NO: 1580062 - RNA, 19 nt, Artificial Sequence
  Description of Artificial Sequence: Synthetic oligonucleotide
  Antisense strand to SEQ ID NO: 1580061
ugugaucuccaggacagcu

SEQ ID NO: 1580063 - RNA, 19 nt, Artificial Sequence
  Description of Artificial Sequence: Synthetic oligonucleotide
  Sense strand starting at position 3861 of SEQ ID NO: 1560152
acgggucaugcacauguua

SEQ ID NO: 1580064 - RNA, 19 nt, Artificial Sequence
  Description of Artificial Sequence: Synthetic oligonucleotide
  Antisense strand to SEQ ID NO: 1580063
uaacaugugcaugacccgu

SEQ ID NO: 1580065 - RNA, 19 nt, Artificial Sequence
  Description of Artificial Sequence: Synthetic oligonucleotide
  Sense strand starting at position 3863 of SEQ ID NO: 1560152
gggucaugcacauguuaug

SEQ ID NO: 1580066 - RNA, 19 nt, Artificial Sequence
  Description of Artificial Sequence: Synthetic oligonucleotide
  Antisense strand to SEQ ID NO: 1580065
cauaacaugugcaugaccc

SEQ ID NO: 1580067 - RNA, 19 nt, Artificial Sequence
  Description of Artificial Sequence: Synthetic oligonucleotide
  Sense strand starting at position 506 of SEQ ID NO: 1560153
guaugugggaaguagaacu

SEQ ID NO: 1580068 - RNA, 19 nt, Artificial Sequence
  Description of Artificial Sequence: Synthetic oligonucleotide
  Antisense strand to SEQ ID NO: 1580067
aguucuacuucccacauac

SEQ ID NO: 1580069 - RNA, 19 nt, Artificial Sequence
  Description of Artificial Sequence: Synthetic oligonucleotide
  Sense strand starting at position 933 of SEQ ID NO: 1560153
gagagagcaucggucaaua

SEQ ID NO: 1580070 - RNA, 19 nt, Artificial Sequence
  Description of Artificial Sequence: Synthetic oligonucleotide
  Antisense strand to SEQ ID NO: 1580069
uauugaccgaugcucucuc

SEQ ID NO: 1580071 - RNA, 19 nt, Artificial Sequence
  Description of Artificial Sequence: Synthetic oligonucleotide
  Sense strand starting at position 1062 of SEQ ID NO: 1560153
guguguccuacugagucaa

SEQ ID NO: 1580072 - RNA, 19 nt, Artificial Sequence
  Description of Artificial Sequence: Synthetic oligonucleotide
  Antisense strand to SEQ ID NO: 1580071
uugacucaguaggacacac

SEQ ID NO: 1580073 - RNA, 19 nt, Artificial Sequence
  Description of Artificial Sequence: Synthetic oligonucleotide
  Sense strand starting at position 1078 of SEQ ID NO: 1560153
caaagucagcagugugaca

SEQ ID NO: 1580074 - RNA, 19 nt, Artificial Sequence
  Description of Artificial Sequence: Synthetic oligonucleotide
  Antisense strand to SEQ ID NO: 1580073
ugucacacugcugacuuug

SEQ ID NO: 1580075 - RNA, 19 nt, Artificial Sequence
  Description of Artificial Sequence: Synthetic oligonucleotide
  Sense strand starting at position 1359 of SEQ ID NO: 1560153
agcauaagcucugugauga

SEQ ID NO: 1580076 - RNA, 19 nt, Artificial Sequence
  Description of Artificial Sequence: Synthetic oligonucleotide
  Antisense strand to SEQ ID NO: 1580075
ucaucacagagcuuaugcu

SEQ ID NO: 1580077 - RNA, 19 nt, Artificial Sequence
  Description of Artificial Sequence: Synthetic oligonucleotide
  Sense strand starting at position 1367 of SEQ ID NO: 1560153
cucugugaugacugagacu

SEQ ID NO: 1580078 - RNA, 19 nt, Artificial Sequence
  Description of Artificial Sequence: Synthetic oligonucleotide
  Antisense strand to SEQ ID NO: 1580077
agucucagucaucacagag

SEQ ID NO: 1580079 - RNA, 19 nt, Artificial Sequence
  Description of Artificial Sequence: Synthetic oligonucleotide
  Sense strand starting at position 1374 of SEQ ID NO: 1560153
augacugagacuugucuga

SEQ ID NO: 1580080 - RNA, 19 nt, Artificial Sequence
  Description of Artificial Sequence: Synthetic oligonucleotide
  Antisense strand to SEQ ID NO: 1580079
ucagacaagucucagucau

SEQ ID NO: 1580081 - RNA, 19 nt, Artificial Sequence
  Description of Artificial Sequence: Synthetic oligonucleotide
  Sense strand starting at position 1376 of SEQ ID NO: 1560153
gacugagacuugucugaug

SEQ ID NO: 1580082 - RNA, 19 nt, Artificial Sequence
  Description of Artificial Sequence: Synthetic oligonucleotide
  Antisense strand to SEQ ID NO: 1580081
caucagacaagucucaguc

SEQ ID NO: 1580083 - RNA, 19 nt, Artificial Sequence
  Description of Artificial Sequence: Synthetic oligonucleotide
  Sense strand starting at position 1378 of SEQ ID NO: 1560153
cugagacuugucugaugcu

SEQ ID NO: 1580084 - RNA, 19 nt, Artificial Sequence
  Description of Artificial Sequence: Synthetic oligonucleotide
  Antisense strand to SEQ ID NO: 1580083
agcaucagacaagucucag

SEQ ID NO: 1580085 - RNA, 19 nt, Artificial Sequence
  Description of Artificial Sequence: Synthetic oligonucleotide
  Sense strand starting at position 1428 of SEQ ID NO: 1560153
aaugcuuguggaugaguua

SEQ ID NO: 1580086 - RNA, 19 nt, Artificial Sequence
  Description of Artificial Sequence: Synthetic oligonucleotide
  Antisense strand to SEQ ID NO: 1580085
uaacucauccacaagcauu

SEQ ID NO: 1580087 - RNA, 19 nt, Artificial Sequence
  Description of Artificial Sequence: Synthetic oligonucleotide
  Sense strand starting at position 1431 of SEQ ID NO: 1560153
gcuuguggaugaguuaaug

SEQ ID NO: 1580088 - RNA, 19 nt, Artificial Sequence
  Description of Artificial Sequence: Synthetic oligonucleotide
  Antisense strand to SEQ ID NO: 1580087
cauuaacucauccacaagc

SEQ ID NO: 1580089 - RNA, 19 nt, Artificial Sequence
  Description of Artificial Sequence: Synthetic oligonucleotide
  Sense strand starting at position 1437 of SEQ ID NO: 1560153
ggaugaguuaaugagugua

SEQ ID NO: 1580090 - RNA, 19 nt, Artificial Sequence
  Description of Artificial Sequence: Synthetic oligonucleotide
  Antisense strand to SEQ ID NO: 1580089
uacacucauuaacucaucc

SEQ ID NO: 1580091 - RNA, 19 nt, Artificial Sequence
  Description of Artificial Sequence: Synthetic oligonucleotide
  Sense strand starting at position 1440 of SEQ ID NO: 1560153
ugaguuaaugaguguaucu

SEQ ID NO: 1580092 - RNA, 19 nt, Artificial Sequence
  Description of Artificial Sequence: Synthetic oligonucleotide
  Antisense strand to SEQ ID NO: 1580091
agauacacucauuaacuca

SEQ ID NO: 1580093 - RNA, 19 nt, Artificial Sequence
  Description of Artificial Sequence: Synthetic oligonucleotide
  Sense strand starting at position 1473 of SEQ ID NO: 1560153
aacuucugauuggugagua

SEQ ID NO: 1580094 - RNA, 19 nt, Artificial Sequence
  Description of Artificial Sequence: Synthetic oligonucleotide
  Antisense strand to SEQ ID NO: 1580093
uacucaccaaucagaaguu

SEQ ID NO: 1580095 - RNA, 19 nt, Artificial Sequence
  Description of Artificial Sequence: Synthetic oligonucleotide
  Sense strand starting at position 1498 of SEQ ID NO: 1560153
gcauuuaguuuccuuguua

SEQ ID NO: 1580096 - RNA, 19 nt, Artificial Sequence
  Description of Artificial Sequence: Synthetic oligonucleotide
  Antisense strand to SEQ ID NO: 1580095
uaacaaggaaacuaaaugc

SEQ ID NO: 1580097 - RNA, 19 nt, Artificial Sequence
  Description of Artificial Sequence: Synthetic oligonucleotide
  Sense strand starting at position 1525 of SEQ ID NO: 1560153
uuuggagugucauccuaau

SEQ ID NO: 1580098 - RNA, 19 nt, Artificial Sequence
  Description of Artificial Sequence: Synthetic oligonucleotide
  Antisense strand to SEQ ID NO: 1580097
auuaggaugacacuccaaa

SEQ ID NO: 1580099 - RNA, 19 nt, Artificial Sequence
  Description of Artificial Sequence: Synthetic oligonucleotide
  Sense strand starting at position 1997 of SEQ ID NO: 1560153
gccuccucucagggauaga

SEQ ID NO: 1580100 - RNA, 19 nt, Artificial Sequence
  Description of Artificial Sequence: Synthetic oligonucleotide
  Antisense strand to SEQ ID NO: 1580099
ucuaucccugagaggaggc

SEQ ID NO: 1580101 - RNA, 19 nt, Artificial Sequence
  Description of Artificial Sequence: Synthetic oligonucleotide
  Sense strand starting at position 2047 of SEQ ID NO: 1560153
gcggucucuguucaggaau

SEQ ID NO: 1580102 - RNA, 19 nt, Artificial Sequence
  Description of Artificial Sequence: Synthetic oligonucleotide
  Antisense strand to SEQ ID NO: 1580101
auuccugaacagagaccgc

SEQ ID NO: 1580103 - RNA, 19 nt, Artificial Sequence
  Description of Artificial Sequence: Synthetic oligonucleotide
  Sense strand starting at position 2139 of SEQ ID NO: 1560153
cccagaagaugcucugaga

SEQ ID NO: 1580104 - RNA, 19 nt, Artificial Sequence
  Description of Artificial Sequence: Synthetic oligonucleotide
  Antisense strand to SEQ ID NO: 1580103
ucucagagcaucuucuggg

SEQ ID NO: 1580105 - RNA, 19 nt, Artificial Sequence
  Description of Artificial Sequence: Synthetic oligonucleotide
  Sense strand starting at position 2411 of SEQ ID NO: 1560153
ggacacauccagggcuaaa

SEQ ID NO: 1580106 - RNA, 19 nt, Artificial Sequence
  Description of Artificial Sequence: Synthetic oligonucleotide
  Antisense strand to SEQ ID NO: 1580105
uuuagcccuggaugugucc

SEQ ID NO: 1580107 - RNA, 19 nt, Artificial Sequence
  Description of Artificial Sequence: Synthetic oligonucleotide
  Sense strand starting at position 2453 of SEQ ID NO: 1560153
guucuuucugcaguguuau

SEQ ID NO: 1580108 - RNA, 19 nt, Artificial Sequence
  Description of Artificial Sequence: Synthetic oligonucleotide
  Antisense strand to SEQ ID NO: 1580107
auaacacugcagaaagaac

SEQ ID NO: 1580109 - RNA, 19 nt, Artificial Sequence
  Description of Artificial Sequence: Synthetic oligonucleotide
  Sense strand starting at position 2464 of SEQ ID NO: 1560153
aguguuaugugacucuaau

SEQ ID NO: 1580110 - RNA, 19 nt, Artificial Sequence
  Description of Artificial Sequence: Synthetic oligonucleotide
  Antisense strand to SEQ ID NO: 1580109
auuagagucacauaacacu

SEQ ID NO: 1580111 - RNA, 19 nt, Artificial Sequence
  Description of Artificial Sequence: Synthetic oligonucleotide
  Sense strand starting at position 2488 of SEQ ID NO: 1560153
gggaguaacugagaaugaa

SEQ ID NO: 1580112 - RNA, 19 nt, Artificial Sequence
  Description of Artificial Sequence: Synthetic oligonucleotide
  Antisense strand to SEQ ID NO: 1580111
uucauucucaguuacuccc

SEQ ID NO: 1580113 - RNA, 19 nt, Artificial Sequence
  Description of Artificial Sequence: Synthetic oligonucleotide
  Sense strand starting at position 2522 of SEQ ID NO: 1560153
aguauuaugucauccagac

SEQ ID NO: 1580114 - RNA, 19 nt, Artificial Sequence
  Description of Artificial Sequence: Synthetic oligonucleotide
  Antisense strand to SEQ ID NO: 1580113
gucuggaugacauaauacu

SEQ ID NO: 1580115 - RNA, 19 nt, Artificial Sequence
  Description of Artificial Sequence: Synthetic oligonucleotide
  Sense strand starting at position 2778 of SEQ ID NO: 1560153
agagauuugaugugugcuu

SEQ ID NO: 1580116 - RNA, 19 nt, Artificial Sequence
  Description of Artificial Sequence: Synthetic oligonucleotide
  Antisense strand to SEQ ID NO: 1580115
aagcacacaucaaaucucu

SEQ ID NO: 1580117 - RNA, 19 nt, Artificial Sequence
  Description of Artificial Sequence: Synthetic oligonucleotide
  Sense strand starting at position 2783 of SEQ ID NO: 1560153
uuugaugugugcuuaauuu

SEQ ID NO: 1580118 - RNA, 19 nt, Artificial Sequence
  Description of Artificial Sequence: Synthetic oligonucleotide
  Antisense strand to SEQ ID NO: 1580117
aaauuaagcacacaucaaa

SEQ ID NO: 1580119 - RNA, 19 nt, Artificial Sequence
  Description of Artificial Sequence: Synthetic oligonucleotide
  Sense strand starting at position 2886 of SEQ ID NO: 1560153
uauauaguggcauaagcau

SEQ ID NO: 1580120 - RNA, 19 nt, Artificial Sequence
  Description of Artificial Sequence: Synthetic oligonucleotide
  Antisense strand to SEQ ID NO: 1580119
augcuuaugccacuauaua

SEQ ID NO: 1580121 - RNA, 19 nt, Artificial Sequence
  Description of Artificial Sequence: Synthetic oligonucleotide
  Sense strand starting at position 2892 of SEQ ID NO: 1560153
guggcauaagcauggaauu

SEQ ID NO: 1580122 - RNA, 19 nt, Artificial Sequence
  Description of Artificial Sequence: Synthetic oligonucleotide
  Antisense strand to SEQ ID NO: 1580121
aauuccaugcuuaugccac

SEQ ID NO: 1580123 - RNA, 19 nt, Artificial Sequence
  Description of Artificial Sequence: Synthetic oligonucleotide
  Sense strand starting at position 3089 of SEQ ID NO: 1560153
guacgugaugguuaucauu

SEQ ID NO: 1580124 - RNA, 19 nt, Artificial Sequence
  Description of Artificial Sequence: Synthetic oligonucleotide
  Antisense strand to SEQ ID NO: 1580123
aaugauaaccaucacguac

SEQ ID NO: 1580125 - RNA, 19 nt, Artificial Sequence
  Description of Artificial Sequence: Synthetic oligonucleotide
  Sense strand starting at position 3137 of SEQ ID NO: 1560153
uuccaaagagagugucuau

SEQ ID NO: 1580126 - RNA, 19 nt, Artificial Sequence
  Description of Artificial Sequence: Synthetic oligonucleotide
  Antisense strand to SEQ ID NO: 1580125
auagacacucucuuuggaa

SEQ ID NO: 1580127 - RNA, 19 nt, Artificial Sequence
  Description of Artificial Sequence: Synthetic oligonucleotide
  Sense strand starting at position 3144 of SEQ ID NO: 1560153
gagagugucuaugcuggaa

SEQ ID NO: 1580128 - RNA, 19 nt, Artificial Sequence
  Description of Artificial Sequence: Synthetic oligonucleotide
  Antisense strand to SEQ ID NO: 1580127
uuccagcauagacacucuc

SEQ ID NO: 1580129 - RNA, 19 nt, Artificial Sequence
  Description of Artificial Sequence: Synthetic oligonucleotide
  Sense strand starting at position 3147 of SEQ ID NO: 1560153
agugucuaugcuggaauau

SEQ ID NO: 1580130 - RNA, 19 nt, Artificial Sequence
  Description of Artificial Sequence: Synthetic oligonucleotide
  Antisense strand to SEQ ID NO: 1580129
auauuccagcauagacacu

SEQ ID NO: 1580131 - RNA, 19 nt, Artificial Sequence
  Description of Artificial Sequence: Synthetic oligonucleotide
  Sense strand starting at position 3148 of SEQ ID NO: 1560153
gugucuaugcuggaauauu

SEQ ID NO: 1580132 - RNA, 19 nt, Artificial Sequence
  Description of Artificial Sequence: Synthetic oligonucleotide
  Antisense strand to SEQ ID NO: 1580131
aauauuccagcauagacac

SEQ ID NO: 1580133 - RNA, 19 nt, Artificial Sequence
  Description of Artificial Sequence: Synthetic oligonucleotide
  Sense strand starting at position 3184 of SEQ ID NO: 1560153
cuaacaugcaugugugaag

SEQ ID NO: 1580134 - RNA, 19 nt, Artificial Sequence
  Description of Artificial Sequence: Synthetic oligonucleotide
  Antisense strand to SEQ ID NO: 1580133
cuucacacaugcauguuag

SEQ ID NO: 1580135 - RNA, 19 nt, Artificial Sequence
  Description of Artificial Sequence: Synthetic oligonucleotide
  Sense strand starting at position 3185 of SEQ ID NO: 1560153
uaacaugcaugugugaaga

SEQ ID NO: 1580136 - RNA, 19 nt, Artificial Sequence
  Description of Artificial Sequence: Synthetic oligonucleotide
  Antisense strand to SEQ ID NO: 1580135
ucuucacacaugcauguua

SEQ ID NO: 1580137 - RNA, 19 nt, Artificial Sequence
  Description of Artificial Sequence: Synthetic oligonucleotide
  Sense strand starting at position 3285 of SEQ ID NO: 1560153
ggucaaguugucuaacuuu

SEQ ID NO: 1580138 - RNA, 19 nt, Artificial Sequence
  Description of Artificial Sequence: Synthetic oligonucleotide
  Antisense strand to SEQ ID NO: 1580137
aaaguuagacaacuugacc

SEQ ID NO: 1580139 - RNA, 19 nt, Artificial Sequence
  Description of Artificial Sequence: Synthetic oligonucleotide
  Sense strand starting at position 3430 of SEQ ID NO: 1560153
ugcccauggucuguaaaca

SEQ ID NO: 1580140 - RNA, 19 nt, Artificial Sequence
  Description of Artificial Sequence: Synthetic oligonucleotide
  Antisense strand to SEQ ID NO: 1580139
uguuuacagaccaugggca

SEQ ID NO: 1580141 - RNA, 19 nt, Artificial Sequence
  Description of Artificial Sequence: Synthetic oligonucleotide
  Sense strand starting at position 3480 of SEQ ID NO: 1560153
uggagaaauagcugaucca

SEQ ID NO: 1580142 - RNA, 19 nt, Artificial Sequence
  Description of Artificial Sequence: Synthetic oligonucleotide
  Antisense strand to SEQ ID NO: 1580141
uggaucagcuauuucucca

SEQ ID NO: 1580143 - RNA, 19 nt, Artificial Sequence
  Description of Artificial Sequence: Synthetic oligonucleotide
  Sense strand starting at position 3646 of SEQ ID NO: 1560153
gggacaauaucagcgacau

SEQ ID NO: 1580144 - RNA, 19 nt, Artificial Sequence
  Description of Artificial Sequence: Synthetic oligonucleotide
  Antisense strand to SEQ ID NO: 1580143
augucgcugauauuguccc

SEQ ID NO: 1580145 - RNA, 19 nt, Artificial Sequence
  Description of Artificial Sequence: Synthetic oligonucleotide
  Sense strand starting at position 3647 of SEQ ID NO: 1560153
ggacaauaucagcgacaua

SEQ ID NO: 1580146 - RNA, 19 nt, Artificial Sequence
  Description of Artificial Sequence: Synthetic oligonucleotide
  Antisense strand to SEQ ID NO: 1580145
uaugucgcugauauugucc

SEQ ID NO: 1580147 - RNA, 19 nt, Artificial Sequence
  Description of Artificial Sequence: Synthetic oligonucleotide
  Sense strand starting at position 226 of SEQ ID NO: 1560154
cugagcuucucugugagga

SEQ ID NO: 1580148 - RNA, 19 nt, Artificial Sequence
  Description of Artificial Sequence: Synthetic oligonucleotide
  Antisense strand to SEQ ID NO: 1580147
uccucacagagaagcucag

SEQ ID NO: 1580149 - RNA, 19 nt, Artificial Sequence
  Description of Artificial Sequence: Synthetic oligonucleotide
  Sense strand starting at position 227 of SEQ ID NO: 1560154
ugagcuucucugugaggau

SEQ ID NO: 1580150 - RNA, 19 nt, Artificial Sequence
  Description of Artificial Sequence: Synthetic oligonucleotide
  Antisense strand to SEQ ID NO: 1580149
auccucacagagaagcuca

SEQ ID NO: 1580151 - RNA, 19 nt, Artificial Sequence
  Description of Artificial Sequence: Synthetic oligonucleotide
  Sense strand starting at position 308 of SEQ ID NO: 1560154
cacagaaucuuggcugaga

SEQ ID NO: 1580152 - RNA, 19 nt, Artificial Sequence
  Description of Artificial Sequence: Synthetic oligonucleotide
  Antisense strand to SEQ ID NO: 1580151
ucucagccaagauucugug

SEQ ID NO: 1580153 - RNA, 19 nt, Artificial Sequence
  Description of Artificial Sequence: Synthetic oligonucleotide
  Sense strand starting at position 310 of SEQ ID NO: 1560154
cagaaucuuggcugagacu

SEQ ID NO: 1580154 - RNA, 19 nt, Artificial Sequence
  Description of Artificial Sequence: Synthetic oligonucleotide
  Antisense strand to SEQ ID NO: 1580153
agucucagccaagauucug

SEQ ID NO: 1580155 - RNA, 19 nt, Artificial Sequence
  Description of Artificial Sequence: Synthetic oligonucleotide
  Sense strand starting at position 405 of SEQ ID NO: 1560154
aagggauucuggucuguag

SEQ ID NO: 1580156 - RNA, 19 nt, Artificial Sequence
  Description of Artificial Sequence: Synthetic oligonucleotide
  Antisense strand to SEQ ID NO: 1580155
cuacagaccagaaucccuu

SEQ ID NO: 1580157 - RNA, 19 nt, Artificial Sequence
  Description of Artificial Sequence: Synthetic oligonucleotide
  Sense strand starting at position 407 of SEQ ID NO: 1560154
gggauucuggucuguagaa

SEQ ID NO: 1580158 - RNA, 19 nt, Artificial Sequence
  Description of Artificial Sequence: Synthetic oligonucleotide
  Antisense strand to SEQ ID NO: 1580157
uucuacagaccagaauccc

SEQ ID NO: 1580159 - RNA, 19 nt, Artificial Sequence
  Description of Artificial Sequence: Synthetic oligonucleotide
  Sense strand starting at position 408 of SEQ ID NO: 1560154
ggauucuggucuguagaag

SEQ ID NO: 1580160 - RNA, 19 nt, Artificial Sequence
  Description of Artificial Sequence: Synthetic oligonucleotide
  Antisense strand to SEQ ID NO: 1580159
cuucuacagaccagaaucc

SEQ ID NO: 1580161 - RNA, 19 nt, Artificial Sequence
  Description of Artificial Sequence: Synthetic oligonucleotide
  Sense strand starting at position 409 of SEQ ID NO: 1560154
gauucuggucuguagaagu

SEQ ID NO: 1580162 - RNA, 19 nt, Artificial Sequence
  Description of Artificial Sequence: Synthetic oligonucleotide
  Antisense strand to SEQ ID NO: 1580161
acuucuacagaccagaauc

SEQ ID NO: 1580163 - RNA, 19 nt, Artificial Sequence
  Description of Artificial Sequence: Synthetic oligonucleotide
  Sense strand starting at position 525 of SEQ ID NO: 1560154
guguguaugaaguagaacu

SEQ ID NO: 1580164 - RNA, 19 nt, Artificial Sequence
  Description of Artificial Sequence: Synthetic oligonucleotide
  Antisense strand to SEQ ID NO: 1580163
aguucuacuucauacacac

SEQ ID NO: 1580165 - RNA, 19 nt, Artificial Sequence
  Description of Artificial Sequence: Synthetic oligonucleotide
  Sense strand starting at position 555 of SEQ ID NO: 1560154
cccagaagucauggaggua

SEQ ID NO: 1580166 - RNA, 19 nt, Artificial Sequence
  Description of Artificial Sequence: Synthetic oligonucleotide
  Antisense strand to SEQ ID NO: 1580165
uaccuccaugacuucuggg

SEQ ID NO: 1580167 - RNA, 19 nt, Artificial Sequence
  Description of Artificial Sequence: Synthetic oligonucleotide
  Sense strand starting at position 558 of SEQ ID NO: 1560154
agaagucauggagguauca

SEQ ID NO: 1580168 - RNA, 19 nt, Artificial Sequence
  Description of Artificial Sequence: Synthetic oligonucleotide
  Antisense strand to SEQ ID NO: 1580167
ugauaccuccaugacuucu

SEQ ID NO: 1580169 - RNA, 19 nt, Artificial Sequence
  Description of Artificial Sequence: Synthetic oligonucleotide
  Sense strand starting at position 577 of SEQ ID NO: 1560154
cucacagaauacguagaau

SEQ ID NO: 1580170 - RNA, 19 nt, Artificial Sequence
  Description of Artificial Sequence: Synthetic oligonucleotide
  Antisense strand to SEQ ID NO: 1580169
auucuacguauucugugag

SEQ ID NO: 1580171 - RNA, 19 nt, Artificial Sequence
  Description of Artificial Sequence: Synthetic oligonucleotide
  Sense strand starting at position 580 of SEQ ID NO: 1560154
acagaauacguagaauugu

SEQ ID NO: 1580172 - RNA, 19 nt, Artificial Sequence
  Description of Artificial Sequence: Synthetic oligonucleotide
  Antisense strand to SEQ ID NO: 1580171
acaauucuacguauucugu

SEQ ID NO: 1580173 - RNA, 19 nt, Artificial Sequence
  Description of Artificial Sequence: Synthetic oligonucleotide
  Sense strand starting at position 591 of SEQ ID NO: 1560154
agaauugucugguuacuuc

SEQ ID NO: 1580174 - RNA, 19 nt, Artificial Sequence
  Description of Artificial Sequence: Synthetic oligonucleotide
  Antisense strand to SEQ ID NO: 1580173
gaaguaaccagacaauucu

SEQ ID NO: 1580175 - RNA, 19 nt, Artificial Sequence
  Description of Artificial Sequence: Synthetic oligonucleotide
  Sense strand starting at position 633 of SEQ ID NO: 1560154
uaacguguaggguauagau

SEQ ID NO: 1580176 - RNA, 19 nt, Artificial Sequence
  Description of Artificial Sequence: Synthetic oligonucleotide
  Antisense strand to SEQ ID NO: 1580175
aucuauacccuacacguua

SEQ ID NO: 1580177 - RNA, 19 nt, Artificial Sequence
  Description of Artificial Sequence: Synthetic oligonucleotide
  Sense strand starting at position 864 of SEQ ID NO: 1560154
ucccuucugcgacauugaa

SEQ ID NO: 1580178 - RNA, 19 nt, Artificial Sequence
  Description of Artificial Sequence: Synthetic oligonucleotide
  Antisense strand to SEQ ID NO: 1580177
uucaaugucgcagaaggga

SEQ ID NO: 1580179 - RNA, 19 nt, Artificial Sequence
  Description of Artificial Sequence: Synthetic oligonucleotide
  Sense strand starting at position 882 of SEQ ID NO: 1560154
acggcacgacaucaauauu

SEQ ID NO: 1580180 - RNA, 19 nt, Artificial Sequence
  Description of Artificial Sequence: Synthetic oligonucleotide
  Antisense strand to SEQ ID NO: 1580179
aauauugaugucgugccgu

SEQ ID NO: 1580181 - RNA, 19 nt, Artificial Sequence
  Description of Artificial Sequence: Synthetic oligonucleotide
  Sense strand starting at position 885 of SEQ ID NO: 1560154
gcacgacaucaauauuggu

SEQ ID NO: 1580182 - RNA, 19 nt, Artificial Sequence
  Description of Artificial Sequence: Synthetic oligonucleotide
  Antisense strand to SEQ ID NO: 1580181
accaauauugaugucgugc

SEQ ID NO: 1580183 - RNA, 19 nt, Artificial Sequence
  Description of Artificial Sequence: Synthetic oligonucleotide
  Sense strand starting at position 893 of SEQ ID NO: 1560154
ucaauauuggucugggcac

SEQ ID NO: 1580184 - RNA, 19 nt, Artificial Sequence
  Description of Artificial Sequence: Synthetic oligonucleotide
  Antisense strand to SEQ ID NO: 1580183
gugcccagaccaauauuga

SEQ ID NO: 1580185 - RNA, 19 nt, Artificial Sequence
  Description of Artificial Sequence: Synthetic oligonucleotide
  Sense strand starting at position 919 of SEQ ID NO: 1560154
cagguuccagaagguuaaa

SEQ ID NO: 1580186 - RNA, 19 nt, Artificial Sequence
  Description of Artificial Sequence: Synthetic oligonucleotide
  Antisense strand to SEQ ID NO: 1580185
uuuaaccuucuggaaccug

SEQ ID NO: 1580187 - RNA, 19 nt, Artificial Sequence
  Description of Artificial Sequence: Synthetic oligonucleotide
  Sense strand starting at position 1071 of SEQ ID NO: 1560154
uguguccuacuggaucaau

SEQ ID NO: 1580188 - RNA, 19 nt, Artificial Sequence
  Description of Artificial Sequence: Synthetic oligonucleotide
  Antisense strand to SEQ ID NO: 1580187
auugauccaguaggacaca

SEQ ID NO: 1580189 - RNA, 19 nt, Artificial Sequence
  Description of Artificial Sequence: Synthetic oligonucleotide
  Sense strand starting at position 1546 of SEQ ID NO: 1560154
ugaagcgucacaugauaua

SEQ ID NO: 1580190 - RNA, 19 nt, Artificial Sequence
  Description of Artificial Sequence: Synthetic oligonucleotide
  Antisense strand to SEQ ID NO: 1580189
uauaucaugugacgcuuca

SEQ ID NO: 1580191 - RNA, 19 nt, Artificial Sequence
  Description of Artificial Sequence: Synthetic oligonucleotide
  Sense strand starting at position 1589 of SEQ ID NO: 1560154
guagcagcuagugaugauu

SEQ ID NO: 1580192 - RNA, 19 nt, Artificial Sequence
  Description of Artificial Sequence: Synthetic oligonucleotide
  Antisense strand to SEQ ID NO: 1580191
aaucaucacuagcugcuac

SEQ ID NO: 1580193 - RNA, 19 nt, Artificial Sequence
  Description of Artificial Sequence: Synthetic oligonucleotide
  Sense strand starting at position 1592 of SEQ ID NO: 1560154
gcagcuagugaugauuaac

SEQ ID NO: 1580194 - RNA, 19 nt, Artificial Sequence
  Description of Artificial Sequence: Synthetic oligonucleotide
  Antisense strand to SEQ ID NO: 1580193
guuaaucaucacuagcugc

SEQ ID NO: 1580195 - RNA, 19 nt, Artificial Sequence
  Description of Artificial Sequence: Synthetic oligonucleotide
  Sense strand starting at position 1617 of SEQ ID NO: 1560154
aagagaacaugugagauuu

SEQ ID NO: 1580196 - RNA, 19 nt, Artificial Sequence
  Description of Artificial Sequence: Synthetic oligonucleotide
  Antisense strand to SEQ ID NO: 1580195
aaaucucacauguucucuu

SEQ ID NO: 1580197 - RNA, 19 nt, Artificial Sequence
  Description of Artificial Sequence: Synthetic oligonucleotide
  Sense strand starting at position 1651 of SEQ ID NO: 1560154
auuccaguccaaugugauu

SEQ ID NO: 1580198 - RNA, 19 nt, Artificial Sequence
  Description of Artificial Sequence: Synthetic oligonucleotide
  Antisense strand to SEQ ID NO: 1580197
aaucacauuggacuggaau

SEQ ID NO: 1580199 - RNA, 19 nt, Artificial Sequence
  Description of Artificial Sequence: Synthetic oligonucleotide
  Sense strand starting at position 2142 of SEQ ID NO: 1560154
gauacaaagcuuugaguag

SEQ ID NO: 1580200 - RNA, 19 nt, Artificial Sequence
  Description of Artificial Sequence: Synthetic oligonucleotide
  Antisense strand to SEQ ID NO: 1580199
cuacucaaagcuuuguauc

SEQ ID NO: 1580201 - RNA, 19 nt, Artificial Sequence
  Description of Artificial Sequence: Synthetic oligonucleotide
  Sense strand starting at position 2294 of SEQ ID NO: 1560154
uggguuucugcugggauga

SEQ ID NO: 1580202 - RNA, 19 nt, Artificial Sequence
  Description of Artificial Sequence: Synthetic oligonucleotide
  Antisense strand to SEQ ID NO: 1580201
ucaucccagcagaaaccca

SEQ ID NO: 1580203 - RNA, 19 nt, Artificial Sequence
  Description of Artificial Sequence: Synthetic oligonucleotide
  Sense strand starting at position 2295 of SEQ ID NO: 1560154
ggguuucugcugggaugau

SEQ ID NO: 1580204 - RNA, 19 nt, Artificial Sequence
  Description of Artificial Sequence: Synthetic oligonucleotide
  Antisense strand to SEQ ID NO: 1580203
aucaucccagcagaaaccc

SEQ ID NO: 1580205 - RNA, 19 nt, Artificial Sequence
  Description of Artificial Sequence: Synthetic oligonucleotide
  Sense strand starting at position 2780 of SEQ ID NO: 1560154
acaagaagggucuguugga

SEQ ID NO: 1580206 - RNA, 19 nt, Artificial Sequence
  Description of Artificial Sequence: Synthetic oligonucleotide
  Antisense strand to SEQ ID NO: 1580205
uccaacagacccuucuugu

SEQ ID NO: 1580207 - RNA, 19 nt, Artificial Sequence
  Description of Artificial Sequence: Synthetic oligonucleotide
  Sense strand starting at position 2859 of SEQ ID NO: 1560154
gggaauuacagcugaccuu

SEQ ID NO: 1580208 - RNA, 19 nt, Artificial Sequence
  Description of Artificial Sequence: Synthetic oligonucleotide
  Antisense strand to SEQ ID NO: 1580207
aaggucagcuguaauuccc

SEQ ID NO: 1580209 - RNA, 19 nt, Artificial Sequence
  Description of Artificial Sequence: Synthetic oligonucleotide
  Sense strand starting at position 2906 of SEQ ID NO: 1560154
cacuuacaugucgauguuu

SEQ ID NO: 1580210 - RNA, 19 nt, Artificial Sequence
  Description of Artificial Sequence: Synthetic oligonucleotide
  Antisense strand to SEQ ID NO: 1580209
aaacaucgacauguaagug

SEQ ID NO: 1580211 - RNA, 19 nt, Artificial Sequence
  Description of Artificial Sequence: Synthetic oligonucleotide
  Sense strand starting at position 3408 of SEQ ID NO: 1560154
ccuacuuaaccuggagaca

SEQ ID NO: 1580212 - RNA, 19 nt, Artificial Sequence
  Description of Artificial Sequence: Synthetic oligonucleotide
  Antisense strand to SEQ ID NO: 1580211
ugucuccagguuaaguagg

SEQ ID NO: 1580213 - RNA, 19 nt, Artificial Sequence
  Description of Artificial Sequence: Synthetic oligonucleotide
  Sense strand starting at position 3636 of SEQ ID NO: 1560154
gugguucaauuguugggaa

SEQ ID NO: 1580214 - RNA, 19 nt, Artificial Sequence
  Description of Artificial Sequence: Synthetic oligonucleotide
  Antisense strand to SEQ ID NO: 1580213
uucccaacaauugaaccac

SEQ ID NO: 1580215 - RNA, 19 nt, Artificial Sequence
  Description of Artificial Sequence: Synthetic oligonucleotide
  Sense strand starting at position 3706 of SEQ ID NO: 1560154
ugccuuauucgagaaucaa

SEQ ID NO: 1580216 - RNA, 19 nt, Artificial Sequence
  Description of Artificial Sequence: Synthetic oligonucleotide
  Antisense strand to SEQ ID NO: 1580215
uugauucucgaauaaggca

SEQ ID NO: 1580217 - RNA, 19 nt, Artificial Sequence
  Description of Artificial Sequence: Synthetic oligonucleotide
  Sense strand starting at position 3727 of SEQ ID NO: 1560154
gcaauuuccugaguguucu

SEQ ID NO: 1580218 - RNA, 19 nt, Artificial Sequence
  Description of Artificial Sequence: Synthetic oligonucleotide
  Antisense strand to SEQ ID NO: 1580217
agaacacucaggaaauugc

SEQ ID NO: 1580219 - RNA, 19 nt, Artificial Sequence
  Description of Artificial Sequence: Synthetic oligonucleotide
  Sense strand starting at position 3772 of SEQ ID NO: 1560154
gcaagagaucuguggucaa

SEQ ID NO: 1580220 - RNA, 19 nt, Artificial Sequence
  Description of Artificial Sequence: Synthetic oligonucleotide
  Antisense strand to SEQ ID NO: 1580219
uugaccacagaucucuugc

SEQ ID NO: 1580221 - RNA, 19 nt, Artificial Sequence
  Description of Artificial Sequence: Synthetic oligonucleotide
  Sense strand starting at position 3775 of SEQ ID NO: 1560154
agagaucuguggucaaagu

SEQ ID NO: 1580222 - RNA, 19 nt, Artificial Sequence
  Description of Artificial Sequence: Synthetic oligonucleotide
  Antisense strand to SEQ ID NO: 1580221
acuuugaccacagaucucu

SEQ ID NO: 1580223 - RNA, 19 nt, Artificial Sequence
  Description of Artificial Sequence: Synthetic oligonucleotide
  Sense strand starting at position 3776 of SEQ ID NO: 1560154
gagaucuguggucaaaguc

SEQ ID NO: 1580224 - RNA, 19 nt, Artificial Sequence
  Description of Artificial Sequence: Synthetic oligonucleotide
  Antisense strand to SEQ ID NO: 1580223
gacuuugaccacagaucuc

SEQ ID NO: 1580225 - RNA, 19 nt, Artificial Sequence
  Description of Artificial Sequence: Synthetic oligonucleotide
  Sense strand starting at position 3830 of SEQ ID NO: 1560154
uggugugaccuccaagcua

SEQ ID NO: 1580226 - RNA, 19 nt, Artificial Sequence
  Description of Artificial Sequence: Synthetic oligonucleotide
  Antisense strand to SEQ ID NO: 1580225
uagcuuggaggucacacca

SEQ ID NO: 1580227 - RNA, 19 nt, Artificial Sequence
  Description of Artificial Sequence: Synthetic oligonucleotide
  Sense strand starting at position 24 of SEQ ID NO: 1560155
aggacaagacucuguccuu

SEQ ID NO: 1580228 - RNA, 19 nt, Artificial Sequence
  Description of Artificial Sequence: Synthetic oligonucleotide
  Antisense strand to SEQ ID NO: 1580227
aaggacagagucuuguccu

SEQ ID NO: 1580229 - RNA, 19 nt, Artificial Sequence
  Description of Artificial Sequence: Synthetic oligonucleotide
  Sense strand starting at position 112 of SEQ ID NO: 1560155
cugguaaaucuuugcuccu

SEQ ID NO: 1580230 - RNA, 19 nt, Artificial Sequence
  Description of Artificial Sequence: Synthetic oligonucleotide
  Antisense strand to SEQ ID NO: 1580229
aggagcaaagauuuaccag

SEQ ID NO: 1580231 - RNA, 19 nt, Artificial Sequence
  Description of Artificial Sequence: Synthetic oligonucleotide
  Sense strand starting at position 113 of SEQ ID NO: 1560155
ugguaaaucuuugcuccua

SEQ ID NO: 1580232 - RNA, 19 nt, Artificial Sequence
  Description of Artificial Sequence: Synthetic oligonucleotide
  Antisense strand to SEQ ID NO: 1580231
uaggagcaaagauuuacca

SEQ ID NO: 1580233 - RNA, 19 nt, Artificial Sequence
  Description of Artificial Sequence: Synthetic oligonucleotide
  Sense strand starting at position 114 of SEQ ID NO: 1560155
gguaaaucuuugcuccuag

SEQ ID NO: 1580234 - RNA, 19 nt, Artificial Sequence
  Description of Artificial Sequence: Synthetic oligonucleotide
  Antisense strand to SEQ ID NO: 1580233
cuaggagcaaagauuuacc

SEQ ID NO: 1580235 - RNA, 19 nt, Artificial Sequence
  Description of Artificial Sequence: Synthetic oligonucleotide
  Sense strand starting at position 234 of SEQ ID NO: 1560155
ggaugaacuucucugugag

SEQ ID NO: 1580236 - RNA, 19 nt, Artificial Sequence
  Description of Artificial Sequence: Synthetic oligonucleotide
  Antisense strand to SEQ ID NO: 1580235
cucacagagaaguucaucc

SEQ ID NO: 1580237 - RNA, 19 nt, Artificial Sequence
  Description of Artificial Sequence: Synthetic oligonucleotide
  Sense strand starting at position 236 of SEQ ID NO: 1560155
augaacuucucugugagga

SEQ ID NO: 1580238 - RNA, 19 nt, Artificial Sequence
  Description of Artificial Sequence: Synthetic oligonucleotide
  Antisense strand to SEQ ID NO: 1580237
uccucacagagaaguucau

SEQ ID NO: 1580239 - RNA, 19 nt, Artificial Sequence
  Description of Artificial Sequence: Synthetic oligonucleotide
  Sense strand starting at position 237 of SEQ ID NO: 1560155
ugaacuucucugugaggau

SEQ ID NO: 1580240 - RNA, 19 nt, Artificial Sequence
  Description of Artificial Sequence: Synthetic oligonucleotide
  Antisense strand to SEQ ID NO: 1580239
auccucacagagaaguuca

SEQ ID NO: 1580241 - RNA, 19 nt, Artificial Sequence
  Description of Artificial Sequence: Synthetic oligonucleotide
  Sense strand starting at position 290 of SEQ ID NO: 1560155
ugacccaguucuuuagagu

SEQ ID NO: 1580242 - RNA, 19 nt, Artificial Sequence
  Description of Artificial Sequence: Synthetic oligonucleotide
  Antisense strand to SEQ ID NO: 1580241
acucuaaagaacuggguca

SEQ ID NO: 1580243 - RNA, 19 nt, Artificial Sequence
  Description of Artificial Sequence: Synthetic oligonucleotide
  Sense strand starting at position 291 of SEQ ID NO: 1560155
gacccaguucuuuagaguu

SEQ ID NO: 1580244 - RNA, 19 nt, Artificial Sequence
  Description of Artificial Sequence: Synthetic oligonucleotide
  Antisense strand to SEQ ID NO: 1580243
aacucuaaagaacuggguc

SEQ ID NO: 1580245 - RNA, 19 nt, Artificial Sequence
  Description of Artificial Sequence: Synthetic oligonucleotide
  Sense strand starting at position 350 of SEQ ID NO: 1560155
ggcugagucugaucuccuu

SEQ ID NO: 1580246 - RNA, 19 nt, Artificial Sequence
  Description of Artificial Sequence: Synthetic oligonucleotide
  Antisense strand to SEQ ID NO: 1580245
aaggagaucagacucagcc

SEQ ID NO: 1580247 - RNA, 19 nt, Artificial Sequence
  Description of Artificial Sequence: Synthetic oligonucleotide
  Sense strand starting at position 437 of SEQ ID NO: 1560155
ggaauucuggucuguggaa

SEQ ID NO: 1580248 - RNA, 19 nt, Artificial Sequence
  Description of Artificial Sequence: Synthetic oligonucleotide
  Antisense strand to SEQ ID NO: 1580247
uuccacagaccagaauucc

SEQ ID NO: 1580249 - RNA, 19 nt, Artificial Sequence
  Description of Artificial Sequence: Synthetic oligonucleotide
  Sense strand starting at position 438 of SEQ ID NO: 1560155
gaauucuggucuguggaag

SEQ ID NO: 1580250 - RNA, 19 nt, Artificial Sequence
  Description of Artificial Sequence: Synthetic oligonucleotide
  Antisense strand to SEQ ID NO: 1580249
cuuccacagaccagaauuc

SEQ ID NO: 1580251 - RNA, 19 nt, Artificial Sequence
  Description of Artificial Sequence: Synthetic oligonucleotide
  Sense strand starting at position 469 of SEQ ID NO: 1560155
gaguguguccugcacuaaa

SEQ ID NO: 1580252 - RNA, 19 nt, Artificial Sequence
  Description of Artificial Sequence: Synthetic oligonucleotide
  Antisense strand to SEQ ID NO: 1580251
uuuagugcaggacacacuc

SEQ ID NO: 1580253 - RNA, 19 nt, Artificial Sequence
  Description of Artificial Sequence: Synthetic oligonucleotide
  Sense strand starting at position 497 of SEQ ID NO: 1560155
ccuaaagugggauguaaug

SEQ ID NO: 1580254 - RNA, 19 nt, Artificial Sequence
  Description of Artificial Sequence: Synthetic oligonucleotide
  Antisense strand to SEQ ID NO: 1580253
cauuacaucccacuuuagg

SEQ ID NO: 1580255 - RNA, 19 nt, Artificial Sequence
  Description of Artificial Sequence: Synthetic oligonucleotide
  Sense strand starting at position 662 of SEQ ID NO: 1560155
ugacuuguaggguguagga

SEQ ID NO: 1580256 - RNA, 19 nt, Artificial Sequence
  Description of Artificial Sequence: Synthetic oligonucleotide
  Antisense strand to SEQ ID NO: 1580255
uccuacacccuacaaguca

SEQ ID NO: 1580257 - RNA, 19 nt, Artificial Sequence
  Description of Artificial Sequence: Synthetic oligonucleotide
  Sense strand starting at position 675 of SEQ ID NO: 1560155
guaggauccugugucauuu

SEQ ID NO: 1580258 - RNA, 19 nt, Artificial Sequence
  Description of Artificial Sequence: Synthetic oligonucleotide
  Antisense strand to SEQ ID NO: 1580257
aaaugacacaggauccuac

SEQ ID NO: 1580259 - RNA, 19 nt, Artificial Sequence
  Description of Artificial Sequence: Synthetic oligonucleotide
  Sense strand starting at position 728 of SEQ ID NO: 1560155
gguauauugucucucgauu

SEQ ID NO: 1580260 - RNA, 19 nt, Artificial Sequence
  Description of Artificial Sequence: Synthetic oligonucleotide
  Antisense strand to SEQ ID NO: 1580259
aaucgagagacaauauacc

SEQ ID NO: 1580261 - RNA, 19 nt, Artificial Sequence
  Description of Artificial Sequence: Synthetic oligonucleotide
  Sense strand starting at position 994 of SEQ ID NO: 1560155
gcaauauugcaacauaugu

SEQ ID NO: 1580262 - RNA, 19 nt, Artificial Sequence
  Description of Artificial Sequence: Synthetic oligonucleotide
  Antisense strand to SEQ ID NO: 1580261
acauauguugcaauauugc

SEQ ID NO: 1580263 - RNA, 19 nt, Artificial Sequence
  Description of Artificial Sequence: Synthetic oligonucleotide
  Sense strand starting at position 1031 of SEQ ID NO: 1560155
ggacaucagcuuuggaguu

SEQ ID NO: 1580264 - RNA, 19 nt, Artificial Sequence
  Description of Artificial Sequence: Synthetic oligonucleotide
  Antisense strand to SEQ ID NO: 1580263
aacuccaaagcugaugucc

SEQ ID NO: 1580265 - RNA, 19 nt, Artificial Sequence
  Description of Artificial Sequence: Synthetic oligonucleotide
  Sense strand starting at position 1333 of SEQ ID NO: 1560155
ucuagaucucuuugucugu

SEQ ID NO: 1580266 - RNA, 19 nt, Artificial Sequence
  Description of Artificial Sequence: Synthetic oligonucleotide
  Antisense strand to SEQ ID NO: 1580265
acagacaaagagaucuaga

SEQ ID NO: 1580267 - RNA, 19 nt, Artificial Sequence
  Description of Artificial Sequence: Synthetic oligonucleotide
  Sense strand starting at position 1445 of SEQ ID NO: 1560155
ggaugaguuccugagcauu

SEQ ID NO: 1580268 - RNA, 19 nt, Artificial Sequence
  Description of Artificial Sequence: Synthetic oligonucleotide
  Antisense strand to SEQ ID NO: 1580267
aaugcucaggaacucaucc

SEQ ID NO: 1580269 - RNA, 19 nt, Artificial Sequence
  Description of Artificial Sequence: Synthetic oligonucleotide
  Sense strand starting at position 1484 of SEQ ID NO: 1560155
gaggcuuauuugccaaugu

SEQ ID NO: 1580270 - RNA, 19 nt, Artificial Sequence
  Description of Artificial Sequence: Synthetic oligonucleotide
  Antisense strand to SEQ ID NO: 1580269
acauuggcaaauaagccuc

SEQ ID NO: 1580271 - RNA, 19 nt, Artificial Sequence
  Description of Artificial Sequence: Synthetic oligonucleotide
  Sense strand starting at position 1488 of SEQ ID NO: 1560155
cuuauuugccaaugucuga

SEQ ID NO: 1580272 - RNA, 19 nt, Artificial Sequence
  Description of Artificial Sequence: Synthetic oligonucleotide
  Antisense strand to SEQ ID NO: 1580271
ucagacauuggcaaauaag

SEQ ID NO: 1580273 - RNA, 19 nt, Artificial Sequence
  Description of Artificial Sequence: Synthetic oligonucleotide
  Sense strand starting at position 1492 of SEQ ID NO: 1560155
uuugccaaugucugacauu

SEQ ID NO: 1580274 - RNA, 19 nt, Artificial Sequence
  Description of Artificial Sequence: Synthetic oligonucleotide
  Antisense strand to SEQ ID NO: 1580273
aaugucagacauuggcaaa

SEQ ID NO: 1580275 - RNA, 19 nt, Artificial Sequence
  Description of Artificial Sequence: Synthetic oligonucleotide
  Sense strand starting at position 1504 of SEQ ID NO: 1560155
ugacauuguuggcugagga

SEQ ID NO: 1580276 - RNA, 19 nt, Artificial Sequence
  Description of Artificial Sequence: Synthetic oligonucleotide
  Antisense strand to SEQ ID NO: 1580275
uccucagccaacaauguca

SEQ ID NO: 1580277 - RNA, 19 nt, Artificial Sequence
  Description of Artificial Sequence: Synthetic oligonucleotide
  Sense strand starting at position 1514 of SEQ ID NO: 1560155
ggcugaggacaauguuuca

SEQ ID NO: 1580278 - RNA, 19 nt, Artificial Sequence
  Description of Artificial Sequence: Synthetic oligonucleotide
  Antisense strand to SEQ ID NO: 1580277
ugaaacauuguccucagcc

SEQ ID NO: 1580279 - RNA, 19 nt, Artificial Sequence
  Description of Artificial Sequence: Synthetic oligonucleotide
  Sense strand starting at position 1553 of SEQ ID NO: 1560155
ugaagugucaucugguaug

SEQ ID NO: 1580280 - RNA, 19 nt, Artificial Sequence
  Description of Artificial Sequence: Synthetic oligonucleotide
  Antisense strand to SEQ ID NO: 1580279
cauaccagaugacacuuca

SEQ ID NO: 1580281 - RNA, 19 nt, Artificial Sequence
  Description of Artificial Sequence: Synthetic oligonucleotide
  Sense strand starting at position 1558 of SEQ ID NO: 1560155
ugucaucugguaugguuau

SEQ ID NO: 1580282 - RNA, 19 nt, Artificial Sequence
  Description of Artificial Sequence: Synthetic oligonucleotide
  Antisense strand to SEQ ID NO: 1580281
auaaccauaccagaugaca

SEQ ID NO: 1580283 - RNA, 19 nt, Artificial Sequence
  Description of Artificial Sequence: Synthetic oligonucleotide
  Sense strand starting at position 1564 of SEQ ID NO: 1560155
cugguaugguuauuauuau

SEQ ID NO: 1580284 - RNA, 19 nt, Artificial Sequence
  Description of Artificial Sequence: Synthetic oligonucleotide
  Antisense strand to SEQ ID NO: 1580283
auaauaauaaccauaccag

SEQ ID NO: 1580285 - RNA, 19 nt, Artificial Sequence
  Description of Artificial Sequence: Synthetic oligonucleotide
  Sense strand starting at position 1945 of SEQ ID NO: 1560155
uccagaaacuuucugagca

SEQ ID NO: 1580286 - RNA, 19 nt, Artificial Sequence
  Description of Artificial Sequence: Synthetic oligonucleotide
  Antisense strand to SEQ ID NO: 1580285
ugcucagaaaguuucugga

SEQ ID NO: 1580287 - RNA, 19 nt, Artificial Sequence
  Description of Artificial Sequence: Synthetic oligonucleotide
  Sense strand starting at position 2139 of SEQ ID NO: 1560155
cugggaauugcugaggucu

SEQ ID NO: 1580288 - RNA, 19 nt, Artificial Sequence
  Description of Artificial Sequence: Synthetic oligonucleotide
  Antisense strand to SEQ ID NO: 1580287
agaccucagcaauucccag

SEQ ID NO: 1580289 - RNA, 19 nt, Artificial Sequence
  Description of Artificial Sequence: Synthetic oligonucleotide
  Sense strand starting at position 2721 of SEQ ID NO: 1560155
ccauguucucucugaccau

SEQ ID NO: 1580290 - RNA, 19 nt, Artificial Sequence
  Description of Artificial Sequence: Synthetic oligonucleotide
  Antisense strand to SEQ ID NO: 1580289
auggucagagagaacaugg

SEQ ID NO: 1580291 - RNA, 19 nt, Artificial Sequence
  Description of Artificial Sequence: Synthetic oligonucleotide
  Sense strand starting at position 2839 of SEQ ID NO: 1560155
acaagacagugcucucuga

SEQ ID NO: 1580292 - RNA, 19 nt, Artificial Sequence
  Description of Artificial Sequence: Synthetic oligonucleotide
  Antisense strand to SEQ ID NO: 1580291
ucagagagcacugucuugu

SEQ ID NO: 1580293 - RNA, 19 nt, Artificial Sequence
  Description of Artificial Sequence: Synthetic oligonucleotide
  Sense strand starting at position 2843 of SEQ ID NO: 1560155
gacagugcucucugagauc

SEQ ID NO: 1580294 - RNA, 19 nt, Artificial Sequence
  Description of Artificial Sequence: Synthetic oligonucleotide
  Antisense strand to SEQ ID NO: 1580293
gaucucagagagcacuguc

SEQ ID NO: 1580295 - RNA, 19 nt, Artificial Sequence
  Description of Artificial Sequence: Synthetic oligonucleotide
  Sense strand starting at position 3087 of SEQ ID NO: 1560155
ggccauguucugggaacaa

SEQ ID NO: 1580296 - RNA, 19 nt, Artificial Sequence
  Description of Artificial Sequence: Synthetic oligonucleotide
  Antisense strand to SEQ ID NO: 1580295
uuguucccagaacauggcc

SEQ ID NO: 1580297 - RNA, 19 nt, Artificial Sequence
  Description of Artificial Sequence: Synthetic oligonucleotide
  Sense strand starting at position 3127 of SEQ ID NO: 1560155
ccagcuuguguacaugaga

SEQ ID NO: 1580298 - RNA, 19 nt, Artificial Sequence
  Description of Artificial Sequence: Synthetic oligonucleotide
  Antisense strand to SEQ ID NO: 1580297
ucucauguacacaagcugg

SEQ ID NO: 1580299 - RNA, 19 nt, Artificial Sequence
  Description of Artificial Sequence: Synthetic oligonucleotide
  Sense strand starting at position 3343 of SEQ ID NO: 1560155
ccugccaugccguagagaa

SEQ ID NO: 1580300 - RNA, 19 nt, Artificial Sequence
  Description of Artificial Sequence: Synthetic oligonucleotide
  Antisense strand to SEQ ID NO: 1580299
uucucuacggcauggcagg

SEQ ID NO: 1580301 - RNA, 19 nt, Artificial Sequence
  Description of Artificial Sequence: Synthetic oligonucleotide
  Sense strand starting at position 3797 of SEQ ID NO: 1560155
ccacauggaucugcacauu

SEQ ID NO: 1580302 - RNA, 19 nt, Artificial Sequence
  Description of Artificial Sequence: Synthetic oligonucleotide
  Antisense strand to SEQ ID NO: 1580301
aaugugcagauccaugugg

SEQ ID NO: 1580303 - RNA, 19 nt, Artificial Sequence
  Description of Artificial Sequence: Synthetic oligonucleotide
  Sense strand starting at position 3821 of SEQ ID NO: 1560155
cgaggucacccacauguua

SEQ ID NO: 1580304 - RNA, 19 nt, Artificial Sequence
  Description of Artificial Sequence: Synthetic oligonucleotide
  Antisense strand to SEQ ID NO: 1580303
uaacaugugggugaccucg

SEQ ID NO: 1580305 - RNA, 19 nt, Artificial Sequence
  Description of Artificial Sequence: Synthetic oligonucleotide
  Sense strand starting at position 3913 of SEQ ID NO: 1560155
guuaguccuccucacaaug

SEQ ID NO: 1580306 - RNA, 19 nt, Artificial Sequence
  Description of Artificial Sequence: Synthetic oligonucleotide
  Antisense strand to SEQ ID NO: 1580305
cauugugaggaggacuaac

SEQ ID NO: 1580307 - RNA, 19 nt, Artificial Sequence
  Description of Artificial Sequence: Synthetic oligonucleotide
  Sense strand starting at position 11 of SEQ ID NO: 1560156
aacagagcugaguaaucuu

SEQ ID NO: 1580308 - RNA, 19 nt, Artificial Sequence
  Description of Artificial Sequence: Synthetic oligonucleotide
  Antisense strand to SEQ ID NO: 1580307
aagauuacucagcucuguu

SEQ ID NO: 1580309 - RNA, 19 nt, Artificial Sequence
  Description of Artificial Sequence: Synthetic oligonucleotide
  Sense strand starting at position 86 of SEQ ID NO: 1560156
gcugauucccaaugaauau

SEQ ID NO: 1580310 - RNA, 19 nt, Artificial Sequence
  Description of Artificial Sequence: Synthetic oligonucleotide
  Antisense strand to SEQ ID NO: 1580309
auauucauugggaaucagc

SEQ ID NO: 1580311 - RNA, 19 nt, Artificial Sequence
  Description of Artificial Sequence: Synthetic oligonucleotide
  Sense strand starting at position 112 of SEQ ID NO: 1560156
gguggacuaaguggguaau

SEQ ID NO: 1580312 - RNA, 19 nt, Artificial Sequence
  Description of Artificial Sequence: Synthetic oligonucleotide
  Antisense strand to SEQ ID NO: 1580311
auuacccacuuaguccacc

SEQ ID NO: 1580313 - RNA, 19 nt, Artificial Sequence
  Description of Artificial Sequence: Synthetic oligonucleotide
  Sense strand starting at position 113 of SEQ ID NO: 1560156
guggacuaaguggguaaua

SEQ ID NO: 1580314 - RNA, 19 nt, Artificial Sequence
  Description of Artificial Sequence: Synthetic oligonucleotide
  Antisense strand to SEQ ID NO: 1580313
uauuacccacuuaguccac

SEQ ID NO: 1580315 - RNA, 19 nt, Artificial Sequence
  Description of Artificial Sequence: Synthetic oligonucleotide
  Sense strand starting at position 185 of SEQ ID NO: 1560156
acugaaagcgcagaauguu

SEQ ID NO: 1580316 - RNA, 19 nt, Artificial Sequence
  Description of Artificial Sequence: Synthetic oligonucleotide
  Antisense strand to SEQ ID NO: 1580315
aacauucugcgcuuucagu

SEQ ID NO: 1580317 - RNA, 19 nt, Artificial Sequence
  Description of Artificial Sequence: Synthetic oligonucleotide
  Sense strand starting at position 535 of SEQ ID NO: 1560156
gacacuggucucuggucua

SEQ ID NO: 1580318 - RNA, 19 nt, Artificial Sequence
  Description of Artificial Sequence: Synthetic oligonucleotide
  Antisense strand to SEQ ID NO: 1580317
uagaccagagaccaguguc

SEQ ID NO: 1580319 - RNA, 19 nt, Artificial Sequence
  Description of Artificial Sequence: Synthetic oligonucleotide
  Sense strand starting at position 608 of SEQ ID NO: 1560156
agucauucuccuggugaaa

SEQ ID NO: 1580320 - RNA, 19 nt, Artificial Sequence
  Description of Artificial Sequence: Synthetic oligonucleotide
  Antisense strand to SEQ ID NO: 1580319
uuucaccaggagaaugacu

SEQ ID NO: 1580321 - RNA, 19 nt, Artificial Sequence
  Description of Artificial Sequence: Synthetic oligonucleotide
  Sense strand starting at position 704 of SEQ ID NO: 1560156
guacuaaaccacuaucugu

SEQ ID NO: 1580322 - RNA, 19 nt, Artificial Sequence
  Description of Artificial Sequence: Synthetic oligonucleotide
  Antisense strand to SEQ ID NO: 1580321
acagauagugguuuaguac

SEQ ID NO: 1580323 - RNA, 19 nt, Artificial Sequence
  Description of Artificial Sequence: Synthetic oligonucleotide
  Sense strand starting at position 885 of SEQ ID NO: 1560156
gggucacuggagcauuaga

SEQ ID NO: 1580324 - RNA, 19 nt, Artificial Sequence
  Description of Artificial Sequence: Synthetic oligonucleotide
  Antisense strand to SEQ ID NO: 1580323
ucuaaugcuccagugaccc

SEQ ID NO: 1580325 - RNA, 19 nt, Artificial Sequence
  Description of Artificial Sequence: Synthetic oligonucleotide
  Sense strand starting at position 939 of SEQ ID NO: 1560156
ugaagugauuuacaacaca

SEQ ID NO: 1580326 - RNA, 19 nt, Artificial Sequence
  Description of Artificial Sequence: Synthetic oligonucleotide
  Antisense strand to SEQ ID NO: 1580325
uguguuguaaaucacuuca

SEQ ID NO: 1580327 - RNA, 19 nt, Artificial Sequence
  Description of Artificial Sequence: Synthetic oligonucleotide
  Sense strand starting at position 1056 of SEQ ID NO: 1560156
aggccaguguaccuaucaa

SEQ ID NO: 1580328 - RNA, 19 nt, Artificial Sequence
  Description of Artificial Sequence: Synthetic oligonucleotide
  Antisense strand to SEQ ID NO: 1580327
uugauagguacacuggccu

SEQ ID NO: 1580329 - RNA, 19 nt, Artificial Sequence
  Description of Artificial Sequence: Synthetic oligonucleotide
  Sense strand starting at position 1146 of SEQ ID NO: 1560156
cauuacugugaccaaguga

SEQ ID NO: 1580330 - RNA, 19 nt, Artificial Sequence
  Description of Artificial Sequence: Synthetic oligonucleotide
  Antisense strand to SEQ ID NO: 1580329
ucacuuggucacaguaaug

SEQ ID NO: 1580331 - RNA, 19 nt, Artificial Sequence
  Description of Artificial Sequence: Synthetic oligonucleotide
  Sense strand starting at position 1166 of SEQ ID NO: 1560156
gcaaucuuagaccacgaga

SEQ ID NO: 1580332 - RNA, 19 nt, Artificial Sequence
  Description of Artificial Sequence: Synthetic oligonucleotide
  Antisense strand to SEQ ID NO: 1580331
ucucguggucuaagauugc

SEQ ID NO: 1580333 - RNA, 19 nt, Artificial Sequence
  Description of Artificial Sequence: Synthetic oligonucleotide
  Sense strand starting at position 1239 of SEQ ID NO: 1560156
uguuuaauuucccagggau

SEQ ID NO: 1580334 - RNA, 19 nt, Artificial Sequence
  Description of Artificial Sequence: Synthetic oligonucleotide
  Antisense strand to SEQ ID NO: 1580333
aucccugggaaauuaaaca

SEQ ID NO: 1580335 - RNA, 19 nt, Artificial Sequence
  Description of Artificial Sequence: Synthetic oligonucleotide
  Sense strand starting at position 1301 of SEQ ID NO: 1560156
augugaucuugagaauuua

SEQ ID NO: 1580336 - RNA, 19 nt, Artificial Sequence
  Description of Artificial Sequence: Synthetic oligonucleotide
  Antisense strand to SEQ ID NO: 1580335
uaaauucucaagaucacau

SEQ ID NO: 1580337 - RNA, 19 nt, Artificial Sequence
  Description of Artificial Sequence: Synthetic oligonucleotide
  Sense strand starting at position 1322 of SEQ ID NO: 1560156
ggauauucucaaugaaguu

SEQ ID NO: 1580338 - RNA, 19 nt, Artificial Sequence
  Description of Artificial Sequence: Synthetic oligonucleotide
  Antisense strand to SEQ ID NO: 1580337
aacuucauugagaauaucc

SEQ ID NO: 1580339 - RNA, 19 nt, Artificial Sequence
  Description of Artificial Sequence: Synthetic oligonucleotide
  Sense strand starting at position 1445 of SEQ ID NO: 1560156
ccuuguacccuguaauuau

SEQ ID NO: 1580340 - RNA, 19 nt, Artificial Sequence
  Description of Artificial Sequence: Synthetic oligonucleotide
  Antisense strand to SEQ ID NO: 1580339
auaauuacaggguacaagg

SEQ ID NO: 1580341 - RNA, 19 nt, Artificial Sequence
  Description of Artificial Sequence: Synthetic oligonucleotide
  Sense strand starting at position 1456 of SEQ ID NO: 1560156
guaauuauuuagccuuguu

SEQ ID NO: 1580342 - RNA, 19 nt, Artificial Sequence
  Description of Artificial Sequence: Synthetic oligonucleotide
  Antisense strand to SEQ ID NO: 1580341
aacaaggcuaaauaauuac

SEQ ID NO: 1580343 - RNA, 19 nt, Artificial Sequence
  Description of Artificial Sequence: Synthetic oligonucleotide
  Sense strand starting at position 1459 of SEQ ID NO: 1560156
auuauuuagccuuguuuac

SEQ ID NO: 1580344 - RNA, 19 nt, Artificial Sequence
  Description of Artificial Sequence: Synthetic oligonucleotide
  Antisense strand to SEQ ID NO: 1580343
guaaacaaggcuaaauaau

SEQ ID NO: 1580345 - RNA, 19 nt, Artificial Sequence
  Description of Artificial Sequence: Synthetic oligonucleotide
  Sense strand starting at position 1568 of SEQ ID NO: 1560156
aagagcuucuagguguaga

SEQ ID NO: 1580346 - RNA, 19 nt, Artificial Sequence
  Description of Artificial Sequence: Synthetic oligonucleotide
  Antisense strand to SEQ ID NO: 1580345
ucuacaccuagaagcucuu

SEQ ID NO: 1580347 - RNA, 19 nt, Artificial Sequence
  Description of Artificial Sequence: Synthetic oligonucleotide
  Sense strand starting at position 1569 of SEQ ID NO: 1560156
agagcuucuagguguagaa

SEQ ID NO: 1580348 - RNA, 19 nt, Artificial Sequence
  Description of Artificial Sequence: Synthetic oligonucleotide
  Antisense strand to SEQ ID NO: 1580347
uucuacaccuagaagcucu

SEQ ID NO: 1580349 - RNA, 19 nt, Artificial Sequence
  Description of Artificial Sequence: Synthetic oligonucleotide
  Sense strand starting at position 1642 of SEQ ID NO: 1560156
ucacauuucuuugggagaa

SEQ ID NO: 1580350 - RNA, 19 nt, Artificial Sequence
  Description of Artificial Sequence: Synthetic oligonucleotide
  Antisense strand to SEQ ID NO: 1580349
uucucccaaagaaauguga

SEQ ID NO: 1580351 - RNA, 19 nt, Artificial Sequence
  Description of Artificial Sequence: Synthetic oligonucleotide
  Sense strand starting at position 1643 of SEQ ID NO: 1560156
cacauuucuuugggagaag

SEQ ID NO: 1580352 - RNA, 19 nt, Artificial Sequence
  Description of Artificial Sequence: Synthetic oligonucleotide
  Antisense strand to SEQ ID NO: 1580351
cuucucccaaagaaaugug

SEQ ID NO: 1580353 - RNA, 19 nt, Artificial Sequence
  Description of Artificial Sequence: Synthetic oligonucleotide
  Sense strand starting at position 1644 of SEQ ID NO: 1560156
acauuucuuugggagaagu

SEQ ID NO: 1580354 - RNA, 19 nt, Artificial Sequence
  Description of Artificial Sequence: Synthetic oligonucleotide
  Antisense strand to SEQ ID NO: 1580353
acuucucccaaagaaaugu

SEQ ID NO: 1580355 - RNA, 19 nt, Artificial Sequence
  Description of Artificial Sequence: Synthetic oligonucleotide
  Sense strand starting at position 1652 of SEQ ID NO: 1560156
uugggagaagucugccuua

SEQ ID NO: 1580356 - RNA, 19 nt, Artificial Sequence
  Description of Artificial Sequence: Synthetic oligonucleotide
  Antisense strand to SEQ ID NO: 1580355
uaaggcagacuucucccaa

SEQ ID NO: 1580357 - RNA, 19 nt, Artificial Sequence
  Description of Artificial Sequence: Synthetic oligonucleotide
  Sense strand starting at position 1655 of SEQ ID NO: 1560156
ggagaagucugccuuaagu

SEQ ID NO: 1580358 - RNA, 19 nt, Artificial Sequence
  Description of Artificial Sequence: Synthetic oligonucleotide
  Antisense strand to SEQ ID NO: 1580357
acuuaaggcagacuucucc

SEQ ID NO: 1580359 - RNA, 19 nt, Artificial Sequence
  Description of Artificial Sequence: Synthetic oligonucleotide
  Sense strand starting at position 1657 of SEQ ID NO: 1560156
agaagucugccuuaaguga

SEQ ID NO: 1580360 - RNA, 19 nt, Artificial Sequence
  Description of Artificial Sequence: Synthetic oligonucleotide
  Antisense strand to SEQ ID NO: 1580359
ucacuuaaggcagacuucu

SEQ ID NO: 1580361 - RNA, 19 nt, Artificial Sequence
  Description of Artificial Sequence: Synthetic oligonucleotide
  Sense strand starting at position 1722 of SEQ ID NO: 1560156
ggugucacccaucaacauu

SEQ ID NO: 1580362 - RNA, 19 nt, Artificial Sequence
  Description of Artificial Sequence: Synthetic oligonucleotide
  Antisense strand to SEQ ID NO: 1580361
aauguugaugggugacacc

SEQ ID NO: 1580363 - RNA, 19 nt, Artificial Sequence
  Description of Artificial Sequence: Synthetic oligonucleotide
  Sense strand starting at position 1773 of SEQ ID NO: 1560156
gccagauuacaguauaaac

SEQ ID NO: 1580364 - RNA, 19 nt, Artificial Sequence
  Description of Artificial Sequence: Synthetic oligonucleotide
  Antisense strand to SEQ ID NO: 1580363
guuuauacuguaaucuggc

SEQ ID NO: 1580365 - RNA, 19 nt, Artificial Sequence
  Description of Artificial Sequence: Synthetic oligonucleotide
  Sense strand starting at position 2022 of SEQ ID NO: 1560156
caguaaagugcaggacauu

SEQ ID NO: 1580366 - RNA, 19 nt, Artificial Sequence
  Description of Artificial Sequence: Synthetic oligonucleotide
  Antisense strand to SEQ ID NO: 1580365
aauguccugcacuuuacug

SEQ ID NO: 1580367 - RNA, 19 nt, Artificial Sequence
  Description of Artificial Sequence: Synthetic oligonucleotide
  Sense strand starting at position 2117 of SEQ ID NO: 1560156
auugaucagucuuugaacu

SEQ ID NO: 1580368 - RNA, 19 nt, Artificial Sequence
  Description of Artificial Sequence: Synthetic oligonucleotide
  Antisense strand to SEQ ID NO: 1580367
aguucaaagacugaucaau

SEQ ID NO: 1580369 - RNA, 19 nt, Artificial Sequence
  Description of Artificial Sequence: Synthetic oligonucleotide
  Sense strand starting at position 2118 of SEQ ID NO: 1560156
uugaucagucuuugaacuu

SEQ ID NO: 1580370 - RNA, 19 nt, Artificial Sequence
  Description of Artificial Sequence: Synthetic oligonucleotide
  Antisense strand to SEQ ID NO: 1580369
aaguucaaagacugaucaa

SEQ ID NO: 1580371 - RNA, 19 nt, Artificial Sequence
  Description of Artificial Sequence: Synthetic oligonucleotide
  Sense strand starting at position 3431 of SEQ ID NO: 1560156
aggauuagcauugauguca

SEQ ID NO: 1580372 - RNA, 19 nt, Artificial Sequence
  Description of Artificial Sequence: Synthetic oligonucleotide
  Antisense strand to SEQ ID NO: 1580371
ugacaucaaugcuaauccu

SEQ ID NO: 1580373 - RNA, 19 nt, Artificial Sequence
  Description of Artificial Sequence: Synthetic oligonucleotide
  Sense strand starting at position 3440 of SEQ ID NO: 1560156
auugaugucacauggguga

SEQ ID NO: 1580374 - RNA, 19 nt, Artificial Sequence
  Description of Artificial Sequence: Synthetic oligonucleotide
  Antisense strand to SEQ ID NO: 1580373
ucacccaugugacaucaau

SEQ ID NO: 1580375 - RNA, 19 nt, Artificial Sequence
  Description of Artificial Sequence: Synthetic oligonucleotide
  Sense strand starting at position 3442 of SEQ ID NO: 1560156
ugaugucacaugggugaaa

SEQ ID NO: 1580376 - RNA, 19 nt, Artificial Sequence
  Description of Artificial Sequence: Synthetic oligonucleotide
  Antisense strand to SEQ ID NO: 1580375
uuucacccaugugacauca

SEQ ID NO: 1580377 - RNA, 19 nt, Artificial Sequence
  Description of Artificial Sequence: Synthetic oligonucleotide
  Sense strand starting at position 3443 of SEQ ID NO: 1560156
gaugucacaugggugaaau

SEQ ID NO: 1580378 - RNA, 19 nt, Artificial Sequence
  Description of Artificial Sequence: Synthetic oligonucleotide
  Antisense strand to SEQ ID NO: 1580377
auuucacccaugugacauc

SEQ ID NO: 1580379 - RNA, 19 nt, Artificial Sequence
  Description of Artificial Sequence: Synthetic oligonucleotide
  Sense strand starting at position 3444 of SEQ ID NO: 1560156
augucacaugggugaaauc

SEQ ID NO: 1580380 - RNA, 19 nt, Artificial Sequence
  Description of Artificial Sequence: Synthetic oligonucleotide
  Antisense strand to SEQ ID NO: 1580379
gauuucacccaugugacau

SEQ ID NO: 1580381 - RNA, 19 nt, Artificial Sequence
  Description of Artificial Sequence: Synthetic oligonucleotide
  Sense strand starting at position 3484 of SEQ ID NO: 1560156
uguuguuagggugagauga

SEQ ID NO: 1580382 - RNA, 19 nt, Artificial Sequence
  Description of Artificial Sequence: Synthetic oligonucleotide
  Antisense strand to SEQ ID NO: 1580381
ucaucucacccuaacaaca

SEQ ID NO: 1580383 - RNA, 19 nt, Artificial Sequence
  Description of Artificial Sequence: Synthetic oligonucleotide
  Sense strand starting at position 3516 of SEQ ID NO: 1560156
aaaugauucucuuugggug

SEQ ID NO: 1580384 - RNA, 19 nt, Artificial Sequence
  Description of Artificial Sequence: Synthetic oligonucleotide
  Antisense strand to SEQ ID NO: 1580383
cacccaaagagaaucauuu

SEQ ID NO: 1580385 - RNA, 19 nt, Artificial Sequence
  Description of Artificial Sequence: Synthetic oligonucleotide
  Sense strand starting at position 3972 of SEQ ID NO: 1560156
cagaacucgccugauaggu

SEQ ID NO: 1580386 - RNA, 19 nt, Artificial Sequence
  Description of Artificial Sequence: Synthetic oligonucleotide
  Antisense strand to SEQ ID NO: 1580385
accuaucaggcgaguucug

SEQ ID NO: 1580387 - RNA, 19 nt, Artificial Sequence
  Description of Artificial Sequence: Synthetic oligonucleotide
  Sense strand starting at position 30 of SEQ ID NO: 1560157
gggucacuggagcauuaga

SEQ ID NO: 1580388 - RNA, 19 nt, Artificial Sequence
  Description of Artificial Sequence: Synthetic oligonucleotide
  Antisense strand to SEQ ID NO: 1580387
ucuaaugcuccagugaccc

SEQ ID NO: 1580389 - RNA, 19 nt, Artificial Sequence
  Description of Artificial Sequence: Synthetic oligonucleotide
  Sense strand starting at position 84 of SEQ ID NO: 1560157
ugaagugauuuacaacaca

SEQ ID NO: 1580390 - RNA, 19 nt, Artificial Sequence
  Description of Artificial Sequence: Synthetic oligonucleotide
  Antisense strand to SEQ ID NO: 1580389
uguguuguaaaucacuuca

SEQ ID NO: 1580391 - RNA, 19 nt, Artificial Sequence
  Description of Artificial Sequence: Synthetic oligonucleotide
  Sense strand starting at position 201 of SEQ ID NO: 1560157
aggccaguguaccuaucaa

SEQ ID NO: 1580392 - RNA, 19 nt, Artificial Sequence
  Description of Artificial Sequence: Synthetic oligonucleotide
  Antisense strand to SEQ ID NO: 1580391
uugauagguacacuggccu

SEQ ID NO: 1580393 - RNA, 19 nt, Artificial Sequence
  Description of Artificial Sequence: Synthetic oligonucleotide
  Sense strand starting at position 291 of SEQ ID NO: 1560157
cauuacugugaccaaguga

SEQ ID NO: 1580394 - RNA, 19 nt, Artificial Sequence
  Description of Artificial Sequence: Synthetic oligonucleotide
  Antisense strand to SEQ ID NO: 1580393
ucacuuggucacaguaaug

SEQ ID NO: 1580395 - RNA, 19 nt, Artificial Sequence
  Description of Artificial Sequence: Synthetic oligonucleotide
  Sense strand starting at position 311 of SEQ ID NO: 1560157
gcaaucuuagaccacgaga

SEQ ID NO: 1580396 - RNA, 19 nt, Artificial Sequence
  Description of Artificial Sequence: Synthetic oligonucleotide
  Antisense strand to SEQ ID NO: 1580395
ucucguggucuaagauugc

SEQ ID NO: 1580397 - RNA, 19 nt, Artificial Sequence
  Description of Artificial Sequence: Synthetic oligonucleotide
  Sense strand starting at position 384 of SEQ ID NO: 1560157
uguuuaauuucccagggau

SEQ ID NO: 1580398 - RNA, 19 nt, Artificial Sequence
  Description of Artificial Sequence: Synthetic oligonucleotide
  Antisense strand to SEQ ID NO: 1580397
aucccugggaaauuaaaca

SEQ ID NO: 1580399 - RNA, 19 nt, Artificial Sequence
  Description of Artificial Sequence: Synthetic oligonucleotide
  Sense strand starting at position 446 of SEQ ID NO: 1560157
augugaucuugagaauuua

SEQ ID NO: 1580400 - RNA, 19 nt, Artificial Sequence
  Description of Artificial Sequence: Synthetic oligonucleotide
  Antisense strand to SEQ ID NO: 1580399
uaaauucucaagaucacau

SEQ ID NO: 1580401 - RNA, 19 nt, Artificial Sequence
  Description of Artificial Sequence: Synthetic oligonucleotide
  Sense strand starting at position 467 of SEQ ID NO: 1560157
ggauauucucaaugaaguu

SEQ ID NO: 1580402 - RNA, 19 nt, Artificial Sequence
  Description of Artificial Sequence: Synthetic oligonucleotide
  Antisense strand to SEQ ID NO: 1580401
aacuucauugagaauaucc

SEQ ID NO: 1580403 - RNA, 19 nt, Artificial Sequence
  Description of Artificial Sequence: Synthetic oligonucleotide
  Sense strand starting at position 590 of SEQ ID NO: 1560157
ccuuguacccuguaauuau

SEQ ID NO: 1580404 - RNA, 19 nt, Artificial Sequence
  Description of Artificial Sequence: Synthetic oligonucleotide
  Antisense strand to SEQ ID NO: 1580403
auaauuacaggguacaagg

SEQ ID NO: 1580405 - RNA, 19 nt, Artificial Sequence
  Description of Artificial Sequence: Synthetic oligonucleotide
  Sense strand starting at position 601 of SEQ ID NO: 1560157
guaauuauuuagccuuguu

SEQ ID NO: 1580406 - RNA, 19 nt, Artificial Sequence
  Description of Artificial Sequence: Synthetic oligonucleotide
  Antisense strand to SEQ ID NO: 1580405
aacaaggcuaaauaauuac

SEQ ID NO: 1580407 - RNA, 19 nt, Artificial Sequence
  Description of Artificial Sequence: Synthetic oligonucleotide
  Sense strand starting at position 604 of SEQ ID NO: 1560157
auuauuuagccuuguuuac

SEQ ID NO: 1580408 - RNA, 19 nt, Artificial Sequence
  Description of Artificial Sequence: Synthetic oligonucleotide
  Antisense strand to SEQ ID NO: 1580407
guaaacaaggcuaaauaau

SEQ ID NO: 1580409 - RNA, 19 nt, Artificial Sequence
  Description of Artificial Sequence: Synthetic oligonucleotide
  Sense strand starting at position 713 of SEQ ID NO: 1560157
aagagcuucuagguguaga

SEQ ID NO: 1580410 - RNA, 19 nt, Artificial Sequence
  Description of Artificial Sequence: Synthetic oligonucleotide
  Antisense strand to SEQ ID NO: 1580409
ucuacaccuagaagcucuu

SEQ ID NO: 1580411 - RNA, 19 nt, Artificial Sequence
  Description of Artificial Sequence: Synthetic oligonucleotide
  Sense strand starting at position 714 of SEQ ID NO: 1560157
agagcuucuagguguagaa

SEQ ID NO: 1580412 - RNA, 19 nt, Artificial Sequence
  Description of Artificial Sequence: Synthetic oligonucleotide
  Antisense strand to SEQ ID NO: 1580411
uucuacaccuagaagcucu

SEQ ID NO: 1580413 - RNA, 19 nt, Artificial Sequence
  Description of Artificial Sequence: Synthetic oligonucleotide
  Sense strand starting at position 787 of SEQ ID NO: 1560157
ucacauuucuuugggagaa

SEQ ID NO: 1580414 - RNA, 19 nt, Artificial Sequence
  Description of Artificial Sequence: Synthetic oligonucleotide
  Antisense strand to SEQ ID NO: 1580413
uucucccaaagaaauguga

SEQ ID NO: 1580415 - RNA, 19 nt, Artificial Sequence
  Description of Artificial Sequence: Synthetic oligonucleotide
  Sense strand starting at position 788 of SEQ ID NO: 1560157
cacauuucuuugggagaag

SEQ ID NO: 1580416 - RNA, 19 nt, Artificial Sequence
  Description of Artificial Sequence: Synthetic oligonucleotide
  Antisense strand to SEQ ID NO: 1580415
cuucucccaaagaaaugug

SEQ ID NO: 1580417 - RNA, 19 nt, Artificial Sequence
  Description of Artificial Sequence: Synthetic oligonucleotide
  Sense strand starting at position 789 of SEQ ID NO: 1560157
acauuucuuugggagaagu

SEQ ID NO: 1580418 - RNA, 19 nt, Artificial Sequence
  Description of Artificial Sequence: Synthetic oligonucleotide
  Antisense strand to SEQ ID NO: 1580417
acuucucccaaagaaaugu

SEQ ID NO: 1580419 - RNA, 19 nt, Artificial Sequence
  Description of Artificial Sequence: Synthetic oligonucleotide
  Sense strand starting at position 797 of SEQ ID NO: 1560157
uugggagaagucugccuua

SEQ ID NO: 1580420 - RNA, 19 nt, Artificial Sequence
  Description of Artificial Sequence: Synthetic oligonucleotide
  Antisense strand to SEQ ID NO: 1580419
uaaggcagacuucucccaa

SEQ ID NO: 1580421 - RNA, 19 nt, Artificial Sequence
  Description of Artificial Sequence: Synthetic oligonucleotide
  Sense strand starting at position 800 of SEQ ID NO: 1560157
ggagaagucugccuuaagu

SEQ ID NO: 1580422 - RNA, 19 nt, Artificial Sequence
  Description of Artificial Sequence: Synthetic oligonucleotide
  Antisense strand to SEQ ID NO: 1580421
acuuaaggcagacuucucc

SEQ ID NO: 1580423 - RNA, 19 nt, Artificial Sequence
  Description of Artificial Sequence: Synthetic oligonucleotide
  Sense strand starting at position 802 of SEQ ID NO: 1560157
agaagucugccuuaaguga

SEQ ID NO: 1580424 - RNA, 19 nt, Artificial Sequence
  Description of Artificial Sequence: Synthetic oligonucleotide
  Antisense strand to SEQ ID NO: 1580423
ucacuuaaggcagacuucu

SEQ ID NO: 1580425 - RNA, 19 nt, Artificial Sequence
  Description of Artificial Sequence: Synthetic oligonucleotide
  Sense strand starting at position 867 of SEQ ID NO: 1560157
ggugucacccaucaacauu

SEQ ID NO: 1580426 - RNA, 19 nt, Artificial Sequence
  Description of Artificial Sequence: Synthetic oligonucleotide
  Antisense strand to SEQ ID NO: 1580425
aauguugaugggugacacc

SEQ ID NO: 1580427 - RNA, 19 nt, Artificial Sequence
  Description of Artificial Sequence: Synthetic oligonucleotide
  Sense strand starting at position 918 of SEQ ID NO: 1560157
gccagauuacaguauaaac

SEQ ID NO: 1580428 - RNA, 19 nt, Artificial Sequence
  Description of Artificial Sequence: Synthetic oligonucleotide
  Antisense strand to SEQ ID NO: 1580427
guuuauacuguaaucuggc

SEQ ID NO: 1580429 - RNA, 19 nt, Artificial Sequence
  Description of Artificial Sequence: Synthetic oligonucleotide
  Sense strand starting at position 1167 of SEQ ID NO: 1560157
caguaaagugcaggacauu

SEQ ID NO: 1580430 - RNA, 19 nt, Artificial Sequence
  Description of Artificial Sequence: Synthetic oligonucleotide
  Antisense strand to SEQ ID NO: 1580429
aauguccugcacuuuacug

SEQ ID NO: 1580431 - RNA, 19 nt, Artificial Sequence
  Description of Artificial Sequence: Synthetic oligonucleotide
  Sense strand starting at position 1262 of SEQ ID NO: 1560157
auugaucagucuuugaacu

SEQ ID NO: 1580432 - RNA, 19 nt, Artificial Sequence
  Description of Artificial Sequence: Synthetic oligonucleotide
  Antisense strand to SEQ ID NO: 1580431
aguucaaagacugaucaau

SEQ ID NO: 1580433 - RNA, 19 nt, Artificial Sequence
  Description of Artificial Sequence: Synthetic oligonucleotide
  Sense strand starting at position 1263 of SEQ ID NO: 1560157
uugaucagucuuugaacuu

SEQ ID NO: 1580434 - RNA, 19 nt, Artificial Sequence
  Description of Artificial Sequence: Synthetic oligonucleotide
  Antisense strand to SEQ ID NO: 1580433
aaguucaaagacugaucaa

SEQ ID NO: 1580435 - RNA, 19 nt, Artificial Sequence
  Description of Artificial Sequence: Synthetic oligonucleotide
  Sense strand starting at position 2576 of SEQ ID NO: 1560157
aggauuagcauugauguca

SEQ ID NO: 1580436 - RNA, 19 nt, Artificial Sequence
  Description of Artificial Sequence: Synthetic oligonucleotide
  Antisense strand to SEQ ID NO: 1580435
ugacaucaaugcuaauccu

SEQ ID NO: 1580437 - RNA, 19 nt, Artificial Sequence
  Description of Artificial Sequence: Synthetic oligonucleotide
  Sense strand starting at position 2585 of SEQ ID NO: 1560157
auugaugucacauggguga

SEQ ID NO: 1580438 - RNA, 19 nt, Artificial Sequence
  Description of Artificial Sequence: Synthetic oligonucleotide
  Antisense strand to SEQ ID NO: 1580437
ucacccaugugacaucaau

SEQ ID NO: 1580439 - RNA, 19 nt, Artificial Sequence
  Description of Artificial Sequence: Synthetic oligonucleotide
  Sense strand starting at position 2587 of SEQ ID NO: 1560157
ugaugucacaugggugaaa

SEQ ID NO: 1580440 - RNA, 19 nt, Artificial Sequence
  Description of Artificial Sequence: Synthetic oligonucleotide
  Antisense strand to SEQ ID NO: 1580439
uuucacccaugugacauca

SEQ ID NO: 1580441 - RNA, 19 nt, Artificial Sequence
  Description of Artificial Sequence: Synthetic oligonucleotide
  Sense strand starting at position 2588 of SEQ ID NO: 1560157
gaugucacaugggugaaau

SEQ ID NO: 1580442 - RNA, 19 nt, Artificial Sequence
  Description of Artificial Sequence: Synthetic oligonucleotide
  Antisense strand to SEQ ID NO: 1580441
auuucacccaugugacauc

SEQ ID NO: 1580443 - RNA, 19 nt, Artificial Sequence
  Description of Artificial Sequence: Synthetic oligonucleotide
  Sense strand starting at position 2589 of SEQ ID NO: 1560157
augucacaugggugaaauc

SEQ ID NO: 1580444 - RNA, 19 nt, Artificial Sequence
  Description of Artificial Sequence: Synthetic oligonucleotide
  Antisense strand to SEQ ID NO: 1580443
gauuucacccaugugacau

SEQ ID NO: 1580445 - RNA, 19 nt, Artificial Sequence
  Description of Artificial Sequence: Synthetic oligonucleotide
  Sense strand starting at position 2629 of SEQ ID NO: 1560157
uguuguuagggugagauga

SEQ ID NO: 1580446 - RNA, 19 nt, Artificial Sequence
  Description of Artificial Sequence: Synthetic oligonucleotide
  Antisense strand to SEQ ID NO: 1580445
ucaucucacccuaacaaca

SEQ ID NO: 1580447 - RNA, 19 nt, Artificial Sequence
  Description of Artificial Sequence: Synthetic oligonucleotide
  Sense strand starting at position 2661 of SEQ ID NO: 1560157
aaaugauucucuuugggug

SEQ ID NO: 1580448 - RNA, 19 nt, Artificial Sequence
  Description of Artificial Sequence: Synthetic oligonucleotide
  Antisense strand to SEQ ID NO: 1580447
cacccaaagagaaucauuu

SEQ ID NO: 1580449 - RNA, 19 nt, Artificial Sequence
  Description of Artificial Sequence: Synthetic oligonucleotide
  Sense strand starting at position 3117 of SEQ ID NO: 1560157
cagaacucgccugauaggu

SEQ ID NO: 1580450 - RNA, 19 nt, Artificial Sequence
  Description of Artificial Sequence: Synthetic oligonucleotide
  Antisense strand to SEQ ID NO: 1580449
accuaucaggcgaguucug

SEQ ID NO: 1580451 - RNA, 19 nt, Artificial Sequence
  Description of Artificial Sequence: Synthetic oligonucleotide
  Sense strand starting at position 3235 of SEQ ID NO: 1560157
gauuguuucgaggaaucag

SEQ ID NO: 1580452 - RNA, 19 nt, Artificial Sequence
  Description of Artificial Sequence: Synthetic oligonucleotide
  Antisense strand to SEQ ID NO: 1580451
cugauuccucgaaacaauc

SEQ ID NO: 1580453 - RNA, 19 nt, Artificial Sequence
  Description of Artificial Sequence: Synthetic oligonucleotide
  Sense strand starting at position 3288 of SEQ ID NO: 1560157
ggucacaacggugaacaau

SEQ ID NO: 1580454 - RNA, 19 nt, Artificial Sequence
  Description of Artificial Sequence: Synthetic oligonucleotide
  Antisense strand to SEQ ID NO: 1580453
auuguucaccguugugacc

SEQ ID NO: 1580455 - RNA, 19 nt, Artificial Sequence
  Description of Artificial Sequence: Synthetic oligonucleotide
  Sense strand starting at position 3608 of SEQ ID NO: 1560157
agguaauaaugcucacaga

SEQ ID NO: 1580456 - RNA, 19 nt, Artificial Sequence
  Description of Artificial Sequence: Synthetic oligonucleotide
  Antisense strand to SEQ ID NO: 1580455
ucugugagcauuauuaccu

SEQ ID NO: 1580457 - RNA, 19 nt, Artificial Sequence
  Description of Artificial Sequence: Synthetic oligonucleotide
  Sense strand starting at position 3609 of SEQ ID NO: 1560157
gguaauaaugcucacagau

SEQ ID NO: 1580458 - RNA, 19 nt, Artificial Sequence
  Description of Artificial Sequence: Synthetic oligonucleotide
  Antisense strand to SEQ ID NO: 1580457
aucugugagcauuauuacc

SEQ ID NO: 1580459 - RNA, 19 nt, Artificial Sequence
  Description of Artificial Sequence: Synthetic oligonucleotide
  Sense strand starting at position 3634 of SEQ ID NO: 1560157
uuaggagaauaagugucau

SEQ ID NO: 1580460 - RNA, 19 nt, Artificial Sequence
  Description of Artificial Sequence: Synthetic oligonucleotide
  Antisense strand to SEQ ID NO: 1580459
augacacuuauucuccuaa

SEQ ID NO: 1580461 - RNA, 19 nt, Artificial Sequence
  Description of Artificial Sequence: Synthetic oligonucleotide
  Sense strand starting at position 3640 of SEQ ID NO: 1560157
gaauaagugucauugaaac

SEQ ID NO: 1580462 - RNA, 19 nt, Artificial Sequence
  Description of Artificial Sequence: Synthetic oligonucleotide
  Antisense strand to SEQ ID NO: 1580461
guuucaaugacacuuauuc

SEQ ID NO: 1580463 - RNA, 19 nt, Artificial Sequence
  Description of Artificial Sequence: Synthetic oligonucleotide
  Sense strand starting at position 3646 of SEQ ID NO: 1560157
gugucauugaaacaagugu

SEQ ID NO: 1580464 - RNA, 19 nt, Artificial Sequence
  Description of Artificial Sequence: Synthetic oligonucleotide
  Antisense strand to SEQ ID NO: 1580463
acacuuguuucaaugacac

SEQ ID NO: 1580465 - RNA, 19 nt, Artificial Sequence
  Description of Artificial Sequence: Synthetic oligonucleotide
  Sense strand starting at position 3653 of SEQ ID NO: 1560157
ugaaacaaguguguuucuu

SEQ ID NO: 1580466 - RNA, 19 nt, Artificial Sequence
  Description of Artificial Sequence: Synthetic oligonucleotide
  Antisense strand to SEQ ID NO: 1580465
aagaaacacacuuguuuca

SEQ ID NO: 1580467 - RNA, 19 nt, Artificial Sequence
  Description of Artificial Sequence: Synthetic oligonucleotide
  Sense strand starting at position 60 of SEQ ID NO: 1560158
acgggaaucuuucuagaaa

SEQ ID NO: 1580468 - RNA, 19 nt, Artificial Sequence
  Description of Artificial Sequence: Synthetic oligonucleotide
  Antisense strand to SEQ ID NO: 1580467
uuucuagaaagauucccgu

SEQ ID NO: 1580469 - RNA, 19 nt, Artificial Sequence
  Description of Artificial Sequence: Synthetic oligonucleotide
  Sense strand starting at position 61 of SEQ ID NO: 1560158
cgggaaucuuucuagaaau

SEQ ID NO: 1580470 - RNA, 19 nt, Artificial Sequence
  Description of Artificial Sequence: Synthetic oligonucleotide
  Antisense strand to SEQ ID NO: 1580469
auuucuagaaagauucccg

SEQ ID NO: 1580471 - RNA, 19 nt, Artificial Sequence
  Description of Artificial Sequence: Synthetic oligonucleotide
  Sense strand starting at position 300 of SEQ ID NO: 1560158
ggguuucuuuccucccuca

SEQ ID NO: 1580472 - RNA, 19 nt, Artificial Sequence
  Description of Artificial Sequence: Synthetic oligonucleotide
  Antisense strand to SEQ ID NO: 1580471
ugagggaggaaagaaaccc

SEQ ID NO: 1580473 - RNA, 19 nt, Artificial Sequence
  Description of Artificial Sequence: Synthetic oligonucleotide
  Sense strand starting at position 545 of SEQ ID NO: 1560158
cagggucuuccuggaggau

SEQ ID NO: 1580474 - RNA, 19 nt, Artificial Sequence
  Description of Artificial Sequence: Synthetic oligonucleotide
  Antisense strand to SEQ ID NO: 1580473
auccuccaggaagacccug

SEQ ID NO: 1580475 - RNA, 19 nt, Artificial Sequence
  Description of Artificial Sequence: Synthetic oligonucleotide
  Sense strand starting at position 726 of SEQ ID NO: 1560158
augccaucggagggagaau

SEQ ID NO: 1580476 - RNA, 19 nt, Artificial Sequence
  Description of Artificial Sequence: Synthetic oligonucleotide
  Antisense strand to SEQ ID NO: 1580475
auucucccuccgauggcau

SEQ ID NO: 1580477 - RNA, 19 nt, Artificial Sequence
  Description of Artificial Sequence: Synthetic oligonucleotide
  Sense strand starting at position 1067 of SEQ ID NO: 1560158
ccgucuuccuuuguaguua

SEQ ID NO: 1580478 - RNA, 19 nt, Artificial Sequence
  Description of Artificial Sequence: Synthetic oligonucleotide
  Antisense strand to SEQ ID NO: 1580477
uaacuacaaaggaagacgg

SEQ ID NO: 1580479 - RNA, 19 nt, Artificial Sequence
  Description of Artificial Sequence: Synthetic oligonucleotide
  Sense strand starting at position 2296 of SEQ ID NO: 1560158
gggcaucggccggaagaau

SEQ ID NO: 1580480 - RNA, 19 nt, Artificial Sequence
  Description of Artificial Sequence: Synthetic oligonucleotide
  Antisense strand to SEQ ID NO: 1580479
auucuuccggccgaugccc

SEQ ID NO: 1580481 - RNA, 19 nt, Artificial Sequence
  Description of Artificial Sequence: Synthetic oligonucleotide
  Sense strand starting at position 2349 of SEQ ID NO: 1560158
cguugaaagcgcccgugau

SEQ ID NO: 1580482 - RNA, 19 nt, Artificial Sequence
  Description of Artificial Sequence: Synthetic oligonucleotide
  Antisense strand to SEQ ID NO: 1580481
aucacgggcgcuuucaacg

SEQ ID NO: 1580483 - RNA, 19 nt, Artificial Sequence
  Description of Artificial Sequence: Synthetic oligonucleotide
  Sense strand starting at position 2350 of SEQ ID NO: 1560158
guugaaagcgcccgugauc

SEQ ID NO: 1580484 - RNA, 19 nt, Artificial Sequence
  Description of Artificial Sequence: Synthetic oligonucleotide
  Antisense strand to SEQ ID NO: 1580483
gaucacgggcgcuuucaac

SEQ ID NO: 1580485 - RNA, 19 nt, Artificial Sequence
  Description of Artificial Sequence: Synthetic oligonucleotide
  Sense strand starting at position 2359 of SEQ ID NO: 1560158
gcccgugauccuuaaagua

SEQ ID NO: 1580486 - RNA, 19 nt, Artificial Sequence
  Description of Artificial Sequence: Synthetic oligonucleotide
  Antisense strand to SEQ ID NO: 1580485
uacuuuaaggaucacgggc

SEQ ID NO: 1580487 - RNA, 19 nt, Artificial Sequence
  Description of Artificial Sequence: Synthetic oligonucleotide
  Sense strand starting at position 2375 of SEQ ID NO: 1560158
guagguaacucaucaauaa

SEQ ID NO: 1580488 - RNA, 19 nt, Artificial Sequence
  Description of Artificial Sequence: Synthetic oligonucleotide
  Antisense strand to SEQ ID NO: 1580487
uuauugaugaguuaccuac

SEQ ID NO: 1580489 - RNA, 19 nt, Artificial Sequence
  Description of Artificial Sequence: Synthetic oligonucleotide
  Sense strand starting at position 2845 of SEQ ID NO: 1560158
gaaaguguccuuggcccuu

SEQ ID NO: 1580490 - RNA, 19 nt, Artificial Sequence
  Description of Artificial Sequence: Synthetic oligonucleotide
  Antisense strand to SEQ ID NO: 1580489
aagggccaaggacacuuuc

SEQ ID NO: 1580491 - RNA, 19 nt, Artificial Sequence
  Description of Artificial Sequence: Synthetic oligonucleotide
  Sense strand starting at position 2858 of SEQ ID NO: 1560158
gcccuuuaaguauguaacu

SEQ ID NO: 1580492 - RNA, 19 nt, Artificial Sequence
  Description of Artificial Sequence: Synthetic oligonucleotide
  Antisense strand to SEQ ID NO: 1580491
aguuacauacuuaaagggc

SEQ ID NO: 1580493 - RNA, 19 nt, Artificial Sequence
  Description of Artificial Sequence: Synthetic oligonucleotide
  Sense strand starting at position 2863 of SEQ ID NO: 1560158
uuaaguauguaacucauca

SEQ ID NO: 1580494 - RNA, 19 nt, Artificial Sequence
  Description of Artificial Sequence: Synthetic oligonucleotide
  Antisense strand to SEQ ID NO: 1580493
ugaugaguuacauacuuaa

SEQ ID NO: 1580495 - RNA, 19 nt, Artificial Sequence
  Description of Artificial Sequence: Synthetic oligonucleotide
  Sense strand starting at position 2903 of SEQ ID NO: 1560158
gagacuggcucgcacugau

SEQ ID NO: 1580496 - RNA, 19 nt, Artificial Sequence
  Description of Artificial Sequence: Synthetic oligonucleotide
  Antisense strand to SEQ ID NO: 1580495
aucagugcgagccagucuc

SEQ ID NO: 1580497 - RNA, 19 nt, Artificial Sequence
  Description of Artificial Sequence: Synthetic oligonucleotide
  Sense strand starting at position 2906 of SEQ ID NO: 1560158
acuggcucgcacugauaau

SEQ ID NO: 1580498 - RNA, 19 nt, Artificial Sequence
  Description of Artificial Sequence: Synthetic oligonucleotide
  Antisense strand to SEQ ID NO: 1580497
auuaucagugcgagccagu

SEQ ID NO: 1580499 - RNA, 19 nt, Artificial Sequence
  Description of Artificial Sequence: Synthetic oligonucleotide
  Sense strand starting at position 2944 of SEQ ID NO: 1560158
ugaaguaucucccagcucu

SEQ ID NO: 1580500 - RNA, 19 nt, Artificial Sequence
  Description of Artificial Sequence: Synthetic oligonucleotide
  Antisense strand to SEQ ID NO: 1580499
agagcugggagauacuuca

SEQ ID NO: 1580501 - RNA, 19 nt, Artificial Sequence
  Description of Artificial Sequence: Synthetic oligonucleotide
  Sense strand starting at position 2958 of SEQ ID NO: 1560158
gcucuaaagugcccgugau

SEQ ID NO: 1580502 - RNA, 19 nt, Artificial Sequence
  Description of Artificial Sequence: Synthetic oligonucleotide
  Antisense strand to SEQ ID NO: 1580501
aucacgggcacuuuagagc

SEQ ID NO: 1580503 - RNA, 19 nt, Artificial Sequence
  Description of Artificial Sequence: Synthetic oligonucleotide
  Sense strand starting at position 2959 of SEQ ID NO: 1560158
cucuaaagugcccgugauc

SEQ ID NO: 1580504 - RNA, 19 nt, Artificial Sequence
  Description of Artificial Sequence: Synthetic oligonucleotide
  Antisense strand to SEQ ID NO: 1580503
gaucacgggcacuuuagag

SEQ ID NO: 1580505 - RNA, 19 nt, Artificial Sequence
  Description of Artificial Sequence: Synthetic oligonucleotide
  Sense strand starting at position 2968 of SEQ ID NO: 1560158
gcccgugauccuuuacgua

SEQ ID NO: 1580506 - RNA, 19 nt, Artificial Sequence
  Description of Artificial Sequence: Synthetic oligonucleotide
  Antisense strand to SEQ ID NO: 1580505
uacguaaaggaucacgggc

SEQ ID NO: 1580507 - RNA, 19 nt, Artificial Sequence
  Description of Artificial Sequence: Synthetic oligonucleotide
  Sense strand starting at position 2971 of SEQ ID NO: 1560158
cgugauccuuuacguauga

SEQ ID NO: 1580508 - RNA, 19 nt, Artificial Sequence
  Description of Artificial Sequence: Synthetic oligonucleotide
  Antisense strand to SEQ ID NO: 1580507
ucauacguaaaggaucacg

SEQ ID NO: 1580509 - RNA, 19 nt, Artificial Sequence
  Description of Artificial Sequence: Synthetic oligonucleotide
  Sense strand starting at position 2972 of SEQ ID NO: 1560158
gugauccuuuacguaugaa

SEQ ID NO: 1580510 - RNA, 19 nt, Artificial Sequence
  Description of Artificial Sequence: Synthetic oligonucleotide
  Antisense strand to SEQ ID NO: 1580509
uucauacguaaaggaucac

SEQ ID NO: 1580511 - RNA, 19 nt, Artificial Sequence
  Description of Artificial Sequence: Synthetic oligonucleotide
  Sense strand starting at position 2975 of SEQ ID NO: 1560158
auccuuuacguaugaaacu

SEQ ID NO: 1580512 - RNA, 19 nt, Artificial Sequence
  Description of Artificial Sequence: Synthetic oligonucleotide
  Antisense strand to SEQ ID NO: 1580511
aguuucauacguaaaggau

SEQ ID NO: 1580513 - RNA, 19 nt, Artificial Sequence
  Description of Artificial Sequence: Synthetic oligonucleotide
  Sense strand starting at position 3126 of SEQ ID NO: 1560158
gugagacgccauugcugua

SEQ ID NO: 1580514 - RNA, 19 nt, Artificial Sequence
  Description of Artificial Sequence: Synthetic oligonucleotide
  Antisense strand to SEQ ID NO: 1580513
uacagcaauggcgucucac

SEQ ID NO: 1580515 - RNA, 19 nt, Artificial Sequence
  Description of Artificial Sequence: Synthetic oligonucleotide
  Sense strand starting at position 3427 of SEQ ID NO: 1560158
gagugaaacucuguuugag

SEQ ID NO: 1580516 - RNA, 19 nt, Artificial Sequence
  Description of Artificial Sequence: Synthetic oligonucleotide
  Antisense strand to SEQ ID NO: 1580515
cucaaacagaguuucacuc

SEQ ID NO: 1580517 - RNA, 19 nt, Artificial Sequence
  Description of Artificial Sequence: Synthetic oligonucleotide
  Sense strand starting at position 3429 of SEQ ID NO: 1560158
gugaaacucuguuugagaa

SEQ ID NO: 1580518 - RNA, 19 nt, Artificial Sequence
  Description of Artificial Sequence: Synthetic oligonucleotide
  Antisense strand to SEQ ID NO: 1580517
uucucaaacagaguuucac

SEQ ID NO: 1580519 - RNA, 19 nt, Artificial Sequence
  Description of Artificial Sequence: Synthetic oligonucleotide
  Sense strand starting at position 3430 of SEQ ID NO: 1560158
ugaaacucuguuugagaaa

SEQ ID NO: 1580520 - RNA, 19 nt, Artificial Sequence
  Description of Artificial Sequence: Synthetic oligonucleotide
  Antisense strand to SEQ ID NO: 1580519
uuucucaaacagaguuuca

SEQ ID NO: 1580521 - RNA, 19 nt, Artificial Sequence
  Description of Artificial Sequence: Synthetic oligonucleotide
  Sense strand starting at position 3524 of SEQ ID NO: 1560158
aucgguugaucccugggau

SEQ ID NO: 1580522 - RNA, 19 nt, Artificial Sequence
  Description of Artificial Sequence: Synthetic oligonucleotide
  Antisense strand to SEQ ID NO: 1580521
aucccagggaucaaccgau

SEQ ID NO: 1580523 - RNA, 19 nt, Artificial Sequence
  Description of Artificial Sequence: Synthetic oligonucleotide
  Sense strand starting at position 3525 of SEQ ID NO: 1560158
ucgguugaucccugggaua

SEQ ID NO: 1580524 - RNA, 19 nt, Artificial Sequence
  Description of Artificial Sequence: Synthetic oligonucleotide
  Antisense strand to SEQ ID NO: 1580523
uaucccagggaucaaccga

SEQ ID NO: 1580525 - RNA, 19 nt, Artificial Sequence
  Description of Artificial Sequence: Synthetic oligonucleotide
  Sense strand starting at position 3527 of SEQ ID NO: 1560158
gguugaucccugggauauu

SEQ ID NO: 1580526 - RNA, 19 nt, Artificial Sequence
  Description of Artificial Sequence: Synthetic oligonucleotide
  Antisense strand to SEQ ID NO: 1580525
aauaucccagggaucaacc

SEQ ID NO: 1580527 - RNA, 19 nt, Artificial Sequence
  Description of Artificial Sequence: Synthetic oligonucleotide
  Sense strand starting at position 3528 of SEQ ID NO: 1560158
guugaucccugggauauua

SEQ ID NO: 1580528 - RNA, 19 nt, Artificial Sequence
  Description of Artificial Sequence: Synthetic oligonucleotide
  Antisense strand to SEQ ID NO: 1580527
uaauaucccagggaucaac

SEQ ID NO: 1580529 - RNA, 19 nt, Artificial Sequence
  Description of Artificial Sequence: Synthetic oligonucleotide
  Sense strand starting at position 3541 of SEQ ID NO: 1560158
auauuaaagcugcagugaa

SEQ ID NO: 1580530 - RNA, 19 nt, Artificial Sequence
  Description of Artificial Sequence: Synthetic oligonucleotide
  Antisense strand to SEQ ID NO: 1580529
uucacugcagcuuuaauau

SEQ ID NO: 1580531 - RNA, 19 nt, Artificial Sequence
  Description of Artificial Sequence: Synthetic oligonucleotide
  Sense strand starting at position 3829 of SEQ ID NO: 1560158
uacccuuugucugggaugu

SEQ ID NO: 1580532 - RNA, 19 nt, Artificial Sequence
  Description of Artificial Sequence: Synthetic oligonucleotide
  Antisense strand to SEQ ID NO: 1580531
acaucccagacaaagggua

SEQ ID NO: 1580533 - RNA, 19 nt, Artificial Sequence
  Description of Artificial Sequence: Synthetic oligonucleotide
  Sense strand starting at position 3862 of SEQ ID NO: 1560158
auguguggcucauuccuua

SEQ ID NO: 1580534 - RNA, 19 nt, Artificial Sequence
  Description of Artificial Sequence: Synthetic oligonucleotide
  Antisense strand to SEQ ID NO: 1580533
uaaggaaugagccacacau

SEQ ID NO: 1580535 - RNA, 19 nt, Artificial Sequence
  Description of Artificial Sequence: Synthetic oligonucleotide
  Sense strand starting at position 3865 of SEQ ID NO: 1560158
uguggcucauuccuuaauu

SEQ ID NO: 1580536 - RNA, 19 nt, Artificial Sequence
  Description of Artificial Sequence: Synthetic oligonucleotide
  Antisense strand to SEQ ID NO: 1580535
aauuaaggaaugagccaca

SEQ ID NO: 1580537 - RNA, 19 nt, Artificial Sequence
  Description of Artificial Sequence: Synthetic oligonucleotide
  Sense strand starting at position 3866 of SEQ ID NO: 1560158
guggcucauuccuuaauuc

SEQ ID NO: 1580538 - RNA, 19 nt, Artificial Sequence
  Description of Artificial Sequence: Synthetic oligonucleotide
  Antisense strand to SEQ ID NO: 1580537
gaauuaaggaaugagccac

SEQ ID NO: 1580539 - RNA, 19 nt, Artificial Sequence
  Description of Artificial Sequence: Synthetic oligonucleotide
  Sense strand starting at position 59 of SEQ ID NO: 1560159
acgggaaucuuucuagaaa

SEQ ID NO: 1580540 - RNA, 19 nt, Artificial Sequence
  Description of Artificial Sequence: Synthetic oligonucleotide
  Antisense strand to SEQ ID NO: 1580539
uuucuagaaagauucccgu

SEQ ID NO: 1580541 - RNA, 19 nt, Artificial Sequence
  Description of Artificial Sequence: Synthetic oligonucleotide
  Sense strand starting at position 60 of SEQ ID NO: 1560159
cgggaaucuuucuagaaau

SEQ ID NO: 1580542 - RNA, 19 nt, Artificial Sequence
  Description of Artificial Sequence: Synthetic oligonucleotide
  Antisense strand to SEQ ID NO: 1580541
auuucuagaaagauucccg

SEQ ID NO: 1580543 - RNA, 19 nt, Artificial Sequence
  Description of Artificial Sequence: Synthetic oligonucleotide
  Sense strand starting at position 299 of SEQ ID NO: 1560159
ggguuucuuuccucccuca

SEQ ID NO: 1580544 - RNA, 19 nt, Artificial Sequence
  Description of Artificial Sequence: Synthetic oligonucleotide
  Antisense strand to SEQ ID NO: 1580543
ugagggaggaaagaaaccc

SEQ ID NO: 1580545 - RNA, 19 nt, Artificial Sequence
  Description of Artificial Sequence: Synthetic oligonucleotide
  Sense strand starting at position 544 of SEQ ID NO: 1560159
cagggucuuccuggaggau

SEQ ID NO: 1580546 - RNA, 19 nt, Artificial Sequence
  Description of Artificial Sequence: Synthetic oligonucleotide
  Antisense strand to SEQ ID NO: 1580545
auccuccaggaagacccug

SEQ ID NO: 1580547 - RNA, 19 nt, Artificial Sequence
  Description of Artificial Sequence: Synthetic oligonucleotide
  Sense strand starting at position 725 of SEQ ID NO: 1560159
augccaucggagggagaau

SEQ ID NO: 1580548 - RNA, 19 nt, Artificial Sequence
  Description of Artificial Sequence: Synthetic oligonucleotide
  Antisense strand to SEQ ID NO: 1580547
auucucccuccgauggcau

SEQ ID NO: 1580549 - RNA, 19 nt, Artificial Sequence
  Description of Artificial Sequence: Synthetic oligonucleotide
  Sense strand starting at position 1066 of SEQ ID NO: 1560159
ccgucuuccuuuguaguua

SEQ ID NO: 1580550 - RNA, 19 nt, Artificial Sequence
  Description of Artificial Sequence: Synthetic oligonucleotide
  Antisense strand to SEQ ID NO: 1580549
uaacuacaaaggaagacgg

SEQ ID NO: 1580551 - RNA, 19 nt, Artificial Sequence
  Description of Artificial Sequence: Synthetic oligonucleotide
  Sense strand starting at position 2295 of SEQ ID NO: 1560159
gggcaucggccggaagaau

SEQ ID NO: 1580552 - RNA, 19 nt, Artificial Sequence
  Description of Artificial Sequence: Synthetic oligonucleotide
  Antisense strand to SEQ ID NO: 1580551
auucuuccggccgaugccc

SEQ ID NO: 1580553 - RNA, 19 nt, Artificial Sequence
  Description of Artificial Sequence: Synthetic oligonucleotide
  Sense strand starting at position 2348 of SEQ ID NO: 1560159
cguugaaagcgcccgugau

SEQ ID NO: 1580554 - RNA, 19 nt, Artificial Sequence
  Description of Artificial Sequence: Synthetic oligonucleotide
  Antisense strand to SEQ ID NO: 1580553
aucacgggcgcuuucaacg

SEQ ID NO: 1580555 - RNA, 19 nt, Artificial Sequence
  Description of Artificial Sequence: Synthetic oligonucleotide
  Sense strand starting at position 2349 of SEQ ID NO: 1560159
guugaaagcgcccgugauc

SEQ ID NO: 1580556 - RNA, 19 nt, Artificial Sequence
  Description of Artificial Sequence: Synthetic oligonucleotide
  Antisense strand to SEQ ID NO: 1580555
gaucacgggcgcuuucaac

SEQ ID NO: 1580557 - RNA, 19 nt, Artificial Sequence
  Description of Artificial Sequence: Synthetic oligonucleotide
  Sense strand starting at position 2358 of SEQ ID NO: 1560159
gcccgugauccuuaaagua

SEQ ID NO: 1580558 - RNA, 19 nt, Artificial Sequence
  Description of Artificial Sequence: Synthetic oligonucleotide
  Antisense strand to SEQ ID NO: 1580557
uacuuuaaggaucacgggc

SEQ ID NO: 1580559 - RNA, 19 nt, Artificial Sequence
  Description of Artificial Sequence: Synthetic oligonucleotide
  Sense strand starting at position 2374 of SEQ ID NO: 1560159
guagguaacucaucaauaa

SEQ ID NO: 1580560 - RNA, 19 nt, Artificial Sequence
  Description of Artificial Sequence: Synthetic oligonucleotide
  Antisense strand to SEQ ID NO: 1580559
uuauugaugaguuaccuac

SEQ ID NO: 1580561 - RNA, 19 nt, Artificial Sequence
  Description of Artificial Sequence: Synthetic oligonucleotide
  Sense strand starting at position 2844 of SEQ ID NO: 1560159
gaaaguguccuuggcccuu

SEQ ID NO: 1580562 - RNA, 19 nt, Artificial Sequence
  Description of Artificial Sequence: Synthetic oligonucleotide
  Antisense strand to SEQ ID NO: 1580561
aagggccaaggacacuuuc

SEQ ID NO: 1580563 - RNA, 19 nt, Artificial Sequence
  Description of Artificial Sequence: Synthetic oligonucleotide
  Sense strand starting at position 2857 of SEQ ID NO: 1560159
gcccuuuaaguauguaacu

SEQ ID NO: 1580564 - RNA, 19 nt, Artificial Sequence
  Description of Artificial Sequence: Synthetic oligonucleotide
  Antisense strand to SEQ ID NO: 1580563
aguuacauacuuaaagggc

SEQ ID NO: 1580565 - RNA, 19 nt, Artificial Sequence
  Description of Artificial Sequence: Synthetic oligonucleotide
  Sense strand starting at position 2862 of SEQ ID NO: 1560159
uuaaguauguaacucauca

SEQ ID NO: 1580566 - RNA, 19 nt, Artificial Sequence
  Description of Artificial Sequence: Synthetic oligonucleotide
  Antisense strand to SEQ ID NO: 1580565
ugaugaguuacauacuuaa

SEQ ID NO: 1580567 - RNA, 19 nt, Artificial Sequence
  Description of Artificial Sequence: Synthetic oligonucleotide
  Sense strand starting at position 2902 of SEQ ID NO: 1560159
gagacuggcucgcacugau

SEQ ID NO: 1580568 - RNA, 19 nt, Artificial Sequence
  Description of Artificial Sequence: Synthetic oligonucleotide
  Antisense strand to SEQ ID NO: 1580567
aucagugcgagccagucuc

SEQ ID NO: 1580569 - RNA, 19 nt, Artificial Sequence
  Description of Artificial Sequence: Synthetic oligonucleotide
  Sense strand starting at position 2905 of SEQ ID NO: 1560159
acuggcucgcacugauaau

SEQ ID NO: 1580570 - RNA, 19 nt, Artificial Sequence
  Description of Artificial Sequence: Synthetic oligonucleotide
  Antisense strand to SEQ ID NO: 1580569
auuaucagugcgagccagu

SEQ ID NO: 1580571 - RNA, 19 nt, Artificial Sequence
  Description of Artificial Sequence: Synthetic oligonucleotide
  Sense strand starting at position 2943 of SEQ ID NO: 1560159
ugaaguaucucccagcucu

SEQ ID NO: 1580572 - RNA, 19 nt, Artificial Sequence
  Description of Artificial Sequence: Synthetic oligonucleotide
  Antisense strand to SEQ ID NO: 1580571
agagcugggagauacuuca

SEQ ID NO: 1580573 - RNA, 19 nt, Artificial Sequence
  Description of Artificial Sequence: Synthetic oligonucleotide
  Sense strand starting at position 2957 of SEQ ID NO: 1560159
gcucuaaagugcccgugau

SEQ ID NO: 1580574 - RNA, 19 nt, Artificial Sequence
  Description of Artificial Sequence: Synthetic oligonucleotide
  Antisense strand to SEQ ID NO: 1580573
aucacgggcacuuuagagc

SEQ ID NO: 1580575 - RNA, 19 nt, Artificial Sequence
  Description of Artificial Sequence: Synthetic oligonucleotide
  Sense strand starting at position 2958 of SEQ ID NO: 1560159
cucuaaagugcccgugauc

SEQ ID NO: 1580576 - RNA, 19 nt, Artificial Sequence
  Description of Artificial Sequence: Synthetic oligonucleotide
  Antisense strand to SEQ ID NO: 1580575
gaucacgggcacuuuagag

SEQ ID NO: 1580577 - RNA, 19 nt, Artificial Sequence
  Description of Artificial Sequence: Synthetic oligonucleotide
  Sense strand starting at position 2967 of SEQ ID NO: 1560159
gcccgugauccuuuacgua

SEQ ID NO: 1580578 - RNA, 19 nt, Artificial Sequence
  Description of Artificial Sequence: Synthetic oligonucleotide
  Antisense strand to SEQ ID NO: 1580577
uacguaaaggaucacgggc

SEQ ID NO: 1580579 - RNA, 19 nt, Artificial Sequence
  Description of Artificial Sequence: Synthetic oligonucleotide
  Sense strand starting at position 2970 of SEQ ID NO: 1560159
cgugauccuuuacguauga

SEQ ID NO: 1580580 - RNA, 19 nt, Artificial Sequence
  Description of Artificial Sequence: Synthetic oligonucleotide
  Antisense strand to SEQ ID NO: 1580579
ucauacguaaaggaucacg

SEQ ID NO: 1580581 - RNA, 19 nt, Artificial Sequence
  Description of Artificial Sequence: Synthetic oligonucleotide
  Sense strand starting at position 2971 of SEQ ID NO: 1560159
gugauccuuuacguaugaa

SEQ ID NO: 1580582 - RNA, 19 nt, Artificial Sequence
  Description of Artificial Sequence: Synthetic oligonucleotide
  Antisense strand to SEQ ID NO: 1580581
uucauacguaaaggaucac

SEQ ID NO: 1580583 - RNA, 19 nt, Artificial Sequence
  Description of Artificial Sequence: Synthetic oligonucleotide
  Sense strand starting at position 2974 of SEQ ID NO: 1560159
auccuuuacguaugaaacu

SEQ ID NO: 1580584 - RNA, 19 nt, Artificial Sequence
  Description of Artificial Sequence: Synthetic oligonucleotide
  Antisense strand to SEQ ID NO: 1580583
aguuucauacguaaaggau

SEQ ID NO: 1580585 - RNA, 19 nt, Artificial Sequence
  Description of Artificial Sequence: Synthetic oligonucleotide
  Sense strand starting at position 3125 of SEQ ID NO: 1560159
gugagacgccauugcugua

SEQ ID NO: 1580586 - RNA, 19 nt, Artificial Sequence
  Description of Artificial Sequence: Synthetic oligonucleotide
  Antisense strand to SEQ ID NO: 1580585
uacagcaauggcgucucac

SEQ ID NO: 1580587 - RNA, 19 nt, Artificial Sequence
  Description of Artificial Sequence: Synthetic oligonucleotide
  Sense strand starting at position 3426 of SEQ ID NO: 1560159
gagugaaacucuguuugag

SEQ ID NO: 1580588 - RNA, 19 nt, Artificial Sequence
  Description of Artificial Sequence: Synthetic oligonucleotide
  Antisense strand to SEQ ID NO: 1580587
cucaaacagaguuucacuc

SEQ ID NO: 1580589 - RNA, 19 nt, Artificial Sequence
  Description of Artificial Sequence: Synthetic oligonucleotide
  Sense strand starting at position 3428 of SEQ ID NO: 1560159
gugaaacucuguuugagaa

SEQ ID NO: 1580590 - RNA, 19 nt, Artificial Sequence
  Description of Artificial Sequence: Synthetic oligonucleotide
  Antisense strand to SEQ ID NO: 1580589
uucucaaacagaguuucac

SEQ ID NO: 1580591 - RNA, 19 nt, Artificial Sequence
  Description of Artificial Sequence: Synthetic oligonucleotide
  Sense strand starting at position 3429 of SEQ ID NO: 1560159
ugaaacucuguuugagaaa

SEQ ID NO: 1580592 - RNA, 19 nt, Artificial Sequence
  Description of Artificial Sequence: Synthetic oligonucleotide
  Antisense strand to SEQ ID NO: 1580591
uuucucaaacagaguuuca

SEQ ID NO: 1580593 - RNA, 19 nt, Artificial Sequence
  Description of Artificial Sequence: Synthetic oligonucleotide
  Sense strand starting at position 3523 of SEQ ID NO: 1560159
aucgguugaucccugggau

SEQ ID NO: 1580594 - RNA, 19 nt, Artificial Sequence
  Description of Artificial Sequence: Synthetic oligonucleotide
  Antisense strand to SEQ ID NO: 1580593
aucccagggaucaaccgau

SEQ ID NO: 1580595 - RNA, 19 nt, Artificial Sequence
  Description of Artificial Sequence: Synthetic oligonucleotide
  Sense strand starting at position 3524 of SEQ ID NO: 1560159
ucgguugaucccugggaua

SEQ ID NO: 1580596 - RNA, 19 nt, Artificial Sequence
  Description of Artificial Sequence: Synthetic oligonucleotide
  Antisense strand to SEQ ID NO: 1580595
uaucccagggaucaaccga

SEQ ID NO: 1580597 - RNA, 19 nt, Artificial Sequence
  Description of Artificial Sequence: Synthetic oligonucleotide
  Sense strand starting at position 3526 of SEQ ID NO: 1560159
gguugaucccugggauauu

SEQ ID NO: 1580598 - RNA, 19 nt, Artificial Sequence
  Description of Artificial Sequence: Synthetic oligonucleotide
  Antisense strand to SEQ ID NO: 1580597
aauaucccagggaucaacc

SEQ ID NO: 1580599 - RNA, 19 nt, Artificial Sequence
  Description of Artificial Sequence: Synthetic oligonucleotide
  Sense strand starting at position 3527 of SEQ ID NO: 1560159
guugaucccugggauauua

SEQ ID NO: 1580600 - RNA, 19 nt, Artificial Sequence
  Description of Artificial Sequence: Synthetic oligonucleotide
  Antisense strand to SEQ ID NO: 1580599
uaauaucccagggaucaac

SEQ ID NO: 1580601 - RNA, 19 nt, Artificial Sequence
  Description of Artificial Sequence: Synthetic oligonucleotide
  Sense strand starting at position 3540 of SEQ ID NO: 1560159
auauuaaagcugcagugaa

SEQ ID NO: 1580602 - RNA, 19 nt, Artificial Sequence
  Description of Artificial Sequence: Synthetic oligonucleotide
  Antisense strand to SEQ ID NO: 1580601
uucacugcagcuuuaauau

SEQ ID NO: 1580603 - RNA, 19 nt, Artificial Sequence
  Description of Artificial Sequence: Synthetic oligonucleotide
  Sense strand starting at position 3828 of SEQ ID NO: 1560159
uacccuuugucugggaugu

SEQ ID NO: 1580604 - RNA, 19 nt, Artificial Sequence
  Description of Artificial Sequence: Synthetic oligonucleotide
  Antisense strand to SEQ ID NO: 1580603
acaucccagacaaagggua

SEQ ID NO: 1580605 - RNA, 19 nt, Artificial Sequence
  Description of Artificial Sequence: Synthetic oligonucleotide
  Sense strand starting at position 3861 of SEQ ID NO: 1560159
auguguggcucauuccuua

SEQ ID NO: 1580606 - RNA, 19 nt, Artificial Sequence
  Description of Artificial Sequence: Synthetic oligonucleotide
  Antisense strand to SEQ ID NO: 1580605
uaaggaaugagccacacau

SEQ ID NO: 1580607 - RNA, 19 nt, Artificial Sequence
  Description of Artificial Sequence: Synthetic oligonucleotide
  Sense strand starting at position 3864 of SEQ ID NO: 1560159
uguggcucauuccuuaauu

SEQ ID NO: 1580608 - RNA, 19 nt, Artificial Sequence
  Description of Artificial Sequence: Synthetic oligonucleotide
  Antisense strand to SEQ ID NO: 1580607
aauuaaggaaugagccaca

SEQ ID NO: 1580609 - RNA, 19 nt, Artificial Sequence
  Description of Artificial Sequence: Synthetic oligonucleotide
  Sense strand starting at position 3865 of SEQ ID NO: 1560159
guggcucauuccuuaauuc

SEQ ID NO: 1580610 - RNA, 19 nt, Artificial Sequence
  Description of Artificial Sequence: Synthetic oligonucleotide
  Antisense strand to SEQ ID NO: 1580609
gaauuaaggaaugagccac

SEQ ID NO: 1580611 - RNA, 19 nt, Artificial Sequence
  Description of Artificial Sequence: Synthetic oligonucleotide
  Sense strand starting at position 282 of SEQ ID NO: 1560160
uuuaccauuguguacagaa

SEQ ID NO: 1580612 - RNA, 19 nt, Artificial Sequence
  Description of Artificial Sequence: Synthetic oligonucleotide
  Antisense strand to SEQ ID NO: 1580611
uucuguacacaaugguaaa

SEQ ID NO: 1580613 - RNA, 19 nt, Artificial Sequence
  Description of Artificial Sequence: Synthetic oligonucleotide
  Sense strand starting at position 302 of SEQ ID NO: 1560160
uauuuaugggcuugucuau

SEQ ID NO: 1580614 - RNA, 19 nt, Artificial Sequence
  Description of Artificial Sequence: Synthetic oligonucleotide
  Antisense strand to SEQ ID NO: 1580613
auagacaagcccauaaaua

SEQ ID NO: 1580615 - RNA, 19 nt, Artificial Sequence
  Description of Artificial Sequence: Synthetic oligonucleotide
  Sense strand starting at position 344 of SEQ ID NO: 1560160
cugucaguuguggguauca

SEQ ID NO: 1580616 - RNA, 19 nt, Artificial Sequence
  Description of Artificial Sequence: Synthetic oligonucleotide
  Antisense strand to SEQ ID NO: 1580615
ugauacccacaacugacag

SEQ ID NO: 1580617 - RNA, 19 nt, Artificial Sequence
  Description of Artificial Sequence: Synthetic oligonucleotide
  Sense strand starting at position 625 of SEQ ID NO: 1560160
ucggguuuaagcgauuauc

SEQ ID NO: 1580618 - RNA, 19 nt, Artificial Sequence
  Description of Artificial Sequence: Synthetic oligonucleotide
  Antisense strand to SEQ ID NO: 1580617
gauaaucgcuuaaacccga

SEQ ID NO: 1580619 - RNA, 19 nt, Artificial Sequence
  Description of Artificial Sequence: Synthetic oligonucleotide
  Sense strand starting at position 628 of SEQ ID NO: 1560160
gguuuaagcgauuauccca

SEQ ID NO: 1580620 - RNA, 19 nt, Artificial Sequence
  Description of Artificial Sequence: Synthetic oligonucleotide
  Antisense strand to SEQ ID NO: 1580619
ugggauaaucgcuuaaacc

SEQ ID NO: 1580621 - RNA, 19 nt, Artificial Sequence
  Description of Artificial Sequence: Synthetic oligonucleotide
  Sense strand starting at position 860 of SEQ ID NO: 1560160
ggcauugagacuuggcaga

SEQ ID NO: 1580622 - RNA, 19 nt, Artificial Sequence
  Description of Artificial Sequence: Synthetic oligonucleotide
  Antisense strand to SEQ ID NO: 1580621
ucugccaagucucaaugcc

SEQ ID NO: 1580623 - RNA, 19 nt, Artificial Sequence
  Description of Artificial Sequence: Synthetic oligonucleotide
  Sense strand starting at position 1228 of SEQ ID NO: 1560160
gauguauguaguggguaua

SEQ ID NO: 1580624 - RNA, 19 nt, Artificial Sequence
  Description of Artificial Sequence: Synthetic oligonucleotide
  Antisense strand to SEQ ID NO: 1580623
uauacccacuacauacauc

SEQ ID NO: 1580625 - RNA, 19 nt, Artificial Sequence
  Description of Artificial Sequence: Synthetic oligonucleotide
  Sense strand starting at position 1229 of SEQ ID NO: 1560160
auguauguaguggguauau

SEQ ID NO: 1580626 - RNA, 19 nt, Artificial Sequence
  Description of Artificial Sequence: Synthetic oligonucleotide
  Antisense strand to SEQ ID NO: 1580625
auauacccacuacauacau

SEQ ID NO: 1580627 - RNA, 19 nt, Artificial Sequence
  Description of Artificial Sequence: Synthetic oligonucleotide
  Sense strand starting at position 1238 of SEQ ID NO: 1560160
guggguauaucggauggga

SEQ ID NO: 1580628 - RNA, 19 nt, Artificial Sequence
  Description of Artificial Sequence: Synthetic oligonucleotide
  Antisense strand to SEQ ID NO: 1580627
ucccauccgauauacccac

SEQ ID NO: 1580629 - RNA, 19 nt, Artificial Sequence
  Description of Artificial Sequence: Synthetic oligonucleotide
  Sense strand starting at position 1240 of SEQ ID NO: 1560160
ggguauaucggaugggacu

SEQ ID NO: 1580630 - RNA, 19 nt, Artificial Sequence
  Description of Artificial Sequence: Synthetic oligonucleotide
  Antisense strand to SEQ ID NO: 1580629
agucccauccgauauaccc

SEQ ID NO: 1580631 - RNA, 19 nt, Artificial Sequence
  Description of Artificial Sequence: Synthetic oligonucleotide
  Sense strand starting at position 1241 of SEQ ID NO: 1560160
gguauaucggaugggacuu

SEQ ID NO: 1580632 - RNA, 19 nt, Artificial Sequence
  Description of Artificial Sequence: Synthetic oligonucleotide
  Antisense strand to SEQ ID NO: 1580631
aagucccauccgauauacc

SEQ ID NO: 1580633 - RNA, 19 nt, Artificial Sequence
  Description of Artificial Sequence: Synthetic oligonucleotide
  Sense strand starting at position 1306 of SEQ ID NO: 1560160
ggcuauauccagcagugca

SEQ ID NO: 1580634 - RNA, 19 nt, Artificial Sequence
  Description of Artificial Sequence: Synthetic oligonucleotide
  Antisense strand to SEQ ID NO: 1580633
ugcacugcuggauauagcc

SEQ ID NO: 1580635 - RNA, 19 nt, Artificial Sequence
  Description of Artificial Sequence: Synthetic oligonucleotide
  Sense strand starting at position 1331 of SEQ ID NO: 1560160
guacgucguccaggaguua

SEQ ID NO: 1580636 - RNA, 19 nt, Artificial Sequence
  Description of Artificial Sequence: Synthetic oligonucleotide
  Antisense strand to SEQ ID NO: 1580635
uaacuccuggacgacguac

SEQ ID NO: 1580637 - RNA, 19 nt, Artificial Sequence
  Description of Artificial Sequence: Synthetic oligonucleotide
  Sense strand starting at position 1332 of SEQ ID NO: 1560160
uacgucguccaggaguuaa

SEQ ID NO: 1580638 - RNA, 19 nt, Artificial Sequence
  Description of Artificial Sequence: Synthetic oligonucleotide
  Antisense strand to SEQ ID NO: 1580637
uuaacuccuggacgacgua

SEQ ID NO: 1580639 - RNA, 19 nt, Artificial Sequence
  Description of Artificial Sequence: Synthetic oligonucleotide
  Sense strand starting at position 1538 of SEQ ID NO: 1560160
ugaacaauuagccgggagu

SEQ ID NO: 1580640 - RNA, 19 nt, Artificial Sequence
  Description of Artificial Sequence: Synthetic oligonucleotide
  Antisense strand to SEQ ID NO: 1580639
acucccggcuaauuguuca

SEQ ID NO: 1580641 - RNA, 19 nt, Artificial Sequence
  Description of Artificial Sequence: Synthetic oligonucleotide
  Sense strand starting at position 1539 of SEQ ID NO: 1560160
gaacaauuagccgggagua

SEQ ID NO: 1580642 - RNA, 19 nt, Artificial Sequence
  Description of Artificial Sequence: Synthetic oligonucleotide
  Antisense strand to SEQ ID NO: 1580641
uacucccggcuaauuguuc

SEQ ID NO: 1580643 - RNA, 19 nt, Artificial Sequence
  Description of Artificial Sequence: Synthetic oligonucleotide
  Sense strand starting at position 1857 of SEQ ID NO: 1560160
gcgagcaucuacuuacgaa

SEQ ID NO: 1580644 - RNA, 19 nt, Artificial Sequence
  Description of Artificial Sequence: Synthetic oligonucleotide
  Antisense strand to SEQ ID NO: 1580643
uucguaaguagaugcucgc

SEQ ID NO: 1580645 - RNA, 19 nt, Artificial Sequence
  Description of Artificial Sequence: Synthetic oligonucleotide
  Sense strand starting at position 1858 of SEQ ID NO: 1560160
cgagcaucuacuuacgaaa

SEQ ID NO: 1580646 - RNA, 19 nt, Artificial Sequence
  Description of Artificial Sequence: Synthetic oligonucleotide
  Antisense strand to SEQ ID NO: 1580645
uuucguaaguagaugcucg

SEQ ID NO: 1580647 - RNA, 19 nt, Artificial Sequence
  Description of Artificial Sequence: Synthetic oligonucleotide
  Sense strand starting at position 1861 of SEQ ID NO: 1560160
gcaucuacuuacgaaauga

SEQ ID NO: 1580648 - RNA, 19 nt, Artificial Sequence
  Description of Artificial Sequence: Synthetic oligonucleotide
  Antisense strand to SEQ ID NO: 1580647
ucauuucguaaguagaugc

SEQ ID NO: 1580649 - RNA, 19 nt, Artificial Sequence
  Description of Artificial Sequence: Synthetic oligonucleotide
  Sense strand starting at position 1893 of SEQ ID NO: 1560160
uccgaaaucccaggagcau

SEQ ID NO: 1580650 - RNA, 19 nt, Artificial Sequence
  Description of Artificial Sequence: Synthetic oligonucleotide
  Antisense strand to SEQ ID NO: 1580649
augcuccugggauuucgga

SEQ ID NO: 1580651 - RNA, 19 nt, Artificial Sequence
  Description of Artificial Sequence: Synthetic oligonucleotide
  Sense strand starting at position 2009 of SEQ ID NO: 1560160
ucacgcuuucucuucgcaa

SEQ ID NO: 1580652 - RNA, 19 nt, Artificial Sequence
  Description of Artificial Sequence: Synthetic oligonucleotide
  Antisense strand to SEQ ID NO: 1580651
uugcgaagagaaagcguga

SEQ ID NO: 1580653 - RNA, 19 nt, Artificial Sequence
  Description of Artificial Sequence: Synthetic oligonucleotide
  Sense strand starting at position 2151 of SEQ ID NO: 1560160
cggaaacguccgcccuuau

SEQ ID NO: 1580654 - RNA, 19 nt, Artificial Sequence
  Description of Artificial Sequence: Synthetic oligonucleotide
  Antisense strand to SEQ ID NO: 1580653
auaagggcggacguuuccg

SEQ ID NO: 1580655 - RNA, 19 nt, Artificial Sequence
  Description of Artificial Sequence: Synthetic oligonucleotide
  Sense strand starting at position 2164 of SEQ ID NO: 1560160
ccuuauccguucucuuauu

SEQ ID NO: 1580656 - RNA, 19 nt, Artificial Sequence
  Description of Artificial Sequence: Synthetic oligonucleotide
  Antisense strand to SEQ ID NO: 1580655
aauaagagaacggauaagg

SEQ ID NO: 1580657 - RNA, 19 nt, Artificial Sequence
  Description of Artificial Sequence: Synthetic oligonucleotide
  Sense strand starting at position 2173 of SEQ ID NO: 1560160
uucucuuauuggucagguu

SEQ ID NO: 1580658 - RNA, 19 nt, Artificial Sequence
  Description of Artificial Sequence: Synthetic oligonucleotide
  Antisense strand to SEQ ID NO: 1580657
aaccugaccaauaagagaa

SEQ ID NO: 1580659 - RNA, 19 nt, Artificial Sequence
  Description of Artificial Sequence: Synthetic oligonucleotide
  Sense strand starting at position 2174 of SEQ ID NO: 1560160
ucucuuauuggucagguua

SEQ ID NO: 1580660 - RNA, 19 nt, Artificial Sequence
  Description of Artificial Sequence: Synthetic oligonucleotide
  Antisense strand to SEQ ID NO: 1580659
uaaccugaccaauaagaga

SEQ ID NO: 1580661 - RNA, 19 nt, Artificial Sequence
  Description of Artificial Sequence: Synthetic oligonucleotide
  Sense strand starting at position 2196 of SEQ ID NO: 1560160
guccauuucugacgccaca

SEQ ID NO: 1580662 - RNA, 19 nt, Artificial Sequence
  Description of Artificial Sequence: Synthetic oligonucleotide
  Antisense strand to SEQ ID NO: 1580661
uguggcgucagaaauggac

SEQ ID NO: 1580663 - RNA, 19 nt, Artificial Sequence
  Description of Artificial Sequence: Synthetic oligonucleotide
  Sense strand starting at position 2408 of SEQ ID NO: 1560160
gggcuaggcacgugaugaa

SEQ ID NO: 1580664 - RNA, 19 nt, Artificial Sequence
  Description of Artificial Sequence: Synthetic oligonucleotide
  Antisense strand to SEQ ID NO: 1580663
uucaucacgugccuagccc

SEQ ID NO: 1580665 - RNA, 19 nt, Artificial Sequence
  Description of Artificial Sequence: Synthetic oligonucleotide
  Sense strand starting at position 2450 of SEQ ID NO: 1560160
caggaaucuccugguucuu

SEQ ID NO: 1580666 - RNA, 19 nt, Artificial Sequence
  Description of Artificial Sequence: Synthetic oligonucleotide
  Antisense strand to SEQ ID NO: 1580665
aagaaccaggagauuccug

SEQ ID NO: 1580667 - RNA, 19 nt, Artificial Sequence
  Description of Artificial Sequence: Synthetic oligonucleotide
  Sense strand starting at position 2455 of SEQ ID NO: 1560160
aucuccugguucuuagaga

SEQ ID NO: 1580668 - RNA, 19 nt, Artificial Sequence
  Description of Artificial Sequence: Synthetic oligonucleotide
  Antisense strand to SEQ ID NO: 1580667
ucucuaagaaccaggagau

SEQ ID NO: 1580669 - RNA, 19 nt, Artificial Sequence
  Description of Artificial Sequence: Synthetic oligonucleotide
  Sense strand starting at position 2456 of SEQ ID NO: 1560160
ucuccugguucuuagagaa

SEQ ID NO: 1580670 - RNA, 19 nt, Artificial Sequence
  Description of Artificial Sequence: Synthetic oligonucleotide
  Antisense strand to SEQ ID NO: 1580669
uucucuaagaaccaggaga

SEQ ID NO: 1580671 - RNA, 19 nt, Artificial Sequence
  Description of Artificial Sequence: Synthetic oligonucleotide
  Sense strand starting at position 2572 of SEQ ID NO: 1560160
gcccaauguugggauuaca

SEQ ID NO: 1580672 - RNA, 19 nt, Artificial Sequence
  Description of Artificial Sequence: Synthetic oligonucleotide
  Antisense strand to SEQ ID NO: 1580671
uguaaucccaacauugggc

SEQ ID NO: 1580673 - RNA, 19 nt, Artificial Sequence
  Description of Artificial Sequence: Synthetic oligonucleotide
  Sense strand starting at position 2657 of SEQ ID NO: 1560160
auuggaauccaaugccauu

SEQ ID NO: 1580674 - RNA, 19 nt, Artificial Sequence
  Description of Artificial Sequence: Synthetic oligonucleotide
  Antisense strand to SEQ ID NO: 1580673
aauggcauuggauuccaau

SEQ ID NO: 1580675 - RNA, 19 nt, Artificial Sequence
  Description of Artificial Sequence: Synthetic oligonucleotide
  Sense strand starting at position 3082 of SEQ ID NO: 1560160
ggaaucuuauuugacaguu

SEQ ID NO: 1580676 - RNA, 19 nt, Artificial Sequence
  Description of Artificial Sequence: Synthetic oligonucleotide
  Antisense strand to SEQ ID NO: 1580675
aacugucaaauaagauucc

SEQ ID NO: 1580677 - RNA, 19 nt, Artificial Sequence
  Description of Artificial Sequence: Synthetic oligonucleotide
  Sense strand starting at position 3091 of SEQ ID NO: 1560160
uuugacaguucuuugacaa

SEQ ID NO: 1580678 - RNA, 19 nt, Artificial Sequence
  Description of Artificial Sequence: Synthetic oligonucleotide
  Antisense strand to SEQ ID NO: 1580677
uugucaaagaacugucaaa

SEQ ID NO: 1580679 - RNA, 19 nt, Artificial Sequence
  Description of Artificial Sequence: Synthetic oligonucleotide
  Sense strand starting at position 3092 of SEQ ID NO: 1560160
uugacaguucuuugacaaa

SEQ ID NO: 1580680 - RNA, 19 nt, Artificial Sequence
  Description of Artificial Sequence: Synthetic oligonucleotide
  Antisense strand to SEQ ID NO: 1580679
uuugucaaagaacugucaa

SEQ ID NO: 1580681 - RNA, 19 nt, Artificial Sequence
  Description of Artificial Sequence: Synthetic oligonucleotide
  Sense strand starting at position 3587 of SEQ ID NO: 1560160
ucggguuagaaauguaagu

SEQ ID NO: 1580682 - RNA, 19 nt, Artificial Sequence
  Description of Artificial Sequence: Synthetic oligonucleotide
  Antisense strand to SEQ ID NO: 1580681
acuuacauuucuaacccga

SEQ ID NO: 1580683 - RNA, 19 nt, Artificial Sequence
  Description of Artificial Sequence: Synthetic oligonucleotide
  Sense strand starting at position 3589 of SEQ ID NO: 1560160
ggguuagaaauguaaguau

SEQ ID NO: 1580684 - RNA, 19 nt, Artificial Sequence
  Description of Artificial Sequence: Synthetic oligonucleotide
  Antisense strand to SEQ ID NO: 1580683
auacuuacauuucuaaccc

SEQ ID NO: 1580685 - RNA, 19 nt, Artificial Sequence
  Description of Artificial Sequence: Synthetic oligonucleotide
  Sense strand starting at position 3919 of SEQ ID NO: 1560160
aaauguaagcauuggauua

SEQ ID NO: 1580686 - RNA, 19 nt, Artificial Sequence
  Description of Artificial Sequence: Synthetic oligonucleotide
  Antisense strand to SEQ ID NO: 1580685
uaauccaaugcuuacauuu

SEQ ID NO: 1580687 - RNA, 19 nt, Artificial Sequence
  Description of Artificial Sequence: Synthetic oligonucleotide
  Sense strand starting at position 3921 of SEQ ID NO: 1560160
auguaagcauuggauuaaa

SEQ ID NO: 1580688 - RNA, 19 nt, Artificial Sequence
  Description of Artificial Sequence: Synthetic oligonucleotide
  Antisense strand to SEQ ID NO: 1580687
uuuaauccaaugcuuacau

SEQ ID NO: 1580689 - RNA, 19 nt, Artificial Sequence
  Description of Artificial Sequence: Synthetic oligonucleotide
  Sense strand starting at position 3981 of SEQ ID NO: 1560160
aucccuugguaucauuuau

SEQ ID NO: 1580690 - RNA, 19 nt, Artificial Sequence
  Description of Artificial Sequence: Synthetic oligonucleotide
  Antisense strand to SEQ ID NO: 1580689
auaaaugauaccaagggau

SEQ ID NO: 1580691 - RNA, 19 nt, Artificial Sequence
  Description of Artificial Sequence: Synthetic oligonucleotide
  Sense strand starting at position 8 of SEQ ID NO: 1560161
cucccucaugugggugaua

SEQ ID NO: 1580692 - RNA, 19 nt, Artificial Sequence
  Description of Artificial Sequence: Synthetic oligonucleotide
  Antisense strand to SEQ ID NO: 1580691
uaucacccacaugagggag

SEQ ID NO: 1580693 - RNA, 19 nt, Artificial Sequence
  Description of Artificial Sequence: Synthetic oligonucleotide
  Sense strand starting at position 9 of SEQ ID NO: 1560161
ucccucaugugggugauau

SEQ ID NO: 1580694 - RNA, 19 nt, Artificial Sequence
  Description of Artificial Sequence: Synthetic oligonucleotide
  Antisense strand to SEQ ID NO: 1580693
auaucacccacaugaggga

SEQ ID NO: 1580695 - RNA, 19 nt, Artificial Sequence
  Description of Artificial Sequence: Synthetic oligonucleotide
  Sense strand starting at position 10 of SEQ ID NO: 1560161
cccucaugugggugauaug

SEQ ID NO: 1580696 - RNA, 19 nt, Artificial Sequence
  Description of Artificial Sequence: Synthetic oligonucleotide
  Antisense strand to SEQ ID NO: 1580695
cauaucacccacaugaggg

SEQ ID NO: 1580697 - RNA, 19 nt, Artificial Sequence
  Description of Artificial Sequence: Synthetic oligonucleotide
  Sense strand starting at position 43 of SEQ ID NO: 1560161
gagaguggcagucagacaa

SEQ ID NO: 1580698 - RNA, 19 nt, Artificial Sequence
  Description of Artificial Sequence: Synthetic oligonucleotide
  Antisense strand to SEQ ID NO: 1580697
uugucugacugccacucuc

SEQ ID NO: 1580699 - RNA, 19 nt, Artificial Sequence
  Description of Artificial Sequence: Synthetic oligonucleotide
  Sense strand starting at position 279 of SEQ ID NO: 1560161
gcgccaaugucaccaucau

SEQ ID NO: 1580700 - RNA, 19 nt, Artificial Sequence
  Description of Artificial Sequence: Synthetic oligonucleotide
  Antisense strand to SEQ ID NO: 1580699
augauggugacauuggcgc

SEQ ID NO: 1580701 - RNA, 19 nt, Artificial Sequence
  Description of Artificial Sequence: Synthetic oligonucleotide
  Sense strand starting at position 314 of SEQ ID NO: 1560161
gggcgauggucuccgcaga

SEQ ID NO: 1580702 - RNA, 19 nt, Artificial Sequence
  Description of Artificial Sequence: Synthetic oligonucleotide
  Antisense strand to SEQ ID NO: 1580701
ucugcggagaccaucgccc

SEQ ID NO: 1580703 - RNA, 19 nt, Artificial Sequence
  Description of Artificial Sequence: Synthetic oligonucleotide
  Sense strand starting at position 315 of SEQ ID NO: 1560161
ggcgauggucuccgcagaa

SEQ ID NO: 1580704 - RNA, 19 nt, Artificial Sequence
  Description of Artificial Sequence: Synthetic oligonucleotide
  Antisense strand to SEQ ID NO: 1580703
uucugcggagaccaucgcc

SEQ ID NO: 1580705 - RNA, 19 nt, Artificial Sequence
  Description of Artificial Sequence: Synthetic oligonucleotide
  Sense strand starting at position 510 of SEQ ID NO: 1560161
cugccucuucccgauuaca

SEQ ID NO: 1580706 - RNA, 19 nt, Artificial Sequence
  Description of Artificial Sequence: Synthetic oligonucleotide
  Antisense strand to SEQ ID NO: 1580705
uguaaucgggaagaggcag

SEQ ID NO: 1580707 - RNA, 19 nt, Artificial Sequence
  Description of Artificial Sequence: Synthetic oligonucleotide
  Sense strand starting at position 1565 of SEQ ID NO: 1560161
cccguuucccagcagagaa

SEQ ID NO: 1580708 - RNA, 19 nt, Artificial Sequence
  Description of Artificial Sequence: Synthetic oligonucleotide
  Antisense strand to SEQ ID NO: 1580707
uucucugcugggaaacggg

SEQ ID NO: 1580709 - RNA, 19 nt, Artificial Sequence
  Description of Artificial Sequence: Synthetic oligonucleotide
  Sense strand starting at position 1885 of SEQ ID NO: 1560161
ggcacagucuugggaccau

SEQ ID NO: 1580710 - RNA, 19 nt, Artificial Sequence
  Description of Artificial Sequence: Synthetic oligonucleotide
  Antisense strand to SEQ ID NO: 1580709
auggucccaagacugugcc

SEQ ID NO: 1580711 - RNA, 19 nt, Artificial Sequence
  Description of Artificial Sequence: Synthetic oligonucleotide
  Sense strand starting at position 2287 of SEQ ID NO: 1560161
gaucgacugugacaucauu

SEQ ID NO: 1580712 - RNA, 19 nt, Artificial Sequence
  Description of Artificial Sequence: Synthetic oligonucleotide
  Antisense strand to SEQ ID NO: 1580711
aaugaugucacagucgauc

SEQ ID NO: 1580713 - RNA, 19 nt, Artificial Sequence
  Description of Artificial Sequence: Synthetic oligonucleotide
  Sense strand starting at position 2486 of SEQ ID NO: 1560161
gcaggaugcagggaugagu

SEQ ID NO: 1580714 - RNA, 19 nt, Artificial Sequence
  Description of Artificial Sequence: Synthetic oligonucleotide
  Antisense strand to SEQ ID NO: 1580713
acucaucccugcauccugc

SEQ ID NO: 1580715 - RNA, 19 nt, Artificial Sequence
  Description of Artificial Sequence: Synthetic oligonucleotide
  Sense strand starting at position 2495 of SEQ ID NO: 1560161
agggaugaguccugcagca

SEQ ID NO: 1580716 - RNA, 19 nt, Artificial Sequence
  Description of Artificial Sequence: Synthetic oligonucleotide
  Antisense strand to SEQ ID NO: 1580715
ugcugcaggacucaucccu

SEQ ID NO: 1580717 - RNA, 19 nt, Artificial Sequence
  Description of Artificial Sequence: Synthetic oligonucleotide
  Sense strand starting at position 3378 of SEQ ID NO: 1560161
acucuuuauucuugaacgu

SEQ ID NO: 1580718 - RNA, 19 nt, Artificial Sequence
  Description of Artificial Sequence: Synthetic oligonucleotide
  Antisense strand to SEQ ID NO: 1580717
acguucaagaauaaagagu

SEQ ID NO: 1580719 - RNA, 19 nt, Artificial Sequence
  Description of Artificial Sequence: Synthetic oligonucleotide
  Sense strand starting at position 3439 of SEQ ID NO: 1560161
gaggcuuggccuggccaau

SEQ ID NO: 1580720 - RNA, 19 nt, Artificial Sequence
  Description of Artificial Sequence: Synthetic oligonucleotide
  Antisense strand to SEQ ID NO: 1580719
auuggccaggccaagccuc

SEQ ID NO: 1580721 - RNA, 19 nt, Artificial Sequence
  Description of Artificial Sequence: Synthetic oligonucleotide
  Sense strand starting at position 3475 of SEQ ID NO: 1560161
aggccagagaugugacuaa

SEQ ID NO: 1580722 - RNA, 19 nt, Artificial Sequence
  Description of Artificial Sequence: Synthetic oligonucleotide
  Antisense strand to SEQ ID NO: 1580721
uuagucacaucucuggccu

SEQ ID NO: 1580723 - RNA, 19 nt, Artificial Sequence
  Description of Artificial Sequence: Synthetic oligonucleotide
  Sense strand starting at position 3530 of SEQ ID NO: 1560161
gggauaugcucucaaaggu

SEQ ID NO: 1580724 - RNA, 19 nt, Artificial Sequence
  Description of Artificial Sequence: Synthetic oligonucleotide
  Antisense strand to SEQ ID NO: 1580723
accuuugagagcauauccc

SEQ ID NO: 1580725 - RNA, 19 nt, Artificial Sequence
  Description of Artificial Sequence: Synthetic oligonucleotide
  Sense strand starting at position 3610 of SEQ ID NO: 1560161
agcacuaucuggucaccau

SEQ ID NO: 1580726 - RNA, 19 nt, Artificial Sequence
  Description of Artificial Sequence: Synthetic oligonucleotide
  Antisense strand to SEQ ID NO: 1580725
auggugaccagauagugcu

SEQ ID NO: 1580727 - RNA, 19 nt, Artificial Sequence
  Description of Artificial Sequence: Synthetic oligonucleotide
  Sense strand starting at position 3676 of SEQ ID NO: 1560161
ccagcucagccucgaauuu

SEQ ID NO: 1580728 - RNA, 19 nt, Artificial Sequence
  Description of Artificial Sequence: Synthetic oligonucleotide
  Antisense strand to SEQ ID NO: 1580727
aaauucgaggcugagcugg

SEQ ID NO: 1580729 - RNA, 19 nt, Artificial Sequence
  Description of Artificial Sequence: Synthetic oligonucleotide
  Sense strand starting at position 214 of SEQ ID NO: 1560162
agcaguugucauggagaca

SEQ ID NO: 1580730 - RNA, 19 nt, Artificial Sequence
  Description of Artificial Sequence: Synthetic oligonucleotide
  Antisense strand to SEQ ID NO: 1580729
ugucuccaugacaacugcu

SEQ ID NO: 1580731 - RNA, 19 nt, Artificial Sequence
  Description of Artificial Sequence: Synthetic oligonucleotide
  Sense strand starting at position 215 of SEQ ID NO: 1560162
gcaguugucauggagacag

SEQ ID NO: 1580732 - RNA, 19 nt, Artificial Sequence
  Description of Artificial Sequence: Synthetic oligonucleotide
  Antisense strand to SEQ ID NO: 1580731
cugucuccaugacaacugc

SEQ ID NO: 1580733 - RNA, 19 nt, Artificial Sequence
  Description of Artificial Sequence: Synthetic oligonucleotide
  Sense strand starting at position 278 of SEQ ID NO: 1560162
gaagaucagcuuuggaaca

SEQ ID NO: 1580734 - RNA, 19 nt, Artificial Sequence
  Description of Artificial Sequence: Synthetic oligonucleotide
  Antisense strand to SEQ ID NO: 1580733
uguuccaaagcugaucuuc

SEQ ID NO: 1580735 - RNA, 19 nt, Artificial Sequence
  Description of Artificial Sequence: Synthetic oligonucleotide
  Sense strand starting at position 591 of SEQ ID NO: 1560162
cucccucaugugggugaua

SEQ ID NO: 1580736 - RNA, 19 nt, Artificial Sequence
  Description of Artificial Sequence: Synthetic oligonucleotide
  Antisense strand to SEQ ID NO: 1580735
uaucacccacaugagggag

SEQ ID NO: 1580737 - RNA, 19 nt, Artificial Sequence
  Description of Artificial Sequence: Synthetic oligonucleotide
  Sense strand starting at position 592 of SEQ ID NO: 1560162
ucccucaugugggugauau

SEQ ID NO: 1580738 - RNA, 19 nt, Artificial Sequence
  Description of Artificial Sequence: Synthetic oligonucleotide
  Antisense strand to SEQ ID NO: 1580737
auaucacccacaugaggga

SEQ ID NO: 1580739 - RNA, 19 nt, Artificial Sequence
  Description of Artificial Sequence: Synthetic oligonucleotide
  Sense strand starting at position 593 of SEQ ID NO: 1560162
cccucaugugggugauaug

SEQ ID NO: 1580740 - RNA, 19 nt, Artificial Sequence
  Description of Artificial Sequence: Synthetic oligonucleotide
  Antisense strand to SEQ ID NO: 1580739
cauaucacccacaugaggg

SEQ ID NO: 1580741 - RNA, 19 nt, Artificial Sequence
  Description of Artificial Sequence: Synthetic oligonucleotide
  Sense strand starting at position 626 of SEQ ID NO: 1560162
gagaguggcagucagacaa

SEQ ID NO: 1580742 - RNA, 19 nt, Artificial Sequence
  Description of Artificial Sequence: Synthetic oligonucleotide
  Antisense strand to SEQ ID NO: 1580741
uugucugacugccacucuc

SEQ ID NO: 1580743 - RNA, 19 nt, Artificial Sequence
  Description of Artificial Sequence: Synthetic oligonucleotide
  Sense strand starting at position 862 of SEQ ID NO: 1560162
gcgccaaugucaccaucau

SEQ ID NO: 1580744 - RNA, 19 nt, Artificial Sequence
  Description of Artificial Sequence: Synthetic oligonucleotide
  Antisense strand to SEQ ID NO: 1580743
augauggugacauuggcgc

SEQ ID NO: 1580745 - RNA, 19 nt, Artificial Sequence
  Description of Artificial Sequence: Synthetic oligonucleotide
  Sense strand starting at position 897 of SEQ ID NO: 1560162
gggcgauggucuccgcaga

SEQ ID NO: 1580746 - RNA, 19 nt, Artificial Sequence
  Description of Artificial Sequence: Synthetic oligonucleotide
  Antisense strand to SEQ ID NO: 1580745
ucugcggagaccaucgccc

SEQ ID NO: 1580747 - RNA, 19 nt, Artificial Sequence
  Description of Artificial Sequence: Synthetic oligonucleotide
  Sense strand starting at position 898 of SEQ ID NO: 1560162
ggcgauggucuccgcagaa

SEQ ID NO: 1580748 - RNA, 19 nt, Artificial Sequence
  Description of Artificial Sequence: Synthetic oligonucleotide
  Antisense strand to SEQ ID NO: 1580747
uucugcggagaccaucgcc

SEQ ID NO: 1580749 - RNA, 19 nt, Artificial Sequence
  Description of Artificial Sequence: Synthetic oligonucleotide
  Sense strand starting at position 1093 of SEQ ID NO: 1560162
cugccucuucccgauuaca

SEQ ID NO: 1580750 - RNA, 19 nt, Artificial Sequence
  Description of Artificial Sequence: Synthetic oligonucleotide
  Antisense strand to SEQ ID NO: 1580749
uguaaucgggaagaggcag

SEQ ID NO: 1580751 - RNA, 19 nt, Artificial Sequence
  Description of Artificial Sequence: Synthetic oligonucleotide
  Sense strand starting at position 2148 of SEQ ID NO: 1560162
cccguuucccagcagagaa

SEQ ID NO: 1580752 - RNA, 19 nt, Artificial Sequence
  Description of Artificial Sequence: Synthetic oligonucleotide
  Antisense strand to SEQ ID NO: 1580751
uucucugcugggaaacggg

SEQ ID NO: 1580753 - RNA, 19 nt, Artificial Sequence
  Description of Artificial Sequence: Synthetic oligonucleotide
  Sense strand starting at position 2468 of SEQ ID NO: 1560162
ggcacagucuugggaccau

SEQ ID NO: 1580754 - RNA, 19 nt, Artificial Sequence
  Description of Artificial Sequence: Synthetic oligonucleotide
  Antisense strand to SEQ ID NO: 1580753
auggucccaagacugugcc

SEQ ID NO: 1580755 - RNA, 19 nt, Artificial Sequence
  Description of Artificial Sequence: Synthetic oligonucleotide
  Sense strand starting at position 2870 of SEQ ID NO: 1560162
gaucgacugugacaucauu

SEQ ID NO: 1580756 - RNA, 19 nt, Artificial Sequence
  Description of Artificial Sequence: Synthetic oligonucleotide
  Antisense strand to SEQ ID NO: 1580755
aaugaugucacagucgauc

SEQ ID NO: 1580757 - RNA, 19 nt, Artificial Sequence
  Description of Artificial Sequence: Synthetic oligonucleotide
  Sense strand starting at position 3069 of SEQ ID NO: 1560162
gcaggaugcagggaugagu

SEQ ID NO: 1580758 - RNA, 19 nt, Artificial Sequence
  Description of Artificial Sequence: Synthetic oligonucleotide
  Antisense strand to SEQ ID NO: 1580757
acucaucccugcauccugc

SEQ ID NO: 1580759 - RNA, 19 nt, Artificial Sequence
  Description of Artificial Sequence: Synthetic oligonucleotide
  Sense strand starting at position 3078 of SEQ ID NO: 1560162
agggaugaguccugcagca

SEQ ID NO: 1580760 - RNA, 19 nt, Artificial Sequence
  Description of Artificial Sequence: Synthetic oligonucleotide
  Antisense strand to SEQ ID NO: 1580759
ugcugcaggacucaucccu

SEQ ID NO: 1580761 - RNA, 19 nt, Artificial Sequence
  Description of Artificial Sequence: Synthetic oligonucleotide
  Sense strand starting at position 3961 of SEQ ID NO: 1560162
acucuuuauucuugaacgu

SEQ ID NO: 1580762 - RNA, 19 nt, Artificial Sequence
  Description of Artificial Sequence: Synthetic oligonucleotide
  Antisense strand to SEQ ID NO: 1580761
acguucaagaauaaagagu

SEQ ID NO: 1580763 - RNA, 19 nt, Artificial Sequence
  Description of Artificial Sequence: Synthetic oligonucleotide
  Sense strand starting at position 188 of SEQ ID NO: 1560163
gguggacacuguugugaau

SEQ ID NO: 1580764 - RNA, 19 nt, Artificial Sequence
  Description of Artificial Sequence: Synthetic oligonucleotide
  Antisense strand to SEQ ID NO: 1580763
auucacaacaguguccacc

SEQ ID NO: 1580765 - RNA, 19 nt, Artificial Sequence
  Description of Artificial Sequence: Synthetic oligonucleotide
  Sense strand starting at position 190 of SEQ ID NO: 1560163
uggacacuguugugaauuu

SEQ ID NO: 1580766 - RNA, 19 nt, Artificial Sequence
  Description of Artificial Sequence: Synthetic oligonucleotide
  Antisense strand to SEQ ID NO: 1580765
aaauucacaacagugucca

SEQ ID NO: 1580767 - RNA, 19 nt, Artificial Sequence
  Description of Artificial Sequence: Synthetic oligonucleotide
  Sense strand starting at position 199 of SEQ ID NO: 1560163
uugugaauuucucagagga

SEQ ID NO: 1580768 - RNA, 19 nt, Artificial Sequence
  Description of Artificial Sequence: Synthetic oligonucleotide
  Antisense strand to SEQ ID NO: 1580767
uccucugagaaauucacaa

SEQ ID NO: 1580769 - RNA, 19 nt, Artificial Sequence
  Description of Artificial Sequence: Synthetic oligonucleotide
  Sense strand starting at position 979 of SEQ ID NO: 1560163
agaauuagacgauguuacu

SEQ ID NO: 1580770 - RNA, 19 nt, Artificial Sequence
  Description of Artificial Sequence: Synthetic oligonucleotide
  Antisense strand to SEQ ID NO: 1580769
aguaacaucgucuaauucu

SEQ ID NO: 1580771 - RNA, 19 nt, Artificial Sequence
  Description of Artificial Sequence: Synthetic oligonucleotide
  Sense strand starting at position 988 of SEQ ID NO: 1560163
cgauguuacucugccaaag

SEQ ID NO: 1580772 - RNA, 19 nt, Artificial Sequence
  Description of Artificial Sequence: Synthetic oligonucleotide
  Antisense strand to SEQ ID NO: 1580771
cuuuggcagaguaacaucg

SEQ ID NO: 1580773 - RNA, 19 nt, Artificial Sequence
  Description of Artificial Sequence: Synthetic oligonucleotide
  Sense strand starting at position 1104 of SEQ ID NO: 1560163
acgggauguucuuaagaca

SEQ ID NO: 1580774 - RNA, 19 nt, Artificial Sequence
  Description of Artificial Sequence: Synthetic oligonucleotide
  Antisense strand to SEQ ID NO: 1580773
ugucuuaagaacaucccgu

SEQ ID NO: 1580775 - RNA, 19 nt, Artificial Sequence
  Description of Artificial Sequence: Synthetic oligonucleotide
  Sense strand starting at position 1107 of SEQ ID NO: 1560163
ggauguucuuaagacacaa

SEQ ID NO: 1580776 - RNA, 19 nt, Artificial Sequence
  Description of Artificial Sequence: Synthetic oligonucleotide
  Antisense strand to SEQ ID NO: 1580775
uugugucuuaagaacaucc

SEQ ID NO: 1580777 - RNA, 19 nt, Artificial Sequence
  Description of Artificial Sequence: Synthetic oligonucleotide
  Sense strand starting at position 1413 of SEQ ID NO: 1560163
cuuggaaugacguguuuaa

SEQ ID NO: 1580778 - RNA, 19 nt, Artificial Sequence
  Description of Artificial Sequence: Synthetic oligonucleotide
  Antisense strand to SEQ ID NO: 1580777
uuaaacacgucauuccaag

SEQ ID NO: 1580779 - RNA, 19 nt, Artificial Sequence
  Description of Artificial Sequence: Synthetic oligonucleotide
  Sense strand starting at position 1423 of SEQ ID NO: 1560163
cguguuuaagcgguucuca

SEQ ID NO: 1580780 - RNA, 19 nt, Artificial Sequence
  Description of Artificial Sequence: Synthetic oligonucleotide
  Antisense strand to SEQ ID NO: 1580779
ugagaaccgcuuaaacacg

SEQ ID NO: 1580781 - RNA, 19 nt, Artificial Sequence
  Description of Artificial Sequence: Synthetic oligonucleotide
  Sense strand starting at position 2329 of SEQ ID NO: 1560163
guuucuagucugcgccuua

SEQ ID NO: 1580782 - RNA, 19 nt, Artificial Sequence
  Description of Artificial Sequence: Synthetic oligonucleotide
  Antisense strand to SEQ ID NO: 1580781
uaaggcgcagacuagaaac

SEQ ID NO: 1580783 - RNA, 19 nt, Artificial Sequence
  Description of Artificial Sequence: Synthetic oligonucleotide
  Sense strand starting at position 2330 of SEQ ID NO: 1560163
uuucuagucugcgccuuau

SEQ ID NO: 1580784 - RNA, 19 nt, Artificial Sequence
  Description of Artificial Sequence: Synthetic oligonucleotide
  Antisense strand to SEQ ID NO: 1580783
auaaggcgcagacuagaaa

SEQ ID NO: 1580785 - RNA, 19 nt, Artificial Sequence
  Description of Artificial Sequence: Synthetic oligonucleotide
  Sense strand starting at position 2924 of SEQ ID NO: 1560163
gcauguacucugggcaagu

SEQ ID NO: 1580786 - RNA, 19 nt, Artificial Sequence
  Description of Artificial Sequence: Synthetic oligonucleotide
  Antisense strand to SEQ ID NO: 1580785
acuugcccagaguacaugc

SEQ ID NO: 1580787 - RNA, 19 nt, Artificial Sequence
  Description of Artificial Sequence: Synthetic oligonucleotide
  Sense strand starting at position 2942 of SEQ ID NO: 1560163
uggcuucgccuuuggacaa

SEQ ID NO: 1580788 - RNA, 19 nt, Artificial Sequence
  Description of Artificial Sequence: Synthetic oligonucleotide
  Antisense strand to SEQ ID NO: 1580787
uuguccaaaggcgaagcca

SEQ ID NO: 1580789 - RNA, 19 nt, Artificial Sequence
  Description of Artificial Sequence: Synthetic oligonucleotide
  Sense strand starting at position 2943 of SEQ ID NO: 1560163
ggcuucgccuuuggacaau

SEQ ID NO: 1580790 - RNA, 19 nt, Artificial Sequence
  Description of Artificial Sequence: Synthetic oligonucleotide
  Antisense strand to SEQ ID NO: 1580789
auuguccaaaggcgaagcc

SEQ ID NO: 1580791 - RNA, 19 nt, Artificial Sequence
  Description of Artificial Sequence: Synthetic oligonucleotide
  Sense strand starting at position 3060 of SEQ ID NO: 1560163
uaggcaagcugagauuuga

SEQ ID NO: 1580792 - RNA, 19 nt, Artificial Sequence
  Description of Artificial Sequence: Synthetic oligonucleotide
  Antisense strand to SEQ ID NO: 1580791
ucaaaucucagcuugccua

SEQ ID NO: 1580793 - RNA, 19 nt, Artificial Sequence
  Description of Artificial Sequence: Synthetic oligonucleotide
  Sense strand starting at position 3124 of SEQ ID NO: 1560163
gcaggagaccucuguugca

SEQ ID NO: 1580794 - RNA, 19 nt, Artificial Sequence
  Description of Artificial Sequence: Synthetic oligonucleotide
  Antisense strand to SEQ ID NO: 1580793
ugcaacagaggucuccugc

SEQ ID NO: 1580795 - RNA, 19 nt, Artificial Sequence
  Description of Artificial Sequence: Synthetic oligonucleotide
  Sense strand starting at position 3127 of SEQ ID NO: 1560163
ggagaccucuguugcaagu

SEQ ID NO: 1580796 - RNA, 19 nt, Artificial Sequence
  Description of Artificial Sequence: Synthetic oligonucleotide
  Antisense strand to SEQ ID NO: 1580795
acuugcaacagaggucucc

SEQ ID NO: 1580797 - RNA, 19 nt, Artificial Sequence
  Description of Artificial Sequence: Synthetic oligonucleotide
  Sense strand starting at position 3133 of SEQ ID NO: 1560163
cucuguugcaaguguggaa

SEQ ID NO: 1580798 - RNA, 19 nt, Artificial Sequence
  Description of Artificial Sequence: Synthetic oligonucleotide
  Antisense strand to SEQ ID NO: 1580797
uuccacacuugcaacagag

SEQ ID NO: 1580799 - RNA, 19 nt, Artificial Sequence
  Description of Artificial Sequence: Synthetic oligonucleotide
  Sense strand starting at position 3442 of SEQ ID NO: 1560163
caauguuggccagacugau

SEQ ID NO: 1580800 - RNA, 19 nt, Artificial Sequence
  Description of Artificial Sequence: Synthetic oligonucleotide
  Antisense strand to SEQ ID NO: 1580799
aucagucuggccaacauug

SEQ ID NO: 1580801 - RNA, 19 nt, Artificial Sequence
  Description of Artificial Sequence: Synthetic oligonucleotide
  Sense strand starting at position 3715 of SEQ ID NO: 1560163
ggaguagaauuacgugaac

SEQ ID NO: 1580802 - RNA, 19 nt, Artificial Sequence
  Description of Artificial Sequence: Synthetic oligonucleotide
  Antisense strand to SEQ ID NO: 1580801
guucacguaauucuacucc

SEQ ID NO: 1580803 - RNA, 19 nt, Artificial Sequence
  Description of Artificial Sequence: Synthetic oligonucleotide
  Sense strand starting at position 3718 of SEQ ID NO: 1560163
guagaauuacgugaaccca

SEQ ID NO: 1580804 - RNA, 19 nt, Artificial Sequence
  Description of Artificial Sequence: Synthetic oligonucleotide
  Antisense strand to SEQ ID NO: 1580803
uggguucacguaauucuac

SEQ ID NO: 1580805 - RNA, 19 nt, Artificial Sequence
  Description of Artificial Sequence: Synthetic oligonucleotide
  Sense strand starting at position 3817 of SEQ ID NO: 1560163
uuucguuaaagaugggagu

SEQ ID NO: 1580806 - RNA, 19 nt, Artificial Sequence
  Description of Artificial Sequence: Synthetic oligonucleotide
  Antisense strand to SEQ ID NO: 1580805
acucccaucuuuaacgaaa

SEQ ID NO: 1580807 - RNA, 19 nt, Artificial Sequence
  Description of Artificial Sequence: Synthetic oligonucleotide
  Sense strand starting at position 3819 of SEQ ID NO: 1560163
ucguuaaagaugggagucu

SEQ ID NO: 1580808 - RNA, 19 nt, Artificial Sequence
  Description of Artificial Sequence: Synthetic oligonucleotide
  Antisense strand to SEQ ID NO: 1580807
agacucccaucuuuaacga

SEQ ID NO: 1580809 - RNA, 19 nt, Artificial Sequence
  Description of Artificial Sequence: Synthetic oligonucleotide
  Sense strand starting at position 3853 of SEQ ID NO: 1560163
gcuagaauggaaugucaug

SEQ ID NO: 1580810 - RNA, 19 nt, Artificial Sequence
  Description of Artificial Sequence: Synthetic oligonucleotide
  Antisense strand to SEQ ID NO: 1580809
caugacauuccauucuagc

SEQ ID NO: 1580811 - RNA, 19 nt, Artificial Sequence
  Description of Artificial Sequence: Synthetic oligonucleotide
  Sense strand starting at position 94 of SEQ ID NO: 1560164
aggagagauuuaggcuaga

SEQ ID NO: 1580812 - RNA, 19 nt, Artificial Sequence
  Description of Artificial Sequence: Synthetic oligonucleotide
  Antisense strand to SEQ ID NO: 1580811
ucuagccuaaaucucuccu

SEQ ID NO: 1580813 - RNA, 19 nt, Artificial Sequence
  Description of Artificial Sequence: Synthetic oligonucleotide
  Sense strand starting at position 1613 of SEQ ID NO: 1560164
gugccuuccaguuggacau

SEQ ID NO: 1580814 - RNA, 19 nt, Artificial Sequence
  Description of Artificial Sequence: Synthetic oligonucleotide
  Antisense strand to SEQ ID NO: 1580813
auguccaacuggaaggcac

SEQ ID NO: 1580815 - RNA, 19 nt, Artificial Sequence
  Description of Artificial Sequence: Synthetic oligonucleotide
  Sense strand starting at position 1614 of SEQ ID NO: 1560164
ugccuuccaguuggacaua

SEQ ID NO: 1580816 - RNA, 19 nt, Artificial Sequence
  Description of Artificial Sequence: Synthetic oligonucleotide
  Antisense strand to SEQ ID NO: 1580815
uauguccaacuggaaggca

SEQ ID NO: 1580817 - RNA, 19 nt, Artificial Sequence
  Description of Artificial Sequence: Synthetic oligonucleotide
  Sense strand starting at position 1709 of SEQ ID NO: 1560164
ucagacucugucugcaaga

SEQ ID NO: 1580818 - RNA, 19 nt, Artificial Sequence
  Description of Artificial Sequence: Synthetic oligonucleotide
  Antisense strand to SEQ ID NO: 1580817
ucuugcagacagagucuga

SEQ ID NO: 1580819 - RNA, 19 nt, Artificial Sequence
  Description of Artificial Sequence: Synthetic oligonucleotide
  Sense strand starting at position 1710 of SEQ ID NO: 1560164
cagacucugucugcaagaa

SEQ ID NO: 1580820 - RNA, 19 nt, Artificial Sequence
  Description of Artificial Sequence: Synthetic oligonucleotide
  Antisense strand to SEQ ID NO: 1580819
uucuugcagacagagucug

SEQ ID NO: 1580821 - RNA, 19 nt, Artificial Sequence
  Description of Artificial Sequence: Synthetic oligonucleotide
  Sense strand starting at position 1711 of SEQ ID NO: 1560164
agacucugucugcaagaaa

SEQ ID NO: 1580822 - RNA, 19 nt, Artificial Sequence
  Description of Artificial Sequence: Synthetic oligonucleotide
  Antisense strand to SEQ ID NO: 1580821
uuucuugcagacagagucu

SEQ ID NO: 1580823 - RNA, 19 nt, Artificial Sequence
  Description of Artificial Sequence: Synthetic oligonucleotide
  Sense strand starting at position 1737 of SEQ ID NO: 1560164
uccagaaaguuccgauuuc

SEQ ID NO: 1580824 - RNA, 19 nt, Artificial Sequence
  Description of Artificial Sequence: Synthetic oligonucleotide
  Antisense strand to SEQ ID NO: 1580823
gaaaucggaacuuucugga

SEQ ID NO: 1580825 - RNA, 19 nt, Artificial Sequence
  Description of Artificial Sequence: Synthetic oligonucleotide
  Sense strand starting at position 1794 of SEQ ID NO: 1560164
uuccauuagugaggagaga

SEQ ID NO: 1580826 - RNA, 19 nt, Artificial Sequence
  Description of Artificial Sequence: Synthetic oligonucleotide
  Antisense strand to SEQ ID NO: 1580825
ucucuccucacuaauggaa

SEQ ID NO: 1580827 - RNA, 19 nt, Artificial Sequence
  Description of Artificial Sequence: Synthetic oligonucleotide
  Sense strand starting at position 2126 of SEQ ID NO: 1560164
uggguuaccuccugccaga

SEQ ID NO: 1580828 - RNA, 19 nt, Artificial Sequence
  Description of Artificial Sequence: Synthetic oligonucleotide
  Antisense strand to SEQ ID NO: 1580827
ucuggcaggagguaaccca

SEQ ID NO: 1580829 - RNA, 19 nt, Artificial Sequence
  Description of Artificial Sequence: Synthetic oligonucleotide
  Sense strand starting at position 2157 of SEQ ID NO: 1560164
ucgacaagucgcugggaga

SEQ ID NO: 1580830 - RNA, 19 nt, Artificial Sequence
  Description of Artificial Sequence: Synthetic oligonucleotide
  Antisense strand to SEQ ID NO: 1580829
ucucccagcgacuugucga

SEQ ID NO: 1580831 - RNA, 19 nt, Artificial Sequence
  Description of Artificial Sequence: Synthetic oligonucleotide
  Sense strand starting at position 2382 of SEQ ID NO: 1560164
uccucuauauuagagagaa

SEQ ID NO: 1580832 - RNA, 19 nt, Artificial Sequence
  Description of Artificial Sequence: Synthetic oligonucleotide
  Antisense strand to SEQ ID NO: 1580831
uucucucuaauauagagga

SEQ ID NO: 1580833 - RNA, 19 nt, Artificial Sequence
  Description of Artificial Sequence: Synthetic oligonucleotide
  Sense strand starting at position 2413 of SEQ ID NO: 1560164
guaggaaggucacuugaca

SEQ ID NO: 1580834 - RNA, 19 nt, Artificial Sequence
  Description of Artificial Sequence: Synthetic oligonucleotide
  Antisense strand to SEQ ID NO: 1580833
ugucaagugaccuuccuac

SEQ ID NO: 1580835 - RNA, 19 nt, Artificial Sequence
  Description of Artificial Sequence: Synthetic oligonucleotide
  Sense strand starting at position 2461 of SEQ ID NO: 1560164
gcuugacacccugacgaau

SEQ ID NO: 1580836 - RNA, 19 nt, Artificial Sequence
  Description of Artificial Sequence: Synthetic oligonucleotide
  Antisense strand to SEQ ID NO: 1580835
auucgucagggugucaagc

SEQ ID NO: 1580837 - RNA, 19 nt, Artificial Sequence
  Description of Artificial Sequence: Synthetic oligonucleotide
  Sense strand starting at position 2558 of SEQ ID NO: 1560164
gagccugaaucaugaaagu

SEQ ID NO: 1580838 - RNA, 19 nt, Artificial Sequence
  Description of Artificial Sequence: Synthetic oligonucleotide
  Antisense strand to SEQ ID NO: 1580837
acuuucaugauucaggcuc

SEQ ID NO: 1580839 - RNA, 19 nt, Artificial Sequence
  Description of Artificial Sequence: Synthetic oligonucleotide
  Sense strand starting at position 2567 of SEQ ID NO: 1560164
ucaugaaaguuauauggaa

SEQ ID NO: 1580840 - RNA, 19 nt, Artificial Sequence
  Description of Artificial Sequence: Synthetic oligonucleotide
  Antisense strand to SEQ ID NO: 1580839
uuccauauaacuuucauga

SEQ ID NO: 1580841 - RNA, 19 nt, Artificial Sequence
  Description of Artificial Sequence: Synthetic oligonucleotide
  Sense strand starting at position 2580 of SEQ ID NO: 1560164
auggaaaguucagggaugu

SEQ ID NO: 1580842 - RNA, 19 nt, Artificial Sequence
  Description of Artificial Sequence: Synthetic oligonucleotide
  Antisense strand to SEQ ID NO: 1580841
acaucccugaacuuuccau

SEQ ID NO: 1580843 - RNA, 19 nt, Artificial Sequence
  Description of Artificial Sequence: Synthetic oligonucleotide
  Sense strand starting at position 2614 of SEQ ID NO: 1560164
gcuugauccaggugccuga

SEQ ID NO: 1580844 - RNA, 19 nt, Artificial Sequence
  Description of Artificial Sequence: Synthetic oligonucleotide
  Antisense strand to SEQ ID NO: 1580843
ucaggcaccuggaucaagc

SEQ ID NO: 1580845 - RNA, 19 nt, Artificial Sequence
  Description of Artificial Sequence: Synthetic oligonucleotide
  Sense strand starting at position 2618 of SEQ ID NO: 1560164
gauccaggugccugaacaa

SEQ ID NO: 1580846 - RNA, 19 nt, Artificial Sequence
  Description of Artificial Sequence: Synthetic oligonucleotide
  Antisense strand to SEQ ID NO: 1580845
uuguucaggcaccuggauc

SEQ ID NO: 1580847 - RNA, 19 nt, Artificial Sequence
  Description of Artificial Sequence: Synthetic oligonucleotide
  Sense strand starting at position 2842 of SEQ ID NO: 1560164
gagggcagguucugaugaa

SEQ ID NO: 1580848 - RNA, 19 nt, Artificial Sequence
  Description of Artificial Sequence: Synthetic oligonucleotide
  Antisense strand to SEQ ID NO: 1580847
uucaucagaaccugcccuc

SEQ ID NO: 1580849 - RNA, 19 nt, Artificial Sequence
  Description of Artificial Sequence: Synthetic oligonucleotide
  Sense strand starting at position 3260 of SEQ ID NO: 1560164
cgggauucacguugcauua

SEQ ID NO: 1580850 - RNA, 19 nt, Artificial Sequence
  Description of Artificial Sequence: Synthetic oligonucleotide
  Antisense strand to SEQ ID NO: 1580849
uaaugcaacgugaaucccg

SEQ ID NO: 1580851 - RNA, 19 nt, Artificial Sequence
  Description of Artificial Sequence: Synthetic oligonucleotide
  Sense strand starting at position 340 of SEQ ID NO: 1560165
cccaauguagaguaaaguu

SEQ ID NO: 1580852 - RNA, 19 nt, Artificial Sequence
  Description of Artificial Sequence: Synthetic oligonucleotide
  Antisense strand to SEQ ID NO: 1580851
aacuuuacucuacauuggg

SEQ ID NO: 1580853 - RNA, 19 nt, Artificial Sequence
  Description of Artificial Sequence: Synthetic oligonucleotide
  Sense strand starting at position 349 of SEQ ID NO: 1560165
gaguaaaguugcgauguca

SEQ ID NO: 1580854 - RNA, 19 nt, Artificial Sequence
  Description of Artificial Sequence: Synthetic oligonucleotide
  Antisense strand to SEQ ID NO: 1580853
ugacaucgcaacuuuacuc

SEQ ID NO: 1580855 - RNA, 19 nt, Artificial Sequence
  Description of Artificial Sequence: Synthetic oligonucleotide
  Sense strand starting at position 390 of SEQ ID NO: 1560165
cuaccagaguucucauacu

SEQ ID NO: 1580856 - RNA, 19 nt, Artificial Sequence
  Description of Artificial Sequence: Synthetic oligonucleotide
  Antisense strand to SEQ ID NO: 1580855
aguaugagaacucugguag

SEQ ID NO: 1580857 - RNA, 19 nt, Artificial Sequence
  Description of Artificial Sequence: Synthetic oligonucleotide
  Sense strand starting at position 396 of SEQ ID NO: 1560165
gaguucucauacugugacu

SEQ ID NO: 1580858 - RNA, 19 nt, Artificial Sequence
  Description of Artificial Sequence: Synthetic oligonucleotide
  Antisense strand to SEQ ID NO: 1580857
agucacaguaugagaacuc

SEQ ID NO: 1580859 - RNA, 19 nt, Artificial Sequence
  Description of Artificial Sequence: Synthetic oligonucleotide
  Sense strand starting at position 1616 of SEQ ID NO: 1560165
ucguguaccuggcuuuaua

SEQ ID NO: 1580860 - RNA, 19 nt, Artificial Sequence
  Description of Artificial Sequence: Synthetic oligonucleotide
  Antisense strand to SEQ ID NO: 1580859
uauaaagccagguacacga

SEQ ID NO: 1580861 - RNA, 19 nt, Artificial Sequence
  Description of Artificial Sequence: Synthetic oligonucleotide
  Sense strand starting at position 1684 of SEQ ID NO: 1560165
gggugagcucgacacuaac

SEQ ID NO: 1580862 - RNA, 19 nt, Artificial Sequence
  Description of Artificial Sequence: Synthetic oligonucleotide
  Antisense strand to SEQ ID NO: 1580861
guuagugucgagcucaccc

SEQ ID NO: 1580863 - RNA, 19 nt, Artificial Sequence
  Description of Artificial Sequence: Synthetic oligonucleotide
  Sense strand starting at position 2249 of SEQ ID NO: 1560165
ggagguguguccugcccau

SEQ ID NO: 1580864 - RNA, 19 nt, Artificial Sequence
  Description of Artificial Sequence: Synthetic oligonucleotide
  Antisense strand to SEQ ID NO: 1580863
augggcaggacacaccucc

SEQ ID NO: 1580865 - RNA, 19 nt, Artificial Sequence
  Description of Artificial Sequence: Synthetic oligonucleotide
  Sense strand starting at position 2920 of SEQ ID NO: 1560165
gcacccauccugcagagau

SEQ ID NO: 1580866 - RNA, 19 nt, Artificial Sequence
  Description of Artificial Sequence: Synthetic oligonucleotide
  Antisense strand to SEQ ID NO: 1580865
aucucugcaggaugggugc

SEQ ID NO: 1580867 - RNA, 19 nt, Artificial Sequence
  Description of Artificial Sequence: Synthetic oligonucleotide
  Sense strand starting at position 3136 of SEQ ID NO: 1560165
guuugaauccaucgccagu

SEQ ID NO: 1580868 - RNA, 19 nt, Artificial Sequence
  Description of Artificial Sequence: Synthetic oligonucleotide
  Antisense strand to SEQ ID NO: 1580867
acuggcgauggauucaaac

SEQ ID NO: 1580869 - RNA, 19 nt, Artificial Sequence
  Description of Artificial Sequence: Synthetic oligonucleotide
  Sense strand starting at position 3272 of SEQ ID NO: 1560165
gggccaccuuccucagauu

SEQ ID NO: 1580870 - RNA, 19 nt, Artificial Sequence
  Description of Artificial Sequence: Synthetic oligonucleotide
  Antisense strand to SEQ ID NO: 1580869
aaucugaggaagguggccc

SEQ ID NO: 1580871 - RNA, 19 nt, Artificial Sequence
  Description of Artificial Sequence: Synthetic oligonucleotide
  Sense strand starting at position 3284 of SEQ ID NO: 1560165
ucagauuuaucggccucga

SEQ ID NO: 1580872 - RNA, 19 nt, Artificial Sequence
  Description of Artificial Sequence: Synthetic oligonucleotide
  Antisense strand to SEQ ID NO: 1580871
ucgaggccgauaaaucuga

SEQ ID NO: 1580873 - RNA, 19 nt, Artificial Sequence
  Description of Artificial Sequence: Synthetic oligonucleotide
  Sense strand starting at position 3454 of SEQ ID NO: 1560165
augacucgccggugaagua

SEQ ID NO: 1580874 - RNA, 19 nt, Artificial Sequence
  Description of Artificial Sequence: Synthetic oligonucleotide
  Antisense strand to SEQ ID NO: 1580873
uacuucaccggcgagucau

SEQ ID NO: 1580875 - RNA, 19 nt, Artificial Sequence
  Description of Artificial Sequence: Synthetic oligonucleotide
  Sense strand starting at position 3648 of SEQ ID NO: 1560165
uuaggacuccauugacaca

SEQ ID NO: 1580876 - RNA, 19 nt, Artificial Sequence
  Description of Artificial Sequence: Synthetic oligonucleotide
  Antisense strand to SEQ ID NO: 1580875
ugugucaauggaguccuaa

SEQ ID NO: 1580877 - RNA, 19 nt, Artificial Sequence
  Description of Artificial Sequence: Synthetic oligonucleotide
  Sense strand starting at position 1709 of SEQ ID NO: 1560166
ccugcagucuuuccuggaa

SEQ ID NO: 1580878 - RNA, 19 nt, Artificial Sequence
  Description of Artificial Sequence: Synthetic oligonucleotide
  Antisense strand to SEQ ID NO: 1580877
uuccaggaaagacugcagg

SEQ ID NO: 1580879 - RNA, 19 nt, Artificial Sequence
  Description of Artificial Sequence: Synthetic oligonucleotide
  Sense strand starting at position 1711 of SEQ ID NO: 1560166
ugcagucuuuccuggaaca

SEQ ID NO: 1580880 - RNA, 19 nt, Artificial Sequence
  Description of Artificial Sequence: Synthetic oligonucleotide
  Antisense strand to SEQ ID NO: 1580879
uguuccaggaaagacugca

SEQ ID NO: 1580881 - RNA, 19 nt, Artificial Sequence
  Description of Artificial Sequence: Synthetic oligonucleotide
  Sense strand starting at position 1712 of SEQ ID NO: 1560166
gcagucuuuccuggaacau

SEQ ID NO: 1580882 - RNA, 19 nt, Artificial Sequence
  Description of Artificial Sequence: Synthetic oligonucleotide
  Antisense strand to SEQ ID NO: 1580881
auguuccaggaaagacugc

SEQ ID NO: 1580883 - RNA, 19 nt, Artificial Sequence
  Description of Artificial Sequence: Synthetic oligonucleotide
  Sense strand starting at position 1734 of SEQ ID NO: 1560166
caucuuuggugcccggaaa

SEQ ID NO: 1580884 - RNA, 19 nt, Artificial Sequence
  Description of Artificial Sequence: Synthetic oligonucleotide
  Antisense strand to SEQ ID NO: 1580883
uuuccgggcaccaaagaug

SEQ ID NO: 1580885 - RNA, 19 nt, Artificial Sequence
  Description of Artificial Sequence: Synthetic oligonucleotide
  Sense strand starting at position 1735 of SEQ ID NO: 1560166
aucuuuggugcccggaaau

SEQ ID NO: 1580886 - RNA, 19 nt, Artificial Sequence
  Description of Artificial Sequence: Synthetic oligonucleotide
  Antisense strand to SEQ ID NO: 1580885
auuuccgggcaccaaagau

SEQ ID NO: 1580887 - RNA, 19 nt, Artificial Sequence
  Description of Artificial Sequence: Synthetic oligonucleotide
  Sense strand starting at position 2016 of SEQ ID NO: 1560166
ggaugagccucuugugauu

SEQ ID NO: 1580888 - RNA, 19 nt, Artificial Sequence
  Description of Artificial Sequence: Synthetic oligonucleotide
  Antisense strand to SEQ ID NO: 1580887
aaucacaagaggcucaucc

SEQ ID NO: 1580889 - RNA, 19 nt, Artificial Sequence
  Description of Artificial Sequence: Synthetic oligonucleotide
  Sense strand starting at position 2377 of SEQ ID NO: 1560166
gcggucgucaccuguggua

SEQ ID NO: 1580890 - RNA, 19 nt, Artificial Sequence
  Description of Artificial Sequence: Synthetic oligonucleotide
  Antisense strand to SEQ ID NO: 1580889
uaccacaggugacgaccgc

SEQ ID NO: 1580891 - RNA, 19 nt, Artificial Sequence
  Description of Artificial Sequence: Synthetic oligonucleotide
  Sense strand starting at position 2379 of SEQ ID NO: 1560166
ggucgucaccugugguaaa

SEQ ID NO: 1580892 - RNA, 19 nt, Artificial Sequence
  Description of Artificial Sequence: Synthetic oligonucleotide
  Antisense strand to SEQ ID NO: 1580891
uuuaccacaggugacgacc

SEQ ID NO: 1580893 - RNA, 19 nt, Artificial Sequence
  Description of Artificial Sequence: Synthetic oligonucleotide
  Sense strand starting at position 2672 of SEQ ID NO: 1560166
gcgugugcuucgggugauu

SEQ ID NO: 1580894 - RNA, 19 nt, Artificial Sequence
  Description of Artificial Sequence: Synthetic oligonucleotide
  Antisense strand to SEQ ID NO: 1580893
aaucacccgaagcacacgc

SEQ ID NO: 1580895 - RNA, 19 nt, Artificial Sequence
  Description of Artificial Sequence: Synthetic oligonucleotide
  Sense strand starting at position 2674 of SEQ ID NO: 1560166
gugugcuucgggugauuua

SEQ ID NO: 1580896 - RNA, 19 nt, Artificial Sequence
  Description of Artificial Sequence: Synthetic oligonucleotide
  Antisense strand to SEQ ID NO: 1580895
uaaaucacccgaagcacac

SEQ ID NO: 1580897 - RNA, 19 nt, Artificial Sequence
  Description of Artificial Sequence: Synthetic oligonucleotide
  Sense strand starting at position 2675 of SEQ ID NO: 1560166
ugugcuucgggugauuuaa

SEQ ID NO: 1580898 - RNA, 19 nt, Artificial Sequence
  Description of Artificial Sequence: Synthetic oligonucleotide
  Antisense strand to SEQ ID NO: 1580897
uuaaaucacccgaagcaca

SEQ ID NO: 1580899 - RNA, 19 nt, Artificial Sequence
  Description of Artificial Sequence: Synthetic oligonucleotide
  Sense strand starting at position 3337 of SEQ ID NO: 1560166
ccgggagaguuccuauuca

SEQ ID NO: 1580900 - RNA, 19 nt, Artificial Sequence
  Description of Artificial Sequence: Synthetic oligonucleotide
  Antisense strand to SEQ ID NO: 1580899
ugaauaggaacucucccgg

SEQ ID NO: 1580901 - RNA, 19 nt, Artificial Sequence
  Description of Artificial Sequence: Synthetic oligonucleotide
  Sense strand starting at position 3378 of SEQ ID NO: 1560166
gcacccauccuacagagau

SEQ ID NO: 1580902 - RNA, 19 nt, Artificial Sequence
  Description of Artificial Sequence: Synthetic oligonucleotide
  Antisense strand to SEQ ID NO: 1580901
aucucuguaggaugggugc

SEQ ID NO: 1580903 - RNA, 19 nt, Artificial Sequence
  Description of Artificial Sequence: Synthetic oligonucleotide
  Sense strand starting at position 3424 of SEQ ID NO: 1560166
uugcgaugauuugaugagu

SEQ ID NO: 1580904 - RNA, 19 nt, Artificial Sequence
  Description of Artificial Sequence: Synthetic oligonucleotide
  Antisense strand to SEQ ID NO: 1580903
acucaucaaaucaucgcaa

SEQ ID NO: 1580905 - RNA, 19 nt, Artificial Sequence
  Description of Artificial Sequence: Synthetic oligonucleotide
  Sense strand starting at position 3623 of SEQ ID NO: 1560166
cugggcaucaguggucaau

SEQ ID NO: 1580906 - RNA, 19 nt, Artificial Sequence
  Description of Artificial Sequence: Synthetic oligonucleotide
  Antisense strand to SEQ ID NO: 1580905
auugaccacugaugcccag

SEQ ID NO: 1580907 - RNA, 19 nt, Artificial Sequence
  Description of Artificial Sequence: Synthetic oligonucleotide
  Sense strand starting at position 3729 of SEQ ID NO: 1560166
gggccaccuuccuuagauu

SEQ ID NO: 1580908 - RNA, 19 nt, Artificial Sequence
  Description of Artificial Sequence: Synthetic oligonucleotide
  Antisense strand to SEQ ID NO: 1580907
aaucuaaggaagguggccc

SEQ ID NO: 1580909 - RNA, 19 nt, Artificial Sequence
  Description of Artificial Sequence: Synthetic oligonucleotide
  Sense strand starting at position 3741 of SEQ ID NO: 1560166
uuagauuuaucggccucga

SEQ ID NO: 1580910 - RNA, 19 nt, Artificial Sequence
  Description of Artificial Sequence: Synthetic oligonucleotide
  Antisense strand to SEQ ID NO: 1580909
ucgaggccgauaaaucuaa

SEQ ID NO: 1580911 - RNA, 19 nt, Artificial Sequence
  Description of Artificial Sequence: Synthetic oligonucleotide
  Sense strand starting at position 3909 of SEQ ID NO: 1560166
ugaugacucaccggugaag

SEQ ID NO: 1580912 - RNA, 19 nt, Artificial Sequence
  Description of Artificial Sequence: Synthetic oligonucleotide
  Antisense strand to SEQ ID NO: 1580911
cuucaccggugagucauca

SEQ ID NO: 1580913 - RNA, 19 nt, Artificial Sequence
  Description of Artificial Sequence: Synthetic oligonucleotide
  Sense strand starting at position 3911 of SEQ ID NO: 1560166
augacucaccggugaagua

SEQ ID NO: 1580914 - RNA, 19 nt, Artificial Sequence
  Description of Artificial Sequence: Synthetic oligonucleotide
  Antisense strand to SEQ ID NO: 1580913
uacuucaccggugagucau

SEQ ID NO: 1580915 - RNA, 19 nt, Artificial Sequence
  Description of Artificial Sequence: Synthetic oligonucleotide
  Sense strand starting at position 3912 of SEQ ID NO: 1560166
ugacucaccggugaaguau

SEQ ID NO: 1580916 - RNA, 19 nt, Artificial Sequence
  Description of Artificial Sequence: Synthetic oligonucleotide
  Antisense strand to SEQ ID NO: 1580915
auacuucaccggugaguca

SEQ ID NO: 1580917 - RNA, 19 nt, Artificial Sequence
  Description of Artificial Sequence: Synthetic oligonucleotide
  Sense strand starting at position 99 of SEQ ID NO: 1560167
gggagcucggcuuagaaug

SEQ ID NO: 1580918 - RNA, 19 nt, Artificial Sequence
  Description of Artificial Sequence: Synthetic oligonucleotide
  Antisense strand to SEQ ID NO: 1580917
cauucuaagccgagcuccc

SEQ ID NO: 1580919 - RNA, 19 nt, Artificial Sequence
  Description of Artificial Sequence: Synthetic oligonucleotide
  Sense strand starting at position 974 of SEQ ID NO: 1560167
gccgugugagugggagaau

SEQ ID NO: 1580920 - RNA, 19 nt, Artificial Sequence
  Description of Artificial Sequence: Synthetic oligonucleotide
  Antisense strand to SEQ ID NO: 1580919
auucucccacucacacggc

SEQ ID NO: 1580921 - RNA, 19 nt, Artificial Sequence
  Description of Artificial Sequence: Synthetic oligonucleotide
  Sense strand starting at position 1671 of SEQ ID NO: 1560167
cagugauggccuggaagca

SEQ ID NO: 1580922 - RNA, 19 nt, Artificial Sequence
  Description of Artificial Sequence: Synthetic oligonucleotide
  Antisense strand to SEQ ID NO: 1580921
ugcuuccaggccaucacug

SEQ ID NO: 1580923 - RNA, 19 nt, Artificial Sequence
  Description of Artificial Sequence: Synthetic oligonucleotide
  Sense strand starting at position 1710 of SEQ ID NO: 1560167
ccugcagucuuuccuggaa

SEQ ID NO: 1580924 - RNA, 19 nt, Artificial Sequence
  Description of Artificial Sequence: Synthetic oligonucleotide
  Antisense strand to SEQ ID NO: 1580923
uuccaggaaagacugcagg

SEQ ID NO: 1580925 - RNA, 19 nt, Artificial Sequence
  Description of Artificial Sequence: Synthetic oligonucleotide
  Sense strand starting at position 1712 of SEQ ID NO: 1560167
ugcagucuuuccuggaaca

SEQ ID NO: 1580926 - RNA, 19 nt, Artificial Sequence
  Description of Artificial Sequence: Synthetic oligonucleotide
  Antisense strand to SEQ ID NO: 1580925
uguuccaggaaagacugca

SEQ ID NO: 1580927 - RNA, 19 nt, Artificial Sequence
  Description of Artificial Sequence: Synthetic oligonucleotide
  Sense strand starting at position 1713 of SEQ ID NO: 1560167
gcagucuuuccuggaacau

SEQ ID NO: 1580928 - RNA, 19 nt, Artificial Sequence
  Description of Artificial Sequence: Synthetic oligonucleotide
  Antisense strand to SEQ ID NO: 1580927
auguuccaggaaagacugc

SEQ ID NO: 1580929 - RNA, 19 nt, Artificial Sequence
  Description of Artificial Sequence: Synthetic oligonucleotide
  Sense strand starting at position 1735 of SEQ ID NO: 1560167
caucuuuggugccuggaaa

SEQ ID NO: 1580930 - RNA, 19 nt, Artificial Sequence
  Description of Artificial Sequence: Synthetic oligonucleotide
  Antisense strand to SEQ ID NO: 1580929
uuuccaggcaccaaagaug

SEQ ID NO: 1580931 - RNA, 19 nt, Artificial Sequence
  Description of Artificial Sequence: Synthetic oligonucleotide
  Sense strand starting at position 1736 of SEQ ID NO: 1560167
aucuuuggugccuggaaau

SEQ ID NO: 1580932 - RNA, 19 nt, Artificial Sequence
  Description of Artificial Sequence: Synthetic oligonucleotide
  Antisense strand to SEQ ID NO: 1580931
auuuccaggcaccaaagau

SEQ ID NO: 1580933 - RNA, 19 nt, Artificial Sequence
  Description of Artificial Sequence: Synthetic oligonucleotide
  Sense strand starting at position 1746 of SEQ ID NO: 1560167
ccuggaaaugucgaucuac

SEQ ID NO: 1580934 - RNA, 19 nt, Artificial Sequence
  Description of Artificial Sequence: Synthetic oligonucleotide
  Antisense strand to SEQ ID NO: 1580933
guagaucgacauuuccagg

SEQ ID NO: 1580935 - RNA, 19 nt, Artificial Sequence
  Description of Artificial Sequence: Synthetic oligonucleotide
  Sense strand starting at position 2017 of SEQ ID NO: 1560167
gggugagccucuccugauu

SEQ ID NO: 1580936 - RNA, 19 nt, Artificial Sequence
  Description of Artificial Sequence: Synthetic oligonucleotide
  Antisense strand to SEQ ID NO: 1580935
aaucaggagaggcucaccc

SEQ ID NO: 1580937 - RNA, 19 nt, Artificial Sequence
  Description of Artificial Sequence: Synthetic oligonucleotide
  Sense strand starting at position 2037 of SEQ ID NO: 1560167
gcuccaucacccugcguaa

SEQ ID NO: 1580938 - RNA, 19 nt, Artificial Sequence
  Description of Artificial Sequence: Synthetic oligonucleotide
  Antisense strand to SEQ ID NO: 1580937
uuacgcagggugauggagc

SEQ ID NO: 1580939 - RNA, 19 nt, Artificial Sequence
  Description of Artificial Sequence: Synthetic oligonucleotide
  Sense strand starting at position 2089 of SEQ ID NO: 1560167
cgagcuauuguggcuccga

SEQ ID NO: 1580940 - RNA, 19 nt, Artificial Sequence
  Description of Artificial Sequence: Synthetic oligonucleotide
  Antisense strand to SEQ ID NO: 1580939
ucggagccacaauagcucg

SEQ ID NO: 1580941 - RNA, 19 nt, Artificial Sequence
  Description of Artificial Sequence: Synthetic oligonucleotide
  Sense strand starting at position 2174 of SEQ ID NO: 1560167
ggguccacauugguugaga

SEQ ID NO: 1580942 - RNA, 19 nt, Artificial Sequence
  Description of Artificial Sequence: Synthetic oligonucleotide
  Antisense strand to SEQ ID NO: 1580941
ucucaaccaauguggaccc

SEQ ID NO: 1580943 - RNA, 19 nt, Artificial Sequence
  Description of Artificial Sequence: Synthetic oligonucleotide
  Sense strand starting at position 2366 of SEQ ID NO: 1560167
gcggucgucaccuguggua

SEQ ID NO: 1580944 - RNA, 19 nt, Artificial Sequence
  Description of Artificial Sequence: Synthetic oligonucleotide
  Antisense strand to SEQ ID NO: 1580943
uaccacaggugacgaccgc

SEQ ID NO: 1580945 - RNA, 19 nt, Artificial Sequence
  Description of Artificial Sequence: Synthetic oligonucleotide
  Sense strand starting at position 2368 of SEQ ID NO: 1560167
ggucgucaccugugguaaa

SEQ ID NO: 1580946 - RNA, 19 nt, Artificial Sequence
  Description of Artificial Sequence: Synthetic oligonucleotide
  Antisense strand to SEQ ID NO: 1580945
uuuaccacaggugacgacc

SEQ ID NO: 1580947 - RNA, 19 nt, Artificial Sequence
  Description of Artificial Sequence: Synthetic oligonucleotide
  Sense strand starting at position 2491 of SEQ ID NO: 1560167
ggacuuaguuucugcccaa

SEQ ID NO: 1580948 - RNA, 19 nt, Artificial Sequence
  Description of Artificial Sequence: Synthetic oligonucleotide
  Antisense strand to SEQ ID NO: 1580947
uugggcagaaacuaagucc

SEQ ID NO: 1580949 - RNA, 19 nt, Artificial Sequence
  Description of Artificial Sequence: Synthetic oligonucleotide
  Sense strand starting at position 2494 of SEQ ID NO: 1560167
cuuaguuucugcccaauga

SEQ ID NO: 1580950 - RNA, 19 nt, Artificial Sequence
  Description of Artificial Sequence: Synthetic oligonucleotide
  Antisense strand to SEQ ID NO: 1580949
ucauugggcagaaacuaag

SEQ ID NO: 1580951 - RNA, 19 nt, Artificial Sequence
  Description of Artificial Sequence: Synthetic oligonucleotide
  Sense strand starting at position 2495 of SEQ ID NO: 1560167
uuaguuucugcccaaugag

SEQ ID NO: 1580952 - RNA, 19 nt, Artificial Sequence
  Description of Artificial Sequence: Synthetic oligonucleotide
  Antisense strand to SEQ ID NO: 1580951
cucauugggcagaaacuaa

SEQ ID NO: 1580953 - RNA, 19 nt, Artificial Sequence
  Description of Artificial Sequence: Synthetic oligonucleotide
  Sense strand starting at position 2498 of SEQ ID NO: 1560167
guuucugcccaaugagaga

SEQ ID NO: 1580954 - RNA, 19 nt, Artificial Sequence
  Description of Artificial Sequence: Synthetic oligonucleotide
  Antisense strand to SEQ ID NO: 1580953
ucucucauugggcagaaac

SEQ ID NO: 1580955 - RNA, 19 nt, Artificial Sequence
  Description of Artificial Sequence: Synthetic oligonucleotide
  Sense strand starting at position 2801 of SEQ ID NO: 1560167
cuguuucuuucccagugua

SEQ ID NO: 1580956 - RNA, 19 nt, Artificial Sequence
  Description of Artificial Sequence: Synthetic oligonucleotide
  Antisense strand to SEQ ID NO: 1580955
uacacugggaaagaaacag

SEQ ID NO: 1580957 - RNA, 19 nt, Artificial Sequence
  Description of Artificial Sequence: Synthetic oligonucleotide
  Sense strand starting at position 2930 of SEQ ID NO: 1560167
ccgugugaucgguagcucu

SEQ ID NO: 1580958 - RNA, 19 nt, Artificial Sequence
  Description of Artificial Sequence: Synthetic oligonucleotide
  Antisense strand to SEQ ID NO: 1580957
agagcuaccgaucacacgg

SEQ ID NO: 1580959 - RNA, 19 nt, Artificial Sequence
  Description of Artificial Sequence: Synthetic oligonucleotide
  Sense strand starting at position 2932 of SEQ ID NO: 1560167
gugugaucgguagcucuuu

SEQ ID NO: 1580960 - RNA, 19 nt, Artificial Sequence
  Description of Artificial Sequence: Synthetic oligonucleotide
  Antisense strand to SEQ ID NO: 1580959
aaagagcuaccgaucacac

SEQ ID NO: 1580961 - RNA, 19 nt, Artificial Sequence
  Description of Artificial Sequence: Synthetic oligonucleotide
  Sense strand starting at position 2933 of SEQ ID NO: 1560167
ugugaucgguagcucuuua

SEQ ID NO: 1580962 - RNA, 19 nt, Artificial Sequence
  Description of Artificial Sequence: Synthetic oligonucleotide
  Antisense strand to SEQ ID NO: 1580961
uaaagagcuaccgaucaca

SEQ ID NO: 1580963 - RNA, 19 nt, Artificial Sequence
  Description of Artificial Sequence: Synthetic oligonucleotide
  Sense strand starting at position 2938 of SEQ ID NO: 1560167
ucgguagcucuuuaucuca

SEQ ID NO: 1580964 - RNA, 19 nt, Artificial Sequence
  Description of Artificial Sequence: Synthetic oligonucleotide
  Antisense strand to SEQ ID NO: 1580963
ugagauaaagagcuaccga

SEQ ID NO: 1580965 - RNA, 19 nt, Artificial Sequence
  Description of Artificial Sequence: Synthetic oligonucleotide
  Sense strand starting at position 2940 of SEQ ID NO: 1560167
gguagcucuuuaucucaaa

SEQ ID NO: 1580966 - RNA, 19 nt, Artificial Sequence
  Description of Artificial Sequence: Synthetic oligonucleotide
  Antisense strand to SEQ ID NO: 1580965
uuugagauaaagagcuacc

SEQ ID NO: 1580967 - RNA, 19 nt, Artificial Sequence
  Description of Artificial Sequence: Synthetic oligonucleotide
  Sense strand starting at position 3231 of SEQ ID NO: 1560167
cgaggaguuauguauuagg

SEQ ID NO: 1580968 - RNA, 19 nt, Artificial Sequence
  Description of Artificial Sequence: Synthetic oligonucleotide
  Antisense strand to SEQ ID NO: 1580967
ccuaauacauaacuccucg

SEQ ID NO: 1580969 - RNA, 19 nt, Artificial Sequence
  Description of Artificial Sequence: Synthetic oligonucleotide
  Sense strand starting at position 3234 of SEQ ID NO: 1560167
ggaguuauguauuagggcu

SEQ ID NO: 1580970 - RNA, 19 nt, Artificial Sequence
  Description of Artificial Sequence: Synthetic oligonucleotide
  Antisense strand to SEQ ID NO: 1580969
agcccuaauacauaacucc

SEQ ID NO: 1580971 - RNA, 19 nt, Artificial Sequence
  Description of Artificial Sequence: Synthetic oligonucleotide
  Sense strand starting at position 3240 of SEQ ID NO: 1560167
auguauuagggcuacgaaa

SEQ ID NO: 1580972 - RNA, 19 nt, Artificial Sequence
  Description of Artificial Sequence: Synthetic oligonucleotide
  Antisense strand to SEQ ID NO: 1580971
uuucguagcccuaauacau

SEQ ID NO: 1580973 - RNA, 19 nt, Artificial Sequence
  Description of Artificial Sequence: Synthetic oligonucleotide
  Sense strand starting at position 3242 of SEQ ID NO: 1560167
guauuagggcuacgaaaga

SEQ ID NO: 1580974 - RNA, 19 nt, Artificial Sequence
  Description of Artificial Sequence: Synthetic oligonucleotide
  Antisense strand to SEQ ID NO: 1580973
ucuuucguagcccuaauac

SEQ ID NO: 1580975 - RNA, 19 nt, Artificial Sequence
  Description of Artificial Sequence: Synthetic oligonucleotide
  Sense strand starting at position 3271 of SEQ ID NO: 1560167
aguaaauaguggcuauuau

SEQ ID NO: 1580976 - RNA, 19 nt, Artificial Sequence
  Description of Artificial Sequence: Synthetic oligonucleotide
  Antisense strand to SEQ ID NO: 1580975
auaauagccacuauuuacu

SEQ ID NO: 1580977 - RNA, 19 nt, Artificial Sequence
  Description of Artificial Sequence: Synthetic oligonucleotide
  Sense strand starting at position 3272 of SEQ ID NO: 1560167
guaaauaguggcuauuauu

SEQ ID NO: 1580978 - RNA, 19 nt, Artificial Sequence
  Description of Artificial Sequence: Synthetic oligonucleotide
  Antisense strand to SEQ ID NO: 1580977
aauaauagccacuauuuac

SEQ ID NO: 1580979 - RNA, 19 nt, Artificial Sequence
  Description of Artificial Sequence: Synthetic oligonucleotide
  Sense strand starting at position 3367 of SEQ ID NO: 1560167
gcacccauccuacagagau

SEQ ID NO: 1580980 - RNA, 19 nt, Artificial Sequence
  Description of Artificial Sequence: Synthetic oligonucleotide
  Antisense strand to SEQ ID NO: 1580979
aucucuguaggaugggugc

SEQ ID NO: 1580981 - RNA, 19 nt, Artificial Sequence
  Description of Artificial Sequence: Synthetic oligonucleotide
  Sense strand starting at position 3413 of SEQ ID NO: 1560167
uugcgaugauuugaugagu

SEQ ID NO: 1580982 - RNA, 19 nt, Artificial Sequence
  Description of Artificial Sequence: Synthetic oligonucleotide
  Antisense strand to SEQ ID NO: 1580981
acucaucaaaucaucgcaa

SEQ ID NO: 1580983 - RNA, 19 nt, Artificial Sequence
  Description of Artificial Sequence: Synthetic oligonucleotide
  Sense strand starting at position 3583 of SEQ ID NO: 1560167
guuugaauccaucgccagu

SEQ ID NO: 1580984 - RNA, 19 nt, Artificial Sequence
  Description of Artificial Sequence: Synthetic oligonucleotide
  Antisense strand to SEQ ID NO: 1580983
acuggcgauggauucaaac

SEQ ID NO: 1580985 - RNA, 19 nt, Artificial Sequence
  Description of Artificial Sequence: Synthetic oligonucleotide
  Sense strand starting at position 3734 of SEQ ID NO: 1560167
aguuaucggccuugaagca

SEQ ID NO: 1580986 - RNA, 19 nt, Artificial Sequence
  Description of Artificial Sequence: Synthetic oligonucleotide
  Antisense strand to SEQ ID NO: 1580985
ugcuucaaggccgauaacu

SEQ ID NO: 1580987 - RNA, 19 nt, Artificial Sequence
  Description of Artificial Sequence: Synthetic oligonucleotide
  Sense strand starting at position 3761 of SEQ ID NO: 1560167
agaaguguugguggaggga

SEQ ID NO: 1580988 - RNA, 19 nt, Artificial Sequence
  Description of Artificial Sequence: Synthetic oligonucleotide
  Antisense strand to SEQ ID NO: 1580987
ucccuccaccaacacuucu

SEQ ID NO: 1580989 - RNA, 19 nt, Artificial Sequence
  Description of Artificial Sequence: Synthetic oligonucleotide
  Sense strand starting at position 3898 of SEQ ID NO: 1560167
ugaugacucgccggugaag

SEQ ID NO: 1580990 - RNA, 19 nt, Artificial Sequence
  Description of Artificial Sequence: Synthetic oligonucleotide
  Antisense strand to SEQ ID NO: 1580989
cuucaccggcgagucauca

SEQ ID NO: 1580991 - RNA, 19 nt, Artificial Sequence
  Description of Artificial Sequence: Synthetic oligonucleotide
  Sense strand starting at position 3900 of SEQ ID NO: 1560167
augacucgccggugaagua

SEQ ID NO: 1580992 - RNA, 19 nt, Artificial Sequence
  Description of Artificial Sequence: Synthetic oligonucleotide
  Antisense strand to SEQ ID NO: 1580991
uacuucaccggcgagucau

SEQ ID NO: 1580993 - RNA, 19 nt, Artificial Sequence
  Description of Artificial Sequence: Synthetic oligonucleotide
  Sense strand starting at position 249 of SEQ ID NO: 1560168
ccaaguaccugggaguaua

SEQ ID NO: 1580994 - RNA, 19 nt, Artificial Sequence
  Description of Artificial Sequence: Synthetic oligonucleotide
  Antisense strand to SEQ ID NO: 1580993
uauacucccagguacuugg

SEQ ID NO: 1580995 - RNA, 19 nt, Artificial Sequence
  Description of Artificial Sequence: Synthetic oligonucleotide
  Sense strand starting at position 1568 of SEQ ID NO: 1560168
gccagugauugccuggaag

SEQ ID NO: 1580996 - RNA, 19 nt, Artificial Sequence
  Description of Artificial Sequence: Synthetic oligonucleotide
  Antisense strand to SEQ ID NO: 1580995
cuuccaggcaaucacuggc

SEQ ID NO: 1580997 - RNA, 19 nt, Artificial Sequence
  Description of Artificial Sequence: Synthetic oligonucleotide
  Sense strand starting at position 1570 of SEQ ID NO: 1560168
cagugauugccuggaagga

SEQ ID NO: 1580998 - RNA, 19 nt, Artificial Sequence
  Description of Artificial Sequence: Synthetic oligonucleotide
  Antisense strand to SEQ ID NO: 1580997
uccuuccaggcaaucacug

SEQ ID NO: 1580999 - RNA, 19 nt, Artificial Sequence
  Description of Artificial Sequence: Synthetic oligonucleotide
  Sense strand starting at position 1609 of SEQ ID NO: 1560168
ccugcagucuuaccuggaa

SEQ ID NO: 1581000 - RNA, 19 nt, Artificial Sequence
  Description of Artificial Sequence: Synthetic oligonucleotide
  Antisense strand to SEQ ID NO: 1580999
uuccagguaagacugcagg

SEQ ID NO: 1581001 - RNA, 19 nt, Artificial Sequence
  Description of Artificial Sequence: Synthetic oligonucleotide
  Sense strand starting at position 1612 of SEQ ID NO: 1560168
gcagucuuaccuggaacau

SEQ ID NO: 1581002 - RNA, 19 nt, Artificial Sequence
  Description of Artificial Sequence: Synthetic oligonucleotide
  Antisense strand to SEQ ID NO: 1581001
auguuccagguaagacugc

SEQ ID NO: 1581003 - RNA, 19 nt, Artificial Sequence
  Description of Artificial Sequence: Synthetic oligonucleotide
  Sense strand starting at position 1987 of SEQ ID NO: 1560168
gagcaaagugcuggauuga

SEQ ID NO: 1581004 - RNA, 19 nt, Artificial Sequence
  Description of Artificial Sequence: Synthetic oligonucleotide
  Antisense strand to SEQ ID NO: 1581003
ucaauccagcacuuugcuc

SEQ ID NO: 1581005 - RNA, 19 nt, Artificial Sequence
  Description of Artificial Sequence: Synthetic oligonucleotide
  Sense strand starting at position 1988 of SEQ ID NO: 1560168
agcaaagugcuggauugaa

SEQ ID NO: 1581006 - RNA, 19 nt, Artificial Sequence
  Description of Artificial Sequence: Synthetic oligonucleotide
  Antisense strand to SEQ ID NO: 1581005
uucaauccagcacuuugcu

SEQ ID NO: 1581007 - RNA, 19 nt, Artificial Sequence
  Description of Artificial Sequence: Synthetic oligonucleotide
  Sense strand starting at position 2027 of SEQ ID NO: 1560168
gaggcuuuccugcaccaca

SEQ ID NO: 1581008 - RNA, 19 nt, Artificial Sequence
  Description of Artificial Sequence: Synthetic oligonucleotide
  Antisense strand to SEQ ID NO: 1581007
uguggugcaggaaagccuc

SEQ ID NO: 1581009 - RNA, 19 nt, Artificial Sequence
  Description of Artificial Sequence: Synthetic oligonucleotide
  Sense strand starting at position 2075 of SEQ ID NO: 1560168
ggacuuagcuucugcccaa

SEQ ID NO: 1581010 - RNA, 19 nt, Artificial Sequence
  Description of Artificial Sequence: Synthetic oligonucleotide
  Antisense strand to SEQ ID NO: 1581009
uugggcagaagcuaagucc

SEQ ID NO: 1581011 - RNA, 19 nt, Artificial Sequence
  Description of Artificial Sequence: Synthetic oligonucleotide
  Sense strand starting at position 2078 of SEQ ID NO: 1560168
cuuagcuucugcccaauga

SEQ ID NO: 1581012 - RNA, 19 nt, Artificial Sequence
  Description of Artificial Sequence: Synthetic oligonucleotide
  Antisense strand to SEQ ID NO: 1581011
ucauugggcagaagcuaag

SEQ ID NO: 1581013 - RNA, 19 nt, Artificial Sequence
  Description of Artificial Sequence: Synthetic oligonucleotide
  Sense strand starting at position 2082 of SEQ ID NO: 1560168
gcuucugcccaaugagaga

SEQ ID NO: 1581014 - RNA, 19 nt, Artificial Sequence
  Description of Artificial Sequence: Synthetic oligonucleotide
  Antisense strand to SEQ ID NO: 1581013
ucucucauugggcagaagc

SEQ ID NO: 1581015 - RNA, 19 nt, Artificial Sequence
  Description of Artificial Sequence: Synthetic oligonucleotide
  Sense strand starting at position 2382 of SEQ ID NO: 1560168
aggucuguuucuuucccaa

SEQ ID NO: 1581016 - RNA, 19 nt, Artificial Sequence
  Description of Artificial Sequence: Synthetic oligonucleotide
  Antisense strand to SEQ ID NO: 1581015
uugggaaagaaacagaccu

SEQ ID NO: 1581017 - RNA, 19 nt, Artificial Sequence
  Description of Artificial Sequence: Synthetic oligonucleotide
  Sense strand starting at position 2384 of SEQ ID NO: 1560168
gucuguuucuuucccaaug

SEQ ID NO: 1581018 - RNA, 19 nt, Artificial Sequence
  Description of Artificial Sequence: Synthetic oligonucleotide
  Antisense strand to SEQ ID NO: 1581017
cauugggaaagaaacagac

SEQ ID NO: 1581019 - RNA, 19 nt, Artificial Sequence
  Description of Artificial Sequence: Synthetic oligonucleotide
  Sense strand starting at position 2386 of SEQ ID NO: 1560168
cuguuucuuucccaaugua

SEQ ID NO: 1581020 - RNA, 19 nt, Artificial Sequence
  Description of Artificial Sequence: Synthetic oligonucleotide
  Antisense strand to SEQ ID NO: 1581019
uacauugggaaagaaacag

SEQ ID NO: 1581021 - RNA, 19 nt, Artificial Sequence
  Description of Artificial Sequence: Synthetic oligonucleotide
  Sense strand starting at position 2476 of SEQ ID NO: 1560168
gcaucuugaucgcuucuca

SEQ ID NO: 1581022 - RNA, 19 nt, Artificial Sequence
  Description of Artificial Sequence: Synthetic oligonucleotide
  Antisense strand to SEQ ID NO: 1581021
ugagaagcgaucaagaugc

SEQ ID NO: 1581023 - RNA, 19 nt, Artificial Sequence
  Description of Artificial Sequence: Synthetic oligonucleotide
  Sense strand starting at position 2480 of SEQ ID NO: 1560168
cuugaucgcuucucauuga

SEQ ID NO: 1581024 - RNA, 19 nt, Artificial Sequence
  Description of Artificial Sequence: Synthetic oligonucleotide
  Antisense strand to SEQ ID NO: 1581023
ucaaugagaagcgaucaag

SEQ ID NO: 1581025 - RNA, 19 nt, Artificial Sequence
  Description of Artificial Sequence: Synthetic oligonucleotide
  Sense strand starting at position 2481 of SEQ ID NO: 1560168
uugaucgcuucucauugaa

SEQ ID NO: 1581026 - RNA, 19 nt, Artificial Sequence
  Description of Artificial Sequence: Synthetic oligonucleotide
  Antisense strand to SEQ ID NO: 1581025
uucaaugagaagcgaucaa

SEQ ID NO: 1581027 - RNA, 19 nt, Artificial Sequence
  Description of Artificial Sequence: Synthetic oligonucleotide
  Sense strand starting at position 2515 of SEQ ID NO: 1560168
cccugugaucgguagcuca

SEQ ID NO: 1581028 - RNA, 19 nt, Artificial Sequence
  Description of Artificial Sequence: Synthetic oligonucleotide
  Antisense strand to SEQ ID NO: 1581027
ugagcuaccgaucacaggg

SEQ ID NO: 1581029 - RNA, 19 nt, Artificial Sequence
  Description of Artificial Sequence: Synthetic oligonucleotide
  Sense strand starting at position 2518 of SEQ ID NO: 1560168
ugugaucgguagcucauua

SEQ ID NO: 1581030 - RNA, 19 nt, Artificial Sequence
  Description of Artificial Sequence: Synthetic oligonucleotide
  Antisense strand to SEQ ID NO: 1581029
uaaugagcuaccgaucaca

SEQ ID NO: 1581031 - RNA, 19 nt, Artificial Sequence
  Description of Artificial Sequence: Synthetic oligonucleotide
  Sense strand starting at position 2525 of SEQ ID NO: 1560168
gguagcucauuaucucaaa

SEQ ID NO: 1581032 - RNA, 19 nt, Artificial Sequence
  Description of Artificial Sequence: Synthetic oligonucleotide
  Antisense strand to SEQ ID NO: 1581031
uuugagauaaugagcuacc

SEQ ID NO: 1581033 - RNA, 19 nt, Artificial Sequence
  Description of Artificial Sequence: Synthetic oligonucleotide
  Sense strand starting at position 2816 of SEQ ID NO: 1560168
cgaggaguuauguauuaug

SEQ ID NO: 1581034 - RNA, 19 nt, Artificial Sequence
  Description of Artificial Sequence: Synthetic oligonucleotide
  Antisense strand to SEQ ID NO: 1581033
cauaauacauaacuccucg

SEQ ID NO: 1581035 - RNA, 19 nt, Artificial Sequence
  Description of Artificial Sequence: Synthetic oligonucleotide
  Sense strand starting at position 2819 of SEQ ID NO: 1560168
ggaguuauguauuauggcu

SEQ ID NO: 1581036 - RNA, 19 nt, Artificial Sequence
  Description of Artificial Sequence: Synthetic oligonucleotide
  Antisense strand to SEQ ID NO: 1581035
agccauaauacauaacucc

SEQ ID NO: 1581037 - RNA, 19 nt, Artificial Sequence
  Description of Artificial Sequence: Synthetic oligonucleotide
  Sense strand starting at position 2821 of SEQ ID NO: 1560168
aguuauguauuauggcuaa

SEQ ID NO: 1581038 - RNA, 19 nt, Artificial Sequence
  Description of Artificial Sequence: Synthetic oligonucleotide
  Antisense strand to SEQ ID NO: 1581037
uuagccauaauacauaacu

SEQ ID NO: 1581039 - RNA, 19 nt, Artificial Sequence
  Description of Artificial Sequence: Synthetic oligonucleotide
  Sense strand starting at position 2824 of SEQ ID NO: 1560168
uauguauuauggcuaagaa

SEQ ID NO: 1581040 - RNA, 19 nt, Artificial Sequence
  Description of Artificial Sequence: Synthetic oligonucleotide
  Antisense strand to SEQ ID NO: 1581039
uucuuagccauaauacaua

SEQ ID NO: 1581041 - RNA, 19 nt, Artificial Sequence
  Description of Artificial Sequence: Synthetic oligonucleotide
  Sense strand starting at position 2856 of SEQ ID NO: 1560168
aguaaauagugccuauuau

SEQ ID NO: 1581042 - RNA, 19 nt, Artificial Sequence
  Description of Artificial Sequence: Synthetic oligonucleotide
  Antisense strand to SEQ ID NO: 1581041
auaauaggcacuauuuacu

SEQ ID NO: 1581043 - RNA, 19 nt, Artificial Sequence
  Description of Artificial Sequence: Synthetic oligonucleotide
  Sense strand starting at position 2857 of SEQ ID NO: 1560168
guaaauagugccuauuauu

SEQ ID NO: 1581044 - RNA, 19 nt, Artificial Sequence
  Description of Artificial Sequence: Synthetic oligonucleotide
  Antisense strand to SEQ ID NO: 1581043
aauaauaggcacuauuuac

SEQ ID NO: 1581045 - RNA, 19 nt, Artificial Sequence
  Description of Artificial Sequence: Synthetic oligonucleotide
  Sense strand starting at position 3311 of SEQ ID NO: 1560168
cagaguuauuggccucgaa

SEQ ID NO: 1581046 - RNA, 19 nt, Artificial Sequence
  Description of Artificial Sequence: Synthetic oligonucleotide
  Antisense strand to SEQ ID NO: 1581045
uucgaggccaauaacucug

SEQ ID NO: 1581047 - RNA, 19 nt, Artificial Sequence
  Description of Artificial Sequence: Synthetic oligonucleotide
  Sense strand starting at position 3314 of SEQ ID NO: 1560168
aguuauuggccucgaagca

SEQ ID NO: 1581048 - RNA, 19 nt, Artificial Sequence
  Description of Artificial Sequence: Synthetic oligonucleotide
  Antisense strand to SEQ ID NO: 1581047
ugcuucgaggccaauaacu

SEQ ID NO: 1581049 - RNA, 19 nt, Artificial Sequence
  Description of Artificial Sequence: Synthetic oligonucleotide
  Sense strand starting at position 3477 of SEQ ID NO: 1560168
ccugaugacucgccaguga

SEQ ID NO: 1581050 - RNA, 19 nt, Artificial Sequence
  Description of Artificial Sequence: Synthetic oligonucleotide
  Antisense strand to SEQ ID NO: 1581049
ucacuggcgagucaucagg

SEQ ID NO: 1581051 - RNA, 19 nt, Artificial Sequence
  Description of Artificial Sequence: Synthetic oligonucleotide
  Sense strand starting at position 3481 of SEQ ID NO: 1560168
augacucgccagugaagua

SEQ ID NO: 1581052 - RNA, 19 nt, Artificial Sequence
  Description of Artificial Sequence: Synthetic oligonucleotide
  Antisense strand to SEQ ID NO: 1581051
uacuucacuggcgagucau

SEQ ID NO: 1581053 - RNA, 19 nt, Artificial Sequence
  Description of Artificial Sequence: Synthetic oligonucleotide
  Sense strand starting at position 3482 of SEQ ID NO: 1560168
ugacucgccagugaaguau

SEQ ID NO: 1581054 - RNA, 19 nt, Artificial Sequence
  Description of Artificial Sequence: Synthetic oligonucleotide
  Antisense strand to SEQ ID NO: 1581053
auacuucacuggcgaguca

SEQ ID NO: 1581055 - RNA, 19 nt, Artificial Sequence
  Description of Artificial Sequence: Synthetic oligonucleotide
  Sense strand starting at position 267 of SEQ ID NO: 1560169
ccaccaagccgggauaagu

SEQ ID NO: 1581056 - RNA, 19 nt, Artificial Sequence
  Description of Artificial Sequence: Synthetic oligonucleotide
  Antisense strand to SEQ ID NO: 1581055
acuuaucccggcuuggugg

SEQ ID NO: 1581057 - RNA, 19 nt, Artificial Sequence
  Description of Artificial Sequence: Synthetic oligonucleotide
  Sense strand starting at position 430 of SEQ ID NO: 1560169
cuaccagaguucugauacu

SEQ ID NO: 1581058 - RNA, 19 nt, Artificial Sequence
  Description of Artificial Sequence: Synthetic oligonucleotide
  Antisense strand to SEQ ID NO: 1581057
aguaucagaacucugguag

SEQ ID NO: 1581059 - RNA, 19 nt, Artificial Sequence
  Description of Artificial Sequence: Synthetic oligonucleotide
  Sense strand starting at position 441 of SEQ ID NO: 1560169
cugauacugugacuuugua

SEQ ID NO: 1581060 - RNA, 19 nt, Artificial Sequence
  Description of Artificial Sequence: Synthetic oligonucleotide
  Antisense strand to SEQ ID NO: 1581059
uacaaagucacaguaucag

SEQ ID NO: 1581061 - RNA, 19 nt, Artificial Sequence
  Description of Artificial Sequence: Synthetic oligonucleotide
  Sense strand starting at position 1655 of SEQ ID NO: 1560169
ugguguaccuggcuuuaua

SEQ ID NO: 1581062 - RNA, 19 nt, Artificial Sequence
  Description of Artificial Sequence: Synthetic oligonucleotide
  Antisense strand to SEQ ID NO: 1581061
uauaaagccagguacacca

SEQ ID NO: 1581063 - RNA, 19 nt, Artificial Sequence
  Description of Artificial Sequence: Synthetic oligonucleotide
  Sense strand starting at position 1665 of SEQ ID NO: 1560169
ggcuuuauaccucggguuu

SEQ ID NO: 1581064 - RNA, 19 nt, Artificial Sequence
  Description of Artificial Sequence: Synthetic oligonucleotide
  Antisense strand to SEQ ID NO: 1581063
aaacccgagguauaaagcc

SEQ ID NO: 1581065 - RNA, 19 nt, Artificial Sequence
  Description of Artificial Sequence: Synthetic oligonucleotide
  Sense strand starting at position 1666 of SEQ ID NO: 1560169
gcuuuauaccucggguuug

SEQ ID NO: 1581066 - RNA, 19 nt, Artificial Sequence
  Description of Artificial Sequence: Synthetic oligonucleotide
  Antisense strand to SEQ ID NO: 1581065
caaacccgagguauaaagc

SEQ ID NO: 1581067 - RNA, 19 nt, Artificial Sequence
  Description of Artificial Sequence: Synthetic oligonucleotide
  Sense strand starting at position 1667 of SEQ ID NO: 1560169
cuuuauaccucggguuugu

SEQ ID NO: 1581068 - RNA, 19 nt, Artificial Sequence
  Description of Artificial Sequence: Synthetic oligonucleotide
  Antisense strand to SEQ ID NO: 1581067
acaaacccgagguauaaag

SEQ ID NO: 1581069 - RNA, 19 nt, Artificial Sequence
  Description of Artificial Sequence: Synthetic oligonucleotide
  Sense strand starting at position 1820 of SEQ ID NO: 1560169
guggucuagcgccaaggau

SEQ ID NO: 1581070 - RNA, 19 nt, Artificial Sequence
  Description of Artificial Sequence: Synthetic oligonucleotide
  Antisense strand to SEQ ID NO: 1581069
auccuuggcgcuagaccac

SEQ ID NO: 1581071 - RNA, 19 nt, Artificial Sequence
  Description of Artificial Sequence: Synthetic oligonucleotide
  Sense strand starting at position 1855 of SEQ ID NO: 1560169
ugaagugaccucugagacu

SEQ ID NO: 1581072 - RNA, 19 nt, Artificial Sequence
  Description of Artificial Sequence: Synthetic oligonucleotide
  Antisense strand to SEQ ID NO: 1581071
agucucagaggucacuuca

SEQ ID NO: 1581073 - RNA, 19 nt, Artificial Sequence
  Description of Artificial Sequence: Synthetic oligonucleotide
  Sense strand starting at position 2322 of SEQ ID NO: 1560169
ggaggacauugucuggacu

SEQ ID NO: 1581074 - RNA, 19 nt, Artificial Sequence
  Description of Artificial Sequence: Synthetic oligonucleotide
  Antisense strand to SEQ ID NO: 1581073
aguccagacaauguccucc

SEQ ID NO: 1581075 - RNA, 19 nt, Artificial Sequence
  Description of Artificial Sequence: Synthetic oligonucleotide
  Sense strand starting at position 2323 of SEQ ID NO: 1560169
gaggacauugucuggacuu

SEQ ID NO: 1581076 - RNA, 19 nt, Artificial Sequence
  Description of Artificial Sequence: Synthetic oligonucleotide
  Antisense strand to SEQ ID NO: 1581075
aaguccagacaauguccuc

SEQ ID NO: 1581077 - RNA, 19 nt, Artificial Sequence
  Description of Artificial Sequence: Synthetic oligonucleotide
  Sense strand starting at position 2324 of SEQ ID NO: 1560169
aggacauugucuggacuua

SEQ ID NO: 1581078 - RNA, 19 nt, Artificial Sequence
  Description of Artificial Sequence: Synthetic oligonucleotide
  Antisense strand to SEQ ID NO: 1581077
uaaguccagacaauguccu

SEQ ID NO: 1581079 - RNA, 19 nt, Artificial Sequence
  Description of Artificial Sequence: Synthetic oligonucleotide
  Sense strand starting at position 2560 of SEQ ID NO: 1560169
cgggaguucucggugcugu

SEQ ID NO: 1581080 - RNA, 19 nt, Artificial Sequence
  Description of Artificial Sequence: Synthetic oligonucleotide
  Antisense strand to SEQ ID NO: 1581079
acagcaccgagaacucccg

SEQ ID NO: 1581081 - RNA, 19 nt, Artificial Sequence
  Description of Artificial Sequence: Synthetic oligonucleotide
  Sense strand starting at position 2561 of SEQ ID NO: 1560169
gggaguucucggugcugua

SEQ ID NO: 1581082 - RNA, 19 nt, Artificial Sequence
  Description of Artificial Sequence: Synthetic oligonucleotide
  Antisense strand to SEQ ID NO: 1581081
uacagcaccgagaacuccc

SEQ ID NO: 1581083 - RNA, 19 nt, Artificial Sequence
  Description of Artificial Sequence: Synthetic oligonucleotide
  Sense strand starting at position 2691 of SEQ ID NO: 1560169
guagguuuccugagccgga

SEQ ID NO: 1581084 - RNA, 19 nt, Artificial Sequence
  Description of Artificial Sequence: Synthetic oligonucleotide
  Antisense strand to SEQ ID NO: 1581083
uccggcucaggaaaccuac

SEQ ID NO: 1581085 - RNA, 19 nt, Artificial Sequence
  Description of Artificial Sequence: Synthetic oligonucleotide
  Sense strand starting at position 2696 of SEQ ID NO: 1560169
uuuccugagccggagacau

SEQ ID NO: 1581086 - RNA, 19 nt, Artificial Sequence
  Description of Artificial Sequence: Synthetic oligonucleotide
  Antisense strand to SEQ ID NO: 1581085
augucuccggcucaggaaa

SEQ ID NO: 1581087 - RNA, 19 nt, Artificial Sequence
  Description of Artificial Sequence: Synthetic oligonucleotide
  Sense strand starting at position 2773 of SEQ ID NO: 1560169
ggucgugacuccagaguug

SEQ ID NO: 1581088 - RNA, 19 nt, Artificial Sequence
  Description of Artificial Sequence: Synthetic oligonucleotide
  Antisense strand to SEQ ID NO: 1581087
caacucuggagucacgacc

SEQ ID NO: 1581089 - RNA, 19 nt, Artificial Sequence
  Description of Artificial Sequence: Synthetic oligonucleotide
  Sense strand starting at position 3203 of SEQ ID NO: 1560169
uaaggacuccugggugcua

SEQ ID NO: 1581090 - RNA, 19 nt, Artificial Sequence
  Description of Artificial Sequence: Synthetic oligonucleotide
  Antisense strand to SEQ ID NO: 1581089
uagcacccaggaguccuua

SEQ ID NO: 1581091 - RNA, 19 nt, Artificial Sequence
  Description of Artificial Sequence: Synthetic oligonucleotide
  Sense strand starting at position 3205 of SEQ ID NO: 1560169
aggacuccugggugcuaaa

SEQ ID NO: 1581092 - RNA, 19 nt, Artificial Sequence
  Description of Artificial Sequence: Synthetic oligonucleotide
  Antisense strand to SEQ ID NO: 1581091
uuuagcacccaggaguccu

SEQ ID NO: 1581093 - RNA, 19 nt, Artificial Sequence
  Description of Artificial Sequence: Synthetic oligonucleotide
  Sense strand starting at position 3248 of SEQ ID NO: 1560169
ugugguuguugcugcuaua

SEQ ID NO: 1581094 - RNA, 19 nt, Artificial Sequence
  Description of Artificial Sequence: Synthetic oligonucleotide
  Antisense strand to SEQ ID NO: 1581093
uauagcagcaacaaccaca

SEQ ID NO: 1581095 - RNA, 19 nt, Artificial Sequence
  Description of Artificial Sequence: Synthetic oligonucleotide
  Sense strand starting at position 3251 of SEQ ID NO: 1560169
gguuguugcugcuauagga

SEQ ID NO: 1581096 - RNA, 19 nt, Artificial Sequence
  Description of Artificial Sequence: Synthetic oligonucleotide
  Antisense strand to SEQ ID NO: 1581095
uccuauagcagcaacaacc

SEQ ID NO: 1581097 - RNA, 19 nt, Artificial Sequence
  Description of Artificial Sequence: Synthetic oligonucleotide
  Sense strand starting at position 3260 of SEQ ID NO: 1560169
ugcuauaggagucgagacu

SEQ ID NO: 1581098 - RNA, 19 nt, Artificial Sequence
  Description of Artificial Sequence: Synthetic oligonucleotide
  Antisense strand to SEQ ID NO: 1581097
agucucgacuccuauagca

SEQ ID NO: 1581099 - RNA, 19 nt, Artificial Sequence
  Description of Artificial Sequence: Synthetic oligonucleotide
  Sense strand starting at position 3498 of SEQ ID NO: 1560169
gcgauuagagccugagcaa

SEQ ID NO: 1581100 - RNA, 19 nt, Artificial Sequence
  Description of Artificial Sequence: Synthetic oligonucleotide
  Antisense strand to SEQ ID NO: 1581099
uugcucaggcucuaaucgc

SEQ ID NO: 1581101 - RNA, 19 nt, Artificial Sequence
  Description of Artificial Sequence: Synthetic oligonucleotide
  Sense strand starting at position 3842 of SEQ ID NO: 1560169
gcugcaucuugggcaacaa

SEQ ID NO: 1581102 - RNA, 19 nt, Artificial Sequence
  Description of Artificial Sequence: Synthetic oligonucleotide
  Antisense strand to SEQ ID NO: 1581101
uuguugcccaagaugcagc

SEQ ID NO: 1581103 - RNA, 19 nt, Artificial Sequence
  Description of Artificial Sequence: Synthetic oligonucleotide
  Sense strand starting at position 3888 of SEQ ID NO: 1560169
ccuaccacgucucagaaua

SEQ ID NO: 1581104 - RNA, 19 nt, Artificial Sequence
  Description of Artificial Sequence: Synthetic oligonucleotide
  Antisense strand to SEQ ID NO: 1581103
uauucugagacgugguagg

SEQ ID NO: 1581105 - RNA, 19 nt, Artificial Sequence
  Description of Artificial Sequence: Synthetic oligonucleotide
  Sense strand starting at position 1648 of SEQ ID NO: 1560170
ucguguaccuggcuuuaaa

SEQ ID NO: 1581106 - RNA, 19 nt, Artificial Sequence
  Description of Artificial Sequence: Synthetic oligonucleotide
  Antisense strand to SEQ ID NO: 1581105
uuuaaagccagguacacga

SEQ ID NO: 1581107 - RNA, 19 nt, Artificial Sequence
  Description of Artificial Sequence: Synthetic oligonucleotide
  Sense strand starting at position 1714 of SEQ ID NO: 1560170
uggagugagcucgacacua

SEQ ID NO: 1581108 - RNA, 19 nt, Artificial Sequence
  Description of Artificial Sequence: Synthetic oligonucleotide
  Antisense strand to SEQ ID NO: 1581107
uagugucgagcucacucca

SEQ ID NO: 1581109 - RNA, 19 nt, Artificial Sequence
  Description of Artificial Sequence: Synthetic oligonucleotide
  Sense strand starting at position 1716 of SEQ ID NO: 1560170
gagugagcucgacacuaac

SEQ ID NO: 1581110 - RNA, 19 nt, Artificial Sequence
  Description of Artificial Sequence: Synthetic oligonucleotide
  Antisense strand to SEQ ID NO: 1581109
guuagugucgagcucacuc

SEQ ID NO: 1581111 - RNA, 19 nt, Artificial Sequence
  Description of Artificial Sequence: Synthetic oligonucleotide
  Sense strand starting at position 2067 of SEQ ID NO: 1560170
ggacuuagcuucugcccaa

SEQ ID NO: 1581112 - RNA, 19 nt, Artificial Sequence
  Description of Artificial Sequence: Synthetic oligonucleotide
  Antisense strand to SEQ ID NO: 1581111
uugggcagaagcuaagucc

SEQ ID NO: 1581113 - RNA, 19 nt, Artificial Sequence
  Description of Artificial Sequence: Synthetic oligonucleotide
  Sense strand starting at position 2070 of SEQ ID NO: 1560170
cuuagcuucugcccaauga

SEQ ID NO: 1581114 - RNA, 19 nt, Artificial Sequence
  Description of Artificial Sequence: Synthetic oligonucleotide
  Antisense strand to SEQ ID NO: 1581113
ucauugggcagaagcuaag

SEQ ID NO: 1581115 - RNA, 19 nt, Artificial Sequence
  Description of Artificial Sequence: Synthetic oligonucleotide
  Sense strand starting at position 2074 of SEQ ID NO: 1560170
gcuucugcccaaugagaga

SEQ ID NO: 1581116 - RNA, 19 nt, Artificial Sequence
  Description of Artificial Sequence: Synthetic oligonucleotide
  Antisense strand to SEQ ID NO: 1581115
ucucucauugggcagaagc

SEQ ID NO: 1581117 - RNA, 19 nt, Artificial Sequence
  Description of Artificial Sequence: Synthetic oligonucleotide
  Sense strand starting at position 2467 of SEQ ID NO: 1560170
gcaucuugaucgcuucuca

SEQ ID NO: 1581118 - RNA, 19 nt, Artificial Sequence
  Description of Artificial Sequence: Synthetic oligonucleotide
  Antisense strand to SEQ ID NO: 1581117
ugagaagcgaucaagaugc

SEQ ID NO: 1581119 - RNA, 19 nt, Artificial Sequence
  Description of Artificial Sequence: Synthetic oligonucleotide
  Sense strand starting at position 2472 of SEQ ID NO: 1560170
uugaucgcuucucauugaa

SEQ ID NO: 1581120 - RNA, 19 nt, Artificial Sequence
  Description of Artificial Sequence: Synthetic oligonucleotide
  Antisense strand to SEQ ID NO: 1581119
uucaaugagaagcgaucaa

SEQ ID NO: 1581121 - RNA, 19 nt, Artificial Sequence
  Description of Artificial Sequence: Synthetic oligonucleotide
  Sense strand starting at position 2506 of SEQ ID NO: 1560170
cccugugaucgguagcuca

SEQ ID NO: 1581122 - RNA, 19 nt, Artificial Sequence
  Description of Artificial Sequence: Synthetic oligonucleotide
  Antisense strand to SEQ ID NO: 1581121
ugagcuaccgaucacaggg

SEQ ID NO: 1581123 - RNA, 19 nt, Artificial Sequence
  Description of Artificial Sequence: Synthetic oligonucleotide
  Sense strand starting at position 2509 of SEQ ID NO: 1560170
ugugaucgguagcucauua

SEQ ID NO: 1581124 - RNA, 19 nt, Artificial Sequence
  Description of Artificial Sequence: Synthetic oligonucleotide
  Antisense strand to SEQ ID NO: 1581123
uaaugagcuaccgaucaca

SEQ ID NO: 1581125 - RNA, 19 nt, Artificial Sequence
  Description of Artificial Sequence: Synthetic oligonucleotide
  Sense strand starting at position 2516 of SEQ ID NO: 1560170
gguagcucauuaucucaaa

SEQ ID NO: 1581126 - RNA, 19 nt, Artificial Sequence
  Description of Artificial Sequence: Synthetic oligonucleotide
  Antisense strand to SEQ ID NO: 1581125
uuugagauaaugagcuacc

SEQ ID NO: 1581127 - RNA, 19 nt, Artificial Sequence
  Description of Artificial Sequence: Synthetic oligonucleotide
  Sense strand starting at position 2684 of SEQ ID NO: 1560170
ccauccacaucgugaaaug

SEQ ID NO: 1581128 - RNA, 19 nt, Artificial Sequence
  Description of Artificial Sequence: Synthetic oligonucleotide
  Antisense strand to SEQ ID NO: 1581127
cauuucacgauguggaugg

SEQ ID NO: 1581129 - RNA, 19 nt, Artificial Sequence
  Description of Artificial Sequence: Synthetic oligonucleotide
  Sense strand starting at position 2685 of SEQ ID NO: 1560170
cauccacaucgugaaaugu

SEQ ID NO: 1581130 - RNA, 19 nt, Artificial Sequence
  Description of Artificial Sequence: Synthetic oligonucleotide
  Antisense strand to SEQ ID NO: 1581129
acauuucacgauguggaug

SEQ ID NO: 1581131 - RNA, 19 nt, Artificial Sequence
  Description of Artificial Sequence: Synthetic oligonucleotide
  Sense strand starting at position 2953 of SEQ ID NO: 1560170
ugcagagacugagcucaaa

SEQ ID NO: 1581132 - RNA, 19 nt, Artificial Sequence
  Description of Artificial Sequence: Synthetic oligonucleotide
  Antisense strand to SEQ ID NO: 1581131
uuugagcucagucucugca

SEQ ID NO: 1581133 - RNA, 19 nt, Artificial Sequence
  Description of Artificial Sequence: Synthetic oligonucleotide
  Sense strand starting at position 3291 of SEQ ID NO: 1560170
cggcuaccuuccucagagu

SEQ ID NO: 1581134 - RNA, 19 nt, Artificial Sequence
  Description of Artificial Sequence: Synthetic oligonucleotide
  Antisense strand to SEQ ID NO: 1581133
acucugaggaagguagccg

SEQ ID NO: 1581135 - RNA, 19 nt, Artificial Sequence
  Description of Artificial Sequence: Synthetic oligonucleotide
  Sense strand starting at position 3292 of SEQ ID NO: 1560170
ggcuaccuuccucagaguu

SEQ ID NO: 1581136 - RNA, 19 nt, Artificial Sequence
  Description of Artificial Sequence: Synthetic oligonucleotide
  Antisense strand to SEQ ID NO: 1581135
aacucugaggaagguagcc

SEQ ID NO: 1581137 - RNA, 19 nt, Artificial Sequence
  Description of Artificial Sequence: Synthetic oligonucleotide
  Sense strand starting at position 3294 of SEQ ID NO: 1560170
cuaccuuccucagaguuau

SEQ ID NO: 1581138 - RNA, 19 nt, Artificial Sequence
  Description of Artificial Sequence: Synthetic oligonucleotide
  Antisense strand to SEQ ID NO: 1581137
auaacucugaggaagguag

SEQ ID NO: 1581139 - RNA, 19 nt, Artificial Sequence
  Description of Artificial Sequence: Synthetic oligonucleotide
  Sense strand starting at position 33 of SEQ ID NO: 1560171
cuccaucguccauacauga

SEQ ID NO: 1581140 - RNA, 19 nt, Artificial Sequence
  Description of Artificial Sequence: Synthetic oligonucleotide
  Antisense strand to SEQ ID NO: 1581139
ucauguauggacgauggag

SEQ ID NO: 1581141 - RNA, 19 nt, Artificial Sequence
  Description of Artificial Sequence: Synthetic oligonucleotide
  Sense strand starting at position 145 of SEQ ID NO: 1560171
acaguaucauucucaagug

SEQ ID NO: 1581142 - RNA, 19 nt, Artificial Sequence
  Description of Artificial Sequence: Synthetic oligonucleotide
  Antisense strand to SEQ ID NO: 1581141
cacuugagaaugauacugu

SEQ ID NO: 1581143 - RNA, 19 nt, Artificial Sequence
  Description of Artificial Sequence: Synthetic oligonucleotide
  Sense strand starting at position 153 of SEQ ID NO: 1560171
auucucaaguguccacuua

SEQ ID NO: 1581144 - RNA, 19 nt, Artificial Sequence
  Description of Artificial Sequence: Synthetic oligonucleotide
  Antisense strand to SEQ ID NO: 1581143
uaaguggacacuugagaau

SEQ ID NO: 1581145 - RNA, 19 nt, Artificial Sequence
  Description of Artificial Sequence: Synthetic oligonucleotide
  Sense strand starting at position 252 of SEQ ID NO: 1560171
aaucuauuuguguggcuuu

SEQ ID NO: 1581146 - RNA, 19 nt, Artificial Sequence
  Description of Artificial Sequence: Synthetic oligonucleotide
  Antisense strand to SEQ ID NO: 1581145
aaagccacacaaauagauu

SEQ ID NO: 1581147 - RNA, 19 nt, Artificial Sequence
  Description of Artificial Sequence: Synthetic oligonucleotide
  Sense strand starting at position 399 of SEQ ID NO: 1560171
cacauauguguguauaaag

SEQ ID NO: 1581148 - RNA, 19 nt, Artificial Sequence
  Description of Artificial Sequence: Synthetic oligonucleotide
  Antisense strand to SEQ ID NO: 1581147
cuuuauacacacauaugug

SEQ ID NO: 1581149 - RNA, 19 nt, Artificial Sequence
  Description of Artificial Sequence: Synthetic oligonucleotide
  Sense strand starting at position 439 of SEQ ID NO: 1560171
gcgauuacauccuuucuaa

SEQ ID NO: 1581150 - RNA, 19 nt, Artificial Sequence
  Description of Artificial Sequence: Synthetic oligonucleotide
  Antisense strand to SEQ ID NO: 1581149
uuagaaaggauguaaucgc

SEQ ID NO: 1581151 - RNA, 19 nt, Artificial Sequence
  Description of Artificial Sequence: Synthetic oligonucleotide
  Sense strand starting at position 488 of SEQ ID NO: 1560171
ucaugauagcaugguccua

SEQ ID NO: 1581152 - RNA, 19 nt, Artificial Sequence
  Description of Artificial Sequence: Synthetic oligonucleotide
  Antisense strand to SEQ ID NO: 1581151
uaggaccaugcuaucauga

SEQ ID NO: 1581153 - RNA, 19 nt, Artificial Sequence
  Description of Artificial Sequence: Synthetic oligonucleotide
  Sense strand starting at position 879 of SEQ ID NO: 1560171
cgggaaaucccacaggcua

SEQ ID NO: 1581154 - RNA, 19 nt, Artificial Sequence
  Description of Artificial Sequence: Synthetic oligonucleotide
  Antisense strand to SEQ ID NO: 1581153
uagccugugggauuucccg

SEQ ID NO: 1581155 - RNA, 19 nt, Artificial Sequence
  Description of Artificial Sequence: Synthetic oligonucleotide
  Sense strand starting at position 962 of SEQ ID NO: 1560171
gguauuucuggcuguuacu

SEQ ID NO: 1581156 - RNA, 19 nt, Artificial Sequence
  Description of Artificial Sequence: Synthetic oligonucleotide
  Antisense strand to SEQ ID NO: 1581155
aguaacagccagaaauacc

SEQ ID NO: 1581157 - RNA, 19 nt, Artificial Sequence
  Description of Artificial Sequence: Synthetic oligonucleotide
  Sense strand starting at position 976 of SEQ ID NO: 1560171
uuacuaaggcauggugaga

SEQ ID NO: 1581158 - RNA, 19 nt, Artificial Sequence
  Description of Artificial Sequence: Synthetic oligonucleotide
  Antisense strand to SEQ ID NO: 1581157
ucucaccaugccuuaguaa

SEQ ID NO: 1581159 - RNA, 19 nt, Artificial Sequence
  Description of Artificial Sequence: Synthetic oligonucleotide
  Sense strand starting at position 1135 of SEQ ID NO: 1560171
ucacguuauuuacugagca

SEQ ID NO: 1581160 - RNA, 19 nt, Artificial Sequence
  Description of Artificial Sequence: Synthetic oligonucleotide
  Antisense strand to SEQ ID NO: 1581159
ugcucaguaaauaacguga

SEQ ID NO: 1581161 - RNA, 19 nt, Artificial Sequence
  Description of Artificial Sequence: Synthetic oligonucleotide
  Sense strand starting at position 1184 of SEQ ID NO: 1560171
gcugccaaagcguuaugua

SEQ ID NO: 1581162 - RNA, 19 nt, Artificial Sequence
  Description of Artificial Sequence: Synthetic oligonucleotide
  Antisense strand to SEQ ID NO: 1581161
uacauaacgcuuuggcagc

SEQ ID NO: 1581163 - RNA, 19 nt, Artificial Sequence
  Description of Artificial Sequence: Synthetic oligonucleotide
  Sense strand starting at position 1193 of SEQ ID NO: 1560171
gcguuauguaaugcagagu

SEQ ID NO: 1581164 - RNA, 19 nt, Artificial Sequence
  Description of Artificial Sequence: Synthetic oligonucleotide
  Antisense strand to SEQ ID NO: 1581163
acucugcauuacauaacgc

SEQ ID NO: 1581165 - RNA, 19 nt, Artificial Sequence
  Description of Artificial Sequence: Synthetic oligonucleotide
  Sense strand starting at position 1196 of SEQ ID NO: 1560171
uuauguaaugcagagucca

SEQ ID NO: 1581166 - RNA, 19 nt, Artificial Sequence
  Description of Artificial Sequence: Synthetic oligonucleotide
  Antisense strand to SEQ ID NO: 1581165
uggacucugcauuacauaa

SEQ ID NO: 1581167 - RNA, 19 nt, Artificial Sequence
  Description of Artificial Sequence: Synthetic oligonucleotide
  Sense strand starting at position 1312 of SEQ ID NO: 1560171
ggaggaagucacggugcau

SEQ ID NO: 1581168 - RNA, 19 nt, Artificial Sequence
  Description of Artificial Sequence: Synthetic oligonucleotide
  Antisense strand to SEQ ID NO: 1581167
augcaccgugacuuccucc

SEQ ID NO: 1581169 - RNA, 19 nt, Artificial Sequence
  Description of Artificial Sequence: Synthetic oligonucleotide
  Sense strand starting at position 2126 of SEQ ID NO: 1560171
cgagauccgugacuuccau

SEQ ID NO: 1581170 - RNA, 19 nt, Artificial Sequence
  Description of Artificial Sequence: Synthetic oligonucleotide
  Antisense strand to SEQ ID NO: 1581169
auggaagucacggaucucg

SEQ ID NO: 1581171 - RNA, 19 nt, Artificial Sequence
  Description of Artificial Sequence: Synthetic oligonucleotide
  Sense strand starting at position 2164 of SEQ ID NO: 1560171
uugacauauccgcgaggga

SEQ ID NO: 1581172 - RNA, 19 nt, Artificial Sequence
  Description of Artificial Sequence: Synthetic oligonucleotide
  Antisense strand to SEQ ID NO: 1581171
ucccucgcggauaugucaa

SEQ ID NO: 1581173 - RNA, 19 nt, Artificial Sequence
  Description of Artificial Sequence: Synthetic oligonucleotide
  Sense strand starting at position 2203 of SEQ ID NO: 1560171
cugucauuggcugggagga

SEQ ID NO: 1581174 - RNA, 19 nt, Artificial Sequence
  Description of Artificial Sequence: Synthetic oligonucleotide
  Antisense strand to SEQ ID NO: 1581173
uccucccagccaaugacag

SEQ ID NO: 1581175 - RNA, 19 nt, Artificial Sequence
  Description of Artificial Sequence: Synthetic oligonucleotide
  Sense strand starting at position 2287 of SEQ ID NO: 1560171
gugggauagucccuaagag

SEQ ID NO: 1581176 - RNA, 19 nt, Artificial Sequence
  Description of Artificial Sequence: Synthetic oligonucleotide
  Antisense strand to SEQ ID NO: 1581175
cucuuagggacuaucccac

SEQ ID NO: 1581177 - RNA, 19 nt, Artificial Sequence
  Description of Artificial Sequence: Synthetic oligonucleotide
  Sense strand starting at position 2319 of SEQ ID NO: 1560171
gcucuuacgucaccagaac

SEQ ID NO: 1581178 - RNA, 19 nt, Artificial Sequence
  Description of Artificial Sequence: Synthetic oligonucleotide
  Antisense strand to SEQ ID NO: 1581177
guucuggugacguaagagc

SEQ ID NO: 1581179 - RNA, 19 nt, Artificial Sequence
  Description of Artificial Sequence: Synthetic oligonucleotide
  Sense strand starting at position 2373 of SEQ ID NO: 1560171
ggauuuagaugaggaaccu

SEQ ID NO: 1581180 - RNA, 19 nt, Artificial Sequence
  Description of Artificial Sequence: Synthetic oligonucleotide
  Antisense strand to SEQ ID NO: 1581179
agguuccucaucuaaaucc

SEQ ID NO: 1581181 - RNA, 19 nt, Artificial Sequence
  Description of Artificial Sequence: Synthetic oligonucleotide
  Sense strand starting at position 2413 of SEQ ID NO: 1560171
ugggacaucggcuaaauau

SEQ ID NO: 1581182 - RNA, 19 nt, Artificial Sequence
  Description of Artificial Sequence: Synthetic oligonucleotide
  Antisense strand to SEQ ID NO: 1581181
auauuuagccgauguccca

SEQ ID NO: 1581183 - RNA, 19 nt, Artificial Sequence
  Description of Artificial Sequence: Synthetic oligonucleotide
  Sense strand starting at position 2493 of SEQ ID NO: 1560171
gcgcuucggaaguauuuga

SEQ ID NO: 1581184 - RNA, 19 nt, Artificial Sequence
  Description of Artificial Sequence: Synthetic oligonucleotide
  Antisense strand to SEQ ID NO: 1581183
ucaaauacuuccgaagcgc

SEQ ID NO: 1581185 - RNA, 19 nt, Artificial Sequence
  Description of Artificial Sequence: Synthetic oligonucleotide
  Sense strand starting at position 2550 of SEQ ID NO: 1560171
gacgaaauggaucguuucu

SEQ ID NO: 1581186 - RNA, 19 nt, Artificial Sequence
  Description of Artificial Sequence: Synthetic oligonucleotide
  Antisense strand to SEQ ID NO: 1581185
agaaacgauccauuucguc

SEQ ID NO: 1581187 - RNA, 19 nt, Artificial Sequence
  Description of Artificial Sequence: Synthetic oligonucleotide
  Sense strand starting at position 2555 of SEQ ID NO: 1560171
aauggaucguuucugguuu

SEQ ID NO: 1581188 - RNA, 19 nt, Artificial Sequence
  Description of Artificial Sequence: Synthetic oligonucleotide
  Antisense strand to SEQ ID NO: 1581187
aaaccagaaacgauccauu

SEQ ID NO: 1581189 - RNA, 19 nt, Artificial Sequence
  Description of Artificial Sequence: Synthetic oligonucleotide
  Sense strand starting at position 2567 of SEQ ID NO: 1560171
cugguuuaauccucaggaa

SEQ ID NO: 1581190 - RNA, 19 nt, Artificial Sequence
  Description of Artificial Sequence: Synthetic oligonucleotide
  Antisense strand to SEQ ID NO: 1581189
uuccugaggauuaaaccag

SEQ ID NO: 1581191 - RNA, 19 nt, Artificial Sequence
  Description of Artificial Sequence: Synthetic oligonucleotide
  Sense strand starting at position 2751 of SEQ ID NO: 1560171
agcugugucuauuuauuag

SEQ ID NO: 1581192 - RNA, 19 nt, Artificial Sequence
  Description of Artificial Sequence: Synthetic oligonucleotide
  Antisense strand to SEQ ID NO: 1581191
cuaauaaauagacacagcu

SEQ ID NO: 1581193 - RNA, 19 nt, Artificial Sequence
  Description of Artificial Sequence: Synthetic oligonucleotide
  Sense strand starting at position 2809 of SEQ ID NO: 1560171
auuaguucuggcgagggua

SEQ ID NO: 1581194 - RNA, 19 nt, Artificial Sequence
  Description of Artificial Sequence: Synthetic oligonucleotide
  Antisense strand to SEQ ID NO: 1581193
uacccucgccagaacuaau

SEQ ID NO: 1581195 - RNA, 19 nt, Artificial Sequence
  Description of Artificial Sequence: Synthetic oligonucleotide
  Sense strand starting at position 2855 of SEQ ID NO: 1560171
accuguuaguaacugauca

SEQ ID NO: 1581196 - RNA, 19 nt, Artificial Sequence
  Description of Artificial Sequence: Synthetic oligonucleotide
  Antisense strand to SEQ ID NO: 1581195
ugaucaguuacuaacaggu

SEQ ID NO: 1581197 - RNA, 19 nt, Artificial Sequence
  Description of Artificial Sequence: Synthetic oligonucleotide
  Sense strand starting at position 2859 of SEQ ID NO: 1560171
guuaguaacugaucauauu

SEQ ID NO: 1581198 - RNA, 19 nt, Artificial Sequence
  Description of Artificial Sequence: Synthetic oligonucleotide
  Antisense strand to SEQ ID NO: 1581197
aauaugaucaguuacuaac

SEQ ID NO: 1581199 - RNA, 19 nt, Artificial Sequence
  Description of Artificial Sequence: Synthetic oligonucleotide
  Sense strand starting at position 2877 of SEQ ID NO: 1560171
uuaccaggucaauaaaugu

SEQ ID NO: 1581200 - RNA, 19 nt, Artificial Sequence
  Description of Artificial Sequence: Synthetic oligonucleotide
  Antisense strand to SEQ ID NO: 1581199
acauuuauugaccugguaa

SEQ ID NO: 1581201 - RNA, 19 nt, Artificial Sequence
  Description of Artificial Sequence: Synthetic oligonucleotide
  Sense strand starting at position 2916 of SEQ ID NO: 1560171
uugauugaacuguguagau

SEQ ID NO: 1581202 - RNA, 19 nt, Artificial Sequence
  Description of Artificial Sequence: Synthetic oligonucleotide
  Antisense strand to SEQ ID NO: 1581201
aucuacacaguucaaucaa

SEQ ID NO: 1581203 - RNA, 19 nt, Artificial Sequence
  Description of Artificial Sequence: Synthetic oligonucleotide
  Sense strand starting at position 3333 of SEQ ID NO: 1560171
aaguauggucaaggcauga

SEQ ID NO: 1581204 - RNA, 19 nt, Artificial Sequence
  Description of Artificial Sequence: Synthetic oligonucleotide
  Antisense strand to SEQ ID NO: 1581203
ucaugccuugaccauacuu

SEQ ID NO: 1581205 - RNA, 19 nt, Artificial Sequence
  Description of Artificial Sequence: Synthetic oligonucleotide
  Sense strand starting at position 3357 of SEQ ID NO: 1560171
gaccuagaugucuagaugu

SEQ ID NO: 1581206 - RNA, 19 nt, Artificial Sequence
  Description of Artificial Sequence: Synthetic oligonucleotide
  Antisense strand to SEQ ID NO: 1581205
acaucuagacaucuagguc

SEQ ID NO: 1581207 - RNA, 19 nt, Artificial Sequence
  Description of Artificial Sequence: Synthetic oligonucleotide
  Sense strand starting at position 3359 of SEQ ID NO: 1560171
ccuagaugucuagaugugu

SEQ ID NO: 1581208 - RNA, 19 nt, Artificial Sequence
  Description of Artificial Sequence: Synthetic oligonucleotide
  Antisense strand to SEQ ID NO: 1581207
acacaucuagacaucuagg

SEQ ID NO: 1581209 - RNA, 19 nt, Artificial Sequence
  Description of Artificial Sequence: Synthetic oligonucleotide
  Sense strand starting at position 3443 of SEQ ID NO: 1560171
guggcucauaccugugaga

SEQ ID NO: 1581210 - RNA, 19 nt, Artificial Sequence
  Description of Artificial Sequence: Synthetic oligonucleotide
  Antisense strand to SEQ ID NO: 1581209
ucucacagguaugagccac

SEQ ID NO: 1581211 - RNA, 19 nt, Artificial Sequence
  Description of Artificial Sequence: Synthetic oligonucleotide
  Sense strand starting at position 3445 of SEQ ID NO: 1560171
ggcucauaccugugagacc

SEQ ID NO: 1581212 - RNA, 19 nt, Artificial Sequence
  Description of Artificial Sequence: Synthetic oligonucleotide
  Antisense strand to SEQ ID NO: 1581211
ggucucacagguaugagcc

SEQ ID NO: 1581213 - RNA, 19 nt, Artificial Sequence
  Description of Artificial Sequence: Synthetic oligonucleotide
  Sense strand starting at position 3787 of SEQ ID NO: 1560171
ggauuuagcuaagaugagu

SEQ ID NO: 1581214 - RNA, 19 nt, Artificial Sequence
  Description of Artificial Sequence: Synthetic oligonucleotide
  Antisense strand to SEQ ID NO: 1581213
acucaucuuagcuaaaucc

SEQ ID NO: 1581215 - RNA, 19 nt, Artificial Sequence
  Description of Artificial Sequence: Synthetic oligonucleotide
  Sense strand starting at position 3792 of SEQ ID NO: 1560171
uagcuaagaugaguaaaca

SEQ ID NO: 1581216 - RNA, 19 nt, Artificial Sequence
  Description of Artificial Sequence: Synthetic oligonucleotide
  Antisense strand to SEQ ID NO: 1581215
uguuuacucaucuuagcua

SEQ ID NO: 1581217 - RNA, 19 nt, Artificial Sequence
  Description of Artificial Sequence: Synthetic oligonucleotide
  Sense strand starting at position 3957 of SEQ ID NO: 1560171
cgcucaacucacugacaga

SEQ ID NO: 1581218 - RNA, 19 nt, Artificial Sequence
  Description of Artificial Sequence: Synthetic oligonucleotide
  Antisense strand to SEQ ID NO: 1581217
ucugucagugaguugagcg

SEQ ID NO: 1581219 - RNA, 19 nt, Artificial Sequence
  Description of Artificial Sequence: Synthetic oligonucleotide
  Sense strand starting at position 556 of SEQ ID NO: 1560172
uguuuaaucgaacaccaac

SEQ ID NO: 1581220 - RNA, 19 nt, Artificial Sequence
  Description of Artificial Sequence: Synthetic oligonucleotide
  Antisense strand to SEQ ID NO: 1581219
guugguguucgauuaaaca

SEQ ID NO: 1581221 - RNA, 19 nt, Artificial Sequence
  Description of Artificial Sequence: Synthetic oligonucleotide
  Sense strand starting at position 574 of SEQ ID NO: 1560172
cuguguguuauguauuaag

SEQ ID NO: 1581222 - RNA, 19 nt, Artificial Sequence
  Description of Artificial Sequence: Synthetic oligonucleotide
  Antisense strand to SEQ ID NO: 1581221
cuuaauacauaacacacag

SEQ ID NO: 1581223 - RNA, 19 nt, Artificial Sequence
  Description of Artificial Sequence: Synthetic oligonucleotide
  Sense strand starting at position 593 of SEQ ID NO: 1560172
ggacaaugaccuuguaccu

SEQ ID NO: 1581224 - RNA, 19 nt, Artificial Sequence
  Description of Artificial Sequence: Synthetic oligonucleotide
  Antisense strand to SEQ ID NO: 1581223
agguacaaggucauugucc

SEQ ID NO: 1581225 - RNA, 19 nt, Artificial Sequence
  Description of Artificial Sequence: Synthetic oligonucleotide
  Sense strand starting at position 668 of SEQ ID NO: 1560172
ccuuguuugggucauugua

SEQ ID NO: 1581226 - RNA, 19 nt, Artificial Sequence
  Description of Artificial Sequence: Synthetic oligonucleotide
  Antisense strand to SEQ ID NO: 1581225
uacaaugacccaaacaagg

SEQ ID NO: 1581227 - RNA, 19 nt, Artificial Sequence
  Description of Artificial Sequence: Synthetic oligonucleotide
  Sense strand starting at position 676 of SEQ ID NO: 1560172
gggucauuguaccuuaaua

SEQ ID NO: 1581228 - RNA, 19 nt, Artificial Sequence
  Description of Artificial Sequence: Synthetic oligonucleotide
  Antisense strand to SEQ ID NO: 1581227
uauuaagguacaaugaccc

SEQ ID NO: 1581229 - RNA, 19 nt, Artificial Sequence
  Description of Artificial Sequence: Synthetic oligonucleotide
  Sense strand starting at position 678 of SEQ ID NO: 1560172
gucauuguaccuuaauaca

SEQ ID NO: 1581230 - RNA, 19 nt, Artificial Sequence
  Description of Artificial Sequence: Synthetic oligonucleotide
  Antisense strand to SEQ ID NO: 1581229
uguauuaagguacaaugac

SEQ ID NO: 1581231 - RNA, 19 nt, Artificial Sequence
  Description of Artificial Sequence: Synthetic oligonucleotide
  Sense strand starting at position 703 of SEQ ID NO: 1560172
acaauuggcguucgaucaa

SEQ ID NO: 1581232 - RNA, 19 nt, Artificial Sequence
  Description of Artificial Sequence: Synthetic oligonucleotide
  Antisense strand to SEQ ID NO: 1581231
uugaucgaacgccaauugu

SEQ ID NO: 1581233 - RNA, 19 nt, Artificial Sequence
  Description of Artificial Sequence: Synthetic oligonucleotide
  Sense strand starting at position 801 of SEQ ID NO: 1560172
ggguacugaacgugacaga

SEQ ID NO: 1581234 - RNA, 19 nt, Artificial Sequence
  Description of Artificial Sequence: Synthetic oligonucleotide
  Antisense strand to SEQ ID NO: 1581233
ucugucacguucaguaccc

SEQ ID NO: 1581235 - RNA, 19 nt, Artificial Sequence
  Description of Artificial Sequence: Synthetic oligonucleotide
  Sense strand starting at position 808 of SEQ ID NO: 1560172
gaacgugacagaugugaua

SEQ ID NO: 1581236 - RNA, 19 nt, Artificial Sequence
  Description of Artificial Sequence: Synthetic oligonucleotide
  Antisense strand to SEQ ID NO: 1581235
uaucacaucugucacguuc

SEQ ID NO: 1581237 - RNA, 19 nt, Artificial Sequence
  Description of Artificial Sequence: Synthetic oligonucleotide
  Sense strand starting at position 849 of SEQ ID NO: 1560172
ccuggugacuauccauuau

SEQ ID NO: 1581238 - RNA, 19 nt, Artificial Sequence
  Description of Artificial Sequence: Synthetic oligonucleotide
  Antisense strand to SEQ ID NO: 1581237
auaauggauagucaccagg

SEQ ID NO: 1581239 - RNA, 19 nt, Artificial Sequence
  Description of Artificial Sequence: Synthetic oligonucleotide
  Sense strand starting at position 917 of SEQ ID NO: 1560172
ggaauccuguugccuaaau

SEQ ID NO: 1581240 - RNA, 19 nt, Artificial Sequence
  Description of Artificial Sequence: Synthetic oligonucleotide
  Antisense strand to SEQ ID NO: 1581239
auuuaggcaacaggauucc

SEQ ID NO: 1581241 - RNA, 19 nt, Artificial Sequence
  Description of Artificial Sequence: Synthetic oligonucleotide
  Sense strand starting at position 918 of SEQ ID NO: 1560172
gaauccuguugccuaaaug

SEQ ID NO: 1581242 - RNA, 19 nt, Artificial Sequence
  Description of Artificial Sequence: Synthetic oligonucleotide
  Antisense strand to SEQ ID NO: 1581241
cauuuaggcaacaggauuc

SEQ ID NO: 1581243 - RNA, 19 nt, Artificial Sequence
  Description of Artificial Sequence: Synthetic oligonucleotide
  Sense strand starting at position 1000 of SEQ ID NO: 1560172
gcugcaggcaucugaaaug

SEQ ID NO: 1581244 - RNA, 19 nt, Artificial Sequence
  Description of Artificial Sequence: Synthetic oligonucleotide
  Antisense strand to SEQ ID NO: 1581243
cauuucagaugccugcagc

SEQ ID NO: 1581245 - RNA, 19 nt, Artificial Sequence
  Description of Artificial Sequence: Synthetic oligonucleotide
  Sense strand starting at position 1141 of SEQ ID NO: 1560172
cugcuaaucuccgucauca

SEQ ID NO: 1581246 - RNA, 19 nt, Artificial Sequence
  Description of Artificial Sequence: Synthetic oligonucleotide
  Antisense strand to SEQ ID NO: 1581245
ugaugacggagauuagcag

SEQ ID NO: 1581247 - RNA, 19 nt, Artificial Sequence
  Description of Artificial Sequence: Synthetic oligonucleotide
  Sense strand starting at position 1143 of SEQ ID NO: 1560172
gcuaaucuccgucaucagu

SEQ ID NO: 1581248 - RNA, 19 nt, Artificial Sequence
  Description of Artificial Sequence: Synthetic oligonucleotide
  Antisense strand to SEQ ID NO: 1581247
acugaugacggagauuagc

SEQ ID NO: 1581249 - RNA, 19 nt, Artificial Sequence
  Description of Artificial Sequence: Synthetic oligonucleotide
  Sense strand starting at position 1217 of SEQ ID NO: 1560172
cucguuguucuccauuaca

SEQ ID NO: 1581250 - RNA, 19 nt, Artificial Sequence
  Description of Artificial Sequence: Synthetic oligonucleotide
  Antisense strand to SEQ ID NO: 1581249
uguaauggagaacaacgag

SEQ ID NO: 1581251 - RNA, 19 nt, Artificial Sequence
  Description of Artificial Sequence: Synthetic oligonucleotide
  Sense strand starting at position 1356 of SEQ ID NO: 1560172
cggacuggaauccgagaaa

SEQ ID NO: 1581252 - RNA, 19 nt, Artificial Sequence
  Description of Artificial Sequence: Synthetic oligonucleotide
  Antisense strand to SEQ ID NO: 1581251
uuucucggauuccaguccg

SEQ ID NO: 1581253 - RNA, 19 nt, Artificial Sequence
  Description of Artificial Sequence: Synthetic oligonucleotide
  Sense strand starting at position 1502 of SEQ ID NO: 1560172
ucugcuucuccauagucau

SEQ ID NO: 1581254 - RNA, 19 nt, Artificial Sequence
  Description of Artificial Sequence: Synthetic oligonucleotide
  Antisense strand to SEQ ID NO: 1581253
augacuauggagaagcaga

SEQ ID NO: 1581255 - RNA, 19 nt, Artificial Sequence
  Description of Artificial Sequence: Synthetic oligonucleotide
  Sense strand starting at position 1505 of SEQ ID NO: 1560172
gcuucuccauagucaucuu

SEQ ID NO: 1581256 - RNA, 19 nt, Artificial Sequence
  Description of Artificial Sequence: Synthetic oligonucleotide
  Antisense strand to SEQ ID NO: 1581255
aagaugacuauggagaagc

SEQ ID NO: 1581257 - RNA, 19 nt, Artificial Sequence
  Description of Artificial Sequence: Synthetic oligonucleotide
  Sense strand starting at position 1558 of SEQ ID NO: 1560172
gcgagcuugucgaugacau

SEQ ID NO: 1581258 - RNA, 19 nt, Artificial Sequence
  Description of Artificial Sequence: Synthetic oligonucleotide
  Antisense strand to SEQ ID NO: 1581257
augucaucgacaagcucgc

SEQ ID NO: 1581259 - RNA, 19 nt, Artificial Sequence
  Description of Artificial Sequence: Synthetic oligonucleotide
  Sense strand starting at position 1559 of SEQ ID NO: 1560172
cgagcuugucgaugacauu

SEQ ID NO: 1581260 - RNA, 19 nt, Artificial Sequence
  Description of Artificial Sequence: Synthetic oligonucleotide
  Antisense strand to SEQ ID NO: 1581259
aaugucaucgacaagcucg

SEQ ID NO: 1581261 - RNA, 19 nt, Artificial Sequence
  Description of Artificial Sequence: Synthetic oligonucleotide
  Sense strand starting at position 2544 of SEQ ID NO: 1560172
uccacucuuuggucaggaa

SEQ ID NO: 1581262 - RNA, 19 nt, Artificial Sequence
  Description of Artificial Sequence: Synthetic oligonucleotide
  Antisense strand to SEQ ID NO: 1581261
uuccugaccaaagagugga

SEQ ID NO: 1581263 - RNA, 19 nt, Artificial Sequence
  Description of Artificial Sequence: Synthetic oligonucleotide
  Sense strand starting at position 2719 of SEQ ID NO: 1560172
guggacguccgauauaaac

SEQ ID NO: 1581264 - RNA, 19 nt, Artificial Sequence
  Description of Artificial Sequence: Synthetic oligonucleotide
  Antisense strand to SEQ ID NO: 1581263
guuuauaucggacguccac

SEQ ID NO: 1581265 - RNA, 19 nt, Artificial Sequence
  Description of Artificial Sequence: Synthetic oligonucleotide
  Sense strand starting at position 2741 of SEQ ID NO: 1560172
uccucuugagaugguuaau

SEQ ID NO: 1581266 - RNA, 19 nt, Artificial Sequence
  Description of Artificial Sequence: Synthetic oligonucleotide
  Antisense strand to SEQ ID NO: 1581265
auuaaccaucucaagagga

SEQ ID NO: 1581267 - RNA, 19 nt, Artificial Sequence
  Description of Artificial Sequence: Synthetic oligonucleotide
  Sense strand starting at position 2744 of SEQ ID NO: 1560172
ucuugagaugguuaaugcu

SEQ ID NO: 1581268 - RNA, 19 nt, Artificial Sequence
  Description of Artificial Sequence: Synthetic oligonucleotide
  Antisense strand to SEQ ID NO: 1581267
agcauuaaccaucucaaga

SEQ ID NO: 1581269 - RNA, 19 nt, Artificial Sequence
  Description of Artificial Sequence: Synthetic oligonucleotide
  Sense strand starting at position 2754 of SEQ ID NO: 1560172
guuaaugcuuaguuggcua

SEQ ID NO: 1581270 - RNA, 19 nt, Artificial Sequence
  Description of Artificial Sequence: Synthetic oligonucleotide
  Antisense strand to SEQ ID NO: 1581269
uagccaacuaagcauuaac

SEQ ID NO: 1581271 - RNA, 19 nt, Artificial Sequence
  Description of Artificial Sequence: Synthetic oligonucleotide
  Sense strand starting at position 2756 of SEQ ID NO: 1560172
uaaugcuuaguuggcuaua

SEQ ID NO: 1581272 - RNA, 19 nt, Artificial Sequence
  Description of Artificial Sequence: Synthetic oligonucleotide
  Antisense strand to SEQ ID NO: 1581271
uauagccaacuaagcauua

SEQ ID NO: 1581273 - RNA, 19 nt, Artificial Sequence
  Description of Artificial Sequence: Synthetic oligonucleotide
  Sense strand starting at position 3051 of SEQ ID NO: 1560172
ccaccagaugcuuauggau

SEQ ID NO: 1581274 - RNA, 19 nt, Artificial Sequence
  Description of Artificial Sequence: Synthetic oligonucleotide
  Antisense strand to SEQ ID NO: 1581273
auccauaagcaucuggugg

SEQ ID NO: 1581275 - RNA, 19 nt, Artificial Sequence
  Description of Artificial Sequence: Synthetic oligonucleotide
  Sense strand starting at position 3058 of SEQ ID NO: 1560172
augcuuauggauugacaac

SEQ ID NO: 1581276 - RNA, 19 nt, Artificial Sequence
  Description of Artificial Sequence: Synthetic oligonucleotide
  Antisense strand to SEQ ID NO: 1581275
guugucaauccauaagcau

SEQ ID NO: 1581277 - RNA, 19 nt, Artificial Sequence
  Description of Artificial Sequence: Synthetic oligonucleotide
  Sense strand starting at position 3091 of SEQ ID NO: 1560172
ugcuguaggcuaggaauca

SEQ ID NO: 1581278 - RNA, 19 nt, Artificial Sequence
  Description of Artificial Sequence: Synthetic oligonucleotide
  Antisense strand to SEQ ID NO: 1581277
ugauuccuagccuacagca

SEQ ID NO: 1581279 - RNA, 19 nt, Artificial Sequence
  Description of Artificial Sequence: Synthetic oligonucleotide
  Sense strand starting at position 3221 of SEQ ID NO: 1560172
caugaagaucgaggaucuu

SEQ ID NO: 1581280 - RNA, 19 nt, Artificial Sequence
  Description of Artificial Sequence: Synthetic oligonucleotide
  Antisense strand to SEQ ID NO: 1581279
aagauccucgaucuucaug

SEQ ID NO: 1581281 - RNA, 19 nt, Artificial Sequence
  Description of Artificial Sequence: Synthetic oligonucleotide
  Sense strand starting at position 3230 of SEQ ID NO: 1560172
cgaggaucuuaauuguuug

SEQ ID NO: 1581282 - RNA, 19 nt, Artificial Sequence
  Description of Artificial Sequence: Synthetic oligonucleotide
  Antisense strand to SEQ ID NO: 1581281
caaacaauuaagauccucg

SEQ ID NO: 1581283 - RNA, 19 nt, Artificial Sequence
  Description of Artificial Sequence: Synthetic oligonucleotide
  Sense strand starting at position 3234 of SEQ ID NO: 1560172
gaucuuaauuguuugguuu

SEQ ID NO: 1581284 - RNA, 19 nt, Artificial Sequence
  Description of Artificial Sequence: Synthetic oligonucleotide
  Antisense strand to SEQ ID NO: 1581283
aaaccaaacaauuaagauc

SEQ ID NO: 1581285 - RNA, 19 nt, Artificial Sequence
  Description of Artificial Sequence: Synthetic oligonucleotide
  Sense strand starting at position 3613 of SEQ ID NO: 1560172
uaugauaacugaguaguuu

SEQ ID NO: 1581286 - RNA, 19 nt, Artificial Sequence
  Description of Artificial Sequence: Synthetic oligonucleotide
  Antisense strand to SEQ ID NO: 1581285
aaacuacucaguuaucaua

SEQ ID NO: 1581287 - RNA, 19 nt, Artificial Sequence
  Description of Artificial Sequence: Synthetic oligonucleotide
  Sense strand starting at position 3617 of SEQ ID NO: 1560172
auaacugaguaguuucuua

SEQ ID NO: 1581288 - RNA, 19 nt, Artificial Sequence
  Description of Artificial Sequence: Synthetic oligonucleotide
  Antisense strand to SEQ ID NO: 1581287
uaagaaacuacucaguuau

SEQ ID NO: 1581289 - RNA, 19 nt, Artificial Sequence
  Description of Artificial Sequence: Synthetic oligonucleotide
  Sense strand starting at position 3621 of SEQ ID NO: 1560172
cugaguaguuucuuaaaua

SEQ ID NO: 1581290 - RNA, 19 nt, Artificial Sequence
  Description of Artificial Sequence: Synthetic oligonucleotide
  Antisense strand to SEQ ID NO: 1581289
uauuuaagaaacuacucag

SEQ ID NO: 1581291 - RNA, 19 nt, Artificial Sequence
  Description of Artificial Sequence: Synthetic oligonucleotide
  Sense strand starting at position 3652 of SEQ ID NO: 1560172
guuugaauguuuguuccua

SEQ ID NO: 1581292 - RNA, 19 nt, Artificial Sequence
  Description of Artificial Sequence: Synthetic oligonucleotide
  Antisense strand to SEQ ID NO: 1581291
uaggaacaaacauucaaac

SEQ ID NO: 1581293 - RNA, 19 nt, Artificial Sequence
  Description of Artificial Sequence: Synthetic oligonucleotide
  Sense strand starting at position 3653 of SEQ ID NO: 1560172
uuugaauguuuguuccuaa

SEQ ID NO: 1581294 - RNA, 19 nt, Artificial Sequence
  Description of Artificial Sequence: Synthetic oligonucleotide
  Antisense strand to SEQ ID NO: 1581293
uuaggaacaaacauucaaa

SEQ ID NO: 1581295 - RNA, 19 nt, Artificial Sequence
  Description of Artificial Sequence: Synthetic oligonucleotide
  Sense strand starting at position 3654 of SEQ ID NO: 1560172
uugaauguuuguuccuaau

SEQ ID NO: 1581296 - RNA, 19 nt, Artificial Sequence
  Description of Artificial Sequence: Synthetic oligonucleotide
  Antisense strand to SEQ ID NO: 1581295
auuaggaacaaacauucaa

SEQ ID NO: 1581297 - RNA, 19 nt, Artificial Sequence
  Description of Artificial Sequence: Synthetic oligonucleotide
  Sense strand starting at position 3753 of SEQ ID NO: 1560172
uaaauagguuaucauggga

SEQ ID NO: 1581298 - RNA, 19 nt, Artificial Sequence
  Description of Artificial Sequence: Synthetic oligonucleotide
  Antisense strand to SEQ ID NO: 1581297
ucccaugauaaccuauuua

SEQ ID NO: 1581299 - RNA, 19 nt, Artificial Sequence
  Description of Artificial Sequence: Synthetic oligonucleotide
  Sense strand starting at position 220 of SEQ ID NO: 1560173
gggccagcuuauccuuaua

SEQ ID NO: 1581300 - RNA, 19 nt, Artificial Sequence
  Description of Artificial Sequence: Synthetic oligonucleotide
  Antisense strand to SEQ ID NO: 1581299
uauaaggauaagcuggccc

SEQ ID NO: 1581301 - RNA, 19 nt, Artificial Sequence
  Description of Artificial Sequence: Synthetic oligonucleotide
  Sense strand starting at position 222 of SEQ ID NO: 1560173
gccagcuuauccuuauagu

SEQ ID NO: 1581302 - RNA, 19 nt, Artificial Sequence
  Description of Artificial Sequence: Synthetic oligonucleotide
  Antisense strand to SEQ ID NO: 1581301
acuauaaggauaagcuggc

SEQ ID NO: 1581303 - RNA, 19 nt, Artificial Sequence
  Description of Artificial Sequence: Synthetic oligonucleotide
  Sense strand starting at position 223 of SEQ ID NO: 1560173
ccagcuuauccuuauaguu

SEQ ID NO: 1581304 - RNA, 19 nt, Artificial Sequence
  Description of Artificial Sequence: Synthetic oligonucleotide
  Antisense strand to SEQ ID NO: 1581303
aacuauaaggauaagcugg

SEQ ID NO: 1581305 - RNA, 19 nt, Artificial Sequence
  Description of Artificial Sequence: Synthetic oligonucleotide
  Sense strand starting at position 520 of SEQ ID NO: 1560173
auuacaggucucugagcua

SEQ ID NO: 1581306 - RNA, 19 nt, Artificial Sequence
  Description of Artificial Sequence: Synthetic oligonucleotide
  Antisense strand to SEQ ID NO: 1581305
uagcucagagaccuguaau

SEQ ID NO: 1581307 - RNA, 19 nt, Artificial Sequence
  Description of Artificial Sequence: Synthetic oligonucleotide
  Sense strand starting at position 596 of SEQ ID NO: 1560173
uucugaauugucuggucca

SEQ ID NO: 1581308 - RNA, 19 nt, Artificial Sequence
  Description of Artificial Sequence: Synthetic oligonucleotide
  Antisense strand to SEQ ID NO: 1581307
uggaccagacaauucagaa

SEQ ID NO: 1581309 - RNA, 19 nt, Artificial Sequence
  Description of Artificial Sequence: Synthetic oligonucleotide
  Sense strand starting at position 825 of SEQ ID NO: 1560173
gcugaaagcaccuguguuu

SEQ ID NO: 1581310 - RNA, 19 nt, Artificial Sequence
  Description of Artificial Sequence: Synthetic oligonucleotide
  Antisense strand to SEQ ID NO: 1581309
aaacacaggugcuuucagc

SEQ ID NO: 1581311 - RNA, 19 nt, Artificial Sequence
  Description of Artificial Sequence: Synthetic oligonucleotide
  Sense strand starting at position 871 of SEQ ID NO: 1560173
guuagagccgugccugauu

SEQ ID NO: 1581312 - RNA, 19 nt, Artificial Sequence
  Description of Artificial Sequence: Synthetic oligonucleotide
  Antisense strand to SEQ ID NO: 1581311
aaucaggcacggcucuaac

SEQ ID NO: 1581313 - RNA, 19 nt, Artificial Sequence
  Description of Artificial Sequence: Synthetic oligonucleotide
  Sense strand starting at position 942 of SEQ ID NO: 1560173
cuucuuaaugucugcaaug

SEQ ID NO: 1581314 - RNA, 19 nt, Artificial Sequence
  Description of Artificial Sequence: Synthetic oligonucleotide
  Antisense strand to SEQ ID NO: 1581313
cauugcagacauuaagaag

SEQ ID NO: 1581315 - RNA, 19 nt, Artificial Sequence
  Description of Artificial Sequence: Synthetic oligonucleotide
  Sense strand starting at position 943 of SEQ ID NO: 1560173
uucuuaaugucugcaauga

SEQ ID NO: 1581316 - RNA, 19 nt, Artificial Sequence
  Description of Artificial Sequence: Synthetic oligonucleotide
  Antisense strand to SEQ ID NO: 1581315
ucauugcagacauuaagaa

SEQ ID NO: 1581317 - RNA, 19 nt, Artificial Sequence
  Description of Artificial Sequence: Synthetic oligonucleotide
  Sense strand starting at position 944 of SEQ ID NO: 1560173
ucuuaaugucugcaaugau

SEQ ID NO: 1581318 - RNA, 19 nt, Artificial Sequence
  Description of Artificial Sequence: Synthetic oligonucleotide
  Antisense strand to SEQ ID NO: 1581317
aucauugcagacauuaaga

SEQ ID NO: 1581319 - RNA, 19 nt, Artificial Sequence
  Description of Artificial Sequence: Synthetic oligonucleotide
  Sense strand starting at position 1076 of SEQ ID NO: 1560173
acaauagguccaugauggu

SEQ ID NO: 1581320 - RNA, 19 nt, Artificial Sequence
  Description of Artificial Sequence: Synthetic oligonucleotide
  Antisense strand to SEQ ID NO: 1581319
accaucauggaccuauugu

SEQ ID NO: 1581321 - RNA, 19 nt, Artificial Sequence
  Description of Artificial Sequence: Synthetic oligonucleotide
  Sense strand starting at position 1111 of SEQ ID NO: 1560173
gccugagacagaugugagu

SEQ ID NO: 1581322 - RNA, 19 nt, Artificial Sequence
  Description of Artificial Sequence: Synthetic oligonucleotide
  Antisense strand to SEQ ID NO: 1581321
acucacaucugucucaggc

SEQ ID NO: 1581323 - RNA, 19 nt, Artificial Sequence
  Description of Artificial Sequence: Synthetic oligonucleotide
  Sense strand starting at position 1252 of SEQ ID NO: 1560173
agcugagaacacugggauu

SEQ ID NO: 1581324 - RNA, 19 nt, Artificial Sequence
  Description of Artificial Sequence: Synthetic oligonucleotide
  Antisense strand to SEQ ID NO: 1581323
aaucccaguguucucagcu

SEQ ID NO: 1581325 - RNA, 19 nt, Artificial Sequence
  Description of Artificial Sequence: Synthetic oligonucleotide
  Sense strand starting at position 1254 of SEQ ID NO: 1560173
cugagaacacugggauugu

SEQ ID NO: 1581326 - RNA, 19 nt, Artificial Sequence
  Description of Artificial Sequence: Synthetic oligonucleotide
  Antisense strand to SEQ ID NO: 1581325
acaaucccaguguucucag

SEQ ID NO: 1581327 - RNA, 19 nt, Artificial Sequence
  Description of Artificial Sequence: Synthetic oligonucleotide
  Sense strand starting at position 1359 of SEQ ID NO: 1560173
gaaguuauggcuugcaagu

SEQ ID NO: 1581328 - RNA, 19 nt, Artificial Sequence
  Description of Artificial Sequence: Synthetic oligonucleotide
  Antisense strand to SEQ ID NO: 1581327
acuugcaagccauaacuuc

SEQ ID NO: 1581329 - RNA, 19 nt, Artificial Sequence
  Description of Artificial Sequence: Synthetic oligonucleotide
  Sense strand starting at position 1410 of SEQ ID NO: 1560173
ccuggaguccuugauacga

SEQ ID NO: 1581330 - RNA, 19 nt, Artificial Sequence
  Description of Artificial Sequence: Synthetic oligonucleotide
  Antisense strand to SEQ ID NO: 1581329
ucguaucaaggacuccagg

SEQ ID NO: 1581331 - RNA, 19 nt, Artificial Sequence
  Description of Artificial Sequence: Synthetic oligonucleotide
  Sense strand starting at position 1412 of SEQ ID NO: 1560173
uggaguccuugauacgacu

SEQ ID NO: 1581332 - RNA, 19 nt, Artificial Sequence
  Description of Artificial Sequence: Synthetic oligonucleotide
  Antisense strand to SEQ ID NO: 1581331
agucguaucaaggacucca

SEQ ID NO: 1581333 - RNA, 19 nt, Artificial Sequence
  Description of Artificial Sequence: Synthetic oligonucleotide
  Sense strand starting at position 1545 of SEQ ID NO: 1560173
guaccaagaacaggugaau

SEQ ID NO: 1581334 - RNA, 19 nt, Artificial Sequence
  Description of Artificial Sequence: Synthetic oligonucleotide
  Antisense strand to SEQ ID NO: 1581333
auucaccuguucuugguac

SEQ ID NO: 1581335 - RNA, 19 nt, Artificial Sequence
  Description of Artificial Sequence: Synthetic oligonucleotide
  Sense strand starting at position 1669 of SEQ ID NO: 1560173
uggagauucggucgcacua

SEQ ID NO: 1581336 - RNA, 19 nt, Artificial Sequence
  Description of Artificial Sequence: Synthetic oligonucleotide
  Antisense strand to SEQ ID NO: 1581335
uagugcgaccgaaucucca

SEQ ID NO: 1581337 - RNA, 19 nt, Artificial Sequence
  Description of Artificial Sequence: Synthetic oligonucleotide
  Sense strand starting at position 1682 of SEQ ID NO: 1560173
gcacuauacaccgaggaca

SEQ ID NO: 1581338 - RNA, 19 nt, Artificial Sequence
  Description of Artificial Sequence: Synthetic oligonucleotide
  Antisense strand to SEQ ID NO: 1581337
uguccucgguguauagugc

SEQ ID NO: 1581339 - RNA, 19 nt, Artificial Sequence
  Description of Artificial Sequence: Synthetic oligonucleotide
  Sense strand starting at position 1732 of SEQ ID NO: 1560173
guuggagaccucgauguug

SEQ ID NO: 1581340 - RNA, 19 nt, Artificial Sequence
  Description of Artificial Sequence: Synthetic oligonucleotide
  Antisense strand to SEQ ID NO: 1581339
caacaucgaggucuccaac

SEQ ID NO: 1581341 - RNA, 19 nt, Artificial Sequence
  Description of Artificial Sequence: Synthetic oligonucleotide
  Sense strand starting at position 1969 of SEQ ID NO: 1560173
ccguuuccggauuaaacga

SEQ ID NO: 1581342 - RNA, 19 nt, Artificial Sequence
  Description of Artificial Sequence: Synthetic oligonucleotide
  Antisense strand to SEQ ID NO: 1581341
ucguuuaauccggaaacgg

SEQ ID NO: 1581343 - RNA, 19 nt, Artificial Sequence
  Description of Artificial Sequence: Synthetic oligonucleotide
  Sense strand starting at position 1978 of SEQ ID NO: 1560173
gauuaaacgacgugacgua

SEQ ID NO: 1581344 - RNA, 19 nt, Artificial Sequence
  Description of Artificial Sequence: Synthetic oligonucleotide
  Antisense strand to SEQ ID NO: 1581343
uacgucacgucguuuaauc

SEQ ID NO: 1581345 - RNA, 19 nt, Artificial Sequence
  Description of Artificial Sequence: Synthetic oligonucleotide
  Sense strand starting at position 2107 of SEQ ID NO: 1560173
gcgcguccgaguguuucau

SEQ ID NO: 1581346 - RNA, 19 nt, Artificial Sequence
  Description of Artificial Sequence: Synthetic oligonucleotide
  Antisense strand to SEQ ID NO: 1581345
augaaacacucggacgcgc

SEQ ID NO: 1581347 - RNA, 19 nt, Artificial Sequence
  Description of Artificial Sequence: Synthetic oligonucleotide
  Sense strand starting at position 2200 of SEQ ID NO: 1560173
cagcuuauucgugagaccu

SEQ ID NO: 1581348 - RNA, 19 nt, Artificial Sequence
  Description of Artificial Sequence: Synthetic oligonucleotide
  Antisense strand to SEQ ID NO: 1581347
aggucucacgaauaagcug

SEQ ID NO: 1581349 - RNA, 19 nt, Artificial Sequence
  Description of Artificial Sequence: Synthetic oligonucleotide
  Sense strand starting at position 2208 of SEQ ID NO: 1560173
ucgugagaccuugacuucu

SEQ ID NO: 1581350 - RNA, 19 nt, Artificial Sequence
  Description of Artificial Sequence: Synthetic oligonucleotide
  Antisense strand to SEQ ID NO: 1581349
agaagucaaggucucacga

SEQ ID NO: 1581351 - RNA, 19 nt, Artificial Sequence
  Description of Artificial Sequence: Synthetic oligonucleotide
  Sense strand starting at position 2312 of SEQ ID NO: 1560173
uggcuuguuucuuccacuu

SEQ ID NO: 1581352 - RNA, 19 nt, Artificial Sequence
  Description of Artificial Sequence: Synthetic oligonucleotide
  Antisense strand to SEQ ID NO: 1581351
aaguggaagaaacaagcca

SEQ ID NO: 1581353 - RNA, 19 nt, Artificial Sequence
  Description of Artificial Sequence: Synthetic oligonucleotide
  Sense strand starting at position 2374 of SEQ ID NO: 1560173
cuacgcuucucauccuaga

SEQ ID NO: 1581354 - RNA, 19 nt, Artificial Sequence
  Description of Artificial Sequence: Synthetic oligonucleotide
  Antisense strand to SEQ ID NO: 1581353
ucuaggaugagaagcguag

SEQ ID NO: 1581355 - RNA, 19 nt, Artificial Sequence
  Description of Artificial Sequence: Synthetic oligonucleotide
  Sense strand starting at position 2581 of SEQ ID NO: 1560173
gaggccaugcaguaacauu

SEQ ID NO: 1581356 - RNA, 19 nt, Artificial Sequence
  Description of Artificial Sequence: Synthetic oligonucleotide
  Antisense strand to SEQ ID NO: 1581355
aauguuacugcauggccuc

SEQ ID NO: 1581357 - RNA, 19 nt, Artificial Sequence
  Description of Artificial Sequence: Synthetic oligonucleotide
  Sense strand starting at position 2784 of SEQ ID NO: 1560173
uuaaucacaugguguuaaa

SEQ ID NO: 1581358 - RNA, 19 nt, Artificial Sequence
  Description of Artificial Sequence: Synthetic oligonucleotide
  Antisense strand to SEQ ID NO: 1581357
uuuaacaccaugugauuaa

SEQ ID NO: 1581359 - RNA, 19 nt, Artificial Sequence
  Description of Artificial Sequence: Synthetic oligonucleotide
  Sense strand starting at position 3021 of SEQ ID NO: 1560173
gcugcacguucugcucaaa

SEQ ID NO: 1581360 - RNA, 19 nt, Artificial Sequence
  Description of Artificial Sequence: Synthetic oligonucleotide
  Antisense strand to SEQ ID NO: 1581359
uuugagcagaacgugcagc

SEQ ID NO: 1581361 - RNA, 19 nt, Artificial Sequence
  Description of Artificial Sequence: Synthetic oligonucleotide
  Sense strand starting at position 3316 of SEQ ID NO: 1560173
ugguguugggcaggucaga

SEQ ID NO: 1581362 - RNA, 19 nt, Artificial Sequence
  Description of Artificial Sequence: Synthetic oligonucleotide
  Antisense strand to SEQ ID NO: 1581361
ucugaccugcccaacacca

SEQ ID NO: 1581363 - RNA, 19 nt, Artificial Sequence
  Description of Artificial Sequence: Synthetic oligonucleotide
  Sense strand starting at position 3327 of SEQ ID NO: 1560173
aggucagauccagggcaua

SEQ ID NO: 1581364 - RNA, 19 nt, Artificial Sequence
  Description of Artificial Sequence: Synthetic oligonucleotide
  Antisense strand to SEQ ID NO: 1581363
uaugcccuggaucugaccu

SEQ ID NO: 1581365 - RNA, 19 nt, Artificial Sequence
  Description of Artificial Sequence: Synthetic oligonucleotide
  Sense strand starting at position 3426 of SEQ ID NO: 1560173
gaagaugacugggaaauca

SEQ ID NO: 1581366 - RNA, 19 nt, Artificial Sequence
  Description of Artificial Sequence: Synthetic oligonucleotide
  Antisense strand to SEQ ID NO: 1581365
ugauuucccagucaucuuc

SEQ ID NO: 1581367 - RNA, 19 nt, Artificial Sequence
  Description of Artificial Sequence: Synthetic oligonucleotide
  Sense strand starting at position 3473 of SEQ ID NO: 1560173
agggacagagucugaugua

SEQ ID NO: 1581368 - RNA, 19 nt, Artificial Sequence
  Description of Artificial Sequence: Synthetic oligonucleotide
  Antisense strand to SEQ ID NO: 1581367
uacaucagacucugucccu

SEQ ID NO: 1581369 - RNA, 19 nt, Artificial Sequence
  Description of Artificial Sequence: Synthetic oligonucleotide
  Sense strand starting at position 3476 of SEQ ID NO: 1560173
gacagagucugauguagug

SEQ ID NO: 1581370 - RNA, 19 nt, Artificial Sequence
  Description of Artificial Sequence: Synthetic oligonucleotide
  Antisense strand to SEQ ID NO: 1581369
cacuacaucagacucuguc

SEQ ID NO: 1581371 - RNA, 19 nt, Artificial Sequence
  Description of Artificial Sequence: Synthetic oligonucleotide
  Sense strand starting at position 3485 of SEQ ID NO: 1560173
ugauguagugcccacaaga

SEQ ID NO: 1581372 - RNA, 19 nt, Artificial Sequence
  Description of Artificial Sequence: Synthetic oligonucleotide
  Antisense strand to SEQ ID NO: 1581371
ucuugugggcacuacauca

SEQ ID NO: 1581373 - RNA, 19 nt, Artificial Sequence
  Description of Artificial Sequence: Synthetic oligonucleotide
  Sense strand starting at position 3552 of SEQ ID NO: 1560173
aguguccucaccugaggau

SEQ ID NO: 1581374 - RNA, 19 nt, Artificial Sequence
  Description of Artificial Sequence: Synthetic oligonucleotide
  Antisense strand to SEQ ID NO: 1581373
auccucaggugaggacacu

SEQ ID NO: 1581375 - RNA, 19 nt, Artificial Sequence
  Description of Artificial Sequence: Synthetic oligonucleotide
  Sense strand starting at position 3901 of SEQ ID NO: 1560173
ugguuugcuccugggaauu

SEQ ID NO: 1581376 - RNA, 19 nt, Artificial Sequence
  Description of Artificial Sequence: Synthetic oligonucleotide
  Antisense strand to SEQ ID NO: 1581375
aauucccaggagcaaacca

SEQ ID NO: 1581377 - RNA, 19 nt, Artificial Sequence
  Description of Artificial Sequence: Synthetic oligonucleotide
  Sense strand starting at position 3950 of SEQ ID NO: 1560173
agaugaccagcuugaaguu

SEQ ID NO: 1581378 - RNA, 19 nt, Artificial Sequence
  Description of Artificial Sequence: Synthetic oligonucleotide
  Antisense strand to SEQ ID NO: 1581377
aacuucaagcuggucaucu

SEQ ID NO: 1581379 - RNA, 19 nt, Artificial Sequence
  Description of Artificial Sequence: Synthetic oligonucleotide
  Sense strand starting at position 25 of SEQ ID NO: 1560174
gccucuuggccauagcuua

SEQ ID NO: 1581380 - RNA, 19 nt, Artificial Sequence
  Description of Artificial Sequence: Synthetic oligonucleotide
  Antisense strand to SEQ ID NO: 1581379
uaagcuauggccaagaggc

SEQ ID NO: 1581381 - RNA, 19 nt, Artificial Sequence
  Description of Artificial Sequence: Synthetic oligonucleotide
  Sense strand starting at position 341 of SEQ ID NO: 1560174
gggccagcuuauccuuaua

SEQ ID NO: 1581382 - RNA, 19 nt, Artificial Sequence
  Description of Artificial Sequence: Synthetic oligonucleotide
  Antisense strand to SEQ ID NO: 1581381
uauaaggauaagcuggccc

SEQ ID NO: 1581383 - RNA, 19 nt, Artificial Sequence
  Description of Artificial Sequence: Synthetic oligonucleotide
  Sense strand starting at position 343 of SEQ ID NO: 1560174
gccagcuuauccuuauagu

SEQ ID NO: 1581384 - RNA, 19 nt, Artificial Sequence
  Description of Artificial Sequence: Synthetic oligonucleotide
  Antisense strand to SEQ ID NO: 1581383
acuauaaggauaagcuggc

SEQ ID NO: 1581385 - RNA, 19 nt, Artificial Sequence
  Description of Artificial Sequence: Synthetic oligonucleotide
  Sense strand starting at position 344 of SEQ ID NO: 1560174
ccagcuuauccuuauaguu

SEQ ID NO: 1581386 - RNA, 19 nt, Artificial Sequence
  Description of Artificial Sequence: Synthetic oligonucleotide
  Antisense strand to SEQ ID NO: 1581385
aacuauaaggauaagcugg

SEQ ID NO: 1581387 - RNA, 19 nt, Artificial Sequence
  Description of Artificial Sequence: Synthetic oligonucleotide
  Sense strand starting at position 641 of SEQ ID NO: 1560174
auuacaggucucugagcua

SEQ ID NO: 1581388 - RNA, 19 nt, Artificial Sequence
  Description of Artificial Sequence: Synthetic oligonucleotide
  Antisense strand to SEQ ID NO: 1581387
uagcucagagaccuguaau

SEQ ID NO: 1581389 - RNA, 19 nt, Artificial Sequence
  Description of Artificial Sequence: Synthetic oligonucleotide
  Sense strand starting at position 717 of SEQ ID NO: 1560174
uucugaauugucuggucca

SEQ ID NO: 1581390 - RNA, 19 nt, Artificial Sequence
  Description of Artificial Sequence: Synthetic oligonucleotide
  Antisense strand to SEQ ID NO: 1581389
uggaccagacaauucagaa

SEQ ID NO: 1581391 - RNA, 19 nt, Artificial Sequence
  Description of Artificial Sequence: Synthetic oligonucleotide
  Sense strand starting at position 946 of SEQ ID NO: 1560174
gcugaaagcaccuguguuu

SEQ ID NO: 1581392 - RNA, 19 nt, Artificial Sequence
  Description of Artificial Sequence: Synthetic oligonucleotide
  Antisense strand to SEQ ID NO: 1581391
aaacacaggugcuuucagc

SEQ ID NO: 1581393 - RNA, 19 nt, Artificial Sequence
  Description of Artificial Sequence: Synthetic oligonucleotide
  Sense strand starting at position 992 of SEQ ID NO: 1560174
guuagagccgugccugauu

SEQ ID NO: 1581394 - RNA, 19 nt, Artificial Sequence
  Description of Artificial Sequence: Synthetic oligonucleotide
  Antisense strand to SEQ ID NO: 1581393
aaucaggcacggcucuaac

SEQ ID NO: 1581395 - RNA, 19 nt, Artificial Sequence
  Description of Artificial Sequence: Synthetic oligonucleotide
  Sense strand starting at position 1063 of SEQ ID NO: 1560174
cuucuuaaugucugcaaug

SEQ ID NO: 1581396 - RNA, 19 nt, Artificial Sequence
  Description of Artificial Sequence: Synthetic oligonucleotide
  Antisense strand to SEQ ID NO: 1581395
cauugcagacauuaagaag

SEQ ID NO: 1581397 - RNA, 19 nt, Artificial Sequence
  Description of Artificial Sequence: Synthetic oligonucleotide
  Sense strand starting at position 1064 of SEQ ID NO: 1560174
uucuuaaugucugcaauga

SEQ ID NO: 1581398 - RNA, 19 nt, Artificial Sequence
  Description of Artificial Sequence: Synthetic oligonucleotide
  Antisense strand to SEQ ID NO: 1581397
ucauugcagacauuaagaa

SEQ ID NO: 1581399 - RNA, 19 nt, Artificial Sequence
  Description of Artificial Sequence: Synthetic oligonucleotide
  Sense strand starting at position 1065 of SEQ ID NO: 1560174
ucuuaaugucugcaaugau

SEQ ID NO: 1581400 - RNA, 19 nt, Artificial Sequence
  Description of Artificial Sequence: Synthetic oligonucleotide
  Antisense strand to SEQ ID NO: 1581399
aucauugcagacauuaaga

SEQ ID NO: 1581401 - RNA, 19 nt, Artificial Sequence
  Description of Artificial Sequence: Synthetic oligonucleotide
  Sense strand starting at position 1197 of SEQ ID NO: 1560174
acaauagguccaugauggu

SEQ ID NO: 1581402 - RNA, 19 nt, Artificial Sequence
  Description of Artificial Sequence: Synthetic oligonucleotide
  Antisense strand to SEQ ID NO: 1581401
accaucauggaccuauugu

SEQ ID NO: 1581403 - RNA, 19 nt, Artificial Sequence
  Description of Artificial Sequence: Synthetic oligonucleotide
  Sense strand starting at position 1232 of SEQ ID NO: 1560174
gccugagacagaugugagu

SEQ ID NO: 1581404 - RNA, 19 nt, Artificial Sequence
  Description of Artificial Sequence: Synthetic oligonucleotide
  Antisense strand to SEQ ID NO: 1581403
acucacaucugucucaggc

SEQ ID NO: 1581405 - RNA, 19 nt, Artificial Sequence
  Description of Artificial Sequence: Synthetic oligonucleotide
  Sense strand starting at position 1373 of SEQ ID NO: 1560174
agcugagaacacugggauu

SEQ ID NO: 1581406 - RNA, 19 nt, Artificial Sequence
  Description of Artificial Sequence: Synthetic oligonucleotide
  Antisense strand to SEQ ID NO: 1581405
aaucccaguguucucagcu

SEQ ID NO: 1581407 - RNA, 19 nt, Artificial Sequence
  Description of Artificial Sequence: Synthetic oligonucleotide
  Sense strand starting at position 1375 of SEQ ID NO: 1560174
cugagaacacugggauugu

SEQ ID NO: 1581408 - RNA, 19 nt, Artificial Sequence
  Description of Artificial Sequence: Synthetic oligonucleotide
  Antisense strand to SEQ ID NO: 1581407
acaaucccaguguucucag

SEQ ID NO: 1581409 - RNA, 19 nt, Artificial Sequence
  Description of Artificial Sequence: Synthetic oligonucleotide
  Sense strand starting at position 1480 of SEQ ID NO: 1560174
gaaguuauggcuugcaagu

SEQ ID NO: 1581410 - RNA, 19 nt, Artificial Sequence
  Description of Artificial Sequence: Synthetic oligonucleotide
  Antisense strand to SEQ ID NO: 1581409
acuugcaagccauaacuuc

SEQ ID NO: 1581411 - RNA, 19 nt, Artificial Sequence
  Description of Artificial Sequence: Synthetic oligonucleotide
  Sense strand starting at position 1531 of SEQ ID NO: 1560174
ccuggaguccuugauacga

SEQ ID NO: 1581412 - RNA, 19 nt, Artificial Sequence
  Description of Artificial Sequence: Synthetic oligonucleotide
  Antisense strand to SEQ ID NO: 1581411
ucguaucaaggacuccagg

SEQ ID NO: 1581413 - RNA, 19 nt, Artificial Sequence
  Description of Artificial Sequence: Synthetic oligonucleotide
  Sense strand starting at position 1533 of SEQ ID NO: 1560174
uggaguccuugauacgacu

SEQ ID NO: 1581414 - RNA, 19 nt, Artificial Sequence
  Description of Artificial Sequence: Synthetic oligonucleotide
  Antisense strand to SEQ ID NO: 1581413
agucguaucaaggacucca

SEQ ID NO: 1581415 - RNA, 19 nt, Artificial Sequence
  Description of Artificial Sequence: Synthetic oligonucleotide
  Sense strand starting at position 1666 of SEQ ID NO: 1560174
guaccaagaacaggugaau

SEQ ID NO: 1581416 - RNA, 19 nt, Artificial Sequence
  Description of Artificial Sequence: Synthetic oligonucleotide
  Antisense strand to SEQ ID NO: 1581415
auucaccuguucuugguac

SEQ ID NO: 1581417 - RNA, 19 nt, Artificial Sequence
  Description of Artificial Sequence: Synthetic oligonucleotide
  Sense strand starting at position 1790 of SEQ ID NO: 1560174
uggagauucggucgcacua

SEQ ID NO: 1581418 - RNA, 19 nt, Artificial Sequence
  Description of Artificial Sequence: Synthetic oligonucleotide
  Antisense strand to SEQ ID NO: 1581417
uagugcgaccgaaucucca

SEQ ID NO: 1581419 - RNA, 19 nt, Artificial Sequence
  Description of Artificial Sequence: Synthetic oligonucleotide
  Sense strand starting at position 1803 of SEQ ID NO: 1560174
gcacuauacaccgaggaca

SEQ ID NO: 1581420 - RNA, 19 nt, Artificial Sequence
  Description of Artificial Sequence: Synthetic oligonucleotide
  Antisense strand to SEQ ID NO: 1581419
uguccucgguguauagugc

SEQ ID NO: 1581421 - RNA, 19 nt, Artificial Sequence
  Description of Artificial Sequence: Synthetic oligonucleotide
  Sense strand starting at position 1853 of SEQ ID NO: 1560174
guuggagaccucgauguug

SEQ ID NO: 1581422 - RNA, 19 nt, Artificial Sequence
  Description of Artificial Sequence: Synthetic oligonucleotide
  Antisense strand to SEQ ID NO: 1581421
caacaucgaggucuccaac

SEQ ID NO: 1581423 - RNA, 19 nt, Artificial Sequence
  Description of Artificial Sequence: Synthetic oligonucleotide
  Sense strand starting at position 2090 of SEQ ID NO: 1560174
ccguuuccggauuaaacga

SEQ ID NO: 1581424 - RNA, 19 nt, Artificial Sequence
  Description of Artificial Sequence: Synthetic oligonucleotide
  Antisense strand to SEQ ID NO: 1581423
ucguuuaauccggaaacgg

SEQ ID NO: 1581425 - RNA, 19 nt, Artificial Sequence
  Description of Artificial Sequence: Synthetic oligonucleotide
  Sense strand starting at position 2099 of SEQ ID NO: 1560174
gauuaaacgacgugacgua

SEQ ID NO: 1581426 - RNA, 19 nt, Artificial Sequence
  Description of Artificial Sequence: Synthetic oligonucleotide
  Antisense strand to SEQ ID NO: 1581425
uacgucacgucguuuaauc

SEQ ID NO: 1581427 - RNA, 19 nt, Artificial Sequence
  Description of Artificial Sequence: Synthetic oligonucleotide
  Sense strand starting at position 2228 of SEQ ID NO: 1560174
gcgcguccgaguguuucau

SEQ ID NO: 1581428 - RNA, 19 nt, Artificial Sequence
  Description of Artificial Sequence: Synthetic oligonucleotide
  Antisense strand to SEQ ID NO: 1581427
augaaacacucggacgcgc

SEQ ID NO: 1581429 - RNA, 19 nt, Artificial Sequence
  Description of Artificial Sequence: Synthetic oligonucleotide
  Sense strand starting at position 2321 of SEQ ID NO: 1560174
cagcuuauucgugagaccu

SEQ ID NO: 1581430 - RNA, 19 nt, Artificial Sequence
  Description of Artificial Sequence: Synthetic oligonucleotide
  Antisense strand to SEQ ID NO: 1581429
aggucucacgaauaagcug

SEQ ID NO: 1581431 - RNA, 19 nt, Artificial Sequence
  Description of Artificial Sequence: Synthetic oligonucleotide
  Sense strand starting at position 2329 of SEQ ID NO: 1560174
ucgugagaccuugacuucu

SEQ ID NO: 1581432 - RNA, 19 nt, Artificial Sequence
  Description of Artificial Sequence: Synthetic oligonucleotide
  Antisense strand to SEQ ID NO: 1581431
agaagucaaggucucacga

SEQ ID NO: 1581433 - RNA, 19 nt, Artificial Sequence
  Description of Artificial Sequence: Synthetic oligonucleotide
  Sense strand starting at position 2433 of SEQ ID NO: 1560174
uggcuuguuucuuccacuu

SEQ ID NO: 1581434 - RNA, 19 nt, Artificial Sequence
  Description of Artificial Sequence: Synthetic oligonucleotide
  Antisense strand to SEQ ID NO: 1581433
aaguggaagaaacaagcca

SEQ ID NO: 1581435 - RNA, 19 nt, Artificial Sequence
  Description of Artificial Sequence: Synthetic oligonucleotide
  Sense strand starting at position 2495 of SEQ ID NO: 1560174
cuacgcuucucauccuaga

SEQ ID NO: 1581436 - RNA, 19 nt, Artificial Sequence
  Description of Artificial Sequence: Synthetic oligonucleotide
  Antisense strand to SEQ ID NO: 1581435
ucuaggaugagaagcguag

SEQ ID NO: 1581437 - RNA, 19 nt, Artificial Sequence
  Description of Artificial Sequence: Synthetic oligonucleotide
  Sense strand starting at position 2702 of SEQ ID NO: 1560174
gaggccaugcaguaacauu

SEQ ID NO: 1581438 - RNA, 19 nt, Artificial Sequence
  Description of Artificial Sequence: Synthetic oligonucleotide
  Antisense strand to SEQ ID NO: 1581437
aauguuacugcauggccuc

SEQ ID NO: 1581439 - RNA, 19 nt, Artificial Sequence
  Description of Artificial Sequence: Synthetic oligonucleotide
  Sense strand starting at position 2905 of SEQ ID NO: 1560174
uuaaucacaugguguuaaa

SEQ ID NO: 1581440 - RNA, 19 nt, Artificial Sequence
  Description of Artificial Sequence: Synthetic oligonucleotide
  Antisense strand to SEQ ID NO: 1581439
uuuaacaccaugugauuaa

SEQ ID NO: 1581441 - RNA, 19 nt, Artificial Sequence
  Description of Artificial Sequence: Synthetic oligonucleotide
  Sense strand starting at position 3142 of SEQ ID NO: 1560174
gcugcacguucugcucaaa

SEQ ID NO: 1581442 - RNA, 19 nt, Artificial Sequence
  Description of Artificial Sequence: Synthetic oligonucleotide
  Antisense strand to SEQ ID NO: 1581441
uuugagcagaacgugcagc

SEQ ID NO: 1581443 - RNA, 19 nt, Artificial Sequence
  Description of Artificial Sequence: Synthetic oligonucleotide
  Sense strand starting at position 3369 of SEQ ID NO: 1560174
aguccucucuguggacaga

SEQ ID NO: 1581444 - RNA, 19 nt, Artificial Sequence
  Description of Artificial Sequence: Synthetic oligonucleotide
  Antisense strand to SEQ ID NO: 1581443
ucuguccacagagaggacu

SEQ ID NO: 1581445 - RNA, 19 nt, Artificial Sequence
  Description of Artificial Sequence: Synthetic oligonucleotide
  Sense strand starting at position 3437 of SEQ ID NO: 1560174
ugguguugggcaggucaga

SEQ ID NO: 1581446 - RNA, 19 nt, Artificial Sequence
  Description of Artificial Sequence: Synthetic oligonucleotide
  Antisense strand to SEQ ID NO: 1581445
ucugaccugcccaacacca

SEQ ID NO: 1581447 - RNA, 19 nt, Artificial Sequence
  Description of Artificial Sequence: Synthetic oligonucleotide
  Sense strand starting at position 3448 of SEQ ID NO: 1560174
aggucagauccagggcaua

SEQ ID NO: 1581448 - RNA, 19 nt, Artificial Sequence
  Description of Artificial Sequence: Synthetic oligonucleotide
  Antisense strand to SEQ ID NO: 1581447
uaugcccuggaucugaccu

SEQ ID NO: 1581449 - RNA, 19 nt, Artificial Sequence
  Description of Artificial Sequence: Synthetic oligonucleotide
  Sense strand starting at position 3547 of SEQ ID NO: 1560174
gaagaugacugggaaauca

SEQ ID NO: 1581450 - RNA, 19 nt, Artificial Sequence
  Description of Artificial Sequence: Synthetic oligonucleotide
  Antisense strand to SEQ ID NO: 1581449
ugauuucccagucaucuuc

SEQ ID NO: 1581451 - RNA, 19 nt, Artificial Sequence
  Description of Artificial Sequence: Synthetic oligonucleotide
  Sense strand starting at position 3594 of SEQ ID NO: 1560174
agggacagagucugaugua

SEQ ID NO: 1581452 - RNA, 19 nt, Artificial Sequence
  Description of Artificial Sequence: Synthetic oligonucleotide
  Antisense strand to SEQ ID NO: 1581451
uacaucagacucugucccu

SEQ ID NO: 1581453 - RNA, 19 nt, Artificial Sequence
  Description of Artificial Sequence: Synthetic oligonucleotide
  Sense strand starting at position 3597 of SEQ ID NO: 1560174
gacagagucugauguagug

SEQ ID NO: 1581454 - RNA, 19 nt, Artificial Sequence
  Description of Artificial Sequence: Synthetic oligonucleotide
  Antisense strand to SEQ ID NO: 1581453
cacuacaucagacucuguc

SEQ ID NO: 1581455 - RNA, 19 nt, Artificial Sequence
  Description of Artificial Sequence: Synthetic oligonucleotide
  Sense strand starting at position 3606 of SEQ ID NO: 1560174
ugauguagugcccacaaga

SEQ ID NO: 1581456 - RNA, 19 nt, Artificial Sequence
  Description of Artificial Sequence: Synthetic oligonucleotide
  Antisense strand to SEQ ID NO: 1581455
ucuugugggcacuacauca

SEQ ID NO: 1581457 - RNA, 19 nt, Artificial Sequence
  Description of Artificial Sequence: Synthetic oligonucleotide
  Sense strand starting at position 3673 of SEQ ID NO: 1560174
aguguccucaccugaggau

SEQ ID NO: 1581458 - RNA, 19 nt, Artificial Sequence
  Description of Artificial Sequence: Synthetic oligonucleotide
  Antisense strand to SEQ ID NO: 1581457
auccucaggugaggacacu

SEQ ID NO: 1581459 - RNA, 19 nt, Artificial Sequence
  Description of Artificial Sequence: Synthetic oligonucleotide
  Sense strand starting at position 83 of SEQ ID NO: 1560175
cugaacgcuccugaaugaa

SEQ ID NO: 1581460 - RNA, 19 nt, Artificial Sequence
  Description of Artificial Sequence: Synthetic oligonucleotide
  Antisense strand to SEQ ID NO: 1581459
uucauucaggagcguucag

SEQ ID NO: 1581461 - RNA, 19 nt, Artificial Sequence
  Description of Artificial Sequence: Synthetic oligonucleotide
  Sense strand starting at position 164 of SEQ ID NO: 1560175
ggaugaguguccuuccugu

SEQ ID NO: 1581462 - RNA, 19 nt, Artificial Sequence
  Description of Artificial Sequence: Synthetic oligonucleotide
  Antisense strand to SEQ ID NO: 1581461
acaggaaggacacucaucc

SEQ ID NO: 1581463 - RNA, 19 nt, Artificial Sequence
  Description of Artificial Sequence: Synthetic oligonucleotide
  Sense strand starting at position 355 of SEQ ID NO: 1560175
aaagguuacccaggaaagu

SEQ ID NO: 1581464 - RNA, 19 nt, Artificial Sequence
  Description of Artificial Sequence: Synthetic oligonucleotide
  Antisense strand to SEQ ID NO: 1581463
acuuuccuggguaaccuuu

SEQ ID NO: 1581465 - RNA, 19 nt, Artificial Sequence
  Description of Artificial Sequence: Synthetic oligonucleotide
  Sense strand starting at position 688 of SEQ ID NO: 1560175
cgccuacuucuggguuaaa

SEQ ID NO: 1581466 - RNA, 19 nt, Artificial Sequence
  Description of Artificial Sequence: Synthetic oligonucleotide
  Antisense strand to SEQ ID NO: 1581465
uuuaacccagaaguaggcg

SEQ ID NO: 1581467 - RNA, 19 nt, Artificial Sequence
  Description of Artificial Sequence: Synthetic oligonucleotide
  Sense strand starting at position 784 of SEQ ID NO: 1560175
agacaagauguacgcgaaa

SEQ ID NO: 1581468 - RNA, 19 nt, Artificial Sequence
  Description of Artificial Sequence: Synthetic oligonucleotide
  Antisense strand to SEQ ID NO: 1581467
uuucgcguacaucuugucu

SEQ ID NO: 1581469 - RNA, 19 nt, Artificial Sequence
  Description of Artificial Sequence: Synthetic oligonucleotide
  Sense strand starting at position 786 of SEQ ID NO: 1560175
acaagauguacgcgaaagu

SEQ ID NO: 1581470 - RNA, 19 nt, Artificial Sequence
  Description of Artificial Sequence: Synthetic oligonucleotide
  Antisense strand to SEQ ID NO: 1581469
acuuucgcguacaucuugu

SEQ ID NO: 1581471 - RNA, 19 nt, Artificial Sequence
  Description of Artificial Sequence: Synthetic oligonucleotide
  Sense strand starting at position 787 of SEQ ID NO: 1560175
caagauguacgcgaaaguu

SEQ ID NO: 1581472 - RNA, 19 nt, Artificial Sequence
  Description of Artificial Sequence: Synthetic oligonucleotide
  Antisense strand to SEQ ID NO: 1581471
aacuuucgcguacaucuug

SEQ ID NO: 1581473 - RNA, 19 nt, Artificial Sequence
  Description of Artificial Sequence: Synthetic oligonucleotide
  Sense strand starting at position 2475 of SEQ ID NO: 1560175
cggugaaaggcggaagauu

SEQ ID NO: 1581474 - RNA, 19 nt, Artificial Sequence
  Description of Artificial Sequence: Synthetic oligonucleotide
  Antisense strand to SEQ ID NO: 1581473
aaucuuccgccuuucaccg

SEQ ID NO: 1581475 - RNA, 19 nt, Artificial Sequence
  Description of Artificial Sequence: Synthetic oligonucleotide
  Sense strand starting at position 2484 of SEQ ID NO: 1560175
gcggaagauugauccugag

SEQ ID NO: 1581476 - RNA, 19 nt, Artificial Sequence
  Description of Artificial Sequence: Synthetic oligonucleotide
  Antisense strand to SEQ ID NO: 1581475
cucaggaucaaucuuccgc

SEQ ID NO: 1581477 - RNA, 19 nt, Artificial Sequence
  Description of Artificial Sequence: Synthetic oligonucleotide
  Sense strand starting at position 2487 of SEQ ID NO: 1560175
gaagauugauccugaggaa

SEQ ID NO: 1581478 - RNA, 19 nt, Artificial Sequence
  Description of Artificial Sequence: Synthetic oligonucleotide
  Antisense strand to SEQ ID NO: 1581477
uuccucaggaucaaucuuc

SEQ ID NO: 1581479 - RNA, 19 nt, Artificial Sequence
  Description of Artificial Sequence: Synthetic oligonucleotide
  Sense strand starting at position 2490 of SEQ ID NO: 1560175
gauugauccugaggaagau

SEQ ID NO: 1581480 - RNA, 19 nt, Artificial Sequence
  Description of Artificial Sequence: Synthetic oligonucleotide
  Antisense strand to SEQ ID NO: 1581479
aucuuccucaggaucaauc

SEQ ID NO: 1581481 - RNA, 19 nt, Artificial Sequence
  Description of Artificial Sequence: Synthetic oligonucleotide
  Sense strand starting at position 2499 of SEQ ID NO: 1560175
ugaggaagauucugggaua

SEQ ID NO: 1581482 - RNA, 19 nt, Artificial Sequence
  Description of Artificial Sequence: Synthetic oligonucleotide
  Antisense strand to SEQ ID NO: 1581481
uaucccagaaucuuccuca

SEQ ID NO: 1581483 - RNA, 19 nt, Artificial Sequence
  Description of Artificial Sequence: Synthetic oligonucleotide
  Sense strand starting at position 2500 of SEQ ID NO: 1560175
gaggaagauucugggauau

SEQ ID NO: 1581484 - RNA, 19 nt, Artificial Sequence
  Description of Artificial Sequence: Synthetic oligonucleotide
  Antisense strand to SEQ ID NO: 1581483
auaucccagaaucuuccuc

SEQ ID NO: 1581485 - RNA, 19 nt, Artificial Sequence
  Description of Artificial Sequence: Synthetic oligonucleotide
  Sense strand starting at position 2510 of SEQ ID NO: 1560175
cugggauaucccugggcuu

SEQ ID NO: 1581486 - RNA, 19 nt, Artificial Sequence
  Description of Artificial Sequence: Synthetic oligonucleotide
  Antisense strand to SEQ ID NO: 1581485
aagcccagggauaucccag

SEQ ID NO: 1581487 - RNA, 19 nt, Artificial Sequence
  Description of Artificial Sequence: Synthetic oligonucleotide
  Sense strand starting at position 2525 of SEQ ID NO: 1560175
gcuucagcucgcguggaau

SEQ ID NO: 1581488 - RNA, 19 nt, Artificial Sequence
  Description of Artificial Sequence: Synthetic oligonucleotide
  Antisense strand to SEQ ID NO: 1581487
auuccacgcgagcugaagc

SEQ ID NO: 1581489 - RNA, 19 nt, Artificial Sequence
  Description of Artificial Sequence: Synthetic oligonucleotide
  Sense strand starting at position 2604 of SEQ ID NO: 1560175
ggcucuagauucugcugaa

SEQ ID NO: 1581490 - RNA, 19 nt, Artificial Sequence
  Description of Artificial Sequence: Synthetic oligonucleotide
  Antisense strand to SEQ ID NO: 1581489
uucagcagaaucuagagcc

SEQ ID NO: 1581491 - RNA, 19 nt, Artificial Sequence
  Description of Artificial Sequence: Synthetic oligonucleotide
  Sense strand starting at position 2605 of SEQ ID NO: 1560175
gcucuagauucugcugaaa

SEQ ID NO: 1581492 - RNA, 19 nt, Artificial Sequence
  Description of Artificial Sequence: Synthetic oligonucleotide
  Antisense strand to SEQ ID NO: 1581491
uuucagcagaaucuagagc

SEQ ID NO: 1581493 - RNA, 19 nt, Artificial Sequence
  Description of Artificial Sequence: Synthetic oligonucleotide
  Sense strand starting at position 2607 of SEQ ID NO: 1560175
ucuagauucugcugaaagu

SEQ ID NO: 1581494 - RNA, 19 nt, Artificial Sequence
  Description of Artificial Sequence: Synthetic oligonucleotide
  Antisense strand to SEQ ID NO: 1581493
acuuucagcagaaucuaga

SEQ ID NO: 1581495 - RNA, 19 nt, Artificial Sequence
  Description of Artificial Sequence: Synthetic oligonucleotide
  Sense strand starting at position 2608 of SEQ ID NO: 1560175
cuagauucugcugaaagug

SEQ ID NO: 1581496 - RNA, 19 nt, Artificial Sequence
  Description of Artificial Sequence: Synthetic oligonucleotide
  Antisense strand to SEQ ID NO: 1581495
cacuuucagcagaaucuag

SEQ ID NO: 1581497 - RNA, 19 nt, Artificial Sequence
  Description of Artificial Sequence: Synthetic oligonucleotide
  Sense strand starting at position 2810 of SEQ ID NO: 1560175
ggguccuuguucuuccuaa

SEQ ID NO: 1581498 - RNA, 19 nt, Artificial Sequence
  Description of Artificial Sequence: Synthetic oligonucleotide
  Antisense strand to SEQ ID NO: 1581497
uuaggaagaacaaggaccc

SEQ ID NO: 1581499 - RNA, 19 nt, Artificial Sequence
  Description of Artificial Sequence: Synthetic oligonucleotide
  Sense strand starting at position 2814 of SEQ ID NO: 1560175
ccuuguucuuccuaagaag

SEQ ID NO: 1581500 - RNA, 19 nt, Artificial Sequence
  Description of Artificial Sequence: Synthetic oligonucleotide
  Antisense strand to SEQ ID NO: 1581499
cuucuuaggaagaacaagg

SEQ ID NO: 1581501 - RNA, 19 nt, Artificial Sequence
  Description of Artificial Sequence: Synthetic oligonucleotide
  Sense strand starting at position 2920 of SEQ ID NO: 1560175
gucaccuguuagucuugaa

SEQ ID NO: 1581502 - RNA, 19 nt, Artificial Sequence
  Description of Artificial Sequence: Synthetic oligonucleotide
  Antisense strand to SEQ ID NO: 1581501
uucaagacuaacaggugac

SEQ ID NO: 1581503 - RNA, 19 nt, Artificial Sequence
  Description of Artificial Sequence: Synthetic oligonucleotide
  Sense strand starting at position 2924 of SEQ ID NO: 1560175
ccuguuagucuugaaggga

SEQ ID NO: 1581504 - RNA, 19 nt, Artificial Sequence
  Description of Artificial Sequence: Synthetic oligonucleotide
  Antisense strand to SEQ ID NO: 1581503
ucccuucaagacuaacagg

SEQ ID NO: 1581505 - RNA, 19 nt, Artificial Sequence
  Description of Artificial Sequence: Synthetic oligonucleotide
  Sense strand starting at position 2985 of SEQ ID NO: 1560175
gugaaagacccuuacucuc

SEQ ID NO: 1581506 - RNA, 19 nt, Artificial Sequence
  Description of Artificial Sequence: Synthetic oligonucleotide
  Antisense strand to SEQ ID NO: 1581505
gagaguaagggucuuucac

SEQ ID NO: 1581507 - RNA, 19 nt, Artificial Sequence
  Description of Artificial Sequence: Synthetic oligonucleotide
  Sense strand starting at position 3056 of SEQ ID NO: 1560175
uagagugagugauggaauu

SEQ ID NO: 1581508 - RNA, 19 nt, Artificial Sequence
  Description of Artificial Sequence: Synthetic oligonucleotide
  Antisense strand to SEQ ID NO: 1581507
aauuccaucacucacucua

SEQ ID NO: 1581509 - RNA, 19 nt, Artificial Sequence
  Description of Artificial Sequence: Synthetic oligonucleotide
  Sense strand starting at position 3089 of SEQ ID NO: 1560175
gcccaugggucuugacuga

SEQ ID NO: 1581510 - RNA, 19 nt, Artificial Sequence
  Description of Artificial Sequence: Synthetic oligonucleotide
  Antisense strand to SEQ ID NO: 1581509
ucagucaagacccaugggc

SEQ ID NO: 1581511 - RNA, 19 nt, Artificial Sequence
  Description of Artificial Sequence: Synthetic oligonucleotide
  Sense strand starting at position 3096 of SEQ ID NO: 1560175
ggucuugacugaccagagu

SEQ ID NO: 1581512 - RNA, 19 nt, Artificial Sequence
  Description of Artificial Sequence: Synthetic oligonucleotide
  Antisense strand to SEQ ID NO: 1581511
acucuggucagucaagacc

SEQ ID NO: 1581513 - RNA, 19 nt, Artificial Sequence
  Description of Artificial Sequence: Synthetic oligonucleotide
  Sense strand starting at position 3264 of SEQ ID NO: 1560175
caaagagaucauggucuuc

SEQ ID NO: 1581514 - RNA, 19 nt, Artificial Sequence
  Description of Artificial Sequence: Synthetic oligonucleotide
  Antisense strand to SEQ ID NO: 1581513
gaagaccaugaucucuuug

SEQ ID NO: 1581515 - RNA, 19 nt, Artificial Sequence
  Description of Artificial Sequence: Synthetic oligonucleotide
  Sense strand starting at position 3266 of SEQ ID NO: 1560175
aagagaucauggucuuccu

SEQ ID NO: 1581516 - RNA, 19 nt, Artificial Sequence
  Description of Artificial Sequence: Synthetic oligonucleotide
  Antisense strand to SEQ ID NO: 1581515
aggaagaccaugaucucuu

SEQ ID NO: 1581517 - RNA, 19 nt, Artificial Sequence
  Description of Artificial Sequence: Synthetic oligonucleotide
  Sense strand starting at position 3269 of SEQ ID NO: 1560175
agaucauggucuuccuuua

SEQ ID NO: 1581518 - RNA, 19 nt, Artificial Sequence
  Description of Artificial Sequence: Synthetic oligonucleotide
  Antisense strand to SEQ ID NO: 1581517
uaaaggaagaccaugaucu

SEQ ID NO: 1581519 - RNA, 19 nt, Artificial Sequence
  Description of Artificial Sequence: Synthetic oligonucleotide
  Sense strand starting at position 3312 of SEQ ID NO: 1560175
uuaucacucccguauuaca

SEQ ID NO: 1581520 - RNA, 19 nt, Artificial Sequence
  Description of Artificial Sequence: Synthetic oligonucleotide
  Antisense strand to SEQ ID NO: 1581519
uguaauacgggagugauaa

SEQ ID NO: 1581521 - RNA, 19 nt, Artificial Sequence
  Description of Artificial Sequence: Synthetic oligonucleotide
  Sense strand starting at position 3321 of SEQ ID NO: 1560175
ccguauuacagaugagcga

SEQ ID NO: 1581522 - RNA, 19 nt, Artificial Sequence
  Description of Artificial Sequence: Synthetic oligonucleotide
  Antisense strand to SEQ ID NO: 1581521
ucgcucaucuguaauacgg

SEQ ID NO: 1581523 - RNA, 19 nt, Artificial Sequence
  Description of Artificial Sequence: Synthetic oligonucleotide
  Sense strand starting at position 3322 of SEQ ID NO: 1560175
cguauuacagaugagcgaa

SEQ ID NO: 1581524 - RNA, 19 nt, Artificial Sequence
  Description of Artificial Sequence: Synthetic oligonucleotide
  Antisense strand to SEQ ID NO: 1581523
uucgcucaucuguaauacg

SEQ ID NO: 1581525 - RNA, 19 nt, Artificial Sequence
  Description of Artificial Sequence: Synthetic oligonucleotide
  Sense strand starting at position 3330 of SEQ ID NO: 1560175
agaugagcgaauugagaug

SEQ ID NO: 1581526 - RNA, 19 nt, Artificial Sequence
  Description of Artificial Sequence: Synthetic oligonucleotide
  Antisense strand to SEQ ID NO: 1581525
caucucaauucgcucaucu

SEQ ID NO: 1581527 - RNA, 19 nt, Artificial Sequence
  Description of Artificial Sequence: Synthetic oligonucleotide
  Sense strand starting at position 3386 of SEQ ID NO: 1560175
gagaauggcccagguguga

SEQ ID NO: 1581528 - RNA, 19 nt, Artificial Sequence
  Description of Artificial Sequence: Synthetic oligonucleotide
  Antisense strand to SEQ ID NO: 1581527
ucacaccugggccauucuc

SEQ ID NO: 1581529 - RNA, 19 nt, Artificial Sequence
  Description of Artificial Sequence: Synthetic oligonucleotide
  Sense strand starting at position 3399 of SEQ ID NO: 1560175
gugugaugauuccaaacug

SEQ ID NO: 1581530 - RNA, 19 nt, Artificial Sequence
  Description of Artificial Sequence: Synthetic oligonucleotide
  Antisense strand to SEQ ID NO: 1581529
caguuuggaaucaucacac

SEQ ID NO: 1581531 - RNA, 19 nt, Artificial Sequence
  Description of Artificial Sequence: Synthetic oligonucleotide
  Sense strand starting at position 3450 of SEQ ID NO: 1560175
gacuuuaggcucggaguga

SEQ ID NO: 1581532 - RNA, 19 nt, Artificial Sequence
  Description of Artificial Sequence: Synthetic oligonucleotide
  Antisense strand to SEQ ID NO: 1581531
ucacuccgagccuaaaguc

SEQ ID NO: 1581533 - RNA, 19 nt, Artificial Sequence
  Description of Artificial Sequence: Synthetic oligonucleotide
  Sense strand starting at position 3579 of SEQ ID NO: 1560175
gccucagucaggugcagau

SEQ ID NO: 1581534 - RNA, 19 nt, Artificial Sequence
  Description of Artificial Sequence: Synthetic oligonucleotide
  Antisense strand to SEQ ID NO: 1581533
aucugcaccugacugaggc

SEQ ID NO: 1581535 - RNA, 19 nt, Artificial Sequence
  Description of Artificial Sequence: Synthetic oligonucleotide
  Sense strand starting at position 3623 of SEQ ID NO: 1560175
ggacucaagugucaggaaa

SEQ ID NO: 1581536 - RNA, 19 nt, Artificial Sequence
  Description of Artificial Sequence: Synthetic oligonucleotide
  Antisense strand to SEQ ID NO: 1581535
uuuccugacacuugagucc

SEQ ID NO: 1581537 - RNA, 19 nt, Artificial Sequence
  Description of Artificial Sequence: Synthetic oligonucleotide
  Sense strand starting at position 3883 of SEQ ID NO: 1560175
ugcaguuaggccuggaaca

SEQ ID NO: 1581538 - RNA, 19 nt, Artificial Sequence
  Description of Artificial Sequence: Synthetic oligonucleotide
  Antisense strand to SEQ ID NO: 1581537
uguuccaggccuaacugca

SEQ ID NO: 1581539 - RNA, 19 nt, Artificial Sequence
  Description of Artificial Sequence: Synthetic oligonucleotide
  Sense strand starting at position 95 of SEQ ID NO: 1560176
cugaacgcuccugaaugaa

SEQ ID NO: 1581540 - RNA, 19 nt, Artificial Sequence
  Description of Artificial Sequence: Synthetic oligonucleotide
  Antisense strand to SEQ ID NO: 1581539
uucauucaggagcguucag

SEQ ID NO: 1581541 - RNA, 19 nt, Artificial Sequence
  Description of Artificial Sequence: Synthetic oligonucleotide
  Sense strand starting at position 176 of SEQ ID NO: 1560176
ggaugaguguccuuccugu

SEQ ID NO: 1581542 - RNA, 19 nt, Artificial Sequence
  Description of Artificial Sequence: Synthetic oligonucleotide
  Antisense strand to SEQ ID NO: 1581541
acaggaaggacacucaucc

SEQ ID NO: 1581543 - RNA, 19 nt, Artificial Sequence
  Description of Artificial Sequence: Synthetic oligonucleotide
  Sense strand starting at position 367 of SEQ ID NO: 1560176
aaagguuacccaggaaagu

SEQ ID NO: 1581544 - RNA, 19 nt, Artificial Sequence
  Description of Artificial Sequence: Synthetic oligonucleotide
  Antisense strand to SEQ ID NO: 1581543
acuuuccuggguaaccuuu

SEQ ID NO: 1581545 - RNA, 19 nt, Artificial Sequence
  Description of Artificial Sequence: Synthetic oligonucleotide
  Sense strand starting at position 700 of SEQ ID NO: 1560176
cgccuacuucuggguuaaa

SEQ ID NO: 1581546 - RNA, 19 nt, Artificial Sequence
  Description of Artificial Sequence: Synthetic oligonucleotide
  Antisense strand to SEQ ID NO: 1581545
uuuaacccagaaguaggcg

SEQ ID NO: 1581547 - RNA, 19 nt, Artificial Sequence
  Description of Artificial Sequence: Synthetic oligonucleotide
  Sense strand starting at position 796 of SEQ ID NO: 1560176
agacaagauguacgcgaaa

SEQ ID NO: 1581548 - RNA, 19 nt, Artificial Sequence
  Description of Artificial Sequence: Synthetic oligonucleotide
  Antisense strand to SEQ ID NO: 1581547
uuucgcguacaucuugucu

SEQ ID NO: 1581549 - RNA, 19 nt, Artificial Sequence
  Description of Artificial Sequence: Synthetic oligonucleotide
  Sense strand starting at position 798 of SEQ ID NO: 1560176
acaagauguacgcgaaagu

SEQ ID NO: 1581550 - RNA, 19 nt, Artificial Sequence
  Description of Artificial Sequence: Synthetic oligonucleotide
  Antisense strand to SEQ ID NO: 1581549
acuuucgcguacaucuugu

SEQ ID NO: 1581551 - RNA, 19 nt, Artificial Sequence
  Description of Artificial Sequence: Synthetic oligonucleotide
  Sense strand starting at position 799 of SEQ ID NO: 1560176
caagauguacgcgaaaguu

SEQ ID NO: 1581552 - RNA, 19 nt, Artificial Sequence
  Description of Artificial Sequence: Synthetic oligonucleotide
  Antisense strand to SEQ ID NO: 1581551
aacuuucgcguacaucuug

SEQ ID NO: 1581553 - RNA, 19 nt, Artificial Sequence
  Description of Artificial Sequence: Synthetic oligonucleotide
  Sense strand starting at position 2487 of SEQ ID NO: 1560176
cggugaaaggcggaagauu

SEQ ID NO: 1581554 - RNA, 19 nt, Artificial Sequence
  Description of Artificial Sequence: Synthetic oligonucleotide
  Antisense strand to SEQ ID NO: 1581553
aaucuuccgccuuucaccg

SEQ ID NO: 1581555 - RNA, 19 nt, Artificial Sequence
  Description of Artificial Sequence: Synthetic oligonucleotide
  Sense strand starting at position 2496 of SEQ ID NO: 1560176
gcggaagauugauccugag

SEQ ID NO: 1581556 - RNA, 19 nt, Artificial Sequence
  Description of Artificial Sequence: Synthetic oligonucleotide
  Antisense strand to SEQ ID NO: 1581555
cucaggaucaaucuuccgc

SEQ ID NO: 1581557 - RNA, 19 nt, Artificial Sequence
  Description of Artificial Sequence: Synthetic oligonucleotide
  Sense strand starting at position 2499 of SEQ ID NO: 1560176
gaagauugauccugaggaa

SEQ ID NO: 1581558 - RNA, 19 nt, Artificial Sequence
  Description of Artificial Sequence: Synthetic oligonucleotide
  Antisense strand to SEQ ID NO: 1581557
uuccucaggaucaaucuuc

SEQ ID NO: 1581559 - RNA, 19 nt, Artificial Sequence
  Description of Artificial Sequence: Synthetic oligonucleotide
  Sense strand starting at position 2502 of SEQ ID NO: 1560176
gauugauccugaggaagau

SEQ ID NO: 1581560 - RNA, 19 nt, Artificial Sequence
  Description of Artificial Sequence: Synthetic oligonucleotide
  Antisense strand to SEQ ID NO: 1581559
aucuuccucaggaucaauc

SEQ ID NO: 1581561 - RNA, 19 nt, Artificial Sequence
  Description of Artificial Sequence: Synthetic oligonucleotide
  Sense strand starting at position 2511 of SEQ ID NO: 1560176
ugaggaagauucugggaua

SEQ ID NO: 1581562 - RNA, 19 nt, Artificial Sequence
  Description of Artificial Sequence: Synthetic oligonucleotide
  Antisense strand to SEQ ID NO: 1581561
uaucccagaaucuuccuca

SEQ ID NO: 1581563 - RNA, 19 nt, Artificial Sequence
  Description of Artificial Sequence: Synthetic oligonucleotide
  Sense strand starting at position 2512 of SEQ ID NO: 1560176
gaggaagauucugggauau

SEQ ID NO: 1581564 - RNA, 19 nt, Artificial Sequence
  Description of Artificial Sequence: Synthetic oligonucleotide
  Antisense strand to SEQ ID NO: 1581563
auaucccagaaucuuccuc

SEQ ID NO: 1581565 - RNA, 19 nt, Artificial Sequence
  Description of Artificial Sequence: Synthetic oligonucleotide
  Sense strand starting at position 2522 of SEQ ID NO: 1560176
cugggauaucccugggcuu

SEQ ID NO: 1581566 - RNA, 19 nt, Artificial Sequence
  Description of Artificial Sequence: Synthetic oligonucleotide
  Antisense strand to SEQ ID NO: 1581565
aagcccagggauaucccag

SEQ ID NO: 1581567 - RNA, 19 nt, Artificial Sequence
  Description of Artificial Sequence: Synthetic oligonucleotide
  Sense strand starting at position 2537 of SEQ ID NO: 1560176
gcuucagcucgcguggaau

SEQ ID NO: 1581568 - RNA, 19 nt, Artificial Sequence
  Description of Artificial Sequence: Synthetic oligonucleotide
  Antisense strand to SEQ ID NO: 1581567
auuccacgcgagcugaagc

SEQ ID NO: 1581569 - RNA, 19 nt, Artificial Sequence
  Description of Artificial Sequence: Synthetic oligonucleotide
  Sense strand starting at position 2616 of SEQ ID NO: 1560176
ggcucuagauucugcugaa

SEQ ID NO: 1581570 - RNA, 19 nt, Artificial Sequence
  Description of Artificial Sequence: Synthetic oligonucleotide
  Antisense strand to SEQ ID NO: 1581569
uucagcagaaucuagagcc

SEQ ID NO: 1581571 - RNA, 19 nt, Artificial Sequence
  Description of Artificial Sequence: Synthetic oligonucleotide
  Sense strand starting at position 2617 of SEQ ID NO: 1560176
gcucuagauucugcugaaa

SEQ ID NO: 1581572 - RNA, 19 nt, Artificial Sequence
  Description of Artificial Sequence: Synthetic oligonucleotide
  Antisense strand to SEQ ID NO: 1581571
uuucagcagaaucuagagc

SEQ ID NO: 1581573 - RNA, 19 nt, Artificial Sequence
  Description of Artificial Sequence: Synthetic oligonucleotide
  Sense strand starting at position 2619 of SEQ ID NO: 1560176
ucuagauucugcugaaagu

SEQ ID NO: 1581574 - RNA, 19 nt, Artificial Sequence
  Description of Artificial Sequence: Synthetic oligonucleotide
  Antisense strand to SEQ ID NO: 1581573
acuuucagcagaaucuaga

SEQ ID NO: 1581575 - RNA, 19 nt, Artificial Sequence
  Description of Artificial Sequence: Synthetic oligonucleotide
  Sense strand starting at position 2620 of SEQ ID NO: 1560176
cuagauucugcugaaagug

SEQ ID NO: 1581576 - RNA, 19 nt, Artificial Sequence
  Description of Artificial Sequence: Synthetic oligonucleotide
  Antisense strand to SEQ ID NO: 1581575
cacuuucagcagaaucuag

SEQ ID NO: 1581577 - RNA, 19 nt, Artificial Sequence
  Description of Artificial Sequence: Synthetic oligonucleotide
  Sense strand starting at position 2822 of SEQ ID NO: 1560176
ggguccuuguucuuccuaa

SEQ ID NO: 1581578 - RNA, 19 nt, Artificial Sequence
  Description of Artificial Sequence: Synthetic oligonucleotide
  Antisense strand to SEQ ID NO: 1581577
uuaggaagaacaaggaccc

SEQ ID NO: 1581579 - RNA, 19 nt, Artificial Sequence
  Description of Artificial Sequence: Synthetic oligonucleotide
  Sense strand starting at position 2826 of SEQ ID NO: 1560176
ccuuguucuuccuaagaag

SEQ ID NO: 1581580 - RNA, 19 nt, Artificial Sequence
  Description of Artificial Sequence: Synthetic oligonucleotide
  Antisense strand to SEQ ID NO: 1581579
cuucuuaggaagaacaagg

SEQ ID NO: 1581581 - RNA, 19 nt, Artificial Sequence
  Description of Artificial Sequence: Synthetic oligonucleotide
  Sense strand starting at position 2932 of SEQ ID NO: 1560176
gucaccuguuagucuugaa

SEQ ID NO: 1581582 - RNA, 19 nt, Artificial Sequence
  Description of Artificial Sequence: Synthetic oligonucleotide
  Antisense strand to SEQ ID NO: 1581581
uucaagacuaacaggugac

SEQ ID NO: 1581583 - RNA, 19 nt, Artificial Sequence
  Description of Artificial Sequence: Synthetic oligonucleotide
  Sense strand starting at position 2936 of SEQ ID NO: 1560176
ccuguuagucuugaaggga

SEQ ID NO: 1581584 - RNA, 19 nt, Artificial Sequence
  Description of Artificial Sequence: Synthetic oligonucleotide
  Antisense strand to SEQ ID NO: 1581583
ucccuucaagacuaacagg

SEQ ID NO: 1581585 - RNA, 19 nt, Artificial Sequence
  Description of Artificial Sequence: Synthetic oligonucleotide
  Sense strand starting at position 2997 of SEQ ID NO: 1560176
gugaaagacccuuacucuc

SEQ ID NO: 1581586 - RNA, 19 nt, Artificial Sequence
  Description of Artificial Sequence: Synthetic oligonucleotide
  Antisense strand to SEQ ID NO: 1581585
gagaguaagggucuuucac

SEQ ID NO: 1581587 - RNA, 19 nt, Artificial Sequence
  Description of Artificial Sequence: Synthetic oligonucleotide
  Sense strand starting at position 3068 of SEQ ID NO: 1560176
uagagugagugauggaauu

SEQ ID NO: 1581588 - RNA, 19 nt, Artificial Sequence
  Description of Artificial Sequence: Synthetic oligonucleotide
  Antisense strand to SEQ ID NO: 1581587
aauuccaucacucacucua

SEQ ID NO: 1581589 - RNA, 19 nt, Artificial Sequence
  Description of Artificial Sequence: Synthetic oligonucleotide
  Sense strand starting at position 3101 of SEQ ID NO: 1560176
gcccaugggucuugacuga

SEQ ID NO: 1581590 - RNA, 19 nt, Artificial Sequence
  Description of Artificial Sequence: Synthetic oligonucleotide
  Antisense strand to SEQ ID NO: 1581589
ucagucaagacccaugggc

SEQ ID NO: 1581591 - RNA, 19 nt, Artificial Sequence
  Description of Artificial Sequence: Synthetic oligonucleotide
  Sense strand starting at position 3108 of SEQ ID NO: 1560176
ggucuugacugaccagagu

SEQ ID NO: 1581592 - RNA, 19 nt, Artificial Sequence
  Description of Artificial Sequence: Synthetic oligonucleotide
  Antisense strand to SEQ ID NO: 1581591
acucuggucagucaagacc

SEQ ID NO: 1581593 - RNA, 19 nt, Artificial Sequence
  Description of Artificial Sequence: Synthetic oligonucleotide
  Sense strand starting at position 3276 of SEQ ID NO: 1560176
caaagagaucauggucuuc

SEQ ID NO: 1581594 - RNA, 19 nt, Artificial Sequence
  Description of Artificial Sequence: Synthetic oligonucleotide
  Antisense strand to SEQ ID NO: 1581593
gaagaccaugaucucuuug

SEQ ID NO: 1581595 - RNA, 19 nt, Artificial Sequence
  Description of Artificial Sequence: Synthetic oligonucleotide
  Sense strand starting at position 3278 of SEQ ID NO: 1560176
aagagaucauggucuuccu

SEQ ID NO: 1581596 - RNA, 19 nt, Artificial Sequence
  Description of Artificial Sequence: Synthetic oligonucleotide
  Antisense strand to SEQ ID NO: 1581595
aggaagaccaugaucucuu

SEQ ID NO: 1581597 - RNA, 19 nt, Artificial Sequence
  Description of Artificial Sequence: Synthetic oligonucleotide
  Sense strand starting at position 3281 of SEQ ID NO: 1560176
agaucauggucuuccuuua

SEQ ID NO: 1581598 - RNA, 19 nt, Artificial Sequence
  Description of Artificial Sequence: Synthetic oligonucleotide
  Antisense strand to SEQ ID NO: 1581597
uaaaggaagaccaugaucu

SEQ ID NO: 1581599 - RNA, 19 nt, Artificial Sequence
  Description of Artificial Sequence: Synthetic oligonucleotide
  Sense strand starting at position 3324 of SEQ ID NO: 1560176
uuaucacucccguauuaca

SEQ ID NO: 1581600 - RNA, 19 nt, Artificial Sequence
  Description of Artificial Sequence: Synthetic oligonucleotide
  Antisense strand to SEQ ID NO: 1581599
uguaauacgggagugauaa

SEQ ID NO: 1581601 - RNA, 19 nt, Artificial Sequence
  Description of Artificial Sequence: Synthetic oligonucleotide
  Sense strand starting at position 3333 of SEQ ID NO: 1560176
ccguauuacagaugagcga

SEQ ID NO: 1581602 - RNA, 19 nt, Artificial Sequence
  Description of Artificial Sequence: Synthetic oligonucleotide
  Antisense strand to SEQ ID NO: 1581601
ucgcucaucuguaauacgg

SEQ ID NO: 1581603 - RNA, 19 nt, Artificial Sequence
  Description of Artificial Sequence: Synthetic oligonucleotide
  Sense strand starting at position 3334 of SEQ ID NO: 1560176
cguauuacagaugagcgaa

SEQ ID NO: 1581604 - RNA, 19 nt, Artificial Sequence
  Description of Artificial Sequence: Synthetic oligonucleotide
  Antisense strand to SEQ ID NO: 1581603
uucgcucaucuguaauacg

SEQ ID NO: 1581605 - RNA, 19 nt, Artificial Sequence
  Description of Artificial Sequence: Synthetic oligonucleotide
  Sense strand starting at position 3342 of SEQ ID NO: 1560176
agaugagcgaauugagaug

SEQ ID NO: 1581606 - RNA, 19 nt, Artificial Sequence
  Description of Artificial Sequence: Synthetic oligonucleotide
  Antisense strand to SEQ ID NO: 1581605
caucucaauucgcucaucu

SEQ ID NO: 1581607 - RNA, 19 nt, Artificial Sequence
  Description of Artificial Sequence: Synthetic oligonucleotide
  Sense strand starting at position 3398 of SEQ ID NO: 1560176
gagaauggcccagguguga

SEQ ID NO: 1581608 - RNA, 19 nt, Artificial Sequence
  Description of Artificial Sequence: Synthetic oligonucleotide
  Antisense strand to SEQ ID NO: 1581607
ucacaccugggccauucuc

SEQ ID NO: 1581609 - RNA, 19 nt, Artificial Sequence
  Description of Artificial Sequence: Synthetic oligonucleotide
  Sense strand starting at position 3411 of SEQ ID NO: 1560176
gugugaugauuccaaacug

SEQ ID NO: 1581610 - RNA, 19 nt, Artificial Sequence
  Description of Artificial Sequence: Synthetic oligonucleotide
  Antisense strand to SEQ ID NO: 1581609
caguuuggaaucaucacac

SEQ ID NO: 1581611 - RNA, 19 nt, Artificial Sequence
  Description of Artificial Sequence: Synthetic oligonucleotide
  Sense strand starting at position 3462 of SEQ ID NO: 1560176
gacuuuaggcucggaguga

SEQ ID NO: 1581612 - RNA, 19 nt, Artificial Sequence
  Description of Artificial Sequence: Synthetic oligonucleotide
  Antisense strand to SEQ ID NO: 1581611
ucacuccgagccuaaaguc

SEQ ID NO: 1581613 - RNA, 19 nt, Artificial Sequence
  Description of Artificial Sequence: Synthetic oligonucleotide
  Sense strand starting at position 3591 of SEQ ID NO: 1560176
gccucagucaggugcagau

SEQ ID NO: 1581614 - RNA, 19 nt, Artificial Sequence
  Description of Artificial Sequence: Synthetic oligonucleotide
  Antisense strand to SEQ ID NO: 1581613
aucugcaccugacugaggc

SEQ ID NO: 1581615 - RNA, 19 nt, Artificial Sequence
  Description of Artificial Sequence: Synthetic oligonucleotide
  Sense strand starting at position 3635 of SEQ ID NO: 1560176
ggacucaagugucaggaaa

SEQ ID NO: 1581616 - RNA, 19 nt, Artificial Sequence
  Description of Artificial Sequence: Synthetic oligonucleotide
  Antisense strand to SEQ ID NO: 1581615
uuuccugacacuugagucc

SEQ ID NO: 1581617 - RNA, 19 nt, Artificial Sequence
  Description of Artificial Sequence: Synthetic oligonucleotide
  Sense strand starting at position 3895 of SEQ ID NO: 1560176
ugcaguuaggccuggaaca

SEQ ID NO: 1581618 - RNA, 19 nt, Artificial Sequence
  Description of Artificial Sequence: Synthetic oligonucleotide
  Antisense strand to SEQ ID NO: 1581617
uguuccaggccuaacugca

SEQ ID NO: 1581619 - RNA, 19 nt, Artificial Sequence
  Description of Artificial Sequence: Synthetic oligonucleotide
  Sense strand starting at position 28 of SEQ ID NO: 1560177
gcugcagagugguuacaag

SEQ ID NO: 1581620 - RNA, 19 nt, Artificial Sequence
  Description of Artificial Sequence: Synthetic oligonucleotide
  Antisense strand to SEQ ID NO: 1581619
cuuguaaccacucugcagc

SEQ ID NO: 1581621 - RNA, 19 nt, Artificial Sequence
  Description of Artificial Sequence: Synthetic oligonucleotide
  Sense strand starting at position 637 of SEQ ID NO: 1560177
gaggguggucaccgacaga

SEQ ID NO: 1581622 - RNA, 19 nt, Artificial Sequence
  Description of Artificial Sequence: Synthetic oligonucleotide
  Antisense strand to SEQ ID NO: 1581621
ucugucggugaccacccuc

SEQ ID NO: 1581623 - RNA, 19 nt, Artificial Sequence
  Description of Artificial Sequence: Synthetic oligonucleotide
  Sense strand starting at position 674 of SEQ ID NO: 1560177
gguguagaauccucuauug

SEQ ID NO: 1581624 - RNA, 19 nt, Artificial Sequence
  Description of Artificial Sequence: Synthetic oligonucleotide
  Antisense strand to SEQ ID NO: 1581623
caauagaggauucuacacc

SEQ ID NO: 1581625 - RNA, 19 nt, Artificial Sequence
  Description of Artificial Sequence: Synthetic oligonucleotide
  Sense strand starting at position 676 of SEQ ID NO: 1560177
uguagaauccucuauuguu

SEQ ID NO: 1581626 - RNA, 19 nt, Artificial Sequence
  Description of Artificial Sequence: Synthetic oligonucleotide
  Antisense strand to SEQ ID NO: 1581625
aacaauagaggauucuaca

SEQ ID NO: 1581627 - RNA, 19 nt, Artificial Sequence
  Description of Artificial Sequence: Synthetic oligonucleotide
  Sense strand starting at position 686 of SEQ ID NO: 1560177
ucuauuguuccucggagga

SEQ ID NO: 1581628 - RNA, 19 nt, Artificial Sequence
  Description of Artificial Sequence: Synthetic oligonucleotide
  Antisense strand to SEQ ID NO: 1581627
uccuccgaggaacaauaga

SEQ ID NO: 1581629 - RNA, 19 nt, Artificial Sequence
  Description of Artificial Sequence: Synthetic oligonucleotide
  Sense strand starting at position 743 of SEQ ID NO: 1560177
aggagcugcuggucuaaga

SEQ ID NO: 1581630 - RNA, 19 nt, Artificial Sequence
  Description of Artificial Sequence: Synthetic oligonucleotide
  Antisense strand to SEQ ID NO: 1581629
ucuuagaccagcagcuccu

SEQ ID NO: 1581631 - RNA, 19 nt, Artificial Sequence
  Description of Artificial Sequence: Synthetic oligonucleotide
  Sense strand starting at position 752 of SEQ ID NO: 1560177
uggucuaagagcugucugu

SEQ ID NO: 1581632 - RNA, 19 nt, Artificial Sequence
  Description of Artificial Sequence: Synthetic oligonucleotide
  Antisense strand to SEQ ID NO: 1581631
acagacagcucuuagacca

SEQ ID NO: 1581633 - RNA, 19 nt, Artificial Sequence
  Description of Artificial Sequence: Synthetic oligonucleotide
  Sense strand starting at position 897 of SEQ ID NO: 1560177
gucccauccucaucacaga

SEQ ID NO: 1581634 - RNA, 19 nt, Artificial Sequence
  Description of Artificial Sequence: Synthetic oligonucleotide
  Antisense strand to SEQ ID NO: 1581633
ucugugaugaggaugggac

SEQ ID NO: 1581635 - RNA, 19 nt, Artificial Sequence
  Description of Artificial Sequence: Synthetic oligonucleotide
  Sense strand starting at position 1129 of SEQ ID NO: 1560177
ccugaauggcgucaccaau

SEQ ID NO: 1581636 - RNA, 19 nt, Artificial Sequence
  Description of Artificial Sequence: Synthetic oligonucleotide
  Antisense strand to SEQ ID NO: 1581635
auuggugacgccauucagg

SEQ ID NO: 1581637 - RNA, 19 nt, Artificial Sequence
  Description of Artificial Sequence: Synthetic oligonucleotide
  Sense strand starting at position 1217 of SEQ ID NO: 1560177
ggcgaaggauuccucccau

SEQ ID NO: 1581638 - RNA, 19 nt, Artificial Sequence
  Description of Artificial Sequence: Synthetic oligonucleotide
  Antisense strand to SEQ ID NO: 1581637
augggaggaauccuucgcc

SEQ ID NO: 1581639 - RNA, 19 nt, Artificial Sequence
  Description of Artificial Sequence: Synthetic oligonucleotide
  Sense strand starting at position 1257 of SEQ ID NO: 1560177
aaaugugucucuuugaaga

SEQ ID NO: 1581640 - RNA, 19 nt, Artificial Sequence
  Description of Artificial Sequence: Synthetic oligonucleotide
  Antisense strand to SEQ ID NO: 1581639
ucuucaaagagacacauuu

SEQ ID NO: 1581641 - RNA, 19 nt, Artificial Sequence
  Description of Artificial Sequence: Synthetic oligonucleotide
  Sense strand starting at position 1262 of SEQ ID NO: 1560177
ugucucuuugaagaaauuc

SEQ ID NO: 1581642 - RNA, 19 nt, Artificial Sequence
  Description of Artificial Sequence: Synthetic oligonucleotide
  Antisense strand to SEQ ID NO: 1581641
gaauuucuucaaagagaca

SEQ ID NO: 1581643 - RNA, 19 nt, Artificial Sequence
  Description of Artificial Sequence: Synthetic oligonucleotide
  Sense strand starting at position 2029 of SEQ ID NO: 1560177
ugcaaugcucugcaagguu

SEQ ID NO: 1581644 - RNA, 19 nt, Artificial Sequence
  Description of Artificial Sequence: Synthetic oligonucleotide
  Antisense strand to SEQ ID NO: 1581643
aaccuugcagagcauugca

SEQ ID NO: 1581645 - RNA, 19 nt, Artificial Sequence
  Description of Artificial Sequence: Synthetic oligonucleotide
  Sense strand starting at position 2223 of SEQ ID NO: 1560177
guccgcugcccuguuacaa

SEQ ID NO: 1581646 - RNA, 19 nt, Artificial Sequence
  Description of Artificial Sequence: Synthetic oligonucleotide
  Antisense strand to SEQ ID NO: 1581645
uuguaacagggcagcggac

SEQ ID NO: 1581647 - RNA, 19 nt, Artificial Sequence
  Description of Artificial Sequence: Synthetic oligonucleotide
  Sense strand starting at position 2307 of SEQ ID NO: 1560177
uggagauuaccgggugaau

SEQ ID NO: 1581648 - RNA, 19 nt, Artificial Sequence
  Description of Artificial Sequence: Synthetic oligonucleotide
  Antisense strand to SEQ ID NO: 1581647
auucacccgguaaucucca

SEQ ID NO: 1581649 - RNA, 19 nt, Artificial Sequence
  Description of Artificial Sequence: Synthetic oligonucleotide
  Sense strand starting at position 2309 of SEQ ID NO: 1560177
gagauuaccgggugaauca

SEQ ID NO: 1581650 - RNA, 19 nt, Artificial Sequence
  Description of Artificial Sequence: Synthetic oligonucleotide
  Antisense strand to SEQ ID NO: 1581649
ugauucacccgguaaucuc

SEQ ID NO: 1581651 - RNA, 19 nt, Artificial Sequence
  Description of Artificial Sequence: Synthetic oligonucleotide
  Sense strand starting at position 2527 of SEQ ID NO: 1560177
gggcuucuuacauguugag

SEQ ID NO: 1581652 - RNA, 19 nt, Artificial Sequence
  Description of Artificial Sequence: Synthetic oligonucleotide
  Antisense strand to SEQ ID NO: 1581651
cucaacauguaagaagccc

SEQ ID NO: 1581653 - RNA, 19 nt, Artificial Sequence
  Description of Artificial Sequence: Synthetic oligonucleotide
  Sense strand starting at position 2579 of SEQ ID NO: 1560177
agucauucugcauguaaag

SEQ ID NO: 1581654 - RNA, 19 nt, Artificial Sequence
  Description of Artificial Sequence: Synthetic oligonucleotide
  Antisense strand to SEQ ID NO: 1581653
cuuuacaugcagaaugacu

SEQ ID NO: 1581655 - RNA, 19 nt, Artificial Sequence
  Description of Artificial Sequence: Synthetic oligonucleotide
  Sense strand starting at position 2655 of SEQ ID NO: 1560177
cccgaauucccugaaugug

SEQ ID NO: 1581656 - RNA, 19 nt, Artificial Sequence
  Description of Artificial Sequence: Synthetic oligonucleotide
  Antisense strand to SEQ ID NO: 1581655
cacauucagggaauucggg

SEQ ID NO: 1581657 - RNA, 19 nt, Artificial Sequence
  Description of Artificial Sequence: Synthetic oligonucleotide
  Sense strand starting at position 2658 of SEQ ID NO: 1560177
gaauucccugaauguguga

SEQ ID NO: 1581658 - RNA, 19 nt, Artificial Sequence
  Description of Artificial Sequence: Synthetic oligonucleotide
  Antisense strand to SEQ ID NO: 1581657
ucacacauucagggaauuc

SEQ ID NO: 1581659 - RNA, 19 nt, Artificial Sequence
  Description of Artificial Sequence: Synthetic oligonucleotide
  Sense strand starting at position 2675 of SEQ ID NO: 1560177
gaaccuugguucccugaga

SEQ ID NO: 1581660 - RNA, 19 nt, Artificial Sequence
  Description of Artificial Sequence: Synthetic oligonucleotide
  Antisense strand to SEQ ID NO: 1581659
ucucagggaaccaagguuc

SEQ ID NO: 1581661 - RNA, 19 nt, Artificial Sequence
  Description of Artificial Sequence: Synthetic oligonucleotide
  Sense strand starting at position 2714 of SEQ ID NO: 1560177
cuucccucacugugggaaa

SEQ ID NO: 1581662 - RNA, 19 nt, Artificial Sequence
  Description of Artificial Sequence: Synthetic oligonucleotide
  Antisense strand to SEQ ID NO: 1581661
uuucccacagugagggaag

SEQ ID NO: 1581663 - RNA, 19 nt, Artificial Sequence
  Description of Artificial Sequence: Synthetic oligonucleotide
  Sense strand starting at position 2851 of SEQ ID NO: 1560177
guugaaugagcacgaguua

SEQ ID NO: 1581664 - RNA, 19 nt, Artificial Sequence
  Description of Artificial Sequence: Synthetic oligonucleotide
  Antisense strand to SEQ ID NO: 1581663
uaacucgugcucauucaac

SEQ ID NO: 1581665 - RNA, 19 nt, Artificial Sequence
  Description of Artificial Sequence: Synthetic oligonucleotide
  Sense strand starting at position 2852 of SEQ ID NO: 1560177
uugaaugagcacgaguuaa

SEQ ID NO: 1581666 - RNA, 19 nt, Artificial Sequence
  Description of Artificial Sequence: Synthetic oligonucleotide
  Antisense strand to SEQ ID NO: 1581665
uuaacucgugcucauucaa

SEQ ID NO: 1581667 - RNA, 19 nt, Artificial Sequence
  Description of Artificial Sequence: Synthetic oligonucleotide
  Sense strand starting at position 2856 of SEQ ID NO: 1560177
augagcacgaguuaauaga

SEQ ID NO: 1581668 - RNA, 19 nt, Artificial Sequence
  Description of Artificial Sequence: Synthetic oligonucleotide
  Antisense strand to SEQ ID NO: 1581667
ucuauuaacucgugcucau

SEQ ID NO: 1581669 - RNA, 19 nt, Artificial Sequence
  Description of Artificial Sequence: Synthetic oligonucleotide
  Sense strand starting at position 2863 of SEQ ID NO: 1560177
cgaguuaauagauggaagu

SEQ ID NO: 1581670 - RNA, 19 nt, Artificial Sequence
  Description of Artificial Sequence: Synthetic oligonucleotide
  Antisense strand to SEQ ID NO: 1581669
acuuccaucuauuaacucg

SEQ ID NO: 1581671 - RNA, 19 nt, Artificial Sequence
  Description of Artificial Sequence: Synthetic oligonucleotide
  Sense strand starting at position 2865 of SEQ ID NO: 1560177
aguuaauagauggaagugu

SEQ ID NO: 1581672 - RNA, 19 nt, Artificial Sequence
  Description of Artificial Sequence: Synthetic oligonucleotide
  Antisense strand to SEQ ID NO: 1581671
acacuuccaucuauuaacu

SEQ ID NO: 1581673 - RNA, 19 nt, Artificial Sequence
  Description of Artificial Sequence: Synthetic oligonucleotide
  Sense strand starting at position 2971 of SEQ ID NO: 1560177
cagagcugccuuggaauca

SEQ ID NO: 1581674 - RNA, 19 nt, Artificial Sequence
  Description of Artificial Sequence: Synthetic oligonucleotide
  Antisense strand to SEQ ID NO: 1581673
ugauuccaaggcagcucug

SEQ ID NO: 1581675 - RNA, 19 nt, Artificial Sequence
  Description of Artificial Sequence: Synthetic oligonucleotide
  Sense strand starting at position 3068 of SEQ ID NO: 1560177
agccuuaaagcuugaaaua

SEQ ID NO: 1581676 - RNA, 19 nt, Artificial Sequence
  Description of Artificial Sequence: Synthetic oligonucleotide
  Antisense strand to SEQ ID NO: 1581675
uauuucaagcuuuaaggcu

SEQ ID NO: 1581677 - RNA, 19 nt, Artificial Sequence
  Description of Artificial Sequence: Synthetic oligonucleotide
  Sense strand starting at position 3069 of SEQ ID NO: 1560177
gccuuaaagcuugaaauac

SEQ ID NO: 1581678 - RNA, 19 nt, Artificial Sequence
  Description of Artificial Sequence: Synthetic oligonucleotide
  Antisense strand to SEQ ID NO: 1581677
guauuucaagcuuuaaggc

SEQ ID NO: 1581679 - RNA, 19 nt, Artificial Sequence
  Description of Artificial Sequence: Synthetic oligonucleotide
  Sense strand starting at position 3124 of SEQ ID NO: 1560177
uccucaugucaguaugaca

SEQ ID NO: 1581680 - RNA, 19 nt, Artificial Sequence
  Description of Artificial Sequence: Synthetic oligonucleotide
  Antisense strand to SEQ ID NO: 1581679
ugucauacugacaugagga

SEQ ID NO: 1581681 - RNA, 19 nt, Artificial Sequence
  Description of Artificial Sequence: Synthetic oligonucleotide
  Sense strand starting at position 3129 of SEQ ID NO: 1560177
augucaguaugacagauuu

SEQ ID NO: 1581682 - RNA, 19 nt, Artificial Sequence
  Description of Artificial Sequence: Synthetic oligonucleotide
  Antisense strand to SEQ ID NO: 1581681
aaaucugucauacugacau

SEQ ID NO: 1581683 - RNA, 19 nt, Artificial Sequence
  Description of Artificial Sequence: Synthetic oligonucleotide
  Sense strand starting at position 3190 of SEQ ID NO: 1560177
uguugauucucccucuaca

SEQ ID NO: 1581684 - RNA, 19 nt, Artificial Sequence
  Description of Artificial Sequence: Synthetic oligonucleotide
  Antisense strand to SEQ ID NO: 1581683
uguagagggagaaucaaca

SEQ ID NO: 1581685 - RNA, 19 nt, Artificial Sequence
  Description of Artificial Sequence: Synthetic oligonucleotide
  Sense strand starting at position 3226 of SEQ ID NO: 1560177
aggugcaauguuuacacaa

SEQ ID NO: 1581686 - RNA, 19 nt, Artificial Sequence
  Description of Artificial Sequence: Synthetic oligonucleotide
  Antisense strand to SEQ ID NO: 1581685
uuguguaaacauugcaccu

SEQ ID NO: 1581687 - RNA, 19 nt, Artificial Sequence
  Description of Artificial Sequence: Synthetic oligonucleotide
  Sense strand starting at position 3288 of SEQ ID NO: 1560177
ccugacaugguuuggauau

SEQ ID NO: 1581688 - RNA, 19 nt, Artificial Sequence
  Description of Artificial Sequence: Synthetic oligonucleotide
  Antisense strand to SEQ ID NO: 1581687
auauccaaaccaugucagg

SEQ ID NO: 1581689 - RNA, 19 nt, Artificial Sequence
  Description of Artificial Sequence: Synthetic oligonucleotide
  Sense strand starting at position 3423 of SEQ ID NO: 1560177
ggugaugaguugguucuca

SEQ ID NO: 1581690 - RNA, 19 nt, Artificial Sequence
  Description of Artificial Sequence: Synthetic oligonucleotide
  Antisense strand to SEQ ID NO: 1581689
ugagaaccaacucaucacc

SEQ ID NO: 1581691 - RNA, 19 nt, Artificial Sequence
  Description of Artificial Sequence: Synthetic oligonucleotide
  Sense strand starting at position 3452 of SEQ ID NO: 1560177
gugaaaucugacuguuuaa

SEQ ID NO: 1581692 - RNA, 19 nt, Artificial Sequence
  Description of Artificial Sequence: Synthetic oligonucleotide
  Antisense strand to SEQ ID NO: 1581691
uuaaacagucagauuucac

SEQ ID NO: 1581693 - RNA, 19 nt, Artificial Sequence
  Description of Artificial Sequence: Synthetic oligonucleotide
  Sense strand starting at position 3790 of SEQ ID NO: 1560177
agucaaugauagcaacaca

SEQ ID NO: 1581694 - RNA, 19 nt, Artificial Sequence
  Description of Artificial Sequence: Synthetic oligonucleotide
  Antisense strand to SEQ ID NO: 1581693
uguguugcuaucauugacu

SEQ ID NO: 1581695 - RNA, 19 nt, Artificial Sequence
  Description of Artificial Sequence: Synthetic oligonucleotide
  Sense strand starting at position 3827 of SEQ ID NO: 1560177
ucuugaagccaucauguua

SEQ ID NO: 1581696 - RNA, 19 nt, Artificial Sequence
  Description of Artificial Sequence: Synthetic oligonucleotide
  Antisense strand to SEQ ID NO: 1581695
uaacaugauggcuucaaga

SEQ ID NO: 1581697 - RNA, 19 nt, Artificial Sequence
  Description of Artificial Sequence: Synthetic oligonucleotide
  Sense strand starting at position 3966 of SEQ ID NO: 1560177
ggaacagggaguuguuuaa

SEQ ID NO: 1581698 - RNA, 19 nt, Artificial Sequence
  Description of Artificial Sequence: Synthetic oligonucleotide
  Antisense strand to SEQ ID NO: 1581697
uuaaacaacucccuguucc

SEQ ID NO: 1581699 - RNA, 19 nt, Artificial Sequence
  Description of Artificial Sequence: Synthetic oligonucleotide
  Sense strand starting at position 35 of SEQ ID NO: 1560178
cagggaauacccuggguuu

SEQ ID NO: 1581700 - RNA, 19 nt, Artificial Sequence
  Description of Artificial Sequence: Synthetic oligonucleotide
  Antisense strand to SEQ ID NO: 1581699
aaacccaggguauucccug

SEQ ID NO: 1581701 - RNA, 19 nt, Artificial Sequence
  Description of Artificial Sequence: Synthetic oligonucleotide
  Sense strand starting at position 36 of SEQ ID NO: 1560178
agggaauacccuggguuua

SEQ ID NO: 1581702 - RNA, 19 nt, Artificial Sequence
  Description of Artificial Sequence: Synthetic oligonucleotide
  Antisense strand to SEQ ID NO: 1581701
uaaacccaggguauucccu

SEQ ID NO: 1581703 - RNA, 19 nt, Artificial Sequence
  Description of Artificial Sequence: Synthetic oligonucleotide
  Sense strand starting at position 93 of SEQ ID NO: 1560178
cucucugugccuugguuau

SEQ ID NO: 1581704 - RNA, 19 nt, Artificial Sequence
  Description of Artificial Sequence: Synthetic oligonucleotide
  Antisense strand to SEQ ID NO: 1581703
auaaccaaggcacagagag

SEQ ID NO: 1581705 - RNA, 19 nt, Artificial Sequence
  Description of Artificial Sequence: Synthetic oligonucleotide
  Sense strand starting at position 105 of SEQ ID NO: 1560178
ugguuauucuaucugauaa

SEQ ID NO: 1581706 - RNA, 19 nt, Artificial Sequence
  Description of Artificial Sequence: Synthetic oligonucleotide
  Antisense strand to SEQ ID NO: 1581705
uuaucagauagaauaacca

SEQ ID NO: 1581707 - RNA, 19 nt, Artificial Sequence
  Description of Artificial Sequence: Synthetic oligonucleotide
  Sense strand starting at position 112 of SEQ ID NO: 1560178
ucuaucugauaagcaagaa

SEQ ID NO: 1581708 - RNA, 19 nt, Artificial Sequence
  Description of Artificial Sequence: Synthetic oligonucleotide
  Antisense strand to SEQ ID NO: 1581707
uucuugcuuaucagauaga

SEQ ID NO: 1581709 - RNA, 19 nt, Artificial Sequence
  Description of Artificial Sequence: Synthetic oligonucleotide
  Sense strand starting at position 307 of SEQ ID NO: 1560178
agguguggccaucaauaau

SEQ ID NO: 1581710 - RNA, 19 nt, Artificial Sequence
  Description of Artificial Sequence: Synthetic oligonucleotide
  Antisense strand to SEQ ID NO: 1581709
auuauugauggccacaccu

SEQ ID NO: 1581711 - RNA, 19 nt, Artificial Sequence
  Description of Artificial Sequence: Synthetic oligonucleotide
  Sense strand starting at position 320 of SEQ ID NO: 1560178
aauaauggauguccuguua

SEQ ID NO: 1581712 - RNA, 19 nt, Artificial Sequence
  Description of Artificial Sequence: Synthetic oligonucleotide
  Antisense strand to SEQ ID NO: 1581711
uaacaggacauccauuauu

SEQ ID NO: 1581713 - RNA, 19 nt, Artificial Sequence
  Description of Artificial Sequence: Synthetic oligonucleotide
  Sense strand starting at position 452 of SEQ ID NO: 1560178
agugaugaugugggauacu

SEQ ID NO: 1581714 - RNA, 19 nt, Artificial Sequence
  Description of Artificial Sequence: Synthetic oligonucleotide
  Antisense strand to SEQ ID NO: 1581713
aguaucccacaucaucacu

SEQ ID NO: 1581715 - RNA, 19 nt, Artificial Sequence
  Description of Artificial Sequence: Synthetic oligonucleotide
  Sense strand starting at position 614 of SEQ ID NO: 1560178
ucaggagaaucuuuaucuu

SEQ ID NO: 1581716 - RNA, 19 nt, Artificial Sequence
  Description of Artificial Sequence: Synthetic oligonucleotide
  Antisense strand to SEQ ID NO: 1581715
aagauaaagauucuccuga

SEQ ID NO: 1581717 - RNA, 19 nt, Artificial Sequence
  Description of Artificial Sequence: Synthetic oligonucleotide
  Sense strand starting at position 932 of SEQ ID NO: 1560178
aggagaaucuuucuaacgu

SEQ ID NO: 1581718 - RNA, 19 nt, Artificial Sequence
  Description of Artificial Sequence: Synthetic oligonucleotide
  Antisense strand to SEQ ID NO: 1581717
acguuagaaagauucuccu

SEQ ID NO: 1581719 - RNA, 19 nt, Artificial Sequence
  Description of Artificial Sequence: Synthetic oligonucleotide
  Sense strand starting at position 933 of SEQ ID NO: 1560178
ggagaaucuuucuaacgug

SEQ ID NO: 1581720 - RNA, 19 nt, Artificial Sequence
  Description of Artificial Sequence: Synthetic oligonucleotide
  Antisense strand to SEQ ID NO: 1581719
cacguuagaaagauucucc

SEQ ID NO: 1581721 - RNA, 19 nt, Artificial Sequence
  Description of Artificial Sequence: Synthetic oligonucleotide
  Sense strand starting at position 1050 of SEQ ID NO: 1560178
agaugugacuugucagcuu

SEQ ID NO: 1581722 - RNA, 19 nt, Artificial Sequence
  Description of Artificial Sequence: Synthetic oligonucleotide
  Antisense strand to SEQ ID NO: 1581721
aagcugacaagucacaucu

SEQ ID NO: 1581723 - RNA, 19 nt, Artificial Sequence
  Description of Artificial Sequence: Synthetic oligonucleotide
  Sense strand starting at position 1134 of SEQ ID NO: 1560178
ggaaauaccaguugggcau

SEQ ID NO: 1581724 - RNA, 19 nt, Artificial Sequence
  Description of Artificial Sequence: Synthetic oligonucleotide
  Antisense strand to SEQ ID NO: 1581723
augcccaacugguauuucc

SEQ ID NO: 1581725 - RNA, 19 nt, Artificial Sequence
  Description of Artificial Sequence: Synthetic oligonucleotide
  Sense strand starting at position 1205 of SEQ ID NO: 1560178
gcuugagcccaaggguuua

SEQ ID NO: 1581726 - RNA, 19 nt, Artificial Sequence
  Description of Artificial Sequence: Synthetic oligonucleotide
  Antisense strand to SEQ ID NO: 1581725
uaaacccuugggcucaagc

SEQ ID NO: 1581727 - RNA, 19 nt, Artificial Sequence
  Description of Artificial Sequence: Synthetic oligonucleotide
  Sense strand starting at position 1340 of SEQ ID NO: 1560178
ucaccugaccuugggagau

SEQ ID NO: 1581728 - RNA, 19 nt, Artificial Sequence
  Description of Artificial Sequence: Synthetic oligonucleotide
  Antisense strand to SEQ ID NO: 1581727
aucucccaaggucagguga

SEQ ID NO: 1581729 - RNA, 19 nt, Artificial Sequence
  Description of Artificial Sequence: Synthetic oligonucleotide
  Sense strand starting at position 1641 of SEQ ID NO: 1560178
ugaucuccuuccuugugaa

SEQ ID NO: 1581730 - RNA, 19 nt, Artificial Sequence
  Description of Artificial Sequence: Synthetic oligonucleotide
  Antisense strand to SEQ ID NO: 1581729
uucacaaggaaggagauca

SEQ ID NO: 1581731 - RNA, 19 nt, Artificial Sequence
  Description of Artificial Sequence: Synthetic oligonucleotide
  Sense strand starting at position 1850 of SEQ ID NO: 1560178
cggaaccaaaguugucaaa

SEQ ID NO: 1581732 - RNA, 19 nt, Artificial Sequence
  Description of Artificial Sequence: Synthetic oligonucleotide
  Antisense strand to SEQ ID NO: 1581731
uuugacaacuuugguuccg

SEQ ID NO: 1581733 - RNA, 19 nt, Artificial Sequence
  Description of Artificial Sequence: Synthetic oligonucleotide
  Sense strand starting at position 1911 of SEQ ID NO: 1560178
ccagcugcucgugugugaa

SEQ ID NO: 1581734 - RNA, 19 nt, Artificial Sequence
  Description of Artificial Sequence: Synthetic oligonucleotide
  Antisense strand to SEQ ID NO: 1581733
uucacacacgagcagcugg

SEQ ID NO: 1581735 - RNA, 19 nt, Artificial Sequence
  Description of Artificial Sequence: Synthetic oligonucleotide
  Sense strand starting at position 1913 of SEQ ID NO: 1560178
agcugcucgugugugaaga

SEQ ID NO: 1581736 - RNA, 19 nt, Artificial Sequence
  Description of Artificial Sequence: Synthetic oligonucleotide
  Antisense strand to SEQ ID NO: 1581735
ucuucacacacgagcagcu

SEQ ID NO: 1581737 - RNA, 19 nt, Artificial Sequence
  Description of Artificial Sequence: Synthetic oligonucleotide
  Sense strand starting at position 1926 of SEQ ID NO: 1560178
ugaagacugucugcuuguu

SEQ ID NO: 1581738 - RNA, 19 nt, Artificial Sequence
  Description of Artificial Sequence: Synthetic oligonucleotide
  Antisense strand to SEQ ID NO: 1581737
aacaagcagacagucuuca

SEQ ID NO: 1581739 - RNA, 19 nt, Artificial Sequence
  Description of Artificial Sequence: Synthetic oligonucleotide
  Sense strand starting at position 2036 of SEQ ID NO: 1560178
accagugucugggcaaauc

SEQ ID NO: 1581740 - RNA, 19 nt, Artificial Sequence
  Description of Artificial Sequence: Synthetic oligonucleotide
  Antisense strand to SEQ ID NO: 1581739
gauuugcccagacacuggu

SEQ ID NO: 1581741 - RNA, 19 nt, Artificial Sequence
  Description of Artificial Sequence: Synthetic oligonucleotide
  Sense strand starting at position 2096 of SEQ ID NO: 1560178
ccugcuugaugagacucaa

SEQ ID NO: 1581742 - RNA, 19 nt, Artificial Sequence
  Description of Artificial Sequence: Synthetic oligonucleotide
  Antisense strand to SEQ ID NO: 1581741
uugagucucaucaagcagg

SEQ ID NO: 1581743 - RNA, 19 nt, Artificial Sequence
  Description of Artificial Sequence: Synthetic oligonucleotide
  Sense strand starting at position 2145 of SEQ ID NO: 1560178
gaauguguccauggguaag

SEQ ID NO: 1581744 - RNA, 19 nt, Artificial Sequence
  Description of Artificial Sequence: Synthetic oligonucleotide
  Antisense strand to SEQ ID NO: 1581743
cuuacccauggacacauuc

SEQ ID NO: 1581745 - RNA, 19 nt, Artificial Sequence
  Description of Artificial Sequence: Synthetic oligonucleotide
  Sense strand starting at position 2337 of SEQ ID NO: 1560178
gggcaagucaccugacuuc

SEQ ID NO: 1581746 - RNA, 19 nt, Artificial Sequence
  Description of Artificial Sequence: Synthetic oligonucleotide
  Antisense strand to SEQ ID NO: 1581745
gaagucaggugacuugccc

SEQ ID NO: 1581747 - RNA, 19 nt, Artificial Sequence
  Description of Artificial Sequence: Synthetic oligonucleotide
  Sense strand starting at position 2409 of SEQ ID NO: 1560178
uucucaggaucugagauuu

SEQ ID NO: 1581748 - RNA, 19 nt, Artificial Sequence
  Description of Artificial Sequence: Synthetic oligonucleotide
  Antisense strand to SEQ ID NO: 1581747
aaaucucagauccugagaa

SEQ ID NO: 1581749 - RNA, 19 nt, Artificial Sequence
  Description of Artificial Sequence: Synthetic oligonucleotide
  Sense strand starting at position 2583 of SEQ ID NO: 1560178
uuagcuuggcauugugaca

SEQ ID NO: 1581750 - RNA, 19 nt, Artificial Sequence
  Description of Artificial Sequence: Synthetic oligonucleotide
  Antisense strand to SEQ ID NO: 1581749
ugucacaaugccaagcuaa

SEQ ID NO: 1581751 - RNA, 19 nt, Artificial Sequence
  Description of Artificial Sequence: Synthetic oligonucleotide
  Sense strand starting at position 2990 of SEQ ID NO: 1560178
gcaucacugcauugggaac

SEQ ID NO: 1581752 - RNA, 19 nt, Artificial Sequence
  Description of Artificial Sequence: Synthetic oligonucleotide
  Antisense strand to SEQ ID NO: 1581751
guucccaaugcagugaugc

SEQ ID NO: 1581753 - RNA, 19 nt, Artificial Sequence
  Description of Artificial Sequence: Synthetic oligonucleotide
  Sense strand starting at position 3004 of SEQ ID NO: 1560178
ggaacauaauggugaacaa

SEQ ID NO: 1581754 - RNA, 19 nt, Artificial Sequence
  Description of Artificial Sequence: Synthetic oligonucleotide
  Antisense strand to SEQ ID NO: 1581753
uuguucaccauuauguucc

SEQ ID NO: 1581755 - RNA, 19 nt, Artificial Sequence
  Description of Artificial Sequence: Synthetic oligonucleotide
  Sense strand starting at position 3043 of SEQ ID NO: 1560178
gugcauugacauuauuauu

SEQ ID NO: 1581756 - RNA, 19 nt, Artificial Sequence
  Description of Artificial Sequence: Synthetic oligonucleotide
  Antisense strand to SEQ ID NO: 1581755
aauaauaaugucaaugcac

SEQ ID NO: 1581757 - RNA, 19 nt, Artificial Sequence
  Description of Artificial Sequence: Synthetic oligonucleotide
  Sense strand starting at position 3531 of SEQ ID NO: 1560178
gcccaaagggcagaucuaa

SEQ ID NO: 1581758 - RNA, 19 nt, Artificial Sequence
  Description of Artificial Sequence: Synthetic oligonucleotide
  Antisense strand to SEQ ID NO: 1581757
uuagaucugcccuuugggc

SEQ ID NO: 1581759 - RNA, 19 nt, Artificial Sequence
  Description of Artificial Sequence: Synthetic oligonucleotide
  Sense strand starting at position 3580 of SEQ ID NO: 1560178
gaauccucuuggguggaga

SEQ ID NO: 1581760 - RNA, 19 nt, Artificial Sequence
  Description of Artificial Sequence: Synthetic oligonucleotide
  Antisense strand to SEQ ID NO: 1581759
ucuccacccaagaggauuc

SEQ ID NO: 1581761 - RNA, 19 nt, Artificial Sequence
  Description of Artificial Sequence: Synthetic oligonucleotide
  Sense strand starting at position 3581 of SEQ ID NO: 1560178
aauccucuuggguggagaa

SEQ ID NO: 1581762 - RNA, 19 nt, Artificial Sequence
  Description of Artificial Sequence: Synthetic oligonucleotide
  Antisense strand to SEQ ID NO: 1581761
uucuccacccaagaggauu

SEQ ID NO: 1581763 - RNA, 19 nt, Artificial Sequence
  Description of Artificial Sequence: Synthetic oligonucleotide
  Sense strand starting at position 3582 of SEQ ID NO: 1560178
auccucuuggguggagaau

SEQ ID NO: 1581764 - RNA, 19 nt, Artificial Sequence
  Description of Artificial Sequence: Synthetic oligonucleotide
  Antisense strand to SEQ ID NO: 1581763
auucuccacccaagaggau

SEQ ID NO: 1581765 - RNA, 19 nt, Artificial Sequence
  Description of Artificial Sequence: Synthetic oligonucleotide
  Sense strand starting at position 3593 of SEQ ID NO: 1560178
uggagaaucugagagucua

SEQ ID NO: 1581766 - RNA, 19 nt, Artificial Sequence
  Description of Artificial Sequence: Synthetic oligonucleotide
  Antisense strand to SEQ ID NO: 1581765
uagacucucagauucucca

SEQ ID NO: 1581767 - RNA, 19 nt, Artificial Sequence
  Description of Artificial Sequence: Synthetic oligonucleotide
  Sense strand starting at position 3647 of SEQ ID NO: 1560178
uugggucucaccuguguuu

SEQ ID NO: 1581768 - RNA, 19 nt, Artificial Sequence
  Description of Artificial Sequence: Synthetic oligonucleotide
  Antisense strand to SEQ ID NO: 1581767
aaacacaggugagacccaa

SEQ ID NO: 1581769 - RNA, 19 nt, Artificial Sequence
  Description of Artificial Sequence: Synthetic oligonucleotide
  Sense strand starting at position 3737 of SEQ ID NO: 1560178
ugccaaaucugugcaguca

SEQ ID NO: 1581770 - RNA, 19 nt, Artificial Sequence
  Description of Artificial Sequence: Synthetic oligonucleotide
  Antisense strand to SEQ ID NO: 1581769
ugacugcacagauuuggca

SEQ ID NO: 1581771 - RNA, 19 nt, Artificial Sequence
  Description of Artificial Sequence: Synthetic oligonucleotide
  Sense strand starting at position 3738 of SEQ ID NO: 1560178
gccaaaucugugcagucau

SEQ ID NO: 1581772 - RNA, 19 nt, Artificial Sequence
  Description of Artificial Sequence: Synthetic oligonucleotide
  Antisense strand to SEQ ID NO: 1581771
augacugcacagauuuggc

SEQ ID NO: 1581773 - RNA, 19 nt, Artificial Sequence
  Description of Artificial Sequence: Synthetic oligonucleotide
  Sense strand starting at position 3772 of SEQ ID NO: 1560178
ccugaucaggcuugaaaga

SEQ ID NO: 1581774 - RNA, 19 nt, Artificial Sequence
  Description of Artificial Sequence: Synthetic oligonucleotide
  Antisense strand to SEQ ID NO: 1581773
ucuuucaagccugaucagg

SEQ ID NO: 1581775 - RNA, 19 nt, Artificial Sequence
  Description of Artificial Sequence: Synthetic oligonucleotide
  Sense strand starting at position 3847 of SEQ ID NO: 1560178
gcuggagagcagugauaca

SEQ ID NO: 1581776 - RNA, 19 nt, Artificial Sequence
  Description of Artificial Sequence: Synthetic oligonucleotide
  Antisense strand to SEQ ID NO: 1581775
uguaucacugcucuccagc

SEQ ID NO: 1581777 - RNA, 19 nt, Artificial Sequence
  Description of Artificial Sequence: Synthetic oligonucleotide
  Sense strand starting at position 3972 of SEQ ID NO: 1560178
ggagacagggucugucuau

SEQ ID NO: 1581778 - RNA, 19 nt, Artificial Sequence
  Description of Artificial Sequence: Synthetic oligonucleotide
  Antisense strand to SEQ ID NO: 1581777
auagacagacccugucucc

SEQ ID NO: 1581779 - RNA, 19 nt, Artificial Sequence
  Description of Artificial Sequence: Synthetic oligonucleotide
  Sense strand starting at position 25 of SEQ ID NO: 1560179
cuuggacucguccaugcaa

SEQ ID NO: 1581780 - RNA, 19 nt, Artificial Sequence
  Description of Artificial Sequence: Synthetic oligonucleotide
  Antisense strand to SEQ ID NO: 1581779
uugcauggacgaguccaag

SEQ ID NO: 1581781 - RNA, 19 nt, Artificial Sequence
  Description of Artificial Sequence: Synthetic oligonucleotide
  Sense strand starting at position 39 of SEQ ID NO: 1560179
ugcaacgucacucaggaaa

SEQ ID NO: 1581782 - RNA, 19 nt, Artificial Sequence
  Description of Artificial Sequence: Synthetic oligonucleotide
  Antisense strand to SEQ ID NO: 1581781
uuuccugagugacguugca

SEQ ID NO: 1581783 - RNA, 19 nt, Artificial Sequence
  Description of Artificial Sequence: Synthetic oligonucleotide
  Sense strand starting at position 66 of SEQ ID NO: 1560179
ccugaaagguuucuagauu

SEQ ID NO: 1581784 - RNA, 19 nt, Artificial Sequence
  Description of Artificial Sequence: Synthetic oligonucleotide
  Antisense strand to SEQ ID NO: 1581783
aaucuagaaaccuuucagg

SEQ ID NO: 1581785 - RNA, 19 nt, Artificial Sequence
  Description of Artificial Sequence: Synthetic oligonucleotide
  Sense strand starting at position 67 of SEQ ID NO: 1560179
cugaaagguuucuagauuu

SEQ ID NO: 1581786 - RNA, 19 nt, Artificial Sequence
  Description of Artificial Sequence: Synthetic oligonucleotide
  Antisense strand to SEQ ID NO: 1581785
aaaucuagaaaccuuucag

SEQ ID NO: 1581787 - RNA, 19 nt, Artificial Sequence
  Description of Artificial Sequence: Synthetic oligonucleotide
  Sense strand starting at position 188 of SEQ ID NO: 1560179
acgauuugcuccugccaca

SEQ ID NO: 1581788 - RNA, 19 nt, Artificial Sequence
  Description of Artificial Sequence: Synthetic oligonucleotide
  Antisense strand to SEQ ID NO: 1581787
uguggcaggagcaaaucgu

SEQ ID NO: 1581789 - RNA, 19 nt, Artificial Sequence
  Description of Artificial Sequence: Synthetic oligonucleotide
  Sense strand starting at position 607 of SEQ ID NO: 1560179
ucggcuuaucuguagucca

SEQ ID NO: 1581790 - RNA, 19 nt, Artificial Sequence
  Description of Artificial Sequence: Synthetic oligonucleotide
  Antisense strand to SEQ ID NO: 1581789
uggacuacagauaagccga

SEQ ID NO: 1581791 - RNA, 19 nt, Artificial Sequence
  Description of Artificial Sequence: Synthetic oligonucleotide
  Sense strand starting at position 660 of SEQ ID NO: 1560179
gugguaaacuccuuggaag

SEQ ID NO: 1581792 - RNA, 19 nt, Artificial Sequence
  Description of Artificial Sequence: Synthetic oligonucleotide
  Antisense strand to SEQ ID NO: 1581791
cuuccaaggaguuuaccac

SEQ ID NO: 1581793 - RNA, 19 nt, Artificial Sequence
  Description of Artificial Sequence: Synthetic oligonucleotide
  Sense strand starting at position 661 of SEQ ID NO: 1560179
ugguaaacuccuuggaaga

SEQ ID NO: 1581794 - RNA, 19 nt, Artificial Sequence
  Description of Artificial Sequence: Synthetic oligonucleotide
  Antisense strand to SEQ ID NO: 1581793
ucuuccaaggaguuuacca

SEQ ID NO: 1581795 - RNA, 19 nt, Artificial Sequence
  Description of Artificial Sequence: Synthetic oligonucleotide
  Sense strand starting at position 663 of SEQ ID NO: 1560179
guaaacuccuuggaagaaa

SEQ ID NO: 1581796 - RNA, 19 nt, Artificial Sequence
  Description of Artificial Sequence: Synthetic oligonucleotide
  Antisense strand to SEQ ID NO: 1581795
uuucuuccaaggaguuuac

SEQ ID NO: 1581797 - RNA, 19 nt, Artificial Sequence
  Description of Artificial Sequence: Synthetic oligonucleotide
  Sense strand starting at position 702 of SEQ ID NO: 1560179
aagagagaauuguaacaag

SEQ ID NO: 1581798 - RNA, 19 nt, Artificial Sequence
  Description of Artificial Sequence: Synthetic oligonucleotide
  Antisense strand to SEQ ID NO: 1581797
cuuguuacaauucucucuu

SEQ ID NO: 1581799 - RNA, 19 nt, Artificial Sequence
  Description of Artificial Sequence: Synthetic oligonucleotide
  Sense strand starting at position 705 of SEQ ID NO: 1560179
agagaauuguaacaagucu

SEQ ID NO: 1581800 - RNA, 19 nt, Artificial Sequence
  Description of Artificial Sequence: Synthetic oligonucleotide
  Antisense strand to SEQ ID NO: 1581799
agacuuguuacaauucucu

SEQ ID NO: 1581801 - RNA, 19 nt, Artificial Sequence
  Description of Artificial Sequence: Synthetic oligonucleotide
  Sense strand starting at position 716 of SEQ ID NO: 1560179
acaagucucuacccagaga

SEQ ID NO: 1581802 - RNA, 19 nt, Artificial Sequence
  Description of Artificial Sequence: Synthetic oligonucleotide
  Antisense strand to SEQ ID NO: 1581801
ucucuggguagagacuugu

SEQ ID NO: 1581803 - RNA, 19 nt, Artificial Sequence
  Description of Artificial Sequence: Synthetic oligonucleotide
  Sense strand starting at position 737 of SEQ ID NO: 1560179
gcacaagugccagguguuu

SEQ ID NO: 1581804 - RNA, 19 nt, Artificial Sequence
  Description of Artificial Sequence: Synthetic oligonucleotide
  Antisense strand to SEQ ID NO: 1581803
aaacaccuggcacuugugc

SEQ ID NO: 1581805 - RNA, 19 nt, Artificial Sequence
  Description of Artificial Sequence: Synthetic oligonucleotide
  Sense strand starting at position 746 of SEQ ID NO: 1560179
ccagguguuuccuugagga

SEQ ID NO: 1581806 - RNA, 19 nt, Artificial Sequence
  Description of Artificial Sequence: Synthetic oligonucleotide
  Antisense strand to SEQ ID NO: 1581805
uccucaaggaaacaccugg

SEQ ID NO: 1581807 - RNA, 19 nt, Artificial Sequence
  Description of Artificial Sequence: Synthetic oligonucleotide
  Sense strand starting at position 748 of SEQ ID NO: 1560179
agguguuuccuugaggaua

SEQ ID NO: 1581808 - RNA, 19 nt, Artificial Sequence
  Description of Artificial Sequence: Synthetic oligonucleotide
  Antisense strand to SEQ ID NO: 1581807
uauccucaaggaaacaccu

SEQ ID NO: 1581809 - RNA, 19 nt, Artificial Sequence
  Description of Artificial Sequence: Synthetic oligonucleotide
  Sense strand starting at position 750 of SEQ ID NO: 1560179
guguuuccuugaggauaug

SEQ ID NO: 1581810 - RNA, 19 nt, Artificial Sequence
  Description of Artificial Sequence: Synthetic oligonucleotide
  Antisense strand to SEQ ID NO: 1581809
cauauccucaaggaaacac

SEQ ID NO: 1581811 - RNA, 19 nt, Artificial Sequence
  Description of Artificial Sequence: Synthetic oligonucleotide
  Sense strand starting at position 1035 of SEQ ID NO: 1560179
uucccuugauccggaucaa

SEQ ID NO: 1581812 - RNA, 19 nt, Artificial Sequence
  Description of Artificial Sequence: Synthetic oligonucleotide
  Antisense strand to SEQ ID NO: 1581811
uugauccggaucaagggaa

SEQ ID NO: 1581813 - RNA, 19 nt, Artificial Sequence
  Description of Artificial Sequence: Synthetic oligonucleotide
  Sense strand starting at position 1300 of SEQ ID NO: 1560179
cugugccucucuuugcaaa

SEQ ID NO: 1581814 - RNA, 19 nt, Artificial Sequence
  Description of Artificial Sequence: Synthetic oligonucleotide
  Antisense strand to SEQ ID NO: 1581813
uuugcaaagagaggcacag

SEQ ID NO: 1581815 - RNA, 19 nt, Artificial Sequence
  Description of Artificial Sequence: Synthetic oligonucleotide
  Sense strand starting at position 1302 of SEQ ID NO: 1560179
gugccucucuuugcaaaga

SEQ ID NO: 1581816 - RNA, 19 nt, Artificial Sequence
  Description of Artificial Sequence: Synthetic oligonucleotide
  Antisense strand to SEQ ID NO: 1581815
ucuuugcaaagagaggcac

SEQ ID NO: 1581817 - RNA, 19 nt, Artificial Sequence
  Description of Artificial Sequence: Synthetic oligonucleotide
  Sense strand starting at position 1303 of SEQ ID NO: 1560179
ugccucucuuugcaaagau

SEQ ID NO: 1581818 - RNA, 19 nt, Artificial Sequence
  Description of Artificial Sequence: Synthetic oligonucleotide
  Antisense strand to SEQ ID NO: 1581817
aucuuugcaaagagaggca

SEQ ID NO: 1581819 - RNA, 19 nt, Artificial Sequence
  Description of Artificial Sequence: Synthetic oligonucleotide
  Sense strand starting at position 1485 of SEQ ID NO: 1560179
gccugucacucugaucuca

SEQ ID NO: 1581820 - RNA, 19 nt, Artificial Sequence
  Description of Artificial Sequence: Synthetic oligonucleotide
  Antisense strand to SEQ ID NO: 1581819
ugagaucagagugacaggc

SEQ ID NO: 1581821 - RNA, 19 nt, Artificial Sequence
  Description of Artificial Sequence: Synthetic oligonucleotide
  Sense strand starting at position 1588 of SEQ ID NO: 1560179
ucgugcuguuccuauucua

SEQ ID NO: 1581822 - RNA, 19 nt, Artificial Sequence
  Description of Artificial Sequence: Synthetic oligonucleotide
  Antisense strand to SEQ ID NO: 1581821
uagaauaggaacagcacga

SEQ ID NO: 1581823 - RNA, 19 nt, Artificial Sequence
  Description of Artificial Sequence: Synthetic oligonucleotide
  Sense strand starting at position 1664 of SEQ ID NO: 1560179
gugccaucccaucacuuua

SEQ ID NO: 1581824 - RNA, 19 nt, Artificial Sequence
  Description of Artificial Sequence: Synthetic oligonucleotide
  Antisense strand to SEQ ID NO: 1581823
uaaagugaugggauggcac

SEQ ID NO: 1581825 - RNA, 19 nt, Artificial Sequence
  Description of Artificial Sequence: Synthetic oligonucleotide
  Sense strand starting at position 1753 of SEQ ID NO: 1560179
ggccgagcuccguaacuuu

SEQ ID NO: 1581826 - RNA, 19 nt, Artificial Sequence
  Description of Artificial Sequence: Synthetic oligonucleotide
  Antisense strand to SEQ ID NO: 1581825
aaaguuacggagcucggcc

SEQ ID NO: 1581827 - RNA, 19 nt, Artificial Sequence
  Description of Artificial Sequence: Synthetic oligonucleotide
  Sense strand starting at position 1826 of SEQ ID NO: 1560179
caccguuacuccgcacuua

SEQ ID NO: 1581828 - RNA, 19 nt, Artificial Sequence
  Description of Artificial Sequence: Synthetic oligonucleotide
  Antisense strand to SEQ ID NO: 1581827
uaagugcggaguaacggug

SEQ ID NO: 1581829 - RNA, 19 nt, Artificial Sequence
  Description of Artificial Sequence: Synthetic oligonucleotide
  Sense strand starting at position 2773 of SEQ ID NO: 1560179
gaacgucagucauaugcaa

SEQ ID NO: 1581830 - RNA, 19 nt, Artificial Sequence
  Description of Artificial Sequence: Synthetic oligonucleotide
  Antisense strand to SEQ ID NO: 1581829
uugcauaugacugacguuc

SEQ ID NO: 1581831 - RNA, 19 nt, Artificial Sequence
  Description of Artificial Sequence: Synthetic oligonucleotide
  Sense strand starting at position 3167 of SEQ ID NO: 1560179
acauaugcccucugucuua

SEQ ID NO: 1581832 - RNA, 19 nt, Artificial Sequence
  Description of Artificial Sequence: Synthetic oligonucleotide
  Antisense strand to SEQ ID NO: 1581831
uaagacagagggcauaugu

SEQ ID NO: 1581833 - RNA, 19 nt, Artificial Sequence
  Description of Artificial Sequence: Synthetic oligonucleotide
  Sense strand starting at position 3304 of SEQ ID NO: 1560179
ucauccaugcccugucaca

SEQ ID NO: 1581834 - RNA, 19 nt, Artificial Sequence
  Description of Artificial Sequence: Synthetic oligonucleotide
  Antisense strand to SEQ ID NO: 1581833
ugugacagggcauggauga

SEQ ID NO: 1581835 - RNA, 19 nt, Artificial Sequence
  Description of Artificial Sequence: Synthetic oligonucleotide
  Sense strand starting at position 3689 of SEQ ID NO: 1560179
cccucugucuagcaguaua

SEQ ID NO: 1581836 - RNA, 19 nt, Artificial Sequence
  Description of Artificial Sequence: Synthetic oligonucleotide
  Antisense strand to SEQ ID NO: 1581835
uauacugcuagacagaggg

SEQ ID NO: 1581837 - RNA, 19 nt, Artificial Sequence
  Description of Artificial Sequence: Synthetic oligonucleotide
  Sense strand starting at position 3845 of SEQ ID NO: 1560179
gggagcuuguauguauuau

SEQ ID NO: 1581838 - RNA, 19 nt, Artificial Sequence
  Description of Artificial Sequence: Synthetic oligonucleotide
  Antisense strand to SEQ ID NO: 1581837
auaauacauacaagcuccc

SEQ ID NO: 1581839 - RNA, 19 nt, Artificial Sequence
  Description of Artificial Sequence: Synthetic oligonucleotide
  Sense strand starting at position 3846 of SEQ ID NO: 1560179
ggagcuuguauguauuauc

SEQ ID NO: 1581840 - RNA, 19 nt, Artificial Sequence
  Description of Artificial Sequence: Synthetic oligonucleotide
  Antisense strand to SEQ ID NO: 1581839
gauaauacauacaagcucc

SEQ ID NO: 1581841 - RNA, 19 nt, Artificial Sequence
  Description of Artificial Sequence: Synthetic oligonucleotide
  Sense strand starting at position 3851 of SEQ ID NO: 1560179
uuguauguauuaucugguu

SEQ ID NO: 1581842 - RNA, 19 nt, Artificial Sequence
  Description of Artificial Sequence: Synthetic oligonucleotide
  Antisense strand to SEQ ID NO: 1581841
aaccagauaauacauacaa

SEQ ID NO: 1581843 - RNA, 19 nt, Artificial Sequence
  Description of Artificial Sequence: Synthetic oligonucleotide
  Sense strand starting at position 3894 of SEQ ID NO: 1560179
ggagguaugcuuuauuaca

SEQ ID NO: 1581844 - RNA, 19 nt, Artificial Sequence
  Description of Artificial Sequence: Synthetic oligonucleotide
  Antisense strand to SEQ ID NO: 1581843
uguaauaaagcauaccucc

SEQ ID NO: 1581845 - RNA, 19 nt, Artificial Sequence
  Description of Artificial Sequence: Synthetic oligonucleotide
  Sense strand starting at position 3931 of SEQ ID NO: 1560179
aaaugagccucagagauug

SEQ ID NO: 1581846 - RNA, 19 nt, Artificial Sequence
  Description of Artificial Sequence: Synthetic oligonucleotide
  Antisense strand to SEQ ID NO: 1581845
caaucucugaggcucauuu

SEQ ID NO: 1581847 - RNA, 19 nt, Artificial Sequence
  Description of Artificial Sequence: Synthetic oligonucleotide
  Sense strand starting at position 3936 of SEQ ID NO: 1560179
agccucagagauugaauaa

SEQ ID NO: 1581848 - RNA, 19 nt, Artificial Sequence
  Description of Artificial Sequence: Synthetic oligonucleotide
  Antisense strand to SEQ ID NO: 1581847
uuauucaaucucugaggcu

SEQ ID NO: 1581849 - RNA, 19 nt, Artificial Sequence
  Description of Artificial Sequence: Synthetic oligonucleotide
  Sense strand starting at position 3948 of SEQ ID NO: 1560179
ugaauaaacuguggcaaga

SEQ ID NO: 1581850 - RNA, 19 nt, Artificial Sequence
  Description of Artificial Sequence: Synthetic oligonucleotide
  Antisense strand to SEQ ID NO: 1581849
ucuugccacaguuuauuca

SEQ ID NO: 1581851 - RNA, 19 nt, Artificial Sequence
  Description of Artificial Sequence: Synthetic oligonucleotide
  Sense strand starting at position 127 of SEQ ID NO: 1560180
ggccuuacuugcugucuca

SEQ ID NO: 1581852 - RNA, 19 nt, Artificial Sequence
  Description of Artificial Sequence: Synthetic oligonucleotide
  Antisense strand to SEQ ID NO: 1581851
ugagacagcaaguaaggcc

SEQ ID NO: 1581853 - RNA, 19 nt, Artificial Sequence
  Description of Artificial Sequence: Synthetic oligonucleotide
  Sense strand starting at position 1298 of SEQ ID NO: 1560180
cccuuagucugucuuccau

SEQ ID NO: 1581854 - RNA, 19 nt, Artificial Sequence
  Description of Artificial Sequence: Synthetic oligonucleotide
  Antisense strand to SEQ ID NO: 1581853
auggaagacagacuaaggg

SEQ ID NO: 1581855 - RNA, 19 nt, Artificial Sequence
  Description of Artificial Sequence: Synthetic oligonucleotide
  Sense strand starting at position 1308 of SEQ ID NO: 1560180
gucuuccaucccuguacua

SEQ ID NO: 1581856 - RNA, 19 nt, Artificial Sequence
  Description of Artificial Sequence: Synthetic oligonucleotide
  Antisense strand to SEQ ID NO: 1581855
uaguacagggauggaagac

SEQ ID NO: 1581857 - RNA, 19 nt, Artificial Sequence
  Description of Artificial Sequence: Synthetic oligonucleotide
  Sense strand starting at position 1339 of SEQ ID NO: 1560180
ccgggaaguccuuggaauc

SEQ ID NO: 1581858 - RNA, 19 nt, Artificial Sequence
  Description of Artificial Sequence: Synthetic oligonucleotide
  Antisense strand to SEQ ID NO: 1581857
gauuccaaggacuucccgg

SEQ ID NO: 1581859 - RNA, 19 nt, Artificial Sequence
  Description of Artificial Sequence: Synthetic oligonucleotide
  Sense strand starting at position 1340 of SEQ ID NO: 1560180
cgggaaguccuuggaaucu

SEQ ID NO: 1581860 - RNA, 19 nt, Artificial Sequence
  Description of Artificial Sequence: Synthetic oligonucleotide
  Antisense strand to SEQ ID NO: 1581859
agauuccaaggacuucccg

SEQ ID NO: 1581861 - RNA, 19 nt, Artificial Sequence
  Description of Artificial Sequence: Synthetic oligonucleotide
  Sense strand starting at position 1379 of SEQ ID NO: 1560180
ggagcuguccaagauacuc

SEQ ID NO: 1581862 - RNA, 19 nt, Artificial Sequence
  Description of Artificial Sequence: Synthetic oligonucleotide
  Antisense strand to SEQ ID NO: 1581861
gaguaucuuggacagcucc

SEQ ID NO: 1581863 - RNA, 19 nt, Artificial Sequence
  Description of Artificial Sequence: Synthetic oligonucleotide
  Sense strand starting at position 1387 of SEQ ID NO: 1560180
ccaagauacucccagcaga

SEQ ID NO: 1581864 - RNA, 19 nt, Artificial Sequence
  Description of Artificial Sequence: Synthetic oligonucleotide
  Antisense strand to SEQ ID NO: 1581863
ucugcugggaguaucuugg

SEQ ID NO: 1581865 - RNA, 19 nt, Artificial Sequence
  Description of Artificial Sequence: Synthetic oligonucleotide
  Sense strand starting at position 1446 of SEQ ID NO: 1560180
gucuccucacuugagaagu

SEQ ID NO: 1581866 - RNA, 19 nt, Artificial Sequence
  Description of Artificial Sequence: Synthetic oligonucleotide
  Antisense strand to SEQ ID NO: 1581865
acuucucaagugaggagac

SEQ ID NO: 1581867 - RNA, 19 nt, Artificial Sequence
  Description of Artificial Sequence: Synthetic oligonucleotide
  Sense strand starting at position 1482 of SEQ ID NO: 1560180
cauugaguguuccagggau

SEQ ID NO: 1581868 - RNA, 19 nt, Artificial Sequence
  Description of Artificial Sequence: Synthetic oligonucleotide
  Antisense strand to SEQ ID NO: 1581867
aucccuggaacacucaaug

SEQ ID NO: 1581869 - RNA, 19 nt, Artificial Sequence
  Description of Artificial Sequence: Synthetic oligonucleotide
  Sense strand starting at position 1623 of SEQ ID NO: 1560180
ggaggaacccuagguucuu

SEQ ID NO: 1581870 - RNA, 19 nt, Artificial Sequence
  Description of Artificial Sequence: Synthetic oligonucleotide
  Antisense strand to SEQ ID NO: 1581869
aagaaccuaggguuccucc

SEQ ID NO: 1581871 - RNA, 19 nt, Artificial Sequence
  Description of Artificial Sequence: Synthetic oligonucleotide
  Sense strand starting at position 1624 of SEQ ID NO: 1560180
gaggaacccuagguucuua

SEQ ID NO: 1581872 - RNA, 19 nt, Artificial Sequence
  Description of Artificial Sequence: Synthetic oligonucleotide
  Antisense strand to SEQ ID NO: 1581871
uaagaaccuaggguuccuc

SEQ ID NO: 1581873 - RNA, 19 nt, Artificial Sequence
  Description of Artificial Sequence: Synthetic oligonucleotide
  Sense strand starting at position 2225 of SEQ ID NO: 1560180
agggaagugucacuuggaa

SEQ ID NO: 1581874 - RNA, 19 nt, Artificial Sequence
  Description of Artificial Sequence: Synthetic oligonucleotide
  Antisense strand to SEQ ID NO: 1581873
uuccaagugacacuucccu

SEQ ID NO: 1581875 - RNA, 19 nt, Artificial Sequence
  Description of Artificial Sequence: Synthetic oligonucleotide
  Sense strand starting at position 2227 of SEQ ID NO: 1560180
ggaagugucacuuggaauc

SEQ ID NO: 1581876 - RNA, 19 nt, Artificial Sequence
  Description of Artificial Sequence: Synthetic oligonucleotide
  Antisense strand to SEQ ID NO: 1581875
gauuccaagugacacuucc

SEQ ID NO: 1581877 - RNA, 19 nt, Artificial Sequence
  Description of Artificial Sequence: Synthetic oligonucleotide
  Sense strand starting at position 2295 of SEQ ID NO: 1560180
gcgucucacuucgauccua

SEQ ID NO: 1581878 - RNA, 19 nt, Artificial Sequence
  Description of Artificial Sequence: Synthetic oligonucleotide
  Antisense strand to SEQ ID NO: 1581877
uaggaucgaagugagacgc

SEQ ID NO: 1581879 - RNA, 19 nt, Artificial Sequence
  Description of Artificial Sequence: Synthetic oligonucleotide
  Sense strand starting at position 2366 of SEQ ID NO: 1560180
ccauucuucuggcucgagu

SEQ ID NO: 1581880 - RNA, 19 nt, Artificial Sequence
  Description of Artificial Sequence: Synthetic oligonucleotide
  Antisense strand to SEQ ID NO: 1581879
acucgagccagaagaaugg

SEQ ID NO: 1581881 - RNA, 19 nt, Artificial Sequence
  Description of Artificial Sequence: Synthetic oligonucleotide
  Sense strand starting at position 2368 of SEQ ID NO: 1560180
auucuucuggcucgaguuu

SEQ ID NO: 1581882 - RNA, 19 nt, Artificial Sequence
  Description of Artificial Sequence: Synthetic oligonucleotide
  Antisense strand to SEQ ID NO: 1581881
aaacucgagccagaagaau

SEQ ID NO: 1581883 - RNA, 19 nt, Artificial Sequence
  Description of Artificial Sequence: Synthetic oligonucleotide
  Sense strand starting at position 3867 of SEQ ID NO: 1560180
uccgucaccucuugaauga

SEQ ID NO: 1581884 - RNA, 19 nt, Artificial Sequence
  Description of Artificial Sequence: Synthetic oligonucleotide
  Antisense strand to SEQ ID NO: 1581883
ucauucaagaggugacgga

SEQ ID NO: 1581885 - RNA, 19 nt, Artificial Sequence
  Description of Artificial Sequence: Synthetic oligonucleotide
  Sense strand starting at position 165 of SEQ ID NO: 1560181
gcuguacuuccagguagga

SEQ ID NO: 1581886 - RNA, 19 nt, Artificial Sequence
  Description of Artificial Sequence: Synthetic oligonucleotide
  Antisense strand to SEQ ID NO: 1581885
uccuaccuggaaguacagc

SEQ ID NO: 1581887 - RNA, 19 nt, Artificial Sequence
  Description of Artificial Sequence: Synthetic oligonucleotide
  Sense strand starting at position 410 of SEQ ID NO: 1560181
auguaaaugacauguguuu

SEQ ID NO: 1581888 - RNA, 19 nt, Artificial Sequence
  Description of Artificial Sequence: Synthetic oligonucleotide
  Antisense strand to SEQ ID NO: 1581887
aaacacaugucauuuacau

SEQ ID NO: 1581889 - RNA, 19 nt, Artificial Sequence
  Description of Artificial Sequence: Synthetic oligonucleotide
  Sense strand starting at position 993 of SEQ ID NO: 1560181
ugcuucugcucacuguaaa

SEQ ID NO: 1581890 - RNA, 19 nt, Artificial Sequence
  Description of Artificial Sequence: Synthetic oligonucleotide
  Antisense strand to SEQ ID NO: 1581889
uuuacagugagcagaagca

SEQ ID NO: 1581891 - RNA, 19 nt, Artificial Sequence
  Description of Artificial Sequence: Synthetic oligonucleotide
  Sense strand starting at position 1170 of SEQ ID NO: 1560181
aguggcauuuaggagaacu

SEQ ID NO: 1581892 - RNA, 19 nt, Artificial Sequence
  Description of Artificial Sequence: Synthetic oligonucleotide
  Antisense strand to SEQ ID NO: 1581891
aguucuccuaaaugccacu

SEQ ID NO: 1581893 - RNA, 19 nt, Artificial Sequence
  Description of Artificial Sequence: Synthetic oligonucleotide
  Sense strand starting at position 1202 of SEQ ID NO: 1560181
ggcggucagugcugacaca

SEQ ID NO: 1581894 - RNA, 19 nt, Artificial Sequence
  Description of Artificial Sequence: Synthetic oligonucleotide
  Antisense strand to SEQ ID NO: 1581893
ugugucagcacugaccgcc

SEQ ID NO: 1581895 - RNA, 19 nt, Artificial Sequence
  Description of Artificial Sequence: Synthetic oligonucleotide
  Sense strand starting at position 1254 of SEQ ID NO: 1560181
cccaguggcucugagaacu

SEQ ID NO: 1581896 - RNA, 19 nt, Artificial Sequence
  Description of Artificial Sequence: Synthetic oligonucleotide
  Antisense strand to SEQ ID NO: 1581895
aguucucagagccacuggg

SEQ ID NO: 1581897 - RNA, 19 nt, Artificial Sequence
  Description of Artificial Sequence: Synthetic oligonucleotide
  Sense strand starting at position 1268 of SEQ ID NO: 1560181
gaacuagacuuggaagucu

SEQ ID NO: 1581898 - RNA, 19 nt, Artificial Sequence
  Description of Artificial Sequence: Synthetic oligonucleotide
  Antisense strand to SEQ ID NO: 1581897
agacuuccaagucuaguuc

SEQ ID NO: 1581899 - RNA, 19 nt, Artificial Sequence
  Description of Artificial Sequence: Synthetic oligonucleotide
  Sense strand starting at position 1394 of SEQ ID NO: 1560181
cguccuuucccucaugcaa

SEQ ID NO: 1581900 - RNA, 19 nt, Artificial Sequence
  Description of Artificial Sequence: Synthetic oligonucleotide
  Antisense strand to SEQ ID NO: 1581899
uugcaugagggaaaggacg

SEQ ID NO: 1581901 - RNA, 19 nt, Artificial Sequence
  Description of Artificial Sequence: Synthetic oligonucleotide
  Sense strand starting at position 1407 of SEQ ID NO: 1560181
augcaaucgcaaugggaaa

SEQ ID NO: 1581902 - RNA, 19 nt, Artificial Sequence
  Description of Artificial Sequence: Synthetic oligonucleotide
  Antisense strand to SEQ ID NO: 1581901
uuucccauugcgauugcau

SEQ ID NO: 1581903 - RNA, 19 nt, Artificial Sequence
  Description of Artificial Sequence: Synthetic oligonucleotide
  Sense strand starting at position 1453 of SEQ ID NO: 1560181
aagcguugguguguggaua

SEQ ID NO: 1581904 - RNA, 19 nt, Artificial Sequence
  Description of Artificial Sequence: Synthetic oligonucleotide
  Antisense strand to SEQ ID NO: 1581903
uauccacacaccaacgcuu

SEQ ID NO: 1581905 - RNA, 19 nt, Artificial Sequence
  Description of Artificial Sequence: Synthetic oligonucleotide
  Sense strand starting at position 2016 of SEQ ID NO: 1560181
gcgcgccugcgucuuauau

SEQ ID NO: 1581906 - RNA, 19 nt, Artificial Sequence
  Description of Artificial Sequence: Synthetic oligonucleotide
  Antisense strand to SEQ ID NO: 1581905
auauaagacgcaggcgcgc

SEQ ID NO: 1581907 - RNA, 19 nt, Artificial Sequence
  Description of Artificial Sequence: Synthetic oligonucleotide
  Sense strand starting at position 2017 of SEQ ID NO: 1560181
cgcgccugcgucuuauauu

SEQ ID NO: 1581908 - RNA, 19 nt, Artificial Sequence
  Description of Artificial Sequence: Synthetic oligonucleotide
  Antisense strand to SEQ ID NO: 1581907
aauauaagacgcaggcgcg

SEQ ID NO: 1581909 - RNA, 19 nt, Artificial Sequence
  Description of Artificial Sequence: Synthetic oligonucleotide
  Sense strand starting at position 2085 of SEQ ID NO: 1560181
ggugucgggcucgacuauu

SEQ ID NO: 1581910 - RNA, 19 nt, Artificial Sequence
  Description of Artificial Sequence: Synthetic oligonucleotide
  Antisense strand to SEQ ID NO: 1581909
aauagucgagcccgacacc

SEQ ID NO: 1581911 - RNA, 19 nt, Artificial Sequence
  Description of Artificial Sequence: Synthetic oligonucleotide
  Sense strand starting at position 2096 of SEQ ID NO: 1560181
cgacuauuggccgagacgu

SEQ ID NO: 1581912 - RNA, 19 nt, Artificial Sequence
  Description of Artificial Sequence: Synthetic oligonucleotide
  Antisense strand to SEQ ID NO: 1581911
acgucucggccaauagucg

SEQ ID NO: 1581913 - RNA, 19 nt, Artificial Sequence
  Description of Artificial Sequence: Synthetic oligonucleotide
  Sense strand starting at position 2098 of SEQ ID NO: 1560181
acuauuggccgagacguuu

SEQ ID NO: 1581914 - RNA, 19 nt, Artificial Sequence
  Description of Artificial Sequence: Synthetic oligonucleotide
  Antisense strand to SEQ ID NO: 1581913
aaacgucucggccaauagu

SEQ ID NO: 1581915 - RNA, 19 nt, Artificial Sequence
  Description of Artificial Sequence: Synthetic oligonucleotide
  Sense strand starting at position 2269 of SEQ ID NO: 1560181
gggacuucugggugucacu

SEQ ID NO: 1581916 - RNA, 19 nt, Artificial Sequence
  Description of Artificial Sequence: Synthetic oligonucleotide
  Antisense strand to SEQ ID NO: 1581915
agugacacccagaaguccc

SEQ ID NO: 1581917 - RNA, 19 nt, Artificial Sequence
  Description of Artificial Sequence: Synthetic oligonucleotide
  Sense strand starting at position 2310 of SEQ ID NO: 1560181
uccagcagucccgacauaa

SEQ ID NO: 1581918 - RNA, 19 nt, Artificial Sequence
  Description of Artificial Sequence: Synthetic oligonucleotide
  Antisense strand to SEQ ID NO: 1581917
uuaugucgggacugcugga

SEQ ID NO: 1581919 - RNA, 19 nt, Artificial Sequence
  Description of Artificial Sequence: Synthetic oligonucleotide
  Sense strand starting at position 2394 of SEQ ID NO: 1560181
cccgacaccugucgugaua

SEQ ID NO: 1581920 - RNA, 19 nt, Artificial Sequence
  Description of Artificial Sequence: Synthetic oligonucleotide
  Antisense strand to SEQ ID NO: 1581919
uaucacgacaggugucggg

SEQ ID NO: 1581921 - RNA, 19 nt, Artificial Sequence
  Description of Artificial Sequence: Synthetic oligonucleotide
  Sense strand starting at position 2396 of SEQ ID NO: 1560181
cgacaccugucgugauauu

SEQ ID NO: 1581922 - RNA, 19 nt, Artificial Sequence
  Description of Artificial Sequence: Synthetic oligonucleotide
  Antisense strand to SEQ ID NO: 1581921
aauaucacgacaggugucg

SEQ ID NO: 1581923 - RNA, 19 nt, Artificial Sequence
  Description of Artificial Sequence: Synthetic oligonucleotide
  Sense strand starting at position 2397 of SEQ ID NO: 1560181
gacaccugucgugauauuc

SEQ ID NO: 1581924 - RNA, 19 nt, Artificial Sequence
  Description of Artificial Sequence: Synthetic oligonucleotide
  Antisense strand to SEQ ID NO: 1581923
gaauaucacgacagguguc

SEQ ID NO: 1581925 - RNA, 19 nt, Artificial Sequence
  Description of Artificial Sequence: Synthetic oligonucleotide
  Sense strand starting at position 2405 of SEQ ID NO: 1560181
ucgugauauucuugccaau

SEQ ID NO: 1581926 - RNA, 19 nt, Artificial Sequence
  Description of Artificial Sequence: Synthetic oligonucleotide
  Antisense strand to SEQ ID NO: 1581925
auuggcaagaauaucacga

SEQ ID NO: 1581927 - RNA, 19 nt, Artificial Sequence
  Description of Artificial Sequence: Synthetic oligonucleotide
  Sense strand starting at position 2407 of SEQ ID NO: 1560181
gugauauucuugccaauac

SEQ ID NO: 1581928 - RNA, 19 nt, Artificial Sequence
  Description of Artificial Sequence: Synthetic oligonucleotide
  Antisense strand to SEQ ID NO: 1581927
guauuggcaagaauaucac

SEQ ID NO: 1581929 - RNA, 19 nt, Artificial Sequence
  Description of Artificial Sequence: Synthetic oligonucleotide
  Sense strand starting at position 3100 of SEQ ID NO: 1560181
cagaaagucuucggaggga

SEQ ID NO: 1581930 - RNA, 19 nt, Artificial Sequence
  Description of Artificial Sequence: Synthetic oligonucleotide
  Antisense strand to SEQ ID NO: 1581929
ucccuccgaagacuuucug

SEQ ID NO: 1581931 - RNA, 19 nt, Artificial Sequence
  Description of Artificial Sequence: Synthetic oligonucleotide
  Sense strand starting at position 3103 of SEQ ID NO: 1560181
aaagucuucggagggauga

SEQ ID NO: 1581932 - RNA, 19 nt, Artificial Sequence
  Description of Artificial Sequence: Synthetic oligonucleotide
  Antisense strand to SEQ ID NO: 1581931
ucaucccuccgaagacuuu

SEQ ID NO: 1581933 - RNA, 19 nt, Artificial Sequence
  Description of Artificial Sequence: Synthetic oligonucleotide
  Sense strand starting at position 3172 of SEQ ID NO: 1560181
cugcucaucccagggaaau

SEQ ID NO: 1581934 - RNA, 19 nt, Artificial Sequence
  Description of Artificial Sequence: Synthetic oligonucleotide
  Antisense strand to SEQ ID NO: 1581933
auuucccugggaugagcag

SEQ ID NO: 1581935 - RNA, 19 nt, Artificial Sequence
  Description of Artificial Sequence: Synthetic oligonucleotide
  Sense strand starting at position 3173 of SEQ ID NO: 1560181
ugcucaucccagggaaauc

SEQ ID NO: 1581936 - RNA, 19 nt, Artificial Sequence
  Description of Artificial Sequence: Synthetic oligonucleotide
  Antisense strand to SEQ ID NO: 1581935
gauuucccugggaugagca

SEQ ID NO: 1581937 - RNA, 19 nt, Artificial Sequence
  Description of Artificial Sequence: Synthetic oligonucleotide
  Sense strand starting at position 3259 of SEQ ID NO: 1560181
cgcugucuccagugacaag

SEQ ID NO: 1581938 - RNA, 19 nt, Artificial Sequence
  Description of Artificial Sequence: Synthetic oligonucleotide
  Antisense strand to SEQ ID NO: 1581937
cuugucacuggagacagcg

SEQ ID NO: 1581939 - RNA, 19 nt, Artificial Sequence
  Description of Artificial Sequence: Synthetic oligonucleotide
  Sense strand starting at position 3319 of SEQ ID NO: 1560181
gcagcagcugugugauuca

SEQ ID NO: 1581940 - RNA, 19 nt, Artificial Sequence
  Description of Artificial Sequence: Synthetic oligonucleotide
  Antisense strand to SEQ ID NO: 1581939
ugaaucacacagcugcugc

SEQ ID NO: 1581941 - RNA, 19 nt, Artificial Sequence
  Description of Artificial Sequence: Synthetic oligonucleotide
  Sense strand starting at position 3422 of SEQ ID NO: 1560181
cacgcagggugguuauuaa

SEQ ID NO: 1581942 - RNA, 19 nt, Artificial Sequence
  Description of Artificial Sequence: Synthetic oligonucleotide
  Antisense strand to SEQ ID NO: 1581941
uuaauaaccacccugcgug

SEQ ID NO: 1581943 - RNA, 19 nt, Artificial Sequence
  Description of Artificial Sequence: Synthetic oligonucleotide
  Sense strand starting at position 3426 of SEQ ID NO: 1560181
cagggugguuauuaaagga

SEQ ID NO: 1581944 - RNA, 19 nt, Artificial Sequence
  Description of Artificial Sequence: Synthetic oligonucleotide
  Antisense strand to SEQ ID NO: 1581943
uccuuuaauaaccacccug

SEQ ID NO: 1581945 - RNA, 19 nt, Artificial Sequence
  Description of Artificial Sequence: Synthetic oligonucleotide
  Sense strand starting at position 3430 of SEQ ID NO: 1560181
gugguuauuaaaggagaga

SEQ ID NO: 1581946 - RNA, 19 nt, Artificial Sequence
  Description of Artificial Sequence: Synthetic oligonucleotide
  Antisense strand to SEQ ID NO: 1581945
ucucuccuuuaauaaccac

SEQ ID NO: 1581947 - RNA, 19 nt, Artificial Sequence
  Description of Artificial Sequence: Synthetic oligonucleotide
  Sense strand starting at position 3555 of SEQ ID NO: 1560181
ggcccauucuuucugaucu

SEQ ID NO: 1581948 - RNA, 19 nt, Artificial Sequence
  Description of Artificial Sequence: Synthetic oligonucleotide
  Antisense strand to SEQ ID NO: 1581947
agaucagaaagaaugggcc

SEQ ID NO: 1581949 - RNA, 19 nt, Artificial Sequence
  Description of Artificial Sequence: Synthetic oligonucleotide
  Sense strand starting at position 3681 of SEQ ID NO: 1560181
ccugcauaauugcguaauu

SEQ ID NO: 1581950 - RNA, 19 nt, Artificial Sequence
  Description of Artificial Sequence: Synthetic oligonucleotide
  Antisense strand to SEQ ID NO: 1581949
aauuacgcaauuaugcagg

SEQ ID NO: 1581951 - RNA, 19 nt, Artificial Sequence
  Description of Artificial Sequence: Synthetic oligonucleotide
  Sense strand starting at position 3683 of SEQ ID NO: 1560181
ugcauaauugcguaauucu

SEQ ID NO: 1581952 - RNA, 19 nt, Artificial Sequence
  Description of Artificial Sequence: Synthetic oligonucleotide
  Antisense strand to SEQ ID NO: 1581951
agaauuacgcaauuaugca

SEQ ID NO: 1581953 - RNA, 19 nt, Artificial Sequence
  Description of Artificial Sequence: Synthetic oligonucleotide
  Sense strand starting at position 3761 of SEQ ID NO: 1560181
ugcgaagcgccguguucau

SEQ ID NO: 1581954 - RNA, 19 nt, Artificial Sequence
  Description of Artificial Sequence: Synthetic oligonucleotide
  Antisense strand to SEQ ID NO: 1581953
augaacacggcgcuucgca

SEQ ID NO: 1581955 - RNA, 19 nt, Artificial Sequence
  Description of Artificial Sequence: Synthetic oligonucleotide
  Sense strand starting at position 3796 of SEQ ID NO: 1560181
ucagccagugccuaguuau

SEQ ID NO: 1581956 - RNA, 19 nt, Artificial Sequence
  Description of Artificial Sequence: Synthetic oligonucleotide
  Antisense strand to SEQ ID NO: 1581955
auaacuaggcacuggcuga

SEQ ID NO: 1581957 - RNA, 19 nt, Artificial Sequence
  Description of Artificial Sequence: Synthetic oligonucleotide
  Sense strand starting at position 3806 of SEQ ID NO: 1560181
ccuaguuauuaagcgcuua

SEQ ID NO: 1581958 - RNA, 19 nt, Artificial Sequence
  Description of Artificial Sequence: Synthetic oligonucleotide
  Antisense strand to SEQ ID NO: 1581957
uaagcgcuuaauaacuagg

SEQ ID NO: 1581959 - RNA, 19 nt, Artificial Sequence
  Description of Artificial Sequence: Synthetic oligonucleotide
  Sense strand starting at position 163 of SEQ ID NO: 1560182
gcuguacuuccagguagga

SEQ ID NO: 1581960 - RNA, 19 nt, Artificial Sequence
  Description of Artificial Sequence: Synthetic oligonucleotide
  Antisense strand to SEQ ID NO: 1581959
uccuaccuggaaguacagc

SEQ ID NO: 1581961 - RNA, 19 nt, Artificial Sequence
  Description of Artificial Sequence: Synthetic oligonucleotide
  Sense strand starting at position 408 of SEQ ID NO: 1560182
auguaaaugacauguguuu

SEQ ID NO: 1581962 - RNA, 19 nt, Artificial Sequence
  Description of Artificial Sequence: Synthetic oligonucleotide
  Antisense strand to SEQ ID NO: 1581961
aaacacaugucauuuacau

SEQ ID NO: 1581963 - RNA, 19 nt, Artificial Sequence
  Description of Artificial Sequence: Synthetic oligonucleotide
  Sense strand starting at position 991 of SEQ ID NO: 1560182
ugcuucugcucacuguaaa

SEQ ID NO: 1581964 - RNA, 19 nt, Artificial Sequence
  Description of Artificial Sequence: Synthetic oligonucleotide
  Antisense strand to SEQ ID NO: 1581963
uuuacagugagcagaagca

SEQ ID NO: 1581965 - RNA, 19 nt, Artificial Sequence
  Description of Artificial Sequence: Synthetic oligonucleotide
  Sense strand starting at position 1168 of SEQ ID NO: 1560182
aguggcauuuaggagaacu

SEQ ID NO: 1581966 - RNA, 19 nt, Artificial Sequence
  Description of Artificial Sequence: Synthetic oligonucleotide
  Antisense strand to SEQ ID NO: 1581965
aguucuccuaaaugccacu

SEQ ID NO: 1581967 - RNA, 19 nt, Artificial Sequence
  Description of Artificial Sequence: Synthetic oligonucleotide
  Sense strand starting at position 1200 of SEQ ID NO: 1560182
ggcggucagugcugacaca

SEQ ID NO: 1581968 - RNA, 19 nt, Artificial Sequence
  Description of Artificial Sequence: Synthetic oligonucleotide
  Antisense strand to SEQ ID NO: 1581967
ugugucagcacugaccgcc

SEQ ID NO: 1581969 - RNA, 19 nt, Artificial Sequence
  Description of Artificial Sequence: Synthetic oligonucleotide
  Sense strand starting at position 1252 of SEQ ID NO: 1560182
cccaguggcucugagaacu

SEQ ID NO: 1581970 - RNA, 19 nt, Artificial Sequence
  Description of Artificial Sequence: Synthetic oligonucleotide
  Antisense strand to SEQ ID NO: 1581969
aguucucagagccacuggg

SEQ ID NO: 1581971 - RNA, 19 nt, Artificial Sequence
  Description of Artificial Sequence: Synthetic oligonucleotide
  Sense strand starting at position 1266 of SEQ ID NO: 1560182
gaacuagacuuggaagucu

SEQ ID NO: 1581972 - RNA, 19 nt, Artificial Sequence
  Description of Artificial Sequence: Synthetic oligonucleotide
  Antisense strand to SEQ ID NO: 1581971
agacuuccaagucuaguuc

SEQ ID NO: 1581973 - RNA, 19 nt, Artificial Sequence
  Description of Artificial Sequence: Synthetic oligonucleotide
  Sense strand starting at position 1392 of SEQ ID NO: 1560182
cguccuuucccucaugcaa

SEQ ID NO: 1581974 - RNA, 19 nt, Artificial Sequence
  Description of Artificial Sequence: Synthetic oligonucleotide
  Antisense strand to SEQ ID NO: 1581973
uugcaugagggaaaggacg

SEQ ID NO: 1581975 - RNA, 19 nt, Artificial Sequence
  Description of Artificial Sequence: Synthetic oligonucleotide
  Sense strand starting at position 1405 of SEQ ID NO: 1560182
augcaaucgcaaugggaaa

SEQ ID NO: 1581976 - RNA, 19 nt, Artificial Sequence
  Description of Artificial Sequence: Synthetic oligonucleotide
  Antisense strand to SEQ ID NO: 1581975
uuucccauugcgauugcau

SEQ ID NO: 1581977 - RNA, 19 nt, Artificial Sequence
  Description of Artificial Sequence: Synthetic oligonucleotide
  Sense strand starting at position 1451 of SEQ ID NO: 1560182
aagcguugguguguggaua

SEQ ID NO: 1581978 - RNA, 19 nt, Artificial Sequence
  Description of Artificial Sequence: Synthetic oligonucleotide
  Antisense strand to SEQ ID NO: 1581977
uauccacacaccaacgcuu

SEQ ID NO: 1581979 - RNA, 19 nt, Artificial Sequence
  Description of Artificial Sequence: Synthetic oligonucleotide
  Sense strand starting at position 2014 of SEQ ID NO: 1560182
gcgcgccugcgucuuauau

SEQ ID NO: 1581980 - RNA, 19 nt, Artificial Sequence
  Description of Artificial Sequence: Synthetic oligonucleotide
  Antisense strand to SEQ ID NO: 1581979
auauaagacgcaggcgcgc

SEQ ID NO: 1581981 - RNA, 19 nt, Artificial Sequence
  Description of Artificial Sequence: Synthetic oligonucleotide
  Sense strand starting at position 2015 of SEQ ID NO: 1560182
cgcgccugcgucuuauauu

SEQ ID NO: 1581982 - RNA, 19 nt, Artificial Sequence
  Description of Artificial Sequence: Synthetic oligonucleotide
  Antisense strand to SEQ ID NO: 1581981
aauauaagacgcaggcgcg

SEQ ID NO: 1581983 - RNA, 19 nt, Artificial Sequence
  Description of Artificial Sequence: Synthetic oligonucleotide
  Sense strand starting at position 2083 of SEQ ID NO: 1560182
ggugucgggcucgacuauu

SEQ ID NO: 1581984 - RNA, 19 nt, Artificial Sequence
  Description of Artificial Sequence: Synthetic oligonucleotide
  Antisense strand to SEQ ID NO: 1581983
aauagucgagcccgacacc

SEQ ID NO: 1581985 - RNA, 19 nt, Artificial Sequence
  Description of Artificial Sequence: Synthetic oligonucleotide
  Sense strand starting at position 2094 of SEQ ID NO: 1560182
cgacuauuggccgagacgu

SEQ ID NO: 1581986 - RNA, 19 nt, Artificial Sequence
  Description of Artificial Sequence: Synthetic oligonucleotide
  Antisense strand to SEQ ID NO: 1581985
acgucucggccaauagucg

SEQ ID NO: 1581987 - RNA, 19 nt, Artificial Sequence
  Description of Artificial Sequence: Synthetic oligonucleotide
  Sense strand starting at position 2096 of SEQ ID NO: 1560182
acuauuggccgagacguuu

SEQ ID NO: 1581988 - RNA, 19 nt, Artificial Sequence
  Description of Artificial Sequence: Synthetic oligonucleotide
  Antisense strand to SEQ ID NO: 1581987
aaacgucucggccaauagu

SEQ ID NO: 1581989 - RNA, 19 nt, Artificial Sequence
  Description of Artificial Sequence: Synthetic oligonucleotide
  Sense strand starting at position 2267 of SEQ ID NO: 1560182
gggacuucugggugucacu

SEQ ID NO: 1581990 - RNA, 19 nt, Artificial Sequence
  Description of Artificial Sequence: Synthetic oligonucleotide
  Antisense strand to SEQ ID NO: 1581989
agugacacccagaaguccc

SEQ ID NO: 1581991 - RNA, 19 nt, Artificial Sequence
  Description of Artificial Sequence: Synthetic oligonucleotide
  Sense strand starting at position 2308 of SEQ ID NO: 1560182
uccagcagucccgacauaa

SEQ ID NO: 1581992 - RNA, 19 nt, Artificial Sequence
  Description of Artificial Sequence: Synthetic oligonucleotide
  Antisense strand to SEQ ID NO: 1581991
uuaugucgggacugcugga

SEQ ID NO: 1581993 - RNA, 19 nt, Artificial Sequence
  Description of Artificial Sequence: Synthetic oligonucleotide
  Sense strand starting at position 2392 of SEQ ID NO: 1560182
cccgacaccugucgugaua

SEQ ID NO: 1581994 - RNA, 19 nt, Artificial Sequence
  Description of Artificial Sequence: Synthetic oligonucleotide
  Antisense strand to SEQ ID NO: 1581993
uaucacgacaggugucggg

SEQ ID NO: 1581995 - RNA, 19 nt, Artificial Sequence
  Description of Artificial Sequence: Synthetic oligonucleotide
  Sense strand starting at position 2394 of SEQ ID NO: 1560182
cgacaccugucgugauauu

SEQ ID NO: 1581996 - RNA, 19 nt, Artificial Sequence
  Description of Artificial Sequence: Synthetic oligonucleotide
  Antisense strand to SEQ ID NO: 1581995
aauaucacgacaggugucg

SEQ ID NO: 1581997 - RNA, 19 nt, Artificial Sequence
  Description of Artificial Sequence: Synthetic oligonucleotide
  Sense strand starting at position 2395 of SEQ ID NO: 1560182
gacaccugucgugauauuc

SEQ ID NO: 1581998 - RNA, 19 nt, Artificial Sequence
  Description of Artificial Sequence: Synthetic oligonucleotide
  Antisense strand to SEQ ID NO: 1581997
gaauaucacgacagguguc

SEQ ID NO: 1581999 - RNA, 19 nt, Artificial Sequence
  Description of Artificial Sequence: Synthetic oligonucleotide
  Sense strand starting at position 2403 of SEQ ID NO: 1560182
ucgugauauucuugccaau

SEQ ID NO: 1582000 - RNA, 19 nt, Artificial Sequence
  Description of Artificial Sequence: Synthetic oligonucleotide
  Antisense strand to SEQ ID NO: 1581999
auuggcaagaauaucacga

SEQ ID NO: 1582001 - RNA, 19 nt, Artificial Sequence
  Description of Artificial Sequence: Synthetic oligonucleotide
  Sense strand starting at position 2405 of SEQ ID NO: 1560182
gugauauucuugccaauac

SEQ ID NO: 1582002 - RNA, 19 nt, Artificial Sequence
  Description of Artificial Sequence: Synthetic oligonucleotide
  Antisense strand to SEQ ID NO: 1582001
guauuggcaagaauaucac

SEQ ID NO: 1582003 - RNA, 19 nt, Artificial Sequence
  Description of Artificial Sequence: Synthetic oligonucleotide
  Sense strand starting at position 3098 of SEQ ID NO: 1560182
cagaaagucuucggaggga

SEQ ID NO: 1582004 - RNA, 19 nt, Artificial Sequence
  Description of Artificial Sequence: Synthetic oligonucleotide
  Antisense strand to SEQ ID NO: 1582003
ucccuccgaagacuuucug

SEQ ID NO: 1582005 - RNA, 19 nt, Artificial Sequence
  Description of Artificial Sequence: Synthetic oligonucleotide
  Sense strand starting at position 3101 of SEQ ID NO: 1560182
aaagucuucggagggauga

SEQ ID NO: 1582006 - RNA, 19 nt, Artificial Sequence
  Description of Artificial Sequence: Synthetic oligonucleotide
  Antisense strand to SEQ ID NO: 1582005
ucaucccuccgaagacuuu

SEQ ID NO: 1582007 - RNA, 19 nt, Artificial Sequence
  Description of Artificial Sequence: Synthetic oligonucleotide
  Sense strand starting at position 3170 of SEQ ID NO: 1560182
cugcucaucccagggaaau

SEQ ID NO: 1582008 - RNA, 19 nt, Artificial Sequence
  Description of Artificial Sequence: Synthetic oligonucleotide
  Antisense strand to SEQ ID NO: 1582007
auuucccugggaugagcag

SEQ ID NO: 1582009 - RNA, 19 nt, Artificial Sequence
  Description of Artificial Sequence: Synthetic oligonucleotide
  Sense strand starting at position 3171 of SEQ ID NO: 1560182
ugcucaucccagggaaauc

SEQ ID NO: 1582010 - RNA, 19 nt, Artificial Sequence
  Description of Artificial Sequence: Synthetic oligonucleotide
  Antisense strand to SEQ ID NO: 1582009
gauuucccugggaugagca

SEQ ID NO: 1582011 - RNA, 19 nt, Artificial Sequence
  Description of Artificial Sequence: Synthetic oligonucleotide
  Sense strand starting at position 3257 of SEQ ID NO: 1560182
cgcugucuccagugacaag

SEQ ID NO: 1582012 - RNA, 19 nt, Artificial Sequence
  Description of Artificial Sequence: Synthetic oligonucleotide
  Antisense strand to SEQ ID NO: 1582011
cuugucacuggagacagcg

SEQ ID NO: 1582013 - RNA, 19 nt, Artificial Sequence
  Description of Artificial Sequence: Synthetic oligonucleotide
  Sense strand starting at position 3317 of SEQ ID NO: 1560182
gcagcagcugugugauuca

SEQ ID NO: 1582014 - RNA, 19 nt, Artificial Sequence
  Description of Artificial Sequence: Synthetic oligonucleotide
  Antisense strand to SEQ ID NO: 1582013
ugaaucacacagcugcugc

SEQ ID NO: 1582015 - RNA, 19 nt, Artificial Sequence
  Description of Artificial Sequence: Synthetic oligonucleotide
  Sense strand starting at position 3420 of SEQ ID NO: 1560182
cacgcagggugguuauuaa

SEQ ID NO: 1582016 - RNA, 19 nt, Artificial Sequence
  Description of Artificial Sequence: Synthetic oligonucleotide
  Antisense strand to SEQ ID NO: 1582015
uuaauaaccacccugcgug

SEQ ID NO: 1582017 - RNA, 19 nt, Artificial Sequence
  Description of Artificial Sequence: Synthetic oligonucleotide
  Sense strand starting at position 3424 of SEQ ID NO: 1560182
cagggugguuauuaaagga

SEQ ID NO: 1582018 - RNA, 19 nt, Artificial Sequence
  Description of Artificial Sequence: Synthetic oligonucleotide
  Antisense strand to SEQ ID NO: 1582017
uccuuuaauaaccacccug

SEQ ID NO: 1582019 - RNA, 19 nt, Artificial Sequence
  Description of Artificial Sequence: Synthetic oligonucleotide
  Sense strand starting at position 3428 of SEQ ID NO: 1560182
gugguuauuaaaggagaga

SEQ ID NO: 1582020 - RNA, 19 nt, Artificial Sequence
  Description of Artificial Sequence: Synthetic oligonucleotide
  Antisense strand to SEQ ID NO: 1582019
ucucuccuuuaauaaccac

SEQ ID NO: 1582021 - RNA, 19 nt, Artificial Sequence
  Description of Artificial Sequence: Synthetic oligonucleotide
  Sense strand starting at position 3553 of SEQ ID NO: 1560182
ggcccauucuuucugaucu

SEQ ID NO: 1582022 - RNA, 19 nt, Artificial Sequence
  Description of Artificial Sequence: Synthetic oligonucleotide
  Antisense strand to SEQ ID NO: 1582021
agaucagaaagaaugggcc

SEQ ID NO: 1582023 - RNA, 19 nt, Artificial Sequence
  Description of Artificial Sequence: Synthetic oligonucleotide
  Sense strand starting at position 3679 of SEQ ID NO: 1560182
ccugcauaauugcguaauu

SEQ ID NO: 1582024 - RNA, 19 nt, Artificial Sequence
  Description of Artificial Sequence: Synthetic oligonucleotide
  Antisense strand to SEQ ID NO: 1582023
aauuacgcaauuaugcagg

SEQ ID NO: 1582025 - RNA, 19 nt, Artificial Sequence
  Description of Artificial Sequence: Synthetic oligonucleotide
  Sense strand starting at position 3681 of SEQ ID NO: 1560182
ugcauaauugcguaauucu

SEQ ID NO: 1582026 - RNA, 19 nt, Artificial Sequence
  Description of Artificial Sequence: Synthetic oligonucleotide
  Antisense strand to SEQ ID NO: 1582025
agaauuacgcaauuaugca

SEQ ID NO: 1582027 - RNA, 19 nt, Artificial Sequence
  Description of Artificial Sequence: Synthetic oligonucleotide
  Sense strand starting at position 3759 of SEQ ID NO: 1560182
ugcgaagcgccguguucau

SEQ ID NO: 1582028 - RNA, 19 nt, Artificial Sequence
  Description of Artificial Sequence: Synthetic oligonucleotide
  Antisense strand to SEQ ID NO: 1582027
augaacacggcgcuucgca

SEQ ID NO: 1582029 - RNA, 19 nt, Artificial Sequence
  Description of Artificial Sequence: Synthetic oligonucleotide
  Sense strand starting at position 3794 of SEQ ID NO: 1560182
ucagccagugccuaguuau

SEQ ID NO: 1582030 - RNA, 19 nt, Artificial Sequence
  Description of Artificial Sequence: Synthetic oligonucleotide
  Antisense strand to SEQ ID NO: 1582029
auaacuaggcacuggcuga

SEQ ID NO: 1582031 - RNA, 19 nt, Artificial Sequence
  Description of Artificial Sequence: Synthetic oligonucleotide
  Sense strand starting at position 3804 of SEQ ID NO: 1560182
ccuaguuauuaagcgcuua

SEQ ID NO: 1582032 - RNA, 19 nt, Artificial Sequence
  Description of Artificial Sequence: Synthetic oligonucleotide
  Antisense strand to SEQ ID NO: 1582031
uaagcgcuuaauaacuagg

SEQ ID NO: 1582033 - RNA, 19 nt, Artificial Sequence
  Description of Artificial Sequence: Synthetic oligonucleotide
  Sense strand starting at position 291 of SEQ ID NO: 1560183
gggaguaugugagcagguu

SEQ ID NO: 1582034 - RNA, 19 nt, Artificial Sequence
  Description of Artificial Sequence: Synthetic oligonucleotide
  Antisense strand to SEQ ID NO: 1582033
aaccugcucacauacuccc

SEQ ID NO: 1582035 - RNA, 19 nt, Artificial Sequence
  Description of Artificial Sequence: Synthetic oligonucleotide
  Sense strand starting at position 299 of SEQ ID NO: 1560183
gugagcagguucuuggauu

SEQ ID NO: 1582036 - RNA, 19 nt, Artificial Sequence
  Description of Artificial Sequence: Synthetic oligonucleotide
  Antisense strand to SEQ ID NO: 1582035
aauccaagaaccugcucac

SEQ ID NO: 1582037 - RNA, 19 nt, Artificial Sequence
  Description of Artificial Sequence: Synthetic oligonucleotide
  Sense strand starting at position 300 of SEQ ID NO: 1560183
ugagcagguucuuggauua

SEQ ID NO: 1582038 - RNA, 19 nt, Artificial Sequence
  Description of Artificial Sequence: Synthetic oligonucleotide
  Antisense strand to SEQ ID NO: 1582037
uaauccaagaaccugcuca

SEQ ID NO: 1582039 - RNA, 19 nt, Artificial Sequence
  Description of Artificial Sequence: Synthetic oligonucleotide
  Sense strand starting at position 463 of SEQ ID NO: 1560183
ccauuucccugcuguguga

SEQ ID NO: 1582040 - RNA, 19 nt, Artificial Sequence
  Description of Artificial Sequence: Synthetic oligonucleotide
  Antisense strand to SEQ ID NO: 1582039
ucacacagcagggaaaugg

SEQ ID NO: 1582041 - RNA, 19 nt, Artificial Sequence
  Description of Artificial Sequence: Synthetic oligonucleotide
  Sense strand starting at position 510 of SEQ ID NO: 1560183
accucugucuccugugaac

SEQ ID NO: 1582042 - RNA, 19 nt, Artificial Sequence
  Description of Artificial Sequence: Synthetic oligonucleotide
  Antisense strand to SEQ ID NO: 1582041
guucacaggagacagaggu

SEQ ID NO: 1582043 - RNA, 19 nt, Artificial Sequence
  Description of Artificial Sequence: Synthetic oligonucleotide
  Sense strand starting at position 513 of SEQ ID NO: 1560183
ucugucuccugugaacuga

SEQ ID NO: 1582044 - RNA, 19 nt, Artificial Sequence
  Description of Artificial Sequence: Synthetic oligonucleotide
  Antisense strand to SEQ ID NO: 1582043
ucaguucacaggagacaga

SEQ ID NO: 1582045 - RNA, 19 nt, Artificial Sequence
  Description of Artificial Sequence: Synthetic oligonucleotide
  Sense strand starting at position 541 of SEQ ID NO: 1560183
guaggauugccaggauccu

SEQ ID NO: 1582046 - RNA, 19 nt, Artificial Sequence
  Description of Artificial Sequence: Synthetic oligonucleotide
  Antisense strand to SEQ ID NO: 1582045
aggauccuggcaauccuac

SEQ ID NO: 1582047 - RNA, 19 nt, Artificial Sequence
  Description of Artificial Sequence: Synthetic oligonucleotide
  Sense strand starting at position 620 of SEQ ID NO: 1560183
ccugguggcugcuauuauu

SEQ ID NO: 1582048 - RNA, 19 nt, Artificial Sequence
  Description of Artificial Sequence: Synthetic oligonucleotide
  Antisense strand to SEQ ID NO: 1582047
aauaauagcagccaccagg

SEQ ID NO: 1582049 - RNA, 19 nt, Artificial Sequence
  Description of Artificial Sequence: Synthetic oligonucleotide
  Sense strand starting at position 777 of SEQ ID NO: 1560183
agguccuacuguuauuauu

SEQ ID NO: 1582050 - RNA, 19 nt, Artificial Sequence
  Description of Artificial Sequence: Synthetic oligonucleotide
  Antisense strand to SEQ ID NO: 1582049
aauaauaacaguaggaccu

SEQ ID NO: 1582051 - RNA, 19 nt, Artificial Sequence
  Description of Artificial Sequence: Synthetic oligonucleotide
  Sense strand starting at position 779 of SEQ ID NO: 1560183
guccuacuguuauuauuau

SEQ ID NO: 1582052 - RNA, 19 nt, Artificial Sequence
  Description of Artificial Sequence: Synthetic oligonucleotide
  Antisense strand to SEQ ID NO: 1582051
auaauaauaacaguaggac

SEQ ID NO: 1582053 - RNA, 19 nt, Artificial Sequence
  Description of Artificial Sequence: Synthetic oligonucleotide
  Sense strand starting at position 1364 of SEQ ID NO: 1560183
cacucauguguccgcuacu

SEQ ID NO: 1582054 - RNA, 19 nt, Artificial Sequence
  Description of Artificial Sequence: Synthetic oligonucleotide
  Antisense strand to SEQ ID NO: 1582053
aguagcggacacaugagug

SEQ ID NO: 1582055 - RNA, 19 nt, Artificial Sequence
  Description of Artificial Sequence: Synthetic oligonucleotide
  Sense strand starting at position 1365 of SEQ ID NO: 1560183
acucauguguccgcuacua

SEQ ID NO: 1582056 - RNA, 19 nt, Artificial Sequence
  Description of Artificial Sequence: Synthetic oligonucleotide
  Antisense strand to SEQ ID NO: 1582055
uaguagcggacacaugagu

SEQ ID NO: 1582057 - RNA, 19 nt, Artificial Sequence
  Description of Artificial Sequence: Synthetic oligonucleotide
  Sense strand starting at position 1367 of SEQ ID NO: 1560183
ucauguguccgcuacuaag

SEQ ID NO: 1582058 - RNA, 19 nt, Artificial Sequence
  Description of Artificial Sequence: Synthetic oligonucleotide
  Antisense strand to SEQ ID NO: 1582057
cuuaguagcggacacauga

SEQ ID NO: 1582059 - RNA, 19 nt, Artificial Sequence
  Description of Artificial Sequence: Synthetic oligonucleotide
  Sense strand starting at position 1377 of SEQ ID NO: 1560183
gcuacuaagucagaaacaa

SEQ ID NO: 1582060 - RNA, 19 nt, Artificial Sequence
  Description of Artificial Sequence: Synthetic oligonucleotide
  Antisense strand to SEQ ID NO: 1582059
uuguuucugacuuaguagc

SEQ ID NO: 1582061 - RNA, 19 nt, Artificial Sequence
  Description of Artificial Sequence: Synthetic oligonucleotide
  Sense strand starting at position 1496 of SEQ ID NO: 1560183
gccaguguuggcgacaaac

SEQ ID NO: 1582062 - RNA, 19 nt, Artificial Sequence
  Description of Artificial Sequence: Synthetic oligonucleotide
  Antisense strand to SEQ ID NO: 1582061
guuugucgccaacacuggc

SEQ ID NO: 1582063 - RNA, 19 nt, Artificial Sequence
  Description of Artificial Sequence: Synthetic oligonucleotide
  Sense strand starting at position 1505 of SEQ ID NO: 1560183
ggcgacaaacuguaaugaa

SEQ ID NO: 1582064 - RNA, 19 nt, Artificial Sequence
  Description of Artificial Sequence: Synthetic oligonucleotide
  Antisense strand to SEQ ID NO: 1582063
uucauuacaguuugucgcc

SEQ ID NO: 1582065 - RNA, 19 nt, Artificial Sequence
  Description of Artificial Sequence: Synthetic oligonucleotide
  Sense strand starting at position 1610 of SEQ ID NO: 1560183
caagacuugugccgcagaa

SEQ ID NO: 1582066 - RNA, 19 nt, Artificial Sequence
  Description of Artificial Sequence: Synthetic oligonucleotide
  Antisense strand to SEQ ID NO: 1582065
uucugcggcacaagucuug

SEQ ID NO: 1582067 - RNA, 19 nt, Artificial Sequence
  Description of Artificial Sequence: Synthetic oligonucleotide
  Sense strand starting at position 1612 of SEQ ID NO: 1560183
agacuugugccgcagaaau

SEQ ID NO: 1582068 - RNA, 19 nt, Artificial Sequence
  Description of Artificial Sequence: Synthetic oligonucleotide
  Antisense strand to SEQ ID NO: 1582067
auuucugcggcacaagucu

SEQ ID NO: 1582069 - RNA, 19 nt, Artificial Sequence
  Description of Artificial Sequence: Synthetic oligonucleotide
  Sense strand starting at position 1614 of SEQ ID NO: 1560183
acuugugccgcagaaauca

SEQ ID NO: 1582070 - RNA, 19 nt, Artificial Sequence
  Description of Artificial Sequence: Synthetic oligonucleotide
  Antisense strand to SEQ ID NO: 1582069
ugauuucugcggcacaagu

SEQ ID NO: 1582071 - RNA, 19 nt, Artificial Sequence
  Description of Artificial Sequence: Synthetic oligonucleotide
  Sense strand starting at position 1717 of SEQ ID NO: 1560183
ugccuuuguauaggaggau

SEQ ID NO: 1582072 - RNA, 19 nt, Artificial Sequence
  Description of Artificial Sequence: Synthetic oligonucleotide
  Antisense strand to SEQ ID NO: 1582071
auccuccuauacaaaggca

SEQ ID NO: 1582073 - RNA, 19 nt, Artificial Sequence
  Description of Artificial Sequence: Synthetic oligonucleotide
  Sense strand starting at position 1871 of SEQ ID NO: 1560183
gucuguauccuggagguga

SEQ ID NO: 1582074 - RNA, 19 nt, Artificial Sequence
  Description of Artificial Sequence: Synthetic oligonucleotide
  Antisense strand to SEQ ID NO: 1582073
ucaccuccaggauacagac

SEQ ID NO: 1582075 - RNA, 19 nt, Artificial Sequence
  Description of Artificial Sequence: Synthetic oligonucleotide
  Sense strand starting at position 1873 of SEQ ID NO: 1560183
cuguauccuggaggugaca

SEQ ID NO: 1582076 - RNA, 19 nt, Artificial Sequence
  Description of Artificial Sequence: Synthetic oligonucleotide
  Antisense strand to SEQ ID NO: 1582075
ugucaccuccaggauacag

SEQ ID NO: 1582077 - RNA, 19 nt, Artificial Sequence
  Description of Artificial Sequence: Synthetic oligonucleotide
  Sense strand starting at position 1912 of SEQ ID NO: 1560183
gcagccguggccuuauaua

SEQ ID NO: 1582078 - RNA, 19 nt, Artificial Sequence
  Description of Artificial Sequence: Synthetic oligonucleotide
  Antisense strand to SEQ ID NO: 1582077
uauauaaggccacggcugc

SEQ ID NO: 1582079 - RNA, 19 nt, Artificial Sequence
  Description of Artificial Sequence: Synthetic oligonucleotide
  Sense strand starting at position 1934 of SEQ ID NO: 1560183
ggaccuaggcugugcuauu

SEQ ID NO: 1582080 - RNA, 19 nt, Artificial Sequence
  Description of Artificial Sequence: Synthetic oligonucleotide
  Antisense strand to SEQ ID NO: 1582079
aauagcacagccuaggucc

SEQ ID NO: 1582081 - RNA, 19 nt, Artificial Sequence
  Description of Artificial Sequence: Synthetic oligonucleotide
  Sense strand starting at position 2493 of SEQ ID NO: 1560183
cuggcugaguuggagagau

SEQ ID NO: 1582082 - RNA, 19 nt, Artificial Sequence
  Description of Artificial Sequence: Synthetic oligonucleotide
  Antisense strand to SEQ ID NO: 1582081
aucucuccaacucagccag

SEQ ID NO: 1582083 - RNA, 19 nt, Artificial Sequence
  Description of Artificial Sequence: Synthetic oligonucleotide
  Sense strand starting at position 2495 of SEQ ID NO: 1560183
ggcugaguuggagagauuc

SEQ ID NO: 1582084 - RNA, 19 nt, Artificial Sequence
  Description of Artificial Sequence: Synthetic oligonucleotide
  Antisense strand to SEQ ID NO: 1582083
gaaucucuccaacucagcc

SEQ ID NO: 1582085 - RNA, 19 nt, Artificial Sequence
  Description of Artificial Sequence: Synthetic oligonucleotide
  Sense strand starting at position 2738 of SEQ ID NO: 1560183
cgccacguguccugguuaa

SEQ ID NO: 1582086 - RNA, 19 nt, Artificial Sequence
  Description of Artificial Sequence: Synthetic oligonucleotide
  Antisense strand to SEQ ID NO: 1582085
uuaaccaggacacguggcg

SEQ ID NO: 1582087 - RNA, 19 nt, Artificial Sequence
  Description of Artificial Sequence: Synthetic oligonucleotide
  Sense strand starting at position 2742 of SEQ ID NO: 1560183
acguguccugguuaauuau

SEQ ID NO: 1582088 - RNA, 19 nt, Artificial Sequence
  Description of Artificial Sequence: Synthetic oligonucleotide
  Antisense strand to SEQ ID NO: 1582087
auaauuaaccaggacacgu

SEQ ID NO: 1582089 - RNA, 19 nt, Artificial Sequence
  Description of Artificial Sequence: Synthetic oligonucleotide
  Sense strand starting at position 2963 of SEQ ID NO: 1560183
gguucuguggaggagagua

SEQ ID NO: 1582090 - RNA, 19 nt, Artificial Sequence
  Description of Artificial Sequence: Synthetic oligonucleotide
  Antisense strand to SEQ ID NO: 1582089
uacucuccuccacagaacc

SEQ ID NO: 1582091 - RNA, 19 nt, Artificial Sequence
  Description of Artificial Sequence: Synthetic oligonucleotide
  Sense strand starting at position 3061 of SEQ ID NO: 1560183
ccaggauugcgacgaagaa

SEQ ID NO: 1582092 - RNA, 19 nt, Artificial Sequence
  Description of Artificial Sequence: Synthetic oligonucleotide
  Antisense strand to SEQ ID NO: 1582091
uucuucgucgcaauccugg

SEQ ID NO: 1582093 - RNA, 19 nt, Artificial Sequence
  Description of Artificial Sequence: Synthetic oligonucleotide
  Sense strand starting at position 3098 of SEQ ID NO: 1560183
ugaguuccucccuauccca

SEQ ID NO: 1582094 - RNA, 19 nt, Artificial Sequence
  Description of Artificial Sequence: Synthetic oligonucleotide
  Antisense strand to SEQ ID NO: 1582093
ugggauagggaggaacuca

SEQ ID NO: 1582095 - RNA, 19 nt, Artificial Sequence
  Description of Artificial Sequence: Synthetic oligonucleotide
  Sense strand starting at position 3149 of SEQ ID NO: 1560183
gcaggugaggacuggcuua

SEQ ID NO: 1582096 - RNA, 19 nt, Artificial Sequence
  Description of Artificial Sequence: Synthetic oligonucleotide
  Antisense strand to SEQ ID NO: 1582095
uaagccaguccucaccugc

SEQ ID NO: 1582097 - RNA, 19 nt, Artificial Sequence
  Description of Artificial Sequence: Synthetic oligonucleotide
  Sense strand starting at position 3331 of SEQ ID NO: 1560183
uggaacuggucucgaaaca

SEQ ID NO: 1582098 - RNA, 19 nt, Artificial Sequence
  Description of Artificial Sequence: Synthetic oligonucleotide
  Antisense strand to SEQ ID NO: 1582097
uguuucgagaccaguucca

SEQ ID NO: 1582099 - RNA, 19 nt, Artificial Sequence
  Description of Artificial Sequence: Synthetic oligonucleotide
  Sense strand starting at position 3349 of SEQ ID NO: 1560183
agggaucuaucaggcacuu

SEQ ID NO: 1582100 - RNA, 19 nt, Artificial Sequence
  Description of Artificial Sequence: Synthetic oligonucleotide
  Antisense strand to SEQ ID NO: 1582099
aagugccugauagaucccu

SEQ ID NO: 1582101 - RNA, 19 nt, Artificial Sequence
  Description of Artificial Sequence: Synthetic oligonucleotide
  Sense strand starting at position 3397 of SEQ ID NO: 1560183
cgccguccuggaggugaua

SEQ ID NO: 1582102 - RNA, 19 nt, Artificial Sequence
  Description of Artificial Sequence: Synthetic oligonucleotide
  Antisense strand to SEQ ID NO: 1582101
uaucaccuccaggacggcg

SEQ ID NO: 1582103 - RNA, 19 nt, Artificial Sequence
  Description of Artificial Sequence: Synthetic oligonucleotide
  Sense strand starting at position 3467 of SEQ ID NO: 1560183
gcaggccucuuugggaaga

SEQ ID NO: 1582104 - RNA, 19 nt, Artificial Sequence
  Description of Artificial Sequence: Synthetic oligonucleotide
  Antisense strand to SEQ ID NO: 1582103
ucuucccaaagaggccugc

SEQ ID NO: 1582105 - RNA, 19 nt, Artificial Sequence
  Description of Artificial Sequence: Synthetic oligonucleotide
  Sense strand starting at position 3468 of SEQ ID NO: 1560183
caggccucuuugggaagau

SEQ ID NO: 1582106 - RNA, 19 nt, Artificial Sequence
  Description of Artificial Sequence: Synthetic oligonucleotide
  Antisense strand to SEQ ID NO: 1582105
aucuucccaaagaggccug

SEQ ID NO: 1582107 - RNA, 19 nt, Artificial Sequence
  Description of Artificial Sequence: Synthetic oligonucleotide
  Sense strand starting at position 3571 of SEQ ID NO: 1560183
ugagaauggcugggcacau

SEQ ID NO: 1582108 - RNA, 19 nt, Artificial Sequence
  Description of Artificial Sequence: Synthetic oligonucleotide
  Antisense strand to SEQ ID NO: 1582107
augugcccagccauucuca

SEQ ID NO: 1582109 - RNA, 19 nt, Artificial Sequence
  Description of Artificial Sequence: Synthetic oligonucleotide
  Sense strand starting at position 3724 of SEQ ID NO: 1560183
ucccauugugauugacagu

SEQ ID NO: 1582110 - RNA, 19 nt, Artificial Sequence
  Description of Artificial Sequence: Synthetic oligonucleotide
  Antisense strand to SEQ ID NO: 1582109
acugucaaucacaauggga

SEQ ID NO: 1582111 - RNA, 19 nt, Artificial Sequence
  Description of Artificial Sequence: Synthetic oligonucleotide
  Sense strand starting at position 3727 of SEQ ID NO: 1560183
cauugugauugacagugaa

SEQ ID NO: 1582112 - RNA, 19 nt, Artificial Sequence
  Description of Artificial Sequence: Synthetic oligonucleotide
  Antisense strand to SEQ ID NO: 1582111
uucacugucaaucacaaug

SEQ ID NO: 1582113 - RNA, 19 nt, Artificial Sequence
  Description of Artificial Sequence: Synthetic oligonucleotide
  Sense strand starting at position 294 of SEQ ID NO: 1560184
aggugauccacuugggauu

SEQ ID NO: 1582114 - RNA, 19 nt, Artificial Sequence
  Description of Artificial Sequence: Synthetic oligonucleotide
  Antisense strand to SEQ ID NO: 1582113
aaucccaaguggaucaccu

SEQ ID NO: 1582115 - RNA, 19 nt, Artificial Sequence
  Description of Artificial Sequence: Synthetic oligonucleotide
  Sense strand starting at position 295 of SEQ ID NO: 1560184
ggugauccacuugggauua

SEQ ID NO: 1582116 - RNA, 19 nt, Artificial Sequence
  Description of Artificial Sequence: Synthetic oligonucleotide
  Antisense strand to SEQ ID NO: 1582115
uaaucccaaguggaucacc

SEQ ID NO: 1582117 - RNA, 19 nt, Artificial Sequence
  Description of Artificial Sequence: Synthetic oligonucleotide
  Sense strand starting at position 387 of SEQ ID NO: 1560184
cugagcucuucugggaaug

SEQ ID NO: 1582118 - RNA, 19 nt, Artificial Sequence
  Description of Artificial Sequence: Synthetic oligonucleotide
  Antisense strand to SEQ ID NO: 1582117
cauucccagaagagcucag

SEQ ID NO: 1582119 - RNA, 19 nt, Artificial Sequence
  Description of Artificial Sequence: Synthetic oligonucleotide
  Sense strand starting at position 461 of SEQ ID NO: 1560184
gacugcucugaggguuaca

SEQ ID NO: 1582120 - RNA, 19 nt, Artificial Sequence
  Description of Artificial Sequence: Synthetic oligonucleotide
  Antisense strand to SEQ ID NO: 1582119
uguaacccucagagcaguc

SEQ ID NO: 1582121 - RNA, 19 nt, Artificial Sequence
  Description of Artificial Sequence: Synthetic oligonucleotide
  Sense strand starting at position 568 of SEQ ID NO: 1560184
ggaucccaccaaugauuau

SEQ ID NO: 1582122 - RNA, 19 nt, Artificial Sequence
  Description of Artificial Sequence: Synthetic oligonucleotide
  Antisense strand to SEQ ID NO: 1582121
auaaucauuggugggaucc

SEQ ID NO: 1582123 - RNA, 19 nt, Artificial Sequence
  Description of Artificial Sequence: Synthetic oligonucleotide
  Sense strand starting at position 604 of SEQ ID NO: 1560184
ugaauauacuccugaggaa

SEQ ID NO: 1582124 - RNA, 19 nt, Artificial Sequence
  Description of Artificial Sequence: Synthetic oligonucleotide
  Antisense strand to SEQ ID NO: 1582123
uuccucaggaguauauuca

SEQ ID NO: 1582125 - RNA, 19 nt, Artificial Sequence
  Description of Artificial Sequence: Synthetic oligonucleotide
  Sense strand starting at position 607 of SEQ ID NO: 1560184
auauacuccugaggaaaug

SEQ ID NO: 1582126 - RNA, 19 nt, Artificial Sequence
  Description of Artificial Sequence: Synthetic oligonucleotide
  Antisense strand to SEQ ID NO: 1582125
cauuuccucaggaguauau

SEQ ID NO: 1582127 - RNA, 19 nt, Artificial Sequence
  Description of Artificial Sequence: Synthetic oligonucleotide
  Sense strand starting at position 626 of SEQ ID NO: 1560184
agccucuugucuugacaua

SEQ ID NO: 1582128 - RNA, 19 nt, Artificial Sequence
  Description of Artificial Sequence: Synthetic oligonucleotide
  Antisense strand to SEQ ID NO: 1582127
uaugucaagacaagaggcu

SEQ ID NO: 1582129 - RNA, 19 nt, Artificial Sequence
  Description of Artificial Sequence: Synthetic oligonucleotide
  Sense strand starting at position 717 of SEQ ID NO: 1560184
gccaguuacucacgaucuu

SEQ ID NO: 1582130 - RNA, 19 nt, Artificial Sequence
  Description of Artificial Sequence: Synthetic oligonucleotide
  Antisense strand to SEQ ID NO: 1582129
aagaucgugaguaacuggc

SEQ ID NO: 1582131 - RNA, 19 nt, Artificial Sequence
  Description of Artificial Sequence: Synthetic oligonucleotide
  Sense strand starting at position 718 of SEQ ID NO: 1560184
ccaguuacucacgaucuuu

SEQ ID NO: 1582132 - RNA, 19 nt, Artificial Sequence
  Description of Artificial Sequence: Synthetic oligonucleotide
  Antisense strand to SEQ ID NO: 1582131
aaagaucgugaguaacugg

SEQ ID NO: 1582133 - RNA, 19 nt, Artificial Sequence
  Description of Artificial Sequence: Synthetic oligonucleotide
  Sense strand starting at position 850 of SEQ ID NO: 1560184
gccucaaccugagggauga

SEQ ID NO: 1582134 - RNA, 19 nt, Artificial Sequence
  Description of Artificial Sequence: Synthetic oligonucleotide
  Antisense strand to SEQ ID NO: 1582133
ucaucccucagguugaggc

SEQ ID NO: 1582135 - RNA, 19 nt, Artificial Sequence
  Description of Artificial Sequence: Synthetic oligonucleotide
  Sense strand starting at position 879 of SEQ ID NO: 1560184
aaagucagauggucuguga

SEQ ID NO: 1582136 - RNA, 19 nt, Artificial Sequence
  Description of Artificial Sequence: Synthetic oligonucleotide
  Antisense strand to SEQ ID NO: 1582135
ucacagaccaucugacuuu

SEQ ID NO: 1582137 - RNA, 19 nt, Artificial Sequence
  Description of Artificial Sequence: Synthetic oligonucleotide
  Sense strand starting at position 882 of SEQ ID NO: 1560184
gucagauggucugugaaac

SEQ ID NO: 1582138 - RNA, 19 nt, Artificial Sequence
  Description of Artificial Sequence: Synthetic oligonucleotide
  Antisense strand to SEQ ID NO: 1582137
guuucacagaccaucugac

SEQ ID NO: 1582139 - RNA, 19 nt, Artificial Sequence
  Description of Artificial Sequence: Synthetic oligonucleotide
  Sense strand starting at position 900 of SEQ ID NO: 1560184
cccguaugggcagaaucaa

SEQ ID NO: 1582140 - RNA, 19 nt, Artificial Sequence
  Description of Artificial Sequence: Synthetic oligonucleotide
  Antisense strand to SEQ ID NO: 1582139
uugauucugcccauacggg

SEQ ID NO: 1582141 - RNA, 19 nt, Artificial Sequence
  Description of Artificial Sequence: Synthetic oligonucleotide
  Sense strand starting at position 940 of SEQ ID NO: 1560184
cagagucgaucccaaacaa

SEQ ID NO: 1582142 - RNA, 19 nt, Artificial Sequence
  Description of Artificial Sequence: Synthetic oligonucleotide
  Antisense strand to SEQ ID NO: 1582141
uuguuugggaucgacucug

SEQ ID NO: 1582143 - RNA, 19 nt, Artificial Sequence
  Description of Artificial Sequence: Synthetic oligonucleotide
  Sense strand starting at position 998 of SEQ ID NO: 1560184
aacaguaugccagauguuc

SEQ ID NO: 1582144 - RNA, 19 nt, Artificial Sequence
  Description of Artificial Sequence: Synthetic oligonucleotide
  Antisense strand to SEQ ID NO: 1582143
gaacaucuggcauacuguu

SEQ ID NO: 1582145 - RNA, 19 nt, Artificial Sequence
  Description of Artificial Sequence: Synthetic oligonucleotide
  Sense strand starting at position 1038 of SEQ ID NO: 1560184
gaucuagaagcuugggcau

SEQ ID NO: 1582146 - RNA, 19 nt, Artificial Sequence
  Description of Artificial Sequence: Synthetic oligonucleotide
  Antisense strand to SEQ ID NO: 1582145
augcccaagcuucuagauc

SEQ ID NO: 1582147 - RNA, 19 nt, Artificial Sequence
  Description of Artificial Sequence: Synthetic oligonucleotide
  Sense strand starting at position 1069 of SEQ ID NO: 1560184
ucaggugauucugagguga

SEQ ID NO: 1582148 - RNA, 19 nt, Artificial Sequence
  Description of Artificial Sequence: Synthetic oligonucleotide
  Antisense strand to SEQ ID NO: 1582147
ucaccucagaaucaccuga

SEQ ID NO: 1582149 - RNA, 19 nt, Artificial Sequence
  Description of Artificial Sequence: Synthetic oligonucleotide
  Sense strand starting at position 1073 of SEQ ID NO: 1560184
gugauucugaggugagcau

SEQ ID NO: 1582150 - RNA, 19 nt, Artificial Sequence
  Description of Artificial Sequence: Synthetic oligonucleotide
  Antisense strand to SEQ ID NO: 1582149
augcucaccucagaaucac

SEQ ID NO: 1582151 - RNA, 19 nt, Artificial Sequence
  Description of Artificial Sequence: Synthetic oligonucleotide
  Sense strand starting at position 1122 of SEQ ID NO: 1560184
cgcuggagucgggaaugaa

SEQ ID NO: 1582152 - RNA, 19 nt, Artificial Sequence
  Description of Artificial Sequence: Synthetic oligonucleotide
  Antisense strand to SEQ ID NO: 1582151
uucauucccgacuccagcg

SEQ ID NO: 1582153 - RNA, 19 nt, Artificial Sequence
  Description of Artificial Sequence: Synthetic oligonucleotide
  Sense strand starting at position 1146 of SEQ ID NO: 1560184
uugaaacaucagcaguguu

SEQ ID NO: 1582154 - RNA, 19 nt, Artificial Sequence
  Description of Artificial Sequence: Synthetic oligonucleotide
  Antisense strand to SEQ ID NO: 1582153
aacacugcugauguuucaa

SEQ ID NO: 1582155 - RNA, 19 nt, Artificial Sequence
  Description of Artificial Sequence: Synthetic oligonucleotide
  Sense strand starting at position 1149 of SEQ ID NO: 1560184
aaacaucagcaguguuuga

SEQ ID NO: 1582156 - RNA, 19 nt, Artificial Sequence
  Description of Artificial Sequence: Synthetic oligonucleotide
  Antisense strand to SEQ ID NO: 1582155
ucaaacacugcugauguuu

SEQ ID NO: 1582157 - RNA, 19 nt, Artificial Sequence
  Description of Artificial Sequence: Synthetic oligonucleotide
  Sense strand starting at position 1153 of SEQ ID NO: 1560184
aucagcaguguuugaagua

SEQ ID NO: 1582158 - RNA, 19 nt, Artificial Sequence
  Description of Artificial Sequence: Synthetic oligonucleotide
  Antisense strand to SEQ ID NO: 1582157
uacuucaaacacugcugau

SEQ ID NO: 1582159 - RNA, 19 nt, Artificial Sequence
  Description of Artificial Sequence: Synthetic oligonucleotide
  Sense strand starting at position 1265 of SEQ ID NO: 1560184
gguaugagucuggguggua

SEQ ID NO: 1582160 - RNA, 19 nt, Artificial Sequence
  Description of Artificial Sequence: Synthetic oligonucleotide
  Antisense strand to SEQ ID NO: 1582159
uaccacccagacucauacc

SEQ ID NO: 1582161 - RNA, 19 nt, Artificial Sequence
  Description of Artificial Sequence: Synthetic oligonucleotide
  Sense strand starting at position 1266 of SEQ ID NO: 1560184
guaugagucugggugguag

SEQ ID NO: 1582162 - RNA, 19 nt, Artificial Sequence
  Description of Artificial Sequence: Synthetic oligonucleotide
  Antisense strand to SEQ ID NO: 1582161
cuaccacccagacucauac

SEQ ID NO: 1582163 - RNA, 19 nt, Artificial Sequence
  Description of Artificial Sequence: Synthetic oligonucleotide
  Sense strand starting at position 1347 of SEQ ID NO: 1560184
agugcaguuguaugaaggu

SEQ ID NO: 1582164 - RNA, 19 nt, Artificial Sequence
  Description of Artificial Sequence: Synthetic oligonucleotide
  Antisense strand to SEQ ID NO: 1582163
accuucauacaacugcacu

SEQ ID NO: 1582165 - RNA, 19 nt, Artificial Sequence
  Description of Artificial Sequence: Synthetic oligonucleotide
  Sense strand starting at position 1435 of SEQ ID NO: 1560184
gaguguugcaaggagacca

SEQ ID NO: 1582166 - RNA, 19 nt, Artificial Sequence
  Description of Artificial Sequence: Synthetic oligonucleotide
  Antisense strand to SEQ ID NO: 1582165
uggucuccuugcaacacuc

SEQ ID NO: 1582167 - RNA, 19 nt, Artificial Sequence
  Description of Artificial Sequence: Synthetic oligonucleotide
  Sense strand starting at position 1454 of SEQ ID NO: 1560184
gagugaagcugaggucuaa

SEQ ID NO: 1582168 - RNA, 19 nt, Artificial Sequence
  Description of Artificial Sequence: Synthetic oligonucleotide
  Antisense strand to SEQ ID NO: 1582167
uuagaccucagcuucacuc

SEQ ID NO: 1582169 - RNA, 19 nt, Artificial Sequence
  Description of Artificial Sequence: Synthetic oligonucleotide
  Sense strand starting at position 1518 of SEQ ID NO: 1560184
gagcguagagccugagaga

SEQ ID NO: 1582170 - RNA, 19 nt, Artificial Sequence
  Description of Artificial Sequence: Synthetic oligonucleotide
  Antisense strand to SEQ ID NO: 1582169
ucucucaggcucuacgcuc

SEQ ID NO: 1582171 - RNA, 19 nt, Artificial Sequence
  Description of Artificial Sequence: Synthetic oligonucleotide
  Sense strand starting at position 2086 of SEQ ID NO: 1560184
gcgggaucccgaggaagaa

SEQ ID NO: 1582172 - RNA, 19 nt, Artificial Sequence
  Description of Artificial Sequence: Synthetic oligonucleotide
  Antisense strand to SEQ ID NO: 1582171
uucuuccucgggaucccgc

SEQ ID NO: 1582173 - RNA, 19 nt, Artificial Sequence
  Description of Artificial Sequence: Synthetic oligonucleotide
  Sense strand starting at position 2784 of SEQ ID NO: 1560184
ggaggcuuucuuugcuacu

SEQ ID NO: 1582174 - RNA, 19 nt, Artificial Sequence
  Description of Artificial Sequence: Synthetic oligonucleotide
  Antisense strand to SEQ ID NO: 1582173
aguagcaaagaaagccucc

SEQ ID NO: 1582175 - RNA, 19 nt, Artificial Sequence
  Description of Artificial Sequence: Synthetic oligonucleotide
  Sense strand starting at position 2785 of SEQ ID NO: 1560184
gaggcuuucuuugcuacua

SEQ ID NO: 1582176 - RNA, 19 nt, Artificial Sequence
  Description of Artificial Sequence: Synthetic oligonucleotide
  Antisense strand to SEQ ID NO: 1582175
uaguagcaaagaaagccuc

SEQ ID NO: 1582177 - RNA, 19 nt, Artificial Sequence
  Description of Artificial Sequence: Synthetic oligonucleotide
  Sense strand starting at position 2786 of SEQ ID NO: 1560184
aggcuuucuuugcuacuaa

SEQ ID NO: 1582178 - RNA, 19 nt, Artificial Sequence
  Description of Artificial Sequence: Synthetic oligonucleotide
  Antisense strand to SEQ ID NO: 1582177
uuaguagcaaagaaagccu

SEQ ID NO: 1582179 - RNA, 19 nt, Artificial Sequence
  Description of Artificial Sequence: Synthetic oligonucleotide
  Sense strand starting at position 2787 of SEQ ID NO: 1560184
ggcuuucuuugcuacuaag

SEQ ID NO: 1582180 - RNA, 19 nt, Artificial Sequence
  Description of Artificial Sequence: Synthetic oligonucleotide
  Antisense strand to SEQ ID NO: 1582179
cuuaguagcaaagaaagcc

SEQ ID NO: 1582181 - RNA, 19 nt, Artificial Sequence
  Description of Artificial Sequence: Synthetic oligonucleotide
  Sense strand starting at position 2790 of SEQ ID NO: 1560184
uuucuuugcuacuaaggga

SEQ ID NO: 1582182 - RNA, 19 nt, Artificial Sequence
  Description of Artificial Sequence: Synthetic oligonucleotide
  Antisense strand to SEQ ID NO: 1582181
ucccuuaguagcaaagaaa

SEQ ID NO: 1582183 - RNA, 19 nt, Artificial Sequence
  Description of Artificial Sequence: Synthetic oligonucleotide
  Sense strand starting at position 3654 of SEQ ID NO: 1560184
agagaaguguagugugauu

SEQ ID NO: 1582184 - RNA, 19 nt, Artificial Sequence
  Description of Artificial Sequence: Synthetic oligonucleotide
  Antisense strand to SEQ ID NO: 1582183
aaucacacuacacuucucu

SEQ ID NO: 1582185 - RNA, 19 nt, Artificial Sequence
  Description of Artificial Sequence: Synthetic oligonucleotide
  Sense strand starting at position 3663 of SEQ ID NO: 1560184
uagugugauuuagggcuaa

SEQ ID NO: 1582186 - RNA, 19 nt, Artificial Sequence
  Description of Artificial Sequence: Synthetic oligonucleotide
  Antisense strand to SEQ ID NO: 1582185
uuagcccuaaaucacacua

SEQ ID NO: 1582187 - RNA, 19 nt, Artificial Sequence
  Description of Artificial Sequence: Synthetic oligonucleotide
  Sense strand starting at position 3685 of SEQ ID NO: 1560184
cugaucaggcccuaaauca

SEQ ID NO: 1582188 - RNA, 19 nt, Artificial Sequence
  Description of Artificial Sequence: Synthetic oligonucleotide
  Antisense strand to SEQ ID NO: 1582187
ugauuuagggccugaucag

SEQ ID NO: 1582189 - RNA, 19 nt, Artificial Sequence
  Description of Artificial Sequence: Synthetic oligonucleotide
  Sense strand starting at position 3726 of SEQ ID NO: 1560184
gugauaucaagguggccuu

SEQ ID NO: 1582190 - RNA, 19 nt, Artificial Sequence
  Description of Artificial Sequence: Synthetic oligonucleotide
  Antisense strand to SEQ ID NO: 1582189
aaggccaccuugauaucac

SEQ ID NO: 1582191 - RNA, 19 nt, Artificial Sequence
  Description of Artificial Sequence: Synthetic oligonucleotide
  Sense strand starting at position 117 of SEQ ID NO: 1560185
cuaacuugagauugugagu

SEQ ID NO: 1582192 - RNA, 19 nt, Artificial Sequence
  Description of Artificial Sequence: Synthetic oligonucleotide
  Antisense strand to SEQ ID NO: 1582191
acucacaaucucaaguuag

SEQ ID NO: 1582193 - RNA, 19 nt, Artificial Sequence
  Description of Artificial Sequence: Synthetic oligonucleotide
  Sense strand starting at position 324 of SEQ ID NO: 1560185
gcaguacuugcacaaauga

SEQ ID NO: 1582194 - RNA, 19 nt, Artificial Sequence
  Description of Artificial Sequence: Synthetic oligonucleotide
  Antisense strand to SEQ ID NO: 1582193
ucauuugugcaaguacugc

SEQ ID NO: 1582195 - RNA, 19 nt, Artificial Sequence
  Description of Artificial Sequence: Synthetic oligonucleotide
  Sense strand starting at position 355 of SEQ ID NO: 1560185
agggaaguuauuggcuaga

SEQ ID NO: 1582196 - RNA, 19 nt, Artificial Sequence
  Description of Artificial Sequence: Synthetic oligonucleotide
  Antisense strand to SEQ ID NO: 1582195
ucuagccaauaacuucccu

SEQ ID NO: 1582197 - RNA, 19 nt, Artificial Sequence
  Description of Artificial Sequence: Synthetic oligonucleotide
  Sense strand starting at position 357 of SEQ ID NO: 1560185
ggaaguuauuggcuagaau

SEQ ID NO: 1582198 - RNA, 19 nt, Artificial Sequence
  Description of Artificial Sequence: Synthetic oligonucleotide
  Antisense strand to SEQ ID NO: 1582197
auucuagccaauaacuucc

SEQ ID NO: 1582199 - RNA, 19 nt, Artificial Sequence
  Description of Artificial Sequence: Synthetic oligonucleotide
  Sense strand starting at position 358 of SEQ ID NO: 1560185
gaaguuauuggcuagaauc

SEQ ID NO: 1582200 - RNA, 19 nt, Artificial Sequence
  Description of Artificial Sequence: Synthetic oligonucleotide
  Antisense strand to SEQ ID NO: 1582199
gauucuagccaauaacuuc

SEQ ID NO: 1582201 - RNA, 19 nt, Artificial Sequence
  Description of Artificial Sequence: Synthetic oligonucleotide
  Sense strand starting at position 360 of SEQ ID NO: 1560185
aguuauuggcuagaaucua

SEQ ID NO: 1582202 - RNA, 19 nt, Artificial Sequence
  Description of Artificial Sequence: Synthetic oligonucleotide
  Antisense strand to SEQ ID NO: 1582201
uagauucuagccaauaacu

SEQ ID NO: 1582203 - RNA, 19 nt, Artificial Sequence
  Description of Artificial Sequence: Synthetic oligonucleotide
  Sense strand starting at position 375 of SEQ ID NO: 1560185
ucuauaaauggaugguauu

SEQ ID NO: 1582204 - RNA, 19 nt, Artificial Sequence
  Description of Artificial Sequence: Synthetic oligonucleotide
  Antisense strand to SEQ ID NO: 1582203
aauaccauccauuuauaga

SEQ ID NO: 1582205 - RNA, 19 nt, Artificial Sequence
  Description of Artificial Sequence: Synthetic oligonucleotide
  Sense strand starting at position 996 of SEQ ID NO: 1560185
cuguaagcucugccuugua

SEQ ID NO: 1582206 - RNA, 19 nt, Artificial Sequence
  Description of Artificial Sequence: Synthetic oligonucleotide
  Antisense strand to SEQ ID NO: 1582205
uacaaggcagagcuuacag

SEQ ID NO: 1582207 - RNA, 19 nt, Artificial Sequence
  Description of Artificial Sequence: Synthetic oligonucleotide
  Sense strand starting at position 1253 of SEQ ID NO: 1560185
ucucauaaaugcucagaga

SEQ ID NO: 1582208 - RNA, 19 nt, Artificial Sequence
  Description of Artificial Sequence: Synthetic oligonucleotide
  Antisense strand to SEQ ID NO: 1582207
ucucugagcauuuaugaga

SEQ ID NO: 1582209 - RNA, 19 nt, Artificial Sequence
  Description of Artificial Sequence: Synthetic oligonucleotide
  Sense strand starting at position 1267 of SEQ ID NO: 1560185
agagauaaguccucgguaa

SEQ ID NO: 1582210 - RNA, 19 nt, Artificial Sequence
  Description of Artificial Sequence: Synthetic oligonucleotide
  Antisense strand to SEQ ID NO: 1582209
uuaccgaggacuuaucucu

SEQ ID NO: 1582211 - RNA, 19 nt, Artificial Sequence
  Description of Artificial Sequence: Synthetic oligonucleotide
  Sense strand starting at position 1268 of SEQ ID NO: 1560185
gagauaaguccucgguaac

SEQ ID NO: 1582212 - RNA, 19 nt, Artificial Sequence
  Description of Artificial Sequence: Synthetic oligonucleotide
  Antisense strand to SEQ ID NO: 1582211
guuaccgaggacuuaucuc

SEQ ID NO: 1582213 - RNA, 19 nt, Artificial Sequence
  Description of Artificial Sequence: Synthetic oligonucleotide
  Sense strand starting at position 1269 of SEQ ID NO: 1560185
agauaaguccucgguaacu

SEQ ID NO: 1582214 - RNA, 19 nt, Artificial Sequence
  Description of Artificial Sequence: Synthetic oligonucleotide
  Antisense strand to SEQ ID NO: 1582213
aguuaccgaggacuuaucu

SEQ ID NO: 1582215 - RNA, 19 nt, Artificial Sequence
  Description of Artificial Sequence: Synthetic oligonucleotide
  Sense strand starting at position 1271 of SEQ ID NO: 1560185
auaaguccucgguaacuca

SEQ ID NO: 1582216 - RNA, 19 nt, Artificial Sequence
  Description of Artificial Sequence: Synthetic oligonucleotide
  Antisense strand to SEQ ID NO: 1582215
ugaguuaccgaggacuuau

SEQ ID NO: 1582217 - RNA, 19 nt, Artificial Sequence
  Description of Artificial Sequence: Synthetic oligonucleotide
  Sense strand starting at position 1664 of SEQ ID NO: 1560185
aguuuacucucaucagaua

SEQ ID NO: 1582218 - RNA, 19 nt, Artificial Sequence
  Description of Artificial Sequence: Synthetic oligonucleotide
  Antisense strand to SEQ ID NO: 1582217
uaucugaugagaguaaacu

SEQ ID NO: 1582219 - RNA, 19 nt, Artificial Sequence
  Description of Artificial Sequence: Synthetic oligonucleotide
  Sense strand starting at position 1948 of SEQ ID NO: 1560185
ucugaauuguguccagacu

SEQ ID NO: 1582220 - RNA, 19 nt, Artificial Sequence
  Description of Artificial Sequence: Synthetic oligonucleotide
  Antisense strand to SEQ ID NO: 1582219
agucuggacacaauucaga

SEQ ID NO: 1582221 - RNA, 19 nt, Artificial Sequence
  Description of Artificial Sequence: Synthetic oligonucleotide
  Sense strand starting at position 1960 of SEQ ID NO: 1560185
ccagacuucugugugaauc

SEQ ID NO: 1582222 - RNA, 19 nt, Artificial Sequence
  Description of Artificial Sequence: Synthetic oligonucleotide
  Antisense strand to SEQ ID NO: 1582221
gauucacacagaagucugg

SEQ ID NO: 1582223 - RNA, 19 nt, Artificial Sequence
  Description of Artificial Sequence: Synthetic oligonucleotide
  Sense strand starting at position 1976 of SEQ ID NO: 1560185
aucucugagcugcagaauu

SEQ ID NO: 1582224 - RNA, 19 nt, Artificial Sequence
  Description of Artificial Sequence: Synthetic oligonucleotide
  Antisense strand to SEQ ID NO: 1582223
aauucugcagcucagagau

SEQ ID NO: 1582225 - RNA, 19 nt, Artificial Sequence
  Description of Artificial Sequence: Synthetic oligonucleotide
  Sense strand starting at position 2022 of SEQ ID NO: 1560185
ggcuuuauuccugauucca

SEQ ID NO: 1582226 - RNA, 19 nt, Artificial Sequence
  Description of Artificial Sequence: Synthetic oligonucleotide
  Antisense strand to SEQ ID NO: 1582225
uggaaucaggaauaaagcc

SEQ ID NO: 1582227 - RNA, 19 nt, Artificial Sequence
  Description of Artificial Sequence: Synthetic oligonucleotide
  Sense strand starting at position 2049 of SEQ ID NO: 1560185
ccaggaagguuuccucaca

SEQ ID NO: 1582228 - RNA, 19 nt, Artificial Sequence
  Description of Artificial Sequence: Synthetic oligonucleotide
  Antisense strand to SEQ ID NO: 1582227
ugugaggaaaccuuccugg

SEQ ID NO: 1582229 - RNA, 19 nt, Artificial Sequence
  Description of Artificial Sequence: Synthetic oligonucleotide
  Sense strand starting at position 2309 of SEQ ID NO: 1560185
uaaccugugcaaugguaaa

SEQ ID NO: 1582230 - RNA, 19 nt, Artificial Sequence
  Description of Artificial Sequence: Synthetic oligonucleotide
  Antisense strand to SEQ ID NO: 1582229
uuuaccauugcacagguua

SEQ ID NO: 1582231 - RNA, 19 nt, Artificial Sequence
  Description of Artificial Sequence: Synthetic oligonucleotide
  Sense strand starting at position 2350 of SEQ ID NO: 1560185
ggcacuuggcuuugaaaga

SEQ ID NO: 1582232 - RNA, 19 nt, Artificial Sequence
  Description of Artificial Sequence: Synthetic oligonucleotide
  Antisense strand to SEQ ID NO: 1582231
ucuuucaaagccaagugcc

SEQ ID NO: 1582233 - RNA, 19 nt, Artificial Sequence
  Description of Artificial Sequence: Synthetic oligonucleotide
  Sense strand starting at position 2391 of SEQ ID NO: 1560185
gugguucugggagagcaua

SEQ ID NO: 1582234 - RNA, 19 nt, Artificial Sequence
  Description of Artificial Sequence: Synthetic oligonucleotide
  Antisense strand to SEQ ID NO: 1582233
uaugcucucccagaaccac

SEQ ID NO: 1582235 - RNA, 19 nt, Artificial Sequence
  Description of Artificial Sequence: Synthetic oligonucleotide
  Sense strand starting at position 2404 of SEQ ID NO: 1560185
agcauagaucuugaucauu

SEQ ID NO: 1582236 - RNA, 19 nt, Artificial Sequence
  Description of Artificial Sequence: Synthetic oligonucleotide
  Antisense strand to SEQ ID NO: 1582235
aaugaucaagaucuaugcu

SEQ ID NO: 1582237 - RNA, 19 nt, Artificial Sequence
  Description of Artificial Sequence: Synthetic oligonucleotide
  Sense strand starting at position 2594 of SEQ ID NO: 1560185
ugucguucuccugcagauu

SEQ ID NO: 1582238 - RNA, 19 nt, Artificial Sequence
  Description of Artificial Sequence: Synthetic oligonucleotide
  Antisense strand to SEQ ID NO: 1582237
aaucugcaggagaacgaca

SEQ ID NO: 1582239 - RNA, 19 nt, Artificial Sequence
  Description of Artificial Sequence: Synthetic oligonucleotide
  Sense strand starting at position 2616 of SEQ ID NO: 1560185
ggagaaaggugagauuucu

SEQ ID NO: 1582240 - RNA, 19 nt, Artificial Sequence
  Description of Artificial Sequence: Synthetic oligonucleotide
  Antisense strand to SEQ ID NO: 1582239
agaaaucucaccuuucucc

SEQ ID NO: 1582241 - RNA, 19 nt, Artificial Sequence
  Description of Artificial Sequence: Synthetic oligonucleotide
  Sense strand starting at position 2653 of SEQ ID NO: 1560185
aagcgaugaggaugcauua

SEQ ID NO: 1582242 - RNA, 19 nt, Artificial Sequence
  Description of Artificial Sequence: Synthetic oligonucleotide
  Antisense strand to SEQ ID NO: 1582241
uaaugcauccucaucgcuu

SEQ ID NO: 1582243 - RNA, 19 nt, Artificial Sequence
  Description of Artificial Sequence: Synthetic oligonucleotide
  Sense strand starting at position 2660 of SEQ ID NO: 1560185
gaggaugcauuagcauuaa

SEQ ID NO: 1582244 - RNA, 19 nt, Artificial Sequence
  Description of Artificial Sequence: Synthetic oligonucleotide
  Antisense strand to SEQ ID NO: 1582243
uuaaugcuaaugcauccuc

SEQ ID NO: 1582245 - RNA, 19 nt, Artificial Sequence
  Description of Artificial Sequence: Synthetic oligonucleotide
  Sense strand starting at position 2686 of SEQ ID NO: 1560185
ugugcuugacccgacaaua

SEQ ID NO: 1582246 - RNA, 19 nt, Artificial Sequence
  Description of Artificial Sequence: Synthetic oligonucleotide
  Antisense strand to SEQ ID NO: 1582245
uauugucgggucaagcaca

SEQ ID NO: 1582247 - RNA, 19 nt, Artificial Sequence
  Description of Artificial Sequence: Synthetic oligonucleotide
  Sense strand starting at position 2965 of SEQ ID NO: 1560185
agaacuguagcuuguaaga

SEQ ID NO: 1582248 - RNA, 19 nt, Artificial Sequence
  Description of Artificial Sequence: Synthetic oligonucleotide
  Antisense strand to SEQ ID NO: 1582247
ucuuacaagcuacaguucu

SEQ ID NO: 1582249 - RNA, 19 nt, Artificial Sequence
  Description of Artificial Sequence: Synthetic oligonucleotide
  Sense strand starting at position 3109 of SEQ ID NO: 1560185
uaguaagcuguggauaaag

SEQ ID NO: 1582250 - RNA, 19 nt, Artificial Sequence
  Description of Artificial Sequence: Synthetic oligonucleotide
  Antisense strand to SEQ ID NO: 1582249
cuuuauccacagcuuacua

SEQ ID NO: 1582251 - RNA, 19 nt, Artificial Sequence
  Description of Artificial Sequence: Synthetic oligonucleotide
  Sense strand starting at position 3111 of SEQ ID NO: 1560185
guaagcuguggauaaagau

SEQ ID NO: 1582252 - RNA, 19 nt, Artificial Sequence
  Description of Artificial Sequence: Synthetic oligonucleotide
  Antisense strand to SEQ ID NO: 1582251
aucuuuauccacagcuuac

SEQ ID NO: 1582253 - RNA, 19 nt, Artificial Sequence
  Description of Artificial Sequence: Synthetic oligonucleotide
  Sense strand starting at position 3117 of SEQ ID NO: 1560185
uguggauaaagauguugau

SEQ ID NO: 1582254 - RNA, 19 nt, Artificial Sequence
  Description of Artificial Sequence: Synthetic oligonucleotide
  Antisense strand to SEQ ID NO: 1582253
aucaacaucuuuauccaca

SEQ ID NO: 1582255 - RNA, 19 nt, Artificial Sequence
  Description of Artificial Sequence: Synthetic oligonucleotide
  Sense strand starting at position 3136 of SEQ ID NO: 1560185
guuauuuacuucucaggca

SEQ ID NO: 1582256 - RNA, 19 nt, Artificial Sequence
  Description of Artificial Sequence: Synthetic oligonucleotide
  Antisense strand to SEQ ID NO: 1582255
ugccugagaaguaaauaac

SEQ ID NO: 1582257 - RNA, 19 nt, Artificial Sequence
  Description of Artificial Sequence: Synthetic oligonucleotide
  Sense strand starting at position 3178 of SEQ ID NO: 1560185
cagagagauugaucuucuu

SEQ ID NO: 1582258 - RNA, 19 nt, Artificial Sequence
  Description of Artificial Sequence: Synthetic oligonucleotide
  Antisense strand to SEQ ID NO: 1582257
aagaagaucaaucucucug

SEQ ID NO: 1582259 - RNA, 19 nt, Artificial Sequence
  Description of Artificial Sequence: Synthetic oligonucleotide
  Sense strand starting at position 3260 of SEQ ID NO: 1560185
uccauuaugcccuacgacu

SEQ ID NO: 1582260 - RNA, 19 nt, Artificial Sequence
  Description of Artificial Sequence: Synthetic oligonucleotide
  Antisense strand to SEQ ID NO: 1582259
agucguagggcauaaugga

SEQ ID NO: 1582261 - RNA, 19 nt, Artificial Sequence
  Description of Artificial Sequence: Synthetic oligonucleotide
  Sense strand starting at position 3396 of SEQ ID NO: 1560185
ggaugacaguucucuccuu

SEQ ID NO: 1582262 - RNA, 19 nt, Artificial Sequence
  Description of Artificial Sequence: Synthetic oligonucleotide
  Antisense strand to SEQ ID NO: 1582261
aaggagagaacugucaucc

SEQ ID NO: 1582263 - RNA, 19 nt, Artificial Sequence
  Description of Artificial Sequence: Synthetic oligonucleotide
  Sense strand starting at position 3523 of SEQ ID NO: 1560185
caagaaaugcuguaguaug

SEQ ID NO: 1582264 - RNA, 19 nt, Artificial Sequence
  Description of Artificial Sequence: Synthetic oligonucleotide
  Antisense strand to SEQ ID NO: 1582263
cauacuacagcauuucuug

SEQ ID NO: 1582265 - RNA, 19 nt, Artificial Sequence
  Description of Artificial Sequence: Synthetic oligonucleotide
  Sense strand starting at position 3561 of SEQ ID NO: 1560185
ugcauaauacgagaccaau

SEQ ID NO: 1582266 - RNA, 19 nt, Artificial Sequence
  Description of Artificial Sequence: Synthetic oligonucleotide
  Antisense strand to SEQ ID NO: 1582265
auuggucucguauuaugca

SEQ ID NO: 1582267 - RNA, 19 nt, Artificial Sequence
  Description of Artificial Sequence: Synthetic oligonucleotide
  Sense strand starting at position 3707 of SEQ ID NO: 1560185
agguauaaaucuguaaugu

SEQ ID NO: 1582268 - RNA, 19 nt, Artificial Sequence
  Description of Artificial Sequence: Synthetic oligonucleotide
  Antisense strand to SEQ ID NO: 1582267
acauuacagauuuauaccu

SEQ ID NO: 1582269 - RNA, 19 nt, Artificial Sequence
  Description of Artificial Sequence: Synthetic oligonucleotide
  Sense strand starting at position 3708 of SEQ ID NO: 1560185
gguauaaaucuguaauguu

SEQ ID NO: 1582270 - RNA, 19 nt, Artificial Sequence
  Description of Artificial Sequence: Synthetic oligonucleotide
  Antisense strand to SEQ ID NO: 1582269
aacauuacagauuuauacc

SEQ ID NO: 1582271 - RNA, 19 nt, Artificial Sequence
  Description of Artificial Sequence: Synthetic oligonucleotide
  Sense strand starting at position 14 of SEQ ID NO: 1560186
guccuuaugucuucccuga

SEQ ID NO: 1582272 - RNA, 19 nt, Artificial Sequence
  Description of Artificial Sequence: Synthetic oligonucleotide
  Antisense strand to SEQ ID NO: 1582271
ucagggaagacauaaggac

SEQ ID NO: 1582273 - RNA, 19 nt, Artificial Sequence
  Description of Artificial Sequence: Synthetic oligonucleotide
  Sense strand starting at position 18 of SEQ ID NO: 1560186
uuaugucuucccugagccu

SEQ ID NO: 1582274 - RNA, 19 nt, Artificial Sequence
  Description of Artificial Sequence: Synthetic oligonucleotide
  Antisense strand to SEQ ID NO: 1582273
aggcucagggaagacauaa

SEQ ID NO: 1582275 - RNA, 19 nt, Artificial Sequence
  Description of Artificial Sequence: Synthetic oligonucleotide
  Sense strand starting at position 171 of SEQ ID NO: 1560186
cggugcucugcaugaucau

SEQ ID NO: 1582276 - RNA, 19 nt, Artificial Sequence
  Description of Artificial Sequence: Synthetic oligonucleotide
  Antisense strand to SEQ ID NO: 1582275
augaucaugcagagcaccg

SEQ ID NO: 1582277 - RNA, 19 nt, Artificial Sequence
  Description of Artificial Sequence: Synthetic oligonucleotide
  Sense strand starting at position 184 of SEQ ID NO: 1560186
gaucaugucugccagcaga

SEQ ID NO: 1582278 - RNA, 19 nt, Artificial Sequence
  Description of Artificial Sequence: Synthetic oligonucleotide
  Antisense strand to SEQ ID NO: 1582277
ucugcuggcagacaugauc

SEQ ID NO: 1582279 - RNA, 19 nt, Artificial Sequence
  Description of Artificial Sequence: Synthetic oligonucleotide
  Sense strand starting at position 324 of SEQ ID NO: 1560186
gcgggagucguuagugugu

SEQ ID NO: 1582280 - RNA, 19 nt, Artificial Sequence
  Description of Artificial Sequence: Synthetic oligonucleotide
  Antisense strand to SEQ ID NO: 1582279
acacacuaacgacucccgc

SEQ ID NO: 1582281 - RNA, 19 nt, Artificial Sequence
  Description of Artificial Sequence: Synthetic oligonucleotide
  Sense strand starting at position 445 of SEQ ID NO: 1560186
ccaguuuacccgcgagaau

SEQ ID NO: 1582282 - RNA, 19 nt, Artificial Sequence
  Description of Artificial Sequence: Synthetic oligonucleotide
  Antisense strand to SEQ ID NO: 1582281
auucucgcggguaaacugg

SEQ ID NO: 1582283 - RNA, 19 nt, Artificial Sequence
  Description of Artificial Sequence: Synthetic oligonucleotide
  Sense strand starting at position 446 of SEQ ID NO: 1560186
caguuuacccgcgagaauu

SEQ ID NO: 1582284 - RNA, 19 nt, Artificial Sequence
  Description of Artificial Sequence: Synthetic oligonucleotide
  Antisense strand to SEQ ID NO: 1582283
aauucucgcggguaaacug

SEQ ID NO: 1582285 - RNA, 19 nt, Artificial Sequence
  Description of Artificial Sequence: Synthetic oligonucleotide
  Sense strand starting at position 448 of SEQ ID NO: 1560186
guuuacccgcgagaauuga

SEQ ID NO: 1582286 - RNA, 19 nt, Artificial Sequence
  Description of Artificial Sequence: Synthetic oligonucleotide
  Antisense strand to SEQ ID NO: 1582285
ucaauucucgcggguaaac

SEQ ID NO: 1582287 - RNA, 19 nt, Artificial Sequence
  Description of Artificial Sequence: Synthetic oligonucleotide
  Sense strand starting at position 505 of SEQ ID NO: 1560186
agaagaagacguuguucuu

SEQ ID NO: 1582288 - RNA, 19 nt, Artificial Sequence
  Description of Artificial Sequence: Synthetic oligonucleotide
  Antisense strand to SEQ ID NO: 1582287
aagaacaacgucuucuucu

SEQ ID NO: 1582289 - RNA, 19 nt, Artificial Sequence
  Description of Artificial Sequence: Synthetic oligonucleotide
  Sense strand starting at position 526 of SEQ ID NO: 1560186
acgcauucuucacggugua

SEQ ID NO: 1582290 - RNA, 19 nt, Artificial Sequence
  Description of Artificial Sequence: Synthetic oligonucleotide
  Antisense strand to SEQ ID NO: 1582289
uacaccgugaagaaugcgu

SEQ ID NO: 1582291 - RNA, 19 nt, Artificial Sequence
  Description of Artificial Sequence: Synthetic oligonucleotide
  Sense strand starting at position 1159 of SEQ ID NO: 1560186
aggcguuuggauugagacu

SEQ ID NO: 1582292 - RNA, 19 nt, Artificial Sequence
  Description of Artificial Sequence: Synthetic oligonucleotide
  Antisense strand to SEQ ID NO: 1582291
agucucaauccaaacgccu

SEQ ID NO: 1582293 - RNA, 19 nt, Artificial Sequence
  Description of Artificial Sequence: Synthetic oligonucleotide
  Sense strand starting at position 1160 of SEQ ID NO: 1560186
ggcguuuggauugagacuu

SEQ ID NO: 1582294 - RNA, 19 nt, Artificial Sequence
  Description of Artificial Sequence: Synthetic oligonucleotide
  Antisense strand to SEQ ID NO: 1582293
aagucucaauccaaacgcc

SEQ ID NO: 1582295 - RNA, 19 nt, Artificial Sequence
  Description of Artificial Sequence: Synthetic oligonucleotide
  Sense strand starting at position 1168 of SEQ ID NO: 1560186
gauugagacuuggagguca

SEQ ID NO: 1582296 - RNA, 19 nt, Artificial Sequence
  Description of Artificial Sequence: Synthetic oligonucleotide
  Antisense strand to SEQ ID NO: 1582295
ugaccuccaagucucaauc

SEQ ID NO: 1582297 - RNA, 19 nt, Artificial Sequence
  Description of Artificial Sequence: Synthetic oligonucleotide
  Sense strand starting at position 1368 of SEQ ID NO: 1560186
ugaaaugcccucugacauc

SEQ ID NO: 1582298 - RNA, 19 nt, Artificial Sequence
  Description of Artificial Sequence: Synthetic oligonucleotide
  Antisense strand to SEQ ID NO: 1582297
gaugucagagggcauuuca

SEQ ID NO: 1582299 - RNA, 19 nt, Artificial Sequence
  Description of Artificial Sequence: Synthetic oligonucleotide
  Sense strand starting at position 1833 of SEQ ID NO: 1560186
caggcuuugcugugaggaa

SEQ ID NO: 1582300 - RNA, 19 nt, Artificial Sequence
  Description of Artificial Sequence: Synthetic oligonucleotide
  Antisense strand to SEQ ID NO: 1582299
uuccucacagcaaagccug

SEQ ID NO: 1582301 - RNA, 19 nt, Artificial Sequence
  Description of Artificial Sequence: Synthetic oligonucleotide
  Sense strand starting at position 1834 of SEQ ID NO: 1560186
aggcuuugcugugaggaac

SEQ ID NO: 1582302 - RNA, 19 nt, Artificial Sequence
  Description of Artificial Sequence: Synthetic oligonucleotide
  Antisense strand to SEQ ID NO: 1582301
guuccucacagcaaagccu

SEQ ID NO: 1582303 - RNA, 19 nt, Artificial Sequence
  Description of Artificial Sequence: Synthetic oligonucleotide
  Sense strand starting at position 2059 of SEQ ID NO: 1560186
ggcuguuuaaagggauaau

SEQ ID NO: 1582304 - RNA, 19 nt, Artificial Sequence
  Description of Artificial Sequence: Synthetic oligonucleotide
  Antisense strand to SEQ ID NO: 1582303
auuaucccuuuaaacagcc

SEQ ID NO: 1582305 - RNA, 19 nt, Artificial Sequence
  Description of Artificial Sequence: Synthetic oligonucleotide
  Sense strand starting at position 2060 of SEQ ID NO: 1560186
gcuguuuaaagggauaauc

SEQ ID NO: 1582306 - RNA, 19 nt, Artificial Sequence
  Description of Artificial Sequence: Synthetic oligonucleotide
  Antisense strand to SEQ ID NO: 1582305
gauuaucccuuuaaacagc

SEQ ID NO: 1582307 - RNA, 19 nt, Artificial Sequence
  Description of Artificial Sequence: Synthetic oligonucleotide
  Sense strand starting at position 2109 of SEQ ID NO: 1560186
gcagcucucaacugaguga

SEQ ID NO: 1582308 - RNA, 19 nt, Artificial Sequence
  Description of Artificial Sequence: Synthetic oligonucleotide
  Antisense strand to SEQ ID NO: 1582307
ucacucaguugagagcugc

SEQ ID NO: 1582309 - RNA, 19 nt, Artificial Sequence
  Description of Artificial Sequence: Synthetic oligonucleotide
  Sense strand starting at position 2120 of SEQ ID NO: 1560186
cugagugacugcuuagauu

SEQ ID NO: 1582310 - RNA, 19 nt, Artificial Sequence
  Description of Artificial Sequence: Synthetic oligonucleotide
  Antisense strand to SEQ ID NO: 1582309
aaucuaagcagucacucag

SEQ ID NO: 1582311 - RNA, 19 nt, Artificial Sequence
  Description of Artificial Sequence: Synthetic oligonucleotide
  Sense strand starting at position 2718 of SEQ ID NO: 1560186
gcugacauuauggauguga

SEQ ID NO: 1582312 - RNA, 19 nt, Artificial Sequence
  Description of Artificial Sequence: Synthetic oligonucleotide
  Antisense strand to SEQ ID NO: 1582311
ucacauccauaaugucagc

SEQ ID NO: 1582313 - RNA, 19 nt, Artificial Sequence
  Description of Artificial Sequence: Synthetic oligonucleotide
  Sense strand starting at position 2722 of SEQ ID NO: 1560186
acauuauggaugugagcca

SEQ ID NO: 1582314 - RNA, 19 nt, Artificial Sequence
  Description of Artificial Sequence: Synthetic oligonucleotide
  Antisense strand to SEQ ID NO: 1582313
uggcucacauccauaaugu

SEQ ID NO: 1582315 - RNA, 19 nt, Artificial Sequence
  Description of Artificial Sequence: Synthetic oligonucleotide
  Sense strand starting at position 3307 of SEQ ID NO: 1560186
ccagcugucugacugcaga

SEQ ID NO: 1582316 - RNA, 19 nt, Artificial Sequence
  Description of Artificial Sequence: Synthetic oligonucleotide
  Antisense strand to SEQ ID NO: 1582315
ucugcagucagacagcugg

SEQ ID NO: 1582317 - RNA, 19 nt, Artificial Sequence
  Description of Artificial Sequence: Synthetic oligonucleotide
  Sense strand starting at position 3363 of SEQ ID NO: 1560186
cuggguaucccuugaagcu

SEQ ID NO: 1582318 - RNA, 19 nt, Artificial Sequence
  Description of Artificial Sequence: Synthetic oligonucleotide
  Antisense strand to SEQ ID NO: 1582317
agcuucaagggauacccag

SEQ ID NO: 1582319 - RNA, 19 nt, Artificial Sequence
  Description of Artificial Sequence: Synthetic oligonucleotide
  Sense strand starting at position 3520 of SEQ ID NO: 1560186
cccucagggccuuaauagu

SEQ ID NO: 1582320 - RNA, 19 nt, Artificial Sequence
  Description of Artificial Sequence: Synthetic oligonucleotide
  Antisense strand to SEQ ID NO: 1582319
acuauuaaggcccugaggg

SEQ ID NO: 1582321 - RNA, 19 nt, Artificial Sequence
  Description of Artificial Sequence: Synthetic oligonucleotide
  Sense strand starting at position 3526 of SEQ ID NO: 1560186
gggccuuaauagucaacca

SEQ ID NO: 1582322 - RNA, 19 nt, Artificial Sequence
  Description of Artificial Sequence: Synthetic oligonucleotide
  Antisense strand to SEQ ID NO: 1582321
ugguugacuauuaaggccc

SEQ ID NO: 1582323 - RNA, 19 nt, Artificial Sequence
  Description of Artificial Sequence: Synthetic oligonucleotide
  Sense strand starting at position 3556 of SEQ ID NO: 1560186
agcuuagugucuuccacca

SEQ ID NO: 1582324 - RNA, 19 nt, Artificial Sequence
  Description of Artificial Sequence: Synthetic oligonucleotide
  Antisense strand to SEQ ID NO: 1582323
ugguggaagacacuaagcu

SEQ ID NO: 1582325 - RNA, 19 nt, Artificial Sequence
  Description of Artificial Sequence: Synthetic oligonucleotide
  Sense strand starting at position 3558 of SEQ ID NO: 1560186
cuuagugucuuccaccaua

SEQ ID NO: 1582326 - RNA, 19 nt, Artificial Sequence
  Description of Artificial Sequence: Synthetic oligonucleotide
  Antisense strand to SEQ ID NO: 1582325
uaugguggaagacacuaag

SEQ ID NO: 1582327 - RNA, 19 nt, Artificial Sequence
  Description of Artificial Sequence: Synthetic oligonucleotide
  Sense strand starting at position 3561 of SEQ ID NO: 1560186
agugucuuccaccauauua

SEQ ID NO: 1582328 - RNA, 19 nt, Artificial Sequence
  Description of Artificial Sequence: Synthetic oligonucleotide
  Antisense strand to SEQ ID NO: 1582327
uaauaugguggaagacacu

SEQ ID NO: 1582329 - RNA, 19 nt, Artificial Sequence
  Description of Artificial Sequence: Synthetic oligonucleotide
  Sense strand starting at position 3697 of SEQ ID NO: 1560186
ccugaaucugucuggcuca

SEQ ID NO: 1582330 - RNA, 19 nt, Artificial Sequence
  Description of Artificial Sequence: Synthetic oligonucleotide
  Antisense strand to SEQ ID NO: 1582329
ugagccagacagauucagg

SEQ ID NO: 1582331 - RNA, 19 nt, Artificial Sequence
  Description of Artificial Sequence: Synthetic oligonucleotide
  Sense strand starting at position 3896 of SEQ ID NO: 1560186
gaaaguccagcaugacauu

SEQ ID NO: 1582332 - RNA, 19 nt, Artificial Sequence
  Description of Artificial Sequence: Synthetic oligonucleotide
  Antisense strand to SEQ ID NO: 1582331
aaugucaugcuggacuuuc

SEQ ID NO: 1582333 - RNA, 19 nt, Artificial Sequence
  Description of Artificial Sequence: Synthetic oligonucleotide
  Sense strand starting at position 1057 of SEQ ID NO: 1560187
cccggacuccuggaaggua

SEQ ID NO: 1582334 - RNA, 19 nt, Artificial Sequence
  Description of Artificial Sequence: Synthetic oligonucleotide
  Antisense strand to SEQ ID NO: 1582333
uaccuuccaggaguccggg

SEQ ID NO: 1582335 - RNA, 19 nt, Artificial Sequence
  Description of Artificial Sequence: Synthetic oligonucleotide
  Sense strand starting at position 1238 of SEQ ID NO: 1560187
gagggcuucugguuacuca

SEQ ID NO: 1582336 - RNA, 19 nt, Artificial Sequence
  Description of Artificial Sequence: Synthetic oligonucleotide
  Antisense strand to SEQ ID NO: 1582335
ugaguaaccagaagcccuc

SEQ ID NO: 1582337 - RNA, 19 nt, Artificial Sequence
  Description of Artificial Sequence: Synthetic oligonucleotide
  Sense strand starting at position 1245 of SEQ ID NO: 1560187
ucugguuacucacggaugu

SEQ ID NO: 1582338 - RNA, 19 nt, Artificial Sequence
  Description of Artificial Sequence: Synthetic oligonucleotide
  Antisense strand to SEQ ID NO: 1582337
acauccgugaguaaccaga

SEQ ID NO: 1582339 - RNA, 19 nt, Artificial Sequence
  Description of Artificial Sequence: Synthetic oligonucleotide
  Sense strand starting at position 1246 of SEQ ID NO: 1560187
cugguuacucacggaugua

SEQ ID NO: 1582340 - RNA, 19 nt, Artificial Sequence
  Description of Artificial Sequence: Synthetic oligonucleotide
  Antisense strand to SEQ ID NO: 1582339
uacauccgugaguaaccag

SEQ ID NO: 1582341 - RNA, 19 nt, Artificial Sequence
  Description of Artificial Sequence: Synthetic oligonucleotide
  Sense strand starting at position 1247 of SEQ ID NO: 1560187
ugguuacucacggauguaa

SEQ ID NO: 1582342 - RNA, 19 nt, Artificial Sequence
  Description of Artificial Sequence: Synthetic oligonucleotide
  Antisense strand to SEQ ID NO: 1582341
uuacauccgugaguaacca

SEQ ID NO: 1582343 - RNA, 19 nt, Artificial Sequence
  Description of Artificial Sequence: Synthetic oligonucleotide
  Sense strand starting at position 1249 of SEQ ID NO: 1560187
guuacucacggauguaagu

SEQ ID NO: 1582344 - RNA, 19 nt, Artificial Sequence
  Description of Artificial Sequence: Synthetic oligonucleotide
  Antisense strand to SEQ ID NO: 1582343
acuuacauccgugaguaac

SEQ ID NO: 1582345 - RNA, 19 nt, Artificial Sequence
  Description of Artificial Sequence: Synthetic oligonucleotide
  Sense strand starting at position 1255 of SEQ ID NO: 1560187
cacggauguaagugacgau

SEQ ID NO: 1582346 - RNA, 19 nt, Artificial Sequence
  Description of Artificial Sequence: Synthetic oligonucleotide
  Antisense strand to SEQ ID NO: 1582345
aucgucacuuacauccgug

SEQ ID NO: 1582347 - RNA, 19 nt, Artificial Sequence
  Description of Artificial Sequence: Synthetic oligonucleotide
  Sense strand starting at position 2067 of SEQ ID NO: 1560187
gccggaaaccuccaacguu

SEQ ID NO: 1582348 - RNA, 19 nt, Artificial Sequence
  Description of Artificial Sequence: Synthetic oligonucleotide
  Antisense strand to SEQ ID NO: 1582347
aacguuggagguuuccggc

SEQ ID NO: 1582349 - RNA, 19 nt, Artificial Sequence
  Description of Artificial Sequence: Synthetic oligonucleotide
  Sense strand starting at position 2170 of SEQ ID NO: 1560187
ucugcuguagcccaaagau

SEQ ID NO: 1582350 - RNA, 19 nt, Artificial Sequence
  Description of Artificial Sequence: Synthetic oligonucleotide
  Antisense strand to SEQ ID NO: 1582349
aucuuugggcuacagcaga

SEQ ID NO: 1582351 - RNA, 19 nt, Artificial Sequence
  Description of Artificial Sequence: Synthetic oligonucleotide
  Sense strand starting at position 2179 of SEQ ID NO: 1560187
gcccaaagaucagauaauc

SEQ ID NO: 1582352 - RNA, 19 nt, Artificial Sequence
  Description of Artificial Sequence: Synthetic oligonucleotide
  Antisense strand to SEQ ID NO: 1582351
gauuaucugaucuuugggc

SEQ ID NO: 1582353 - RNA, 19 nt, Artificial Sequence
  Description of Artificial Sequence: Synthetic oligonucleotide
  Sense strand starting at position 2477 of SEQ ID NO: 1560187
uggagauccaagugagugu

SEQ ID NO: 1582354 - RNA, 19 nt, Artificial Sequence
  Description of Artificial Sequence: Synthetic oligonucleotide
  Antisense strand to SEQ ID NO: 1582353
acacucacuuggaucucca

SEQ ID NO: 1582355 - RNA, 19 nt, Artificial Sequence
  Description of Artificial Sequence: Synthetic oligonucleotide
  Sense strand starting at position 2507 of SEQ ID NO: 1560187
gggugacacaugugaagag

SEQ ID NO: 1582356 - RNA, 19 nt, Artificial Sequence
  Description of Artificial Sequence: Synthetic oligonucleotide
  Antisense strand to SEQ ID NO: 1582355
cucuucacaugugucaccc

SEQ ID NO: 1582357 - RNA, 19 nt, Artificial Sequence
  Description of Artificial Sequence: Synthetic oligonucleotide
  Sense strand starting at position 2540 of SEQ ID NO: 1560187
ugugcaugacccuggaaga

SEQ ID NO: 1582358 - RNA, 19 nt, Artificial Sequence
  Description of Artificial Sequence: Synthetic oligonucleotide
  Antisense strand to SEQ ID NO: 1582357
ucuuccagggucaugcaca

SEQ ID NO: 1582359 - RNA, 19 nt, Artificial Sequence
  Description of Artificial Sequence: Synthetic oligonucleotide
  Sense strand starting at position 2568 of SEQ ID NO: 1560187
gggauuaauuggccacuuu

SEQ ID NO: 1582360 - RNA, 19 nt, Artificial Sequence
  Description of Artificial Sequence: Synthetic oligonucleotide
  Antisense strand to SEQ ID NO: 1582359
aaaguggccaauuaauccc

SEQ ID NO: 1582361 - RNA, 19 nt, Artificial Sequence
  Description of Artificial Sequence: Synthetic oligonucleotide
  Sense strand starting at position 2569 of SEQ ID NO: 1560187
ggauuaauuggccacuuua

SEQ ID NO: 1582362 - RNA, 19 nt, Artificial Sequence
  Description of Artificial Sequence: Synthetic oligonucleotide
  Antisense strand to SEQ ID NO: 1582361
uaaaguggccaauuaaucc

SEQ ID NO: 1582363 - RNA, 19 nt, Artificial Sequence
  Description of Artificial Sequence: Synthetic oligonucleotide
  Sense strand starting at position 2714 of SEQ ID NO: 1560187
ggagcagucagggaagguu

SEQ ID NO: 1582364 - RNA, 19 nt, Artificial Sequence
  Description of Artificial Sequence: Synthetic oligonucleotide
  Antisense strand to SEQ ID NO: 1582363
aaccuucccugacugcucc

SEQ ID NO: 1582365 - RNA, 19 nt, Artificial Sequence
  Description of Artificial Sequence: Synthetic oligonucleotide
  Sense strand starting at position 2728 of SEQ ID NO: 1560187
agguuucuccaggagguga

SEQ ID NO: 1582366 - RNA, 19 nt, Artificial Sequence
  Description of Artificial Sequence: Synthetic oligonucleotide
  Antisense strand to SEQ ID NO: 1582365
ucaccuccuggagaaaccu

SEQ ID NO: 1582367 - RNA, 19 nt, Artificial Sequence
  Description of Artificial Sequence: Synthetic oligonucleotide
  Sense strand starting at position 2730 of SEQ ID NO: 1560187
guuucuccaggaggugaaa

SEQ ID NO: 1582368 - RNA, 19 nt, Artificial Sequence
  Description of Artificial Sequence: Synthetic oligonucleotide
  Antisense strand to SEQ ID NO: 1582367
uuucaccuccuggagaaac

SEQ ID NO: 1582369 - RNA, 19 nt, Artificial Sequence
  Description of Artificial Sequence: Synthetic oligonucleotide
  Sense strand starting at position 2743 of SEQ ID NO: 1560187
gugaaaucgacagacgcua

SEQ ID NO: 1582370 - RNA, 19 nt, Artificial Sequence
  Description of Artificial Sequence: Synthetic oligonucleotide
  Antisense strand to SEQ ID NO: 1582369
uagcgucugucgauuucac

SEQ ID NO: 1582371 - RNA, 19 nt, Artificial Sequence
  Description of Artificial Sequence: Synthetic oligonucleotide
  Sense strand starting at position 2760 of SEQ ID NO: 1560187
uagguugugugcucaagga

SEQ ID NO: 1582372 - RNA, 19 nt, Artificial Sequence
  Description of Artificial Sequence: Synthetic oligonucleotide
  Antisense strand to SEQ ID NO: 1582371
uccuugagcacacaaccua

SEQ ID NO: 1582373 - RNA, 19 nt, Artificial Sequence
  Description of Artificial Sequence: Synthetic oligonucleotide
  Sense strand starting at position 3023 of SEQ ID NO: 1560187
ggaagaacccuuugcaccu

SEQ ID NO: 1582374 - RNA, 19 nt, Artificial Sequence
  Description of Artificial Sequence: Synthetic oligonucleotide
  Antisense strand to SEQ ID NO: 1582373
aggugcaaaggguucuucc

SEQ ID NO: 1582375 - RNA, 19 nt, Artificial Sequence
  Description of Artificial Sequence: Synthetic oligonucleotide
  Sense strand starting at position 3193 of SEQ ID NO: 1560187
ucucaucaucgaggucuca

SEQ ID NO: 1582376 - RNA, 19 nt, Artificial Sequence
  Description of Artificial Sequence: Synthetic oligonucleotide
  Antisense strand to SEQ ID NO: 1582375
ugagaccucgaugaugaga

SEQ ID NO: 1582377 - RNA, 19 nt, Artificial Sequence
  Description of Artificial Sequence: Synthetic oligonucleotide
  Sense strand starting at position 3236 of SEQ ID NO: 1560187
ccuuaucuauuccgcaagu

SEQ ID NO: 1582378 - RNA, 19 nt, Artificial Sequence
  Description of Artificial Sequence: Synthetic oligonucleotide
  Antisense strand to SEQ ID NO: 1582377
acuugcggaauagauaagg

SEQ ID NO: 1582379 - RNA, 19 nt, Artificial Sequence
  Description of Artificial Sequence: Synthetic oligonucleotide
  Sense strand starting at position 3237 of SEQ ID NO: 1560187
cuuaucuauuccgcaaguu

SEQ ID NO: 1582380 - RNA, 19 nt, Artificial Sequence
  Description of Artificial Sequence: Synthetic oligonucleotide
  Antisense strand to SEQ ID NO: 1582379
aacuugcggaauagauaag

SEQ ID NO: 1582381 - RNA, 19 nt, Artificial Sequence
  Description of Artificial Sequence: Synthetic oligonucleotide
  Sense strand starting at position 3238 of SEQ ID NO: 1560187
uuaucuauuccgcaaguua

SEQ ID NO: 1582382 - RNA, 19 nt, Artificial Sequence
  Description of Artificial Sequence: Synthetic oligonucleotide
  Antisense strand to SEQ ID NO: 1582381
uaacuugcggaauagauaa

SEQ ID NO: 1582383 - RNA, 19 nt, Artificial Sequence
  Description of Artificial Sequence: Synthetic oligonucleotide
  Sense strand starting at position 3246 of SEQ ID NO: 1560187
uccgcaaguuacuuuauua

SEQ ID NO: 1582384 - RNA, 19 nt, Artificial Sequence
  Description of Artificial Sequence: Synthetic oligonucleotide
  Antisense strand to SEQ ID NO: 1582383
uaauaaaguaacuugcgga

SEQ ID NO: 1582385 - RNA, 19 nt, Artificial Sequence
  Description of Artificial Sequence: Synthetic oligonucleotide
  Sense strand starting at position 3294 of SEQ ID NO: 1560187
ucaagacuggcaugaucuu

SEQ ID NO: 1582386 - RNA, 19 nt, Artificial Sequence
  Description of Artificial Sequence: Synthetic oligonucleotide
  Antisense strand to SEQ ID NO: 1582385
aagaucaugccagucuuga

SEQ ID NO: 1582387 - RNA, 19 nt, Artificial Sequence
  Description of Artificial Sequence: Synthetic oligonucleotide
  Sense strand starting at position 3300 of SEQ ID NO: 1560187
cuggcaugaucuuguuugu

SEQ ID NO: 1582388 - RNA, 19 nt, Artificial Sequence
  Description of Artificial Sequence: Synthetic oligonucleotide
  Antisense strand to SEQ ID NO: 1582387
acaaacaagaucaugccag

SEQ ID NO: 1582389 - RNA, 19 nt, Artificial Sequence
  Description of Artificial Sequence: Synthetic oligonucleotide
  Sense strand starting at position 3303 of SEQ ID NO: 1560187
gcaugaucuuguuuguuua

SEQ ID NO: 1582390 - RNA, 19 nt, Artificial Sequence
  Description of Artificial Sequence: Synthetic oligonucleotide
  Antisense strand to SEQ ID NO: 1582389
uaaacaaacaagaucaugc

SEQ ID NO: 1582391 - RNA, 19 nt, Artificial Sequence
  Description of Artificial Sequence: Synthetic oligonucleotide
  Sense strand starting at position 3321 of SEQ ID NO: 1560187
augucuguucccugccaau

SEQ ID NO: 1582392 - RNA, 19 nt, Artificial Sequence
  Description of Artificial Sequence: Synthetic oligonucleotide
  Antisense strand to SEQ ID NO: 1582391
auuggcagggaacagacau

SEQ ID NO: 1582393 - RNA, 19 nt, Artificial Sequence
  Description of Artificial Sequence: Synthetic oligonucleotide
  Sense strand starting at position 3324 of SEQ ID NO: 1560187
ucuguucccugccaaugaa

SEQ ID NO: 1582394 - RNA, 19 nt, Artificial Sequence
  Description of Artificial Sequence: Synthetic oligonucleotide
  Antisense strand to SEQ ID NO: 1582393
uucauuggcagggaacaga

SEQ ID NO: 1582395 - RNA, 19 nt, Artificial Sequence
  Description of Artificial Sequence: Synthetic oligonucleotide
  Sense strand starting at position 3362 of SEQ ID NO: 1560187
ugaugcaucuccuagcaca

SEQ ID NO: 1582396 - RNA, 19 nt, Artificial Sequence
  Description of Artificial Sequence: Synthetic oligonucleotide
  Antisense strand to SEQ ID NO: 1582395
ugugcuaggagaugcauca

SEQ ID NO: 1582397 - RNA, 19 nt, Artificial Sequence
  Description of Artificial Sequence: Synthetic oligonucleotide
  Sense strand starting at position 3859 of SEQ ID NO: 1560187
ccaagaaauccugguacau

SEQ ID NO: 1582398 - RNA, 19 nt, Artificial Sequence
  Description of Artificial Sequence: Synthetic oligonucleotide
  Antisense strand to SEQ ID NO: 1582397
auguaccaggauuucuugg

SEQ ID NO: 1582399 - RNA, 19 nt, Artificial Sequence
  Description of Artificial Sequence: Synthetic oligonucleotide
  Sense strand starting at position 140 of SEQ ID NO: 1560188
cagggauggauguggguaa

SEQ ID NO: 1582400 - RNA, 19 nt, Artificial Sequence
  Description of Artificial Sequence: Synthetic oligonucleotide
  Antisense strand to SEQ ID NO: 1582399
uuacccacauccaucccug

SEQ ID NO: 1582401 - RNA, 19 nt, Artificial Sequence
  Description of Artificial Sequence: Synthetic oligonucleotide
  Sense strand starting at position 161 of SEQ ID NO: 1560188
ucaugaugugguuaggaug

SEQ ID NO: 1582402 - RNA, 19 nt, Artificial Sequence
  Description of Artificial Sequence: Synthetic oligonucleotide
  Antisense strand to SEQ ID NO: 1582401
cauccuaaccacaucauga

SEQ ID NO: 1582403 - RNA, 19 nt, Artificial Sequence
  Description of Artificial Sequence: Synthetic oligonucleotide
  Sense strand starting at position 249 of SEQ ID NO: 1560188
ugaaguuggauuggagagu

SEQ ID NO: 1582404 - RNA, 19 nt, Artificial Sequence
  Description of Artificial Sequence: Synthetic oligonucleotide
  Antisense strand to SEQ ID NO: 1582403
acucuccaauccaacuuca

SEQ ID NO: 1582405 - RNA, 19 nt, Artificial Sequence
  Description of Artificial Sequence: Synthetic oligonucleotide
  Sense strand starting at position 339 of SEQ ID NO: 1560188
augggauugguuggucaua

SEQ ID NO: 1582406 - RNA, 19 nt, Artificial Sequence
  Description of Artificial Sequence: Synthetic oligonucleotide
  Antisense strand to SEQ ID NO: 1582405
uaugaccaaccaaucccau

SEQ ID NO: 1582407 - RNA, 19 nt, Artificial Sequence
  Description of Artificial Sequence: Synthetic oligonucleotide
  Sense strand starting at position 340 of SEQ ID NO: 1560188
ugggauugguuggucauau

SEQ ID NO: 1582408 - RNA, 19 nt, Artificial Sequence
  Description of Artificial Sequence: Synthetic oligonucleotide
  Antisense strand to SEQ ID NO: 1582407
auaugaccaaccaauccca

SEQ ID NO: 1582409 - RNA, 19 nt, Artificial Sequence
  Description of Artificial Sequence: Synthetic oligonucleotide
  Sense strand starting at position 341 of SEQ ID NO: 1560188
gggauugguuggucauaua

SEQ ID NO: 1582410 - RNA, 19 nt, Artificial Sequence
  Description of Artificial Sequence: Synthetic oligonucleotide
  Antisense strand to SEQ ID NO: 1582409
uauaugaccaaccaauccc

SEQ ID NO: 1582411 - RNA, 19 nt, Artificial Sequence
  Description of Artificial Sequence: Synthetic oligonucleotide
  Sense strand starting at position 348 of SEQ ID NO: 1560188
guuggucauauauguagac

SEQ ID NO: 1582412 - RNA, 19 nt, Artificial Sequence
  Description of Artificial Sequence: Synthetic oligonucleotide
  Antisense strand to SEQ ID NO: 1582411
gucuacauauaugaccaac

SEQ ID NO: 1582413 - RNA, 19 nt, Artificial Sequence
  Description of Artificial Sequence: Synthetic oligonucleotide
  Sense strand starting at position 370 of SEQ ID NO: 1560188
gggcuugagggucacauua

SEQ ID NO: 1582414 - RNA, 19 nt, Artificial Sequence
  Description of Artificial Sequence: Synthetic oligonucleotide
  Antisense strand to SEQ ID NO: 1582413
uaaugugacccucaagccc

SEQ ID NO: 1582415 - RNA, 19 nt, Artificial Sequence
  Description of Artificial Sequence: Synthetic oligonucleotide
  Sense strand starting at position 567 of SEQ ID NO: 1560188
aucagcauaucucagggau

SEQ ID NO: 1582416 - RNA, 19 nt, Artificial Sequence
  Description of Artificial Sequence: Synthetic oligonucleotide
  Antisense strand to SEQ ID NO: 1582415
aucccugagauaugcugau

SEQ ID NO: 1582417 - RNA, 19 nt, Artificial Sequence
  Description of Artificial Sequence: Synthetic oligonucleotide
  Sense strand starting at position 569 of SEQ ID NO: 1560188
cagcauaucucagggauuu

SEQ ID NO: 1582418 - RNA, 19 nt, Artificial Sequence
  Description of Artificial Sequence: Synthetic oligonucleotide
  Antisense strand to SEQ ID NO: 1582417
aaaucccugagauaugcug

SEQ ID NO: 1582419 - RNA, 19 nt, Artificial Sequence
  Description of Artificial Sequence: Synthetic oligonucleotide
  Sense strand starting at position 1170 of SEQ ID NO: 1560188
cuuguugaacccugugcua

SEQ ID NO: 1582420 - RNA, 19 nt, Artificial Sequence
  Description of Artificial Sequence: Synthetic oligonucleotide
  Antisense strand to SEQ ID NO: 1582419
uagcacaggguucaacaag

SEQ ID NO: 1582421 - RNA, 19 nt, Artificial Sequence
  Description of Artificial Sequence: Synthetic oligonucleotide
  Sense strand starting at position 1172 of SEQ ID NO: 1560188
uguugaacccugugcuaug

SEQ ID NO: 1582422 - RNA, 19 nt, Artificial Sequence
  Description of Artificial Sequence: Synthetic oligonucleotide
  Antisense strand to SEQ ID NO: 1582421
cauagcacaggguucaaca

SEQ ID NO: 1582423 - RNA, 19 nt, Artificial Sequence
  Description of Artificial Sequence: Synthetic oligonucleotide
  Sense strand starting at position 1195 of SEQ ID NO: 1560188
ggguuugagauccaagucu

SEQ ID NO: 1582424 - RNA, 19 nt, Artificial Sequence
  Description of Artificial Sequence: Synthetic oligonucleotide
  Antisense strand to SEQ ID NO: 1582423
agacuuggaucucaaaccc

SEQ ID NO: 1582425 - RNA, 19 nt, Artificial Sequence
  Description of Artificial Sequence: Synthetic oligonucleotide
  Sense strand starting at position 1225 of SEQ ID NO: 1560188
gggcuuuggguagaaaggu

SEQ ID NO: 1582426 - RNA, 19 nt, Artificial Sequence
  Description of Artificial Sequence: Synthetic oligonucleotide
  Antisense strand to SEQ ID NO: 1582425
accuuucuacccaaagccc

SEQ ID NO: 1582427 - RNA, 19 nt, Artificial Sequence
  Description of Artificial Sequence: Synthetic oligonucleotide
  Sense strand starting at position 1300 of SEQ ID NO: 1560188
cucagagacuuugcaccua

SEQ ID NO: 1582428 - RNA, 19 nt, Artificial Sequence
  Description of Artificial Sequence: Synthetic oligonucleotide
  Antisense strand to SEQ ID NO: 1582427
uaggugcaaagucucugag

SEQ ID NO: 1582429 - RNA, 19 nt, Artificial Sequence
  Description of Artificial Sequence: Synthetic oligonucleotide
  Sense strand starting at position 1330 of SEQ ID NO: 1560188
cuggacuucucuucuuaag

SEQ ID NO: 1582430 - RNA, 19 nt, Artificial Sequence
  Description of Artificial Sequence: Synthetic oligonucleotide
  Antisense strand to SEQ ID NO: 1582429
cuuaagaagagaaguccag

SEQ ID NO: 1582431 - RNA, 19 nt, Artificial Sequence
  Description of Artificial Sequence: Synthetic oligonucleotide
  Sense strand starting at position 1332 of SEQ ID NO: 1560188
ggacuucucuucuuaagau

SEQ ID NO: 1582432 - RNA, 19 nt, Artificial Sequence
  Description of Artificial Sequence: Synthetic oligonucleotide
  Antisense strand to SEQ ID NO: 1582431
aucuuaagaagagaagucc

SEQ ID NO: 1582433 - RNA, 19 nt, Artificial Sequence
  Description of Artificial Sequence: Synthetic oligonucleotide
  Sense strand starting at position 1557 of SEQ ID NO: 1560188
gagacugacuaugugucua

SEQ ID NO: 1582434 - RNA, 19 nt, Artificial Sequence
  Description of Artificial Sequence: Synthetic oligonucleotide
  Antisense strand to SEQ ID NO: 1582433
uagacacauagucagucuc

SEQ ID NO: 1582435 - RNA, 19 nt, Artificial Sequence
  Description of Artificial Sequence: Synthetic oligonucleotide
  Sense strand starting at position 1559 of SEQ ID NO: 1560188
gacugacuaugugucuaca

SEQ ID NO: 1582436 - RNA, 19 nt, Artificial Sequence
  Description of Artificial Sequence: Synthetic oligonucleotide
  Antisense strand to SEQ ID NO: 1582435
uguagacacauagucaguc

SEQ ID NO: 1582437 - RNA, 19 nt, Artificial Sequence
  Description of Artificial Sequence: Synthetic oligonucleotide
  Sense strand starting at position 1561 of SEQ ID NO: 1560188
cugacuaugugucuacaau

SEQ ID NO: 1582438 - RNA, 19 nt, Artificial Sequence
  Description of Artificial Sequence: Synthetic oligonucleotide
  Antisense strand to SEQ ID NO: 1582437
auuguagacacauagucag

SEQ ID NO: 1582439 - RNA, 19 nt, Artificial Sequence
  Description of Artificial Sequence: Synthetic oligonucleotide
  Sense strand starting at position 1562 of SEQ ID NO: 1560188
ugacuaugugucuacaaug

SEQ ID NO: 1582440 - RNA, 19 nt, Artificial Sequence
  Description of Artificial Sequence: Synthetic oligonucleotide
  Antisense strand to SEQ ID NO: 1582439
cauuguagacacauaguca

SEQ ID NO: 1582441 - RNA, 19 nt, Artificial Sequence
  Description of Artificial Sequence: Synthetic oligonucleotide
  Sense strand starting at position 2516 of SEQ ID NO: 1560188
ggucuugagauggaugguu

SEQ ID NO: 1582442 - RNA, 19 nt, Artificial Sequence
  Description of Artificial Sequence: Synthetic oligonucleotide
  Antisense strand to SEQ ID NO: 1582441
aaccauccaucucaagacc

SEQ ID NO: 1582443 - RNA, 19 nt, Artificial Sequence
  Description of Artificial Sequence: Synthetic oligonucleotide
  Sense strand starting at position 2518 of SEQ ID NO: 1560188
ucuugagauggaugguuua

SEQ ID NO: 1582444 - RNA, 19 nt, Artificial Sequence
  Description of Artificial Sequence: Synthetic oligonucleotide
  Antisense strand to SEQ ID NO: 1582443
uaaaccauccaucucaaga

SEQ ID NO: 1582445 - RNA, 19 nt, Artificial Sequence
  Description of Artificial Sequence: Synthetic oligonucleotide
  Sense strand starting at position 2555 of SEQ ID NO: 1560188
ggccuuaaauggcuuuaca

SEQ ID NO: 1582446 - RNA, 19 nt, Artificial Sequence
  Description of Artificial Sequence: Synthetic oligonucleotide
  Antisense strand to SEQ ID NO: 1582445
uguaaagccauuuaaggcc

SEQ ID NO: 1582447 - RNA, 19 nt, Artificial Sequence
  Description of Artificial Sequence: Synthetic oligonucleotide
  Sense strand starting at position 2875 of SEQ ID NO: 1560188
uuacaaggguccucguaga

SEQ ID NO: 1582448 - RNA, 19 nt, Artificial Sequence
  Description of Artificial Sequence: Synthetic oligonucleotide
  Antisense strand to SEQ ID NO: 1582447
ucuacgaggacccuuguaa

SEQ ID NO: 1582449 - RNA, 19 nt, Artificial Sequence
  Description of Artificial Sequence: Synthetic oligonucleotide
  Sense strand starting at position 2925 of SEQ ID NO: 1560188
aaggcaauguggucacuaa

SEQ ID NO: 1582450 - RNA, 19 nt, Artificial Sequence
  Description of Artificial Sequence: Synthetic oligonucleotide
  Antisense strand to SEQ ID NO: 1582449
uuagugaccacauugccuu

SEQ ID NO: 1582451 - RNA, 19 nt, Artificial Sequence
  Description of Artificial Sequence: Synthetic oligonucleotide
  Sense strand starting at position 2926 of SEQ ID NO: 1560188
aggcaauguggucacuaaa

SEQ ID NO: 1582452 - RNA, 19 nt, Artificial Sequence
  Description of Artificial Sequence: Synthetic oligonucleotide
  Antisense strand to SEQ ID NO: 1582451
uuuagugaccacauugccu

SEQ ID NO: 1582453 - RNA, 19 nt, Artificial Sequence
  Description of Artificial Sequence: Synthetic oligonucleotide
  Sense strand starting at position 2929 of SEQ ID NO: 1560188
caauguggucacuaaaguu

SEQ ID NO: 1582454 - RNA, 19 nt, Artificial Sequence
  Description of Artificial Sequence: Synthetic oligonucleotide
  Antisense strand to SEQ ID NO: 1582453
aacuuuagugaccacauug

SEQ ID NO: 1582455 - RNA, 19 nt, Artificial Sequence
  Description of Artificial Sequence: Synthetic oligonucleotide
  Sense strand starting at position 2943 of SEQ ID NO: 1560188
aaguuaugcuggcuuugaa

SEQ ID NO: 1582456 - RNA, 19 nt, Artificial Sequence
  Description of Artificial Sequence: Synthetic oligonucleotide
  Antisense strand to SEQ ID NO: 1582455
uucaaagccagcauaacuu

SEQ ID NO: 1582457 - RNA, 19 nt, Artificial Sequence
  Description of Artificial Sequence: Synthetic oligonucleotide
  Sense strand starting at position 2946 of SEQ ID NO: 1560188
uuaugcuggcuuugaagau

SEQ ID NO: 1582458 - RNA, 19 nt, Artificial Sequence
  Description of Artificial Sequence: Synthetic oligonucleotide
  Antisense strand to SEQ ID NO: 1582457
aucuucaaagccagcauaa

SEQ ID NO: 1582459 - RNA, 19 nt, Artificial Sequence
  Description of Artificial Sequence: Synthetic oligonucleotide
  Sense strand starting at position 2952 of SEQ ID NO: 1560188
uggcuuugaagaugcaaga

SEQ ID NO: 1582460 - RNA, 19 nt, Artificial Sequence
  Description of Artificial Sequence: Synthetic oligonucleotide
  Antisense strand to SEQ ID NO: 1582459
ucuugcaucuucaaagcca

SEQ ID NO: 1582461 - RNA, 19 nt, Artificial Sequence
  Description of Artificial Sequence: Synthetic oligonucleotide
  Sense strand starting at position 2972 of SEQ ID NO: 1560188
ggagccauaugcuaaagaa

SEQ ID NO: 1582462 - RNA, 19 nt, Artificial Sequence
  Description of Artificial Sequence: Synthetic oligonucleotide
  Antisense strand to SEQ ID NO: 1582461
uucuuuagcauauggcucc

SEQ ID NO: 1582463 - RNA, 19 nt, Artificial Sequence
  Description of Artificial Sequence: Synthetic oligonucleotide
  Sense strand starting at position 3077 of SEQ ID NO: 1560188
ggguuucagcagugagacu

SEQ ID NO: 1582464 - RNA, 19 nt, Artificial Sequence
  Description of Artificial Sequence: Synthetic oligonucleotide
  Antisense strand to SEQ ID NO: 1582463
agucucacugcugaaaccc

SEQ ID NO: 1582465 - RNA, 19 nt, Artificial Sequence
  Description of Artificial Sequence: Synthetic oligonucleotide
  Sense strand starting at position 3095 of SEQ ID NO: 1560188
ugauguuggucuccugacu

SEQ ID NO: 1582466 - RNA, 19 nt, Artificial Sequence
  Description of Artificial Sequence: Synthetic oligonucleotide
  Antisense strand to SEQ ID NO: 1582465
agucaggagaccaacauca

SEQ ID NO: 1582467 - RNA, 19 nt, Artificial Sequence
  Description of Artificial Sequence: Synthetic oligonucleotide
  Sense strand starting at position 3777 of SEQ ID NO: 1560188
gugguuccgagucacucaa

SEQ ID NO: 1582468 - RNA, 19 nt, Artificial Sequence
  Description of Artificial Sequence: Synthetic oligonucleotide
  Antisense strand to SEQ ID NO: 1582467
uugagugacucggaaccac

SEQ ID NO: 1582469 - RNA, 19 nt, Artificial Sequence
  Description of Artificial Sequence: Synthetic oligonucleotide
  Sense strand starting at position 3779 of SEQ ID NO: 1560188
gguuccgagucacucaauu

SEQ ID NO: 1582470 - RNA, 19 nt, Artificial Sequence
  Description of Artificial Sequence: Synthetic oligonucleotide
  Antisense strand to SEQ ID NO: 1582469
aauugagugacucggaacc

SEQ ID NO: 1582471 - RNA, 19 nt, Artificial Sequence
  Description of Artificial Sequence: Synthetic oligonucleotide
  Sense strand starting at position 3800 of SEQ ID NO: 1560188
ugaguaauuuguuagaguc

SEQ ID NO: 1582472 - RNA, 19 nt, Artificial Sequence
  Description of Artificial Sequence: Synthetic oligonucleotide
  Antisense strand to SEQ ID NO: 1582471
gacucuaacaaauuacuca

SEQ ID NO: 1582473 - RNA, 19 nt, Artificial Sequence
  Description of Artificial Sequence: Synthetic oligonucleotide
  Sense strand starting at position 3802 of SEQ ID NO: 1560188
aguaauuuguuagagucac

SEQ ID NO: 1582474 - RNA, 19 nt, Artificial Sequence
  Description of Artificial Sequence: Synthetic oligonucleotide
  Antisense strand to SEQ ID NO: 1582473
gugacucuaacaaauuacu

SEQ ID NO: 1582475 - RNA, 19 nt, Artificial Sequence
  Description of Artificial Sequence: Synthetic oligonucleotide
  Sense strand starting at position 3814 of SEQ ID NO: 1560188
gagucacuauaggaaacua

SEQ ID NO: 1582476 - RNA, 19 nt, Artificial Sequence
  Description of Artificial Sequence: Synthetic oligonucleotide
  Antisense strand to SEQ ID NO: 1582475
uaguuuccuauagugacuc

SEQ ID NO: 1582477 - RNA, 19 nt, Artificial Sequence
  Description of Artificial Sequence: Synthetic oligonucleotide
  Sense strand starting at position 3949 of SEQ ID NO: 1560188
ggaacauuagguuggguuu

SEQ ID NO: 1582478 - RNA, 19 nt, Artificial Sequence
  Description of Artificial Sequence: Synthetic oligonucleotide
  Antisense strand to SEQ ID NO: 1582477
aaacccaaccuaauguucc

SEQ ID NO: 1582479 - RNA, 19 nt, Artificial Sequence
  Description of Artificial Sequence: Synthetic oligonucleotide
  Sense strand starting at position 318 of SEQ ID NO: 1560189
cagggucaugacuagcuaa

SEQ ID NO: 1582480 - RNA, 19 nt, Artificial Sequence
  Description of Artificial Sequence: Synthetic oligonucleotide
  Antisense strand to SEQ ID NO: 1582479
uuagcuagucaugacccug

SEQ ID NO: 1582481 - RNA, 19 nt, Artificial Sequence
  Description of Artificial Sequence: Synthetic oligonucleotide
  Sense strand starting at position 348 of SEQ ID NO: 1560189
ccugucuguggucauugua

SEQ ID NO: 1582482 - RNA, 19 nt, Artificial Sequence
  Description of Artificial Sequence: Synthetic oligonucleotide
  Antisense strand to SEQ ID NO: 1582481
uacaaugaccacagacagg

SEQ ID NO: 1582483 - RNA, 19 nt, Artificial Sequence
  Description of Artificial Sequence: Synthetic oligonucleotide
  Sense strand starting at position 1481 of SEQ ID NO: 1560189
gucacucacccuuggacaa

SEQ ID NO: 1582484 - RNA, 19 nt, Artificial Sequence
  Description of Artificial Sequence: Synthetic oligonucleotide
  Antisense strand to SEQ ID NO: 1582483
uuguccaagggugagugac

SEQ ID NO: 1582485 - RNA, 19 nt, Artificial Sequence
  Description of Artificial Sequence: Synthetic oligonucleotide
  Sense strand starting at position 1499 of SEQ ID NO: 1560189
auaggauacucagaaucac

SEQ ID NO: 1582486 - RNA, 19 nt, Artificial Sequence
  Description of Artificial Sequence: Synthetic oligonucleotide
  Antisense strand to SEQ ID NO: 1582485
gugauucugaguauccuau

SEQ ID NO: 1582487 - RNA, 19 nt, Artificial Sequence
  Description of Artificial Sequence: Synthetic oligonucleotide
  Sense strand starting at position 1655 of SEQ ID NO: 1560189
gaguuacucccaggaaacu

SEQ ID NO: 1582488 - RNA, 19 nt, Artificial Sequence
  Description of Artificial Sequence: Synthetic oligonucleotide
  Antisense strand to SEQ ID NO: 1582487
aguuuccugggaguaacuc

SEQ ID NO: 1582489 - RNA, 19 nt, Artificial Sequence
  Description of Artificial Sequence: Synthetic oligonucleotide
  Sense strand starting at position 1714 of SEQ ID NO: 1560189
gcuucuaagcggcagaguu

SEQ ID NO: 1582490 - RNA, 19 nt, Artificial Sequence
  Description of Artificial Sequence: Synthetic oligonucleotide
  Antisense strand to SEQ ID NO: 1582489
aacucugccgcuuagaagc

SEQ ID NO: 1582491 - RNA, 19 nt, Artificial Sequence
  Description of Artificial Sequence: Synthetic oligonucleotide
  Sense strand starting at position 1945 of SEQ ID NO: 1560189
cccaguccugggcagagau

SEQ ID NO: 1582492 - RNA, 19 nt, Artificial Sequence
  Description of Artificial Sequence: Synthetic oligonucleotide
  Antisense strand to SEQ ID NO: 1582491
aucucugcccaggacuggg

SEQ ID NO: 1582493 - RNA, 19 nt, Artificial Sequence
  Description of Artificial Sequence: Synthetic oligonucleotide
  Sense strand starting at position 1947 of SEQ ID NO: 1560189
caguccugggcagagauau

SEQ ID NO: 1582494 - RNA, 19 nt, Artificial Sequence
  Description of Artificial Sequence: Synthetic oligonucleotide
  Antisense strand to SEQ ID NO: 1582493
auaucucugcccaggacug

SEQ ID NO: 1582495 - RNA, 19 nt, Artificial Sequence
  Description of Artificial Sequence: Synthetic oligonucleotide
  Sense strand starting at position 2025 of SEQ ID NO: 1560189
ggccuuaauuccuggcaac

SEQ ID NO: 1582496 - RNA, 19 nt, Artificial Sequence
  Description of Artificial Sequence: Synthetic oligonucleotide
  Antisense strand to SEQ ID NO: 1582495
guugccaggaauuaaggcc

SEQ ID NO: 1582497 - RNA, 19 nt, Artificial Sequence
  Description of Artificial Sequence: Synthetic oligonucleotide
  Sense strand starting at position 2172 of SEQ ID NO: 1560189
ggcuucucuuuggagcuua

SEQ ID NO: 1582498 - RNA, 19 nt, Artificial Sequence
  Description of Artificial Sequence: Synthetic oligonucleotide
  Antisense strand to SEQ ID NO: 1582497
uaagcuccaaagagaagcc

SEQ ID NO: 1582499 - RNA, 19 nt, Artificial Sequence
  Description of Artificial Sequence: Synthetic oligonucleotide
  Sense strand starting at position 2407 of SEQ ID NO: 1560189
guuugaaccugaccuugau

SEQ ID NO: 1582500 - RNA, 19 nt, Artificial Sequence
  Description of Artificial Sequence: Synthetic oligonucleotide
  Antisense strand to SEQ ID NO: 1582499
aucaaggucagguucaaac

SEQ ID NO: 1582501 - RNA, 19 nt, Artificial Sequence
  Description of Artificial Sequence: Synthetic oligonucleotide
  Sense strand starting at position 2486 of SEQ ID NO: 1560189
gcaggacucuaccacugua

SEQ ID NO: 1582502 - RNA, 19 nt, Artificial Sequence
  Description of Artificial Sequence: Synthetic oligonucleotide
  Antisense strand to SEQ ID NO: 1582501
uacagugguagaguccugc

SEQ ID NO: 1582503 - RNA, 19 nt, Artificial Sequence
  Description of Artificial Sequence: Synthetic oligonucleotide
  Sense strand starting at position 2563 of SEQ ID NO: 1560189
gggccucucucacaaagau

SEQ ID NO: 1582504 - RNA, 19 nt, Artificial Sequence
  Description of Artificial Sequence: Synthetic oligonucleotide
  Antisense strand to SEQ ID NO: 1582503
aucuuugugagagaggccc

SEQ ID NO: 1582505 - RNA, 19 nt, Artificial Sequence
  Description of Artificial Sequence: Synthetic oligonucleotide
  Sense strand starting at position 2572 of SEQ ID NO: 1560189
ucacaaagaugcuaugaua

SEQ ID NO: 1582506 - RNA, 19 nt, Artificial Sequence
  Description of Artificial Sequence: Synthetic oligonucleotide
  Antisense strand to SEQ ID NO: 1582505
uaucauagcaucuuuguga

SEQ ID NO: 1582507 - RNA, 19 nt, Artificial Sequence
  Description of Artificial Sequence: Synthetic oligonucleotide
  Sense strand starting at position 2786 of SEQ ID NO: 1560189
uaaagacaaugagguuaua

SEQ ID NO: 1582508 - RNA, 19 nt, Artificial Sequence
  Description of Artificial Sequence: Synthetic oligonucleotide
  Antisense strand to SEQ ID NO: 1582507
uauaaccucauugucuuua

SEQ ID NO: 1582509 - RNA, 19 nt, Artificial Sequence
  Description of Artificial Sequence: Synthetic oligonucleotide
  Sense strand starting at position 2798 of SEQ ID NO: 1560189
gguuauacaugucuaccua

SEQ ID NO: 1582510 - RNA, 19 nt, Artificial Sequence
  Description of Artificial Sequence: Synthetic oligonucleotide
  Antisense strand to SEQ ID NO: 1582509
uagguagacauguauaacc

SEQ ID NO: 1582511 - RNA, 19 nt, Artificial Sequence
  Description of Artificial Sequence: Synthetic oligonucleotide
  Sense strand starting at position 2893 of SEQ ID NO: 1560189
aggcauugaucuuggaacu

SEQ ID NO: 1582512 - RNA, 19 nt, Artificial Sequence
  Description of Artificial Sequence: Synthetic oligonucleotide
  Antisense strand to SEQ ID NO: 1582511
aguuccaagaucaaugccu

SEQ ID NO: 1582513 - RNA, 19 nt, Artificial Sequence
  Description of Artificial Sequence: Synthetic oligonucleotide
  Sense strand starting at position 2894 of SEQ ID NO: 1560189
ggcauugaucuuggaacug

SEQ ID NO: 1582514 - RNA, 19 nt, Artificial Sequence
  Description of Artificial Sequence: Synthetic oligonucleotide
  Antisense strand to SEQ ID NO: 1582513
caguuccaagaucaaugcc

SEQ ID NO: 1582515 - RNA, 19 nt, Artificial Sequence
  Description of Artificial Sequence: Synthetic oligonucleotide
  Sense strand starting at position 2943 of SEQ ID NO: 1560189
uccucucuucuuggagcua

SEQ ID NO: 1582516 - RNA, 19 nt, Artificial Sequence
  Description of Artificial Sequence: Synthetic oligonucleotide
  Antisense strand to SEQ ID NO: 1582515
uagcuccaagaagagagga

SEQ ID NO: 1582517 - RNA, 19 nt, Artificial Sequence
  Description of Artificial Sequence: Synthetic oligonucleotide
  Sense strand starting at position 2944 of SEQ ID NO: 1560189
ccucucuucuuggagcuaa

SEQ ID NO: 1582518 - RNA, 19 nt, Artificial Sequence
  Description of Artificial Sequence: Synthetic oligonucleotide
  Antisense strand to SEQ ID NO: 1582517
uuagcuccaagaagagagg

SEQ ID NO: 1582519 - RNA, 19 nt, Artificial Sequence
  Description of Artificial Sequence: Synthetic oligonucleotide
  Sense strand starting at position 2954 of SEQ ID NO: 1560189
uggagcuaauauucuagaa

SEQ ID NO: 1582520 - RNA, 19 nt, Artificial Sequence
  Description of Artificial Sequence: Synthetic oligonucleotide
  Antisense strand to SEQ ID NO: 1582519
uucuagaauauuagcucca

SEQ ID NO: 1582521 - RNA, 19 nt, Artificial Sequence
  Description of Artificial Sequence: Synthetic oligonucleotide
  Sense strand starting at position 2956 of SEQ ID NO: 1560189
gagcuaauauucuagaagu

SEQ ID NO: 1582522 - RNA, 19 nt, Artificial Sequence
  Description of Artificial Sequence: Synthetic oligonucleotide
  Antisense strand to SEQ ID NO: 1582521
acuucuagaauauuagcuc

SEQ ID NO: 1582523 - RNA, 19 nt, Artificial Sequence
  Description of Artificial Sequence: Synthetic oligonucleotide
  Sense strand starting at position 2958 of SEQ ID NO: 1560189
gcuaauauucuagaagugu

SEQ ID NO: 1582524 - RNA, 19 nt, Artificial Sequence
  Description of Artificial Sequence: Synthetic oligonucleotide
  Antisense strand to SEQ ID NO: 1582523
acacuucuagaauauuagc

SEQ ID NO: 1582525 - RNA, 19 nt, Artificial Sequence
  Description of Artificial Sequence: Synthetic oligonucleotide
  Sense strand starting at position 3020 of SEQ ID NO: 1560189
acauaaguuguauagcaua

SEQ ID NO: 1582526 - RNA, 19 nt, Artificial Sequence
  Description of Artificial Sequence: Synthetic oligonucleotide
  Antisense strand to SEQ ID NO: 1582525
uaugcuauacaacuuaugu

SEQ ID NO: 1582527 - RNA, 19 nt, Artificial Sequence
  Description of Artificial Sequence: Synthetic oligonucleotide
  Sense strand starting at position 3023 of SEQ ID NO: 1560189
uaaguuguauagcauagua

SEQ ID NO: 1582528 - RNA, 19 nt, Artificial Sequence
  Description of Artificial Sequence: Synthetic oligonucleotide
  Antisense strand to SEQ ID NO: 1582527
uacuaugcuauacaacuua

SEQ ID NO: 1582529 - RNA, 19 nt, Artificial Sequence
  Description of Artificial Sequence: Synthetic oligonucleotide
  Sense strand starting at position 3025 of SEQ ID NO: 1560189
aguuguauagcauaguagu

SEQ ID NO: 1582530 - RNA, 19 nt, Artificial Sequence
  Description of Artificial Sequence: Synthetic oligonucleotide
  Antisense strand to SEQ ID NO: 1582529
acuacuaugcuauacaacu

SEQ ID NO: 1582531 - RNA, 19 nt, Artificial Sequence
  Description of Artificial Sequence: Synthetic oligonucleotide
  Sense strand starting at position 3230 of SEQ ID NO: 1560189
ugaucugacuccuaauguc

SEQ ID NO: 1582532 - RNA, 19 nt, Artificial Sequence
  Description of Artificial Sequence: Synthetic oligonucleotide
  Antisense strand to SEQ ID NO: 1582531
gacauuaggagucagauca

SEQ ID NO: 1582533 - RNA, 19 nt, Artificial Sequence
  Description of Artificial Sequence: Synthetic oligonucleotide
  Sense strand starting at position 3239 of SEQ ID NO: 1560189
uccuaauguccauagugca

SEQ ID NO: 1582534 - RNA, 19 nt, Artificial Sequence
  Description of Artificial Sequence: Synthetic oligonucleotide
  Antisense strand to SEQ ID NO: 1582533
ugcacuauggacauuagga

SEQ ID NO: 1582535 - RNA, 19 nt, Artificial Sequence
  Description of Artificial Sequence: Synthetic oligonucleotide
  Sense strand starting at position 3290 of SEQ ID NO: 1560189
agucauaaaugcuaugaaa

SEQ ID NO: 1582536 - RNA, 19 nt, Artificial Sequence
  Description of Artificial Sequence: Synthetic oligonucleotide
  Antisense strand to SEQ ID NO: 1582535
uuucauagcauuuaugacu

SEQ ID NO: 1582537 - RNA, 19 nt, Artificial Sequence
  Description of Artificial Sequence: Synthetic oligonucleotide
  Sense strand starting at position 3416 of SEQ ID NO: 1560189
aggugaaauguugagcacu

SEQ ID NO: 1582538 - RNA, 19 nt, Artificial Sequence
  Description of Artificial Sequence: Synthetic oligonucleotide
  Antisense strand to SEQ ID NO: 1582537
agugcucaacauuucaccu

SEQ ID NO: 1582539 - RNA, 19 nt, Artificial Sequence
  Description of Artificial Sequence: Synthetic oligonucleotide
  Sense strand starting at position 3418 of SEQ ID NO: 1560189
gugaaauguugagcacuua

SEQ ID NO: 1582540 - RNA, 19 nt, Artificial Sequence
  Description of Artificial Sequence: Synthetic oligonucleotide
  Antisense strand to SEQ ID NO: 1582539
uaagugcucaacauuucac

SEQ ID NO: 1582541 - RNA, 19 nt, Artificial Sequence
  Description of Artificial Sequence: Synthetic oligonucleotide
  Sense strand starting at position 3419 of SEQ ID NO: 1560189
ugaaauguugagcacuuaa

SEQ ID NO: 1582542 - RNA, 19 nt, Artificial Sequence
  Description of Artificial Sequence: Synthetic oligonucleotide
  Antisense strand to SEQ ID NO: 1582541
uuaagugcucaacauuuca

SEQ ID NO: 1582543 - RNA, 19 nt, Artificial Sequence
  Description of Artificial Sequence: Synthetic oligonucleotide
  Sense strand starting at position 3455 of SEQ ID NO: 1560189
ucuuguagauauguaaaca

SEQ ID NO: 1582544 - RNA, 19 nt, Artificial Sequence
  Description of Artificial Sequence: Synthetic oligonucleotide
  Antisense strand to SEQ ID NO: 1582543
uguuuacauaucuacaaga

SEQ ID NO: 1582545 - RNA, 19 nt, Artificial Sequence
  Description of Artificial Sequence: Synthetic oligonucleotide
  Sense strand starting at position 3549 of SEQ ID NO: 1560189
guggcucagcucugcaauu

SEQ ID NO: 1582546 - RNA, 19 nt, Artificial Sequence
  Description of Artificial Sequence: Synthetic oligonucleotide
  Antisense strand to SEQ ID NO: 1582545
aauugcagagcugagccac

SEQ ID NO: 1582547 - RNA, 19 nt, Artificial Sequence
  Description of Artificial Sequence: Synthetic oligonucleotide
  Sense strand starting at position 3550 of SEQ ID NO: 1560189
uggcucagcucugcaauuu

SEQ ID NO: 1582548 - RNA, 19 nt, Artificial Sequence
  Description of Artificial Sequence: Synthetic oligonucleotide
  Antisense strand to SEQ ID NO: 1582547
aaauugcagagcugagcca

SEQ ID NO: 1582549 - RNA, 19 nt, Artificial Sequence
  Description of Artificial Sequence: Synthetic oligonucleotide
  Sense strand starting at position 3668 of SEQ ID NO: 1560189
ugggcauggugauguguau

SEQ ID NO: 1582550 - RNA, 19 nt, Artificial Sequence
  Description of Artificial Sequence: Synthetic oligonucleotide
  Antisense strand to SEQ ID NO: 1582549
auacacaucaccaugccca

SEQ ID NO: 1582551 - RNA, 19 nt, Artificial Sequence
  Description of Artificial Sequence: Synthetic oligonucleotide
  Sense strand starting at position 3675 of SEQ ID NO: 1560189
ggugauguguaucgguagu

SEQ ID NO: 1582552 - RNA, 19 nt, Artificial Sequence
  Description of Artificial Sequence: Synthetic oligonucleotide
  Antisense strand to SEQ ID NO: 1582551
acuaccgauacacaucacc

SEQ ID NO: 1582553 - RNA, 19 nt, Artificial Sequence
  Description of Artificial Sequence: Synthetic oligonucleotide
  Sense strand starting at position 3973 of SEQ ID NO: 1560189
agacaagccuuguacacaa

SEQ ID NO: 1582554 - RNA, 19 nt, Artificial Sequence
  Description of Artificial Sequence: Synthetic oligonucleotide
  Antisense strand to SEQ ID NO: 1582553
uuguguacaaggcuugucu

SEQ ID NO: 1582555 - RNA, 19 nt, Artificial Sequence
  Description of Artificial Sequence: Synthetic oligonucleotide
  Sense strand starting at position 167 of SEQ ID NO: 1560190
ccaggaguuuaggucccaa

SEQ ID NO: 1582556 - RNA, 19 nt, Artificial Sequence
  Description of Artificial Sequence: Synthetic oligonucleotide
  Antisense strand to SEQ ID NO: 1582555
uugggaccuaaacuccugg

SEQ ID NO: 1582557 - RNA, 19 nt, Artificial Sequence
  Description of Artificial Sequence: Synthetic oligonucleotide
  Sense strand starting at position 856 of SEQ ID NO: 1560190
cguaaugcaugucucaauu

SEQ ID NO: 1582558 - RNA, 19 nt, Artificial Sequence
  Description of Artificial Sequence: Synthetic oligonucleotide
  Antisense strand to SEQ ID NO: 1582557
aauugagacaugcauuacg

SEQ ID NO: 1582559 - RNA, 19 nt, Artificial Sequence
  Description of Artificial Sequence: Synthetic oligonucleotide
  Sense strand starting at position 1055 of SEQ ID NO: 1560190
ccuugaucucugugauucc

SEQ ID NO: 1582560 - RNA, 19 nt, Artificial Sequence
  Description of Artificial Sequence: Synthetic oligonucleotide
  Antisense strand to SEQ ID NO: 1582559
ggaaucacagagaucaagg

SEQ ID NO: 1582561 - RNA, 19 nt, Artificial Sequence
  Description of Artificial Sequence: Synthetic oligonucleotide
  Sense strand starting at position 1058 of SEQ ID NO: 1560190
ugaucucugugauuccuaa

SEQ ID NO: 1582562 - RNA, 19 nt, Artificial Sequence
  Description of Artificial Sequence: Synthetic oligonucleotide
  Antisense strand to SEQ ID NO: 1582561
uuaggaaucacagagauca

SEQ ID NO: 1582563 - RNA, 19 nt, Artificial Sequence
  Description of Artificial Sequence: Synthetic oligonucleotide
  Sense strand starting at position 1632 of SEQ ID NO: 1560190
gaggcucugucuuccacua

SEQ ID NO: 1582564 - RNA, 19 nt, Artificial Sequence
  Description of Artificial Sequence: Synthetic oligonucleotide
  Antisense strand to SEQ ID NO: 1582563
uaguggaagacagagccuc

SEQ ID NO: 1582565 - RNA, 19 nt, Artificial Sequence
  Description of Artificial Sequence: Synthetic oligonucleotide
  Sense strand starting at position 1745 of SEQ ID NO: 1560190
guuggaucuucuucugaau

SEQ ID NO: 1582566 - RNA, 19 nt, Artificial Sequence
  Description of Artificial Sequence: Synthetic oligonucleotide
  Antisense strand to SEQ ID NO: 1582565
auucagaagaagauccaac

SEQ ID NO: 1582567 - RNA, 19 nt, Artificial Sequence
  Description of Artificial Sequence: Synthetic oligonucleotide
  Sense strand starting at position 1747 of SEQ ID NO: 1560190
uggaucuucuucugaauug

SEQ ID NO: 1582568 - RNA, 19 nt, Artificial Sequence
  Description of Artificial Sequence: Synthetic oligonucleotide
  Antisense strand to SEQ ID NO: 1582567
caauucagaagaagaucca

SEQ ID NO: 1582569 - RNA, 19 nt, Artificial Sequence
  Description of Artificial Sequence: Synthetic oligonucleotide
  Sense strand starting at position 1748 of SEQ ID NO: 1560190
ggaucuucuucugaauuga

SEQ ID NO: 1582570 - RNA, 19 nt, Artificial Sequence
  Description of Artificial Sequence: Synthetic oligonucleotide
  Antisense strand to SEQ ID NO: 1582569
ucaauucagaagaagaucc

SEQ ID NO: 1582571 - RNA, 19 nt, Artificial Sequence
  Description of Artificial Sequence: Synthetic oligonucleotide
  Sense strand starting at position 1988 of SEQ ID NO: 1560190
acaggaagcuggguaagau

SEQ ID NO: 1582572 - RNA, 19 nt, Artificial Sequence
  Description of Artificial Sequence: Synthetic oligonucleotide
  Antisense strand to SEQ ID NO: 1582571
aucuuacccagcuuccugu

SEQ ID NO: 1582573 - RNA, 19 nt, Artificial Sequence
  Description of Artificial Sequence: Synthetic oligonucleotide
  Sense strand starting at position 2043 of SEQ ID NO: 1560190
cugagaucggccugaccuu

SEQ ID NO: 1582574 - RNA, 19 nt, Artificial Sequence
  Description of Artificial Sequence: Synthetic oligonucleotide
  Antisense strand to SEQ ID NO: 1582573
aaggucaggccgaucucag

SEQ ID NO: 1582575 - RNA, 19 nt, Artificial Sequence
  Description of Artificial Sequence: Synthetic oligonucleotide
  Sense strand starting at position 2062 of SEQ ID NO: 1560190
gcaggaauuucagggaggu

SEQ ID NO: 1582576 - RNA, 19 nt, Artificial Sequence
  Description of Artificial Sequence: Synthetic oligonucleotide
  Antisense strand to SEQ ID NO: 1582575
accucccugaaauuccugc

SEQ ID NO: 1582577 - RNA, 19 nt, Artificial Sequence
  Description of Artificial Sequence: Synthetic oligonucleotide
  Sense strand starting at position 2191 of SEQ ID NO: 1560190
uguuaugccucccuacgua

SEQ ID NO: 1582578 - RNA, 19 nt, Artificial Sequence
  Description of Artificial Sequence: Synthetic oligonucleotide
  Antisense strand to SEQ ID NO: 1582577
uacguagggaggcauaaca

SEQ ID NO: 1582579 - RNA, 19 nt, Artificial Sequence
  Description of Artificial Sequence: Synthetic oligonucleotide
  Sense strand starting at position 2331 of SEQ ID NO: 1560190
guuggagaugaacgauagu

SEQ ID NO: 1582580 - RNA, 19 nt, Artificial Sequence
  Description of Artificial Sequence: Synthetic oligonucleotide
  Antisense strand to SEQ ID NO: 1582579
acuaucguucaucuccaac

SEQ ID NO: 1582581 - RNA, 19 nt, Artificial Sequence
  Description of Artificial Sequence: Synthetic oligonucleotide
  Sense strand starting at position 2334 of SEQ ID NO: 1560190
ggagaugaacgauaguugu

SEQ ID NO: 1582582 - RNA, 19 nt, Artificial Sequence
  Description of Artificial Sequence: Synthetic oligonucleotide
  Antisense strand to SEQ ID NO: 1582581
acaacuaucguucaucucc

SEQ ID NO: 1582583 - RNA, 19 nt, Artificial Sequence
  Description of Artificial Sequence: Synthetic oligonucleotide
  Sense strand starting at position 2337 of SEQ ID NO: 1560190
gaugaacgauaguuguuua

SEQ ID NO: 1582584 - RNA, 19 nt, Artificial Sequence
  Description of Artificial Sequence: Synthetic oligonucleotide
  Antisense strand to SEQ ID NO: 1582583
uaaacaacuaucguucauc

SEQ ID NO: 1582585 - RNA, 19 nt, Artificial Sequence
  Description of Artificial Sequence: Synthetic oligonucleotide
  Sense strand starting at position 2338 of SEQ ID NO: 1560190
augaacgauaguuguuuau

SEQ ID NO: 1582586 - RNA, 19 nt, Artificial Sequence
  Description of Artificial Sequence: Synthetic oligonucleotide
  Antisense strand to SEQ ID NO: 1582585
auaaacaacuaucguucau

SEQ ID NO: 1582587 - RNA, 19 nt, Artificial Sequence
  Description of Artificial Sequence: Synthetic oligonucleotide
  Sense strand starting at position 2466 of SEQ ID NO: 1560190
gaggcacugcgagauuaag

SEQ ID NO: 1582588 - RNA, 19 nt, Artificial Sequence
  Description of Artificial Sequence: Synthetic oligonucleotide
  Antisense strand to SEQ ID NO: 1582587
cuuaaucucgcagugccuc

SEQ ID NO: 1582589 - RNA, 19 nt, Artificial Sequence
  Description of Artificial Sequence: Synthetic oligonucleotide
  Sense strand starting at position 2472 of SEQ ID NO: 1560190
cugcgagauuaagaaacua

SEQ ID NO: 1582590 - RNA, 19 nt, Artificial Sequence
  Description of Artificial Sequence: Synthetic oligonucleotide
  Antisense strand to SEQ ID NO: 1582589
uaguuucuuaaucucgcag

SEQ ID NO: 1582591 - RNA, 19 nt, Artificial Sequence
  Description of Artificial Sequence: Synthetic oligonucleotide
  Sense strand starting at position 2696 of SEQ ID NO: 1560190
gcauauucagaggguggaa

SEQ ID NO: 1582592 - RNA, 19 nt, Artificial Sequence
  Description of Artificial Sequence: Synthetic oligonucleotide
  Antisense strand to SEQ ID NO: 1582591
uuccacccucugaauaugc

SEQ ID NO: 1582593 - RNA, 19 nt, Artificial Sequence
  Description of Artificial Sequence: Synthetic oligonucleotide
  Sense strand starting at position 2760 of SEQ ID NO: 1560190
uuggaugaaucucacaaga

SEQ ID NO: 1582594 - RNA, 19 nt, Artificial Sequence
  Description of Artificial Sequence: Synthetic oligonucleotide
  Antisense strand to SEQ ID NO: 1582593
ucuugugagauucauccaa

SEQ ID NO: 1582595 - RNA, 19 nt, Artificial Sequence
  Description of Artificial Sequence: Synthetic oligonucleotide
  Sense strand starting at position 2762 of SEQ ID NO: 1560190
ggaugaaucucacaagagu

SEQ ID NO: 1582596 - RNA, 19 nt, Artificial Sequence
  Description of Artificial Sequence: Synthetic oligonucleotide
  Antisense strand to SEQ ID NO: 1582595
acucuugugagauucaucc

SEQ ID NO: 1582597 - RNA, 19 nt, Artificial Sequence
  Description of Artificial Sequence: Synthetic oligonucleotide
  Sense strand starting at position 2798 of SEQ ID NO: 1560190
augaauacauucuguaaga

SEQ ID NO: 1582598 - RNA, 19 nt, Artificial Sequence
  Description of Artificial Sequence: Synthetic oligonucleotide
  Antisense strand to SEQ ID NO: 1582597
ucuuacagaauguauucau

SEQ ID NO: 1582599 - RNA, 19 nt, Artificial Sequence
  Description of Artificial Sequence: Synthetic oligonucleotide
  Sense strand starting at position 2799 of SEQ ID NO: 1560190
ugaauacauucuguaagau

SEQ ID NO: 1582600 - RNA, 19 nt, Artificial Sequence
  Description of Artificial Sequence: Synthetic oligonucleotide
  Antisense strand to SEQ ID NO: 1582599
aucuuacagaauguauuca

SEQ ID NO: 1582601 - RNA, 19 nt, Artificial Sequence
  Description of Artificial Sequence: Synthetic oligonucleotide
  Sense strand starting at position 2852 of SEQ ID NO: 1560190
gaacuaaccuuugauggga

SEQ ID NO: 1582602 - RNA, 19 nt, Artificial Sequence
  Description of Artificial Sequence: Synthetic oligonucleotide
  Antisense strand to SEQ ID NO: 1582601
ucccaucaaagguuaguuc

SEQ ID NO: 1582603 - RNA, 19 nt, Artificial Sequence
  Description of Artificial Sequence: Synthetic oligonucleotide
  Sense strand starting at position 2900 of SEQ ID NO: 1560190
gguguaaacugaccagaau

SEQ ID NO: 1582604 - RNA, 19 nt, Artificial Sequence
  Description of Artificial Sequence: Synthetic oligonucleotide
  Antisense strand to SEQ ID NO: 1582603
auucuggucaguuuacacc

SEQ ID NO: 1582605 - RNA, 19 nt, Artificial Sequence
  Description of Artificial Sequence: Synthetic oligonucleotide
  Sense strand starting at position 2938 of SEQ ID NO: 1560190
ugcugacaauguuccauau

SEQ ID NO: 1582606 - RNA, 19 nt, Artificial Sequence
  Description of Artificial Sequence: Synthetic oligonucleotide
  Antisense strand to SEQ ID NO: 1582605
auauggaacauugucagca

SEQ ID NO: 1582607 - RNA, 19 nt, Artificial Sequence
  Description of Artificial Sequence: Synthetic oligonucleotide
  Sense strand starting at position 3528 of SEQ ID NO: 1560190
auuuaagacuuguguacug

SEQ ID NO: 1582608 - RNA, 19 nt, Artificial Sequence
  Description of Artificial Sequence: Synthetic oligonucleotide
  Antisense strand to SEQ ID NO: 1582607
caguacacaagucuuaaau

SEQ ID NO: 1582609 - RNA, 19 nt, Artificial Sequence
  Description of Artificial Sequence: Synthetic oligonucleotide
  Sense strand starting at position 3535 of SEQ ID NO: 1560190
acuuguguacuguguugua

SEQ ID NO: 1582610 - RNA, 19 nt, Artificial Sequence
  Description of Artificial Sequence: Synthetic oligonucleotide
  Antisense strand to SEQ ID NO: 1582609
uacaacacaguacacaagu

SEQ ID NO: 1582611 - RNA, 19 nt, Artificial Sequence
  Description of Artificial Sequence: Synthetic oligonucleotide
  Sense strand starting at position 3538 of SEQ ID NO: 1560190
uguguacuguguuguaaau

SEQ ID NO: 1582612 - RNA, 19 nt, Artificial Sequence
  Description of Artificial Sequence: Synthetic oligonucleotide
  Antisense strand to SEQ ID NO: 1582611
auuuacaacacaguacaca

SEQ ID NO: 1582613 - RNA, 19 nt, Artificial Sequence
  Description of Artificial Sequence: Synthetic oligonucleotide
  Sense strand starting at position 3540 of SEQ ID NO: 1560190
uguacuguguuguaaaugu

SEQ ID NO: 1582614 - RNA, 19 nt, Artificial Sequence
  Description of Artificial Sequence: Synthetic oligonucleotide
  Antisense strand to SEQ ID NO: 1582613
acauuuacaacacaguaca

SEQ ID NO: 1582615 - RNA, 19 nt, Artificial Sequence
  Description of Artificial Sequence: Synthetic oligonucleotide
  Sense strand starting at position 3544 of SEQ ID NO: 1560190
cuguguuguaaauguguua

SEQ ID NO: 1582616 - RNA, 19 nt, Artificial Sequence
  Description of Artificial Sequence: Synthetic oligonucleotide
  Antisense strand to SEQ ID NO: 1582615
uaacacauuuacaacacag

SEQ ID NO: 1582617 - RNA, 19 nt, Artificial Sequence
  Description of Artificial Sequence: Synthetic oligonucleotide
  Sense strand starting at position 3648 of SEQ ID NO: 1560190
aauuaaacaguggguagau

SEQ ID NO: 1582618 - RNA, 19 nt, Artificial Sequence
  Description of Artificial Sequence: Synthetic oligonucleotide
  Antisense strand to SEQ ID NO: 1582617
aucuacccacuguuuaauu

SEQ ID NO: 1582619 - RNA, 19 nt, Artificial Sequence
  Description of Artificial Sequence: Synthetic oligonucleotide
  Sense strand starting at position 3649 of SEQ ID NO: 1560190
auuaaacaguggguagaua

SEQ ID NO: 1582620 - RNA, 19 nt, Artificial Sequence
  Description of Artificial Sequence: Synthetic oligonucleotide
  Antisense strand to SEQ ID NO: 1582619
uaucuacccacuguuuaau

SEQ ID NO: 1582621 - RNA, 19 nt, Artificial Sequence
  Description of Artificial Sequence: Synthetic oligonucleotide
  Sense strand starting at position 3728 of SEQ ID NO: 1560190
aaacaucuguggccuggaa

SEQ ID NO: 1582622 - RNA, 19 nt, Artificial Sequence
  Description of Artificial Sequence: Synthetic oligonucleotide
  Antisense strand to SEQ ID NO: 1582621
uuccaggccacagauguuu

SEQ ID NO: 1582623 - RNA, 19 nt, Artificial Sequence
  Description of Artificial Sequence: Synthetic oligonucleotide
  Sense strand starting at position 3869 of SEQ ID NO: 1560190
ugaaauccuagcuguggga

SEQ ID NO: 1582624 - RNA, 19 nt, Artificial Sequence
  Description of Artificial Sequence: Synthetic oligonucleotide
  Antisense strand to SEQ ID NO: 1582623
ucccacagcuaggauuuca

SEQ ID NO: 1582625 - RNA, 19 nt, Artificial Sequence
  Description of Artificial Sequence: Synthetic oligonucleotide
  Sense strand starting at position 3871 of SEQ ID NO: 1560190
aaauccuagcugugggaga

SEQ ID NO: 1582626 - RNA, 19 nt, Artificial Sequence
  Description of Artificial Sequence: Synthetic oligonucleotide
  Antisense strand to SEQ ID NO: 1582625
ucucccacagcuaggauuu

SEQ ID NO: 1582627 - RNA, 19 nt, Artificial Sequence
  Description of Artificial Sequence: Synthetic oligonucleotide
  Sense strand starting at position 75 of SEQ ID NO: 1560191
ccucgaucauucccugaau

SEQ ID NO: 1582628 - RNA, 19 nt, Artificial Sequence
  Description of Artificial Sequence: Synthetic oligonucleotide
  Antisense strand to SEQ ID NO: 1582627
auucagggaaugaucgagg

SEQ ID NO: 1582629 - RNA, 19 nt, Artificial Sequence
  Description of Artificial Sequence: Synthetic oligonucleotide
  Sense strand starting at position 76 of SEQ ID NO: 1560191
cucgaucauucccugaaug

SEQ ID NO: 1582630 - RNA, 19 nt, Artificial Sequence
  Description of Artificial Sequence: Synthetic oligonucleotide
  Antisense strand to SEQ ID NO: 1582629
cauucagggaaugaucgag

SEQ ID NO: 1582631 - RNA, 19 nt, Artificial Sequence
  Description of Artificial Sequence: Synthetic oligonucleotide
  Sense strand starting at position 78 of SEQ ID NO: 1560191
cgaucauucccugaaugca

SEQ ID NO: 1582632 - RNA, 19 nt, Artificial Sequence
  Description of Artificial Sequence: Synthetic oligonucleotide
  Antisense strand to SEQ ID NO: 1582631
ugcauucagggaaugaucg

SEQ ID NO: 1582633 - RNA, 19 nt, Artificial Sequence
  Description of Artificial Sequence: Synthetic oligonucleotide
  Sense strand starting at position 103 of SEQ ID NO: 1560191
ggaucuuucuguuccaagu

SEQ ID NO: 1582634 - RNA, 19 nt, Artificial Sequence
  Description of Artificial Sequence: Synthetic oligonucleotide
  Antisense strand to SEQ ID NO: 1582633
acuuggaacagaaagaucc

SEQ ID NO: 1582635 - RNA, 19 nt, Artificial Sequence
  Description of Artificial Sequence: Synthetic oligonucleotide
  Sense strand starting at position 747 of SEQ ID NO: 1560191
ggaggaucaugccuggauc

SEQ ID NO: 1582636 - RNA, 19 nt, Artificial Sequence
  Description of Artificial Sequence: Synthetic oligonucleotide
  Antisense strand to SEQ ID NO: 1582635
gauccaggcaugauccucc

SEQ ID NO: 1582637 - RNA, 19 nt, Artificial Sequence
  Description of Artificial Sequence: Synthetic oligonucleotide
  Sense strand starting at position 750 of SEQ ID NO: 1560191
ggaucaugccuggaucacu

SEQ ID NO: 1582638 - RNA, 19 nt, Artificial Sequence
  Description of Artificial Sequence: Synthetic oligonucleotide
  Antisense strand to SEQ ID NO: 1582637
agugauccaggcaugaucc

SEQ ID NO: 1582639 - RNA, 19 nt, Artificial Sequence
  Description of Artificial Sequence: Synthetic oligonucleotide
  Sense strand starting at position 760 of SEQ ID NO: 1560191
uggaucacuuaggauuaaa

SEQ ID NO: 1582640 - RNA, 19 nt, Artificial Sequence
  Description of Artificial Sequence: Synthetic oligonucleotide
  Antisense strand to SEQ ID NO: 1582639
uuuaauccuaagugaucca

SEQ ID NO: 1582641 - RNA, 19 nt, Artificial Sequence
  Description of Artificial Sequence: Synthetic oligonucleotide
  Sense strand starting at position 790 of SEQ ID NO: 1560191
cagcauaaggcuugucaca

SEQ ID NO: 1582642 - RNA, 19 nt, Artificial Sequence
  Description of Artificial Sequence: Synthetic oligonucleotide
  Antisense strand to SEQ ID NO: 1582641
ugugacaagccuuaugcug

SEQ ID NO: 1582643 - RNA, 19 nt, Artificial Sequence
  Description of Artificial Sequence: Synthetic oligonucleotide
  Sense strand starting at position 792 of SEQ ID NO: 1560191
gcauaaggcuugucacaga

SEQ ID NO: 1582644 - RNA, 19 nt, Artificial Sequence
  Description of Artificial Sequence: Synthetic oligonucleotide
  Antisense strand to SEQ ID NO: 1582643
ucugugacaagccuuaugc

SEQ ID NO: 1582645 - RNA, 19 nt, Artificial Sequence
  Description of Artificial Sequence: Synthetic oligonucleotide
  Sense strand starting at position 810 of SEQ ID NO: 1560191
aguagcagcacucgauaaa

SEQ ID NO: 1582646 - RNA, 19 nt, Artificial Sequence
  Description of Artificial Sequence: Synthetic oligonucleotide
  Antisense strand to SEQ ID NO: 1582645
uuuaucgagugcugcuacu

SEQ ID NO: 1582647 - RNA, 19 nt, Artificial Sequence
  Description of Artificial Sequence: Synthetic oligonucleotide
  Sense strand starting at position 811 of SEQ ID NO: 1560191
guagcagcacucgauaaau

SEQ ID NO: 1582648 - RNA, 19 nt, Artificial Sequence
  Description of Artificial Sequence: Synthetic oligonucleotide
  Antisense strand to SEQ ID NO: 1582647
auuuaucgagugcugcuac

SEQ ID NO: 1582649 - RNA, 19 nt, Artificial Sequence
  Description of Artificial Sequence: Synthetic oligonucleotide
  Sense strand starting at position 813 of SEQ ID NO: 1560191
agcagcacucgauaaauau

SEQ ID NO: 1582650 - RNA, 19 nt, Artificial Sequence
  Description of Artificial Sequence: Synthetic oligonucleotide
  Antisense strand to SEQ ID NO: 1582649
auauuuaucgagugcugcu

SEQ ID NO: 1582651 - RNA, 19 nt, Artificial Sequence
  Description of Artificial Sequence: Synthetic oligonucleotide
  Sense strand starting at position 824 of SEQ ID NO: 1560191
auaaauaucgcucggucaa

SEQ ID NO: 1582652 - RNA, 19 nt, Artificial Sequence
  Description of Artificial Sequence: Synthetic oligonucleotide
  Antisense strand to SEQ ID NO: 1582651
uugaccgagcgauauuuau

SEQ ID NO: 1582653 - RNA, 19 nt, Artificial Sequence
  Description of Artificial Sequence: Synthetic oligonucleotide
  Sense strand starting at position 825 of SEQ ID NO: 1560191
uaaauaucgcucggucaau

SEQ ID NO: 1582654 - RNA, 19 nt, Artificial Sequence
  Description of Artificial Sequence: Synthetic oligonucleotide
  Antisense strand to SEQ ID NO: 1582653
auugaccgagcgauauuua

SEQ ID NO: 1582655 - RNA, 19 nt, Artificial Sequence
  Description of Artificial Sequence: Synthetic oligonucleotide
  Sense strand starting at position 826 of SEQ ID NO: 1560191
aaauaucgcucggucaaug

SEQ ID NO: 1582656 - RNA, 19 nt, Artificial Sequence
  Description of Artificial Sequence: Synthetic oligonucleotide
  Antisense strand to SEQ ID NO: 1582655
cauugaccgagcgauauuu

SEQ ID NO: 1582657 - RNA, 19 nt, Artificial Sequence
  Description of Artificial Sequence: Synthetic oligonucleotide
  Sense strand starting at position 834 of SEQ ID NO: 1560191
cucggucaaugauuagaca

SEQ ID NO: 1582658 - RNA, 19 nt, Artificial Sequence
  Description of Artificial Sequence: Synthetic oligonucleotide
  Antisense strand to SEQ ID NO: 1582657
ugucuaaucauugaccgag

SEQ ID NO: 1582659 - RNA, 19 nt, Artificial Sequence
  Description of Artificial Sequence: Synthetic oligonucleotide
  Sense strand starting at position 918 of SEQ ID NO: 1560191
gcgguuaccucuccuggga

SEQ ID NO: 1582660 - RNA, 19 nt, Artificial Sequence
  Description of Artificial Sequence: Synthetic oligonucleotide
  Antisense strand to SEQ ID NO: 1582659
ucccaggagagguaaccgc

SEQ ID NO: 1582661 - RNA, 19 nt, Artificial Sequence
  Description of Artificial Sequence: Synthetic oligonucleotide
  Sense strand starting at position 1172 of SEQ ID NO: 1560191
guuacugaggccugugagu

SEQ ID NO: 1582662 - RNA, 19 nt, Artificial Sequence
  Description of Artificial Sequence: Synthetic oligonucleotide
  Antisense strand to SEQ ID NO: 1582661
acucacaggccucaguaac

SEQ ID NO: 1582663 - RNA, 19 nt, Artificial Sequence
  Description of Artificial Sequence: Synthetic oligonucleotide
  Sense strand starting at position 1279 of SEQ ID NO: 1560191
augauuguugaaugacuaa

SEQ ID NO: 1582664 - RNA, 19 nt, Artificial Sequence
  Description of Artificial Sequence: Synthetic oligonucleotide
  Antisense strand to SEQ ID NO: 1582663
uuagucauucaacaaucau

SEQ ID NO: 1582665 - RNA, 19 nt, Artificial Sequence
  Description of Artificial Sequence: Synthetic oligonucleotide
  Sense strand starting at position 1300 of SEQ ID NO: 1560191
gauggaaugaugugucaug

SEQ ID NO: 1582666 - RNA, 19 nt, Artificial Sequence
  Description of Artificial Sequence: Synthetic oligonucleotide
  Antisense strand to SEQ ID NO: 1582665
caugacacaucauuccauc

SEQ ID NO: 1582667 - RNA, 19 nt, Artificial Sequence
  Description of Artificial Sequence: Synthetic oligonucleotide
  Sense strand starting at position 1301 of SEQ ID NO: 1560191
auggaaugaugugucauga

SEQ ID NO: 1582668 - RNA, 19 nt, Artificial Sequence
  Description of Artificial Sequence: Synthetic oligonucleotide
  Antisense strand to SEQ ID NO: 1582667
ucaugacacaucauuccau

SEQ ID NO: 1582669 - RNA, 19 nt, Artificial Sequence
  Description of Artificial Sequence: Synthetic oligonucleotide
  Sense strand starting at position 1310 of SEQ ID NO: 1560191
ugugucaugagucaaagac

SEQ ID NO: 1582670 - RNA, 19 nt, Artificial Sequence
  Description of Artificial Sequence: Synthetic oligonucleotide
  Antisense strand to SEQ ID NO: 1582669
gucuuugacucaugacaca

SEQ ID NO: 1582671 - RNA, 19 nt, Artificial Sequence
  Description of Artificial Sequence: Synthetic oligonucleotide
  Sense strand starting at position 1319 of SEQ ID NO: 1560191
agucaaagacuaggaguau

SEQ ID NO: 1582672 - RNA, 19 nt, Artificial Sequence
  Description of Artificial Sequence: Synthetic oligonucleotide
  Antisense strand to SEQ ID NO: 1582671
auacuccuagucuuugacu

SEQ ID NO: 1582673 - RNA, 19 nt, Artificial Sequence
  Description of Artificial Sequence: Synthetic oligonucleotide
  Sense strand starting at position 1344 of SEQ ID NO: 1560191
uccauucuccaauggguga

SEQ ID NO: 1582674 - RNA, 19 nt, Artificial Sequence
  Description of Artificial Sequence: Synthetic oligonucleotide
  Antisense strand to SEQ ID NO: 1582673
ucacccauuggagaaugga

SEQ ID NO: 1582675 - RNA, 19 nt, Artificial Sequence
  Description of Artificial Sequence: Synthetic oligonucleotide
  Sense strand starting at position 1382 of SEQ ID NO: 1560191
gugcucugcagccaagauu

SEQ ID NO: 1582676 - RNA, 19 nt, Artificial Sequence
  Description of Artificial Sequence: Synthetic oligonucleotide
  Antisense strand to SEQ ID NO: 1582675
aaucuuggcugcagagcac

SEQ ID NO: 1582677 - RNA, 19 nt, Artificial Sequence
  Description of Artificial Sequence: Synthetic oligonucleotide
  Sense strand starting at position 1393 of SEQ ID NO: 1560191
ccaagauuccucuggacca

SEQ ID NO: 1582678 - RNA, 19 nt, Artificial Sequence
  Description of Artificial Sequence: Synthetic oligonucleotide
  Antisense strand to SEQ ID NO: 1582677
ugguccagaggaaucuugg

SEQ ID NO: 1582679 - RNA, 19 nt, Artificial Sequence
  Description of Artificial Sequence: Synthetic oligonucleotide
  Sense strand starting at position 1980 of SEQ ID NO: 1560191
ggguuuguuuaucucggga

SEQ ID NO: 1582680 - RNA, 19 nt, Artificial Sequence
  Description of Artificial Sequence: Synthetic oligonucleotide
  Antisense strand to SEQ ID NO: 1582679
ucccgagauaaacaaaccc

SEQ ID NO: 1582681 - RNA, 19 nt, Artificial Sequence
  Description of Artificial Sequence: Synthetic oligonucleotide
  Sense strand starting at position 1983 of SEQ ID NO: 1560191
uuuguuuaucucgggauuc

SEQ ID NO: 1582682 - RNA, 19 nt, Artificial Sequence
  Description of Artificial Sequence: Synthetic oligonucleotide
  Antisense strand to SEQ ID NO: 1582681
gaaucccgagauaaacaaa

SEQ ID NO: 1582683 - RNA, 19 nt, Artificial Sequence
  Description of Artificial Sequence: Synthetic oligonucleotide
  Sense strand starting at position 1985 of SEQ ID NO: 1560191
uguuuaucucgggauucag

SEQ ID NO: 1582684 - RNA, 19 nt, Artificial Sequence
  Description of Artificial Sequence: Synthetic oligonucleotide
  Antisense strand to SEQ ID NO: 1582683
cugaaucccgagauaaaca

SEQ ID NO: 1582685 - RNA, 19 nt, Artificial Sequence
  Description of Artificial Sequence: Synthetic oligonucleotide
  Sense strand starting at position 2044 of SEQ ID NO: 1560191
ccaucuuaccucgggcaga

SEQ ID NO: 1582686 - RNA, 19 nt, Artificial Sequence
  Description of Artificial Sequence: Synthetic oligonucleotide
  Antisense strand to SEQ ID NO: 1582685
ucugcccgagguaagaugg

SEQ ID NO: 1582687 - RNA, 19 nt, Artificial Sequence
  Description of Artificial Sequence: Synthetic oligonucleotide
  Sense strand starting at position 2371 of SEQ ID NO: 1560191
gcgagaugagcagauacaa

SEQ ID NO: 1582688 - RNA, 19 nt, Artificial Sequence
  Description of Artificial Sequence: Synthetic oligonucleotide
  Antisense strand to SEQ ID NO: 1582687
uuguaucugcucaucucgc

SEQ ID NO: 1582689 - RNA, 19 nt, Artificial Sequence
  Description of Artificial Sequence: Synthetic oligonucleotide
  Sense strand starting at position 2415 of SEQ ID NO: 1560191
ggacacagaucuucuccau

SEQ ID NO: 1582690 - RNA, 19 nt, Artificial Sequence
  Description of Artificial Sequence: Synthetic oligonucleotide
  Antisense strand to SEQ ID NO: 1582689
auggagaagaucugugucc

SEQ ID NO: 1582691 - RNA, 19 nt, Artificial Sequence
  Description of Artificial Sequence: Synthetic oligonucleotide
  Sense strand starting at position 2691 of SEQ ID NO: 1560191
aggugauggagcgaacauu

SEQ ID NO: 1582692 - RNA, 19 nt, Artificial Sequence
  Description of Artificial Sequence: Synthetic oligonucleotide
  Antisense strand to SEQ ID NO: 1582691
aauguucgcuccaucaccu

SEQ ID NO: 1582693 - RNA, 19 nt, Artificial Sequence
  Description of Artificial Sequence: Synthetic oligonucleotide
  Sense strand starting at position 2699 of SEQ ID NO: 1560191
gagcgaacauuugaaacca

SEQ ID NO: 1582694 - RNA, 19 nt, Artificial Sequence
  Description of Artificial Sequence: Synthetic oligonucleotide
  Antisense strand to SEQ ID NO: 1582693
ugguuucaaauguucgcuc

SEQ ID NO: 1582695 - RNA, 19 nt, Artificial Sequence
  Description of Artificial Sequence: Synthetic oligonucleotide
  Sense strand starting at position 3058 of SEQ ID NO: 1560191
uguagcagugucugggaaa

SEQ ID NO: 1582696 - RNA, 19 nt, Artificial Sequence
  Description of Artificial Sequence: Synthetic oligonucleotide
  Antisense strand to SEQ ID NO: 1582695
uuucccagacacugcuaca

SEQ ID NO: 1582697 - RNA, 19 nt, Artificial Sequence
  Description of Artificial Sequence: Synthetic oligonucleotide
  Sense strand starting at position 3071 of SEQ ID NO: 1560191
gggaaacagaucugccgau

SEQ ID NO: 1582698 - RNA, 19 nt, Artificial Sequence
  Description of Artificial Sequence: Synthetic oligonucleotide
  Antisense strand to SEQ ID NO: 1582697
aucggcagaucuguuuccc

SEQ ID NO: 1582699 - RNA, 19 nt, Artificial Sequence
  Description of Artificial Sequence: Synthetic oligonucleotide
  Sense strand starting at position 3072 of SEQ ID NO: 1560191
ggaaacagaucugccgauu

SEQ ID NO: 1582700 - RNA, 19 nt, Artificial Sequence
  Description of Artificial Sequence: Synthetic oligonucleotide
  Antisense strand to SEQ ID NO: 1582699
aaucggcagaucuguuucc

SEQ ID NO: 1582701 - RNA, 19 nt, Artificial Sequence
  Description of Artificial Sequence: Synthetic oligonucleotide
  Sense strand starting at position 3075 of SEQ ID NO: 1560191
aacagaucugccgauugac

SEQ ID NO: 1582702 - RNA, 19 nt, Artificial Sequence
  Description of Artificial Sequence: Synthetic oligonucleotide
  Antisense strand to SEQ ID NO: 1582701
gucaaucggcagaucuguu

SEQ ID NO: 1582703 - RNA, 19 nt, Artificial Sequence
  Description of Artificial Sequence: Synthetic oligonucleotide
  Sense strand starting at position 3969 of SEQ ID NO: 1560191
cuuugugaugcccggaaug

SEQ ID NO: 1582704 - RNA, 19 nt, Artificial Sequence
  Description of Artificial Sequence: Synthetic oligonucleotide
  Antisense strand to SEQ ID NO: 1582703
cauuccgggcaucacaaag

SEQ ID NO: 1582705 - RNA, 19 nt, Artificial Sequence
  Description of Artificial Sequence: Synthetic oligonucleotide
  Sense strand starting at position 3971 of SEQ ID NO: 1560191
uugugaugcccggaaugcu

SEQ ID NO: 1582706 - RNA, 19 nt, Artificial Sequence
  Description of Artificial Sequence: Synthetic oligonucleotide
  Antisense strand to SEQ ID NO: 1582705
agcauuccgggcaucacaa

SEQ ID NO: 1582707 - RNA, 19 nt, Artificial Sequence
  Description of Artificial Sequence: Synthetic oligonucleotide
  Sense strand starting at position 523 of SEQ ID NO: 1560192
ggaggaucaugccuggauc

SEQ ID NO: 1582708 - RNA, 19 nt, Artificial Sequence
  Description of Artificial Sequence: Synthetic oligonucleotide
  Antisense strand to SEQ ID NO: 1582707
gauccaggcaugauccucc

SEQ ID NO: 1582709 - RNA, 19 nt, Artificial Sequence
  Description of Artificial Sequence: Synthetic oligonucleotide
  Sense strand starting at position 526 of SEQ ID NO: 1560192
ggaucaugccuggaucacu

SEQ ID NO: 1582710 - RNA, 19 nt, Artificial Sequence
  Description of Artificial Sequence: Synthetic oligonucleotide
  Antisense strand to SEQ ID NO: 1582709
agugauccaggcaugaucc

SEQ ID NO: 1582711 - RNA, 19 nt, Artificial Sequence
  Description of Artificial Sequence: Synthetic oligonucleotide
  Sense strand starting at position 536 of SEQ ID NO: 1560192
uggaucacuuaggauuaaa

SEQ ID NO: 1582712 - RNA, 19 nt, Artificial Sequence
  Description of Artificial Sequence: Synthetic oligonucleotide
  Antisense strand to SEQ ID NO: 1582711
uuuaauccuaagugaucca

SEQ ID NO: 1582713 - RNA, 19 nt, Artificial Sequence
  Description of Artificial Sequence: Synthetic oligonucleotide
  Sense strand starting at position 566 of SEQ ID NO: 1560192
cagcauaaggcuugucaca

SEQ ID NO: 1582714 - RNA, 19 nt, Artificial Sequence
  Description of Artificial Sequence: Synthetic oligonucleotide
  Antisense strand to SEQ ID NO: 1582713
ugugacaagccuuaugcug

SEQ ID NO: 1582715 - RNA, 19 nt, Artificial Sequence
  Description of Artificial Sequence: Synthetic oligonucleotide
  Sense strand starting at position 568 of SEQ ID NO: 1560192
gcauaaggcuugucacaga

SEQ ID NO: 1582716 - RNA, 19 nt, Artificial Sequence
  Description of Artificial Sequence: Synthetic oligonucleotide
  Antisense strand to SEQ ID NO: 1582715
ucugugacaagccuuaugc

SEQ ID NO: 1582717 - RNA, 19 nt, Artificial Sequence
  Description of Artificial Sequence: Synthetic oligonucleotide
  Sense strand starting at position 586 of SEQ ID NO: 1560192
aguagcagcacucgauaaa

SEQ ID NO: 1582718 - RNA, 19 nt, Artificial Sequence
  Description of Artificial Sequence: Synthetic oligonucleotide
  Antisense strand to SEQ ID NO: 1582717
uuuaucgagugcugcuacu

SEQ ID NO: 1582719 - RNA, 19 nt, Artificial Sequence
  Description of Artificial Sequence: Synthetic oligonucleotide
  Sense strand starting at position 587 of SEQ ID NO: 1560192
guagcagcacucgauaaau

SEQ ID NO: 1582720 - RNA, 19 nt, Artificial Sequence
  Description of Artificial Sequence: Synthetic oligonucleotide
  Antisense strand to SEQ ID NO: 1582719
auuuaucgagugcugcuac

SEQ ID NO: 1582721 - RNA, 19 nt, Artificial Sequence
  Description of Artificial Sequence: Synthetic oligonucleotide
  Sense strand starting at position 589 of SEQ ID NO: 1560192
agcagcacucgauaaauau

SEQ ID NO: 1582722 - RNA, 19 nt, Artificial Sequence
  Description of Artificial Sequence: Synthetic oligonucleotide
  Antisense strand to SEQ ID NO: 1582721
auauuuaucgagugcugcu

SEQ ID NO: 1582723 - RNA, 19 nt, Artificial Sequence
  Description of Artificial Sequence: Synthetic oligonucleotide
  Sense strand starting at position 600 of SEQ ID NO: 1560192
auaaauaucgcucggucaa

SEQ ID NO: 1582724 - RNA, 19 nt, Artificial Sequence
  Description of Artificial Sequence: Synthetic oligonucleotide
  Antisense strand to SEQ ID NO: 1582723
uugaccgagcgauauuuau

SEQ ID NO: 1582725 - RNA, 19 nt, Artificial Sequence
  Description of Artificial Sequence: Synthetic oligonucleotide
  Sense strand starting at position 601 of SEQ ID NO: 1560192
uaaauaucgcucggucaau

SEQ ID NO: 1582726 - RNA, 19 nt, Artificial Sequence
  Description of Artificial Sequence: Synthetic oligonucleotide
  Antisense strand to SEQ ID NO: 1582725
auugaccgagcgauauuua

SEQ ID NO: 1582727 - RNA, 19 nt, Artificial Sequence
  Description of Artificial Sequence: Synthetic oligonucleotide
  Sense strand starting at position 602 of SEQ ID NO: 1560192
aaauaucgcucggucaaug

SEQ ID NO: 1582728 - RNA, 19 nt, Artificial Sequence
  Description of Artificial Sequence: Synthetic oligonucleotide
  Antisense strand to SEQ ID NO: 1582727
cauugaccgagcgauauuu

SEQ ID NO: 1582729 - RNA, 19 nt, Artificial Sequence
  Description of Artificial Sequence: Synthetic oligonucleotide
  Sense strand starting at position 610 of SEQ ID NO: 1560192
cucggucaaugauuagaca

SEQ ID NO: 1582730 - RNA, 19 nt, Artificial Sequence
  Description of Artificial Sequence: Synthetic oligonucleotide
  Antisense strand to SEQ ID NO: 1582729
ugucuaaucauugaccgag

SEQ ID NO: 1582731 - RNA, 19 nt, Artificial Sequence
  Description of Artificial Sequence: Synthetic oligonucleotide
  Sense strand starting at position 694 of SEQ ID NO: 1560192
gcgguuaccucuccuggga

SEQ ID NO: 1582732 - RNA, 19 nt, Artificial Sequence
  Description of Artificial Sequence: Synthetic oligonucleotide
  Antisense strand to SEQ ID NO: 1582731
ucccaggagagguaaccgc

SEQ ID NO: 1582733 - RNA, 19 nt, Artificial Sequence
  Description of Artificial Sequence: Synthetic oligonucleotide
  Sense strand starting at position 948 of SEQ ID NO: 1560192
guuacugaggccugugagu

SEQ ID NO: 1582734 - RNA, 19 nt, Artificial Sequence
  Description of Artificial Sequence: Synthetic oligonucleotide
  Antisense strand to SEQ ID NO: 1582733
acucacaggccucaguaac

SEQ ID NO: 1582735 - RNA, 19 nt, Artificial Sequence
  Description of Artificial Sequence: Synthetic oligonucleotide
  Sense strand starting at position 955 of SEQ ID NO: 1560192
aggccugugaguugucuca

SEQ ID NO: 1582736 - RNA, 19 nt, Artificial Sequence
  Description of Artificial Sequence: Synthetic oligonucleotide
  Antisense strand to SEQ ID NO: 1582735
ugagacaacucacaggccu

SEQ ID NO: 1582737 - RNA, 19 nt, Artificial Sequence
  Description of Artificial Sequence: Synthetic oligonucleotide
  Sense strand starting at position 1055 of SEQ ID NO: 1560192
augauuguugaaugacuaa

SEQ ID NO: 1582738 - RNA, 19 nt, Artificial Sequence
  Description of Artificial Sequence: Synthetic oligonucleotide
  Antisense strand to SEQ ID NO: 1582737
uuagucauucaacaaucau

SEQ ID NO: 1582739 - RNA, 19 nt, Artificial Sequence
  Description of Artificial Sequence: Synthetic oligonucleotide
  Sense strand starting at position 1076 of SEQ ID NO: 1560192
gauggaaugaugugucaug

SEQ ID NO: 1582740 - RNA, 19 nt, Artificial Sequence
  Description of Artificial Sequence: Synthetic oligonucleotide
  Antisense strand to SEQ ID NO: 1582739
caugacacaucauuccauc

SEQ ID NO: 1582741 - RNA, 19 nt, Artificial Sequence
  Description of Artificial Sequence: Synthetic oligonucleotide
  Sense strand starting at position 1077 of SEQ ID NO: 1560192
auggaaugaugugucauga

SEQ ID NO: 1582742 - RNA, 19 nt, Artificial Sequence
  Description of Artificial Sequence: Synthetic oligonucleotide
  Antisense strand to SEQ ID NO: 1582741
ucaugacacaucauuccau

SEQ ID NO: 1582743 - RNA, 19 nt, Artificial Sequence
  Description of Artificial Sequence: Synthetic oligonucleotide
  Sense strand starting at position 1086 of SEQ ID NO: 1560192
ugugucaugagucaaagac

SEQ ID NO: 1582744 - RNA, 19 nt, Artificial Sequence
  Description of Artificial Sequence: Synthetic oligonucleotide
  Antisense strand to SEQ ID NO: 1582743
gucuuugacucaugacaca

SEQ ID NO: 1582745 - RNA, 19 nt, Artificial Sequence
  Description of Artificial Sequence: Synthetic oligonucleotide
  Sense strand starting at position 1095 of SEQ ID NO: 1560192
agucaaagacuaggaguau

SEQ ID NO: 1582746 - RNA, 19 nt, Artificial Sequence
  Description of Artificial Sequence: Synthetic oligonucleotide
  Antisense strand to SEQ ID NO: 1582745
auacuccuagucuuugacu

SEQ ID NO: 1582747 - RNA, 19 nt, Artificial Sequence
  Description of Artificial Sequence: Synthetic oligonucleotide
  Sense strand starting at position 1120 of SEQ ID NO: 1560192
uccauucuccaauggguga

SEQ ID NO: 1582748 - RNA, 19 nt, Artificial Sequence
  Description of Artificial Sequence: Synthetic oligonucleotide
  Antisense strand to SEQ ID NO: 1582747
ucacccauuggagaaugga

SEQ ID NO: 1582749 - RNA, 19 nt, Artificial Sequence
  Description of Artificial Sequence: Synthetic oligonucleotide
  Sense strand starting at position 1158 of SEQ ID NO: 1560192
gugcucugcagccaagauu

SEQ ID NO: 1582750 - RNA, 19 nt, Artificial Sequence
  Description of Artificial Sequence: Synthetic oligonucleotide
  Antisense strand to SEQ ID NO: 1582749
aaucuuggcugcagagcac

SEQ ID NO: 1582751 - RNA, 19 nt, Artificial Sequence
  Description of Artificial Sequence: Synthetic oligonucleotide
  Sense strand starting at position 1169 of SEQ ID NO: 1560192
ccaagauuccucuggacca

SEQ ID NO: 1582752 - RNA, 19 nt, Artificial Sequence
  Description of Artificial Sequence: Synthetic oligonucleotide
  Antisense strand to SEQ ID NO: 1582751
ugguccagaggaaucuugg

SEQ ID NO: 1582753 - RNA, 19 nt, Artificial Sequence
  Description of Artificial Sequence: Synthetic oligonucleotide
  Sense strand starting at position 1756 of SEQ ID NO: 1560192
ggguuuguuuaucucggga

SEQ ID NO: 1582754 - RNA, 19 nt, Artificial Sequence
  Description of Artificial Sequence: Synthetic oligonucleotide
  Antisense strand to SEQ ID NO: 1582753
ucccgagauaaacaaaccc

SEQ ID NO: 1582755 - RNA, 19 nt, Artificial Sequence
  Description of Artificial Sequence: Synthetic oligonucleotide
  Sense strand starting at position 1759 of SEQ ID NO: 1560192
uuuguuuaucucgggauuc

SEQ ID NO: 1582756 - RNA, 19 nt, Artificial Sequence
  Description of Artificial Sequence: Synthetic oligonucleotide
  Antisense strand to SEQ ID NO: 1582755
gaaucccgagauaaacaaa

SEQ ID NO: 1582757 - RNA, 19 nt, Artificial Sequence
  Description of Artificial Sequence: Synthetic oligonucleotide
  Sense strand starting at position 1761 of SEQ ID NO: 1560192
uguuuaucucgggauucag

SEQ ID NO: 1582758 - RNA, 19 nt, Artificial Sequence
  Description of Artificial Sequence: Synthetic oligonucleotide
  Antisense strand to SEQ ID NO: 1582757
cugaaucccgagauaaaca

SEQ ID NO: 1582759 - RNA, 19 nt, Artificial Sequence
  Description of Artificial Sequence: Synthetic oligonucleotide
  Sense strand starting at position 1820 of SEQ ID NO: 1560192
ccaucuuaccucgggcaga

SEQ ID NO: 1582760 - RNA, 19 nt, Artificial Sequence
  Description of Artificial Sequence: Synthetic oligonucleotide
  Antisense strand to SEQ ID NO: 1582759
ucugcccgagguaagaugg

SEQ ID NO: 1582761 - RNA, 19 nt, Artificial Sequence
  Description of Artificial Sequence: Synthetic oligonucleotide
  Sense strand starting at position 2147 of SEQ ID NO: 1560192
gcgagaugagcagauacaa

SEQ ID NO: 1582762 - RNA, 19 nt, Artificial Sequence
  Description of Artificial Sequence: Synthetic oligonucleotide
  Antisense strand to SEQ ID NO: 1582761
uuguaucugcucaucucgc

SEQ ID NO: 1582763 - RNA, 19 nt, Artificial Sequence
  Description of Artificial Sequence: Synthetic oligonucleotide
  Sense strand starting at position 2191 of SEQ ID NO: 1560192
ggacacagaucuucuccau

SEQ ID NO: 1582764 - RNA, 19 nt, Artificial Sequence
  Description of Artificial Sequence: Synthetic oligonucleotide
  Antisense strand to SEQ ID NO: 1582763
auggagaagaucugugucc

SEQ ID NO: 1582765 - RNA, 19 nt, Artificial Sequence
  Description of Artificial Sequence: Synthetic oligonucleotide
  Sense strand starting at position 2366 of SEQ ID NO: 1560192
ccuagagacuccuaucaug

SEQ ID NO: 1582766 - RNA, 19 nt, Artificial Sequence
  Description of Artificial Sequence: Synthetic oligonucleotide
  Antisense strand to SEQ ID NO: 1582765
caugauaggagucucuagg

SEQ ID NO: 1582767 - RNA, 19 nt, Artificial Sequence
  Description of Artificial Sequence: Synthetic oligonucleotide
  Sense strand starting at position 2467 of SEQ ID NO: 1560192
aggugauggagcgaacauu

SEQ ID NO: 1582768 - RNA, 19 nt, Artificial Sequence
  Description of Artificial Sequence: Synthetic oligonucleotide
  Antisense strand to SEQ ID NO: 1582767
aauguucgcuccaucaccu

SEQ ID NO: 1582769 - RNA, 19 nt, Artificial Sequence
  Description of Artificial Sequence: Synthetic oligonucleotide
  Sense strand starting at position 2475 of SEQ ID NO: 1560192
gagcgaacauuugaaacca

SEQ ID NO: 1582770 - RNA, 19 nt, Artificial Sequence
  Description of Artificial Sequence: Synthetic oligonucleotide
  Antisense strand to SEQ ID NO: 1582769
ugguuucaaauguucgcuc

SEQ ID NO: 1582771 - RNA, 19 nt, Artificial Sequence
  Description of Artificial Sequence: Synthetic oligonucleotide
  Sense strand starting at position 2834 of SEQ ID NO: 1560192
uguagcagugucugggaaa

SEQ ID NO: 1582772 - RNA, 19 nt, Artificial Sequence
  Description of Artificial Sequence: Synthetic oligonucleotide
  Antisense strand to SEQ ID NO: 1582771
uuucccagacacugcuaca

SEQ ID NO: 1582773 - RNA, 19 nt, Artificial Sequence
  Description of Artificial Sequence: Synthetic oligonucleotide
  Sense strand starting at position 2847 of SEQ ID NO: 1560192
gggaaacagaucugccgau

SEQ ID NO: 1582774 - RNA, 19 nt, Artificial Sequence
  Description of Artificial Sequence: Synthetic oligonucleotide
  Antisense strand to SEQ ID NO: 1582773
aucggcagaucuguuuccc

SEQ ID NO: 1582775 - RNA, 19 nt, Artificial Sequence
  Description of Artificial Sequence: Synthetic oligonucleotide
  Sense strand starting at position 2848 of SEQ ID NO: 1560192
ggaaacagaucugccgauu

SEQ ID NO: 1582776 - RNA, 19 nt, Artificial Sequence
  Description of Artificial Sequence: Synthetic oligonucleotide
  Antisense strand to SEQ ID NO: 1582775
aaucggcagaucuguuucc

SEQ ID NO: 1582777 - RNA, 19 nt, Artificial Sequence
  Description of Artificial Sequence: Synthetic oligonucleotide
  Sense strand starting at position 2851 of SEQ ID NO: 1560192
aacagaucugccgauugac

SEQ ID NO: 1582778 - RNA, 19 nt, Artificial Sequence
  Description of Artificial Sequence: Synthetic oligonucleotide
  Antisense strand to SEQ ID NO: 1582777
gucaaucggcagaucuguu

SEQ ID NO: 1582779 - RNA, 19 nt, Artificial Sequence
  Description of Artificial Sequence: Synthetic oligonucleotide
  Sense strand starting at position 3745 of SEQ ID NO: 1560192
cuuugugaugcccggaaug

SEQ ID NO: 1582780 - RNA, 19 nt, Artificial Sequence
  Description of Artificial Sequence: Synthetic oligonucleotide
  Antisense strand to SEQ ID NO: 1582779
cauuccgggcaucacaaag

SEQ ID NO: 1582781 - RNA, 19 nt, Artificial Sequence
  Description of Artificial Sequence: Synthetic oligonucleotide
  Sense strand starting at position 3747 of SEQ ID NO: 1560192
uugugaugcccggaaugcu

SEQ ID NO: 1582782 - RNA, 19 nt, Artificial Sequence
  Description of Artificial Sequence: Synthetic oligonucleotide
  Antisense strand to SEQ ID NO: 1582781
agcauuccgggcaucacaa

SEQ ID NO: 1582783 - RNA, 19 nt, Artificial Sequence
  Description of Artificial Sequence: Synthetic oligonucleotide
  Sense strand starting at position 3809 of SEQ ID NO: 1560192
ggaucuuacuuguuggugu

SEQ ID NO: 1582784 - RNA, 19 nt, Artificial Sequence
  Description of Artificial Sequence: Synthetic oligonucleotide
  Antisense strand to SEQ ID NO: 1582783
acaccaacaaguaagaucc

SEQ ID NO: 1582785 - RNA, 19 nt, Artificial Sequence
  Description of Artificial Sequence: Synthetic oligonucleotide
  Sense strand starting at position 3947 of SEQ ID NO: 1560192
gguuguucguccucuggaa

SEQ ID NO: 1582786 - RNA, 19 nt, Artificial Sequence
  Description of Artificial Sequence: Synthetic oligonucleotide
  Antisense strand to SEQ ID NO: 1582785
uuccagaggacgaacaacc

SEQ ID NO: 1582787 - RNA, 19 nt, Artificial Sequence
  Description of Artificial Sequence: Synthetic oligonucleotide
  Sense strand starting at position 118 of SEQ ID NO: 1560193
gccuaacauggugaaacau

SEQ ID NO: 1582788 - RNA, 19 nt, Artificial Sequence
  Description of Artificial Sequence: Synthetic oligonucleotide
  Antisense strand to SEQ ID NO: 1582787
auguuucaccauguuaggc

SEQ ID NO: 1582789 - RNA, 19 nt, Artificial Sequence
  Description of Artificial Sequence: Synthetic oligonucleotide
  Sense strand starting at position 693 of SEQ ID NO: 1560193
acaguaugugcaggaucaa

SEQ ID NO: 1582790 - RNA, 19 nt, Artificial Sequence
  Description of Artificial Sequence: Synthetic oligonucleotide
  Antisense strand to SEQ ID NO: 1582789
uugauccugcacauacugu

SEQ ID NO: 1582791 - RNA, 19 nt, Artificial Sequence
  Description of Artificial Sequence: Synthetic oligonucleotide
  Sense strand starting at position 694 of SEQ ID NO: 1560193
caguaugugcaggaucaaa

SEQ ID NO: 1582792 - RNA, 19 nt, Artificial Sequence
  Description of Artificial Sequence: Synthetic oligonucleotide
  Antisense strand to SEQ ID NO: 1582791
uuugauccugcacauacug

SEQ ID NO: 1582793 - RNA, 19 nt, Artificial Sequence
  Description of Artificial Sequence: Synthetic oligonucleotide
  Sense strand starting at position 716 of SEQ ID NO: 1560193
gccacauccugacuuguga

SEQ ID NO: 1582794 - RNA, 19 nt, Artificial Sequence
  Description of Artificial Sequence: Synthetic oligonucleotide
  Antisense strand to SEQ ID NO: 1582793
ucacaagucaggauguggc

SEQ ID NO: 1582795 - RNA, 19 nt, Artificial Sequence
  Description of Artificial Sequence: Synthetic oligonucleotide
  Sense strand starting at position 1252 of SEQ ID NO: 1560193
gggagagucuugagcguag

SEQ ID NO: 1582796 - RNA, 19 nt, Artificial Sequence
  Description of Artificial Sequence: Synthetic oligonucleotide
  Antisense strand to SEQ ID NO: 1582795
cuacgcucaagacucuccc

SEQ ID NO: 1582797 - RNA, 19 nt, Artificial Sequence
  Description of Artificial Sequence: Synthetic oligonucleotide
  Sense strand starting at position 1254 of SEQ ID NO: 1560193
gagagucuugagcguagga

SEQ ID NO: 1582798 - RNA, 19 nt, Artificial Sequence
  Description of Artificial Sequence: Synthetic oligonucleotide
  Antisense strand to SEQ ID NO: 1582797
uccuacgcucaagacucuc

SEQ ID NO: 1582799 - RNA, 19 nt, Artificial Sequence
  Description of Artificial Sequence: Synthetic oligonucleotide
  Sense strand starting at position 1256 of SEQ ID NO: 1560193
gagucuugagcguaggaau

SEQ ID NO: 1582800 - RNA, 19 nt, Artificial Sequence
  Description of Artificial Sequence: Synthetic oligonucleotide
  Antisense strand to SEQ ID NO: 1582799
auuccuacgcucaagacuc

SEQ ID NO: 1582801 - RNA, 19 nt, Artificial Sequence
  Description of Artificial Sequence: Synthetic oligonucleotide
  Sense strand starting at position 2426 of SEQ ID NO: 1560193
ucuacuguuucugcuuuau

SEQ ID NO: 1582802 - RNA, 19 nt, Artificial Sequence
  Description of Artificial Sequence: Synthetic oligonucleotide
  Antisense strand to SEQ ID NO: 1582801
auaaagcagaaacaguaga

SEQ ID NO: 1582803 - RNA, 19 nt, Artificial Sequence
  Description of Artificial Sequence: Synthetic oligonucleotide
  Sense strand starting at position 2430 of SEQ ID NO: 1560193
cuguuucugcuuuauuuau

SEQ ID NO: 1582804 - RNA, 19 nt, Artificial Sequence
  Description of Artificial Sequence: Synthetic oligonucleotide
  Antisense strand to SEQ ID NO: 1582803
auaaauaaagcagaaacag

SEQ ID NO: 1582805 - RNA, 19 nt, Artificial Sequence
  Description of Artificial Sequence: Synthetic oligonucleotide
  Sense strand starting at position 2512 of SEQ ID NO: 1560193
agcucaauguggccucaaa

SEQ ID NO: 1582806 - RNA, 19 nt, Artificial Sequence
  Description of Artificial Sequence: Synthetic oligonucleotide
  Antisense strand to SEQ ID NO: 1582805
uuugaggccacauugagcu

SEQ ID NO: 1582807 - RNA, 19 nt, Artificial Sequence
  Description of Artificial Sequence: Synthetic oligonucleotide
  Sense strand starting at position 2557 of SEQ ID NO: 1560193
ccaccuugcucuccagagu

SEQ ID NO: 1582808 - RNA, 19 nt, Artificial Sequence
  Description of Artificial Sequence: Synthetic oligonucleotide
  Antisense strand to SEQ ID NO: 1582807
acucuggagagcaaggugg

SEQ ID NO: 1582809 - RNA, 19 nt, Artificial Sequence
  Description of Artificial Sequence: Synthetic oligonucleotide
  Sense strand starting at position 3241 of SEQ ID NO: 1560193
uguggauucuuccuggaga

SEQ ID NO: 1582810 - RNA, 19 nt, Artificial Sequence
  Description of Artificial Sequence: Synthetic oligonucleotide
  Antisense strand to SEQ ID NO: 1582809
ucuccaggaagaauccaca

SEQ ID NO: 1582811 - RNA, 19 nt, Artificial Sequence
  Description of Artificial Sequence: Synthetic oligonucleotide
  Sense strand starting at position 3242 of SEQ ID NO: 1560193
guggauucuuccuggagau

SEQ ID NO: 1582812 - RNA, 19 nt, Artificial Sequence
  Description of Artificial Sequence: Synthetic oligonucleotide
  Antisense strand to SEQ ID NO: 1582811
aucuccaggaagaauccac

SEQ ID NO: 1582813 - RNA, 19 nt, Artificial Sequence
  Description of Artificial Sequence: Synthetic oligonucleotide
  Sense strand starting at position 3301 of SEQ ID NO: 1560193
ugggcuuugcaggauaagu

SEQ ID NO: 1582814 - RNA, 19 nt, Artificial Sequence
  Description of Artificial Sequence: Synthetic oligonucleotide
  Antisense strand to SEQ ID NO: 1582813
acuuauccugcaaagccca

SEQ ID NO: 1582815 - RNA, 19 nt, Artificial Sequence
  Description of Artificial Sequence: Synthetic oligonucleotide
  Sense strand starting at position 3309 of SEQ ID NO: 1560193
gcaggauaaguaggaguuu

SEQ ID NO: 1582816 - RNA, 19 nt, Artificial Sequence
  Description of Artificial Sequence: Synthetic oligonucleotide
  Antisense strand to SEQ ID NO: 1582815
aaacuccuacuuauccugc

SEQ ID NO: 1582817 - RNA, 19 nt, Artificial Sequence
  Description of Artificial Sequence: Synthetic oligonucleotide
  Sense strand starting at position 3384 of SEQ ID NO: 1560193
guaggaagauugcugguaa

SEQ ID NO: 1582818 - RNA, 19 nt, Artificial Sequence
  Description of Artificial Sequence: Synthetic oligonucleotide
  Antisense strand to SEQ ID NO: 1582817
uuaccagcaaucuuccuac

SEQ ID NO: 1582819 - RNA, 19 nt, Artificial Sequence
  Description of Artificial Sequence: Synthetic oligonucleotide
  Sense strand starting at position 3385 of SEQ ID NO: 1560193
uaggaagauugcugguaau

SEQ ID NO: 1582820 - RNA, 19 nt, Artificial Sequence
  Description of Artificial Sequence: Synthetic oligonucleotide
  Antisense strand to SEQ ID NO: 1582819
auuaccagcaaucuuccua

SEQ ID NO: 1582821 - RNA, 19 nt, Artificial Sequence
  Description of Artificial Sequence: Synthetic oligonucleotide
  Sense strand starting at position 3388 of SEQ ID NO: 1560193
gaagauugcugguaauguu

SEQ ID NO: 1582822 - RNA, 19 nt, Artificial Sequence
  Description of Artificial Sequence: Synthetic oligonucleotide
  Antisense strand to SEQ ID NO: 1582821
aacauuaccagcaaucuuc

SEQ ID NO: 1582823 - RNA, 19 nt, Artificial Sequence
  Description of Artificial Sequence: Synthetic oligonucleotide
  Sense strand starting at position 3395 of SEQ ID NO: 1560193
gcugguaauguugggacuu

SEQ ID NO: 1582824 - RNA, 19 nt, Artificial Sequence
  Description of Artificial Sequence: Synthetic oligonucleotide
  Antisense strand to SEQ ID NO: 1582823
aagucccaacauuaccagc

SEQ ID NO: 1582825 - RNA, 19 nt, Artificial Sequence
  Description of Artificial Sequence: Synthetic oligonucleotide
  Sense strand starting at position 3636 of SEQ ID NO: 1560193
cuccuagguuugugcagaa

SEQ ID NO: 1582826 - RNA, 19 nt, Artificial Sequence
  Description of Artificial Sequence: Synthetic oligonucleotide
  Antisense strand to SEQ ID NO: 1582825
uucugcacaaaccuaggag

SEQ ID NO: 1582827 - RNA, 19 nt, Artificial Sequence
  Description of Artificial Sequence: Synthetic oligonucleotide
  Sense strand starting at position 3640 of SEQ ID NO: 1560193
uagguuugugcagaaaguc

SEQ ID NO: 1582828 - RNA, 19 nt, Artificial Sequence
  Description of Artificial Sequence: Synthetic oligonucleotide
  Antisense strand to SEQ ID NO: 1582827
gacuuucugcacaaaccua

SEQ ID NO: 1582829 - RNA, 19 nt, Artificial Sequence
  Description of Artificial Sequence: Synthetic oligonucleotide
  Sense strand starting at position 3648 of SEQ ID NO: 1560193
ugcagaaaguccucagaaa

SEQ ID NO: 1582830 - RNA, 19 nt, Artificial Sequence
  Description of Artificial Sequence: Synthetic oligonucleotide
  Antisense strand to SEQ ID NO: 1582829
uuucugaggacuuucugca

SEQ ID NO: 1582831 - RNA, 19 nt, Artificial Sequence
  Description of Artificial Sequence: Synthetic oligonucleotide
  Sense strand starting at position 3686 of SEQ ID NO: 1560193
aagugcucaguuugaauga

SEQ ID NO: 1582832 - RNA, 19 nt, Artificial Sequence
  Description of Artificial Sequence: Synthetic oligonucleotide
  Antisense strand to SEQ ID NO: 1582831
ucauucaaacugagcacuu

SEQ ID NO: 1582833 - RNA, 19 nt, Artificial Sequence
  Description of Artificial Sequence: Synthetic oligonucleotide
  Sense strand starting at position 3687 of SEQ ID NO: 1560193
agugcucaguuugaaugau

SEQ ID NO: 1582834 - RNA, 19 nt, Artificial Sequence
  Description of Artificial Sequence: Synthetic oligonucleotide
  Antisense strand to SEQ ID NO: 1582833
aucauucaaacugagcacu

SEQ ID NO: 1582835 - RNA, 19 nt, Artificial Sequence
  Description of Artificial Sequence: Synthetic oligonucleotide
  Sense strand starting at position 3700 of SEQ ID NO: 1560193
aaugauuuauugcuguguu

SEQ ID NO: 1582836 - RNA, 19 nt, Artificial Sequence
  Description of Artificial Sequence: Synthetic oligonucleotide
  Antisense strand to SEQ ID NO: 1582835
aacacagcaauaaaucauu

SEQ ID NO: 1582837 - RNA, 19 nt, Artificial Sequence
  Description of Artificial Sequence: Synthetic oligonucleotide
  Sense strand starting at position 3703 of SEQ ID NO: 1560193
gauuuauugcuguguuaga

SEQ ID NO: 1582838 - RNA, 19 nt, Artificial Sequence
  Description of Artificial Sequence: Synthetic oligonucleotide
  Antisense strand to SEQ ID NO: 1582837
ucuaacacagcaauaaauc

SEQ ID NO: 1582839 - RNA, 19 nt, Artificial Sequence
  Description of Artificial Sequence: Synthetic oligonucleotide
  Sense strand starting at position 3704 of SEQ ID NO: 1560193
auuuauugcuguguuagau

SEQ ID NO: 1582840 - RNA, 19 nt, Artificial Sequence
  Description of Artificial Sequence: Synthetic oligonucleotide
  Antisense strand to SEQ ID NO: 1582839
aucuaacacagcaauaaau

SEQ ID NO: 1582841 - RNA, 19 nt, Artificial Sequence
  Description of Artificial Sequence: Synthetic oligonucleotide
  Sense strand starting at position 3713 of SEQ ID NO: 1560193
uguguuagaucagggacca

SEQ ID NO: 1582842 - RNA, 19 nt, Artificial Sequence
  Description of Artificial Sequence: Synthetic oligonucleotide
  Antisense strand to SEQ ID NO: 1582841
uggucccugaucuaacaca

SEQ ID NO: 1582843 - RNA, 19 nt, Artificial Sequence
  Description of Artificial Sequence: Synthetic oligonucleotide
  Sense strand starting at position 3714 of SEQ ID NO: 1560193
guguuagaucagggaccau

SEQ ID NO: 1582844 - RNA, 19 nt, Artificial Sequence
  Description of Artificial Sequence: Synthetic oligonucleotide
  Antisense strand to SEQ ID NO: 1582843
auggucccugaucuaacac

SEQ ID NO: 1582845 - RNA, 19 nt, Artificial Sequence
  Description of Artificial Sequence: Synthetic oligonucleotide
  Sense strand starting at position 3731 of SEQ ID NO: 1560193
auggaagucugagaagucu

SEQ ID NO: 1582846 - RNA, 19 nt, Artificial Sequence
  Description of Artificial Sequence: Synthetic oligonucleotide
  Antisense strand to SEQ ID NO: 1582845
agacuucucagacuuccau

SEQ ID NO: 1582847 - RNA, 19 nt, Artificial Sequence
  Description of Artificial Sequence: Synthetic oligonucleotide
  Sense strand starting at position 3764 of SEQ ID NO: 1560193
augggagucuacuugaagu

SEQ ID NO: 1582848 - RNA, 19 nt, Artificial Sequence
  Description of Artificial Sequence: Synthetic oligonucleotide
  Antisense strand to SEQ ID NO: 1582847
acuucaaguagacucccau

SEQ ID NO: 1582849 - RNA, 19 nt, Artificial Sequence
  Description of Artificial Sequence: Synthetic oligonucleotide
  Sense strand starting at position 3766 of SEQ ID NO: 1560193
gggagucuacuugaagugu

SEQ ID NO: 1582850 - RNA, 19 nt, Artificial Sequence
  Description of Artificial Sequence: Synthetic oligonucleotide
  Antisense strand to SEQ ID NO: 1582849
acacuucaaguagacuccc

SEQ ID NO: 1582851 - RNA, 19 nt, Artificial Sequence
  Description of Artificial Sequence: Synthetic oligonucleotide
  Sense strand starting at position 71 of SEQ ID NO: 1560194
agugccgagcucgagaaau

SEQ ID NO: 1582852 - RNA, 19 nt, Artificial Sequence
  Description of Artificial Sequence: Synthetic oligonucleotide
  Antisense strand to SEQ ID NO: 1582851
auuucucgagcucggcacu

SEQ ID NO: 1582853 - RNA, 19 nt, Artificial Sequence
  Description of Artificial Sequence: Synthetic oligonucleotide
  Sense strand starting at position 83 of SEQ ID NO: 1560194
gagaaauccuagucuaguc

SEQ ID NO: 1582854 - RNA, 19 nt, Artificial Sequence
  Description of Artificial Sequence: Synthetic oligonucleotide
  Antisense strand to SEQ ID NO: 1582853
gacuagacuaggauuucuc

SEQ ID NO: 1582855 - RNA, 19 nt, Artificial Sequence
  Description of Artificial Sequence: Synthetic oligonucleotide
  Sense strand starting at position 88 of SEQ ID NO: 1560194
auccuagucuagucugaag

SEQ ID NO: 1582856 - RNA, 19 nt, Artificial Sequence
  Description of Artificial Sequence: Synthetic oligonucleotide
  Antisense strand to SEQ ID NO: 1582855
cuucagacuagacuaggau

SEQ ID NO: 1582857 - RNA, 19 nt, Artificial Sequence
  Description of Artificial Sequence: Synthetic oligonucleotide
  Sense strand starting at position 90 of SEQ ID NO: 1560194
ccuagucuagucugaagaa

SEQ ID NO: 1582858 - RNA, 19 nt, Artificial Sequence
  Description of Artificial Sequence: Synthetic oligonucleotide
  Antisense strand to SEQ ID NO: 1582857
uucuucagacuagacuagg

SEQ ID NO: 1582859 - RNA, 19 nt, Artificial Sequence
  Description of Artificial Sequence: Synthetic oligonucleotide
  Sense strand starting at position 120 of SEQ ID NO: 1560194
cgugcaagacugugauuua

SEQ ID NO: 1582860 - RNA, 19 nt, Artificial Sequence
  Description of Artificial Sequence: Synthetic oligonucleotide
  Antisense strand to SEQ ID NO: 1582859
uaaaucacagucuugcacg

SEQ ID NO: 1582861 - RNA, 19 nt, Artificial Sequence
  Description of Artificial Sequence: Synthetic oligonucleotide
  Sense strand starting at position 147 of SEQ ID NO: 1560194
uuuguacuuuguccuaaag

SEQ ID NO: 1582862 - RNA, 19 nt, Artificial Sequence
  Description of Artificial Sequence: Synthetic oligonucleotide
  Antisense strand to SEQ ID NO: 1582861
cuuuaggacaaaguacaaa

SEQ ID NO: 1582863 - RNA, 19 nt, Artificial Sequence
  Description of Artificial Sequence: Synthetic oligonucleotide
  Sense strand starting at position 455 of SEQ ID NO: 1560194
uacagugggcucuaucaca

SEQ ID NO: 1582864 - RNA, 19 nt, Artificial Sequence
  Description of Artificial Sequence: Synthetic oligonucleotide
  Antisense strand to SEQ ID NO: 1582863
ugugauagagcccacugua

SEQ ID NO: 1582865 - RNA, 19 nt, Artificial Sequence
  Description of Artificial Sequence: Synthetic oligonucleotide
  Sense strand starting at position 486 of SEQ ID NO: 1560194
auguguccuacccaaguga

SEQ ID NO: 1582866 - RNA, 19 nt, Artificial Sequence
  Description of Artificial Sequence: Synthetic oligonucleotide
  Antisense strand to SEQ ID NO: 1582865
ucacuuggguaggacacau

SEQ ID NO: 1582867 - RNA, 19 nt, Artificial Sequence
  Description of Artificial Sequence: Synthetic oligonucleotide
  Sense strand starting at position 770 of SEQ ID NO: 1560194
ucccacaugucagugacau

SEQ ID NO: 1582868 - RNA, 19 nt, Artificial Sequence
  Description of Artificial Sequence: Synthetic oligonucleotide
  Antisense strand to SEQ ID NO: 1582867
augucacugacauguggga

SEQ ID NO: 1582869 - RNA, 19 nt, Artificial Sequence
  Description of Artificial Sequence: Synthetic oligonucleotide
  Sense strand starting at position 771 of SEQ ID NO: 1560194
cccacaugucagugacauc

SEQ ID NO: 1582870 - RNA, 19 nt, Artificial Sequence
  Description of Artificial Sequence: Synthetic oligonucleotide
  Antisense strand to SEQ ID NO: 1582869
gaugucacugacauguggg

SEQ ID NO: 1582871 - RNA, 19 nt, Artificial Sequence
  Description of Artificial Sequence: Synthetic oligonucleotide
  Sense strand starting at position 846 of SEQ ID NO: 1560194
aacgguagcugccugaaau

SEQ ID NO: 1582872 - RNA, 19 nt, Artificial Sequence
  Description of Artificial Sequence: Synthetic oligonucleotide
  Antisense strand to SEQ ID NO: 1582871
auuucaggcagcuaccguu

SEQ ID NO: 1582873 - RNA, 19 nt, Artificial Sequence
  Description of Artificial Sequence: Synthetic oligonucleotide
  Sense strand starting at position 974 of SEQ ID NO: 1560194
gugucagcagugucuugua

SEQ ID NO: 1582874 - RNA, 19 nt, Artificial Sequence
  Description of Artificial Sequence: Synthetic oligonucleotide
  Antisense strand to SEQ ID NO: 1582873
uacaagacacugcugacac

SEQ ID NO: 1582875 - RNA, 19 nt, Artificial Sequence
  Description of Artificial Sequence: Synthetic oligonucleotide
  Sense strand starting at position 1046 of SEQ ID NO: 1560194
gucucacuguuccuugaau

SEQ ID NO: 1582876 - RNA, 19 nt, Artificial Sequence
  Description of Artificial Sequence: Synthetic oligonucleotide
  Antisense strand to SEQ ID NO: 1582875
auucaaggaacagugagac

SEQ ID NO: 1582877 - RNA, 19 nt, Artificial Sequence
  Description of Artificial Sequence: Synthetic oligonucleotide
  Sense strand starting at position 1209 of SEQ ID NO: 1560194
cauggaaucgcggaguuga

SEQ ID NO: 1582878 - RNA, 19 nt, Artificial Sequence
  Description of Artificial Sequence: Synthetic oligonucleotide
  Antisense strand to SEQ ID NO: 1582877
ucaacuccgcgauuccaug

SEQ ID NO: 1582879 - RNA, 19 nt, Artificial Sequence
  Description of Artificial Sequence: Synthetic oligonucleotide
  Sense strand starting at position 1437 of SEQ ID NO: 1560194
acgggauuccgugacaaga

SEQ ID NO: 1582880 - RNA, 19 nt, Artificial Sequence
  Description of Artificial Sequence: Synthetic oligonucleotide
  Antisense strand to SEQ ID NO: 1582879
ucuugucacggaaucccgu

SEQ ID NO: 1582881 - RNA, 19 nt, Artificial Sequence
  Description of Artificial Sequence: Synthetic oligonucleotide
  Sense strand starting at position 1831 of SEQ ID NO: 1560194
cuccgaacuccaggacuuu

SEQ ID NO: 1582882 - RNA, 19 nt, Artificial Sequence
  Description of Artificial Sequence: Synthetic oligonucleotide
  Antisense strand to SEQ ID NO: 1582881
aaaguccuggaguucggag

SEQ ID NO: 1582883 - RNA, 19 nt, Artificial Sequence
  Description of Artificial Sequence: Synthetic oligonucleotide
  Sense strand starting at position 2058 of SEQ ID NO: 1560194
accguauucugauucgaag

SEQ ID NO: 1582884 - RNA, 19 nt, Artificial Sequence
  Description of Artificial Sequence: Synthetic oligonucleotide
  Antisense strand to SEQ ID NO: 1582883
cuucgaaucagaauacggu

SEQ ID NO: 1582885 - RNA, 19 nt, Artificial Sequence
  Description of Artificial Sequence: Synthetic oligonucleotide
  Sense strand starting at position 2060 of SEQ ID NO: 1560194
cguauucugauucgaagaa

SEQ ID NO: 1582886 - RNA, 19 nt, Artificial Sequence
  Description of Artificial Sequence: Synthetic oligonucleotide
  Antisense strand to SEQ ID NO: 1582885
uucuucgaaucagaauacg

SEQ ID NO: 1582887 - RNA, 19 nt, Artificial Sequence
  Description of Artificial Sequence: Synthetic oligonucleotide
  Sense strand starting at position 2152 of SEQ ID NO: 1560194
cucauauccuuucuguguu

SEQ ID NO: 1582888 - RNA, 19 nt, Artificial Sequence
  Description of Artificial Sequence: Synthetic oligonucleotide
  Antisense strand to SEQ ID NO: 1582887
aacacagaaaggauaugag

SEQ ID NO: 1582889 - RNA, 19 nt, Artificial Sequence
  Description of Artificial Sequence: Synthetic oligonucleotide
  Sense strand starting at position 2190 of SEQ ID NO: 1560194
gggucuuacggccaacaaa

SEQ ID NO: 1582890 - RNA, 19 nt, Artificial Sequence
  Description of Artificial Sequence: Synthetic oligonucleotide
  Antisense strand to SEQ ID NO: 1582889
uuuguuggccguaagaccc

SEQ ID NO: 1582891 - RNA, 19 nt, Artificial Sequence
  Description of Artificial Sequence: Synthetic oligonucleotide
  Sense strand starting at position 2465 of SEQ ID NO: 1560194
cgugaaauuggguggaugu

SEQ ID NO: 1582892 - RNA, 19 nt, Artificial Sequence
  Description of Artificial Sequence: Synthetic oligonucleotide
  Antisense strand to SEQ ID NO: 1582891
acauccacccaauuucacg

SEQ ID NO: 1582893 - RNA, 19 nt, Artificial Sequence
  Description of Artificial Sequence: Synthetic oligonucleotide
  Sense strand starting at position 2506 of SEQ ID NO: 1560194
uggugcuacugacuggaua

SEQ ID NO: 1582894 - RNA, 19 nt, Artificial Sequence
  Description of Artificial Sequence: Synthetic oligonucleotide
  Antisense strand to SEQ ID NO: 1582893
uauccagucaguagcacca

SEQ ID NO: 1582895 - RNA, 19 nt, Artificial Sequence
  Description of Artificial Sequence: Synthetic oligonucleotide
  Sense strand starting at position 2507 of SEQ ID NO: 1560194
ggugcuacugacuggauaa

SEQ ID NO: 1582896 - RNA, 19 nt, Artificial Sequence
  Description of Artificial Sequence: Synthetic oligonucleotide
  Antisense strand to SEQ ID NO: 1582895
uuauccagucaguagcacc

SEQ ID NO: 1582897 - RNA, 19 nt, Artificial Sequence
  Description of Artificial Sequence: Synthetic oligonucleotide
  Sense strand starting at position 2508 of SEQ ID NO: 1560194
gugcuacugacuggauaag

SEQ ID NO: 1582898 - RNA, 19 nt, Artificial Sequence
  Description of Artificial Sequence: Synthetic oligonucleotide
  Antisense strand to SEQ ID NO: 1582897
cuuauccagucaguagcac

SEQ ID NO: 1582899 - RNA, 19 nt, Artificial Sequence
  Description of Artificial Sequence: Synthetic oligonucleotide
  Sense strand starting at position 2887 of SEQ ID NO: 1560194
aagugacaucuauguuuga

SEQ ID NO: 1582900 - RNA, 19 nt, Artificial Sequence
  Description of Artificial Sequence: Synthetic oligonucleotide
  Antisense strand to SEQ ID NO: 1582899
ucaaacauagaugucacuu

SEQ ID NO: 1582901 - RNA, 19 nt, Artificial Sequence
  Description of Artificial Sequence: Synthetic oligonucleotide
  Sense strand starting at position 2975 of SEQ ID NO: 1560194
cgcuguguuauugggaaga

SEQ ID NO: 1582902 - RNA, 19 nt, Artificial Sequence
  Description of Artificial Sequence: Synthetic oligonucleotide
  Antisense strand to SEQ ID NO: 1582901
ucuucccaauaacacagcg

SEQ ID NO: 1582903 - RNA, 19 nt, Artificial Sequence
  Description of Artificial Sequence: Synthetic oligonucleotide
  Sense strand starting at position 2992 of SEQ ID NO: 1560194
gacguaguuagauggcgaa

SEQ ID NO: 1582904 - RNA, 19 nt, Artificial Sequence
  Description of Artificial Sequence: Synthetic oligonucleotide
  Antisense strand to SEQ ID NO: 1582903
uucgccaucuaacuacguc

SEQ ID NO: 1582905 - RNA, 19 nt, Artificial Sequence
  Description of Artificial Sequence: Synthetic oligonucleotide
  Sense strand starting at position 2996 of SEQ ID NO: 1560194
uaguuagauggcgaaugga

SEQ ID NO: 1582906 - RNA, 19 nt, Artificial Sequence
  Description of Artificial Sequence: Synthetic oligonucleotide
  Antisense strand to SEQ ID NO: 1582905
uccauucgccaucuaacua

SEQ ID NO: 1582907 - RNA, 19 nt, Artificial Sequence
  Description of Artificial Sequence: Synthetic oligonucleotide
  Sense strand starting at position 3036 of SEQ ID NO: 1560194
augcuuaaguggucaauau

SEQ ID NO: 1582908 - RNA, 19 nt, Artificial Sequence
  Description of Artificial Sequence: Synthetic oligonucleotide
  Antisense strand to SEQ ID NO: 1582907
auauugaccacuuaagcau

SEQ ID NO: 1582909 - RNA, 19 nt, Artificial Sequence
  Description of Artificial Sequence: Synthetic oligonucleotide
  Sense strand starting at position 3037 of SEQ ID NO: 1560194
ugcuuaaguggucaauauu

SEQ ID NO: 1582910 - RNA, 19 nt, Artificial Sequence
  Description of Artificial Sequence: Synthetic oligonucleotide
  Antisense strand to SEQ ID NO: 1582909
aauauugaccacuuaagca

SEQ ID NO: 1582911 - RNA, 19 nt, Artificial Sequence
  Description of Artificial Sequence: Synthetic oligonucleotide
  Sense strand starting at position 3058 of SEQ ID NO: 1560194
gagcgcugugauuaugaac

SEQ ID NO: 1582912 - RNA, 19 nt, Artificial Sequence
  Description of Artificial Sequence: Synthetic oligonucleotide
  Antisense strand to SEQ ID NO: 1582911
guucauaaucacagcgcuc

SEQ ID NO: 1582913 - RNA, 19 nt, Artificial Sequence
  Description of Artificial Sequence: Synthetic oligonucleotide
  Sense strand starting at position 3096 of SEQ ID NO: 1560194
aagaguaagcuuugcauug

SEQ ID NO: 1582914 - RNA, 19 nt, Artificial Sequence
  Description of Artificial Sequence: Synthetic oligonucleotide
  Antisense strand to SEQ ID NO: 1582913
caaugcaaagcuuacucuu

SEQ ID NO: 1582915 - RNA, 19 nt, Artificial Sequence
  Description of Artificial Sequence: Synthetic oligonucleotide
  Sense strand starting at position 3101 of SEQ ID NO: 1560194
uaagcuuugcauugggaua

SEQ ID NO: 1582916 - RNA, 19 nt, Artificial Sequence
  Description of Artificial Sequence: Synthetic oligonucleotide
  Antisense strand to SEQ ID NO: 1582915
uaucccaaugcaaagcuua

SEQ ID NO: 1582917 - RNA, 19 nt, Artificial Sequence
  Description of Artificial Sequence: Synthetic oligonucleotide
  Sense strand starting at position 3112 of SEQ ID NO: 1560194
uugggauauucugaauaua

SEQ ID NO: 1582918 - RNA, 19 nt, Artificial Sequence
  Description of Artificial Sequence: Synthetic oligonucleotide
  Antisense strand to SEQ ID NO: 1582917
uauauucagaauaucccaa

SEQ ID NO: 1582919 - RNA, 19 nt, Artificial Sequence
  Description of Artificial Sequence: Synthetic oligonucleotide
  Sense strand starting at position 3170 of SEQ ID NO: 1560194
aggucucagcccuguaaca

SEQ ID NO: 1582920 - RNA, 19 nt, Artificial Sequence
  Description of Artificial Sequence: Synthetic oligonucleotide
  Antisense strand to SEQ ID NO: 1582919
uguuacagggcugagaccu

SEQ ID NO: 1582921 - RNA, 19 nt, Artificial Sequence
  Description of Artificial Sequence: Synthetic oligonucleotide
  Sense strand starting at position 3172 of SEQ ID NO: 1560194
gucucagcccuguaacagu

SEQ ID NO: 1582922 - RNA, 19 nt, Artificial Sequence
  Description of Artificial Sequence: Synthetic oligonucleotide
  Antisense strand to SEQ ID NO: 1582921
acuguuacagggcugagac

SEQ ID NO: 1582923 - RNA, 19 nt, Artificial Sequence
  Description of Artificial Sequence: Synthetic oligonucleotide
  Sense strand starting at position 3190 of SEQ ID NO: 1560194
uagcucucgcucuaggaaa

SEQ ID NO: 1582924 - RNA, 19 nt, Artificial Sequence
  Description of Artificial Sequence: Synthetic oligonucleotide
  Antisense strand to SEQ ID NO: 1582923
uuuccuagagcgagagcua

SEQ ID NO: 1582925 - RNA, 19 nt, Artificial Sequence
  Description of Artificial Sequence: Synthetic oligonucleotide
  Sense strand starting at position 3404 of SEQ ID NO: 1560194
gcagaaggugagugacuua

SEQ ID NO: 1582926 - RNA, 19 nt, Artificial Sequence
  Description of Artificial Sequence: Synthetic oligonucleotide
  Antisense strand to SEQ ID NO: 1582925
uaagucacucaccuucugc

SEQ ID NO: 1582927 - RNA, 19 nt, Artificial Sequence
  Description of Artificial Sequence: Synthetic oligonucleotide
  Sense strand starting at position 3824 of SEQ ID NO: 1560194
gguguuaauaacgauucuu

SEQ ID NO: 1582928 - RNA, 19 nt, Artificial Sequence
  Description of Artificial Sequence: Synthetic oligonucleotide
  Antisense strand to SEQ ID NO: 1582927
aagaaucguuauuaacacc

SEQ ID NO: 1582929 - RNA, 19 nt, Artificial Sequence
  Description of Artificial Sequence: Synthetic oligonucleotide
  Sense strand starting at position 3835 of SEQ ID NO: 1560194
cgauucuuugaauguguag

SEQ ID NO: 1582930 - RNA, 19 nt, Artificial Sequence
  Description of Artificial Sequence: Synthetic oligonucleotide
  Antisense strand to SEQ ID NO: 1582929
cuacacauucaaagaaucg

SEQ ID NO: 1582931 - RNA, 19 nt, Artificial Sequence
  Description of Artificial Sequence: Synthetic oligonucleotide
  Sense strand starting at position 47 of SEQ ID NO: 1560195
uacagugggcucuaucaca

SEQ ID NO: 1582932 - RNA, 19 nt, Artificial Sequence
  Description of Artificial Sequence: Synthetic oligonucleotide
  Antisense strand to SEQ ID NO: 1582931
ugugauagagcccacugua

SEQ ID NO: 1582933 - RNA, 19 nt, Artificial Sequence
  Description of Artificial Sequence: Synthetic oligonucleotide
  Sense strand starting at position 52 of SEQ ID NO: 1560195
ugggcucuaucacacaaau

SEQ ID NO: 1582934 - RNA, 19 nt, Artificial Sequence
  Description of Artificial Sequence: Synthetic oligonucleotide
  Antisense strand to SEQ ID NO: 1582933
auuugugugauagagccca

SEQ ID NO: 1582935 - RNA, 19 nt, Artificial Sequence
  Description of Artificial Sequence: Synthetic oligonucleotide
  Sense strand starting at position 78 of SEQ ID NO: 1560195
auguguccuacccaaguga

SEQ ID NO: 1582936 - RNA, 19 nt, Artificial Sequence
  Description of Artificial Sequence: Synthetic oligonucleotide
  Antisense strand to SEQ ID NO: 1582935
ucacuuggguaggacacau

SEQ ID NO: 1582937 - RNA, 19 nt, Artificial Sequence
  Description of Artificial Sequence: Synthetic oligonucleotide
  Sense strand starting at position 362 of SEQ ID NO: 1560195
ucccacaugucagugacau

SEQ ID NO: 1582938 - RNA, 19 nt, Artificial Sequence
  Description of Artificial Sequence: Synthetic oligonucleotide
  Antisense strand to SEQ ID NO: 1582937
augucacugacauguggga

SEQ ID NO: 1582939 - RNA, 19 nt, Artificial Sequence
  Description of Artificial Sequence: Synthetic oligonucleotide
  Sense strand starting at position 363 of SEQ ID NO: 1560195
cccacaugucagugacauc

SEQ ID NO: 1582940 - RNA, 19 nt, Artificial Sequence
  Description of Artificial Sequence: Synthetic oligonucleotide
  Antisense strand to SEQ ID NO: 1582939
gaugucacugacauguggg

SEQ ID NO: 1582941 - RNA, 19 nt, Artificial Sequence
  Description of Artificial Sequence: Synthetic oligonucleotide
  Sense strand starting at position 438 of SEQ ID NO: 1560195
aacgguagcugccugaaau

SEQ ID NO: 1582942 - RNA, 19 nt, Artificial Sequence
  Description of Artificial Sequence: Synthetic oligonucleotide
  Antisense strand to SEQ ID NO: 1582941
auuucaggcagcuaccguu

SEQ ID NO: 1582943 - RNA, 19 nt, Artificial Sequence
  Description of Artificial Sequence: Synthetic oligonucleotide
  Sense strand starting at position 439 of SEQ ID NO: 1560195
acgguagcugccugaaaug

SEQ ID NO: 1582944 - RNA, 19 nt, Artificial Sequence
  Description of Artificial Sequence: Synthetic oligonucleotide
  Antisense strand to SEQ ID NO: 1582943
cauuucaggcagcuaccgu

SEQ ID NO: 1582945 - RNA, 19 nt, Artificial Sequence
  Description of Artificial Sequence: Synthetic oligonucleotide
  Sense strand starting at position 566 of SEQ ID NO: 1560195
gugucagcagugucuugua

SEQ ID NO: 1582946 - RNA, 19 nt, Artificial Sequence
  Description of Artificial Sequence: Synthetic oligonucleotide
  Antisense strand to SEQ ID NO: 1582945
uacaagacacugcugacac

SEQ ID NO: 1582947 - RNA, 19 nt, Artificial Sequence
  Description of Artificial Sequence: Synthetic oligonucleotide
  Sense strand starting at position 638 of SEQ ID NO: 1560195
gucucacuguuccuugaau

SEQ ID NO: 1582948 - RNA, 19 nt, Artificial Sequence
  Description of Artificial Sequence: Synthetic oligonucleotide
  Antisense strand to SEQ ID NO: 1582947
auucaaggaacagugagac

SEQ ID NO: 1582949 - RNA, 19 nt, Artificial Sequence
  Description of Artificial Sequence: Synthetic oligonucleotide
  Sense strand starting at position 801 of SEQ ID NO: 1560195
cauggaaucgcggaguuga

SEQ ID NO: 1582950 - RNA, 19 nt, Artificial Sequence
  Description of Artificial Sequence: Synthetic oligonucleotide
  Antisense strand to SEQ ID NO: 1582949
ucaacuccgcgauuccaug

SEQ ID NO: 1582951 - RNA, 19 nt, Artificial Sequence
  Description of Artificial Sequence: Synthetic oligonucleotide
  Sense strand starting at position 1029 of SEQ ID NO: 1560195
acgggauuccgugacaaga

SEQ ID NO: 1582952 - RNA, 19 nt, Artificial Sequence
  Description of Artificial Sequence: Synthetic oligonucleotide
  Antisense strand to SEQ ID NO: 1582951
ucuugucacggaaucccgu

SEQ ID NO: 1582953 - RNA, 19 nt, Artificial Sequence
  Description of Artificial Sequence: Synthetic oligonucleotide
  Sense strand starting at position 1423 of SEQ ID NO: 1560195
cuccgaacuccaggacuuu

SEQ ID NO: 1582954 - RNA, 19 nt, Artificial Sequence
  Description of Artificial Sequence: Synthetic oligonucleotide
  Antisense strand to SEQ ID NO: 1582953
aaaguccuggaguucggag

SEQ ID NO: 1582955 - RNA, 19 nt, Artificial Sequence
  Description of Artificial Sequence: Synthetic oligonucleotide
  Sense strand starting at position 1650 of SEQ ID NO: 1560195
accguauucugauucgaag

SEQ ID NO: 1582956 - RNA, 19 nt, Artificial Sequence
  Description of Artificial Sequence: Synthetic oligonucleotide
  Antisense strand to SEQ ID NO: 1582955
cuucgaaucagaauacggu

SEQ ID NO: 1582957 - RNA, 19 nt, Artificial Sequence
  Description of Artificial Sequence: Synthetic oligonucleotide
  Sense strand starting at position 1652 of SEQ ID NO: 1560195
cguauucugauucgaagaa

SEQ ID NO: 1582958 - RNA, 19 nt, Artificial Sequence
  Description of Artificial Sequence: Synthetic oligonucleotide
  Antisense strand to SEQ ID NO: 1582957
uucuucgaaucagaauacg

SEQ ID NO: 1582959 - RNA, 19 nt, Artificial Sequence
  Description of Artificial Sequence: Synthetic oligonucleotide
  Sense strand starting at position 1744 of SEQ ID NO: 1560195
cucauauccuuucuguguu

SEQ ID NO: 1582960 - RNA, 19 nt, Artificial Sequence
  Description of Artificial Sequence: Synthetic oligonucleotide
  Antisense strand to SEQ ID NO: 1582959
aacacagaaaggauaugag

SEQ ID NO: 1582961 - RNA, 19 nt, Artificial Sequence
  Description of Artificial Sequence: Synthetic oligonucleotide
  Sense strand starting at position 1782 of SEQ ID NO: 1560195
gggucuuacggccaacaaa

SEQ ID NO: 1582962 - RNA, 19 nt, Artificial Sequence
  Description of Artificial Sequence: Synthetic oligonucleotide
  Antisense strand to SEQ ID NO: 1582961
uuuguuggccguaagaccc

SEQ ID NO: 1582963 - RNA, 19 nt, Artificial Sequence
  Description of Artificial Sequence: Synthetic oligonucleotide
  Sense strand starting at position 2057 of SEQ ID NO: 1560195
cgugaaauuggguggaugu

SEQ ID NO: 1582964 - RNA, 19 nt, Artificial Sequence
  Description of Artificial Sequence: Synthetic oligonucleotide
  Antisense strand to SEQ ID NO: 1582963
acauccacccaauuucacg

SEQ ID NO: 1582965 - RNA, 19 nt, Artificial Sequence
  Description of Artificial Sequence: Synthetic oligonucleotide
  Sense strand starting at position 2098 of SEQ ID NO: 1560195
uggugcuacugacuggaua

SEQ ID NO: 1582966 - RNA, 19 nt, Artificial Sequence
  Description of Artificial Sequence: Synthetic oligonucleotide
  Antisense strand to SEQ ID NO: 1582965
uauccagucaguagcacca

SEQ ID NO: 1582967 - RNA, 19 nt, Artificial Sequence
  Description of Artificial Sequence: Synthetic oligonucleotide
  Sense strand starting at position 2099 of SEQ ID NO: 1560195
ggugcuacugacuggauaa

SEQ ID NO: 1582968 - RNA, 19 nt, Artificial Sequence
  Description of Artificial Sequence: Synthetic oligonucleotide
  Antisense strand to SEQ ID NO: 1582967
uuauccagucaguagcacc

SEQ ID NO: 1582969 - RNA, 19 nt, Artificial Sequence
  Description of Artificial Sequence: Synthetic oligonucleotide
  Sense strand starting at position 2100 of SEQ ID NO: 1560195
gugcuacugacuggauaag

SEQ ID NO: 1582970 - RNA, 19 nt, Artificial Sequence
  Description of Artificial Sequence: Synthetic oligonucleotide
  Antisense strand to SEQ ID NO: 1582969
cuuauccagucaguagcac

SEQ ID NO: 1582971 - RNA, 19 nt, Artificial Sequence
  Description of Artificial Sequence: Synthetic oligonucleotide
  Sense strand starting at position 2473 of SEQ ID NO: 1560195
ggugacaagugacaucuau

SEQ ID NO: 1582972 - RNA, 19 nt, Artificial Sequence
  Description of Artificial Sequence: Synthetic oligonucleotide
  Antisense strand to SEQ ID NO: 1582971
auagaugucacuugucacc

SEQ ID NO: 1582973 - RNA, 19 nt, Artificial Sequence
  Description of Artificial Sequence: Synthetic oligonucleotide
  Sense strand starting at position 2479 of SEQ ID NO: 1560195
aagugacaucuauguuuga

SEQ ID NO: 1582974 - RNA, 19 nt, Artificial Sequence
  Description of Artificial Sequence: Synthetic oligonucleotide
  Antisense strand to SEQ ID NO: 1582973
ucaaacauagaugucacuu

SEQ ID NO: 1582975 - RNA, 19 nt, Artificial Sequence
  Description of Artificial Sequence: Synthetic oligonucleotide
  Sense strand starting at position 2565 of SEQ ID NO: 1560195
cccgcuguguuauugggaa

SEQ ID NO: 1582976 - RNA, 19 nt, Artificial Sequence
  Description of Artificial Sequence: Synthetic oligonucleotide
  Antisense strand to SEQ ID NO: 1582975
uucccaauaacacagcggg

SEQ ID NO: 1582977 - RNA, 19 nt, Artificial Sequence
  Description of Artificial Sequence: Synthetic oligonucleotide
  Sense strand starting at position 2567 of SEQ ID NO: 1560195
cgcuguguuauugggaaga

SEQ ID NO: 1582978 - RNA, 19 nt, Artificial Sequence
  Description of Artificial Sequence: Synthetic oligonucleotide
  Antisense strand to SEQ ID NO: 1582977
ucuucccaauaacacagcg

SEQ ID NO: 1582979 - RNA, 19 nt, Artificial Sequence
  Description of Artificial Sequence: Synthetic oligonucleotide
  Sense strand starting at position 2584 of SEQ ID NO: 1560195
gacguaguuagauggcgaa

SEQ ID NO: 1582980 - RNA, 19 nt, Artificial Sequence
  Description of Artificial Sequence: Synthetic oligonucleotide
  Antisense strand to SEQ ID NO: 1582979
uucgccaucuaacuacguc

SEQ ID NO: 1582981 - RNA, 19 nt, Artificial Sequence
  Description of Artificial Sequence: Synthetic oligonucleotide
  Sense strand starting at position 2588 of SEQ ID NO: 1560195
uaguuagauggcgaaugga

SEQ ID NO: 1582982 - RNA, 19 nt, Artificial Sequence
  Description of Artificial Sequence: Synthetic oligonucleotide
  Antisense strand to SEQ ID NO: 1582981
uccauucgccaucuaacua

SEQ ID NO: 1582983 - RNA, 19 nt, Artificial Sequence
  Description of Artificial Sequence: Synthetic oligonucleotide
  Sense strand starting at position 2628 of SEQ ID NO: 1560195
augcuuaaguggucaauau

SEQ ID NO: 1582984 - RNA, 19 nt, Artificial Sequence
  Description of Artificial Sequence: Synthetic oligonucleotide
  Antisense strand to SEQ ID NO: 1582983
auauugaccacuuaagcau

SEQ ID NO: 1582985 - RNA, 19 nt, Artificial Sequence
  Description of Artificial Sequence: Synthetic oligonucleotide
  Sense strand starting at position 2629 of SEQ ID NO: 1560195
ugcuuaaguggucaauauu

SEQ ID NO: 1582986 - RNA, 19 nt, Artificial Sequence
  Description of Artificial Sequence: Synthetic oligonucleotide
  Antisense strand to SEQ ID NO: 1582985
aauauugaccacuuaagca

SEQ ID NO: 1582987 - RNA, 19 nt, Artificial Sequence
  Description of Artificial Sequence: Synthetic oligonucleotide
  Sense strand starting at position 2646 of SEQ ID NO: 1560195
uuuggagcgcugugauuau

SEQ ID NO: 1582988 - RNA, 19 nt, Artificial Sequence
  Description of Artificial Sequence: Synthetic oligonucleotide
  Antisense strand to SEQ ID NO: 1582987
auaaucacagcgcuccaaa

SEQ ID NO: 1582989 - RNA, 19 nt, Artificial Sequence
  Description of Artificial Sequence: Synthetic oligonucleotide
  Sense strand starting at position 2650 of SEQ ID NO: 1560195
gagcgcugugauuaugaac

SEQ ID NO: 1582990 - RNA, 19 nt, Artificial Sequence
  Description of Artificial Sequence: Synthetic oligonucleotide
  Antisense strand to SEQ ID NO: 1582989
guucauaaucacagcgcuc

SEQ ID NO: 1582991 - RNA, 19 nt, Artificial Sequence
  Description of Artificial Sequence: Synthetic oligonucleotide
  Sense strand starting at position 2688 of SEQ ID NO: 1560195
aagaguaagcuuugcauug

SEQ ID NO: 1582992 - RNA, 19 nt, Artificial Sequence
  Description of Artificial Sequence: Synthetic oligonucleotide
  Antisense strand to SEQ ID NO: 1582991
caaugcaaagcuuacucuu

SEQ ID NO: 1582993 - RNA, 19 nt, Artificial Sequence
  Description of Artificial Sequence: Synthetic oligonucleotide
  Sense strand starting at position 2693 of SEQ ID NO: 1560195
uaagcuuugcauugggaua

SEQ ID NO: 1582994 - RNA, 19 nt, Artificial Sequence
  Description of Artificial Sequence: Synthetic oligonucleotide
  Antisense strand to SEQ ID NO: 1582993
uaucccaaugcaaagcuua

SEQ ID NO: 1582995 - RNA, 19 nt, Artificial Sequence
  Description of Artificial Sequence: Synthetic oligonucleotide
  Sense strand starting at position 2704 of SEQ ID NO: 1560195
uugggauauucugaauaua

SEQ ID NO: 1582996 - RNA, 19 nt, Artificial Sequence
  Description of Artificial Sequence: Synthetic oligonucleotide
  Antisense strand to SEQ ID NO: 1582995
uauauucagaauaucccaa

SEQ ID NO: 1582997 - RNA, 19 nt, Artificial Sequence
  Description of Artificial Sequence: Synthetic oligonucleotide
  Sense strand starting at position 2762 of SEQ ID NO: 1560195
aggucucagcccuguaaca

SEQ ID NO: 1582998 - RNA, 19 nt, Artificial Sequence
  Description of Artificial Sequence: Synthetic oligonucleotide
  Antisense strand to SEQ ID NO: 1582997
uguuacagggcugagaccu

SEQ ID NO: 1582999 - RNA, 19 nt, Artificial Sequence
  Description of Artificial Sequence: Synthetic oligonucleotide
  Sense strand starting at position 2764 of SEQ ID NO: 1560195
gucucagcccuguaacagu

SEQ ID NO: 1583000 - RNA, 19 nt, Artificial Sequence
  Description of Artificial Sequence: Synthetic oligonucleotide
  Antisense strand to SEQ ID NO: 1582999
acuguuacagggcugagac

SEQ ID NO: 1583001 - RNA, 19 nt, Artificial Sequence
  Description of Artificial Sequence: Synthetic oligonucleotide
  Sense strand starting at position 2782 of SEQ ID NO: 1560195
uagcucucgcucuaggaaa

SEQ ID NO: 1583002 - RNA, 19 nt, Artificial Sequence
  Description of Artificial Sequence: Synthetic oligonucleotide
  Antisense strand to SEQ ID NO: 1583001
uuuccuagagcgagagcua

SEQ ID NO: 1583003 - RNA, 19 nt, Artificial Sequence
  Description of Artificial Sequence: Synthetic oligonucleotide
  Sense strand starting at position 2863 of SEQ ID NO: 1560195
cacuuugugucaucacugu

SEQ ID NO: 1583004 - RNA, 19 nt, Artificial Sequence
  Description of Artificial Sequence: Synthetic oligonucleotide
  Antisense strand to SEQ ID NO: 1583003
acagugaugacacaaagug

SEQ ID NO: 1583005 - RNA, 19 nt, Artificial Sequence
  Description of Artificial Sequence: Synthetic oligonucleotide
  Sense strand starting at position 2996 of SEQ ID NO: 1560195
gcagaaggugagugacuua

SEQ ID NO: 1583006 - RNA, 19 nt, Artificial Sequence
  Description of Artificial Sequence: Synthetic oligonucleotide
  Antisense strand to SEQ ID NO: 1583005
uaagucacucaccuucugc

SEQ ID NO: 1583007 - RNA, 19 nt, Artificial Sequence
  Description of Artificial Sequence: Synthetic oligonucleotide
  Sense strand starting at position 3416 of SEQ ID NO: 1560195
gguguuaauaacgauucuu

SEQ ID NO: 1583008 - RNA, 19 nt, Artificial Sequence
  Description of Artificial Sequence: Synthetic oligonucleotide
  Antisense strand to SEQ ID NO: 1583007
aagaaucguuauuaacacc

SEQ ID NO: 1583009 - RNA, 19 nt, Artificial Sequence
  Description of Artificial Sequence: Synthetic oligonucleotide
  Sense strand starting at position 3427 of SEQ ID NO: 1560195
cgauucuuugaauguguag

SEQ ID NO: 1583010 - RNA, 19 nt, Artificial Sequence
  Description of Artificial Sequence: Synthetic oligonucleotide
  Antisense strand to SEQ ID NO: 1583009
cuacacauucaaagaaucg

SEQ ID NO: 1583011 - RNA, 19 nt, Artificial Sequence
  Description of Artificial Sequence: Synthetic oligonucleotide
  Sense strand starting at position 1 of SEQ ID NO: 1560196
gggagagaccugugcauag

SEQ ID NO: 1583012 - RNA, 19 nt, Artificial Sequence
  Description of Artificial Sequence: Synthetic oligonucleotide
  Antisense strand to SEQ ID NO: 1583011
cuaugcacaggucucuccc

SEQ ID NO: 1583013 - RNA, 19 nt, Artificial Sequence
  Description of Artificial Sequence: Synthetic oligonucleotide
  Sense strand starting at position 5 of SEQ ID NO: 1560196
gagaccugugcauagacua

SEQ ID NO: 1583014 - RNA, 19 nt, Artificial Sequence
  Description of Artificial Sequence: Synthetic oligonucleotide
  Antisense strand to SEQ ID NO: 1583013
uagucuaugcacaggucuc

SEQ ID NO: 1583015 - RNA, 19 nt, Artificial Sequence
  Description of Artificial Sequence: Synthetic oligonucleotide
  Sense strand starting at position 12 of SEQ ID NO: 1560196
gugcauagacuaugaggaa

SEQ ID NO: 1583016 - RNA, 19 nt, Artificial Sequence
  Description of Artificial Sequence: Synthetic oligonucleotide
  Antisense strand to SEQ ID NO: 1583015
uuccucauagucuaugcac

SEQ ID NO: 1583017 - RNA, 19 nt, Artificial Sequence
  Description of Artificial Sequence: Synthetic oligonucleotide
  Sense strand starting at position 101 of SEQ ID NO: 1560196
guuguucucacgcagggau

SEQ ID NO: 1583018 - RNA, 19 nt, Artificial Sequence
  Description of Artificial Sequence: Synthetic oligonucleotide
  Antisense strand to SEQ ID NO: 1583017
aucccugcgugagaacaac

SEQ ID NO: 1583019 - RNA, 19 nt, Artificial Sequence
  Description of Artificial Sequence: Synthetic oligonucleotide
  Sense strand starting at position 162 of SEQ ID NO: 1560196
gacauauaugguugucaca

SEQ ID NO: 1583020 - RNA, 19 nt, Artificial Sequence
  Description of Artificial Sequence: Synthetic oligonucleotide
  Antisense strand to SEQ ID NO: 1583019
ugugacaaccauauauguc

SEQ ID NO: 1583021 - RNA, 19 nt, Artificial Sequence
  Description of Artificial Sequence: Synthetic oligonucleotide
  Sense strand starting at position 302 of SEQ ID NO: 1560196
agugccgagcucgagaaau

SEQ ID NO: 1583022 - RNA, 19 nt, Artificial Sequence
  Description of Artificial Sequence: Synthetic oligonucleotide
  Antisense strand to SEQ ID NO: 1583021
auuucucgagcucggcacu

SEQ ID NO: 1583023 - RNA, 19 nt, Artificial Sequence
  Description of Artificial Sequence: Synthetic oligonucleotide
  Sense strand starting at position 314 of SEQ ID NO: 1560196
gagaaauccuagucuaguc

SEQ ID NO: 1583024 - RNA, 19 nt, Artificial Sequence
  Description of Artificial Sequence: Synthetic oligonucleotide
  Antisense strand to SEQ ID NO: 1583023
gacuagacuaggauuucuc

SEQ ID NO: 1583025 - RNA, 19 nt, Artificial Sequence
  Description of Artificial Sequence: Synthetic oligonucleotide
  Sense strand starting at position 319 of SEQ ID NO: 1560196
auccuagucuagucugaag

SEQ ID NO: 1583026 - RNA, 19 nt, Artificial Sequence
  Description of Artificial Sequence: Synthetic oligonucleotide
  Antisense strand to SEQ ID NO: 1583025
cuucagacuagacuaggau

SEQ ID NO: 1583027 - RNA, 19 nt, Artificial Sequence
  Description of Artificial Sequence: Synthetic oligonucleotide
  Sense strand starting at position 321 of SEQ ID NO: 1560196
ccuagucuagucugaagaa

SEQ ID NO: 1583028 - RNA, 19 nt, Artificial Sequence
  Description of Artificial Sequence: Synthetic oligonucleotide
  Antisense strand to SEQ ID NO: 1583027
uucuucagacuagacuagg

SEQ ID NO: 1583029 - RNA, 19 nt, Artificial Sequence
  Description of Artificial Sequence: Synthetic oligonucleotide
  Sense strand starting at position 351 of SEQ ID NO: 1560196
cgugcaagacugugauuua

SEQ ID NO: 1583030 - RNA, 19 nt, Artificial Sequence
  Description of Artificial Sequence: Synthetic oligonucleotide
  Antisense strand to SEQ ID NO: 1583029
uaaaucacagucuugcacg

SEQ ID NO: 1583031 - RNA, 19 nt, Artificial Sequence
  Description of Artificial Sequence: Synthetic oligonucleotide
  Sense strand starting at position 378 of SEQ ID NO: 1560196
uuuguacuuuguccuaaag

SEQ ID NO: 1583032 - RNA, 19 nt, Artificial Sequence
  Description of Artificial Sequence: Synthetic oligonucleotide
  Antisense strand to SEQ ID NO: 1583031
cuuuaggacaaaguacaaa

SEQ ID NO: 1583033 - RNA, 19 nt, Artificial Sequence
  Description of Artificial Sequence: Synthetic oligonucleotide
  Sense strand starting at position 686 of SEQ ID NO: 1560196
uacagugggcucuaucaca

SEQ ID NO: 1583034 - RNA, 19 nt, Artificial Sequence
  Description of Artificial Sequence: Synthetic oligonucleotide
  Antisense strand to SEQ ID NO: 1583033
ugugauagagcccacugua

SEQ ID NO: 1583035 - RNA, 19 nt, Artificial Sequence
  Description of Artificial Sequence: Synthetic oligonucleotide
  Sense strand starting at position 717 of SEQ ID NO: 1560196
auguguccuacccaaguga

SEQ ID NO: 1583036 - RNA, 19 nt, Artificial Sequence
  Description of Artificial Sequence: Synthetic oligonucleotide
  Antisense strand to SEQ ID NO: 1583035
ucacuuggguaggacacau

SEQ ID NO: 1583037 - RNA, 19 nt, Artificial Sequence
  Description of Artificial Sequence: Synthetic oligonucleotide
  Sense strand starting at position 1001 of SEQ ID NO: 1560196
ucccacaugucagugacau

SEQ ID NO: 1583038 - RNA, 19 nt, Artificial Sequence
  Description of Artificial Sequence: Synthetic oligonucleotide
  Antisense strand to SEQ ID NO: 1583037
augucacugacauguggga

SEQ ID NO: 1583039 - RNA, 19 nt, Artificial Sequence
  Description of Artificial Sequence: Synthetic oligonucleotide
  Sense strand starting at position 1002 of SEQ ID NO: 1560196
cccacaugucagugacauc

SEQ ID NO: 1583040 - RNA, 19 nt, Artificial Sequence
  Description of Artificial Sequence: Synthetic oligonucleotide
  Antisense strand to SEQ ID NO: 1583039
gaugucacugacauguggg

SEQ ID NO: 1583041 - RNA, 19 nt, Artificial Sequence
  Description of Artificial Sequence: Synthetic oligonucleotide
  Sense strand starting at position 1077 of SEQ ID NO: 1560196
aacgguagcugccugaaau

SEQ ID NO: 1583042 - RNA, 19 nt, Artificial Sequence
  Description of Artificial Sequence: Synthetic oligonucleotide
  Antisense strand to SEQ ID NO: 1583041
auuucaggcagcuaccguu

SEQ ID NO: 1583043 - RNA, 19 nt, Artificial Sequence
  Description of Artificial Sequence: Synthetic oligonucleotide
  Sense strand starting at position 1205 of SEQ ID NO: 1560196
gugucagcagugucuugua

SEQ ID NO: 1583044 - RNA, 19 nt, Artificial Sequence
  Description of Artificial Sequence: Synthetic oligonucleotide
  Antisense strand to SEQ ID NO: 1583043
uacaagacacugcugacac

SEQ ID NO: 1583045 - RNA, 19 nt, Artificial Sequence
  Description of Artificial Sequence: Synthetic oligonucleotide
  Sense strand starting at position 1277 of SEQ ID NO: 1560196
gucucacuguuccuugaau

SEQ ID NO: 1583046 - RNA, 19 nt, Artificial Sequence
  Description of Artificial Sequence: Synthetic oligonucleotide
  Antisense strand to SEQ ID NO: 1583045
auucaaggaacagugagac

SEQ ID NO: 1583047 - RNA, 19 nt, Artificial Sequence
  Description of Artificial Sequence: Synthetic oligonucleotide
  Sense strand starting at position 1440 of SEQ ID NO: 1560196
cauggaaucgcggaguuga

SEQ ID NO: 1583048 - RNA, 19 nt, Artificial Sequence
  Description of Artificial Sequence: Synthetic oligonucleotide
  Antisense strand to SEQ ID NO: 1583047
ucaacuccgcgauuccaug

SEQ ID NO: 1583049 - RNA, 19 nt, Artificial Sequence
  Description of Artificial Sequence: Synthetic oligonucleotide
  Sense strand starting at position 1668 of SEQ ID NO: 1560196
acgggauuccgugacaaga

SEQ ID NO: 1583050 - RNA, 19 nt, Artificial Sequence
  Description of Artificial Sequence: Synthetic oligonucleotide
  Antisense strand to SEQ ID NO: 1583049
ucuugucacggaaucccgu

SEQ ID NO: 1583051 - RNA, 19 nt, Artificial Sequence
  Description of Artificial Sequence: Synthetic oligonucleotide
  Sense strand starting at position 2062 of SEQ ID NO: 1560196
cuccgaacuccaggacuuu

SEQ ID NO: 1583052 - RNA, 19 nt, Artificial Sequence
  Description of Artificial Sequence: Synthetic oligonucleotide
  Antisense strand to SEQ ID NO: 1583051
aaaguccuggaguucggag

SEQ ID NO: 1583053 - RNA, 19 nt, Artificial Sequence
  Description of Artificial Sequence: Synthetic oligonucleotide
  Sense strand starting at position 2289 of SEQ ID NO: 1560196
accguauucugauucgaag

SEQ ID NO: 1583054 - RNA, 19 nt, Artificial Sequence
  Description of Artificial Sequence: Synthetic oligonucleotide
  Antisense strand to SEQ ID NO: 1583053
cuucgaaucagaauacggu

SEQ ID NO: 1583055 - RNA, 19 nt, Artificial Sequence
  Description of Artificial Sequence: Synthetic oligonucleotide
  Sense strand starting at position 2291 of SEQ ID NO: 1560196
cguauucugauucgaagaa

SEQ ID NO: 1583056 - RNA, 19 nt, Artificial Sequence
  Description of Artificial Sequence: Synthetic oligonucleotide
  Antisense strand to SEQ ID NO: 1583055
uucuucgaaucagaauacg

SEQ ID NO: 1583057 - RNA, 19 nt, Artificial Sequence
  Description of Artificial Sequence: Synthetic oligonucleotide
  Sense strand starting at position 2421 of SEQ ID NO: 1560196
gggucuuacggccaacaaa

SEQ ID NO: 1583058 - RNA, 19 nt, Artificial Sequence
  Description of Artificial Sequence: Synthetic oligonucleotide
  Antisense strand to SEQ ID NO: 1583057
uuuguuggccguaagaccc

SEQ ID NO: 1583059 - RNA, 19 nt, Artificial Sequence
  Description of Artificial Sequence: Synthetic oligonucleotide
  Sense strand starting at position 2696 of SEQ ID NO: 1560196
cgugaaauuggguggaugu

SEQ ID NO: 1583060 - RNA, 19 nt, Artificial Sequence
  Description of Artificial Sequence: Synthetic oligonucleotide
  Antisense strand to SEQ ID NO: 1583059
acauccacccaauuucacg

SEQ ID NO: 1583061 - RNA, 19 nt, Artificial Sequence
  Description of Artificial Sequence: Synthetic oligonucleotide
  Sense strand starting at position 2737 of SEQ ID NO: 1560196
uggugcuacugacuggaua

SEQ ID NO: 1583062 - RNA, 19 nt, Artificial Sequence
  Description of Artificial Sequence: Synthetic oligonucleotide
  Antisense strand to SEQ ID NO: 1583061
uauccagucaguagcacca

SEQ ID NO: 1583063 - RNA, 19 nt, Artificial Sequence
  Description of Artificial Sequence: Synthetic oligonucleotide
  Sense strand starting at position 2738 of SEQ ID NO: 1560196
ggugcuacugacuggauaa

SEQ ID NO: 1583064 - RNA, 19 nt, Artificial Sequence
  Description of Artificial Sequence: Synthetic oligonucleotide
  Antisense strand to SEQ ID NO: 1583063
uuauccagucaguagcacc

SEQ ID NO: 1583065 - RNA, 19 nt, Artificial Sequence
  Description of Artificial Sequence: Synthetic oligonucleotide
  Sense strand starting at position 2739 of SEQ ID NO: 1560196
gugcuacugacuggauaag

SEQ ID NO: 1583066 - RNA, 19 nt, Artificial Sequence
  Description of Artificial Sequence: Synthetic oligonucleotide
  Antisense strand to SEQ ID NO: 1583065
cuuauccagucaguagcac

SEQ ID NO: 1583067 - RNA, 19 nt, Artificial Sequence
  Description of Artificial Sequence: Synthetic oligonucleotide
  Sense strand starting at position 3118 of SEQ ID NO: 1560196
aagugacaucuauguuuga

SEQ ID NO: 1583068 - RNA, 19 nt, Artificial Sequence
  Description of Artificial Sequence: Synthetic oligonucleotide
  Antisense strand to SEQ ID NO: 1583067
ucaaacauagaugucacuu

SEQ ID NO: 1583069 - RNA, 19 nt, Artificial Sequence
  Description of Artificial Sequence: Synthetic oligonucleotide
  Sense strand starting at position 3223 of SEQ ID NO: 1560196
gacguaguuagauggcgaa

SEQ ID NO: 1583070 - RNA, 19 nt, Artificial Sequence
  Description of Artificial Sequence: Synthetic oligonucleotide
  Antisense strand to SEQ ID NO: 1583069
uucgccaucuaacuacguc

SEQ ID NO: 1583071 - RNA, 19 nt, Artificial Sequence
  Description of Artificial Sequence: Synthetic oligonucleotide
  Sense strand starting at position 3227 of SEQ ID NO: 1560196
uaguuagauggcgaaugga

SEQ ID NO: 1583072 - RNA, 19 nt, Artificial Sequence
  Description of Artificial Sequence: Synthetic oligonucleotide
  Antisense strand to SEQ ID NO: 1583071
uccauucgccaucuaacua

SEQ ID NO: 1583073 - RNA, 19 nt, Artificial Sequence
  Description of Artificial Sequence: Synthetic oligonucleotide
  Sense strand starting at position 3267 of SEQ ID NO: 1560196
augcuuaaguggucaauau

SEQ ID NO: 1583074 - RNA, 19 nt, Artificial Sequence
  Description of Artificial Sequence: Synthetic oligonucleotide
  Antisense strand to SEQ ID NO: 1583073
auauugaccacuuaagcau

SEQ ID NO: 1583075 - RNA, 19 nt, Artificial Sequence
  Description of Artificial Sequence: Synthetic oligonucleotide
  Sense strand starting at position 3268 of SEQ ID NO: 1560196
ugcuuaaguggucaauauu

SEQ ID NO: 1583076 - RNA, 19 nt, Artificial Sequence
  Description of Artificial Sequence: Synthetic oligonucleotide
  Antisense strand to SEQ ID NO: 1583075
aauauugaccacuuaagca

SEQ ID NO: 1583077 - RNA, 19 nt, Artificial Sequence
  Description of Artificial Sequence: Synthetic oligonucleotide
  Sense strand starting at position 3289 of SEQ ID NO: 1560196
gagcgcugugauuaugaac

SEQ ID NO: 1583078 - RNA, 19 nt, Artificial Sequence
  Description of Artificial Sequence: Synthetic oligonucleotide
  Antisense strand to SEQ ID NO: 1583077
guucauaaucacagcgcuc

SEQ ID NO: 1583079 - RNA, 19 nt, Artificial Sequence
  Description of Artificial Sequence: Synthetic oligonucleotide
  Sense strand starting at position 3327 of SEQ ID NO: 1560196
aagaguaagcuuugcauug

SEQ ID NO: 1583080 - RNA, 19 nt, Artificial Sequence
  Description of Artificial Sequence: Synthetic oligonucleotide
  Antisense strand to SEQ ID NO: 1583079
caaugcaaagcuuacucuu

SEQ ID NO: 1583081 - RNA, 19 nt, Artificial Sequence
  Description of Artificial Sequence: Synthetic oligonucleotide
  Sense strand starting at position 3332 of SEQ ID NO: 1560196
uaagcuuugcauugggaua

SEQ ID NO: 1583082 - RNA, 19 nt, Artificial Sequence
  Description of Artificial Sequence: Synthetic oligonucleotide
  Antisense strand to SEQ ID NO: 1583081
uaucccaaugcaaagcuua

SEQ ID NO: 1583083 - RNA, 19 nt, Artificial Sequence
  Description of Artificial Sequence: Synthetic oligonucleotide
  Sense strand starting at position 3401 of SEQ ID NO: 1560196
aggucucagcccuguaaca

SEQ ID NO: 1583084 - RNA, 19 nt, Artificial Sequence
  Description of Artificial Sequence: Synthetic oligonucleotide
  Antisense strand to SEQ ID NO: 1583083
uguuacagggcugagaccu

SEQ ID NO: 1583085 - RNA, 19 nt, Artificial Sequence
  Description of Artificial Sequence: Synthetic oligonucleotide
  Sense strand starting at position 3403 of SEQ ID NO: 1560196
gucucagcccuguaacagu

SEQ ID NO: 1583086 - RNA, 19 nt, Artificial Sequence
  Description of Artificial Sequence: Synthetic oligonucleotide
  Antisense strand to SEQ ID NO: 1583085
acuguuacagggcugagac

SEQ ID NO: 1583087 - RNA, 19 nt, Artificial Sequence
  Description of Artificial Sequence: Synthetic oligonucleotide
  Sense strand starting at position 3421 of SEQ ID NO: 1560196
uagcucucgcucuaggaaa

SEQ ID NO: 1583088 - RNA, 19 nt, Artificial Sequence
  Description of Artificial Sequence: Synthetic oligonucleotide
  Antisense strand to SEQ ID NO: 1583087
uuuccuagagcgagagcua

SEQ ID NO: 1583089 - RNA, 19 nt, Artificial Sequence
  Description of Artificial Sequence: Synthetic oligonucleotide
  Sense strand starting at position 3635 of SEQ ID NO: 1560196
gcagaaggugagugacuua

SEQ ID NO: 1583090 - RNA, 19 nt, Artificial Sequence
  Description of Artificial Sequence: Synthetic oligonucleotide
  Antisense strand to SEQ ID NO: 1583089
uaagucacucaccuucugc

SEQ ID NO: 1583091 - RNA, 19 nt, Artificial Sequence
  Description of Artificial Sequence: Synthetic oligonucleotide
  Sense strand starting at position 270 of SEQ ID NO: 1560197
gccucaagggauugucaug

SEQ ID NO: 1583092 - RNA, 19 nt, Artificial Sequence
  Description of Artificial Sequence: Synthetic oligonucleotide
  Antisense strand to SEQ ID NO: 1583091
caugacaaucccuugaggc

SEQ ID NO: 1583093 - RNA, 19 nt, Artificial Sequence
  Description of Artificial Sequence: Synthetic oligonucleotide
  Sense strand starting at position 275 of SEQ ID NO: 1560197
aagggauugucaugccuug

SEQ ID NO: 1583094 - RNA, 19 nt, Artificial Sequence
  Description of Artificial Sequence: Synthetic oligonucleotide
  Antisense strand to SEQ ID NO: 1583093
caaggcaugacaaucccuu

SEQ ID NO: 1583095 - RNA, 19 nt, Artificial Sequence
  Description of Artificial Sequence: Synthetic oligonucleotide
  Sense strand starting at position 405 of SEQ ID NO: 1560197
gguugagggccugauaagu

SEQ ID NO: 1583096 - RNA, 19 nt, Artificial Sequence
  Description of Artificial Sequence: Synthetic oligonucleotide
  Antisense strand to SEQ ID NO: 1583095
acuuaucaggcccucaacc

SEQ ID NO: 1583097 - RNA, 19 nt, Artificial Sequence
  Description of Artificial Sequence: Synthetic oligonucleotide
  Sense strand starting at position 416 of SEQ ID NO: 1560197
ugauaaguugaguguggga

SEQ ID NO: 1583098 - RNA, 19 nt, Artificial Sequence
  Description of Artificial Sequence: Synthetic oligonucleotide
  Antisense strand to SEQ ID NO: 1583097
ucccacacucaacuuauca

SEQ ID NO: 1583099 - RNA, 19 nt, Artificial Sequence
  Description of Artificial Sequence: Synthetic oligonucleotide
  Sense strand starting at position 441 of SEQ ID NO: 1560197
gagguaguauccuaaggag

SEQ ID NO: 1583100 - RNA, 19 nt, Artificial Sequence
  Description of Artificial Sequence: Synthetic oligonucleotide
  Antisense strand to SEQ ID NO: 1583099
cuccuuaggauacuaccuc

SEQ ID NO: 1583101 - RNA, 19 nt, Artificial Sequence
  Description of Artificial Sequence: Synthetic oligonucleotide
  Sense strand starting at position 444 of SEQ ID NO: 1560197
guaguauccuaaggagugu

SEQ ID NO: 1583102 - RNA, 19 nt, Artificial Sequence
  Description of Artificial Sequence: Synthetic oligonucleotide
  Antisense strand to SEQ ID NO: 1583101
acacuccuuaggauacuac

SEQ ID NO: 1583103 - RNA, 19 nt, Artificial Sequence
  Description of Artificial Sequence: Synthetic oligonucleotide
  Sense strand starting at position 483 of SEQ ID NO: 1560197
gacuguuagagugggaauu

SEQ ID NO: 1583104 - RNA, 19 nt, Artificial Sequence
  Description of Artificial Sequence: Synthetic oligonucleotide
  Antisense strand to SEQ ID NO: 1583103
aauucccacucuaacaguc

SEQ ID NO: 1583105 - RNA, 19 nt, Artificial Sequence
  Description of Artificial Sequence: Synthetic oligonucleotide
  Sense strand starting at position 658 of SEQ ID NO: 1560197
ccgugagaccugugugcca

SEQ ID NO: 1583106 - RNA, 19 nt, Artificial Sequence
  Description of Artificial Sequence: Synthetic oligonucleotide
  Antisense strand to SEQ ID NO: 1583105
uggcacacaggucucacgg

SEQ ID NO: 1583107 - RNA, 19 nt, Artificial Sequence
  Description of Artificial Sequence: Synthetic oligonucleotide
  Sense strand starting at position 1107 of SEQ ID NO: 1560197
gccgucugucuucgaagca

SEQ ID NO: 1583108 - RNA, 19 nt, Artificial Sequence
  Description of Artificial Sequence: Synthetic oligonucleotide
  Antisense strand to SEQ ID NO: 1583107
ugcuucgaagacagacggc

SEQ ID NO: 1583109 - RNA, 19 nt, Artificial Sequence
  Description of Artificial Sequence: Synthetic oligonucleotide
  Sense strand starting at position 1108 of SEQ ID NO: 1560197
ccgucugucuucgaagcaa

SEQ ID NO: 1583110 - RNA, 19 nt, Artificial Sequence
  Description of Artificial Sequence: Synthetic oligonucleotide
  Antisense strand to SEQ ID NO: 1583109
uugcuucgaagacagacgg

SEQ ID NO: 1583111 - RNA, 19 nt, Artificial Sequence
  Description of Artificial Sequence: Synthetic oligonucleotide
  Sense strand starting at position 1209 of SEQ ID NO: 1560197
cguugucgugcaucucaaa

SEQ ID NO: 1583112 - RNA, 19 nt, Artificial Sequence
  Description of Artificial Sequence: Synthetic oligonucleotide
  Antisense strand to SEQ ID NO: 1583111
uuugagaugcacgacaacg

SEQ ID NO: 1583113 - RNA, 19 nt, Artificial Sequence
  Description of Artificial Sequence: Synthetic oligonucleotide
  Sense strand starting at position 1402 of SEQ ID NO: 1560197
gccugucaaccaggagaga

SEQ ID NO: 1583114 - RNA, 19 nt, Artificial Sequence
  Description of Artificial Sequence: Synthetic oligonucleotide
  Antisense strand to SEQ ID NO: 1583113
ucucuccugguugacaggc

SEQ ID NO: 1583115 - RNA, 19 nt, Artificial Sequence
  Description of Artificial Sequence: Synthetic oligonucleotide
  Sense strand starting at position 1449 of SEQ ID NO: 1560197
gcgagaaacucgcccaugu

SEQ ID NO: 1583116 - RNA, 19 nt, Artificial Sequence
  Description of Artificial Sequence: Synthetic oligonucleotide
  Antisense strand to SEQ ID NO: 1583115
acaugggcgaguuucucgc

SEQ ID NO: 1583117 - RNA, 19 nt, Artificial Sequence
  Description of Artificial Sequence: Synthetic oligonucleotide
  Sense strand starting at position 1453 of SEQ ID NO: 1560197
gaaacucgcccaugucuuu

SEQ ID NO: 1583118 - RNA, 19 nt, Artificial Sequence
  Description of Artificial Sequence: Synthetic oligonucleotide
  Antisense strand to SEQ ID NO: 1583117
aaagacaugggcgaguuuc

SEQ ID NO: 1583119 - RNA, 19 nt, Artificial Sequence
  Description of Artificial Sequence: Synthetic oligonucleotide
  Sense strand starting at position 1511 of SEQ ID NO: 1560197
cgagauagagcuugaggga

SEQ ID NO: 1583120 - RNA, 19 nt, Artificial Sequence
  Description of Artificial Sequence: Synthetic oligonucleotide
  Antisense strand to SEQ ID NO: 1583119
ucccucaagcucuaucucg

SEQ ID NO: 1583121 - RNA, 19 nt, Artificial Sequence
  Description of Artificial Sequence: Synthetic oligonucleotide
  Sense strand starting at position 1603 of SEQ ID NO: 1560197
accaguaaugcccacaugu

SEQ ID NO: 1583122 - RNA, 19 nt, Artificial Sequence
  Description of Artificial Sequence: Synthetic oligonucleotide
  Antisense strand to SEQ ID NO: 1583121
acaugugggcauuacuggu

SEQ ID NO: 1583123 - RNA, 19 nt, Artificial Sequence
  Description of Artificial Sequence: Synthetic oligonucleotide
  Sense strand starting at position 1831 of SEQ ID NO: 1560197
gaccgacaaucagcgauau

SEQ ID NO: 1583124 - RNA, 19 nt, Artificial Sequence
  Description of Artificial Sequence: Synthetic oligonucleotide
  Antisense strand to SEQ ID NO: 1583123
auaucgcugauugucgguc

SEQ ID NO: 1583125 - RNA, 19 nt, Artificial Sequence
  Description of Artificial Sequence: Synthetic oligonucleotide
  Sense strand starting at position 1833 of SEQ ID NO: 1560197
ccgacaaucagcgauauga

SEQ ID NO: 1583126 - RNA, 19 nt, Artificial Sequence
  Description of Artificial Sequence: Synthetic oligonucleotide
  Antisense strand to SEQ ID NO: 1583125
ucauaucgcugauugucgg

SEQ ID NO: 1583127 - RNA, 19 nt, Artificial Sequence
  Description of Artificial Sequence: Synthetic oligonucleotide
  Sense strand starting at position 1855 of SEQ ID NO: 1560197
gagacagagugauaugagu

SEQ ID NO: 1583128 - RNA, 19 nt, Artificial Sequence
  Description of Artificial Sequence: Synthetic oligonucleotide
  Antisense strand to SEQ ID NO: 1583127
acucauaucacucugucuc

SEQ ID NO: 1583129 - RNA, 19 nt, Artificial Sequence
  Description of Artificial Sequence: Synthetic oligonucleotide
  Sense strand starting at position 1861 of SEQ ID NO: 1560197
gagugauaugagugggaug

SEQ ID NO: 1583130 - RNA, 19 nt, Artificial Sequence
  Description of Artificial Sequence: Synthetic oligonucleotide
  Antisense strand to SEQ ID NO: 1583129
caucccacucauaucacuc

SEQ ID NO: 1583131 - RNA, 19 nt, Artificial Sequence
  Description of Artificial Sequence: Synthetic oligonucleotide
  Sense strand starting at position 1862 of SEQ ID NO: 1560197
agugauaugagugggauga

SEQ ID NO: 1583132 - RNA, 19 nt, Artificial Sequence
  Description of Artificial Sequence: Synthetic oligonucleotide
  Antisense strand to SEQ ID NO: 1583131
ucaucccacucauaucacu

SEQ ID NO: 1583133 - RNA, 19 nt, Artificial Sequence
  Description of Artificial Sequence: Synthetic oligonucleotide
  Sense strand starting at position 1956 of SEQ ID NO: 1560197
ucgcgauggcagugaugga

SEQ ID NO: 1583134 - RNA, 19 nt, Artificial Sequence
  Description of Artificial Sequence: Synthetic oligonucleotide
  Antisense strand to SEQ ID NO: 1583133
uccaucacugccaucgcga

SEQ ID NO: 1583135 - RNA, 19 nt, Artificial Sequence
  Description of Artificial Sequence: Synthetic oligonucleotide
  Sense strand starting at position 2331 of SEQ ID NO: 1560197
agaggagauucagagagau

SEQ ID NO: 1583136 - RNA, 19 nt, Artificial Sequence
  Description of Artificial Sequence: Synthetic oligonucleotide
  Antisense strand to SEQ ID NO: 1583135
aucucucugaaucuccucu

SEQ ID NO: 1583137 - RNA, 19 nt, Artificial Sequence
  Description of Artificial Sequence: Synthetic oligonucleotide
  Sense strand starting at position 2478 of SEQ ID NO: 1560197
ccuguaaucgccugaggug

SEQ ID NO: 1583138 - RNA, 19 nt, Artificial Sequence
  Description of Artificial Sequence: Synthetic oligonucleotide
  Antisense strand to SEQ ID NO: 1583137
caccucaggcgauuacagg

SEQ ID NO: 1583139 - RNA, 19 nt, Artificial Sequence
  Description of Artificial Sequence: Synthetic oligonucleotide
  Sense strand starting at position 2479 of SEQ ID NO: 1560197
cuguaaucgccugagguga

SEQ ID NO: 1583140 - RNA, 19 nt, Artificial Sequence
  Description of Artificial Sequence: Synthetic oligonucleotide
  Antisense strand to SEQ ID NO: 1583139
ucaccucaggcgauuacag

SEQ ID NO: 1583141 - RNA, 19 nt, Artificial Sequence
  Description of Artificial Sequence: Synthetic oligonucleotide
  Sense strand starting at position 2673 of SEQ ID NO: 1560197
agccguguucccgccacua

SEQ ID NO: 1583142 - RNA, 19 nt, Artificial Sequence
  Description of Artificial Sequence: Synthetic oligonucleotide
  Antisense strand to SEQ ID NO: 1583141
uaguggcgggaacacggcu

SEQ ID NO: 1583143 - RNA, 19 nt, Artificial Sequence
  Description of Artificial Sequence: Synthetic oligonucleotide
  Sense strand starting at position 2884 of SEQ ID NO: 1560197
gagagagugcuguguggga

SEQ ID NO: 1583144 - RNA, 19 nt, Artificial Sequence
  Description of Artificial Sequence: Synthetic oligonucleotide
  Antisense strand to SEQ ID NO: 1583143
ucccacacagcacucucuc

SEQ ID NO: 1583145 - RNA, 19 nt, Artificial Sequence
  Description of Artificial Sequence: Synthetic oligonucleotide
  Sense strand starting at position 3017 of SEQ ID NO: 1560197
gggaaugacucauguugga

SEQ ID NO: 1583146 - RNA, 19 nt, Artificial Sequence
  Description of Artificial Sequence: Synthetic oligonucleotide
  Antisense strand to SEQ ID NO: 1583145
uccaacaugagucauuccc

SEQ ID NO: 1583147 - RNA, 19 nt, Artificial Sequence
  Description of Artificial Sequence: Synthetic oligonucleotide
  Sense strand starting at position 3022 of SEQ ID NO: 1560197
ugacucauguuggaaccaa

SEQ ID NO: 1583148 - RNA, 19 nt, Artificial Sequence
  Description of Artificial Sequence: Synthetic oligonucleotide
  Antisense strand to SEQ ID NO: 1583147
uugguuccaacaugaguca

SEQ ID NO: 1583149 - RNA, 19 nt, Artificial Sequence
  Description of Artificial Sequence: Synthetic oligonucleotide
  Sense strand starting at position 3318 of SEQ ID NO: 1560197
gugccugaaucgccaaagu

SEQ ID NO: 1583150 - RNA, 19 nt, Artificial Sequence
  Description of Artificial Sequence: Synthetic oligonucleotide
  Antisense strand to SEQ ID NO: 1583149
acuuuggcgauucaggcac

SEQ ID NO: 1583151 - RNA, 19 nt, Artificial Sequence
  Description of Artificial Sequence: Synthetic oligonucleotide
  Sense strand starting at position 3456 of SEQ ID NO: 1560197
gggugucaccugcagagaa

SEQ ID NO: 1583152 - RNA, 19 nt, Artificial Sequence
  Description of Artificial Sequence: Synthetic oligonucleotide
  Antisense strand to SEQ ID NO: 1583151
uucucugcaggugacaccc

SEQ ID NO: 1583153 - RNA, 19 nt, Artificial Sequence
  Description of Artificial Sequence: Synthetic oligonucleotide
  Sense strand starting at position 3468 of SEQ ID NO: 1560197
cagagaagguggugucauc

SEQ ID NO: 1583154 - RNA, 19 nt, Artificial Sequence
  Description of Artificial Sequence: Synthetic oligonucleotide
  Antisense strand to SEQ ID NO: 1583153
gaugacaccaccuucucug

SEQ ID NO: 1583155 - RNA, 19 nt, Artificial Sequence
  Description of Artificial Sequence: Synthetic oligonucleotide
  Sense strand starting at position 3671 of SEQ ID NO: 1560197
guccgucauugguccuaga

SEQ ID NO: 1583156 - RNA, 19 nt, Artificial Sequence
  Description of Artificial Sequence: Synthetic oligonucleotide
  Antisense strand to SEQ ID NO: 1583155
ucuaggaccaaugacggac

SEQ ID NO: 1583157 - RNA, 19 nt, Artificial Sequence
  Description of Artificial Sequence: Synthetic oligonucleotide
  Sense strand starting at position 3704 of SEQ ID NO: 1560197
gggacaucuccucacuugu

SEQ ID NO: 1583158 - RNA, 19 nt, Artificial Sequence
  Description of Artificial Sequence: Synthetic oligonucleotide
  Antisense strand to SEQ ID NO: 1583157
acaagugaggagauguccc

SEQ ID NO: 1583159 - RNA, 19 nt, Artificial Sequence
  Description of Artificial Sequence: Synthetic oligonucleotide
  Sense strand starting at position 3713 of SEQ ID NO: 1560197
ccucacuuguguccuaaca

SEQ ID NO: 1583160 - RNA, 19 nt, Artificial Sequence
  Description of Artificial Sequence: Synthetic oligonucleotide
  Antisense strand to SEQ ID NO: 1583159
uguuaggacacaagugagg

SEQ ID NO: 1583161 - RNA, 19 nt, Artificial Sequence
  Description of Artificial Sequence: Synthetic oligonucleotide
  Sense strand starting at position 3715 of SEQ ID NO: 1560197
ucacuuguguccuaacauc

SEQ ID NO: 1583162 - RNA, 19 nt, Artificial Sequence
  Description of Artificial Sequence: Synthetic oligonucleotide
  Antisense strand to SEQ ID NO: 1583161
gauguuaggacacaaguga

SEQ ID NO: 1583163 - RNA, 19 nt, Artificial Sequence
  Description of Artificial Sequence: Synthetic oligonucleotide
  Sense strand starting at position 3748 of SEQ ID NO: 1560197
ucugaaucuucgucucuca

SEQ ID NO: 1583164 - RNA, 19 nt, Artificial Sequence
  Description of Artificial Sequence: Synthetic oligonucleotide
  Antisense strand to SEQ ID NO: 1583163
ugagagacgaagauucaga

SEQ ID NO: 1583165 - RNA, 19 nt, Artificial Sequence
  Description of Artificial Sequence: Synthetic oligonucleotide
  Sense strand starting at position 3789 of SEQ ID NO: 1560197
cugugaaucugucuuucuu

SEQ ID NO: 1583166 - RNA, 19 nt, Artificial Sequence
  Description of Artificial Sequence: Synthetic oligonucleotide
  Antisense strand to SEQ ID NO: 1583165
aagaaagacagauucacag

SEQ ID NO: 1583167 - RNA, 19 nt, Artificial Sequence
  Description of Artificial Sequence: Synthetic oligonucleotide
  Sense strand starting at position 3902 of SEQ ID NO: 1560197
gucucugucuccuauguca

SEQ ID NO: 1583168 - RNA, 19 nt, Artificial Sequence
  Description of Artificial Sequence: Synthetic oligonucleotide
  Antisense strand to SEQ ID NO: 1583167
ugacauaggagacagagac

SEQ ID NO: 1583169 - RNA, 19 nt, Artificial Sequence
  Description of Artificial Sequence: Synthetic oligonucleotide
  Sense strand starting at position 3904 of SEQ ID NO: 1560197
cucugucuccuaugucaaa

SEQ ID NO: 1583170 - RNA, 19 nt, Artificial Sequence
  Description of Artificial Sequence: Synthetic oligonucleotide
  Antisense strand to SEQ ID NO: 1583169
uuugacauaggagacagag

SEQ ID NO: 1583171 - RNA, 19 nt, Artificial Sequence
  Description of Artificial Sequence: Synthetic oligonucleotide
  Sense strand starting at position 133 of SEQ ID NO: 1560198
aggagugcuggucauacau

SEQ ID NO: 1583172 - RNA, 19 nt, Artificial Sequence
  Description of Artificial Sequence: Synthetic oligonucleotide
  Antisense strand to SEQ ID NO: 1583171
auguaugaccagcacuccu

SEQ ID NO: 1583173 - RNA, 19 nt, Artificial Sequence
  Description of Artificial Sequence: Synthetic oligonucleotide
  Sense strand starting at position 389 of SEQ ID NO: 1560198
uuguauaucugccucucua

SEQ ID NO: 1583174 - RNA, 19 nt, Artificial Sequence
  Description of Artificial Sequence: Synthetic oligonucleotide
  Antisense strand to SEQ ID NO: 1583173
uagagaggcagauauacaa

SEQ ID NO: 1583175 - RNA, 19 nt, Artificial Sequence
  Description of Artificial Sequence: Synthetic oligonucleotide
  Sense strand starting at position 481 of SEQ ID NO: 1560198
auccuugucuaggucuuau

SEQ ID NO: 1583176 - RNA, 19 nt, Artificial Sequence
  Description of Artificial Sequence: Synthetic oligonucleotide
  Antisense strand to SEQ ID NO: 1583175
auaagaccuagacaaggau

SEQ ID NO: 1583177 - RNA, 19 nt, Artificial Sequence
  Description of Artificial Sequence: Synthetic oligonucleotide
  Sense strand starting at position 695 of SEQ ID NO: 1560198
cuucuucucccgggugagu

SEQ ID NO: 1583178 - RNA, 19 nt, Artificial Sequence
  Description of Artificial Sequence: Synthetic oligonucleotide
  Antisense strand to SEQ ID NO: 1583177
acucacccgggagaagaag

SEQ ID NO: 1583179 - RNA, 19 nt, Artificial Sequence
  Description of Artificial Sequence: Synthetic oligonucleotide
  Sense strand starting at position 1263 of SEQ ID NO: 1560198
gaaggugguguccagguau

SEQ ID NO: 1583180 - RNA, 19 nt, Artificial Sequence
  Description of Artificial Sequence: Synthetic oligonucleotide
  Antisense strand to SEQ ID NO: 1583179
auaccuggacaccaccuuc

SEQ ID NO: 1583181 - RNA, 19 nt, Artificial Sequence
  Description of Artificial Sequence: Synthetic oligonucleotide
  Sense strand starting at position 1278 of SEQ ID NO: 1560198
guaucuuccuagcuccaca

SEQ ID NO: 1583182 - RNA, 19 nt, Artificial Sequence
  Description of Artificial Sequence: Synthetic oligonucleotide
  Antisense strand to SEQ ID NO: 1583181
uguggagcuaggaagauac

SEQ ID NO: 1583183 - RNA, 19 nt, Artificial Sequence
  Description of Artificial Sequence: Synthetic oligonucleotide
  Sense strand starting at position 2055 of SEQ ID NO: 1560198
augucaggcccuugguauu

SEQ ID NO: 1583184 - RNA, 19 nt, Artificial Sequence
  Description of Artificial Sequence: Synthetic oligonucleotide
  Antisense strand to SEQ ID NO: 1583183
aauaccaagggccugacau

SEQ ID NO: 1583185 - RNA, 19 nt, Artificial Sequence
  Description of Artificial Sequence: Synthetic oligonucleotide
  Sense strand starting at position 2079 of SEQ ID NO: 1560198
cugauugugucauuguuuc

SEQ ID NO: 1583186 - RNA, 19 nt, Artificial Sequence
  Description of Artificial Sequence: Synthetic oligonucleotide
  Antisense strand to SEQ ID NO: 1583185
gaaacaaugacacaaucag

SEQ ID NO: 1583187 - RNA, 19 nt, Artificial Sequence
  Description of Artificial Sequence: Synthetic oligonucleotide
  Sense strand starting at position 2085 of SEQ ID NO: 1560198
gugucauuguuuccaccua

SEQ ID NO: 1583188 - RNA, 19 nt, Artificial Sequence
  Description of Artificial Sequence: Synthetic oligonucleotide
  Antisense strand to SEQ ID NO: 1583187
uagguggaaacaaugacac

SEQ ID NO: 1583189 - RNA, 19 nt, Artificial Sequence
  Description of Artificial Sequence: Synthetic oligonucleotide
  Sense strand starting at position 2229 of SEQ ID NO: 1560198
cucuuuaucucucuggagu

SEQ ID NO: 1583190 - RNA, 19 nt, Artificial Sequence
  Description of Artificial Sequence: Synthetic oligonucleotide
  Antisense strand to SEQ ID NO: 1583189
acuccagagagauaaagag

SEQ ID NO: 1583191 - RNA, 19 nt, Artificial Sequence
  Description of Artificial Sequence: Synthetic oligonucleotide
  Sense strand starting at position 2272 of SEQ ID NO: 1560198
guaguuuagugagcaccau

SEQ ID NO: 1583192 - RNA, 19 nt, Artificial Sequence
  Description of Artificial Sequence: Synthetic oligonucleotide
  Antisense strand to SEQ ID NO: 1583191
auggugcucacuaaacuac

SEQ ID NO: 1583193 - RNA, 19 nt, Artificial Sequence
  Description of Artificial Sequence: Synthetic oligonucleotide
  Sense strand starting at position 2292 of SEQ ID NO: 1560198
ccggguuuaucuccagaua

SEQ ID NO: 1583194 - RNA, 19 nt, Artificial Sequence
  Description of Artificial Sequence: Synthetic oligonucleotide
  Antisense strand to SEQ ID NO: 1583193
uaucuggagauaaacccgg

SEQ ID NO: 1583195 - RNA, 19 nt, Artificial Sequence
  Description of Artificial Sequence: Synthetic oligonucleotide
  Sense strand starting at position 2293 of SEQ ID NO: 1560198
cggguuuaucuccagauac

SEQ ID NO: 1583196 - RNA, 19 nt, Artificial Sequence
  Description of Artificial Sequence: Synthetic oligonucleotide
  Antisense strand to SEQ ID NO: 1583195
guaucuggagauaaacccg

SEQ ID NO: 1583197 - RNA, 19 nt, Artificial Sequence
  Description of Artificial Sequence: Synthetic oligonucleotide
  Sense strand starting at position 2295 of SEQ ID NO: 1560198
gguuuaucuccagauacca

SEQ ID NO: 1583198 - RNA, 19 nt, Artificial Sequence
  Description of Artificial Sequence: Synthetic oligonucleotide
  Antisense strand to SEQ ID NO: 1583197
ugguaucuggagauaaacc

SEQ ID NO: 1583199 - RNA, 19 nt, Artificial Sequence
  Description of Artificial Sequence: Synthetic oligonucleotide
  Sense strand starting at position 2316 of SEQ ID NO: 1560198
agucuauagccuuagguaa

SEQ ID NO: 1583200 - RNA, 19 nt, Artificial Sequence
  Description of Artificial Sequence: Synthetic oligonucleotide
  Antisense strand to SEQ ID NO: 1583199
uuaccuaaggcuauagacu

SEQ ID NO: 1583201 - RNA, 19 nt, Artificial Sequence
  Description of Artificial Sequence: Synthetic oligonucleotide
  Sense strand starting at position 2401 of SEQ ID NO: 1560198
augggagaguuguaaagau

SEQ ID NO: 1583202 - RNA, 19 nt, Artificial Sequence
  Description of Artificial Sequence: Synthetic oligonucleotide
  Antisense strand to SEQ ID NO: 1583201
aucuuuacaacucucccau

SEQ ID NO: 1583203 - RNA, 19 nt, Artificial Sequence
  Description of Artificial Sequence: Synthetic oligonucleotide
  Sense strand starting at position 2410 of SEQ ID NO: 1560198
uuguaaagaucagaagaau

SEQ ID NO: 1583204 - RNA, 19 nt, Artificial Sequence
  Description of Artificial Sequence: Synthetic oligonucleotide
  Antisense strand to SEQ ID NO: 1583203
auucuucugaucuuuacaa

SEQ ID NO: 1583205 - RNA, 19 nt, Artificial Sequence
  Description of Artificial Sequence: Synthetic oligonucleotide
  Sense strand starting at position 2421 of SEQ ID NO: 1560198
agaagaauaugccuguuac

SEQ ID NO: 1583206 - RNA, 19 nt, Artificial Sequence
  Description of Artificial Sequence: Synthetic oligonucleotide
  Antisense strand to SEQ ID NO: 1583205
guaacaggcauauucuucu

SEQ ID NO: 1583207 - RNA, 19 nt, Artificial Sequence
  Description of Artificial Sequence: Synthetic oligonucleotide
  Sense strand starting at position 2422 of SEQ ID NO: 1560198
gaagaauaugccuguuaca

SEQ ID NO: 1583208 - RNA, 19 nt, Artificial Sequence
  Description of Artificial Sequence: Synthetic oligonucleotide
  Antisense strand to SEQ ID NO: 1583207
uguaacaggcauauucuuc

SEQ ID NO: 1583209 - RNA, 19 nt, Artificial Sequence
  Description of Artificial Sequence: Synthetic oligonucleotide
  Sense strand starting at position 2597 of SEQ ID NO: 1560198
ccauccaaguaguuagaau

SEQ ID NO: 1583210 - RNA, 19 nt, Artificial Sequence
  Description of Artificial Sequence: Synthetic oligonucleotide
  Antisense strand to SEQ ID NO: 1583209
auucuaacuacuuggaugg

SEQ ID NO: 1583211 - RNA, 19 nt, Artificial Sequence
  Description of Artificial Sequence: Synthetic oligonucleotide
  Sense strand starting at position 2608 of SEQ ID NO: 1560198
guuagaauugcagacuugu

SEQ ID NO: 1583212 - RNA, 19 nt, Artificial Sequence
  Description of Artificial Sequence: Synthetic oligonucleotide
  Antisense strand to SEQ ID NO: 1583211
acaagucugcaauucuaac

SEQ ID NO: 1583213 - RNA, 19 nt, Artificial Sequence
  Description of Artificial Sequence: Synthetic oligonucleotide
  Sense strand starting at position 2903 of SEQ ID NO: 1560198
acuugugugucaccugaac

SEQ ID NO: 1583214 - RNA, 19 nt, Artificial Sequence
  Description of Artificial Sequence: Synthetic oligonucleotide
  Antisense strand to SEQ ID NO: 1583213
guucaggugacacacaagu

SEQ ID NO: 1583215 - RNA, 19 nt, Artificial Sequence
  Description of Artificial Sequence: Synthetic oligonucleotide
  Sense strand starting at position 2905 of SEQ ID NO: 1560198
uugugugucaccugaacua

SEQ ID NO: 1583216 - RNA, 19 nt, Artificial Sequence
  Description of Artificial Sequence: Synthetic oligonucleotide
  Antisense strand to SEQ ID NO: 1583215
uaguucaggugacacacaa

SEQ ID NO: 1583217 - RNA, 19 nt, Artificial Sequence
  Description of Artificial Sequence: Synthetic oligonucleotide
  Sense strand starting at position 2927 of SEQ ID NO: 1560198
ggugacuuuguuggcaagu

SEQ ID NO: 1583218 - RNA, 19 nt, Artificial Sequence
  Description of Artificial Sequence: Synthetic oligonucleotide
  Antisense strand to SEQ ID NO: 1583217
acuugccaacaaagucacc

SEQ ID NO: 1583219 - RNA, 19 nt, Artificial Sequence
  Description of Artificial Sequence: Synthetic oligonucleotide
  Sense strand starting at position 2955 of SEQ ID NO: 1560198
ugaacugugucccugucaa

SEQ ID NO: 1583220 - RNA, 19 nt, Artificial Sequence
  Description of Artificial Sequence: Synthetic oligonucleotide
  Antisense strand to SEQ ID NO: 1583219
uugacagggacacaguuca

SEQ ID NO: 1583221 - RNA, 19 nt, Artificial Sequence
  Description of Artificial Sequence: Synthetic oligonucleotide
  Sense strand starting at position 3056 of SEQ ID NO: 1560198
guuugugacacuuggauga

SEQ ID NO: 1583222 - RNA, 19 nt, Artificial Sequence
  Description of Artificial Sequence: Synthetic oligonucleotide
  Antisense strand to SEQ ID NO: 1583221
ucauccaagugucacaaac

SEQ ID NO: 1583223 - RNA, 19 nt, Artificial Sequence
  Description of Artificial Sequence: Synthetic oligonucleotide
  Sense strand starting at position 3058 of SEQ ID NO: 1560198
uugugacacuuggaugaca

SEQ ID NO: 1583224 - RNA, 19 nt, Artificial Sequence
  Description of Artificial Sequence: Synthetic oligonucleotide
  Antisense strand to SEQ ID NO: 1583223
ugucauccaagugucacaa

SEQ ID NO: 1583225 - RNA, 19 nt, Artificial Sequence
  Description of Artificial Sequence: Synthetic oligonucleotide
  Sense strand starting at position 3117 of SEQ ID NO: 1560198
ugcaguuuaucggucacau

SEQ ID NO: 1583226 - RNA, 19 nt, Artificial Sequence
  Description of Artificial Sequence: Synthetic oligonucleotide
  Antisense strand to SEQ ID NO: 1583225
augugaccgauaaacugca

SEQ ID NO: 1583227 - RNA, 19 nt, Artificial Sequence
  Description of Artificial Sequence: Synthetic oligonucleotide
  Sense strand starting at position 3150 of SEQ ID NO: 1560198
ugcaauaugccacagacua

SEQ ID NO: 1583228 - RNA, 19 nt, Artificial Sequence
  Description of Artificial Sequence: Synthetic oligonucleotide
  Antisense strand to SEQ ID NO: 1583227
uagucuguggcauauugca

SEQ ID NO: 1583229 - RNA, 19 nt, Artificial Sequence
  Description of Artificial Sequence: Synthetic oligonucleotide
  Sense strand starting at position 3188 of SEQ ID NO: 1560198
uguuccaacucuguacaua

SEQ ID NO: 1583230 - RNA, 19 nt, Artificial Sequence
  Description of Artificial Sequence: Synthetic oligonucleotide
  Antisense strand to SEQ ID NO: 1583229
uauguacagaguuggaaca

SEQ ID NO: 1583231 - RNA, 19 nt, Artificial Sequence
  Description of Artificial Sequence: Synthetic oligonucleotide
  Sense strand starting at position 3189 of SEQ ID NO: 1560198
guuccaacucuguacauau

SEQ ID NO: 1583232 - RNA, 19 nt, Artificial Sequence
  Description of Artificial Sequence: Synthetic oligonucleotide
  Antisense strand to SEQ ID NO: 1583231
auauguacagaguuggaac

SEQ ID NO: 1583233 - RNA, 19 nt, Artificial Sequence
  Description of Artificial Sequence: Synthetic oligonucleotide
  Sense strand starting at position 3221 of SEQ ID NO: 1560198
ucaugacgcccucagagau

SEQ ID NO: 1583234 - RNA, 19 nt, Artificial Sequence
  Description of Artificial Sequence: Synthetic oligonucleotide
  Antisense strand to SEQ ID NO: 1583233
aucucugagggcgucauga

SEQ ID NO: 1583235 - RNA, 19 nt, Artificial Sequence
  Description of Artificial Sequence: Synthetic oligonucleotide
  Sense strand starting at position 3234 of SEQ ID NO: 1560198
agagauggacacuguuauu

SEQ ID NO: 1583236 - RNA, 19 nt, Artificial Sequence
  Description of Artificial Sequence: Synthetic oligonucleotide
  Antisense strand to SEQ ID NO: 1583235
aauaacaguguccaucucu

SEQ ID NO: 1583237 - RNA, 19 nt, Artificial Sequence
  Description of Artificial Sequence: Synthetic oligonucleotide
  Sense strand starting at position 3237 of SEQ ID NO: 1560198
gauggacacuguuauuauu

SEQ ID NO: 1583238 - RNA, 19 nt, Artificial Sequence
  Description of Artificial Sequence: Synthetic oligonucleotide
  Antisense strand to SEQ ID NO: 1583237
aauaauaacaguguccauc

SEQ ID NO: 1583239 - RNA, 19 nt, Artificial Sequence
  Description of Artificial Sequence: Synthetic oligonucleotide
  Sense strand starting at position 3239 of SEQ ID NO: 1560198
uggacacuguuauuauuau

SEQ ID NO: 1583240 - RNA, 19 nt, Artificial Sequence
  Description of Artificial Sequence: Synthetic oligonucleotide
  Antisense strand to SEQ ID NO: 1583239
auaauaauaacagugucca

SEQ ID NO: 1583241 - RNA, 19 nt, Artificial Sequence
  Description of Artificial Sequence: Synthetic oligonucleotide
  Sense strand starting at position 3556 of SEQ ID NO: 1560198
cccagcugacacuguuauu

SEQ ID NO: 1583242 - RNA, 19 nt, Artificial Sequence
  Description of Artificial Sequence: Synthetic oligonucleotide
  Antisense strand to SEQ ID NO: 1583241
aauaacagugucagcuggg

SEQ ID NO: 1583243 - RNA, 19 nt, Artificial Sequence
  Description of Artificial Sequence: Synthetic oligonucleotide
  Sense strand starting at position 3742 of SEQ ID NO: 1560198
acagcugaggcuggauaau

SEQ ID NO: 1583244 - RNA, 19 nt, Artificial Sequence
  Description of Artificial Sequence: Synthetic oligonucleotide
  Antisense strand to SEQ ID NO: 1583243
auuauccagccucagcugu

SEQ ID NO: 1583245 - RNA, 19 nt, Artificial Sequence
  Description of Artificial Sequence: Synthetic oligonucleotide
  Sense strand starting at position 3943 of SEQ ID NO: 1560198
ccaggaguuugagaaccau

SEQ ID NO: 1583246 - RNA, 19 nt, Artificial Sequence
  Description of Artificial Sequence: Synthetic oligonucleotide
  Antisense strand to SEQ ID NO: 1583245
augguucucaaacuccugg

SEQ ID NO: 1583247 - RNA, 19 nt, Artificial Sequence
  Description of Artificial Sequence: Synthetic oligonucleotide
  Sense strand starting at position 3954 of SEQ ID NO: 1560198
agaaccaucuggccaagau

SEQ ID NO: 1583248 - RNA, 19 nt, Artificial Sequence
  Description of Artificial Sequence: Synthetic oligonucleotide
  Antisense strand to SEQ ID NO: 1583247
aucuuggccagaugguucu

SEQ ID NO: 1583249 - RNA, 19 nt, Artificial Sequence
  Description of Artificial Sequence: Synthetic oligonucleotide
  Sense strand starting at position 3974 of SEQ ID NO: 1560198
gcaagaccauggucucuaa

SEQ ID NO: 1583250 - RNA, 19 nt, Artificial Sequence
  Description of Artificial Sequence: Synthetic oligonucleotide
  Antisense strand to SEQ ID NO: 1583249
uuagagaccauggucuugc

SEQ ID NO: 1583251 - RNA, 19 nt, Artificial Sequence
  Description of Artificial Sequence: Synthetic oligonucleotide
  Sense strand starting at position 510 of SEQ ID NO: 1560199
gcagaagucagcuguaagg

SEQ ID NO: 1583252 - RNA, 19 nt, Artificial Sequence
  Description of Artificial Sequence: Synthetic oligonucleotide
  Antisense strand to SEQ ID NO: 1583251
ccuuacagcugacuucugc

SEQ ID NO: 1583253 - RNA, 19 nt, Artificial Sequence
  Description of Artificial Sequence: Synthetic oligonucleotide
  Sense strand starting at position 704 of SEQ ID NO: 1560199
gcagaagugucugguccuc

SEQ ID NO: 1583254 - RNA, 19 nt, Artificial Sequence
  Description of Artificial Sequence: Synthetic oligonucleotide
  Antisense strand to SEQ ID NO: 1583253
gaggaccagacacuucugc

SEQ ID NO: 1583255 - RNA, 19 nt, Artificial Sequence
  Description of Artificial Sequence: Synthetic oligonucleotide
  Sense strand starting at position 713 of SEQ ID NO: 1560199
ucugguccucucugagcua

SEQ ID NO: 1583256 - RNA, 19 nt, Artificial Sequence
  Description of Artificial Sequence: Synthetic oligonucleotide
  Antisense strand to SEQ ID NO: 1583255
uagcucagagaggaccaga

SEQ ID NO: 1583257 - RNA, 19 nt, Artificial Sequence
  Description of Artificial Sequence: Synthetic oligonucleotide
  Sense strand starting at position 716 of SEQ ID NO: 1560199
gguccucucugagcuagaa

SEQ ID NO: 1583258 - RNA, 19 nt, Artificial Sequence
  Description of Artificial Sequence: Synthetic oligonucleotide
  Antisense strand to SEQ ID NO: 1583257
uucuagcucagagaggacc

SEQ ID NO: 1583259 - RNA, 19 nt, Artificial Sequence
  Description of Artificial Sequence: Synthetic oligonucleotide
  Sense strand starting at position 964 of SEQ ID NO: 1560199
agagaaccucuuuguuauc

SEQ ID NO: 1583260 - RNA, 19 nt, Artificial Sequence
  Description of Artificial Sequence: Synthetic oligonucleotide
  Antisense strand to SEQ ID NO: 1583259
gauaacaaagagguucucu

SEQ ID NO: 1583261 - RNA, 19 nt, Artificial Sequence
  Description of Artificial Sequence: Synthetic oligonucleotide
  Sense strand starting at position 970 of SEQ ID NO: 1560199
ccucuuuguuauccguuua

SEQ ID NO: 1583262 - RNA, 19 nt, Artificial Sequence
  Description of Artificial Sequence: Synthetic oligonucleotide
  Antisense strand to SEQ ID NO: 1583261
uaaacggauaacaaagagg

SEQ ID NO: 1583263 - RNA, 19 nt, Artificial Sequence
  Description of Artificial Sequence: Synthetic oligonucleotide
  Sense strand starting at position 982 of SEQ ID NO: 1560199
ccguuuaaauuagucagau

SEQ ID NO: 1583264 - RNA, 19 nt, Artificial Sequence
  Description of Artificial Sequence: Synthetic oligonucleotide
  Antisense strand to SEQ ID NO: 1583263
aucugacuaauuuaaacgg

SEQ ID NO: 1583265 - RNA, 19 nt, Artificial Sequence
  Description of Artificial Sequence: Synthetic oligonucleotide
  Sense strand starting at position 983 of SEQ ID NO: 1560199
cguuuaaauuagucagaug

SEQ ID NO: 1583266 - RNA, 19 nt, Artificial Sequence
  Description of Artificial Sequence: Synthetic oligonucleotide
  Antisense strand to SEQ ID NO: 1583265
caucugacuaauuuaaacg

SEQ ID NO: 1583267 - RNA, 19 nt, Artificial Sequence
  Description of Artificial Sequence: Synthetic oligonucleotide
  Sense strand starting at position 986 of SEQ ID NO: 1560199
uuaaauuagucagauggga

SEQ ID NO: 1583268 - RNA, 19 nt, Artificial Sequence
  Description of Artificial Sequence: Synthetic oligonucleotide
  Antisense strand to SEQ ID NO: 1583267
ucccaucugacuaauuuaa

SEQ ID NO: 1583269 - RNA, 19 nt, Artificial Sequence
  Description of Artificial Sequence: Synthetic oligonucleotide
  Sense strand starting at position 1069 of SEQ ID NO: 1560199
ccaggaaauuccuguuugu

SEQ ID NO: 1583270 - RNA, 19 nt, Artificial Sequence
  Description of Artificial Sequence: Synthetic oligonucleotide
  Antisense strand to SEQ ID NO: 1583269
acaaacaggaauuuccugg

SEQ ID NO: 1583271 - RNA, 19 nt, Artificial Sequence
  Description of Artificial Sequence: Synthetic oligonucleotide
  Sense strand starting at position 1383 of SEQ ID NO: 1560199
ccaagauucgcgggagccu

SEQ ID NO: 1583272 - RNA, 19 nt, Artificial Sequence
  Description of Artificial Sequence: Synthetic oligonucleotide
  Antisense strand to SEQ ID NO: 1583271
aggcucccgcgaaucuugg

SEQ ID NO: 1583273 - RNA, 19 nt, Artificial Sequence
  Description of Artificial Sequence: Synthetic oligonucleotide
  Sense strand starting at position 2010 of SEQ ID NO: 1560199
agacuucucuucugccaga

SEQ ID NO: 1583274 - RNA, 19 nt, Artificial Sequence
  Description of Artificial Sequence: Synthetic oligonucleotide
  Antisense strand to SEQ ID NO: 1583273
ucuggcagaagagaagucu

SEQ ID NO: 1583275 - RNA, 19 nt, Artificial Sequence
  Description of Artificial Sequence: Synthetic oligonucleotide
  Sense strand starting at position 2013 of SEQ ID NO: 1560199
cuucucuucugccagaaag

SEQ ID NO: 1583276 - RNA, 19 nt, Artificial Sequence
  Description of Artificial Sequence: Synthetic oligonucleotide
  Antisense strand to SEQ ID NO: 1583275
cuuucuggcagaagagaag

SEQ ID NO: 1583277 - RNA, 19 nt, Artificial Sequence
  Description of Artificial Sequence: Synthetic oligonucleotide
  Sense strand starting at position 2079 of SEQ ID NO: 1560199
gccacuuagaggcgucuaa

SEQ ID NO: 1583278 - RNA, 19 nt, Artificial Sequence
  Description of Artificial Sequence: Synthetic oligonucleotide
  Antisense strand to SEQ ID NO: 1583277
uuagacgccucuaaguggc

SEQ ID NO: 1583279 - RNA, 19 nt, Artificial Sequence
  Description of Artificial Sequence: Synthetic oligonucleotide
  Sense strand starting at position 2144 of SEQ ID NO: 1560199
agggcagguuccucagaga

SEQ ID NO: 1583280 - RNA, 19 nt, Artificial Sequence
  Description of Artificial Sequence: Synthetic oligonucleotide
  Antisense strand to SEQ ID NO: 1583279
ucucugaggaaccugcccu

SEQ ID NO: 1583281 - RNA, 19 nt, Artificial Sequence
  Description of Artificial Sequence: Synthetic oligonucleotide
  Sense strand starting at position 2147 of SEQ ID NO: 1560199
gcagguuccucagagaagg

SEQ ID NO: 1583282 - RNA, 19 nt, Artificial Sequence
  Description of Artificial Sequence: Synthetic oligonucleotide
  Antisense strand to SEQ ID NO: 1583281
ccuucucugaggaaccugc

SEQ ID NO: 1583283 - RNA, 19 nt, Artificial Sequence
  Description of Artificial Sequence: Synthetic oligonucleotide
  Sense strand starting at position 2181 of SEQ ID NO: 1560199
ggcuuuguuggaugaguag

SEQ ID NO: 1583284 - RNA, 19 nt, Artificial Sequence
  Description of Artificial Sequence: Synthetic oligonucleotide
  Antisense strand to SEQ ID NO: 1583283
cuacucauccaacaaagcc

SEQ ID NO: 1583285 - RNA, 19 nt, Artificial Sequence
  Description of Artificial Sequence: Synthetic oligonucleotide
  Sense strand starting at position 2193 of SEQ ID NO: 1560199
ugaguaggaguuugucagu

SEQ ID NO: 1583286 - RNA, 19 nt, Artificial Sequence
  Description of Artificial Sequence: Synthetic oligonucleotide
  Antisense strand to SEQ ID NO: 1583285
acugacaaacuccuacuca

SEQ ID NO: 1583287 - RNA, 19 nt, Artificial Sequence
  Description of Artificial Sequence: Synthetic oligonucleotide
  Sense strand starting at position 2196 of SEQ ID NO: 1560199
guaggaguuugucagucca

SEQ ID NO: 1583288 - RNA, 19 nt, Artificial Sequence
  Description of Artificial Sequence: Synthetic oligonucleotide
  Antisense strand to SEQ ID NO: 1583287
uggacugacaaacuccuac

SEQ ID NO: 1583289 - RNA, 19 nt, Artificial Sequence
  Description of Artificial Sequence: Synthetic oligonucleotide
  Sense strand starting at position 2198 of SEQ ID NO: 1560199
aggaguuugucaguccaaa

SEQ ID NO: 1583290 - RNA, 19 nt, Artificial Sequence
  Description of Artificial Sequence: Synthetic oligonucleotide
  Antisense strand to SEQ ID NO: 1583289
uuuggacugacaaacuccu

SEQ ID NO: 1583291 - RNA, 19 nt, Artificial Sequence
  Description of Artificial Sequence: Synthetic oligonucleotide
  Sense strand starting at position 2327 of SEQ ID NO: 1560199
gugaguuaucaucacaaca

SEQ ID NO: 1583292 - RNA, 19 nt, Artificial Sequence
  Description of Artificial Sequence: Synthetic oligonucleotide
  Antisense strand to SEQ ID NO: 1583291
uguugugaugauaacucac

SEQ ID NO: 1583293 - RNA, 19 nt, Artificial Sequence
  Description of Artificial Sequence: Synthetic oligonucleotide
  Sense strand starting at position 2912 of SEQ ID NO: 1560199
uucccuauaugagcaagua

SEQ ID NO: 1583294 - RNA, 19 nt, Artificial Sequence
  Description of Artificial Sequence: Synthetic oligonucleotide
  Antisense strand to SEQ ID NO: 1583293
uacuugcucauauagggaa

SEQ ID NO: 1583295 - RNA, 19 nt, Artificial Sequence
  Description of Artificial Sequence: Synthetic oligonucleotide
  Sense strand starting at position 2980 of SEQ ID NO: 1560199
ggcucugucggaggaauca

SEQ ID NO: 1583296 - RNA, 19 nt, Artificial Sequence
  Description of Artificial Sequence: Synthetic oligonucleotide
  Antisense strand to SEQ ID NO: 1583295
ugauuccuccgacagagcc

SEQ ID NO: 1583297 - RNA, 19 nt, Artificial Sequence
  Description of Artificial Sequence: Synthetic oligonucleotide
  Sense strand starting at position 2997 of SEQ ID NO: 1560199
caaggaaagcugcauguaa

SEQ ID NO: 1583298 - RNA, 19 nt, Artificial Sequence
  Description of Artificial Sequence: Synthetic oligonucleotide
  Antisense strand to SEQ ID NO: 1583297
uuacaugcagcuuuccuug

SEQ ID NO: 1583299 - RNA, 19 nt, Artificial Sequence
  Description of Artificial Sequence: Synthetic oligonucleotide
  Sense strand starting at position 2999 of SEQ ID NO: 1560199
aggaaagcugcauguaaga

SEQ ID NO: 1583300 - RNA, 19 nt, Artificial Sequence
  Description of Artificial Sequence: Synthetic oligonucleotide
  Antisense strand to SEQ ID NO: 1583299
ucuuacaugcagcuuuccu

SEQ ID NO: 1583301 - RNA, 19 nt, Artificial Sequence
  Description of Artificial Sequence: Synthetic oligonucleotide
  Sense strand starting at position 3047 of SEQ ID NO: 1560199
ucaauaggaguuugacaca

SEQ ID NO: 1583302 - RNA, 19 nt, Artificial Sequence
  Description of Artificial Sequence: Synthetic oligonucleotide
  Antisense strand to SEQ ID NO: 1583301
ugugucaaacuccuauuga

SEQ ID NO: 1583303 - RNA, 19 nt, Artificial Sequence
  Description of Artificial Sequence: Synthetic oligonucleotide
  Sense strand starting at position 3050 of SEQ ID NO: 1560199
auaggaguuugacacauuu

SEQ ID NO: 1583304 - RNA, 19 nt, Artificial Sequence
  Description of Artificial Sequence: Synthetic oligonucleotide
  Antisense strand to SEQ ID NO: 1583303
aaaugugucaaacuccuau

SEQ ID NO: 1583305 - RNA, 19 nt, Artificial Sequence
  Description of Artificial Sequence: Synthetic oligonucleotide
  Sense strand starting at position 3263 of SEQ ID NO: 1560199
ugcugaccauuucuguuau

SEQ ID NO: 1583306 - RNA, 19 nt, Artificial Sequence
  Description of Artificial Sequence: Synthetic oligonucleotide
  Antisense strand to SEQ ID NO: 1583305
auaacagaaauggucagca

SEQ ID NO: 1583307 - RNA, 19 nt, Artificial Sequence
  Description of Artificial Sequence: Synthetic oligonucleotide
  Sense strand starting at position 3264 of SEQ ID NO: 1560199
gcugaccauuucuguuauu

SEQ ID NO: 1583308 - RNA, 19 nt, Artificial Sequence
  Description of Artificial Sequence: Synthetic oligonucleotide
  Antisense strand to SEQ ID NO: 1583307
aauaacagaaauggucagc

SEQ ID NO: 1583309 - RNA, 19 nt, Artificial Sequence
  Description of Artificial Sequence: Synthetic oligonucleotide
  Sense strand starting at position 3273 of SEQ ID NO: 1560199
uucuguuauucugagauga

SEQ ID NO: 1583310 - RNA, 19 nt, Artificial Sequence
  Description of Artificial Sequence: Synthetic oligonucleotide
  Antisense strand to SEQ ID NO: 1583309
ucaucucagaauaacagaa

SEQ ID NO: 1583311 - RNA, 19 nt, Artificial Sequence
  Description of Artificial Sequence: Synthetic oligonucleotide
  Sense strand starting at position 3275 of SEQ ID NO: 1560199
cuguuauucugagaugaag

SEQ ID NO: 1583312 - RNA, 19 nt, Artificial Sequence
  Description of Artificial Sequence: Synthetic oligonucleotide
  Antisense strand to SEQ ID NO: 1583311
cuucaucucagaauaacag

SEQ ID NO: 1583313 - RNA, 19 nt, Artificial Sequence
  Description of Artificial Sequence: Synthetic oligonucleotide
  Sense strand starting at position 3308 of SEQ ID NO: 1560199
ggcacuaucuacuacugua

SEQ ID NO: 1583314 - RNA, 19 nt, Artificial Sequence
  Description of Artificial Sequence: Synthetic oligonucleotide
  Antisense strand to SEQ ID NO: 1583313
uacaguaguagauagugcc

SEQ ID NO: 1583315 - RNA, 19 nt, Artificial Sequence
  Description of Artificial Sequence: Synthetic oligonucleotide
  Sense strand starting at position 199 of SEQ ID NO: 1560200
gguccuuacccuggagaga

SEQ ID NO: 1583316 - RNA, 19 nt, Artificial Sequence
  Description of Artificial Sequence: Synthetic oligonucleotide
  Antisense strand to SEQ ID NO: 1583315
ucucuccaggguaaggacc

SEQ ID NO: 1583317 - RNA, 19 nt, Artificial Sequence
  Description of Artificial Sequence: Synthetic oligonucleotide
  Sense strand starting at position 397 of SEQ ID NO: 1560200
ugcaaauaucaagggcagu

SEQ ID NO: 1583318 - RNA, 19 nt, Artificial Sequence
  Description of Artificial Sequence: Synthetic oligonucleotide
  Antisense strand to SEQ ID NO: 1583317
acugcccuugauauuugca

SEQ ID NO: 1583319 - RNA, 19 nt, Artificial Sequence
  Description of Artificial Sequence: Synthetic oligonucleotide
  Sense strand starting at position 418 of SEQ ID NO: 1560200
gcuucuugguccuuggaga

SEQ ID NO: 1583320 - RNA, 19 nt, Artificial Sequence
  Description of Artificial Sequence: Synthetic oligonucleotide
  Antisense strand to SEQ ID NO: 1583319
ucuccaaggaccaagaagc

SEQ ID NO: 1583321 - RNA, 19 nt, Artificial Sequence
  Description of Artificial Sequence: Synthetic oligonucleotide
  Sense strand starting at position 453 of SEQ ID NO: 1560200
aggagacuggugugaagau

SEQ ID NO: 1583322 - RNA, 19 nt, Artificial Sequence
  Description of Artificial Sequence: Synthetic oligonucleotide
  Antisense strand to SEQ ID NO: 1583321
aucuucacaccagucuccu

SEQ ID NO: 1583323 - RNA, 19 nt, Artificial Sequence
  Description of Artificial Sequence: Synthetic oligonucleotide
  Sense strand starting at position 625 of SEQ ID NO: 1560200
gugggagcucacuaacaug

SEQ ID NO: 1583324 - RNA, 19 nt, Artificial Sequence
  Description of Artificial Sequence: Synthetic oligonucleotide
  Antisense strand to SEQ ID NO: 1583323
cauguuagugagcucccac

SEQ ID NO: 1583325 - RNA, 19 nt, Artificial Sequence
  Description of Artificial Sequence: Synthetic oligonucleotide
  Sense strand starting at position 652 of SEQ ID NO: 1560200
ggcggcuuagugucuuuca

SEQ ID NO: 1583326 - RNA, 19 nt, Artificial Sequence
  Description of Artificial Sequence: Synthetic oligonucleotide
  Antisense strand to SEQ ID NO: 1583325
ugaaagacacuaagccgcc

SEQ ID NO: 1583327 - RNA, 19 nt, Artificial Sequence
  Description of Artificial Sequence: Synthetic oligonucleotide
  Sense strand starting at position 719 of SEQ ID NO: 1560200
cacagugguccugauauca

SEQ ID NO: 1583328 - RNA, 19 nt, Artificial Sequence
  Description of Artificial Sequence: Synthetic oligonucleotide
  Antisense strand to SEQ ID NO: 1583327
ugauaucaggaccacugug

SEQ ID NO: 1583329 - RNA, 19 nt, Artificial Sequence
  Description of Artificial Sequence: Synthetic oligonucleotide
  Sense strand starting at position 1029 of SEQ ID NO: 1560200
gggaguuucuccuccacuc

SEQ ID NO: 1583330 - RNA, 19 nt, Artificial Sequence
  Description of Artificial Sequence: Synthetic oligonucleotide
  Antisense strand to SEQ ID NO: 1583329
gaguggaggagaaacuccc

SEQ ID NO: 1583331 - RNA, 19 nt, Artificial Sequence
  Description of Artificial Sequence: Synthetic oligonucleotide
  Sense strand starting at position 2024 of SEQ ID NO: 1560200
ccgaauauaggccagucau

SEQ ID NO: 1583332 - RNA, 19 nt, Artificial Sequence
  Description of Artificial Sequence: Synthetic oligonucleotide
  Antisense strand to SEQ ID NO: 1583331
augacuggccuauauucgg

SEQ ID NO: 1583333 - RNA, 19 nt, Artificial Sequence
  Description of Artificial Sequence: Synthetic oligonucleotide
  Sense strand starting at position 2036 of SEQ ID NO: 1560200
cagucauugcucccgcuga

SEQ ID NO: 1583334 - RNA, 19 nt, Artificial Sequence
  Description of Artificial Sequence: Synthetic oligonucleotide
  Antisense strand to SEQ ID NO: 1583333
ucagcgggagcaaugacug

SEQ ID NO: 1583335 - RNA, 19 nt, Artificial Sequence
  Description of Artificial Sequence: Synthetic oligonucleotide
  Sense strand starting at position 2176 of SEQ ID NO: 1560200
cuaggauuggcucagguuu

SEQ ID NO: 1583336 - RNA, 19 nt, Artificial Sequence
  Description of Artificial Sequence: Synthetic oligonucleotide
  Antisense strand to SEQ ID NO: 1583335
aaaccugagccaauccuag

SEQ ID NO: 1583337 - RNA, 19 nt, Artificial Sequence
  Description of Artificial Sequence: Synthetic oligonucleotide
  Sense strand starting at position 2351 of SEQ ID NO: 1560200
gcgggaagucguccgucaa

SEQ ID NO: 1583338 - RNA, 19 nt, Artificial Sequence
  Description of Artificial Sequence: Synthetic oligonucleotide
  Antisense strand to SEQ ID NO: 1583337
uugacggacgacuucccgc

SEQ ID NO: 1583339 - RNA, 19 nt, Artificial Sequence
  Description of Artificial Sequence: Synthetic oligonucleotide
  Sense strand starting at position 2358 of SEQ ID NO: 1560200
gucguccgucaaguuuaga

SEQ ID NO: 1583340 - RNA, 19 nt, Artificial Sequence
  Description of Artificial Sequence: Synthetic oligonucleotide
  Antisense strand to SEQ ID NO: 1583339
ucuaaacuugacggacgac

SEQ ID NO: 1583341 - RNA, 19 nt, Artificial Sequence
  Description of Artificial Sequence: Synthetic oligonucleotide
  Sense strand starting at position 2402 of SEQ ID NO: 1560200
auauucugccuugaaguca

SEQ ID NO: 1583342 - RNA, 19 nt, Artificial Sequence
  Description of Artificial Sequence: Synthetic oligonucleotide
  Antisense strand to SEQ ID NO: 1583341
ugacuucaaggcagaauau

SEQ ID NO: 1583343 - RNA, 19 nt, Artificial Sequence
  Description of Artificial Sequence: Synthetic oligonucleotide
  Sense strand starting at position 2501 of SEQ ID NO: 1560200
acagacaggugccuuuaaa

SEQ ID NO: 1583344 - RNA, 19 nt, Artificial Sequence
  Description of Artificial Sequence: Synthetic oligonucleotide
  Antisense strand to SEQ ID NO: 1583343
uuuaaaggcaccugucugu

SEQ ID NO: 1583345 - RNA, 19 nt, Artificial Sequence
  Description of Artificial Sequence: Synthetic oligonucleotide
  Sense strand starting at position 2799 of SEQ ID NO: 1560200
guuggcacaucucugaaau

SEQ ID NO: 1583346 - RNA, 19 nt, Artificial Sequence
  Description of Artificial Sequence: Synthetic oligonucleotide
  Antisense strand to SEQ ID NO: 1583345
auuucagagaugugccaac

SEQ ID NO: 1583347 - RNA, 19 nt, Artificial Sequence
  Description of Artificial Sequence: Synthetic oligonucleotide
  Sense strand starting at position 2800 of SEQ ID NO: 1560200
uuggcacaucucugaaauu

SEQ ID NO: 1583348 - RNA, 19 nt, Artificial Sequence
  Description of Artificial Sequence: Synthetic oligonucleotide
  Antisense strand to SEQ ID NO: 1583347
aauuucagagaugugccaa

SEQ ID NO: 1583349 - RNA, 19 nt, Artificial Sequence
  Description of Artificial Sequence: Synthetic oligonucleotide
  Sense strand starting at position 2850 of SEQ ID NO: 1560200
cagagacacugcuuuaagu

SEQ ID NO: 1583350 - RNA, 19 nt, Artificial Sequence
  Description of Artificial Sequence: Synthetic oligonucleotide
  Antisense strand to SEQ ID NO: 1583349
acuuaaagcagugucucug

SEQ ID NO: 1583351 - RNA, 19 nt, Artificial Sequence
  Description of Artificial Sequence: Synthetic oligonucleotide
  Sense strand starting at position 2852 of SEQ ID NO: 1560200
gagacacugcuuuaagucu

SEQ ID NO: 1583352 - RNA, 19 nt, Artificial Sequence
  Description of Artificial Sequence: Synthetic oligonucleotide
  Antisense strand to SEQ ID NO: 1583351
agacuuaaagcagugucuc

SEQ ID NO: 1583353 - RNA, 19 nt, Artificial Sequence
  Description of Artificial Sequence: Synthetic oligonucleotide
  Sense strand starting at position 2885 of SEQ ID NO: 1560200
agcagaauugguugggaag

SEQ ID NO: 1583354 - RNA, 19 nt, Artificial Sequence
  Description of Artificial Sequence: Synthetic oligonucleotide
  Antisense strand to SEQ ID NO: 1583353
cuucccaaccaauucugcu

SEQ ID NO: 1583355 - RNA, 19 nt, Artificial Sequence
  Description of Artificial Sequence: Synthetic oligonucleotide
  Sense strand starting at position 3067 of SEQ ID NO: 1560200
ucuguugucuucuuggaga

SEQ ID NO: 1583356 - RNA, 19 nt, Artificial Sequence
  Description of Artificial Sequence: Synthetic oligonucleotide
  Antisense strand to SEQ ID NO: 1583355
ucuccaagaagacaacaga

SEQ ID NO: 1583357 - RNA, 19 nt, Artificial Sequence
  Description of Artificial Sequence: Synthetic oligonucleotide
  Sense strand starting at position 3069 of SEQ ID NO: 1560200
uguugucuucuuggagaga

SEQ ID NO: 1583358 - RNA, 19 nt, Artificial Sequence
  Description of Artificial Sequence: Synthetic oligonucleotide
  Antisense strand to SEQ ID NO: 1583357
ucucuccaagaagacaaca

SEQ ID NO: 1583359 - RNA, 19 nt, Artificial Sequence
  Description of Artificial Sequence: Synthetic oligonucleotide
  Sense strand starting at position 3224 of SEQ ID NO: 1560200
gcaggaaguagucaguaac

SEQ ID NO: 1583360 - RNA, 19 nt, Artificial Sequence
  Description of Artificial Sequence: Synthetic oligonucleotide
  Antisense strand to SEQ ID NO: 1583359
guuacugacuacuuccugc

SEQ ID NO: 1583361 - RNA, 19 nt, Artificial Sequence
  Description of Artificial Sequence: Synthetic oligonucleotide
  Sense strand starting at position 3227 of SEQ ID NO: 1560200
ggaaguagucaguaaccau

SEQ ID NO: 1583362 - RNA, 19 nt, Artificial Sequence
  Description of Artificial Sequence: Synthetic oligonucleotide
  Antisense strand to SEQ ID NO: 1583361
augguuacugacuacuucc

SEQ ID NO: 1583363 - RNA, 19 nt, Artificial Sequence
  Description of Artificial Sequence: Synthetic oligonucleotide
  Sense strand starting at position 3238 of SEQ ID NO: 1560200
guaaccauuugucaaagga

SEQ ID NO: 1583364 - RNA, 19 nt, Artificial Sequence
  Description of Artificial Sequence: Synthetic oligonucleotide
  Antisense strand to SEQ ID NO: 1583363
uccuuugacaaaugguuac

SEQ ID NO: 1583365 - RNA, 19 nt, Artificial Sequence
  Description of Artificial Sequence: Synthetic oligonucleotide
  Sense strand starting at position 3261 of SEQ ID NO: 1560200
augaaugaaugugaggaau

SEQ ID NO: 1583366 - RNA, 19 nt, Artificial Sequence
  Description of Artificial Sequence: Synthetic oligonucleotide
  Antisense strand to SEQ ID NO: 1583365
auuccucacauucauucau

SEQ ID NO: 1583367 - RNA, 19 nt, Artificial Sequence
  Description of Artificial Sequence: Synthetic oligonucleotide
  Sense strand starting at position 3272 of SEQ ID NO: 1560200
ugaggaaugacuugugauu

SEQ ID NO: 1583368 - RNA, 19 nt, Artificial Sequence
  Description of Artificial Sequence: Synthetic oligonucleotide
  Antisense strand to SEQ ID NO: 1583367
aaucacaagucauuccuca

SEQ ID NO: 1583369 - RNA, 19 nt, Artificial Sequence
  Description of Artificial Sequence: Synthetic oligonucleotide
  Sense strand starting at position 3308 of SEQ ID NO: 1560200
cugagacuuccacgaacug

SEQ ID NO: 1583370 - RNA, 19 nt, Artificial Sequence
  Description of Artificial Sequence: Synthetic oligonucleotide
  Antisense strand to SEQ ID NO: 1583369
caguucguggaagucucag

SEQ ID NO: 1583371 - RNA, 19 nt, Artificial Sequence
  Description of Artificial Sequence: Synthetic oligonucleotide
  Sense strand starting at position 3392 of SEQ ID NO: 1560200
gguggaaaguaagauaaau

SEQ ID NO: 1583372 - RNA, 19 nt, Artificial Sequence
  Description of Artificial Sequence: Synthetic oligonucleotide
  Antisense strand to SEQ ID NO: 1583371
auuuaucuuacuuuccacc

SEQ ID NO: 1583373 - RNA, 19 nt, Artificial Sequence
  Description of Artificial Sequence: Synthetic oligonucleotide
  Sense strand starting at position 3462 of SEQ ID NO: 1560200
aucagaauggucugaggca

SEQ ID NO: 1583374 - RNA, 19 nt, Artificial Sequence
  Description of Artificial Sequence: Synthetic oligonucleotide
  Antisense strand to SEQ ID NO: 1583373
ugccucagaccauucugau

SEQ ID NO: 1583375 - RNA, 19 nt, Artificial Sequence
  Description of Artificial Sequence: Synthetic oligonucleotide
  Sense strand starting at position 3549 of SEQ ID NO: 1560200
uagaguuauuguucuagag

SEQ ID NO: 1583376 - RNA, 19 nt, Artificial Sequence
  Description of Artificial Sequence: Synthetic oligonucleotide
  Antisense strand to SEQ ID NO: 1583375
cucuagaacaauaacucua

SEQ ID NO: 1583377 - RNA, 19 nt, Artificial Sequence
  Description of Artificial Sequence: Synthetic oligonucleotide
  Sense strand starting at position 3553 of SEQ ID NO: 1560200
guuauuguucuagagcuuu

SEQ ID NO: 1583378 - RNA, 19 nt, Artificial Sequence
  Description of Artificial Sequence: Synthetic oligonucleotide
  Antisense strand to SEQ ID NO: 1583377
aaagcucuagaacaauaac

SEQ ID NO: 1583379 - RNA, 19 nt, Artificial Sequence
  Description of Artificial Sequence: Synthetic oligonucleotide
  Sense strand starting at position 3594 of SEQ ID NO: 1560200
gacaaaguaucgcuucuca

SEQ ID NO: 1583380 - RNA, 19 nt, Artificial Sequence
  Description of Artificial Sequence: Synthetic oligonucleotide
  Antisense strand to SEQ ID NO: 1583379
ugagaagcgauacuuuguc

SEQ ID NO: 1583381 - RNA, 19 nt, Artificial Sequence
  Description of Artificial Sequence: Synthetic oligonucleotide
  Sense strand starting at position 3598 of SEQ ID NO: 1560200
aaguaucgcuucucagaca

SEQ ID NO: 1583382 - RNA, 19 nt, Artificial Sequence
  Description of Artificial Sequence: Synthetic oligonucleotide
  Antisense strand to SEQ ID NO: 1583381
ugucugagaagcgauacuu

SEQ ID NO: 1583383 - RNA, 19 nt, Artificial Sequence
  Description of Artificial Sequence: Synthetic oligonucleotide
  Sense strand starting at position 3609 of SEQ ID NO: 1560200
cucagacaucuccggaauc

SEQ ID NO: 1583384 - RNA, 19 nt, Artificial Sequence
  Description of Artificial Sequence: Synthetic oligonucleotide
  Antisense strand to SEQ ID NO: 1583383
gauuccggagaugucugag

SEQ ID NO: 1583385 - RNA, 19 nt, Artificial Sequence
  Description of Artificial Sequence: Synthetic oligonucleotide
  Sense strand starting at position 3621 of SEQ ID NO: 1560200
cggaaucaccuaggaaugu

SEQ ID NO: 1583386 - RNA, 19 nt, Artificial Sequence
  Description of Artificial Sequence: Synthetic oligonucleotide
  Antisense strand to SEQ ID NO: 1583385
acauuccuaggugauuccg

SEQ ID NO: 1583387 - RNA, 19 nt, Artificial Sequence
  Description of Artificial Sequence: Synthetic oligonucleotide
  Sense strand starting at position 3707 of SEQ ID NO: 1560200
cgcggaucuagcgaugacu

SEQ ID NO: 1583388 - RNA, 19 nt, Artificial Sequence
  Description of Artificial Sequence: Synthetic oligonucleotide
  Antisense strand to SEQ ID NO: 1583387
agucaucgcuagauccgcg

SEQ ID NO: 1583389 - RNA, 19 nt, Artificial Sequence
  Description of Artificial Sequence: Synthetic oligonucleotide
  Sense strand starting at position 3709 of SEQ ID NO: 1560200
cggaucuagcgaugacuuu

SEQ ID NO: 1583390 - RNA, 19 nt, Artificial Sequence
  Description of Artificial Sequence: Synthetic oligonucleotide
  Antisense strand to SEQ ID NO: 1583389
aaagucaucgcuagauccg

SEQ ID NO: 1583391 - RNA, 19 nt, Artificial Sequence
  Description of Artificial Sequence: Synthetic oligonucleotide
  Sense strand starting at position 3716 of SEQ ID NO: 1560200
agcgaugacuuuccaacuu

SEQ ID NO: 1583392 - RNA, 19 nt, Artificial Sequence
  Description of Artificial Sequence: Synthetic oligonucleotide
  Antisense strand to SEQ ID NO: 1583391
aaguuggaaagucaucgcu

SEQ ID NO: 1583393 - RNA, 19 nt, Artificial Sequence
  Description of Artificial Sequence: Synthetic oligonucleotide
  Sense strand starting at position 3779 of SEQ ID NO: 1560200
uguuguugagacgaagacu

SEQ ID NO: 1583394 - RNA, 19 nt, Artificial Sequence
  Description of Artificial Sequence: Synthetic oligonucleotide
  Antisense strand to SEQ ID NO: 1583393
agucuucgucucaacaaca

SEQ ID NO: 1583395 - RNA, 19 nt, Artificial Sequence
  Description of Artificial Sequence: Synthetic oligonucleotide
  Sense strand starting at position 209 of SEQ ID NO: 1560201
cagucaguuggacaucuua

SEQ ID NO: 1583396 - RNA, 19 nt, Artificial Sequence
  Description of Artificial Sequence: Synthetic oligonucleotide
  Antisense strand to SEQ ID NO: 1583395
uaagauguccaacugacug

SEQ ID NO: 1583397 - RNA, 19 nt, Artificial Sequence
  Description of Artificial Sequence: Synthetic oligonucleotide
  Sense strand starting at position 220 of SEQ ID NO: 1560201
acaucuuaggcaugccaca

SEQ ID NO: 1583398 - RNA, 19 nt, Artificial Sequence
  Description of Artificial Sequence: Synthetic oligonucleotide
  Antisense strand to SEQ ID NO: 1583397
uguggcaugccuaagaugu

SEQ ID NO: 1583399 - RNA, 19 nt, Artificial Sequence
  Description of Artificial Sequence: Synthetic oligonucleotide
  Sense strand starting at position 722 of SEQ ID NO: 1560201
agaagcaucuucccaaaga

SEQ ID NO: 1583400 - RNA, 19 nt, Artificial Sequence
  Description of Artificial Sequence: Synthetic oligonucleotide
  Antisense strand to SEQ ID NO: 1583399
ucuuugggaagaugcuucu

SEQ ID NO: 1583401 - RNA, 19 nt, Artificial Sequence
  Description of Artificial Sequence: Synthetic oligonucleotide
  Sense strand starting at position 786 of SEQ ID NO: 1560201
cccaguacccuuggagaaa

SEQ ID NO: 1583402 - RNA, 19 nt, Artificial Sequence
  Description of Artificial Sequence: Synthetic oligonucleotide
  Antisense strand to SEQ ID NO: 1583401
uuucuccaaggguacuggg

SEQ ID NO: 1583403 - RNA, 19 nt, Artificial Sequence
  Description of Artificial Sequence: Synthetic oligonucleotide
  Sense strand starting at position 942 of SEQ ID NO: 1560201
uccuguuuccucuacagag

SEQ ID NO: 1583404 - RNA, 19 nt, Artificial Sequence
  Description of Artificial Sequence: Synthetic oligonucleotide
  Antisense strand to SEQ ID NO: 1583403
cucuguagaggaaacagga

SEQ ID NO: 1583405 - RNA, 19 nt, Artificial Sequence
  Description of Artificial Sequence: Synthetic oligonucleotide
  Sense strand starting at position 1010 of SEQ ID NO: 1560201
ucuccaugacuuugucuau

SEQ ID NO: 1583406 - RNA, 19 nt, Artificial Sequence
  Description of Artificial Sequence: Synthetic oligonucleotide
  Antisense strand to SEQ ID NO: 1583405
auagacaaagucauggaga

SEQ ID NO: 1583407 - RNA, 19 nt, Artificial Sequence
  Description of Artificial Sequence: Synthetic oligonucleotide
  Sense strand starting at position 1011 of SEQ ID NO: 1560201
cuccaugacuuugucuaua

SEQ ID NO: 1583408 - RNA, 19 nt, Artificial Sequence
  Description of Artificial Sequence: Synthetic oligonucleotide
  Antisense strand to SEQ ID NO: 1583407
uauagacaaagucauggag

SEQ ID NO: 1583409 - RNA, 19 nt, Artificial Sequence
  Description of Artificial Sequence: Synthetic oligonucleotide
  Sense strand starting at position 1013 of SEQ ID NO: 1560201
ccaugacuuugucuauacu

SEQ ID NO: 1583410 - RNA, 19 nt, Artificial Sequence
  Description of Artificial Sequence: Synthetic oligonucleotide
  Antisense strand to SEQ ID NO: 1583409
aguauagacaaagucaugg

SEQ ID NO: 1583411 - RNA, 19 nt, Artificial Sequence
  Description of Artificial Sequence: Synthetic oligonucleotide
  Sense strand starting at position 1137 of SEQ ID NO: 1560201
gggacuucugcccacaaca

SEQ ID NO: 1583412 - RNA, 19 nt, Artificial Sequence
  Description of Artificial Sequence: Synthetic oligonucleotide
  Antisense strand to SEQ ID NO: 1583411
uguugugggcagaaguccc

SEQ ID NO: 1583413 - RNA, 19 nt, Artificial Sequence
  Description of Artificial Sequence: Synthetic oligonucleotide
  Sense strand starting at position 1685 of SEQ ID NO: 1560201
caugacuucggcgaagaug

SEQ ID NO: 1583414 - RNA, 19 nt, Artificial Sequence
  Description of Artificial Sequence: Synthetic oligonucleotide
  Antisense strand to SEQ ID NO: 1583413
caucuucgccgaagucaug

SEQ ID NO: 1583415 - RNA, 19 nt, Artificial Sequence
  Description of Artificial Sequence: Synthetic oligonucleotide
  Sense strand starting at position 2184 of SEQ ID NO: 1560201
ccucgcuuuccugaccaua

SEQ ID NO: 1583416 - RNA, 19 nt, Artificial Sequence
  Description of Artificial Sequence: Synthetic oligonucleotide
  Antisense strand to SEQ ID NO: 1583415
uauggucaggaaagcgagg

SEQ ID NO: 1583417 - RNA, 19 nt, Artificial Sequence
  Description of Artificial Sequence: Synthetic oligonucleotide
  Sense strand starting at position 2196 of SEQ ID NO: 1560201
gaccauaaagucgggauga

SEQ ID NO: 1583418 - RNA, 19 nt, Artificial Sequence
  Description of Artificial Sequence: Synthetic oligonucleotide
  Antisense strand to SEQ ID NO: 1583417
ucaucccgacuuuaugguc

SEQ ID NO: 1583419 - RNA, 19 nt, Artificial Sequence
  Description of Artificial Sequence: Synthetic oligonucleotide
  Sense strand starting at position 2292 of SEQ ID NO: 1560201
guggugucggugucgcaau

SEQ ID NO: 1583420 - RNA, 19 nt, Artificial Sequence
  Description of Artificial Sequence: Synthetic oligonucleotide
  Antisense strand to SEQ ID NO: 1583419
auugcgacaccgacaccac

SEQ ID NO: 1583421 - RNA, 19 nt, Artificial Sequence
  Description of Artificial Sequence: Synthetic oligonucleotide
  Sense strand starting at position 2304 of SEQ ID NO: 1560201
ucgcaauggaauuggagau

SEQ ID NO: 1583422 - RNA, 19 nt, Artificial Sequence
  Description of Artificial Sequence: Synthetic oligonucleotide
  Antisense strand to SEQ ID NO: 1583421
aucuccaauuccauugcga

SEQ ID NO: 1583423 - RNA, 19 nt, Artificial Sequence
  Description of Artificial Sequence: Synthetic oligonucleotide
  Sense strand starting at position 2305 of SEQ ID NO: 1560201
cgcaauggaauuggagaua

SEQ ID NO: 1583424 - RNA, 19 nt, Artificial Sequence
  Description of Artificial Sequence: Synthetic oligonucleotide
  Antisense strand to SEQ ID NO: 1583423
uaucuccaauuccauugcg

SEQ ID NO: 1583425 - RNA, 19 nt, Artificial Sequence
  Description of Artificial Sequence: Synthetic oligonucleotide
  Sense strand starting at position 2331 of SEQ ID NO: 1560201
gugaacacaugguuguuua

SEQ ID NO: 1583426 - RNA, 19 nt, Artificial Sequence
  Description of Artificial Sequence: Synthetic oligonucleotide
  Antisense strand to SEQ ID NO: 1583425
uaaacaaccauguguucac

SEQ ID NO: 1583427 - RNA, 19 nt, Artificial Sequence
  Description of Artificial Sequence: Synthetic oligonucleotide
  Sense strand starting at position 2335 of SEQ ID NO: 1560201
acacaugguuguuuacaua

SEQ ID NO: 1583428 - RNA, 19 nt, Artificial Sequence
  Description of Artificial Sequence: Synthetic oligonucleotide
  Antisense strand to SEQ ID NO: 1583427
uauguaaacaaccaugugu

SEQ ID NO: 1583429 - RNA, 19 nt, Artificial Sequence
  Description of Artificial Sequence: Synthetic oligonucleotide
  Sense strand starting at position 2342 of SEQ ID NO: 1560201
guuguuuacauagaaguua

SEQ ID NO: 1583430 - RNA, 19 nt, Artificial Sequence
  Description of Artificial Sequence: Synthetic oligonucleotide
  Antisense strand to SEQ ID NO: 1583429
uaacuucuauguaaacaac

SEQ ID NO: 1583431 - RNA, 19 nt, Artificial Sequence
  Description of Artificial Sequence: Synthetic oligonucleotide
  Sense strand starting at position 2681 of SEQ ID NO: 1560201
uguguaugcaaacauguau

SEQ ID NO: 1583432 - RNA, 19 nt, Artificial Sequence
  Description of Artificial Sequence: Synthetic oligonucleotide
  Antisense strand to SEQ ID NO: 1583431
auacauguuugcauacaca

SEQ ID NO: 1583433 - RNA, 19 nt, Artificial Sequence
  Description of Artificial Sequence: Synthetic oligonucleotide
  Sense strand starting at position 2705 of SEQ ID NO: 1560201
agcuuaauccacugggaga

SEQ ID NO: 1583434 - RNA, 19 nt, Artificial Sequence
  Description of Artificial Sequence: Synthetic oligonucleotide
  Antisense strand to SEQ ID NO: 1583433
ucucccaguggauuaagcu

SEQ ID NO: 1583435 - RNA, 19 nt, Artificial Sequence
  Description of Artificial Sequence: Synthetic oligonucleotide
  Sense strand starting at position 2706 of SEQ ID NO: 1560201
gcuuaauccacugggagag

SEQ ID NO: 1583436 - RNA, 19 nt, Artificial Sequence
  Description of Artificial Sequence: Synthetic oligonucleotide
  Antisense strand to SEQ ID NO: 1583435
cucucccaguggauuaagc

SEQ ID NO: 1583437 - RNA, 19 nt, Artificial Sequence
  Description of Artificial Sequence: Synthetic oligonucleotide
  Sense strand starting at position 2830 of SEQ ID NO: 1560201
ggcugaucccagggucaua

SEQ ID NO: 1583438 - RNA, 19 nt, Artificial Sequence
  Description of Artificial Sequence: Synthetic oligonucleotide
  Antisense strand to SEQ ID NO: 1583437
uaugacccugggaucagcc

SEQ ID NO: 1583439 - RNA, 19 nt, Artificial Sequence
  Description of Artificial Sequence: Synthetic oligonucleotide
  Sense strand starting at position 2884 of SEQ ID NO: 1560201
ggcagaaagugucccaaca

SEQ ID NO: 1583440 - RNA, 19 nt, Artificial Sequence
  Description of Artificial Sequence: Synthetic oligonucleotide
  Antisense strand to SEQ ID NO: 1583439
uguugggacacuuucugcc

SEQ ID NO: 1583441 - RNA, 19 nt, Artificial Sequence
  Description of Artificial Sequence: Synthetic oligonucleotide
  Sense strand starting at position 2912 of SEQ ID NO: 1560201
gucacauagaugcagaagu

SEQ ID NO: 1583442 - RNA, 19 nt, Artificial Sequence
  Description of Artificial Sequence: Synthetic oligonucleotide
  Antisense strand to SEQ ID NO: 1583441
acuucugcaucuaugugac

SEQ ID NO: 1583443 - RNA, 19 nt, Artificial Sequence
  Description of Artificial Sequence: Synthetic oligonucleotide
  Sense strand starting at position 2922 of SEQ ID NO: 1560201
ugcagaagucacuagcuaa

SEQ ID NO: 1583444 - RNA, 19 nt, Artificial Sequence
  Description of Artificial Sequence: Synthetic oligonucleotide
  Antisense strand to SEQ ID NO: 1583443
uuagcuagugacuucugca

SEQ ID NO: 1583445 - RNA, 19 nt, Artificial Sequence
  Description of Artificial Sequence: Synthetic oligonucleotide
  Sense strand starting at position 2925 of SEQ ID NO: 1560201
agaagucacuagcuaaauc

SEQ ID NO: 1583446 - RNA, 19 nt, Artificial Sequence
  Description of Artificial Sequence: Synthetic oligonucleotide
  Antisense strand to SEQ ID NO: 1583445
gauuuagcuagugacuucu

SEQ ID NO: 1583447 - RNA, 19 nt, Artificial Sequence
  Description of Artificial Sequence: Synthetic oligonucleotide
  Sense strand starting at position 2953 of SEQ ID NO: 1560201
ugagcaucaagaugauagu

SEQ ID NO: 1583448 - RNA, 19 nt, Artificial Sequence
  Description of Artificial Sequence: Synthetic oligonucleotide
  Antisense strand to SEQ ID NO: 1583447
acuaucaucuugaugcuca

SEQ ID NO: 1583449 - RNA, 19 nt, Artificial Sequence
  Description of Artificial Sequence: Synthetic oligonucleotide
  Sense strand starting at position 3364 of SEQ ID NO: 1560201
ccaugacuggccgaacuaa

SEQ ID NO: 1583450 - RNA, 19 nt, Artificial Sequence
  Description of Artificial Sequence: Synthetic oligonucleotide
  Antisense strand to SEQ ID NO: 1583449
uuaguucggccagucaugg

SEQ ID NO: 1583451 - RNA, 19 nt, Artificial Sequence
  Description of Artificial Sequence: Synthetic oligonucleotide
  Sense strand starting at position 3458 of SEQ ID NO: 1560201
caaacuagugggugaacau

SEQ ID NO: 1583452 - RNA, 19 nt, Artificial Sequence
  Description of Artificial Sequence: Synthetic oligonucleotide
  Antisense strand to SEQ ID NO: 1583451
auguucacccacuaguuug

SEQ ID NO: 1583453 - RNA, 19 nt, Artificial Sequence
  Description of Artificial Sequence: Synthetic oligonucleotide
  Sense strand starting at position 3505 of SEQ ID NO: 1560201
gucucuacacaagauguuu

SEQ ID NO: 1583454 - RNA, 19 nt, Artificial Sequence
  Description of Artificial Sequence: Synthetic oligonucleotide
  Antisense strand to SEQ ID NO: 1583453
aaacaucuuguguagagac

SEQ ID NO: 1583455 - RNA, 19 nt, Artificial Sequence
  Description of Artificial Sequence: Synthetic oligonucleotide
  Sense strand starting at position 3513 of SEQ ID NO: 1560201
acaagauguuuauuaacug

SEQ ID NO: 1583456 - RNA, 19 nt, Artificial Sequence
  Description of Artificial Sequence: Synthetic oligonucleotide
  Antisense strand to SEQ ID NO: 1583455
caguuaauaaacaucuugu

SEQ ID NO: 1583457 - RNA, 19 nt, Artificial Sequence
  Description of Artificial Sequence: Synthetic oligonucleotide
  Sense strand starting at position 3520 of SEQ ID NO: 1560201
guuuauuaacuguguaaac

SEQ ID NO: 1583458 - RNA, 19 nt, Artificial Sequence
  Description of Artificial Sequence: Synthetic oligonucleotide
  Antisense strand to SEQ ID NO: 1583457
guuuacacaguuaauaaac

SEQ ID NO: 1583459 - RNA, 19 nt, Artificial Sequence
  Description of Artificial Sequence: Synthetic oligonucleotide
  Sense strand starting at position 3522 of SEQ ID NO: 1560201
uuauuaacuguguaaacca

SEQ ID NO: 1583460 - RNA, 19 nt, Artificial Sequence
  Description of Artificial Sequence: Synthetic oligonucleotide
  Antisense strand to SEQ ID NO: 1583459
ugguuuacacaguuaauaa

SEQ ID NO: 1583461 - RNA, 19 nt, Artificial Sequence
  Description of Artificial Sequence: Synthetic oligonucleotide
  Sense strand starting at position 3543 of SEQ ID NO: 1560201
agguaucugagauaggugu

SEQ ID NO: 1583462 - RNA, 19 nt, Artificial Sequence
  Description of Artificial Sequence: Synthetic oligonucleotide
  Antisense strand to SEQ ID NO: 1583461
acaccuaucucagauaccu

SEQ ID NO: 1583463 - RNA, 19 nt, Artificial Sequence
  Description of Artificial Sequence: Synthetic oligonucleotide
  Sense strand starting at position 3666 of SEQ ID NO: 1560201
augagacguccucaauaug

SEQ ID NO: 1583464 - RNA, 19 nt, Artificial Sequence
  Description of Artificial Sequence: Synthetic oligonucleotide
  Antisense strand to SEQ ID NO: 1583463
cauauugaggacgucucau

SEQ ID NO: 1583465 - RNA, 19 nt, Artificial Sequence
  Description of Artificial Sequence: Synthetic oligonucleotide
  Sense strand starting at position 3669 of SEQ ID NO: 1560201
agacguccucaauaugugu

SEQ ID NO: 1583466 - RNA, 19 nt, Artificial Sequence
  Description of Artificial Sequence: Synthetic oligonucleotide
  Antisense strand to SEQ ID NO: 1583465
acacauauugaggacgucu

SEQ ID NO: 1583467 - RNA, 19 nt, Artificial Sequence
  Description of Artificial Sequence: Synthetic oligonucleotide
  Sense strand starting at position 3838 of SEQ ID NO: 1560201
ccuagucugggucaaacaa

SEQ ID NO: 1583468 - RNA, 19 nt, Artificial Sequence
  Description of Artificial Sequence: Synthetic oligonucleotide
  Antisense strand to SEQ ID NO: 1583467
uuguuugacccagacuagg

SEQ ID NO: 1583469 - RNA, 19 nt, Artificial Sequence
  Description of Artificial Sequence: Synthetic oligonucleotide
  Sense strand starting at position 3926 of SEQ ID NO: 1560201
gucuucuguccacaaggaa

SEQ ID NO: 1583470 - RNA, 19 nt, Artificial Sequence
  Description of Artificial Sequence: Synthetic oligonucleotide
  Antisense strand to SEQ ID NO: 1583469
uuccuuguggacagaagac

SEQ ID NO: 1583471 - RNA, 19 nt, Artificial Sequence
  Description of Artificial Sequence: Synthetic oligonucleotide
  Sense strand starting at position 3963 of SEQ ID NO: 1560201
gagagacguaaguagcuuu

SEQ ID NO: 1583472 - RNA, 19 nt, Artificial Sequence
  Description of Artificial Sequence: Synthetic oligonucleotide
  Antisense strand to SEQ ID NO: 1583471
aaagcuacuuacgucucuc

SEQ ID NO: 1583473 - RNA, 19 nt, Artificial Sequence
  Description of Artificial Sequence: Synthetic oligonucleotide
  Sense strand starting at position 3966 of SEQ ID NO: 1560201
agacguaaguagcuuuaaa

SEQ ID NO: 1583474 - RNA, 19 nt, Artificial Sequence
  Description of Artificial Sequence: Synthetic oligonucleotide
  Antisense strand to SEQ ID NO: 1583473
uuuaaagcuacuuacgucu

SEQ ID NO: 1583475 - RNA, 19 nt, Artificial Sequence
  Description of Artificial Sequence: Synthetic oligonucleotide
  Sense strand starting at position 130 of SEQ ID NO: 1560202
ugugcaaauacguguaugu

SEQ ID NO: 1583476 - RNA, 19 nt, Artificial Sequence
  Description of Artificial Sequence: Synthetic oligonucleotide
  Antisense strand to SEQ ID NO: 1583475
acauacacguauuugcaca

SEQ ID NO: 1583477 - RNA, 19 nt, Artificial Sequence
  Description of Artificial Sequence: Synthetic oligonucleotide
  Sense strand starting at position 140 of SEQ ID NO: 1560202
cguguaugugcaugagauu

SEQ ID NO: 1583478 - RNA, 19 nt, Artificial Sequence
  Description of Artificial Sequence: Synthetic oligonucleotide
  Antisense strand to SEQ ID NO: 1583477
aaucucaugcacauacacg

SEQ ID NO: 1583479 - RNA, 19 nt, Artificial Sequence
  Description of Artificial Sequence: Synthetic oligonucleotide
  Sense strand starting at position 141 of SEQ ID NO: 1560202
guguaugugcaugagauug

SEQ ID NO: 1583480 - RNA, 19 nt, Artificial Sequence
  Description of Artificial Sequence: Synthetic oligonucleotide
  Antisense strand to SEQ ID NO: 1583479
caaucucaugcacauacac

SEQ ID NO: 1583481 - RNA, 19 nt, Artificial Sequence
  Description of Artificial Sequence: Synthetic oligonucleotide
  Sense strand starting at position 146 of SEQ ID NO: 1560202
ugugcaugagauuguacaa

SEQ ID NO: 1583482 - RNA, 19 nt, Artificial Sequence
  Description of Artificial Sequence: Synthetic oligonucleotide
  Antisense strand to SEQ ID NO: 1583481
uuguacaaucucaugcaca

SEQ ID NO: 1583483 - RNA, 19 nt, Artificial Sequence
  Description of Artificial Sequence: Synthetic oligonucleotide
  Sense strand starting at position 191 of SEQ ID NO: 1560202
cagagaauagcugggcaua

SEQ ID NO: 1583484 - RNA, 19 nt, Artificial Sequence
  Description of Artificial Sequence: Synthetic oligonucleotide
  Antisense strand to SEQ ID NO: 1583483
uaugcccagcuauucucug

SEQ ID NO: 1583485 - RNA, 19 nt, Artificial Sequence
  Description of Artificial Sequence: Synthetic oligonucleotide
  Sense strand starting at position 192 of SEQ ID NO: 1560202
agagaauagcugggcauau

SEQ ID NO: 1583486 - RNA, 19 nt, Artificial Sequence
  Description of Artificial Sequence: Synthetic oligonucleotide
  Antisense strand to SEQ ID NO: 1583485
auaugcccagcuauucucu

SEQ ID NO: 1583487 - RNA, 19 nt, Artificial Sequence
  Description of Artificial Sequence: Synthetic oligonucleotide
  Sense strand starting at position 193 of SEQ ID NO: 1560202
gagaauagcugggcauaug

SEQ ID NO: 1583488 - RNA, 19 nt, Artificial Sequence
  Description of Artificial Sequence: Synthetic oligonucleotide
  Antisense strand to SEQ ID NO: 1583487
cauaugcccagcuauucuc

SEQ ID NO: 1583489 - RNA, 19 nt, Artificial Sequence
  Description of Artificial Sequence: Synthetic oligonucleotide
  Sense strand starting at position 213 of SEQ ID NO: 1560202
cguuucuccaggugucaau

SEQ ID NO: 1583490 - RNA, 19 nt, Artificial Sequence
  Description of Artificial Sequence: Synthetic oligonucleotide
  Antisense strand to SEQ ID NO: 1583489
auugacaccuggagaaacg

SEQ ID NO: 1583491 - RNA, 19 nt, Artificial Sequence
  Description of Artificial Sequence: Synthetic oligonucleotide
  Sense strand starting at position 222 of SEQ ID NO: 1560202
aggugucaaugugugcaaa

SEQ ID NO: 1583492 - RNA, 19 nt, Artificial Sequence
  Description of Artificial Sequence: Synthetic oligonucleotide
  Antisense strand to SEQ ID NO: 1583491
uuugcacacauugacaccu

SEQ ID NO: 1583493 - RNA, 19 nt, Artificial Sequence
  Description of Artificial Sequence: Synthetic oligonucleotide
  Sense strand starting at position 223 of SEQ ID NO: 1560202
ggugucaaugugugcaaau

SEQ ID NO: 1583494 - RNA, 19 nt, Artificial Sequence
  Description of Artificial Sequence: Synthetic oligonucleotide
  Antisense strand to SEQ ID NO: 1583493
auuugcacacauugacacc

SEQ ID NO: 1583495 - RNA, 19 nt, Artificial Sequence
  Description of Artificial Sequence: Synthetic oligonucleotide
  Sense strand starting at position 224 of SEQ ID NO: 1560202
gugucaaugugugcaaaua

SEQ ID NO: 1583496 - RNA, 19 nt, Artificial Sequence
  Description of Artificial Sequence: Synthetic oligonucleotide
  Antisense strand to SEQ ID NO: 1583495
uauuugcacacauugacac

SEQ ID NO: 1583497 - RNA, 19 nt, Artificial Sequence
  Description of Artificial Sequence: Synthetic oligonucleotide
  Sense strand starting at position 225 of SEQ ID NO: 1560202
ugucaaugugugcaaauau

SEQ ID NO: 1583498 - RNA, 19 nt, Artificial Sequence
  Description of Artificial Sequence: Synthetic oligonucleotide
  Antisense strand to SEQ ID NO: 1583497
auauuugcacacauugaca

SEQ ID NO: 1583499 - RNA, 19 nt, Artificial Sequence
  Description of Artificial Sequence: Synthetic oligonucleotide
  Sense strand starting at position 240 of SEQ ID NO: 1560202
auauuuggcuucuaaugga

SEQ ID NO: 1583500 - RNA, 19 nt, Artificial Sequence
  Description of Artificial Sequence: Synthetic oligonucleotide
  Antisense strand to SEQ ID NO: 1583499
uccauuagaagccaaauau

SEQ ID NO: 1583501 - RNA, 19 nt, Artificial Sequence
  Description of Artificial Sequence: Synthetic oligonucleotide
  Sense strand starting at position 247 of SEQ ID NO: 1560202
gcuucuaauggagggauua

SEQ ID NO: 1583502 - RNA, 19 nt, Artificial Sequence
  Description of Artificial Sequence: Synthetic oligonucleotide
  Antisense strand to SEQ ID NO: 1583501
uaaucccuccauuagaagc

SEQ ID NO: 1583503 - RNA, 19 nt, Artificial Sequence
  Description of Artificial Sequence: Synthetic oligonucleotide
  Sense strand starting at position 312 of SEQ ID NO: 1560202
gcaggugugucugugacuu

SEQ ID NO: 1583504 - RNA, 19 nt, Artificial Sequence
  Description of Artificial Sequence: Synthetic oligonucleotide
  Antisense strand to SEQ ID NO: 1583503
aagucacagacacaccugc

SEQ ID NO: 1583505 - RNA, 19 nt, Artificial Sequence
  Description of Artificial Sequence: Synthetic oligonucleotide
  Sense strand starting at position 316 of SEQ ID NO: 1560202
gugugucugugacuuuaac

SEQ ID NO: 1583506 - RNA, 19 nt, Artificial Sequence
  Description of Artificial Sequence: Synthetic oligonucleotide
  Antisense strand to SEQ ID NO: 1583505
guuaaagucacagacacac

SEQ ID NO: 1583507 - RNA, 19 nt, Artificial Sequence
  Description of Artificial Sequence: Synthetic oligonucleotide
  Sense strand starting at position 327 of SEQ ID NO: 1560202
acuuuaacaccucggacuu

SEQ ID NO: 1583508 - RNA, 19 nt, Artificial Sequence
  Description of Artificial Sequence: Synthetic oligonucleotide
  Antisense strand to SEQ ID NO: 1583507
aaguccgagguguuaaagu

SEQ ID NO: 1583509 - RNA, 19 nt, Artificial Sequence
  Description of Artificial Sequence: Synthetic oligonucleotide
  Sense strand starting at position 360 of SEQ ID NO: 1560202
ccguucugugugagagugu

SEQ ID NO: 1583510 - RNA, 19 nt, Artificial Sequence
  Description of Artificial Sequence: Synthetic oligonucleotide
  Antisense strand to SEQ ID NO: 1583509
acacucucacacagaacgg

SEQ ID NO: 1583511 - RNA, 19 nt, Artificial Sequence
  Description of Artificial Sequence: Synthetic oligonucleotide
  Sense strand starting at position 394 of SEQ ID NO: 1560202
ugggugauggguugugaau

SEQ ID NO: 1583512 - RNA, 19 nt, Artificial Sequence
  Description of Artificial Sequence: Synthetic oligonucleotide
  Antisense strand to SEQ ID NO: 1583511
auucacaacccaucaccca

SEQ ID NO: 1583513 - RNA, 19 nt, Artificial Sequence
  Description of Artificial Sequence: Synthetic oligonucleotide
  Sense strand starting at position 416 of SEQ ID NO: 1560202
gacaguguuuguucggaug

SEQ ID NO: 1583514 - RNA, 19 nt, Artificial Sequence
  Description of Artificial Sequence: Synthetic oligonucleotide
  Antisense strand to SEQ ID NO: 1583513
cauccgaacaaacacuguc

SEQ ID NO: 1583515 - RNA, 19 nt, Artificial Sequence
  Description of Artificial Sequence: Synthetic oligonucleotide
  Sense strand starting at position 450 of SEQ ID NO: 1560202
gugagaauuugagcacgug

SEQ ID NO: 1583516 - RNA, 19 nt, Artificial Sequence
  Description of Artificial Sequence: Synthetic oligonucleotide
  Antisense strand to SEQ ID NO: 1583515
cacgugcucaaauucucac

SEQ ID NO: 1583517 - RNA, 19 nt, Artificial Sequence
  Description of Artificial Sequence: Synthetic oligonucleotide
  Sense strand starting at position 565 of SEQ ID NO: 1560202
cagaguggaugccuaagau

SEQ ID NO: 1583518 - RNA, 19 nt, Artificial Sequence
  Description of Artificial Sequence: Synthetic oligonucleotide
  Antisense strand to SEQ ID NO: 1583517
aucuuaggcauccacucug

SEQ ID NO: 1583519 - RNA, 19 nt, Artificial Sequence
  Description of Artificial Sequence: Synthetic oligonucleotide
  Sense strand starting at position 622 of SEQ ID NO: 1560202
auaguccaaucagggauua

SEQ ID NO: 1583520 - RNA, 19 nt, Artificial Sequence
  Description of Artificial Sequence: Synthetic oligonucleotide
  Antisense strand to SEQ ID NO: 1583519
uaaucccugauuggacuau

SEQ ID NO: 1583521 - RNA, 19 nt, Artificial Sequence
  Description of Artificial Sequence: Synthetic oligonucleotide
  Sense strand starting at position 623 of SEQ ID NO: 1560202
uaguccaaucagggauuaa

SEQ ID NO: 1583522 - RNA, 19 nt, Artificial Sequence
  Description of Artificial Sequence: Synthetic oligonucleotide
  Antisense strand to SEQ ID NO: 1583521
uuaaucccugauuggacua

SEQ ID NO: 1583523 - RNA, 19 nt, Artificial Sequence
  Description of Artificial Sequence: Synthetic oligonucleotide
  Sense strand starting at position 779 of SEQ ID NO: 1560202
agucuagggucucucagau

SEQ ID NO: 1583524 - RNA, 19 nt, Artificial Sequence
  Description of Artificial Sequence: Synthetic oligonucleotide
  Antisense strand to SEQ ID NO: 1583523
aucugagagacccuagacu

SEQ ID NO: 1583525 - RNA, 19 nt, Artificial Sequence
  Description of Artificial Sequence: Synthetic oligonucleotide
  Sense strand starting at position 971 of SEQ ID NO: 1560202
cugagaaauuccucgggaa

SEQ ID NO: 1583526 - RNA, 19 nt, Artificial Sequence
  Description of Artificial Sequence: Synthetic oligonucleotide
  Antisense strand to SEQ ID NO: 1583525
uucccgaggaauuucucag

SEQ ID NO: 1583527 - RNA, 19 nt, Artificial Sequence
  Description of Artificial Sequence: Synthetic oligonucleotide
  Sense strand starting at position 1248 of SEQ ID NO: 1560202
aacuguggguucccgaaga

SEQ ID NO: 1583528 - RNA, 19 nt, Artificial Sequence
  Description of Artificial Sequence: Synthetic oligonucleotide
  Antisense strand to SEQ ID NO: 1583527
ucuucgggaacccacaguu

SEQ ID NO: 1583529 - RNA, 19 nt, Artificial Sequence
  Description of Artificial Sequence: Synthetic oligonucleotide
  Sense strand starting at position 1308 of SEQ ID NO: 1560202
ggcaauuauuugcacccaa

SEQ ID NO: 1583530 - RNA, 19 nt, Artificial Sequence
  Description of Artificial Sequence: Synthetic oligonucleotide
  Antisense strand to SEQ ID NO: 1583529
uugggugcaaauaauugcc

SEQ ID NO: 1583531 - RNA, 19 nt, Artificial Sequence
  Description of Artificial Sequence: Synthetic oligonucleotide
  Sense strand starting at position 2126 of SEQ ID NO: 1560202
uugggaaacuuugugcuga

SEQ ID NO: 1583532 - RNA, 19 nt, Artificial Sequence
  Description of Artificial Sequence: Synthetic oligonucleotide
  Antisense strand to SEQ ID NO: 1583531
ucagcacaaaguuucccaa

SEQ ID NO: 1583533 - RNA, 19 nt, Artificial Sequence
  Description of Artificial Sequence: Synthetic oligonucleotide
  Sense strand starting at position 2333 of SEQ ID NO: 1560202
ccauccaggcccuagaauu

SEQ ID NO: 1583534 - RNA, 19 nt, Artificial Sequence
  Description of Artificial Sequence: Synthetic oligonucleotide
  Antisense strand to SEQ ID NO: 1583533
aauucuagggccuggaugg

SEQ ID NO: 1583535 - RNA, 19 nt, Artificial Sequence
  Description of Artificial Sequence: Synthetic oligonucleotide
  Sense strand starting at position 3454 of SEQ ID NO: 1560202
ggaaucugucccugucgca

SEQ ID NO: 1583536 - RNA, 19 nt, Artificial Sequence
  Description of Artificial Sequence: Synthetic oligonucleotide
  Antisense strand to SEQ ID NO: 1583535
ugcgacagggacagauucc

SEQ ID NO: 1583537 - RNA, 19 nt, Artificial Sequence
  Description of Artificial Sequence: Synthetic oligonucleotide
  Sense strand starting at position 3502 of SEQ ID NO: 1560202
gguggauucuugccauucu

SEQ ID NO: 1583538 - RNA, 19 nt, Artificial Sequence
  Description of Artificial Sequence: Synthetic oligonucleotide
  Antisense strand to SEQ ID NO: 1583537
agaauggcaagaauccacc

SEQ ID NO: 1583539 - RNA, 19 nt, Artificial Sequence
  Description of Artificial Sequence: Synthetic oligonucleotide
  Sense strand starting at position 3510 of SEQ ID NO: 1560202
cuugccauucuugggauga

SEQ ID NO: 1583540 - RNA, 19 nt, Artificial Sequence
  Description of Artificial Sequence: Synthetic oligonucleotide
  Antisense strand to SEQ ID NO: 1583539
ucaucccaagaauggcaag

SEQ ID NO: 1583541 - RNA, 19 nt, Artificial Sequence
  Description of Artificial Sequence: Synthetic oligonucleotide
  Sense strand starting at position 3514 of SEQ ID NO: 1560202
ccauucuugggaugaggca

SEQ ID NO: 1583542 - RNA, 19 nt, Artificial Sequence
  Description of Artificial Sequence: Synthetic oligonucleotide
  Antisense strand to SEQ ID NO: 1583541
ugccucaucccaagaaugg

SEQ ID NO: 1583543 - RNA, 19 nt, Artificial Sequence
  Description of Artificial Sequence: Synthetic oligonucleotide
  Sense strand starting at position 3673 of SEQ ID NO: 1560202
ggcguauucugagcccuga

SEQ ID NO: 1583544 - RNA, 19 nt, Artificial Sequence
  Description of Artificial Sequence: Synthetic oligonucleotide
  Antisense strand to SEQ ID NO: 1583543
ucagggcucagaauacgcc

SEQ ID NO: 1583545 - RNA, 19 nt, Artificial Sequence
  Description of Artificial Sequence: Synthetic oligonucleotide
  Sense strand starting at position 3867 of SEQ ID NO: 1560202
aggagaggguaucucugua

SEQ ID NO: 1583546 - RNA, 19 nt, Artificial Sequence
  Description of Artificial Sequence: Synthetic oligonucleotide
  Antisense strand to SEQ ID NO: 1583545
uacagagauacccucuccu

SEQ ID NO: 1583547 - RNA, 19 nt, Artificial Sequence
  Description of Artificial Sequence: Synthetic oligonucleotide
  Sense strand starting at position 3871 of SEQ ID NO: 1560202
gaggguaucucuguaagcu

SEQ ID NO: 1583548 - RNA, 19 nt, Artificial Sequence
  Description of Artificial Sequence: Synthetic oligonucleotide
  Antisense strand to SEQ ID NO: 1583547
agcuuacagagauacccuc

SEQ ID NO: 1583549 - RNA, 19 nt, Artificial Sequence
  Description of Artificial Sequence: Synthetic oligonucleotide
  Sense strand starting at position 3872 of SEQ ID NO: 1560202
aggguaucucuguaagcug

SEQ ID NO: 1583550 - RNA, 19 nt, Artificial Sequence
  Description of Artificial Sequence: Synthetic oligonucleotide
  Antisense strand to SEQ ID NO: 1583549
cagcuuacagagauacccu

SEQ ID NO: 1583551 - RNA, 19 nt, Artificial Sequence
  Description of Artificial Sequence: Synthetic oligonucleotide
  Sense strand starting at position 3919 of SEQ ID NO: 1560202
ggcugagacuucuccaacu

SEQ ID NO: 1583552 - RNA, 19 nt, Artificial Sequence
  Description of Artificial Sequence: Synthetic oligonucleotide
  Antisense strand to SEQ ID NO: 1583551
aguuggagaagucucagcc

SEQ ID NO: 1583553 - RNA, 19 nt, Artificial Sequence
  Description of Artificial Sequence: Synthetic oligonucleotide
  Sense strand starting at position 3975 of SEQ ID NO: 1560202
gcuggaaguucuuccuaua

SEQ ID NO: 1583554 - RNA, 19 nt, Artificial Sequence
  Description of Artificial Sequence: Synthetic oligonucleotide
  Antisense strand to SEQ ID NO: 1583553
uauaggaagaacuuccagc

SEQ ID NO: 1583555 - RNA, 19 nt, Artificial Sequence
  Description of Artificial Sequence: Synthetic oligonucleotide
  Sense strand starting at position 367 of SEQ ID NO: 1560203
gagcaagauuccgucugag

SEQ ID NO: 1583556 - RNA, 19 nt, Artificial Sequence
  Description of Artificial Sequence: Synthetic oligonucleotide
  Antisense strand to SEQ ID NO: 1583555
cucagacggaaucuugcuc

SEQ ID NO: 1583557 - RNA, 19 nt, Artificial Sequence
  Description of Artificial Sequence: Synthetic oligonucleotide
  Sense strand starting at position 370 of SEQ ID NO: 1560203
caagauuccgucugagaga

SEQ ID NO: 1583558 - RNA, 19 nt, Artificial Sequence
  Description of Artificial Sequence: Synthetic oligonucleotide
  Antisense strand to SEQ ID NO: 1583557
ucucucagacggaaucuug

SEQ ID NO: 1583559 - RNA, 19 nt, Artificial Sequence
  Description of Artificial Sequence: Synthetic oligonucleotide
  Sense strand starting at position 371 of SEQ ID NO: 1560203
aagauuccgucugagagaa

SEQ ID NO: 1583560 - RNA, 19 nt, Artificial Sequence
  Description of Artificial Sequence: Synthetic oligonucleotide
  Antisense strand to SEQ ID NO: 1583559
uucucucagacggaaucuu

SEQ ID NO: 1583561 - RNA, 19 nt, Artificial Sequence
  Description of Artificial Sequence: Synthetic oligonucleotide
  Sense strand starting at position 469 of SEQ ID NO: 1560203
gugggcugcagucaauuau

SEQ ID NO: 1583562 - RNA, 19 nt, Artificial Sequence
  Description of Artificial Sequence: Synthetic oligonucleotide
  Antisense strand to SEQ ID NO: 1583561
auaauugacugcagcccac

SEQ ID NO: 1583563 - RNA, 19 nt, Artificial Sequence
  Description of Artificial Sequence: Synthetic oligonucleotide
  Sense strand starting at position 561 of SEQ ID NO: 1560203
aagcgacauuugggaguuu

SEQ ID NO: 1583564 - RNA, 19 nt, Artificial Sequence
  Description of Artificial Sequence: Synthetic oligonucleotide
  Antisense strand to SEQ ID NO: 1583563
aaacucccaaaugucgcuu

SEQ ID NO: 1583565 - RNA, 19 nt, Artificial Sequence
  Description of Artificial Sequence: Synthetic oligonucleotide
  Sense strand starting at position 562 of SEQ ID NO: 1560203
agcgacauuugggaguuua

SEQ ID NO: 1583566 - RNA, 19 nt, Artificial Sequence
  Description of Artificial Sequence: Synthetic oligonucleotide
  Antisense strand to SEQ ID NO: 1583565
uaaacucccaaaugucgcu

SEQ ID NO: 1583567 - RNA, 19 nt, Artificial Sequence
  Description of Artificial Sequence: Synthetic oligonucleotide
  Sense strand starting at position 572 of SEQ ID NO: 1560203
gggaguuuaguuugaccgu

SEQ ID NO: 1583568 - RNA, 19 nt, Artificial Sequence
  Description of Artificial Sequence: Synthetic oligonucleotide
  Antisense strand to SEQ ID NO: 1583567
acggucaaacuaaacuccc

SEQ ID NO: 1583569 - RNA, 19 nt, Artificial Sequence
  Description of Artificial Sequence: Synthetic oligonucleotide
  Sense strand starting at position 573 of SEQ ID NO: 1560203
ggaguuuaguuugaccgua

SEQ ID NO: 1583570 - RNA, 19 nt, Artificial Sequence
  Description of Artificial Sequence: Synthetic oligonucleotide
  Antisense strand to SEQ ID NO: 1583569
uacggucaaacuaaacucc

SEQ ID NO: 1583571 - RNA, 19 nt, Artificial Sequence
  Description of Artificial Sequence: Synthetic oligonucleotide
  Sense strand starting at position 575 of SEQ ID NO: 1560203
aguuuaguuugaccguagu

SEQ ID NO: 1583572 - RNA, 19 nt, Artificial Sequence
  Description of Artificial Sequence: Synthetic oligonucleotide
  Antisense strand to SEQ ID NO: 1583571
acuacggucaaacuaaacu

SEQ ID NO: 1583573 - RNA, 19 nt, Artificial Sequence
  Description of Artificial Sequence: Synthetic oligonucleotide
  Sense strand starting at position 1043 of SEQ ID NO: 1560203
aggauuacugcgugagcca

SEQ ID NO: 1583574 - RNA, 19 nt, Artificial Sequence
  Description of Artificial Sequence: Synthetic oligonucleotide
  Antisense strand to SEQ ID NO: 1583573
uggcucacgcaguaauccu

SEQ ID NO: 1583575 - RNA, 19 nt, Artificial Sequence
  Description of Artificial Sequence: Synthetic oligonucleotide
  Sense strand starting at position 1106 of SEQ ID NO: 1560203
gugagaagucaccagucaa

SEQ ID NO: 1583576 - RNA, 19 nt, Artificial Sequence
  Description of Artificial Sequence: Synthetic oligonucleotide
  Antisense strand to SEQ ID NO: 1583575
uugacuggugacuucucac

SEQ ID NO: 1583577 - RNA, 19 nt, Artificial Sequence
  Description of Artificial Sequence: Synthetic oligonucleotide
  Sense strand starting at position 1279 of SEQ ID NO: 1560203
cacagaaaggcuugcuguu

SEQ ID NO: 1583578 - RNA, 19 nt, Artificial Sequence
  Description of Artificial Sequence: Synthetic oligonucleotide
  Antisense strand to SEQ ID NO: 1583577
aacagcaagccuuucugug

SEQ ID NO: 1583579 - RNA, 19 nt, Artificial Sequence
  Description of Artificial Sequence: Synthetic oligonucleotide
  Sense strand starting at position 1285 of SEQ ID NO: 1560203
aaggcuugcuguuagaugu

SEQ ID NO: 1583580 - RNA, 19 nt, Artificial Sequence
  Description of Artificial Sequence: Synthetic oligonucleotide
  Antisense strand to SEQ ID NO: 1583579
acaucuaacagcaagccuu

SEQ ID NO: 1583581 - RNA, 19 nt, Artificial Sequence
  Description of Artificial Sequence: Synthetic oligonucleotide
  Sense strand starting at position 1573 of SEQ ID NO: 1560203
ugcguagaaccgucccgau

SEQ ID NO: 1583582 - RNA, 19 nt, Artificial Sequence
  Description of Artificial Sequence: Synthetic oligonucleotide
  Antisense strand to SEQ ID NO: 1583581
aucgggacgguucuacgca

SEQ ID NO: 1583583 - RNA, 19 nt, Artificial Sequence
  Description of Artificial Sequence: Synthetic oligonucleotide
  Sense strand starting at position 1994 of SEQ ID NO: 1560203
ccacgcgucuccuuuaagu

SEQ ID NO: 1583584 - RNA, 19 nt, Artificial Sequence
  Description of Artificial Sequence: Synthetic oligonucleotide
  Antisense strand to SEQ ID NO: 1583583
acuuaaaggagacgcgugg

SEQ ID NO: 1583585 - RNA, 19 nt, Artificial Sequence
  Description of Artificial Sequence: Synthetic oligonucleotide
  Sense strand starting at position 2454 of SEQ ID NO: 1560203
aucucacagggaugucauu

SEQ ID NO: 1583586 - RNA, 19 nt, Artificial Sequence
  Description of Artificial Sequence: Synthetic oligonucleotide
  Antisense strand to SEQ ID NO: 1583585
aaugacaucccugugagau

SEQ ID NO: 1583587 - RNA, 19 nt, Artificial Sequence
  Description of Artificial Sequence: Synthetic oligonucleotide
  Sense strand starting at position 2460 of SEQ ID NO: 1560203
cagggaugucauugagggu

SEQ ID NO: 1583588 - RNA, 19 nt, Artificial Sequence
  Description of Artificial Sequence: Synthetic oligonucleotide
  Antisense strand to SEQ ID NO: 1583587
acccucaaugacaucccug

SEQ ID NO: 1583589 - RNA, 19 nt, Artificial Sequence
  Description of Artificial Sequence: Synthetic oligonucleotide
  Sense strand starting at position 2463 of SEQ ID NO: 1560203
ggaugucauugaggguugu

SEQ ID NO: 1583590 - RNA, 19 nt, Artificial Sequence
  Description of Artificial Sequence: Synthetic oligonucleotide
  Antisense strand to SEQ ID NO: 1583589
acaacccucaaugacaucc

SEQ ID NO: 1583591 - RNA, 19 nt, Artificial Sequence
  Description of Artificial Sequence: Synthetic oligonucleotide
  Sense strand starting at position 2469 of SEQ ID NO: 1560203
cauugaggguuguggagaa

SEQ ID NO: 1583592 - RNA, 19 nt, Artificial Sequence
  Description of Artificial Sequence: Synthetic oligonucleotide
  Antisense strand to SEQ ID NO: 1583591
uucuccacaacccucaaug

SEQ ID NO: 1583593 - RNA, 19 nt, Artificial Sequence
  Description of Artificial Sequence: Synthetic oligonucleotide
  Sense strand starting at position 2485 of SEQ ID NO: 1560203
gaauaaaggucaugacguc

SEQ ID NO: 1583594 - RNA, 19 nt, Artificial Sequence
  Description of Artificial Sequence: Synthetic oligonucleotide
  Antisense strand to SEQ ID NO: 1583593
gacgucaugaccuuuauuc

SEQ ID NO: 1583595 - RNA, 19 nt, Artificial Sequence
  Description of Artificial Sequence: Synthetic oligonucleotide
  Sense strand starting at position 2530 of SEQ ID NO: 1560203
ccgccuugggcuugcuaua

SEQ ID NO: 1583596 - RNA, 19 nt, Artificial Sequence
  Description of Artificial Sequence: Synthetic oligonucleotide
  Antisense strand to SEQ ID NO: 1583595
uauagcaagcccaaggcgg

SEQ ID NO: 1583597 - RNA, 19 nt, Artificial Sequence
  Description of Artificial Sequence: Synthetic oligonucleotide
  Sense strand starting at position 2531 of SEQ ID NO: 1560203
cgccuugggcuugcuauau

SEQ ID NO: 1583598 - RNA, 19 nt, Artificial Sequence
  Description of Artificial Sequence: Synthetic oligonucleotide
  Antisense strand to SEQ ID NO: 1583597
auauagcaagcccaaggcg

SEQ ID NO: 1583599 - RNA, 19 nt, Artificial Sequence
  Description of Artificial Sequence: Synthetic oligonucleotide
  Sense strand starting at position 2535 of SEQ ID NO: 1560203
uugggcuugcuauauguga

SEQ ID NO: 1583600 - RNA, 19 nt, Artificial Sequence
  Description of Artificial Sequence: Synthetic oligonucleotide
  Antisense strand to SEQ ID NO: 1583599
ucacauauagcaagcccaa

SEQ ID NO: 1583601 - RNA, 19 nt, Artificial Sequence
  Description of Artificial Sequence: Synthetic oligonucleotide
  Sense strand starting at position 2554 of SEQ ID NO: 1560203
gccucagucuguccaucua

SEQ ID NO: 1583602 - RNA, 19 nt, Artificial Sequence
  Description of Artificial Sequence: Synthetic oligonucleotide
  Antisense strand to SEQ ID NO: 1583601
uagauggacagacugaggc

SEQ ID NO: 1583603 - RNA, 19 nt, Artificial Sequence
  Description of Artificial Sequence: Synthetic oligonucleotide
  Sense strand starting at position 2615 of SEQ ID NO: 1560203
agagccagggcaugauaau

SEQ ID NO: 1583604 - RNA, 19 nt, Artificial Sequence
  Description of Artificial Sequence: Synthetic oligonucleotide
  Antisense strand to SEQ ID NO: 1583603
auuaucaugcccuggcucu

SEQ ID NO: 1583605 - RNA, 19 nt, Artificial Sequence
  Description of Artificial Sequence: Synthetic oligonucleotide
  Sense strand starting at position 3254 of SEQ ID NO: 1560203
guggcaugaucacaugauc

SEQ ID NO: 1583606 - RNA, 19 nt, Artificial Sequence
  Description of Artificial Sequence: Synthetic oligonucleotide
  Antisense strand to SEQ ID NO: 1583605
gaucaugugaucaugccac

SEQ ID NO: 1583607 - RNA, 19 nt, Artificial Sequence
  Description of Artificial Sequence: Synthetic oligonucleotide
  Sense strand starting at position 3473 of SEQ ID NO: 1560203
ugggauuaccagugagcca

SEQ ID NO: 1583608 - RNA, 19 nt, Artificial Sequence
  Description of Artificial Sequence: Synthetic oligonucleotide
  Antisense strand to SEQ ID NO: 1583607
uggcucacugguaauccca

SEQ ID NO: 1583609 - RNA, 19 nt, Artificial Sequence
  Description of Artificial Sequence: Synthetic oligonucleotide
  Sense strand starting at position 3474 of SEQ ID NO: 1560203
gggauuaccagugagccau

SEQ ID NO: 1583610 - RNA, 19 nt, Artificial Sequence
  Description of Artificial Sequence: Synthetic oligonucleotide
  Antisense strand to SEQ ID NO: 1583609
auggcucacugguaauccc

SEQ ID NO: 1583611 - RNA, 19 nt, Artificial Sequence
  Description of Artificial Sequence: Synthetic oligonucleotide
  Sense strand starting at position 3679 of SEQ ID NO: 1560203
uggcgcuucgccuguaauc

SEQ ID NO: 1583612 - RNA, 19 nt, Artificial Sequence
  Description of Artificial Sequence: Synthetic oligonucleotide
  Antisense strand to SEQ ID NO: 1583611
gauuacaggcgaagcgcca

SEQ ID NO: 1583613 - RNA, 19 nt, Artificial Sequence
  Description of Artificial Sequence: Synthetic oligonucleotide
  Sense strand starting at position 57 of SEQ ID NO: 1560204
uagugucucggauguggaa

SEQ ID NO: 1583614 - RNA, 19 nt, Artificial Sequence
  Description of Artificial Sequence: Synthetic oligonucleotide
  Antisense strand to SEQ ID NO: 1583613
uuccacauccgagacacua

SEQ ID NO: 1583615 - RNA, 19 nt, Artificial Sequence
  Description of Artificial Sequence: Synthetic oligonucleotide
  Sense strand starting at position 139 of SEQ ID NO: 1560204
gcacgacuuugccuugaug

SEQ ID NO: 1583616 - RNA, 19 nt, Artificial Sequence
  Description of Artificial Sequence: Synthetic oligonucleotide
  Antisense strand to SEQ ID NO: 1583615
caucaaggcaaagucgugc

SEQ ID NO: 1583617 - RNA, 19 nt, Artificial Sequence
  Description of Artificial Sequence: Synthetic oligonucleotide
  Sense strand starting at position 141 of SEQ ID NO: 1560204
acgacuuugccuugaugac

SEQ ID NO: 1583618 - RNA, 19 nt, Artificial Sequence
  Description of Artificial Sequence: Synthetic oligonucleotide
  Antisense strand to SEQ ID NO: 1583617
gucaucaaggcaaagucgu

SEQ ID NO: 1583619 - RNA, 19 nt, Artificial Sequence
  Description of Artificial Sequence: Synthetic oligonucleotide
  Sense strand starting at position 402 of SEQ ID NO: 1560204
gggcgucacuagcuaugua

SEQ ID NO: 1583620 - RNA, 19 nt, Artificial Sequence
  Description of Artificial Sequence: Synthetic oligonucleotide
  Antisense strand to SEQ ID NO: 1583619
uacauagcuagugacgccc

SEQ ID NO: 1583621 - RNA, 19 nt, Artificial Sequence
  Description of Artificial Sequence: Synthetic oligonucleotide
  Sense strand starting at position 933 of SEQ ID NO: 1560204
gcccgaaauccugcgcugu

SEQ ID NO: 1583622 - RNA, 19 nt, Artificial Sequence
  Description of Artificial Sequence: Synthetic oligonucleotide
  Antisense strand to SEQ ID NO: 1583621
acagcgcaggauuucgggc

SEQ ID NO: 1583623 - RNA, 19 nt, Artificial Sequence
  Description of Artificial Sequence: Synthetic oligonucleotide
  Sense strand starting at position 1293 of SEQ ID NO: 1560204
acgugaucucccugaccug

SEQ ID NO: 1583624 - RNA, 19 nt, Artificial Sequence
  Description of Artificial Sequence: Synthetic oligonucleotide
  Antisense strand to SEQ ID NO: 1583623
caggucagggagaucacgu

SEQ ID NO: 1583625 - RNA, 19 nt, Artificial Sequence
  Description of Artificial Sequence: Synthetic oligonucleotide
  Sense strand starting at position 1592 of SEQ ID NO: 1560204
ccugcaguucccgaagcau

SEQ ID NO: 1583626 - RNA, 19 nt, Artificial Sequence
  Description of Artificial Sequence: Synthetic oligonucleotide
  Antisense strand to SEQ ID NO: 1583625
augcuucgggaacugcagg

SEQ ID NO: 1583627 - RNA, 19 nt, Artificial Sequence
  Description of Artificial Sequence: Synthetic oligonucleotide
  Sense strand starting at position 2420 of SEQ ID NO: 1560204
ggcuauguccugcaggcua

SEQ ID NO: 1583628 - RNA, 19 nt, Artificial Sequence
  Description of Artificial Sequence: Synthetic oligonucleotide
  Antisense strand to SEQ ID NO: 1583627
uagccugcaggacauagcc

SEQ ID NO: 1583629 - RNA, 19 nt, Artificial Sequence
  Description of Artificial Sequence: Synthetic oligonucleotide
  Sense strand starting at position 2431 of SEQ ID NO: 1560204
gcaggcuaguagucucaaa

SEQ ID NO: 1583630 - RNA, 19 nt, Artificial Sequence
  Description of Artificial Sequence: Synthetic oligonucleotide
  Antisense strand to SEQ ID NO: 1583629
uuugagacuacuagccugc

SEQ ID NO: 1583631 - RNA, 19 nt, Artificial Sequence
  Description of Artificial Sequence: Synthetic oligonucleotide
  Sense strand starting at position 2537 of SEQ ID NO: 1560204
gugcuugcuguaugccaaa

SEQ ID NO: 1583632 - RNA, 19 nt, Artificial Sequence
  Description of Artificial Sequence: Synthetic oligonucleotide
  Antisense strand to SEQ ID NO: 1583631
uuuggcauacagcaagcac

SEQ ID NO: 1583633 - RNA, 19 nt, Artificial Sequence
  Description of Artificial Sequence: Synthetic oligonucleotide
  Sense strand starting at position 2603 of SEQ ID NO: 1560204
gcucacacuucgggaaaca

SEQ ID NO: 1583634 - RNA, 19 nt, Artificial Sequence
  Description of Artificial Sequence: Synthetic oligonucleotide
  Antisense strand to SEQ ID NO: 1583633
uguuucccgaagugugagc

SEQ ID NO: 1583635 - RNA, 19 nt, Artificial Sequence
  Description of Artificial Sequence: Synthetic oligonucleotide
  Sense strand starting at position 2856 of SEQ ID NO: 1560204
gcguaauuccucccuugca

SEQ ID NO: 1583636 - RNA, 19 nt, Artificial Sequence
  Description of Artificial Sequence: Synthetic oligonucleotide
  Antisense strand to SEQ ID NO: 1583635
ugcaagggaggaauuacgc

SEQ ID NO: 1583637 - RNA, 19 nt, Artificial Sequence
  Description of Artificial Sequence: Synthetic oligonucleotide
  Sense strand starting at position 2870 of SEQ ID NO: 1560204
uugcacaauggagguaaua

SEQ ID NO: 1583638 - RNA, 19 nt, Artificial Sequence
  Description of Artificial Sequence: Synthetic oligonucleotide
  Antisense strand to SEQ ID NO: 1583637
uauuaccuccauugugcaa

SEQ ID NO: 1583639 - RNA, 19 nt, Artificial Sequence
  Description of Artificial Sequence: Synthetic oligonucleotide
  Sense strand starting at position 3298 of SEQ ID NO: 1560204
gugggaacagccuguaaua

SEQ ID NO: 1583640 - RNA, 19 nt, Artificial Sequence
  Description of Artificial Sequence: Synthetic oligonucleotide
  Antisense strand to SEQ ID NO: 1583639
uauuacaggcuguucccac

SEQ ID NO: 1583641 - RNA, 19 nt, Artificial Sequence
  Description of Artificial Sequence: Synthetic oligonucleotide
  Sense strand starting at position 3342 of SEQ ID NO: 1560204
cagccacacucuggaguua

SEQ ID NO: 1583642 - RNA, 19 nt, Artificial Sequence
  Description of Artificial Sequence: Synthetic oligonucleotide
  Antisense strand to SEQ ID NO: 1583641
uaacuccagaguguggcug

SEQ ID NO: 1583643 - RNA, 19 nt, Artificial Sequence
  Description of Artificial Sequence: Synthetic oligonucleotide
  Sense strand starting at position 3423 of SEQ ID NO: 1560204
gcgucuauucuauagacag

SEQ ID NO: 1583644 - RNA, 19 nt, Artificial Sequence
  Description of Artificial Sequence: Synthetic oligonucleotide
  Antisense strand to SEQ ID NO: 1583643
cugucuauagaauagacgc

SEQ ID NO: 1583645 - RNA, 19 nt, Artificial Sequence
  Description of Artificial Sequence: Synthetic oligonucleotide
  Sense strand starting at position 3510 of SEQ ID NO: 1560204
gacucagagccagauaugu

SEQ ID NO: 1583646 - RNA, 19 nt, Artificial Sequence
  Description of Artificial Sequence: Synthetic oligonucleotide
  Antisense strand to SEQ ID NO: 1583645
acauaucuggcucugaguc

SEQ ID NO: 1583647 - RNA, 19 nt, Artificial Sequence
  Description of Artificial Sequence: Synthetic oligonucleotide
  Sense strand starting at position 3713 of SEQ ID NO: 1560204
caaggacuguuguguguca

SEQ ID NO: 1583648 - RNA, 19 nt, Artificial Sequence
  Description of Artificial Sequence: Synthetic oligonucleotide
  Antisense strand to SEQ ID NO: 1583647
ugacacacaacaguccuug

SEQ ID NO: 1583649 - RNA, 19 nt, Artificial Sequence
  Description of Artificial Sequence: Synthetic oligonucleotide
  Sense strand starting at position 3717 of SEQ ID NO: 1560204
gacuguugugugucauguc

SEQ ID NO: 1583650 - RNA, 19 nt, Artificial Sequence
  Description of Artificial Sequence: Synthetic oligonucleotide
  Antisense strand to SEQ ID NO: 1583649
gacaugacacacaacaguc

SEQ ID NO: 1583651 - RNA, 19 nt, Artificial Sequence
  Description of Artificial Sequence: Synthetic oligonucleotide
  Sense strand starting at position 3852 of SEQ ID NO: 1560204
ccaggaaauugaucuguuu

SEQ ID NO: 1583652 - RNA, 19 nt, Artificial Sequence
  Description of Artificial Sequence: Synthetic oligonucleotide
  Antisense strand to SEQ ID NO: 1583651
aaacagaucaauuuccugg

SEQ ID NO: 1583653 - RNA, 19 nt, Artificial Sequence
  Description of Artificial Sequence: Synthetic oligonucleotide
  Sense strand starting at position 3854 of SEQ ID NO: 1560204
aggaaauugaucuguuuga

SEQ ID NO: 1583654 - RNA, 19 nt, Artificial Sequence
  Description of Artificial Sequence: Synthetic oligonucleotide
  Antisense strand to SEQ ID NO: 1583653
ucaaacagaucaauuuccu

SEQ ID NO: 1583655 - RNA, 19 nt, Artificial Sequence
  Description of Artificial Sequence: Synthetic oligonucleotide
  Sense strand starting at position 3855 of SEQ ID NO: 1560204
ggaaauugaucuguuugaa

SEQ ID NO: 1583656 - RNA, 19 nt, Artificial Sequence
  Description of Artificial Sequence: Synthetic oligonucleotide
  Antisense strand to SEQ ID NO: 1583655
uucaaacagaucaauuucc

SEQ ID NO: 1583657 - RNA, 19 nt, Artificial Sequence
  Description of Artificial Sequence: Synthetic oligonucleotide
  Sense strand starting at position 3858 of SEQ ID NO: 1560204
aauugaucuguuugaaagg

SEQ ID NO: 1583658 - RNA, 19 nt, Artificial Sequence
  Description of Artificial Sequence: Synthetic oligonucleotide
  Antisense strand to SEQ ID NO: 1583657
ccuuucaaacagaucaauu

SEQ ID NO: 1583659 - RNA, 19 nt, Artificial Sequence
  Description of Artificial Sequence: Synthetic oligonucleotide
  Sense strand starting at position 965 of SEQ ID NO: 1560205
guguuacucugacccaacu

SEQ ID NO: 1583660 - RNA, 19 nt, Artificial Sequence
  Description of Artificial Sequence: Synthetic oligonucleotide
  Antisense strand to SEQ ID NO: 1583659
aguugggucagaguaacac

SEQ ID NO: 1583661 - RNA, 19 nt, Artificial Sequence
  Description of Artificial Sequence: Synthetic oligonucleotide
  Sense strand starting at position 1304 of SEQ ID NO: 1560205
gccagaauuacaggcguuu

SEQ ID NO: 1583662 - RNA, 19 nt, Artificial Sequence
  Description of Artificial Sequence: Synthetic oligonucleotide
  Antisense strand to SEQ ID NO: 1583661
aaacgccuguaauucuggc

SEQ ID NO: 1583663 - RNA, 19 nt, Artificial Sequence
  Description of Artificial Sequence: Synthetic oligonucleotide
  Sense strand starting at position 1334 of SEQ ID NO: 1560205
cugggaaacuguguuuauc

SEQ ID NO: 1583664 - RNA, 19 nt, Artificial Sequence
  Description of Artificial Sequence: Synthetic oligonucleotide
  Antisense strand to SEQ ID NO: 1583663
gauaaacacaguuucccag

SEQ ID NO: 1583665 - RNA, 19 nt, Artificial Sequence
  Description of Artificial Sequence: Synthetic oligonucleotide
  Sense strand starting at position 1342 of SEQ ID NO: 1560205
cuguguuuaucauucugag

SEQ ID NO: 1583666 - RNA, 19 nt, Artificial Sequence
  Description of Artificial Sequence: Synthetic oligonucleotide
  Antisense strand to SEQ ID NO: 1583665
cucagaaugauaaacacag

SEQ ID NO: 1583667 - RNA, 19 nt, Artificial Sequence
  Description of Artificial Sequence: Synthetic oligonucleotide
  Sense strand starting at position 1354 of SEQ ID NO: 1560205
uucugaguccagcggaaua

SEQ ID NO: 1583668 - RNA, 19 nt, Artificial Sequence
  Description of Artificial Sequence: Synthetic oligonucleotide
  Antisense strand to SEQ ID NO: 1583667
uauuccgcuggacucagaa

SEQ ID NO: 1583669 - RNA, 19 nt, Artificial Sequence
  Description of Artificial Sequence: Synthetic oligonucleotide
  Sense strand starting at position 1417 of SEQ ID NO: 1560205
auggguaagcucugggaga

SEQ ID NO: 1583670 - RNA, 19 nt, Artificial Sequence
  Description of Artificial Sequence: Synthetic oligonucleotide
  Antisense strand to SEQ ID NO: 1583669
ucucccagagcuuacccau

SEQ ID NO: 1583671 - RNA, 19 nt, Artificial Sequence
  Description of Artificial Sequence: Synthetic oligonucleotide
  Sense strand starting at position 1419 of SEQ ID NO: 1560205
ggguaagcucugggagaaa

SEQ ID NO: 1583672 - RNA, 19 nt, Artificial Sequence
  Description of Artificial Sequence: Synthetic oligonucleotide
  Antisense strand to SEQ ID NO: 1583671
uuucucccagagcuuaccc

SEQ ID NO: 1583673 - RNA, 19 nt, Artificial Sequence
  Description of Artificial Sequence: Synthetic oligonucleotide
  Sense strand starting at position 1432 of SEQ ID NO: 1560205
gagaaauaaccaggcuggu

SEQ ID NO: 1583674 - RNA, 19 nt, Artificial Sequence
  Description of Artificial Sequence: Synthetic oligonucleotide
  Antisense strand to SEQ ID NO: 1583673
accagccugguuauuucuc

SEQ ID NO: 1583675 - RNA, 19 nt, Artificial Sequence
  Description of Artificial Sequence: Synthetic oligonucleotide
  Sense strand starting at position 1557 of SEQ ID NO: 1560205
ggcuuauugucacuacagu

SEQ ID NO: 1583676 - RNA, 19 nt, Artificial Sequence
  Description of Artificial Sequence: Synthetic oligonucleotide
  Antisense strand to SEQ ID NO: 1583675
acuguagugacaauaagcc

SEQ ID NO: 1583677 - RNA, 19 nt, Artificial Sequence
  Description of Artificial Sequence: Synthetic oligonucleotide
  Sense strand starting at position 1618 of SEQ ID NO: 1560205
gagagaacgcuguacgagu

SEQ ID NO: 1583678 - RNA, 19 nt, Artificial Sequence
  Description of Artificial Sequence: Synthetic oligonucleotide
  Antisense strand to SEQ ID NO: 1583677
acucguacagcguucucuc

SEQ ID NO: 1583679 - RNA, 19 nt, Artificial Sequence
  Description of Artificial Sequence: Synthetic oligonucleotide
  Sense strand starting at position 1666 of SEQ ID NO: 1560205
gguucugucacgggacagu

SEQ ID NO: 1583680 - RNA, 19 nt, Artificial Sequence
  Description of Artificial Sequence: Synthetic oligonucleotide
  Antisense strand to SEQ ID NO: 1583679
acugucccgugacagaacc

SEQ ID NO: 1583681 - RNA, 19 nt, Artificial Sequence
  Description of Artificial Sequence: Synthetic oligonucleotide
  Sense strand starting at position 1682 of SEQ ID NO: 1560205
agugacuacuccucacuga

SEQ ID NO: 1583682 - RNA, 19 nt, Artificial Sequence
  Description of Artificial Sequence: Synthetic oligonucleotide
  Antisense strand to SEQ ID NO: 1583681
ucagugaggaguagucacu

SEQ ID NO: 1583683 - RNA, 19 nt, Artificial Sequence
  Description of Artificial Sequence: Synthetic oligonucleotide
  Sense strand starting at position 1683 of SEQ ID NO: 1560205
gugacuacuccucacugaa

SEQ ID NO: 1583684 - RNA, 19 nt, Artificial Sequence
  Description of Artificial Sequence: Synthetic oligonucleotide
  Antisense strand to SEQ ID NO: 1583683
uucagugaggaguagucac

SEQ ID NO: 1583685 - RNA, 19 nt, Artificial Sequence
  Description of Artificial Sequence: Synthetic oligonucleotide
  Sense strand starting at position 1693 of SEQ ID NO: 1560205
cucacugaacuguggaaga

SEQ ID NO: 1583686 - RNA, 19 nt, Artificial Sequence
  Description of Artificial Sequence: Synthetic oligonucleotide
  Antisense strand to SEQ ID NO: 1583685
ucuuccacaguucagugag

SEQ ID NO: 1583687 - RNA, 19 nt, Artificial Sequence
  Description of Artificial Sequence: Synthetic oligonucleotide
  Sense strand starting at position 1850 of SEQ ID NO: 1560205
cguuuaugcacugcuggua

SEQ ID NO: 1583688 - RNA, 19 nt, Artificial Sequence
  Description of Artificial Sequence: Synthetic oligonucleotide
  Antisense strand to SEQ ID NO: 1583687
uaccagcagugcauaaacg

SEQ ID NO: 1583689 - RNA, 19 nt, Artificial Sequence
  Description of Artificial Sequence: Synthetic oligonucleotide
  Sense strand starting at position 1885 of SEQ ID NO: 1560205
gcguucuuuacgucgaaca

SEQ ID NO: 1583690 - RNA, 19 nt, Artificial Sequence
  Description of Artificial Sequence: Synthetic oligonucleotide
  Antisense strand to SEQ ID NO: 1583689
uguucgacguaaagaacgc

SEQ ID NO: 1583691 - RNA, 19 nt, Artificial Sequence
  Description of Artificial Sequence: Synthetic oligonucleotide
  Sense strand starting at position 1977 of SEQ ID NO: 1560205
gcuccucuuccugaaagac

SEQ ID NO: 1583692 - RNA, 19 nt, Artificial Sequence
  Description of Artificial Sequence: Synthetic oligonucleotide
  Antisense strand to SEQ ID NO: 1583691
gucuuucaggaagaggagc

SEQ ID NO: 1583693 - RNA, 19 nt, Artificial Sequence
  Description of Artificial Sequence: Synthetic oligonucleotide
  Sense strand starting at position 2026 of SEQ ID NO: 1560205
uaggaaauguaguuuacuu

SEQ ID NO: 1583694 - RNA, 19 nt, Artificial Sequence
  Description of Artificial Sequence: Synthetic oligonucleotide
  Antisense strand to SEQ ID NO: 1583693
aaguaaacuacauuuccua

SEQ ID NO: 1583695 - RNA, 19 nt, Artificial Sequence
  Description of Artificial Sequence: Synthetic oligonucleotide
  Sense strand starting at position 2125 of SEQ ID NO: 1560205
agagcaucucgggaauugu

SEQ ID NO: 1583696 - RNA, 19 nt, Artificial Sequence
  Description of Artificial Sequence: Synthetic oligonucleotide
  Antisense strand to SEQ ID NO: 1583695
acaauucccgagaugcucu

SEQ ID NO: 1583697 - RNA, 19 nt, Artificial Sequence
  Description of Artificial Sequence: Synthetic oligonucleotide
  Sense strand starting at position 2136 of SEQ ID NO: 1560205
ggaauuguaguguguuucu

SEQ ID NO: 1583698 - RNA, 19 nt, Artificial Sequence
  Description of Artificial Sequence: Synthetic oligonucleotide
  Antisense strand to SEQ ID NO: 1583697
agaaacacacuacaauucc

SEQ ID NO: 1583699 - RNA, 19 nt, Artificial Sequence
  Description of Artificial Sequence: Synthetic oligonucleotide
  Sense strand starting at position 2621 of SEQ ID NO: 1560205
uggcauuuagguugcauga

SEQ ID NO: 1583700 - RNA, 19 nt, Artificial Sequence
  Description of Artificial Sequence: Synthetic oligonucleotide
  Antisense strand to SEQ ID NO: 1583699
ucaugcaaccuaaaugcca

SEQ ID NO: 1583701 - RNA, 19 nt, Artificial Sequence
  Description of Artificial Sequence: Synthetic oligonucleotide
  Sense strand starting at position 2652 of SEQ ID NO: 1560205
guguucguacgcaagugau

SEQ ID NO: 1583702 - RNA, 19 nt, Artificial Sequence
  Description of Artificial Sequence: Synthetic oligonucleotide
  Antisense strand to SEQ ID NO: 1583701
aucacuugcguacgaacac

SEQ ID NO: 1583703 - RNA, 19 nt, Artificial Sequence
  Description of Artificial Sequence: Synthetic oligonucleotide
  Sense strand starting at position 2654 of SEQ ID NO: 1560205
guucguacgcaagugaugu

SEQ ID NO: 1583704 - RNA, 19 nt, Artificial Sequence
  Description of Artificial Sequence: Synthetic oligonucleotide
  Antisense strand to SEQ ID NO: 1583703
acaucacuugcguacgaac

SEQ ID NO: 1583705 - RNA, 19 nt, Artificial Sequence
  Description of Artificial Sequence: Synthetic oligonucleotide
  Sense strand starting at position 2667 of SEQ ID NO: 1560205
ugauguaaucucugaaauu

SEQ ID NO: 1583706 - RNA, 19 nt, Artificial Sequence
  Description of Artificial Sequence: Synthetic oligonucleotide
  Antisense strand to SEQ ID NO: 1583705
aauuucagagauuacauca

SEQ ID NO: 1583707 - RNA, 19 nt, Artificial Sequence
  Description of Artificial Sequence: Synthetic oligonucleotide
  Sense strand starting at position 2701 of SEQ ID NO: 1560205
cagggaggguuugauggau

SEQ ID NO: 1583708 - RNA, 19 nt, Artificial Sequence
  Description of Artificial Sequence: Synthetic oligonucleotide
  Antisense strand to SEQ ID NO: 1583707
auccaucaaacccucccug

SEQ ID NO: 1583709 - RNA, 19 nt, Artificial Sequence
  Description of Artificial Sequence: Synthetic oligonucleotide
  Sense strand starting at position 2707 of SEQ ID NO: 1560205
ggguuugauggaugacuag

SEQ ID NO: 1583710 - RNA, 19 nt, Artificial Sequence
  Description of Artificial Sequence: Synthetic oligonucleotide
  Antisense strand to SEQ ID NO: 1583709
cuagucauccaucaaaccc

SEQ ID NO: 1583711 - RNA, 19 nt, Artificial Sequence
  Description of Artificial Sequence: Synthetic oligonucleotide
  Sense strand starting at position 2714 of SEQ ID NO: 1560205
auggaugacuaguccgaua

SEQ ID NO: 1583712 - RNA, 19 nt, Artificial Sequence
  Description of Artificial Sequence: Synthetic oligonucleotide
  Antisense strand to SEQ ID NO: 1583711
uaucggacuagucauccau

SEQ ID NO: 1583713 - RNA, 19 nt, Artificial Sequence
  Description of Artificial Sequence: Synthetic oligonucleotide
  Sense strand starting at position 2716 of SEQ ID NO: 1560205
ggaugacuaguccgauagu

SEQ ID NO: 1583714 - RNA, 19 nt, Artificial Sequence
  Description of Artificial Sequence: Synthetic oligonucleotide
  Antisense strand to SEQ ID NO: 1583713
acuaucggacuagucaucc

SEQ ID NO: 1583715 - RNA, 19 nt, Artificial Sequence
  Description of Artificial Sequence: Synthetic oligonucleotide
  Sense strand starting at position 2719 of SEQ ID NO: 1560205
ugacuaguccgauaguauc

SEQ ID NO: 1583716 - RNA, 19 nt, Artificial Sequence
  Description of Artificial Sequence: Synthetic oligonucleotide
  Antisense strand to SEQ ID NO: 1583715
gauacuaucggacuaguca

SEQ ID NO: 1583717 - RNA, 19 nt, Artificial Sequence
  Description of Artificial Sequence: Synthetic oligonucleotide
  Sense strand starting at position 2755 of SEQ ID NO: 1560205
ugguacugcuaucuuuauu

SEQ ID NO: 1583718 - RNA, 19 nt, Artificial Sequence
  Description of Artificial Sequence: Synthetic oligonucleotide
  Antisense strand to SEQ ID NO: 1583717
aauaaagauagcaguacca

SEQ ID NO: 1583719 - RNA, 19 nt, Artificial Sequence
  Description of Artificial Sequence: Synthetic oligonucleotide
  Sense strand starting at position 2782 of SEQ ID NO: 1560205
agaaguugaggcugucaaa

SEQ ID NO: 1583720 - RNA, 19 nt, Artificial Sequence
  Description of Artificial Sequence: Synthetic oligonucleotide
  Antisense strand to SEQ ID NO: 1583719
uuugacagccucaacuucu

SEQ ID NO: 1583721 - RNA, 19 nt, Artificial Sequence
  Description of Artificial Sequence: Synthetic oligonucleotide
  Sense strand starting at position 2828 of SEQ ID NO: 1560205
uccugugauugcuccucua

SEQ ID NO: 1583722 - RNA, 19 nt, Artificial Sequence
  Description of Artificial Sequence: Synthetic oligonucleotide
  Antisense strand to SEQ ID NO: 1583721
uagaggagcaaucacagga

SEQ ID NO: 1583723 - RNA, 19 nt, Artificial Sequence
  Description of Artificial Sequence: Synthetic oligonucleotide
  Sense strand starting at position 2831 of SEQ ID NO: 1560205
ugugauugcuccucuagga

SEQ ID NO: 1583724 - RNA, 19 nt, Artificial Sequence
  Description of Artificial Sequence: Synthetic oligonucleotide
  Antisense strand to SEQ ID NO: 1583723
uccuagaggagcaaucaca

SEQ ID NO: 1583725 - RNA, 19 nt, Artificial Sequence
  Description of Artificial Sequence: Synthetic oligonucleotide
  Sense strand starting at position 2846 of SEQ ID NO: 1560205
aggagaaggucuucucucu

SEQ ID NO: 1583726 - RNA, 19 nt, Artificial Sequence
  Description of Artificial Sequence: Synthetic oligonucleotide
  Antisense strand to SEQ ID NO: 1583725
agagagaagaccuucuccu

SEQ ID NO: 1583727 - RNA, 19 nt, Artificial Sequence
  Description of Artificial Sequence: Synthetic oligonucleotide
  Sense strand starting at position 2882 of SEQ ID NO: 1560205
caguuucgccauuaaagag

SEQ ID NO: 1583728 - RNA, 19 nt, Artificial Sequence
  Description of Artificial Sequence: Synthetic oligonucleotide
  Antisense strand to SEQ ID NO: 1583727
cucuuuaauggcgaaacug

SEQ ID NO: 1583729 - RNA, 19 nt, Artificial Sequence
  Description of Artificial Sequence: Synthetic oligonucleotide
  Sense strand starting at position 2910 of SEQ ID NO: 1560205
ggaagccuaagaugugaua

SEQ ID NO: 1583730 - RNA, 19 nt, Artificial Sequence
  Description of Artificial Sequence: Synthetic oligonucleotide
  Antisense strand to SEQ ID NO: 1583729
uaucacaucuuaggcuucc

SEQ ID NO: 1583731 - RNA, 19 nt, Artificial Sequence
  Description of Artificial Sequence: Synthetic oligonucleotide
  Sense strand starting at position 2923 of SEQ ID NO: 1560205
gugauaagucagggauuaa

SEQ ID NO: 1583732 - RNA, 19 nt, Artificial Sequence
  Description of Artificial Sequence: Synthetic oligonucleotide
  Antisense strand to SEQ ID NO: 1583731
uuaaucccugacuuaucac

SEQ ID NO: 1583733 - RNA, 19 nt, Artificial Sequence
  Description of Artificial Sequence: Synthetic oligonucleotide
  Sense strand starting at position 3121 of SEQ ID NO: 1560205
ugggcaaggucucugaaac

SEQ ID NO: 1583734 - RNA, 19 nt, Artificial Sequence
  Description of Artificial Sequence: Synthetic oligonucleotide
  Antisense strand to SEQ ID NO: 1583733
guuucagagaccuugccca

SEQ ID NO: 1583735 - RNA, 19 nt, Artificial Sequence
  Description of Artificial Sequence: Synthetic oligonucleotide
  Sense strand starting at position 3400 of SEQ ID NO: 1560205
ccacgugugagaugagcau

SEQ ID NO: 1583736 - RNA, 19 nt, Artificial Sequence
  Description of Artificial Sequence: Synthetic oligonucleotide
  Antisense strand to SEQ ID NO: 1583735
augcucaucucacacgugg

SEQ ID NO: 1583737 - RNA, 19 nt, Artificial Sequence
  Description of Artificial Sequence: Synthetic oligonucleotide
  Sense strand starting at position 3404 of SEQ ID NO: 1560205
gugugagaugagcaugaaa

SEQ ID NO: 1583738 - RNA, 19 nt, Artificial Sequence
  Description of Artificial Sequence: Synthetic oligonucleotide
  Antisense strand to SEQ ID NO: 1583737
uuucaugcucaucucacac

SEQ ID NO: 1583739 - RNA, 19 nt, Artificial Sequence
  Description of Artificial Sequence: Synthetic oligonucleotide
  Sense strand starting at position 255 of SEQ ID NO: 1560206
uugugacauuugcuguuau

SEQ ID NO: 1583740 - RNA, 19 nt, Artificial Sequence
  Description of Artificial Sequence: Synthetic oligonucleotide
  Antisense strand to SEQ ID NO: 1583739
auaacagcaaaugucacaa

SEQ ID NO: 1583741 - RNA, 19 nt, Artificial Sequence
  Description of Artificial Sequence: Synthetic oligonucleotide
  Sense strand starting at position 266 of SEQ ID NO: 1560206
gcuguuauaaugugguaua

SEQ ID NO: 1583742 - RNA, 19 nt, Artificial Sequence
  Description of Artificial Sequence: Synthetic oligonucleotide
  Antisense strand to SEQ ID NO: 1583741
uauaccacauuauaacagc

SEQ ID NO: 1583743 - RNA, 19 nt, Artificial Sequence
  Description of Artificial Sequence: Synthetic oligonucleotide
  Sense strand starting at position 277 of SEQ ID NO: 1560206
gugguauaagaauaccugu

SEQ ID NO: 1583744 - RNA, 19 nt, Artificial Sequence
  Description of Artificial Sequence: Synthetic oligonucleotide
  Antisense strand to SEQ ID NO: 1583743
acagguauucuuauaccac

SEQ ID NO: 1583745 - RNA, 19 nt, Artificial Sequence
  Description of Artificial Sequence: Synthetic oligonucleotide
  Sense strand starting at position 1027 of SEQ ID NO: 1560206
guacuagcauuccuugaau

SEQ ID NO: 1583746 - RNA, 19 nt, Artificial Sequence
  Description of Artificial Sequence: Synthetic oligonucleotide
  Antisense strand to SEQ ID NO: 1583745
auucaaggaaugcuaguac

SEQ ID NO: 1583747 - RNA, 19 nt, Artificial Sequence
  Description of Artificial Sequence: Synthetic oligonucleotide
  Sense strand starting at position 1134 of SEQ ID NO: 1560206
guaucuauauuccagggaa

SEQ ID NO: 1583748 - RNA, 19 nt, Artificial Sequence
  Description of Artificial Sequence: Synthetic oligonucleotide
  Antisense strand to SEQ ID NO: 1583747
uucccuggaauauagauac

SEQ ID NO: 1583749 - RNA, 19 nt, Artificial Sequence
  Description of Artificial Sequence: Synthetic oligonucleotide
  Sense strand starting at position 1136 of SEQ ID NO: 1560206
aucuauauuccagggaauc

SEQ ID NO: 1583750 - RNA, 19 nt, Artificial Sequence
  Description of Artificial Sequence: Synthetic oligonucleotide
  Antisense strand to SEQ ID NO: 1583749
gauucccuggaauauagau

SEQ ID NO: 1583751 - RNA, 19 nt, Artificial Sequence
  Description of Artificial Sequence: Synthetic oligonucleotide
  Sense strand starting at position 1181 of SEQ ID NO: 1560206
cuugcagagcagugucaaa

SEQ ID NO: 1583752 - RNA, 19 nt, Artificial Sequence
  Description of Artificial Sequence: Synthetic oligonucleotide
  Antisense strand to SEQ ID NO: 1583751
uuugacacugcucugcaag

SEQ ID NO: 1583753 - RNA, 19 nt, Artificial Sequence
  Description of Artificial Sequence: Synthetic oligonucleotide
  Sense strand starting at position 1307 of SEQ ID NO: 1560206
gaucguuaccggcgagauc

SEQ ID NO: 1583754 - RNA, 19 nt, Artificial Sequence
  Description of Artificial Sequence: Synthetic oligonucleotide
  Antisense strand to SEQ ID NO: 1583753
gaucucgccgguaacgauc

SEQ ID NO: 1583755 - RNA, 19 nt, Artificial Sequence
  Description of Artificial Sequence: Synthetic oligonucleotide
  Sense strand starting at position 1319 of SEQ ID NO: 1560206
cgagaucucuacccgguau

SEQ ID NO: 1583756 - RNA, 19 nt, Artificial Sequence
  Description of Artificial Sequence: Synthetic oligonucleotide
  Antisense strand to SEQ ID NO: 1583755
auaccggguagagaucucg

SEQ ID NO: 1583757 - RNA, 19 nt, Artificial Sequence
  Description of Artificial Sequence: Synthetic oligonucleotide
  Sense strand starting at position 1323 of SEQ ID NO: 1560206
aucucuacccgguaucuga

SEQ ID NO: 1583758 - RNA, 19 nt, Artificial Sequence
  Description of Artificial Sequence: Synthetic oligonucleotide
  Antisense strand to SEQ ID NO: 1583757
ucagauaccggguagagau

SEQ ID NO: 1583759 - RNA, 19 nt, Artificial Sequence
  Description of Artificial Sequence: Synthetic oligonucleotide
  Sense strand starting at position 1445 of SEQ ID NO: 1560206
aggccacgccugugaauua

SEQ ID NO: 1583760 - RNA, 19 nt, Artificial Sequence
  Description of Artificial Sequence: Synthetic oligonucleotide
  Antisense strand to SEQ ID NO: 1583759
uaauucacaggcguggccu

SEQ ID NO: 1583761 - RNA, 19 nt, Artificial Sequence
  Description of Artificial Sequence: Synthetic oligonucleotide
  Sense strand starting at position 1452 of SEQ ID NO: 1560206
gccugugaauuagccauga

SEQ ID NO: 1583762 - RNA, 19 nt, Artificial Sequence
  Description of Artificial Sequence: Synthetic oligonucleotide
  Antisense strand to SEQ ID NO: 1583761
ucauggcuaauucacaggc

SEQ ID NO: 1583763 - RNA, 19 nt, Artificial Sequence
  Description of Artificial Sequence: Synthetic oligonucleotide
  Sense strand starting at position 1454 of SEQ ID NO: 1560206
cugugaauuagccaugaag

SEQ ID NO: 1583764 - RNA, 19 nt, Artificial Sequence
  Description of Artificial Sequence: Synthetic oligonucleotide
  Antisense strand to SEQ ID NO: 1583763
cuucauggcuaauucacag

SEQ ID NO: 1583765 - RNA, 19 nt, Artificial Sequence
  Description of Artificial Sequence: Synthetic oligonucleotide
  Sense strand starting at position 1456 of SEQ ID NO: 1560206
gugaauuagccaugaagag

SEQ ID NO: 1583766 - RNA, 19 nt, Artificial Sequence
  Description of Artificial Sequence: Synthetic oligonucleotide
  Antisense strand to SEQ ID NO: 1583765
cucuucauggcuaauucac

SEQ ID NO: 1583767 - RNA, 19 nt, Artificial Sequence
  Description of Artificial Sequence: Synthetic oligonucleotide
  Sense strand starting at position 1522 of SEQ ID NO: 1560206
cagcuaggucgcuugguau

SEQ ID NO: 1583768 - RNA, 19 nt, Artificial Sequence
  Description of Artificial Sequence: Synthetic oligonucleotide
  Antisense strand to SEQ ID NO: 1583767
auaccaagcgaccuagcug

SEQ ID NO: 1583769 - RNA, 19 nt, Artificial Sequence
  Description of Artificial Sequence: Synthetic oligonucleotide
  Sense strand starting at position 1541 of SEQ ID NO: 1560206
cucugagccuguuuacuga

SEQ ID NO: 1583770 - RNA, 19 nt, Artificial Sequence
  Description of Artificial Sequence: Synthetic oligonucleotide
  Antisense strand to SEQ ID NO: 1583769
ucaguaaacaggcucagag

SEQ ID NO: 1583771 - RNA, 19 nt, Artificial Sequence
  Description of Artificial Sequence: Synthetic oligonucleotide
  Sense strand starting at position 1566 of SEQ ID NO: 1560206
gggauaaucgcaggcccua

SEQ ID NO: 1583772 - RNA, 19 nt, Artificial Sequence
  Description of Artificial Sequence: Synthetic oligonucleotide
  Antisense strand to SEQ ID NO: 1583771
uagggccugcgauuauccc

SEQ ID NO: 1583773 - RNA, 19 nt, Artificial Sequence
  Description of Artificial Sequence: Synthetic oligonucleotide
  Sense strand starting at position 1617 of SEQ ID NO: 1560206
uaauuaaaguuguuuggga

SEQ ID NO: 1583774 - RNA, 19 nt, Artificial Sequence
  Description of Artificial Sequence: Synthetic oligonucleotide
  Antisense strand to SEQ ID NO: 1583773
ucccaaacaacuuuaauua

SEQ ID NO: 1583775 - RNA, 19 nt, Artificial Sequence
  Description of Artificial Sequence: Synthetic oligonucleotide
  Sense strand starting at position 1618 of SEQ ID NO: 1560206
aauuaaaguuguuugggau

SEQ ID NO: 1583776 - RNA, 19 nt, Artificial Sequence
  Description of Artificial Sequence: Synthetic oligonucleotide
  Antisense strand to SEQ ID NO: 1583775
aucccaaacaacuuuaauu

SEQ ID NO: 1583777 - RNA, 19 nt, Artificial Sequence
  Description of Artificial Sequence: Synthetic oligonucleotide
  Sense strand starting at position 1619 of SEQ ID NO: 1560206
auuaaaguuguuugggaug

SEQ ID NO: 1583778 - RNA, 19 nt, Artificial Sequence
  Description of Artificial Sequence: Synthetic oligonucleotide
  Antisense strand to SEQ ID NO: 1583777
caucccaaacaacuuuaau

SEQ ID NO: 1583779 - RNA, 19 nt, Artificial Sequence
  Description of Artificial Sequence: Synthetic oligonucleotide
  Sense strand starting at position 1630 of SEQ ID NO: 1560206
uugggauguugccuggcau

SEQ ID NO: 1583780 - RNA, 19 nt, Artificial Sequence
  Description of Artificial Sequence: Synthetic oligonucleotide
  Antisense strand to SEQ ID NO: 1583779
augccaggcaacaucccaa

SEQ ID NO: 1583781 - RNA, 19 nt, Artificial Sequence
  Description of Artificial Sequence: Synthetic oligonucleotide
  Sense strand starting at position 1661 of SEQ ID NO: 1560206
guaucauuguuagcucuua

SEQ ID NO: 1583782 - RNA, 19 nt, Artificial Sequence
  Description of Artificial Sequence: Synthetic oligonucleotide
  Antisense strand to SEQ ID NO: 1583781
uaagagcuaacaaugauac

SEQ ID NO: 1583783 - RNA, 19 nt, Artificial Sequence
  Description of Artificial Sequence: Synthetic oligonucleotide
  Sense strand starting at position 1672 of SEQ ID NO: 1560206
agcucuuacgaugaacaga

SEQ ID NO: 1583784 - RNA, 19 nt, Artificial Sequence
  Description of Artificial Sequence: Synthetic oligonucleotide
  Antisense strand to SEQ ID NO: 1583783
ucuguucaucguaagagcu

SEQ ID NO: 1583785 - RNA, 19 nt, Artificial Sequence
  Description of Artificial Sequence: Synthetic oligonucleotide
  Sense strand starting at position 2002 of SEQ ID NO: 1560206
gcaagagaacuacgacuuu

SEQ ID NO: 1583786 - RNA, 19 nt, Artificial Sequence
  Description of Artificial Sequence: Synthetic oligonucleotide
  Antisense strand to SEQ ID NO: 1583785
aaagucguaguucucuugc

SEQ ID NO: 1583787 - RNA, 19 nt, Artificial Sequence
  Description of Artificial Sequence: Synthetic oligonucleotide
  Sense strand starting at position 2014 of SEQ ID NO: 1560206
cgacuuucuauugggcuaa

SEQ ID NO: 1583788 - RNA, 19 nt, Artificial Sequence
  Description of Artificial Sequence: Synthetic oligonucleotide
  Antisense strand to SEQ ID NO: 1583787
uuagcccaauagaaagucg

SEQ ID NO: 1583789 - RNA, 19 nt, Artificial Sequence
  Description of Artificial Sequence: Synthetic oligonucleotide
  Sense strand starting at position 2016 of SEQ ID NO: 1560206
acuuucuauugggcuaaau

SEQ ID NO: 1583790 - RNA, 19 nt, Artificial Sequence
  Description of Artificial Sequence: Synthetic oligonucleotide
  Antisense strand to SEQ ID NO: 1583789
auuuagcccaauagaaagu

SEQ ID NO: 1583791 - RNA, 19 nt, Artificial Sequence
  Description of Artificial Sequence: Synthetic oligonucleotide
  Sense strand starting at position 2121 of SEQ ID NO: 1560206
gugucuucacucggagaga

SEQ ID NO: 1583792 - RNA, 19 nt, Artificial Sequence
  Description of Artificial Sequence: Synthetic oligonucleotide
  Antisense strand to SEQ ID NO: 1583791
ucucuccgagugaagacac

SEQ ID NO: 1583793 - RNA, 19 nt, Artificial Sequence
  Description of Artificial Sequence: Synthetic oligonucleotide
  Sense strand starting at position 2425 of SEQ ID NO: 1560206
accgcuacuccuggauaua

SEQ ID NO: 1583794 - RNA, 19 nt, Artificial Sequence
  Description of Artificial Sequence: Synthetic oligonucleotide
  Antisense strand to SEQ ID NO: 1583793
uauauccaggaguagcggu

SEQ ID NO: 1583795 - RNA, 19 nt, Artificial Sequence
  Description of Artificial Sequence: Synthetic oligonucleotide
  Sense strand starting at position 2426 of SEQ ID NO: 1560206
ccgcuacuccuggauauau

SEQ ID NO: 1583796 - RNA, 19 nt, Artificial Sequence
  Description of Artificial Sequence: Synthetic oligonucleotide
  Antisense strand to SEQ ID NO: 1583795
auauauccaggaguagcgg

SEQ ID NO: 1583797 - RNA, 19 nt, Artificial Sequence
  Description of Artificial Sequence: Synthetic oligonucleotide
  Sense strand starting at position 2493 of SEQ ID NO: 1560206
ucgaacuccuggucucuaa

SEQ ID NO: 1583798 - RNA, 19 nt, Artificial Sequence
  Description of Artificial Sequence: Synthetic oligonucleotide
  Antisense strand to SEQ ID NO: 1583797
uuagagaccaggaguucga

SEQ ID NO: 1583799 - RNA, 19 nt, Artificial Sequence
  Description of Artificial Sequence: Synthetic oligonucleotide
  Sense strand starting at position 2497 of SEQ ID NO: 1560206
acuccuggucucuaagcga

SEQ ID NO: 1583800 - RNA, 19 nt, Artificial Sequence
  Description of Artificial Sequence: Synthetic oligonucleotide
  Antisense strand to SEQ ID NO: 1583799
ucgcuuagagaccaggagu

SEQ ID NO: 1583801 - RNA, 19 nt, Artificial Sequence
  Description of Artificial Sequence: Synthetic oligonucleotide
  Sense strand starting at position 2582 of SEQ ID NO: 1560206
cacuuuacggguugagaaa

SEQ ID NO: 1583802 - RNA, 19 nt, Artificial Sequence
  Description of Artificial Sequence: Synthetic oligonucleotide
  Antisense strand to SEQ ID NO: 1583801
uuucucaacccguaaagug

SEQ ID NO: 1583803 - RNA, 19 nt, Artificial Sequence
  Description of Artificial Sequence: Synthetic oligonucleotide
  Sense strand starting at position 3250 of SEQ ID NO: 1560206
ccggcuauaucuguucuuu

SEQ ID NO: 1583804 - RNA, 19 nt, Artificial Sequence
  Description of Artificial Sequence: Synthetic oligonucleotide
  Antisense strand to SEQ ID NO: 1583803
aaagaacagauauagccgg

SEQ ID NO: 1583805 - RNA, 19 nt, Artificial Sequence
  Description of Artificial Sequence: Synthetic oligonucleotide
  Sense strand starting at position 3411 of SEQ ID NO: 1560206
gcaagaauuucuuguggaa

SEQ ID NO: 1583806 - RNA, 19 nt, Artificial Sequence
  Description of Artificial Sequence: Synthetic oligonucleotide
  Antisense strand to SEQ ID NO: 1583805
uuccacaagaaauucuugc

SEQ ID NO: 1583807 - RNA, 19 nt, Artificial Sequence
  Description of Artificial Sequence: Synthetic oligonucleotide
  Sense strand starting at position 3414 of SEQ ID NO: 1560206
agaauuucuuguggaaaug

SEQ ID NO: 1583808 - RNA, 19 nt, Artificial Sequence
  Description of Artificial Sequence: Synthetic oligonucleotide
  Antisense strand to SEQ ID NO: 1583807
cauuuccacaagaaauucu

SEQ ID NO: 1583809 - RNA, 19 nt, Artificial Sequence
  Description of Artificial Sequence: Synthetic oligonucleotide
  Sense strand starting at position 3529 of SEQ ID NO: 1560206
ggugcaguguccagaugga

SEQ ID NO: 1583810 - RNA, 19 nt, Artificial Sequence
  Description of Artificial Sequence: Synthetic oligonucleotide
  Antisense strand to SEQ ID NO: 1583809
uccaucuggacacugcacc

SEQ ID NO: 1583811 - RNA, 19 nt, Artificial Sequence
  Description of Artificial Sequence: Synthetic oligonucleotide
  Sense strand starting at position 3557 of SEQ ID NO: 1560206
gggaccucuucuuacacau

SEQ ID NO: 1583812 - RNA, 19 nt, Artificial Sequence
  Description of Artificial Sequence: Synthetic oligonucleotide
  Antisense strand to SEQ ID NO: 1583811
auguguaagaagagguccc

SEQ ID NO: 1583813 - RNA, 19 nt, Artificial Sequence
  Description of Artificial Sequence: Synthetic oligonucleotide
  Sense strand starting at position 3568 of SEQ ID NO: 1560206
uuacacauucuguguccau

SEQ ID NO: 1583814 - RNA, 19 nt, Artificial Sequence
  Description of Artificial Sequence: Synthetic oligonucleotide
  Antisense strand to SEQ ID NO: 1583813
auggacacagaauguguaa

SEQ ID NO: 1583815 - RNA, 19 nt, Artificial Sequence
  Description of Artificial Sequence: Synthetic oligonucleotide
  Sense strand starting at position 3575 of SEQ ID NO: 1560206
uucuguguccaucaacauu

SEQ ID NO: 1583816 - RNA, 19 nt, Artificial Sequence
  Description of Artificial Sequence: Synthetic oligonucleotide
  Antisense strand to SEQ ID NO: 1583815
aauguugauggacacagaa

SEQ ID NO: 1583817 - RNA, 19 nt, Artificial Sequence
  Description of Artificial Sequence: Synthetic oligonucleotide
  Sense strand starting at position 3581 of SEQ ID NO: 1560206
guccaucaacauugugauu

SEQ ID NO: 1583818 - RNA, 19 nt, Artificial Sequence
  Description of Artificial Sequence: Synthetic oligonucleotide
  Antisense strand to SEQ ID NO: 1583817
aaucacaauguugauggac

SEQ ID NO: 1583819 - RNA, 19 nt, Artificial Sequence
  Description of Artificial Sequence: Synthetic oligonucleotide
  Sense strand starting at position 1 of SEQ ID NO: 1560207
aagaaugauuccgagggag

SEQ ID NO: 1583820 - RNA, 19 nt, Artificial Sequence
  Description of Artificial Sequence: Synthetic oligonucleotide
  Antisense strand to SEQ ID NO: 1583819
cucccucggaaucauucuu

SEQ ID NO: 1583821 - RNA, 19 nt, Artificial Sequence
  Description of Artificial Sequence: Synthetic oligonucleotide
  Sense strand starting at position 3 of SEQ ID NO: 1560207
gaaugauuccgagggagcu

SEQ ID NO: 1583822 - RNA, 19 nt, Artificial Sequence
  Description of Artificial Sequence: Synthetic oligonucleotide
  Antisense strand to SEQ ID NO: 1583821
agcucccucggaaucauuc

SEQ ID NO: 1583823 - RNA, 19 nt, Artificial Sequence
  Description of Artificial Sequence: Synthetic oligonucleotide
  Sense strand starting at position 64 of SEQ ID NO: 1560207
gagaaauugcggcgaugug

SEQ ID NO: 1583824 - RNA, 19 nt, Artificial Sequence
  Description of Artificial Sequence: Synthetic oligonucleotide
  Antisense strand to SEQ ID NO: 1583823
cacaucgccgcaauuucuc

SEQ ID NO: 1583825 - RNA, 19 nt, Artificial Sequence
  Description of Artificial Sequence: Synthetic oligonucleotide
  Sense strand starting at position 76 of SEQ ID NO: 1560207
cgaugugugcggugggaga

SEQ ID NO: 1583826 - RNA, 19 nt, Artificial Sequence
  Description of Artificial Sequence: Synthetic oligonucleotide
  Antisense strand to SEQ ID NO: 1583825
ucucccaccgcacacaucg

SEQ ID NO: 1583827 - RNA, 19 nt, Artificial Sequence
  Description of Artificial Sequence: Synthetic oligonucleotide
  Sense strand starting at position 134 of SEQ ID NO: 1560207
gccugaugcauuggagaac

SEQ ID NO: 1583828 - RNA, 19 nt, Artificial Sequence
  Description of Artificial Sequence: Synthetic oligonucleotide
  Antisense strand to SEQ ID NO: 1583827
guucuccaaugcaucaggc

SEQ ID NO: 1583829 - RNA, 19 nt, Artificial Sequence
  Description of Artificial Sequence: Synthetic oligonucleotide
  Sense strand starting at position 135 of SEQ ID NO: 1560207
ccugaugcauuggagaacu

SEQ ID NO: 1583830 - RNA, 19 nt, Artificial Sequence
  Description of Artificial Sequence: Synthetic oligonucleotide
  Antisense strand to SEQ ID NO: 1583829
aguucuccaaugcaucagg

SEQ ID NO: 1583831 - RNA, 19 nt, Artificial Sequence
  Description of Artificial Sequence: Synthetic oligonucleotide
  Sense strand starting at position 208 of SEQ ID NO: 1560207
gggauucuguuggaaauaa

SEQ ID NO: 1583832 - RNA, 19 nt, Artificial Sequence
  Description of Artificial Sequence: Synthetic oligonucleotide
  Antisense strand to SEQ ID NO: 1583831
uuauuuccaacagaauccc

SEQ ID NO: 1583833 - RNA, 19 nt, Artificial Sequence
  Description of Artificial Sequence: Synthetic oligonucleotide
  Sense strand starting at position 465 of SEQ ID NO: 1560207
agagguagguguggugauu

SEQ ID NO: 1583834 - RNA, 19 nt, Artificial Sequence
  Description of Artificial Sequence: Synthetic oligonucleotide
  Antisense strand to SEQ ID NO: 1583833
aaucaccacaccuaccucu

SEQ ID NO: 1583835 - RNA, 19 nt, Artificial Sequence
  Description of Artificial Sequence: Synthetic oligonucleotide
  Sense strand starting at position 502 of SEQ ID NO: 1560207
gagccaucugggugggaca

SEQ ID NO: 1583836 - RNA, 19 nt, Artificial Sequence
  Description of Artificial Sequence: Synthetic oligonucleotide
  Antisense strand to SEQ ID NO: 1583835
ugucccacccagauggcuc

SEQ ID NO: 1583837 - RNA, 19 nt, Artificial Sequence
  Description of Artificial Sequence: Synthetic oligonucleotide
  Sense strand starting at position 513 of SEQ ID NO: 1560207
gugggacaguguugagaac

SEQ ID NO: 1583838 - RNA, 19 nt, Artificial Sequence
  Description of Artificial Sequence: Synthetic oligonucleotide
  Antisense strand to SEQ ID NO: 1583837
guucucaacacugucccac

SEQ ID NO: 1583839 - RNA, 19 nt, Artificial Sequence
  Description of Artificial Sequence: Synthetic oligonucleotide
  Sense strand starting at position 515 of SEQ ID NO: 1560207
gggacaguguugagaacug

SEQ ID NO: 1583840 - RNA, 19 nt, Artificial Sequence
  Description of Artificial Sequence: Synthetic oligonucleotide
  Antisense strand to SEQ ID NO: 1583839
caguucucaacacuguccc

SEQ ID NO: 1583841 - RNA, 19 nt, Artificial Sequence
  Description of Artificial Sequence: Synthetic oligonucleotide
  Sense strand starting at position 697 of SEQ ID NO: 1560207
cagcguuagcccggacaca

SEQ ID NO: 1583842 - RNA, 19 nt, Artificial Sequence
  Description of Artificial Sequence: Synthetic oligonucleotide
  Antisense strand to SEQ ID NO: 1583841
uguguccgggcuaacgcug

SEQ ID NO: 1583843 - RNA, 19 nt, Artificial Sequence
  Description of Artificial Sequence: Synthetic oligonucleotide
  Sense strand starting at position 793 of SEQ ID NO: 1560207
cauuauucguggcuuagac

SEQ ID NO: 1583844 - RNA, 19 nt, Artificial Sequence
  Description of Artificial Sequence: Synthetic oligonucleotide
  Antisense strand to SEQ ID NO: 1583843
gucuaagccacgaauaaug

SEQ ID NO: 1583845 - RNA, 19 nt, Artificial Sequence
  Description of Artificial Sequence: Synthetic oligonucleotide
  Sense strand starting at position 933 of SEQ ID NO: 1560207
ucuugaucugcucguucca

SEQ ID NO: 1583846 - RNA, 19 nt, Artificial Sequence
  Description of Artificial Sequence: Synthetic oligonucleotide
  Antisense strand to SEQ ID NO: 1583845
uggaacgagcagaucaaga

SEQ ID NO: 1583847 - RNA, 19 nt, Artificial Sequence
  Description of Artificial Sequence: Synthetic oligonucleotide
  Sense strand starting at position 1072 of SEQ ID NO: 1560207
agugguacacgcggaaaua

SEQ ID NO: 1583848 - RNA, 19 nt, Artificial Sequence
  Description of Artificial Sequence: Synthetic oligonucleotide
  Antisense strand to SEQ ID NO: 1583847
uauuuccgcguguaccacu

SEQ ID NO: 1583849 - RNA, 19 nt, Artificial Sequence
  Description of Artificial Sequence: Synthetic oligonucleotide
  Sense strand starting at position 1587 of SEQ ID NO: 1560207
aggucucacccaggaaguu

SEQ ID NO: 1583850 - RNA, 19 nt, Artificial Sequence
  Description of Artificial Sequence: Synthetic oligonucleotide
  Antisense strand to SEQ ID NO: 1583849
aacuuccugggugagaccu

SEQ ID NO: 1583851 - RNA, 19 nt, Artificial Sequence
  Description of Artificial Sequence: Synthetic oligonucleotide
  Sense strand starting at position 1596 of SEQ ID NO: 1560207
ccaggaaguucugguagca

SEQ ID NO: 1583852 - RNA, 19 nt, Artificial Sequence
  Description of Artificial Sequence: Synthetic oligonucleotide
  Antisense strand to SEQ ID NO: 1583851
ugcuaccagaacuuccugg

SEQ ID NO: 1583853 - RNA, 19 nt, Artificial Sequence
  Description of Artificial Sequence: Synthetic oligonucleotide
  Sense strand starting at position 1715 of SEQ ID NO: 1560207
ggaggcaacuccugcgaga

SEQ ID NO: 1583854 - RNA, 19 nt, Artificial Sequence
  Description of Artificial Sequence: Synthetic oligonucleotide
  Antisense strand to SEQ ID NO: 1583853
ucucgcaggaguugccucc

SEQ ID NO: 1583855 - RNA, 19 nt, Artificial Sequence
  Description of Artificial Sequence: Synthetic oligonucleotide
  Sense strand starting at position 2109 of SEQ ID NO: 1560207
agcuuuaaucucugcgaag

SEQ ID NO: 1583856 - RNA, 19 nt, Artificial Sequence
  Description of Artificial Sequence: Synthetic oligonucleotide
  Antisense strand to SEQ ID NO: 1583855
cuucgcagagauuaaagcu

SEQ ID NO: 1583857 - RNA, 19 nt, Artificial Sequence
  Description of Artificial Sequence: Synthetic oligonucleotide
  Sense strand starting at position 2110 of SEQ ID NO: 1560207
gcuuuaaucucugcgaagu

SEQ ID NO: 1583858 - RNA, 19 nt, Artificial Sequence
  Description of Artificial Sequence: Synthetic oligonucleotide
  Antisense strand to SEQ ID NO: 1583857
acuucgcagagauuaaagc

SEQ ID NO: 1583859 - RNA, 19 nt, Artificial Sequence
  Description of Artificial Sequence: Synthetic oligonucleotide
  Sense strand starting at position 2111 of SEQ ID NO: 1560207
cuuuaaucucugcgaaguu

SEQ ID NO: 1583860 - RNA, 19 nt, Artificial Sequence
  Description of Artificial Sequence: Synthetic oligonucleotide
  Antisense strand to SEQ ID NO: 1583859
aacuucgcagagauuaaag

SEQ ID NO: 1583861 - RNA, 19 nt, Artificial Sequence
  Description of Artificial Sequence: Synthetic oligonucleotide
  Sense strand starting at position 2112 of SEQ ID NO: 1560207
uuuaaucucugcgaaguug

SEQ ID NO: 1583862 - RNA, 19 nt, Artificial Sequence
  Description of Artificial Sequence: Synthetic oligonucleotide
  Antisense strand to SEQ ID NO: 1583861
caacuucgcagagauuaaa

SEQ ID NO: 1583863 - RNA, 19 nt, Artificial Sequence
  Description of Artificial Sequence: Synthetic oligonucleotide
  Sense strand starting at position 2186 of SEQ ID NO: 1560207
auccauaguucugguaucu

SEQ ID NO: 1583864 - RNA, 19 nt, Artificial Sequence
  Description of Artificial Sequence: Synthetic oligonucleotide
  Antisense strand to SEQ ID NO: 1583863
agauaccagaacuauggau

SEQ ID NO: 1583865 - RNA, 19 nt, Artificial Sequence
  Description of Artificial Sequence: Synthetic oligonucleotide
  Sense strand starting at position 2418 of SEQ ID NO: 1560207
ggcagaucuccagggucuu

SEQ ID NO: 1583866 - RNA, 19 nt, Artificial Sequence
  Description of Artificial Sequence: Synthetic oligonucleotide
  Antisense strand to SEQ ID NO: 1583865
aagacccuggagaucugcc

SEQ ID NO: 1583867 - RNA, 19 nt, Artificial Sequence
  Description of Artificial Sequence: Synthetic oligonucleotide
  Sense strand starting at position 2419 of SEQ ID NO: 1560207
gcagaucuccagggucuua

SEQ ID NO: 1583868 - RNA, 19 nt, Artificial Sequence
  Description of Artificial Sequence: Synthetic oligonucleotide
  Antisense strand to SEQ ID NO: 1583867
uaagacccuggagaucugc

SEQ ID NO: 1583869 - RNA, 19 nt, Artificial Sequence
  Description of Artificial Sequence: Synthetic oligonucleotide
  Sense strand starting at position 2596 of SEQ ID NO: 1560207
ggcuuuaagagcugcagau

SEQ ID NO: 1583870 - RNA, 19 nt, Artificial Sequence
  Description of Artificial Sequence: Synthetic oligonucleotide
  Antisense strand to SEQ ID NO: 1583869
aucugcagcucuuaaagcc

SEQ ID NO: 1583871 - RNA, 19 nt, Artificial Sequence
  Description of Artificial Sequence: Synthetic oligonucleotide
  Sense strand starting at position 2606 of SEQ ID NO: 1560207
gcugcagaugccuggcuua

SEQ ID NO: 1583872 - RNA, 19 nt, Artificial Sequence
  Description of Artificial Sequence: Synthetic oligonucleotide
  Antisense strand to SEQ ID NO: 1583871
uaagccaggcaucugcagc

SEQ ID NO: 1583873 - RNA, 19 nt, Artificial Sequence
  Description of Artificial Sequence: Synthetic oligonucleotide
  Sense strand starting at position 2643 of SEQ ID NO: 1560207
cgggucuugcuguguguuu

SEQ ID NO: 1583874 - RNA, 19 nt, Artificial Sequence
  Description of Artificial Sequence: Synthetic oligonucleotide
  Antisense strand to SEQ ID NO: 1583873
aaacacacagcaagacccg

SEQ ID NO: 1583875 - RNA, 19 nt, Artificial Sequence
  Description of Artificial Sequence: Synthetic oligonucleotide
  Sense strand starting at position 2654 of SEQ ID NO: 1560207
guguguuuggcucacuguu

SEQ ID NO: 1583876 - RNA, 19 nt, Artificial Sequence
  Description of Artificial Sequence: Synthetic oligonucleotide
  Antisense strand to SEQ ID NO: 1583875
aacagugagccaaacacac

SEQ ID NO: 1583877 - RNA, 19 nt, Artificial Sequence
  Description of Artificial Sequence: Synthetic oligonucleotide
  Sense strand starting at position 2688 of SEQ ID NO: 1560207
agagucuggcaguaguaaa

SEQ ID NO: 1583878 - RNA, 19 nt, Artificial Sequence
  Description of Artificial Sequence: Synthetic oligonucleotide
  Antisense strand to SEQ ID NO: 1583877
uuuacuacugccagacucu

SEQ ID NO: 1583879 - RNA, 19 nt, Artificial Sequence
  Description of Artificial Sequence: Synthetic oligonucleotide
  Sense strand starting at position 2695 of SEQ ID NO: 1560207
ggcaguaguaaaugcacaa

SEQ ID NO: 1583880 - RNA, 19 nt, Artificial Sequence
  Description of Artificial Sequence: Synthetic oligonucleotide
  Antisense strand to SEQ ID NO: 1583879
uugugcauuuacuacugcc

SEQ ID NO: 1583881 - RNA, 19 nt, Artificial Sequence
  Description of Artificial Sequence: Synthetic oligonucleotide
  Sense strand starting at position 2711 of SEQ ID NO: 1560207
caauaaauccgaggcggaa

SEQ ID NO: 1583882 - RNA, 19 nt, Artificial Sequence
  Description of Artificial Sequence: Synthetic oligonucleotide
  Antisense strand to SEQ ID NO: 1583881
uuccgccucggauuuauug

SEQ ID NO: 1583883 - RNA, 19 nt, Artificial Sequence
  Description of Artificial Sequence: Synthetic oligonucleotide
  Sense strand starting at position 2731 of SEQ ID NO: 1560207
caaugagucuuggcucuag

SEQ ID NO: 1583884 - RNA, 19 nt, Artificial Sequence
  Description of Artificial Sequence: Synthetic oligonucleotide
  Antisense strand to SEQ ID NO: 1583883
cuagagccaagacucauug

SEQ ID NO: 1583885 - RNA, 19 nt, Artificial Sequence
  Description of Artificial Sequence: Synthetic oligonucleotide
  Sense strand starting at position 2788 of SEQ ID NO: 1560207
ccucuagaucccugcuaag

SEQ ID NO: 1583886 - RNA, 19 nt, Artificial Sequence
  Description of Artificial Sequence: Synthetic oligonucleotide
  Antisense strand to SEQ ID NO: 1583885
cuuagcagggaucuagagg

SEQ ID NO: 1583887 - RNA, 19 nt, Artificial Sequence
  Description of Artificial Sequence: Synthetic oligonucleotide
  Sense strand starting at position 2791 of SEQ ID NO: 1560207
cuagaucccugcuaagcuu

SEQ ID NO: 1583888 - RNA, 19 nt, Artificial Sequence
  Description of Artificial Sequence: Synthetic oligonucleotide
  Antisense strand to SEQ ID NO: 1583887
aagcuuagcagggaucuag

SEQ ID NO: 1583889 - RNA, 19 nt, Artificial Sequence
  Description of Artificial Sequence: Synthetic oligonucleotide
  Sense strand starting at position 2815 of SEQ ID NO: 1560207
ccuccugccugguuaauau

SEQ ID NO: 1583890 - RNA, 19 nt, Artificial Sequence
  Description of Artificial Sequence: Synthetic oligonucleotide
  Antisense strand to SEQ ID NO: 1583889
auauuaaccaggcaggagg

SEQ ID NO: 1583891 - RNA, 19 nt, Artificial Sequence
  Description of Artificial Sequence: Synthetic oligonucleotide
  Sense strand starting at position 2824 of SEQ ID NO: 1560207
ugguuaauaucaggccuga

SEQ ID NO: 1583892 - RNA, 19 nt, Artificial Sequence
  Description of Artificial Sequence: Synthetic oligonucleotide
  Antisense strand to SEQ ID NO: 1583891
ucaggccugauauuaacca

SEQ ID NO: 1583893 - RNA, 19 nt, Artificial Sequence
  Description of Artificial Sequence: Synthetic oligonucleotide
  Sense strand starting at position 2863 of SEQ ID NO: 1560207
cagccaaauguacgaauua

SEQ ID NO: 1583894 - RNA, 19 nt, Artificial Sequence
  Description of Artificial Sequence: Synthetic oligonucleotide
  Antisense strand to SEQ ID NO: 1583893
uaauucguacauuuggcug

SEQ ID NO: 1583895 - RNA, 19 nt, Artificial Sequence
  Description of Artificial Sequence: Synthetic oligonucleotide
  Sense strand starting at position 2864 of SEQ ID NO: 1560207
agccaaauguacgaauuaa

SEQ ID NO: 1583896 - RNA, 19 nt, Artificial Sequence
  Description of Artificial Sequence: Synthetic oligonucleotide
  Antisense strand to SEQ ID NO: 1583895
uuaauucguacauuuggcu

SEQ ID NO: 1583897 - RNA, 19 nt, Artificial Sequence
  Description of Artificial Sequence: Synthetic oligonucleotide
  Sense strand starting at position 3906 of SEQ ID NO: 1560207
uaccuaguuccagggcauu

SEQ ID NO: 1583898 - RNA, 19 nt, Artificial Sequence
  Description of Artificial Sequence: Synthetic oligonucleotide
  Antisense strand to SEQ ID NO: 1583897
aaugcccuggaacuaggua

SEQ ID NO: 1583899 - RNA, 19 nt, Artificial Sequence
  Description of Artificial Sequence: Synthetic oligonucleotide
  Sense strand starting at position 51 of SEQ ID NO: 1560208
cacagaggccagcguuuau

SEQ ID NO: 1583900 - RNA, 19 nt, Artificial Sequence
  Description of Artificial Sequence: Synthetic oligonucleotide
  Antisense strand to SEQ ID NO: 1583899
auaaacgcuggccucugug

SEQ ID NO: 1583901 - RNA, 19 nt, Artificial Sequence
  Description of Artificial Sequence: Synthetic oligonucleotide
  Sense strand starting at position 98 of SEQ ID NO: 1560208
ccaggcuucuuggucuuaa

SEQ ID NO: 1583902 - RNA, 19 nt, Artificial Sequence
  Description of Artificial Sequence: Synthetic oligonucleotide
  Antisense strand to SEQ ID NO: 1583901
uuaagaccaagaagccugg

SEQ ID NO: 1583903 - RNA, 19 nt, Artificial Sequence
  Description of Artificial Sequence: Synthetic oligonucleotide
  Sense strand starting at position 99 of SEQ ID NO: 1560208
caggcuucuuggucuuaau

SEQ ID NO: 1583904 - RNA, 19 nt, Artificial Sequence
  Description of Artificial Sequence: Synthetic oligonucleotide
  Antisense strand to SEQ ID NO: 1583903
auuaagaccaagaagccug

SEQ ID NO: 1583905 - RNA, 19 nt, Artificial Sequence
  Description of Artificial Sequence: Synthetic oligonucleotide
  Sense strand starting at position 607 of SEQ ID NO: 1560208
gucauugucacucgguaca

SEQ ID NO: 1583906 - RNA, 19 nt, Artificial Sequence
  Description of Artificial Sequence: Synthetic oligonucleotide
  Antisense strand to SEQ ID NO: 1583905
uguaccgagugacaaugac

SEQ ID NO: 1583907 - RNA, 19 nt, Artificial Sequence
  Description of Artificial Sequence: Synthetic oligonucleotide
  Sense strand starting at position 653 of SEQ ID NO: 1560208
gguacaacgggaugucauu

SEQ ID NO: 1583908 - RNA, 19 nt, Artificial Sequence
  Description of Artificial Sequence: Synthetic oligonucleotide
  Antisense strand to SEQ ID NO: 1583907
aaugacaucccguuguacc

SEQ ID NO: 1583909 - RNA, 19 nt, Artificial Sequence
  Description of Artificial Sequence: Synthetic oligonucleotide
  Sense strand starting at position 664 of SEQ ID NO: 1560208
augucauuguccuccugga

SEQ ID NO: 1583910 - RNA, 19 nt, Artificial Sequence
  Description of Artificial Sequence: Synthetic oligonucleotide
  Antisense strand to SEQ ID NO: 1583909
uccaggaggacaaugacau

SEQ ID NO: 1583911 - RNA, 19 nt, Artificial Sequence
  Description of Artificial Sequence: Synthetic oligonucleotide
  Sense strand starting at position 802 of SEQ ID NO: 1560208
ggaagagcuucuguuucuc

SEQ ID NO: 1583912 - RNA, 19 nt, Artificial Sequence
  Description of Artificial Sequence: Synthetic oligonucleotide
  Antisense strand to SEQ ID NO: 1583911
gagaaacagaagcucuucc

SEQ ID NO: 1583913 - RNA, 19 nt, Artificial Sequence
  Description of Artificial Sequence: Synthetic oligonucleotide
  Sense strand starting at position 820 of SEQ ID NO: 1560208
cgcgcacucgguucugaaa

SEQ ID NO: 1583914 - RNA, 19 nt, Artificial Sequence
  Description of Artificial Sequence: Synthetic oligonucleotide
  Antisense strand to SEQ ID NO: 1583913
uuucagaaccgagugcgcg

SEQ ID NO: 1583915 - RNA, 19 nt, Artificial Sequence
  Description of Artificial Sequence: Synthetic oligonucleotide
  Sense strand starting at position 1010 of SEQ ID NO: 1560208
aggguaauagcuuggauuc

SEQ ID NO: 1583916 - RNA, 19 nt, Artificial Sequence
  Description of Artificial Sequence: Synthetic oligonucleotide
  Antisense strand to SEQ ID NO: 1583915
gaauccaagcuauuacccu

SEQ ID NO: 1583917 - RNA, 19 nt, Artificial Sequence
  Description of Artificial Sequence: Synthetic oligonucleotide
  Sense strand starting at position 1011 of SEQ ID NO: 1560208
ggguaauagcuuggauucu

SEQ ID NO: 1583918 - RNA, 19 nt, Artificial Sequence
  Description of Artificial Sequence: Synthetic oligonucleotide
  Antisense strand to SEQ ID NO: 1583917
agaauccaagcuauuaccc

SEQ ID NO: 1583919 - RNA, 19 nt, Artificial Sequence
  Description of Artificial Sequence: Synthetic oligonucleotide
  Sense strand starting at position 1023 of SEQ ID NO: 1560208
ggauucuguuacccgcgaa

SEQ ID NO: 1583920 - RNA, 19 nt, Artificial Sequence
  Description of Artificial Sequence: Synthetic oligonucleotide
  Antisense strand to SEQ ID NO: 1583919
uucgcggguaacagaaucc

SEQ ID NO: 1583921 - RNA, 19 nt, Artificial Sequence
  Description of Artificial Sequence: Synthetic oligonucleotide
  Sense strand starting at position 1272 of SEQ ID NO: 1560208
ccgggugaggccaguguua

SEQ ID NO: 1583922 - RNA, 19 nt, Artificial Sequence
  Description of Artificial Sequence: Synthetic oligonucleotide
  Antisense strand to SEQ ID NO: 1583921
uaacacuggccucacccgg

SEQ ID NO: 1583923 - RNA, 19 nt, Artificial Sequence
  Description of Artificial Sequence: Synthetic oligonucleotide
  Sense strand starting at position 1274 of SEQ ID NO: 1560208
gggugaggccaguguuaag

SEQ ID NO: 1583924 - RNA, 19 nt, Artificial Sequence
  Description of Artificial Sequence: Synthetic oligonucleotide
  Antisense strand to SEQ ID NO: 1583923
cuuaacacuggccucaccc

SEQ ID NO: 1583925 - RNA, 19 nt, Artificial Sequence
  Description of Artificial Sequence: Synthetic oligonucleotide
  Sense strand starting at position 1286 of SEQ ID NO: 1560208
uguuaaggguucccgagau

SEQ ID NO: 1583926 - RNA, 19 nt, Artificial Sequence
  Description of Artificial Sequence: Synthetic oligonucleotide
  Antisense strand to SEQ ID NO: 1583925
aucucgggaacccuuaaca

SEQ ID NO: 1583927 - RNA, 19 nt, Artificial Sequence
  Description of Artificial Sequence: Synthetic oligonucleotide
  Sense strand starting at position 1290 of SEQ ID NO: 1560208
aaggguucccgagauguca

SEQ ID NO: 1583928 - RNA, 19 nt, Artificial Sequence
  Description of Artificial Sequence: Synthetic oligonucleotide
  Antisense strand to SEQ ID NO: 1583927
ugacaucucgggaacccuu

SEQ ID NO: 1583929 - RNA, 19 nt, Artificial Sequence
  Description of Artificial Sequence: Synthetic oligonucleotide
  Sense strand starting at position 1345 of SEQ ID NO: 1560208
cccaguugucuccgaagag

SEQ ID NO: 1583930 - RNA, 19 nt, Artificial Sequence
  Description of Artificial Sequence: Synthetic oligonucleotide
  Antisense strand to SEQ ID NO: 1583929
cucuucggagacaacuggg

SEQ ID NO: 1583931 - RNA, 19 nt, Artificial Sequence
  Description of Artificial Sequence: Synthetic oligonucleotide
  Sense strand starting at position 1696 of SEQ ID NO: 1560208
gaguccugcuccucggauu

SEQ ID NO: 1583932 - RNA, 19 nt, Artificial Sequence
  Description of Artificial Sequence: Synthetic oligonucleotide
  Antisense strand to SEQ ID NO: 1583931
aauccgaggagcaggacuc

SEQ ID NO: 1583933 - RNA, 19 nt, Artificial Sequence
  Description of Artificial Sequence: Synthetic oligonucleotide
  Sense strand starting at position 1767 of SEQ ID NO: 1560208
uccguuucggucucggaau

SEQ ID NO: 1583934 - RNA, 19 nt, Artificial Sequence
  Description of Artificial Sequence: Synthetic oligonucleotide
  Antisense strand to SEQ ID NO: 1583933
auuccgagaccgaaacgga

SEQ ID NO: 1583935 - RNA, 19 nt, Artificial Sequence
  Description of Artificial Sequence: Synthetic oligonucleotide
  Sense strand starting at position 1769 of SEQ ID NO: 1560208
cguuucggucucggaauuu

SEQ ID NO: 1583936 - RNA, 19 nt, Artificial Sequence
  Description of Artificial Sequence: Synthetic oligonucleotide
  Antisense strand to SEQ ID NO: 1583935
aaauuccgagaccgaaacg

SEQ ID NO: 1583937 - RNA, 19 nt, Artificial Sequence
  Description of Artificial Sequence: Synthetic oligonucleotide
  Sense strand starting at position 1781 of SEQ ID NO: 1560208
ggaauuucgcuugguccca

SEQ ID NO: 1583938 - RNA, 19 nt, Artificial Sequence
  Description of Artificial Sequence: Synthetic oligonucleotide
  Antisense strand to SEQ ID NO: 1583937
ugggaccaagcgaaauucc

SEQ ID NO: 1583939 - RNA, 19 nt, Artificial Sequence
  Description of Artificial Sequence: Synthetic oligonucleotide
  Sense strand starting at position 1900 of SEQ ID NO: 1560208
gguaugugagagugaggaa

SEQ ID NO: 1583940 - RNA, 19 nt, Artificial Sequence
  Description of Artificial Sequence: Synthetic oligonucleotide
  Antisense strand to SEQ ID NO: 1583939
uuccucacucucacauacc

SEQ ID NO: 1583941 - RNA, 19 nt, Artificial Sequence
  Description of Artificial Sequence: Synthetic oligonucleotide
  Sense strand starting at position 2013 of SEQ ID NO: 1560208
gcaggaucuuucucagaga

SEQ ID NO: 1583942 - RNA, 19 nt, Artificial Sequence
  Description of Artificial Sequence: Synthetic oligonucleotide
  Antisense strand to SEQ ID NO: 1583941
ucucugagaaagauccugc

SEQ ID NO: 1583943 - RNA, 19 nt, Artificial Sequence
  Description of Artificial Sequence: Synthetic oligonucleotide
  Sense strand starting at position 2014 of SEQ ID NO: 1560208
caggaucuuucucagagau

SEQ ID NO: 1583944 - RNA, 19 nt, Artificial Sequence
  Description of Artificial Sequence: Synthetic oligonucleotide
  Antisense strand to SEQ ID NO: 1583943
aucucugagaaagauccug

SEQ ID NO: 1583945 - RNA, 19 nt, Artificial Sequence
  Description of Artificial Sequence: Synthetic oligonucleotide
  Sense strand starting at position 2028 of SEQ ID NO: 1560208
gagauuuguugagacauua

SEQ ID NO: 1583946 - RNA, 19 nt, Artificial Sequence
  Description of Artificial Sequence: Synthetic oligonucleotide
  Antisense strand to SEQ ID NO: 1583945
uaaugucucaacaaaucuc

SEQ ID NO: 1583947 - RNA, 19 nt, Artificial Sequence
  Description of Artificial Sequence: Synthetic oligonucleotide
  Sense strand starting at position 2071 of SEQ ID NO: 1560208
aagcuaaagucuuugggag

SEQ ID NO: 1583948 - RNA, 19 nt, Artificial Sequence
  Description of Artificial Sequence: Synthetic oligonucleotide
  Antisense strand to SEQ ID NO: 1583947
cucccaaagacuuuagcuu

SEQ ID NO: 1583949 - RNA, 19 nt, Artificial Sequence
  Description of Artificial Sequence: Synthetic oligonucleotide
  Sense strand starting at position 2072 of SEQ ID NO: 1560208
agcuaaagucuuugggagu

SEQ ID NO: 1583950 - RNA, 19 nt, Artificial Sequence
  Description of Artificial Sequence: Synthetic oligonucleotide
  Antisense strand to SEQ ID NO: 1583949
acucccaaagacuuuagcu

SEQ ID NO: 1583951 - RNA, 19 nt, Artificial Sequence
  Description of Artificial Sequence: Synthetic oligonucleotide
  Sense strand starting at position 2075 of SEQ ID NO: 1560208
uaaagucuuugggaguaaa

SEQ ID NO: 1583952 - RNA, 19 nt, Artificial Sequence
  Description of Artificial Sequence: Synthetic oligonucleotide
  Antisense strand to SEQ ID NO: 1583951
uuuacucccaaagacuuua

SEQ ID NO: 1583953 - RNA, 19 nt, Artificial Sequence
  Description of Artificial Sequence: Synthetic oligonucleotide
  Sense strand starting at position 2167 of SEQ ID NO: 1560208
gcagcacaguuguccuaau

SEQ ID NO: 1583954 - RNA, 19 nt, Artificial Sequence
  Description of Artificial Sequence: Synthetic oligonucleotide
  Antisense strand to SEQ ID NO: 1583953
auuaggacaacugugcugc

SEQ ID NO: 1583955 - RNA, 19 nt, Artificial Sequence
  Description of Artificial Sequence: Synthetic oligonucleotide
  Sense strand starting at position 2198 of SEQ ID NO: 1560208
caggaaagauccuggccua

SEQ ID NO: 1583956 - RNA, 19 nt, Artificial Sequence
  Description of Artificial Sequence: Synthetic oligonucleotide
  Antisense strand to SEQ ID NO: 1583955
uaggccaggaucuuuccug

SEQ ID NO: 1583957 - RNA, 19 nt, Artificial Sequence
  Description of Artificial Sequence: Synthetic oligonucleotide
  Sense strand starting at position 2201 of SEQ ID NO: 1560208
gaaagauccuggccuaguc

SEQ ID NO: 1583958 - RNA, 19 nt, Artificial Sequence
  Description of Artificial Sequence: Synthetic oligonucleotide
  Antisense strand to SEQ ID NO: 1583957
gacuaggccaggaucuuuc

SEQ ID NO: 1583959 - RNA, 19 nt, Artificial Sequence
  Description of Artificial Sequence: Synthetic oligonucleotide
  Sense strand starting at position 2477 of SEQ ID NO: 1560208
aagaaauuugccggccuca

SEQ ID NO: 1583960 - RNA, 19 nt, Artificial Sequence
  Description of Artificial Sequence: Synthetic oligonucleotide
  Antisense strand to SEQ ID NO: 1583959
ugaggccggcaaauuucuu

SEQ ID NO: 1583961 - RNA, 19 nt, Artificial Sequence
  Description of Artificial Sequence: Synthetic oligonucleotide
  Sense strand starting at position 2519 of SEQ ID NO: 1560208
cagacaauguuuguuuguu

SEQ ID NO: 1583962 - RNA, 19 nt, Artificial Sequence
  Description of Artificial Sequence: Synthetic oligonucleotide
  Antisense strand to SEQ ID NO: 1583961
aacaaacaaacauugucug

SEQ ID NO: 1583963 - RNA, 19 nt, Artificial Sequence
  Description of Artificial Sequence: Synthetic oligonucleotide
  Sense strand starting at position 2520 of SEQ ID NO: 1560208
agacaauguuuguuuguuu

SEQ ID NO: 1583964 - RNA, 19 nt, Artificial Sequence
  Description of Artificial Sequence: Synthetic oligonucleotide
  Antisense strand to SEQ ID NO: 1583963
aaacaaacaaacauugucu

SEQ ID NO: 1583965 - RNA, 19 nt, Artificial Sequence
  Description of Artificial Sequence: Synthetic oligonucleotide
  Sense strand starting at position 3365 of SEQ ID NO: 1560208
gaacgagauucugucucag

SEQ ID NO: 1583966 - RNA, 19 nt, Artificial Sequence
  Description of Artificial Sequence: Synthetic oligonucleotide
  Antisense strand to SEQ ID NO: 1583965
cugagacagaaucucguuc

SEQ ID NO: 1583967 - RNA, 19 nt, Artificial Sequence
  Description of Artificial Sequence: Synthetic oligonucleotide
  Sense strand starting at position 3367 of SEQ ID NO: 1560208
acgagauucugucucagaa

SEQ ID NO: 1583968 - RNA, 19 nt, Artificial Sequence
  Description of Artificial Sequence: Synthetic oligonucleotide
  Antisense strand to SEQ ID NO: 1583967
uucugagacagaaucucgu

SEQ ID NO: 1583969 - RNA, 19 nt, Artificial Sequence
  Description of Artificial Sequence: Synthetic oligonucleotide
  Sense strand starting at position 3499 of SEQ ID NO: 1560208
agucuuagucaccagcuga

SEQ ID NO: 1583970 - RNA, 19 nt, Artificial Sequence
  Description of Artificial Sequence: Synthetic oligonucleotide
  Antisense strand to SEQ ID NO: 1583969
ucagcuggugacuaagacu

SEQ ID NO: 1583971 - RNA, 19 nt, Artificial Sequence
  Description of Artificial Sequence: Synthetic oligonucleotide
  Sense strand starting at position 3539 of SEQ ID NO: 1560208
uuacaagauugaccuguua

SEQ ID NO: 1583972 - RNA, 19 nt, Artificial Sequence
  Description of Artificial Sequence: Synthetic oligonucleotide
  Antisense strand to SEQ ID NO: 1583971
uaacaggucaaucuuguaa

SEQ ID NO: 1583973 - RNA, 19 nt, Artificial Sequence
  Description of Artificial Sequence: Synthetic oligonucleotide
  Sense strand starting at position 3565 of SEQ ID NO: 1560208
aggccaguuuaccuuaaau

SEQ ID NO: 1583974 - RNA, 19 nt, Artificial Sequence
  Description of Artificial Sequence: Synthetic oligonucleotide
  Antisense strand to SEQ ID NO: 1583973
auuuaagguaaacuggccu

SEQ ID NO: 1583975 - RNA, 19 nt, Artificial Sequence
  Description of Artificial Sequence: Synthetic oligonucleotide
  Sense strand starting at position 3872 of SEQ ID NO: 1560208
agcagagauuacgccauua

SEQ ID NO: 1583976 - RNA, 19 nt, Artificial Sequence
  Description of Artificial Sequence: Synthetic oligonucleotide
  Antisense strand to SEQ ID NO: 1583975
uaauggcguaaucucugcu

SEQ ID NO: 1583977 - RNA, 19 nt, Artificial Sequence
  Description of Artificial Sequence: Synthetic oligonucleotide
  Sense strand starting at position 3874 of SEQ ID NO: 1560208
cagagauuacgccauuaca

SEQ ID NO: 1583978 - RNA, 19 nt, Artificial Sequence
  Description of Artificial Sequence: Synthetic oligonucleotide
  Antisense strand to SEQ ID NO: 1583977
uguaauggcguaaucucug

SEQ ID NO: 1583979 - RNA, 19 nt, Artificial Sequence
  Description of Artificial Sequence: Synthetic oligonucleotide
  Sense strand starting at position 34 of SEQ ID NO: 1560209
gcugcuuucugggaucaga

SEQ ID NO: 1583980 - RNA, 19 nt, Artificial Sequence
  Description of Artificial Sequence: Synthetic oligonucleotide
  Antisense strand to SEQ ID NO: 1583979
ucugaucccagaaagcagc

SEQ ID NO: 1583981 - RNA, 19 nt, Artificial Sequence
  Description of Artificial Sequence: Synthetic oligonucleotide
  Sense strand starting at position 37 of SEQ ID NO: 1560209
gcuuucugggaucagagau

SEQ ID NO: 1583982 - RNA, 19 nt, Artificial Sequence
  Description of Artificial Sequence: Synthetic oligonucleotide
  Antisense strand to SEQ ID NO: 1583981
aucucugaucccagaaagc

SEQ ID NO: 1583983 - RNA, 19 nt, Artificial Sequence
  Description of Artificial Sequence: Synthetic oligonucleotide
  Sense strand starting at position 99 of SEQ ID NO: 1560209
agcuauuccuaagacgaga

SEQ ID NO: 1583984 - RNA, 19 nt, Artificial Sequence
  Description of Artificial Sequence: Synthetic oligonucleotide
  Antisense strand to SEQ ID NO: 1583983
ucucgucuuaggaauagcu

SEQ ID NO: 1583985 - RNA, 19 nt, Artificial Sequence
  Description of Artificial Sequence: Synthetic oligonucleotide
  Sense strand starting at position 204 of SEQ ID NO: 1560209
cagugugucucucagcaca

SEQ ID NO: 1583986 - RNA, 19 nt, Artificial Sequence
  Description of Artificial Sequence: Synthetic oligonucleotide
  Antisense strand to SEQ ID NO: 1583985
ugugcugagagacacacug

SEQ ID NO: 1583987 - RNA, 19 nt, Artificial Sequence
  Description of Artificial Sequence: Synthetic oligonucleotide
  Sense strand starting at position 223 of SEQ ID NO: 1560209
gggauuccaugucacuuaa

SEQ ID NO: 1583988 - RNA, 19 nt, Artificial Sequence
  Description of Artificial Sequence: Synthetic oligonucleotide
  Antisense strand to SEQ ID NO: 1583987
uuaagugacauggaauccc

SEQ ID NO: 1583989 - RNA, 19 nt, Artificial Sequence
  Description of Artificial Sequence: Synthetic oligonucleotide
  Sense strand starting at position 240 of SEQ ID NO: 1560209
aacagaugguaagaucaca

SEQ ID NO: 1583990 - RNA, 19 nt, Artificial Sequence
  Description of Artificial Sequence: Synthetic oligonucleotide
  Antisense strand to SEQ ID NO: 1583989
ugugaucuuaccaucuguu

SEQ ID NO: 1583991 - RNA, 19 nt, Artificial Sequence
  Description of Artificial Sequence: Synthetic oligonucleotide
  Sense strand starting at position 248 of SEQ ID NO: 1560209
guaagaucacagggugacu

SEQ ID NO: 1583992 - RNA, 19 nt, Artificial Sequence
  Description of Artificial Sequence: Synthetic oligonucleotide
  Antisense strand to SEQ ID NO: 1583991
agucacccugugaucuuac

SEQ ID NO: 1583993 - RNA, 19 nt, Artificial Sequence
  Description of Artificial Sequence: Synthetic oligonucleotide
  Sense strand starting at position 259 of SEQ ID NO: 1560209
gggugacuuuagucagagg

SEQ ID NO: 1583994 - RNA, 19 nt, Artificial Sequence
  Description of Artificial Sequence: Synthetic oligonucleotide
  Antisense strand to SEQ ID NO: 1583993
ccucugacuaaagucaccc

SEQ ID NO: 1583995 - RNA, 19 nt, Artificial Sequence
  Description of Artificial Sequence: Synthetic oligonucleotide
  Sense strand starting at position 262 of SEQ ID NO: 1560209
ugacuuuagucagaggaaa

SEQ ID NO: 1583996 - RNA, 19 nt, Artificial Sequence
  Description of Artificial Sequence: Synthetic oligonucleotide
  Antisense strand to SEQ ID NO: 1583995
uuuccucugacuaaaguca

SEQ ID NO: 1583997 - RNA, 19 nt, Artificial Sequence
  Description of Artificial Sequence: Synthetic oligonucleotide
  Sense strand starting at position 675 of SEQ ID NO: 1560209
gagccaaggucugucaugu

SEQ ID NO: 1583998 - RNA, 19 nt, Artificial Sequence
  Description of Artificial Sequence: Synthetic oligonucleotide
  Antisense strand to SEQ ID NO: 1583997
acaugacagaccuuggcuc

SEQ ID NO: 1583999 - RNA, 19 nt, Artificial Sequence
  Description of Artificial Sequence: Synthetic oligonucleotide
  Sense strand starting at position 698 of SEQ ID NO: 1560209
ccgcgucauuccuugcagu

SEQ ID NO: 1584000 - RNA, 19 nt, Artificial Sequence
  Description of Artificial Sequence: Synthetic oligonucleotide
  Antisense strand to SEQ ID NO: 1583999
acugcaaggaaugacgcgg

SEQ ID NO: 1584001 - RNA, 19 nt, Artificial Sequence
  Description of Artificial Sequence: Synthetic oligonucleotide
  Sense strand starting at position 701 of SEQ ID NO: 1560209
cgucauuccuugcagugga

SEQ ID NO: 1584002 - RNA, 19 nt, Artificial Sequence
  Description of Artificial Sequence: Synthetic oligonucleotide
  Antisense strand to SEQ ID NO: 1584001
uccacugcaaggaaugacg

SEQ ID NO: 1584003 - RNA, 19 nt, Artificial Sequence
  Description of Artificial Sequence: Synthetic oligonucleotide
  Sense strand starting at position 890 of SEQ ID NO: 1560209
ggaugccagcuuugaaaga

SEQ ID NO: 1584004 - RNA, 19 nt, Artificial Sequence
  Description of Artificial Sequence: Synthetic oligonucleotide
  Antisense strand to SEQ ID NO: 1584003
ucuuucaaagcuggcaucc

SEQ ID NO: 1584005 - RNA, 19 nt, Artificial Sequence
  Description of Artificial Sequence: Synthetic oligonucleotide
  Sense strand starting at position 981 of SEQ ID NO: 1560209
gcaguagacugucuugcuu

SEQ ID NO: 1584006 - RNA, 19 nt, Artificial Sequence
  Description of Artificial Sequence: Synthetic oligonucleotide
  Antisense strand to SEQ ID NO: 1584005
aagcaagacagucuacugc

SEQ ID NO: 1584007 - RNA, 19 nt, Artificial Sequence
  Description of Artificial Sequence: Synthetic oligonucleotide
  Sense strand starting at position 1203 of SEQ ID NO: 1560209
acuugccagguuuagaaau

SEQ ID NO: 1584008 - RNA, 19 nt, Artificial Sequence
  Description of Artificial Sequence: Synthetic oligonucleotide
  Antisense strand to SEQ ID NO: 1584007
auuucuaaaccuggcaagu

SEQ ID NO: 1584009 - RNA, 19 nt, Artificial Sequence
  Description of Artificial Sequence: Synthetic oligonucleotide
  Sense strand starting at position 1214 of SEQ ID NO: 1560209
uuagaaauauucucuguga

SEQ ID NO: 1584010 - RNA, 19 nt, Artificial Sequence
  Description of Artificial Sequence: Synthetic oligonucleotide
  Antisense strand to SEQ ID NO: 1584009
ucacagagaauauuucuaa

SEQ ID NO: 1584011 - RNA, 19 nt, Artificial Sequence
  Description of Artificial Sequence: Synthetic oligonucleotide
  Sense strand starting at position 1216 of SEQ ID NO: 1560209
agaaauauucucugugaag

SEQ ID NO: 1584012 - RNA, 19 nt, Artificial Sequence
  Description of Artificial Sequence: Synthetic oligonucleotide
  Antisense strand to SEQ ID NO: 1584011
cuucacagagaauauuucu

SEQ ID NO: 1584013 - RNA, 19 nt, Artificial Sequence
  Description of Artificial Sequence: Synthetic oligonucleotide
  Sense strand starting at position 1217 of SEQ ID NO: 1560209
gaaauauucucugugaagc

SEQ ID NO: 1584014 - RNA, 19 nt, Artificial Sequence
  Description of Artificial Sequence: Synthetic oligonucleotide
  Antisense strand to SEQ ID NO: 1584013
gcuucacagagaauauuuc

SEQ ID NO: 1584015 - RNA, 19 nt, Artificial Sequence
  Description of Artificial Sequence: Synthetic oligonucleotide
  Sense strand starting at position 1590 of SEQ ID NO: 1560209
caagacgauucgggaacaa

SEQ ID NO: 1584016 - RNA, 19 nt, Artificial Sequence
  Description of Artificial Sequence: Synthetic oligonucleotide
  Antisense strand to SEQ ID NO: 1584015
uuguucccgaaucgucuug

SEQ ID NO: 1584017 - RNA, 19 nt, Artificial Sequence
  Description of Artificial Sequence: Synthetic oligonucleotide
  Sense strand starting at position 2835 of SEQ ID NO: 1560209
cccuccuuccaguguggaa

SEQ ID NO: 1584018 - RNA, 19 nt, Artificial Sequence
  Description of Artificial Sequence: Synthetic oligonucleotide
  Antisense strand to SEQ ID NO: 1584017
uuccacacuggaaggaggg

SEQ ID NO: 1584019 - RNA, 19 nt, Artificial Sequence
  Description of Artificial Sequence: Synthetic oligonucleotide
  Sense strand starting at position 2998 of SEQ ID NO: 1560209
gcaggaauuuaguggugca

SEQ ID NO: 1584020 - RNA, 19 nt, Artificial Sequence
  Description of Artificial Sequence: Synthetic oligonucleotide
  Antisense strand to SEQ ID NO: 1584019
ugcaccacuaaauuccugc

SEQ ID NO: 1584021 - RNA, 19 nt, Artificial Sequence
  Description of Artificial Sequence: Synthetic oligonucleotide
  Sense strand starting at position 3145 of SEQ ID NO: 1560209
gagcacugggcucaaauga

SEQ ID NO: 1584022 - RNA, 19 nt, Artificial Sequence
  Description of Artificial Sequence: Synthetic oligonucleotide
  Antisense strand to SEQ ID NO: 1584021
ucauuugagcccagugcuc

SEQ ID NO: 1584023 - RNA, 19 nt, Artificial Sequence
  Description of Artificial Sequence: Synthetic oligonucleotide
  Sense strand starting at position 3231 of SEQ ID NO: 1560209
cccguuuauugagaccaaa

SEQ ID NO: 1584024 - RNA, 19 nt, Artificial Sequence
  Description of Artificial Sequence: Synthetic oligonucleotide
  Antisense strand to SEQ ID NO: 1584023
uuuggucucaauaaacggg

SEQ ID NO: 1584025 - RNA, 19 nt, Artificial Sequence
  Description of Artificial Sequence: Synthetic oligonucleotide
  Sense strand starting at position 3250 of SEQ ID NO: 1560209
ucuaaacucuggcuuugau

SEQ ID NO: 1584026 - RNA, 19 nt, Artificial Sequence
  Description of Artificial Sequence: Synthetic oligonucleotide
  Antisense strand to SEQ ID NO: 1584025
aucaaagccagaguuuaga

SEQ ID NO: 1584027 - RNA, 19 nt, Artificial Sequence
  Description of Artificial Sequence: Synthetic oligonucleotide
  Sense strand starting at position 3372 of SEQ ID NO: 1560209
uccugauccuuccaggaaa

SEQ ID NO: 1584028 - RNA, 19 nt, Artificial Sequence
  Description of Artificial Sequence: Synthetic oligonucleotide
  Antisense strand to SEQ ID NO: 1584027
uuuccuggaaggaucagga

SEQ ID NO: 1584029 - RNA, 19 nt, Artificial Sequence
  Description of Artificial Sequence: Synthetic oligonucleotide
  Sense strand starting at position 3374 of SEQ ID NO: 1560209
cugauccuuccaggaaacu

SEQ ID NO: 1584030 - RNA, 19 nt, Artificial Sequence
  Description of Artificial Sequence: Synthetic oligonucleotide
  Antisense strand to SEQ ID NO: 1584029
aguuuccuggaaggaucag

SEQ ID NO: 1584031 - RNA, 19 nt, Artificial Sequence
  Description of Artificial Sequence: Synthetic oligonucleotide
  Sense strand starting at position 3575 of SEQ ID NO: 1560209
ggacguaacugaugauggu

SEQ ID NO: 1584032 - RNA, 19 nt, Artificial Sequence
  Description of Artificial Sequence: Synthetic oligonucleotide
  Antisense strand to SEQ ID NO: 1584031
accaucaucaguuacgucc

SEQ ID NO: 1584033 - RNA, 19 nt, Artificial Sequence
  Description of Artificial Sequence: Synthetic oligonucleotide
  Sense strand starting at position 3651 of SEQ ID NO: 1560209
gucucuccugccuggagaa

SEQ ID NO: 1584034 - RNA, 19 nt, Artificial Sequence
  Description of Artificial Sequence: Synthetic oligonucleotide
  Antisense strand to SEQ ID NO: 1584033
uucuccaggcaggagagac

SEQ ID NO: 1584035 - RNA, 19 nt, Artificial Sequence
  Description of Artificial Sequence: Synthetic oligonucleotide
  Sense strand starting at position 3924 of SEQ ID NO: 1560209
auuugcuccugagauacau

SEQ ID NO: 1584036 - RNA, 19 nt, Artificial Sequence
  Description of Artificial Sequence: Synthetic oligonucleotide
  Antisense strand to SEQ ID NO: 1584035
auguaucucaggagcaaau

SEQ ID NO: 1584037 - RNA, 19 nt, Artificial Sequence
  Description of Artificial Sequence: Synthetic oligonucleotide
  Sense strand starting at position 52 of SEQ ID NO: 1560210
aaauuagcugggcguauaa

SEQ ID NO: 1584038 - RNA, 19 nt, Artificial Sequence
  Description of Artificial Sequence: Synthetic oligonucleotide
  Antisense strand to SEQ ID NO: 1584037
uuauacgcccagcuaauuu

SEQ ID NO: 1584039 - RNA, 19 nt, Artificial Sequence
  Description of Artificial Sequence: Synthetic oligonucleotide
  Sense strand starting at position 63 of SEQ ID NO: 1560210
gcguauaauccaugccugu

SEQ ID NO: 1584040 - RNA, 19 nt, Artificial Sequence
  Description of Artificial Sequence: Synthetic oligonucleotide
  Antisense strand to SEQ ID NO: 1584039
acaggcauggauuauacgc

SEQ ID NO: 1584041 - RNA, 19 nt, Artificial Sequence
  Description of Artificial Sequence: Synthetic oligonucleotide
  Sense strand starting at position 604 of SEQ ID NO: 1560210
gggugauagucucccagaa

SEQ ID NO: 1584042 - RNA, 19 nt, Artificial Sequence
  Description of Artificial Sequence: Synthetic oligonucleotide
  Antisense strand to SEQ ID NO: 1584041
uucugggagacuaucaccc

SEQ ID NO: 1584043 - RNA, 19 nt, Artificial Sequence
  Description of Artificial Sequence: Synthetic oligonucleotide
  Sense strand starting at position 606 of SEQ ID NO: 1560210
gugauagucucccagaaau

SEQ ID NO: 1584044 - RNA, 19 nt, Artificial Sequence
  Description of Artificial Sequence: Synthetic oligonucleotide
  Antisense strand to SEQ ID NO: 1584043
auuucugggagacuaucac

SEQ ID NO: 1584045 - RNA, 19 nt, Artificial Sequence
  Description of Artificial Sequence: Synthetic oligonucleotide
  Sense strand starting at position 631 of SEQ ID NO: 1560210
gcugaaaugccggaaguga

SEQ ID NO: 1584046 - RNA, 19 nt, Artificial Sequence
  Description of Artificial Sequence: Synthetic oligonucleotide
  Antisense strand to SEQ ID NO: 1584045
ucacuuccggcauuucagc

SEQ ID NO: 1584047 - RNA, 19 nt, Artificial Sequence
  Description of Artificial Sequence: Synthetic oligonucleotide
  Sense strand starting at position 877 of SEQ ID NO: 1560210
cgggcagagucauacuuca

SEQ ID NO: 1584048 - RNA, 19 nt, Artificial Sequence
  Description of Artificial Sequence: Synthetic oligonucleotide
  Antisense strand to SEQ ID NO: 1584047
ugaaguaugacucugcccg

SEQ ID NO: 1584049 - RNA, 19 nt, Artificial Sequence
  Description of Artificial Sequence: Synthetic oligonucleotide
  Sense strand starting at position 1312 of SEQ ID NO: 1560210
agggauagcucgcguuaac

SEQ ID NO: 1584050 - RNA, 19 nt, Artificial Sequence
  Description of Artificial Sequence: Synthetic oligonucleotide
  Antisense strand to SEQ ID NO: 1584049
guuaacgcgagcuaucccu

SEQ ID NO: 1584051 - RNA, 19 nt, Artificial Sequence
  Description of Artificial Sequence: Synthetic oligonucleotide
  Sense strand starting at position 1759 of SEQ ID NO: 1560210
caguacuuaccacguugaa

SEQ ID NO: 1584052 - RNA, 19 nt, Artificial Sequence
  Description of Artificial Sequence: Synthetic oligonucleotide
  Antisense strand to SEQ ID NO: 1584051
uucaacgugguaaguacug

SEQ ID NO: 1584053 - RNA, 19 nt, Artificial Sequence
  Description of Artificial Sequence: Synthetic oligonucleotide
  Sense strand starting at position 2113 of SEQ ID NO: 1560210
cggccagauucuccaccau

SEQ ID NO: 1584054 - RNA, 19 nt, Artificial Sequence
  Description of Artificial Sequence: Synthetic oligonucleotide
  Antisense strand to SEQ ID NO: 1584053
augguggagaaucuggccg

SEQ ID NO: 1584055 - RNA, 19 nt, Artificial Sequence
  Description of Artificial Sequence: Synthetic oligonucleotide
  Sense strand starting at position 388 of SEQ ID NO: 1560211
cugagaggcauauggaauu

SEQ ID NO: 1584056 - RNA, 19 nt, Artificial Sequence
  Description of Artificial Sequence: Synthetic oligonucleotide
  Antisense strand to SEQ ID NO: 1584055
aauuccauaugccucucag

SEQ ID NO: 1584057 - RNA, 19 nt, Artificial Sequence
  Description of Artificial Sequence: Synthetic oligonucleotide
  Sense strand starting at position 400 of SEQ ID NO: 1560211
uggaauuccugagcccaca

SEQ ID NO: 1584058 - RNA, 19 nt, Artificial Sequence
  Description of Artificial Sequence: Synthetic oligonucleotide
  Antisense strand to SEQ ID NO: 1584057
ugugggcucaggaauucca

SEQ ID NO: 1584059 - RNA, 19 nt, Artificial Sequence
  Description of Artificial Sequence: Synthetic oligonucleotide
  Sense strand starting at position 420 of SEQ ID NO: 1560211
aucugacagcuacaguauu

SEQ ID NO: 1584060 - RNA, 19 nt, Artificial Sequence
  Description of Artificial Sequence: Synthetic oligonucleotide
  Antisense strand to SEQ ID NO: 1584059
aauacuguagcugucagau

SEQ ID NO: 1584061 - RNA, 19 nt, Artificial Sequence
  Description of Artificial Sequence: Synthetic oligonucleotide
  Sense strand starting at position 462 of SEQ ID NO: 1560211
ccuagucuucuuggucuaa

SEQ ID NO: 1584062 - RNA, 19 nt, Artificial Sequence
  Description of Artificial Sequence: Synthetic oligonucleotide
  Antisense strand to SEQ ID NO: 1584061
uuagaccaagaagacuagg

SEQ ID NO: 1584063 - RNA, 19 nt, Artificial Sequence
  Description of Artificial Sequence: Synthetic oligonucleotide
  Sense strand starting at position 464 of SEQ ID NO: 1560211
uagucuucuuggucuaaga

SEQ ID NO: 1584064 - RNA, 19 nt, Artificial Sequence
  Description of Artificial Sequence: Synthetic oligonucleotide
  Antisense strand to SEQ ID NO: 1584063
ucuuagaccaagaagacua

SEQ ID NO: 1584065 - RNA, 19 nt, Artificial Sequence
  Description of Artificial Sequence: Synthetic oligonucleotide
  Sense strand starting at position 466 of SEQ ID NO: 1560211
gucuucuuggucuaagacu

SEQ ID NO: 1584066 - RNA, 19 nt, Artificial Sequence
  Description of Artificial Sequence: Synthetic oligonucleotide
  Antisense strand to SEQ ID NO: 1584065
agucuuagaccaagaagac

SEQ ID NO: 1584067 - RNA, 19 nt, Artificial Sequence
  Description of Artificial Sequence: Synthetic oligonucleotide
  Sense strand starting at position 690 of SEQ ID NO: 1560211
gcagaaguggucuguacug

SEQ ID NO: 1584068 - RNA, 19 nt, Artificial Sequence
  Description of Artificial Sequence: Synthetic oligonucleotide
  Antisense strand to SEQ ID NO: 1584067
caguacagaccacuucugc

SEQ ID NO: 1584069 - RNA, 19 nt, Artificial Sequence
  Description of Artificial Sequence: Synthetic oligonucleotide
  Sense strand starting at position 851 of SEQ ID NO: 1560211
gggugucuugcagguaaga

SEQ ID NO: 1584070 - RNA, 19 nt, Artificial Sequence
  Description of Artificial Sequence: Synthetic oligonucleotide
  Antisense strand to SEQ ID NO: 1584069
ucuuaccugcaagacaccc

SEQ ID NO: 1584071 - RNA, 19 nt, Artificial Sequence
  Description of Artificial Sequence: Synthetic oligonucleotide
  Sense strand starting at position 1267 of SEQ ID NO: 1560211
cccaguguccaaggaagaa

SEQ ID NO: 1584072 - RNA, 19 nt, Artificial Sequence
  Description of Artificial Sequence: Synthetic oligonucleotide
  Antisense strand to SEQ ID NO: 1584071
uucuuccuuggacacuggg

SEQ ID NO: 1584073 - RNA, 19 nt, Artificial Sequence
  Description of Artificial Sequence: Synthetic oligonucleotide
  Sense strand starting at position 1757 of SEQ ID NO: 1560211
ccgccagaggucagcgauu

SEQ ID NO: 1584074 - RNA, 19 nt, Artificial Sequence
  Description of Artificial Sequence: Synthetic oligonucleotide
  Antisense strand to SEQ ID NO: 1584073
aaucgcugaccucuggcgg

SEQ ID NO: 1584075 - RNA, 19 nt, Artificial Sequence
  Description of Artificial Sequence: Synthetic oligonucleotide
  Sense strand starting at position 1759 of SEQ ID NO: 1560211
gccagaggucagcgauuaa

SEQ ID NO: 1584076 - RNA, 19 nt, Artificial Sequence
  Description of Artificial Sequence: Synthetic oligonucleotide
  Antisense strand to SEQ ID NO: 1584075
uuaaucgcugaccucuggc

SEQ ID NO: 1584077 - RNA, 19 nt, Artificial Sequence
  Description of Artificial Sequence: Synthetic oligonucleotide
  Sense strand starting at position 1763 of SEQ ID NO: 1560211
gaggucagcgauuaaagau

SEQ ID NO: 1584078 - RNA, 19 nt, Artificial Sequence
  Description of Artificial Sequence: Synthetic oligonucleotide
  Antisense strand to SEQ ID NO: 1584077
aucuuuaaucgcugaccuc

SEQ ID NO: 1584079 - RNA, 19 nt, Artificial Sequence
  Description of Artificial Sequence: Synthetic oligonucleotide
  Sense strand starting at position 2007 of SEQ ID NO: 1560211
ucacgugacccggaaaguu

SEQ ID NO: 1584080 - RNA, 19 nt, Artificial Sequence
  Description of Artificial Sequence: Synthetic oligonucleotide
  Antisense strand to SEQ ID NO: 1584079
aacuuuccgggucacguga

SEQ ID NO: 1584081 - RNA, 19 nt, Artificial Sequence
  Description of Artificial Sequence: Synthetic oligonucleotide
  Sense strand starting at position 2017 of SEQ ID NO: 1560211
cggaaaguuuagucacuca

SEQ ID NO: 1584082 - RNA, 19 nt, Artificial Sequence
  Description of Artificial Sequence: Synthetic oligonucleotide
  Antisense strand to SEQ ID NO: 1584081
ugagugacuaaacuuuccg

SEQ ID NO: 1584083 - RNA, 19 nt, Artificial Sequence
  Description of Artificial Sequence: Synthetic oligonucleotide
  Sense strand starting at position 2306 of SEQ ID NO: 1560211
gggagcgcuuaaugagaaa

SEQ ID NO: 1584084 - RNA, 19 nt, Artificial Sequence
  Description of Artificial Sequence: Synthetic oligonucleotide
  Antisense strand to SEQ ID NO: 1584083
uuucucauuaagcgcuccc

SEQ ID NO: 1584085 - RNA, 19 nt, Artificial Sequence
  Description of Artificial Sequence: Synthetic oligonucleotide
  Sense strand starting at position 2535 of SEQ ID NO: 1560211
cuuugaaaggccgaaguaa

SEQ ID NO: 1584086 - RNA, 19 nt, Artificial Sequence
  Description of Artificial Sequence: Synthetic oligonucleotide
  Antisense strand to SEQ ID NO: 1584085
uuacuucggccuuucaaag

SEQ ID NO: 1584087 - RNA, 19 nt, Artificial Sequence
  Description of Artificial Sequence: Synthetic oligonucleotide
  Sense strand starting at position 2715 of SEQ ID NO: 1560211
gguaacagugagugagcua

SEQ ID NO: 1584088 - RNA, 19 nt, Artificial Sequence
  Description of Artificial Sequence: Synthetic oligonucleotide
  Antisense strand to SEQ ID NO: 1584087
uagcucacucacuguuacc

SEQ ID NO: 1584089 - RNA, 19 nt, Artificial Sequence
  Description of Artificial Sequence: Synthetic oligonucleotide
  Sense strand starting at position 2716 of SEQ ID NO: 1560211
guaacagugagugagcuau

SEQ ID NO: 1584090 - RNA, 19 nt, Artificial Sequence
  Description of Artificial Sequence: Synthetic oligonucleotide
  Antisense strand to SEQ ID NO: 1584089
auagcucacucacuguuac

SEQ ID NO: 1584091 - RNA, 19 nt, Artificial Sequence
  Description of Artificial Sequence: Synthetic oligonucleotide
  Sense strand starting at position 2818 of SEQ ID NO: 1560211
gguaaacaccuguguggaa

SEQ ID NO: 1584092 - RNA, 19 nt, Artificial Sequence
  Description of Artificial Sequence: Synthetic oligonucleotide
  Antisense strand to SEQ ID NO: 1584091
uuccacacagguguuuacc

SEQ ID NO: 1584093 - RNA, 19 nt, Artificial Sequence
  Description of Artificial Sequence: Synthetic oligonucleotide
  Sense strand starting at position 3208 of SEQ ID NO: 1560211
ugcauugaaucacagcuau

SEQ ID NO: 1584094 - RNA, 19 nt, Artificial Sequence
  Description of Artificial Sequence: Synthetic oligonucleotide
  Antisense strand to SEQ ID NO: 1584093
auagcugugauucaaugca

SEQ ID NO: 1584095 - RNA, 19 nt, Artificial Sequence
  Description of Artificial Sequence: Synthetic oligonucleotide
  Sense strand starting at position 3564 of SEQ ID NO: 1560211
gguggacaguaucucuaua

SEQ ID NO: 1584096 - RNA, 19 nt, Artificial Sequence
  Description of Artificial Sequence: Synthetic oligonucleotide
  Antisense strand to SEQ ID NO: 1584095
uauagagauacuguccacc

SEQ ID NO: 1584097 - RNA, 19 nt, Artificial Sequence
  Description of Artificial Sequence: Synthetic oligonucleotide
  Sense strand starting at position 3566 of SEQ ID NO: 1560211
uggacaguaucucuauaga

SEQ ID NO: 1584098 - RNA, 19 nt, Artificial Sequence
  Description of Artificial Sequence: Synthetic oligonucleotide
  Antisense strand to SEQ ID NO: 1584097
ucuauagagauacugucca

SEQ ID NO: 1584099 - RNA, 19 nt, Artificial Sequence
  Description of Artificial Sequence: Synthetic oligonucleotide
  Sense strand starting at position 3580 of SEQ ID NO: 1560211
auagaacacgccugcauua

SEQ ID NO: 1584100 - RNA, 19 nt, Artificial Sequence
  Description of Artificial Sequence: Synthetic oligonucleotide
  Antisense strand to SEQ ID NO: 1584099
uaaugcaggcguguucuau

SEQ ID NO: 1584101 - RNA, 19 nt, Artificial Sequence
  Description of Artificial Sequence: Synthetic oligonucleotide
  Sense strand starting at position 3618 of SEQ ID NO: 1560211
aaggcacucugauguggaa

SEQ ID NO: 1584102 - RNA, 19 nt, Artificial Sequence
  Description of Artificial Sequence: Synthetic oligonucleotide
  Antisense strand to SEQ ID NO: 1584101
uuccacaucagagugccuu

SEQ ID NO: 1584103 - RNA, 19 nt, Artificial Sequence
  Description of Artificial Sequence: Synthetic oligonucleotide
  Sense strand starting at position 3620 of SEQ ID NO: 1560211
ggcacucugauguggaaua

SEQ ID NO: 1584104 - RNA, 19 nt, Artificial Sequence
  Description of Artificial Sequence: Synthetic oligonucleotide
  Antisense strand to SEQ ID NO: 1584103
uauuccacaucagagugcc

SEQ ID NO: 1584105 - RNA, 19 nt, Artificial Sequence
  Description of Artificial Sequence: Synthetic oligonucleotide
  Sense strand starting at position 3650 of SEQ ID NO: 1560211
ggaacauaucugcauggcu

SEQ ID NO: 1584106 - RNA, 19 nt, Artificial Sequence
  Description of Artificial Sequence: Synthetic oligonucleotide
  Antisense strand to SEQ ID NO: 1584105
agccaugcagauauguucc

SEQ ID NO: 1584107 - RNA, 19 nt, Artificial Sequence
  Description of Artificial Sequence: Synthetic oligonucleotide
  Sense strand starting at position 3663 of SEQ ID NO: 1560211
auggcucaccuaugaaaug

SEQ ID NO: 1584108 - RNA, 19 nt, Artificial Sequence
  Description of Artificial Sequence: Synthetic oligonucleotide
  Antisense strand to SEQ ID NO: 1584107
cauuucauaggugagccau

SEQ ID NO: 1584109 - RNA, 19 nt, Artificial Sequence
  Description of Artificial Sequence: Synthetic oligonucleotide
  Sense strand starting at position 3664 of SEQ ID NO: 1560211
uggcucaccuaugaaaugu

SEQ ID NO: 1584110 - RNA, 19 nt, Artificial Sequence
  Description of Artificial Sequence: Synthetic oligonucleotide
  Antisense strand to SEQ ID NO: 1584109
acauuucauaggugagcca

SEQ ID NO: 1584111 - RNA, 19 nt, Artificial Sequence
  Description of Artificial Sequence: Synthetic oligonucleotide
  Sense strand starting at position 3699 of SEQ ID NO: 1560211
gggaauuccugggugucag

SEQ ID NO: 1584112 - RNA, 19 nt, Artificial Sequence
  Description of Artificial Sequence: Synthetic oligonucleotide
  Antisense strand to SEQ ID NO: 1584111
cugacacccaggaauuccc

SEQ ID NO: 1584113 - RNA, 19 nt, Artificial Sequence
  Description of Artificial Sequence: Synthetic oligonucleotide
  Sense strand starting at position 3700 of SEQ ID NO: 1560211
ggaauuccugggugucagu

SEQ ID NO: 1584114 - RNA, 19 nt, Artificial Sequence
  Description of Artificial Sequence: Synthetic oligonucleotide
  Antisense strand to SEQ ID NO: 1584113
acugacacccaggaauucc

SEQ ID NO: 1584115 - RNA, 19 nt, Artificial Sequence
  Description of Artificial Sequence: Synthetic oligonucleotide
  Sense strand starting at position 3713 of SEQ ID NO: 1560211
gucagugucuuguaaauac

SEQ ID NO: 1584116 - RNA, 19 nt, Artificial Sequence
  Description of Artificial Sequence: Synthetic oligonucleotide
  Antisense strand to SEQ ID NO: 1584115
guauuuacaagacacugac

SEQ ID NO: 1584117 - RNA, 19 nt, Artificial Sequence
  Description of Artificial Sequence: Synthetic oligonucleotide
  Sense strand starting at position 3754 of SEQ ID NO: 1560211
uacguaaaccuguauggga

SEQ ID NO: 1584118 - RNA, 19 nt, Artificial Sequence
  Description of Artificial Sequence: Synthetic oligonucleotide
  Antisense strand to SEQ ID NO: 1584117
ucccauacagguuuacgua

SEQ ID NO: 1584119 - RNA, 19 nt, Artificial Sequence
  Description of Artificial Sequence: Synthetic oligonucleotide
  Sense strand starting at position 3769 of SEQ ID NO: 1560211
gggacucgguuguauggaa

SEQ ID NO: 1584120 - RNA, 19 nt, Artificial Sequence
  Description of Artificial Sequence: Synthetic oligonucleotide
  Antisense strand to SEQ ID NO: 1584119
uuccauacaaccgaguccc

SEQ ID NO: 1584121 - RNA, 19 nt, Artificial Sequence
  Description of Artificial Sequence: Synthetic oligonucleotide
  Sense strand starting at position 3773 of SEQ ID NO: 1560211
cucgguuguauggaaacau

SEQ ID NO: 1584122 - RNA, 19 nt, Artificial Sequence
  Description of Artificial Sequence: Synthetic oligonucleotide
  Antisense strand to SEQ ID NO: 1584121
auguuuccauacaaccgag

SEQ ID NO: 1584123 - RNA, 19 nt, Artificial Sequence
  Description of Artificial Sequence: Synthetic oligonucleotide
  Sense strand starting at position 3793 of SEQ ID NO: 1560211
cccagauggguguauacuu

SEQ ID NO: 1584124 - RNA, 19 nt, Artificial Sequence
  Description of Artificial Sequence: Synthetic oligonucleotide
  Antisense strand to SEQ ID NO: 1584123
aaguauacacccaucuggg

SEQ ID NO: 1584125 - RNA, 19 nt, Artificial Sequence
  Description of Artificial Sequence: Synthetic oligonucleotide
  Sense strand starting at position 3802 of SEQ ID NO: 1560211
guguauacuuaacugaaac

SEQ ID NO: 1584126 - RNA, 19 nt, Artificial Sequence
  Description of Artificial Sequence: Synthetic oligonucleotide
  Antisense strand to SEQ ID NO: 1584125
guuucaguuaaguauacac

SEQ ID NO: 1584127 - RNA, 19 nt, Artificial Sequence
  Description of Artificial Sequence: Synthetic oligonucleotide
  Sense strand starting at position 3878 of SEQ ID NO: 1560211
gaaacauaccugugaggua

SEQ ID NO: 1584128 - RNA, 19 nt, Artificial Sequence
  Description of Artificial Sequence: Synthetic oligonucleotide
  Antisense strand to SEQ ID NO: 1584127
uaccucacagguauguuuc

SEQ ID NO: 1584129 - RNA, 19 nt, Artificial Sequence
  Description of Artificial Sequence: Synthetic oligonucleotide
  Sense strand starting at position 3879 of SEQ ID NO: 1560211
aaacauaccugugagguaa

SEQ ID NO: 1584130 - RNA, 19 nt, Artificial Sequence
  Description of Artificial Sequence: Synthetic oligonucleotide
  Antisense strand to SEQ ID NO: 1584129
uuaccucacagguauguuu

SEQ ID NO: 1584131 - RNA, 19 nt, Artificial Sequence
  Description of Artificial Sequence: Synthetic oligonucleotide
  Sense strand starting at position 3898 of SEQ ID NO: 1560211
gagaaagcaccuuguagga

SEQ ID NO: 1584132 - RNA, 19 nt, Artificial Sequence
  Description of Artificial Sequence: Synthetic oligonucleotide
  Antisense strand to SEQ ID NO: 1584131
uccuacaaggugcuuucuc

SEQ ID NO: 1584133 - RNA, 19 nt, Artificial Sequence
  Description of Artificial Sequence: Synthetic oligonucleotide
  Sense strand starting at position 3917 of SEQ ID NO: 1560211
ggaacaccuguauggaauu

SEQ ID NO: 1584134 - RNA, 19 nt, Artificial Sequence
  Description of Artificial Sequence: Synthetic oligonucleotide
  Antisense strand to SEQ ID NO: 1584133
aauuccauacagguguucc

SEQ ID NO: 1584135 - RNA, 19 nt, Artificial Sequence
  Description of Artificial Sequence: Synthetic oligonucleotide
  Sense strand starting at position 305 of SEQ ID NO: 1560212
aaguuugaguuugaaccua

SEQ ID NO: 1584136 - RNA, 19 nt, Artificial Sequence
  Description of Artificial Sequence: Synthetic oligonucleotide
  Antisense strand to SEQ ID NO: 1584135
uagguucaaacucaaacuu

SEQ ID NO: 1584137 - RNA, 19 nt, Artificial Sequence
  Description of Artificial Sequence: Synthetic oligonucleotide
  Sense strand starting at position 326 of SEQ ID NO: 1560212
uccaaauugcugugugacu

SEQ ID NO: 1584138 - RNA, 19 nt, Artificial Sequence
  Description of Artificial Sequence: Synthetic oligonucleotide
  Antisense strand to SEQ ID NO: 1584137
agucacacagcaauuugga

SEQ ID NO: 1584139 - RNA, 19 nt, Artificial Sequence
  Description of Artificial Sequence: Synthetic oligonucleotide
  Sense strand starting at position 327 of SEQ ID NO: 1560212
ccaaauugcugugugacuu

SEQ ID NO: 1584140 - RNA, 19 nt, Artificial Sequence
  Description of Artificial Sequence: Synthetic oligonucleotide
  Antisense strand to SEQ ID NO: 1584139
aagucacacagcaauuugg

SEQ ID NO: 1584141 - RNA, 19 nt, Artificial Sequence
  Description of Artificial Sequence: Synthetic oligonucleotide
  Sense strand starting at position 328 of SEQ ID NO: 1560212
caaauugcugugugacuuu

SEQ ID NO: 1584142 - RNA, 19 nt, Artificial Sequence
  Description of Artificial Sequence: Synthetic oligonucleotide
  Antisense strand to SEQ ID NO: 1584141
aaagucacacagcaauuug

SEQ ID NO: 1584143 - RNA, 19 nt, Artificial Sequence
  Description of Artificial Sequence: Synthetic oligonucleotide
  Sense strand starting at position 338 of SEQ ID NO: 1560212
ugugacuuuggaugaguuu

SEQ ID NO: 1584144 - RNA, 19 nt, Artificial Sequence
  Description of Artificial Sequence: Synthetic oligonucleotide
  Antisense strand to SEQ ID NO: 1584143
aaacucauccaaagucaca

SEQ ID NO: 1584145 - RNA, 19 nt, Artificial Sequence
  Description of Artificial Sequence: Synthetic oligonucleotide
  Sense strand starting at position 398 of SEQ ID NO: 1560212
gcugaugcuacccgcuaaa

SEQ ID NO: 1584146 - RNA, 19 nt, Artificial Sequence
  Description of Artificial Sequence: Synthetic oligonucleotide
  Antisense strand to SEQ ID NO: 1584145
uuuagcggguagcaucagc

SEQ ID NO: 1584147 - RNA, 19 nt, Artificial Sequence
  Description of Artificial Sequence: Synthetic oligonucleotide
  Sense strand starting at position 401 of SEQ ID NO: 1560212
gaugcuacccgcuaaauga

SEQ ID NO: 1584148 - RNA, 19 nt, Artificial Sequence
  Description of Artificial Sequence: Synthetic oligonucleotide
  Antisense strand to SEQ ID NO: 1584147
ucauuuagcggguagcauc

SEQ ID NO: 1584149 - RNA, 19 nt, Artificial Sequence
  Description of Artificial Sequence: Synthetic oligonucleotide
  Sense strand starting at position 414 of SEQ ID NO: 1560212
aaaugaugugcuuggcuaa

SEQ ID NO: 1584150 - RNA, 19 nt, Artificial Sequence
  Description of Artificial Sequence: Synthetic oligonucleotide
  Antisense strand to SEQ ID NO: 1584149
uuagccaagcacaucauuu

SEQ ID NO: 1584151 - RNA, 19 nt, Artificial Sequence
  Description of Artificial Sequence: Synthetic oligonucleotide
  Sense strand starting at position 415 of SEQ ID NO: 1560212
aaugaugugcuuggcuaaa

SEQ ID NO: 1584152 - RNA, 19 nt, Artificial Sequence
  Description of Artificial Sequence: Synthetic oligonucleotide
  Antisense strand to SEQ ID NO: 1584151
uuuagccaagcacaucauu

SEQ ID NO: 1584153 - RNA, 19 nt, Artificial Sequence
  Description of Artificial Sequence: Synthetic oligonucleotide
  Sense strand starting at position 446 of SEQ ID NO: 1560212
gacccauuagugcaucgua

SEQ ID NO: 1584154 - RNA, 19 nt, Artificial Sequence
  Description of Artificial Sequence: Synthetic oligonucleotide
  Antisense strand to SEQ ID NO: 1584153
uacgaugcacuaauggguc

SEQ ID NO: 1584155 - RNA, 19 nt, Artificial Sequence
  Description of Artificial Sequence: Synthetic oligonucleotide
  Sense strand starting at position 449 of SEQ ID NO: 1560212
ccauuagugcaucguagag

SEQ ID NO: 1584156 - RNA, 19 nt, Artificial Sequence
  Description of Artificial Sequence: Synthetic oligonucleotide
  Antisense strand to SEQ ID NO: 1584155
cucuacgaugcacuaaugg

SEQ ID NO: 1584157 - RNA, 19 nt, Artificial Sequence
  Description of Artificial Sequence: Synthetic oligonucleotide
  Sense strand starting at position 717 of SEQ ID NO: 1560212
aacagaugugagggucaca

SEQ ID NO: 1584158 - RNA, 19 nt, Artificial Sequence
  Description of Artificial Sequence: Synthetic oligonucleotide
  Antisense strand to SEQ ID NO: 1584157
ugugacccucacaucuguu

SEQ ID NO: 1584159 - RNA, 19 nt, Artificial Sequence
  Description of Artificial Sequence: Synthetic oligonucleotide
  Sense strand starting at position 779 of SEQ ID NO: 1560212
gcucuuuccggcuagaguu

SEQ ID NO: 1584160 - RNA, 19 nt, Artificial Sequence
  Description of Artificial Sequence: Synthetic oligonucleotide
  Antisense strand to SEQ ID NO: 1584159
aacucuagccggaaagagc

SEQ ID NO: 1584161 - RNA, 19 nt, Artificial Sequence
  Description of Artificial Sequence: Synthetic oligonucleotide
  Sense strand starting at position 864 of SEQ ID NO: 1560212
ggacuuugaggcugauaga

SEQ ID NO: 1584162 - RNA, 19 nt, Artificial Sequence
  Description of Artificial Sequence: Synthetic oligonucleotide
  Antisense strand to SEQ ID NO: 1584161
ucuaucagccucaaagucc

SEQ ID NO: 1584163 - RNA, 19 nt, Artificial Sequence
  Description of Artificial Sequence: Synthetic oligonucleotide
  Sense strand starting at position 884 of SEQ ID NO: 1560212
agaauuccacagugugaga

SEQ ID NO: 1584164 - RNA, 19 nt, Artificial Sequence
  Description of Artificial Sequence: Synthetic oligonucleotide
  Antisense strand to SEQ ID NO: 1584163
ucucacacuguggaauucu

SEQ ID NO: 1584165 - RNA, 19 nt, Artificial Sequence
  Description of Artificial Sequence: Synthetic oligonucleotide
  Sense strand starting at position 903 of SEQ ID NO: 1560212
gccaauuucucuuaaagug

SEQ ID NO: 1584166 - RNA, 19 nt, Artificial Sequence
  Description of Artificial Sequence: Synthetic oligonucleotide
  Antisense strand to SEQ ID NO: 1584165
cacuuuaagagaaauuggc

SEQ ID NO: 1584167 - RNA, 19 nt, Artificial Sequence
  Description of Artificial Sequence: Synthetic oligonucleotide
  Sense strand starting at position 2103 of SEQ ID NO: 1560212
gaccguuaucuggguguuu

SEQ ID NO: 1584168 - RNA, 19 nt, Artificial Sequence
  Description of Artificial Sequence: Synthetic oligonucleotide
  Antisense strand to SEQ ID NO: 1584167
aaacacccagauaacgguc

SEQ ID NO: 1584169 - RNA, 19 nt, Artificial Sequence
  Description of Artificial Sequence: Synthetic oligonucleotide
  Sense strand starting at position 2190 of SEQ ID NO: 1560212
cccuacuuaugaggacuuu

SEQ ID NO: 1584170 - RNA, 19 nt, Artificial Sequence
  Description of Artificial Sequence: Synthetic oligonucleotide
  Antisense strand to SEQ ID NO: 1584169
aaaguccucauaaguaggg

SEQ ID NO: 1584171 - RNA, 19 nt, Artificial Sequence
  Description of Artificial Sequence: Synthetic oligonucleotide
  Sense strand starting at position 2542 of SEQ ID NO: 1560212
ccagauggguucugggaua

SEQ ID NO: 1584172 - RNA, 19 nt, Artificial Sequence
  Description of Artificial Sequence: Synthetic oligonucleotide
  Antisense strand to SEQ ID NO: 1584171
uaucccagaacccaucugg

SEQ ID NO: 1584173 - RNA, 19 nt, Artificial Sequence
  Description of Artificial Sequence: Synthetic oligonucleotide
  Sense strand starting at position 2746 of SEQ ID NO: 1560212
augggugauucugugcaau

SEQ ID NO: 1584174 - RNA, 19 nt, Artificial Sequence
  Description of Artificial Sequence: Synthetic oligonucleotide
  Antisense strand to SEQ ID NO: 1584173
auugcacagaaucacccau

SEQ ID NO: 1584175 - RNA, 19 nt, Artificial Sequence
  Description of Artificial Sequence: Synthetic oligonucleotide
  Sense strand starting at position 2748 of SEQ ID NO: 1560212
gggugauucugugcaauca

SEQ ID NO: 1584176 - RNA, 19 nt, Artificial Sequence
  Description of Artificial Sequence: Synthetic oligonucleotide
  Antisense strand to SEQ ID NO: 1584175
ugauugcacagaaucaccc

SEQ ID NO: 1584177 - RNA, 19 nt, Artificial Sequence
  Description of Artificial Sequence: Synthetic oligonucleotide
  Sense strand starting at position 2749 of SEQ ID NO: 1560212
ggugauucugugcaaucaa

SEQ ID NO: 1584178 - RNA, 19 nt, Artificial Sequence
  Description of Artificial Sequence: Synthetic oligonucleotide
  Antisense strand to SEQ ID NO: 1584177
uugauugcacagaaucacc

SEQ ID NO: 1584179 - RNA, 19 nt, Artificial Sequence
  Description of Artificial Sequence: Synthetic oligonucleotide
  Sense strand starting at position 2773 of SEQ ID NO: 1560212
ucuagaaucuucuaucguu

SEQ ID NO: 1584180 - RNA, 19 nt, Artificial Sequence
  Description of Artificial Sequence: Synthetic oligonucleotide
  Antisense strand to SEQ ID NO: 1584179
aacgauagaagauucuaga

SEQ ID NO: 1584181 - RNA, 19 nt, Artificial Sequence
  Description of Artificial Sequence: Synthetic oligonucleotide
  Sense strand starting at position 2873 of SEQ ID NO: 1560212
cuggaacucuccucuugua

SEQ ID NO: 1584182 - RNA, 19 nt, Artificial Sequence
  Description of Artificial Sequence: Synthetic oligonucleotide
  Antisense strand to SEQ ID NO: 1584181
uacaagaggagaguuccag

SEQ ID NO: 1584183 - RNA, 19 nt, Artificial Sequence
  Description of Artificial Sequence: Synthetic oligonucleotide
  Sense strand starting at position 2910 of SEQ ID NO: 1560212
ggcucuaggucacuguauu

SEQ ID NO: 1584184 - RNA, 19 nt, Artificial Sequence
  Description of Artificial Sequence: Synthetic oligonucleotide
  Antisense strand to SEQ ID NO: 1584183
aauacagugaccuagagcc

SEQ ID NO: 1584185 - RNA, 19 nt, Artificial Sequence
  Description of Artificial Sequence: Synthetic oligonucleotide
  Sense strand starting at position 2916 of SEQ ID NO: 1560212
aggucacuguauugacauu

SEQ ID NO: 1584186 - RNA, 19 nt, Artificial Sequence
  Description of Artificial Sequence: Synthetic oligonucleotide
  Antisense strand to SEQ ID NO: 1584185
aaugucaauacagugaccu

SEQ ID NO: 1584187 - RNA, 19 nt, Artificial Sequence
  Description of Artificial Sequence: Synthetic oligonucleotide
  Sense strand starting at position 2934 of SEQ ID NO: 1560212
uuuagugaauguucgauau

SEQ ID NO: 1584188 - RNA, 19 nt, Artificial Sequence
  Description of Artificial Sequence: Synthetic oligonucleotide
  Antisense strand to SEQ ID NO: 1584187
auaucgaacauucacuaaa

SEQ ID NO: 1584189 - RNA, 19 nt, Artificial Sequence
  Description of Artificial Sequence: Synthetic oligonucleotide
  Sense strand starting at position 2936 of SEQ ID NO: 1560212
uagugaauguucgauauuu

SEQ ID NO: 1584190 - RNA, 19 nt, Artificial Sequence
  Description of Artificial Sequence: Synthetic oligonucleotide
  Antisense strand to SEQ ID NO: 1584189
aaauaucgaacauucacua

SEQ ID NO: 1584191 - RNA, 19 nt, Artificial Sequence
  Description of Artificial Sequence: Synthetic oligonucleotide
  Sense strand starting at position 2944 of SEQ ID NO: 1560212
guucgauauuugugaauca

SEQ ID NO: 1584192 - RNA, 19 nt, Artificial Sequence
  Description of Artificial Sequence: Synthetic oligonucleotide
  Antisense strand to SEQ ID NO: 1584191
ugauucacaaauaucgaac

SEQ ID NO: 1584193 - RNA, 19 nt, Artificial Sequence
  Description of Artificial Sequence: Synthetic oligonucleotide
  Sense strand starting at position 2945 of SEQ ID NO: 1560212
uucgauauuugugaaucag

SEQ ID NO: 1584194 - RNA, 19 nt, Artificial Sequence
  Description of Artificial Sequence: Synthetic oligonucleotide
  Antisense strand to SEQ ID NO: 1584193
cugauucacaaauaucgaa

SEQ ID NO: 1584195 - RNA, 19 nt, Artificial Sequence
  Description of Artificial Sequence: Synthetic oligonucleotide
  Sense strand starting at position 3356 of SEQ ID NO: 1560212
ccuuuagcagaugacauau

SEQ ID NO: 1584196 - RNA, 19 nt, Artificial Sequence
  Description of Artificial Sequence: Synthetic oligonucleotide
  Antisense strand to SEQ ID NO: 1584195
auaugucaucugcuaaagg

SEQ ID NO: 1584197 - RNA, 19 nt, Artificial Sequence
  Description of Artificial Sequence: Synthetic oligonucleotide
  Sense strand starting at position 3368 of SEQ ID NO: 1560212
gacauauuagaccaagcgu

SEQ ID NO: 1584198 - RNA, 19 nt, Artificial Sequence
  Description of Artificial Sequence: Synthetic oligonucleotide
  Antisense strand to SEQ ID NO: 1584197
acgcuuggucuaauauguc

SEQ ID NO: 1584199 - RNA, 19 nt, Artificial Sequence
  Description of Artificial Sequence: Synthetic oligonucleotide
  Sense strand starting at position 3523 of SEQ ID NO: 1560212
guagcacaugccugcaaua

SEQ ID NO: 1584200 - RNA, 19 nt, Artificial Sequence
  Description of Artificial Sequence: Synthetic oligonucleotide
  Antisense strand to SEQ ID NO: 1584199
uauugcaggcaugugcuac

SEQ ID NO: 1584201 - RNA, 19 nt, Artificial Sequence
  Description of Artificial Sequence: Synthetic oligonucleotide
  Sense strand starting at position 3679 of SEQ ID NO: 1560212
cagugcaguccugaaggau

SEQ ID NO: 1584202 - RNA, 19 nt, Artificial Sequence
  Description of Artificial Sequence: Synthetic oligonucleotide
  Antisense strand to SEQ ID NO: 1584201
auccuucaggacugcacug

SEQ ID NO: 1584203 - RNA, 19 nt, Artificial Sequence
  Description of Artificial Sequence: Synthetic oligonucleotide
  Sense strand starting at position 3920 of SEQ ID NO: 1560212
gugcaaagcccuguguguu

SEQ ID NO: 1584204 - RNA, 19 nt, Artificial Sequence
  Description of Artificial Sequence: Synthetic oligonucleotide
  Antisense strand to SEQ ID NO: 1584203
aacacacagggcuuugcac

SEQ ID NO: 1584205 - RNA, 19 nt, Artificial Sequence
  Description of Artificial Sequence: Synthetic oligonucleotide
  Sense strand starting at position 3932 of SEQ ID NO: 1560212
guguguuguggcaaggagu

SEQ ID NO: 1584206 - RNA, 19 nt, Artificial Sequence
  Description of Artificial Sequence: Synthetic oligonucleotide
  Antisense strand to SEQ ID NO: 1584205
acuccuugccacaacacac

SEQ ID NO: 1584207 - RNA, 19 nt, Artificial Sequence
  Description of Artificial Sequence: Synthetic oligonucleotide
  Sense strand starting at position 3933 of SEQ ID NO: 1560212
uguguuguggcaaggaguu

SEQ ID NO: 1584208 - RNA, 19 nt, Artificial Sequence
  Description of Artificial Sequence: Synthetic oligonucleotide
  Antisense strand to SEQ ID NO: 1584207
aacuccuugccacaacaca

SEQ ID NO: 1584209 - RNA, 19 nt, Artificial Sequence
  Description of Artificial Sequence: Synthetic oligonucleotide
  Sense strand starting at position 3946 of SEQ ID NO: 1560212
ggaguuugguuugugcuaa

SEQ ID NO: 1584210 - RNA, 19 nt, Artificial Sequence
  Description of Artificial Sequence: Synthetic oligonucleotide
  Antisense strand to SEQ ID NO: 1584209
uuagcacaaaccaaacucc

SEQ ID NO: 1584211 - RNA, 19 nt, Artificial Sequence
  Description of Artificial Sequence: Synthetic oligonucleotide
  Sense strand starting at position 3950 of SEQ ID NO: 1560212
uuugguuugugcuaaacag

SEQ ID NO: 1584212 - RNA, 19 nt, Artificial Sequence
  Description of Artificial Sequence: Synthetic oligonucleotide
  Antisense strand to SEQ ID NO: 1584211
cuguuuagcacaaaccaaa

SEQ ID NO: 1584213 - RNA, 19 nt, Artificial Sequence
  Description of Artificial Sequence: Synthetic oligonucleotide
  Sense strand starting at position 3978 of SEQ ID NO: 1560212
guuggaaguuuagcaaaua

SEQ ID NO: 1584214 - RNA, 19 nt, Artificial Sequence
  Description of Artificial Sequence: Synthetic oligonucleotide
  Antisense strand to SEQ ID NO: 1584213
uauuugcuaaacuuccaac

SEQ ID NO: 1584215 - RNA, 19 nt, Artificial Sequence
  Description of Artificial Sequence: Synthetic oligonucleotide
  Sense strand starting at position 24 of SEQ ID NO: 1560213
agccacugccguuauuaaa

SEQ ID NO: 1584216 - RNA, 19 nt, Artificial Sequence
  Description of Artificial Sequence: Synthetic oligonucleotide
  Antisense strand to SEQ ID NO: 1584215
uuuaauaacggcaguggcu

SEQ ID NO: 1584217 - RNA, 19 nt, Artificial Sequence
  Description of Artificial Sequence: Synthetic oligonucleotide
  Sense strand starting at position 42 of SEQ ID NO: 1560213
aaaggaacaccauguguuu

SEQ ID NO: 1584218 - RNA, 19 nt, Artificial Sequence
  Description of Artificial Sequence: Synthetic oligonucleotide
  Antisense strand to SEQ ID NO: 1584217
aaacacaugguguuccuuu

SEQ ID NO: 1584219 - RNA, 19 nt, Artificial Sequence
  Description of Artificial Sequence: Synthetic oligonucleotide
  Sense strand starting at position 73 of SEQ ID NO: 1560213
gugugagauucucugcaag

SEQ ID NO: 1584220 - RNA, 19 nt, Artificial Sequence
  Description of Artificial Sequence: Synthetic oligonucleotide
  Antisense strand to SEQ ID NO: 1584219
cuugcagagaaucucacac

SEQ ID NO: 1584221 - RNA, 19 nt, Artificial Sequence
  Description of Artificial Sequence: Synthetic oligonucleotide
  Sense strand starting at position 75 of SEQ ID NO: 1560213
gugagauucucugcaagca

SEQ ID NO: 1584222 - RNA, 19 nt, Artificial Sequence
  Description of Artificial Sequence: Synthetic oligonucleotide
  Antisense strand to SEQ ID NO: 1584221
ugcuugcagagaaucucac

SEQ ID NO: 1584223 - RNA, 19 nt, Artificial Sequence
  Description of Artificial Sequence: Synthetic oligonucleotide
  Sense strand starting at position 219 of SEQ ID NO: 1560213
aaacauauugccgaggugu

SEQ ID NO: 1584224 - RNA, 19 nt, Artificial Sequence
  Description of Artificial Sequence: Synthetic oligonucleotide
  Antisense strand to SEQ ID NO: 1584223
acaccucggcaauauguuu

SEQ ID NO: 1584225 - RNA, 19 nt, Artificial Sequence
  Description of Artificial Sequence: Synthetic oligonucleotide
  Sense strand starting at position 221 of SEQ ID NO: 1560213
acauauugccgagguguga

SEQ ID NO: 1584226 - RNA, 19 nt, Artificial Sequence
  Description of Artificial Sequence: Synthetic oligonucleotide
  Antisense strand to SEQ ID NO: 1584225
ucacaccucggcaauaugu

SEQ ID NO: 1584227 - RNA, 19 nt, Artificial Sequence
  Description of Artificial Sequence: Synthetic oligonucleotide
  Sense strand starting at position 225 of SEQ ID NO: 1560213
auugccgaggugugagaau

SEQ ID NO: 1584228 - RNA, 19 nt, Artificial Sequence
  Description of Artificial Sequence: Synthetic oligonucleotide
  Antisense strand to SEQ ID NO: 1584227
auucucacaccucggcaau

SEQ ID NO: 1584229 - RNA, 19 nt, Artificial Sequence
  Description of Artificial Sequence: Synthetic oligonucleotide
  Sense strand starting at position 791 of SEQ ID NO: 1560213
gccacaagccagugugauu

SEQ ID NO: 1584230 - RNA, 19 nt, Artificial Sequence
  Description of Artificial Sequence: Synthetic oligonucleotide
  Antisense strand to SEQ ID NO: 1584229
aaucacacuggcuuguggc

SEQ ID NO: 1584231 - RNA, 19 nt, Artificial Sequence
  Description of Artificial Sequence: Synthetic oligonucleotide
  Sense strand starting at position 800 of SEQ ID NO: 1560213
cagugugauucuuugugug

SEQ ID NO: 1584232 - RNA, 19 nt, Artificial Sequence
  Description of Artificial Sequence: Synthetic oligonucleotide
  Antisense strand to SEQ ID NO: 1584231
cacacaaagaaucacacug

SEQ ID NO: 1584233 - RNA, 19 nt, Artificial Sequence
  Description of Artificial Sequence: Synthetic oligonucleotide
  Sense strand starting at position 802 of SEQ ID NO: 1560213
gugugauucuuuguguguc

SEQ ID NO: 1584234 - RNA, 19 nt, Artificial Sequence
  Description of Artificial Sequence: Synthetic oligonucleotide
  Antisense strand to SEQ ID NO: 1584233
gacacacaaagaaucacac

SEQ ID NO: 1584235 - RNA, 19 nt, Artificial Sequence
  Description of Artificial Sequence: Synthetic oligonucleotide
  Sense strand starting at position 1028 of SEQ ID NO: 1560213
cccacucgcucacaaagau

SEQ ID NO: 1584236 - RNA, 19 nt, Artificial Sequence
  Description of Artificial Sequence: Synthetic oligonucleotide
  Antisense strand to SEQ ID NO: 1584235
aucuuugugagcgaguggg

SEQ ID NO: 1584237 - RNA, 19 nt, Artificial Sequence
  Description of Artificial Sequence: Synthetic oligonucleotide
  Sense strand starting at position 1041 of SEQ ID NO: 1560213
aaagauuccucucgcugga

SEQ ID NO: 1584238 - RNA, 19 nt, Artificial Sequence
  Description of Artificial Sequence: Synthetic oligonucleotide
  Antisense strand to SEQ ID NO: 1584237
uccagcgagaggaaucuuu

SEQ ID NO: 1584239 - RNA, 19 nt, Artificial Sequence
  Description of Artificial Sequence: Synthetic oligonucleotide
  Sense strand starting at position 1497 of SEQ ID NO: 1560213
gcaggacucucuggacagu

SEQ ID NO: 1584240 - RNA, 19 nt, Artificial Sequence
  Description of Artificial Sequence: Synthetic oligonucleotide
  Antisense strand to SEQ ID NO: 1584239
acuguccagagaguccugc

SEQ ID NO: 1584241 - RNA, 19 nt, Artificial Sequence
  Description of Artificial Sequence: Synthetic oligonucleotide
  Sense strand starting at position 2529 of SEQ ID NO: 1560213
uuucgauucuccgcgagua

SEQ ID NO: 1584242 - RNA, 19 nt, Artificial Sequence
  Description of Artificial Sequence: Synthetic oligonucleotide
  Antisense strand to SEQ ID NO: 1584241
uacucgcggagaaucgaaa

SEQ ID NO: 1584243 - RNA, 19 nt, Artificial Sequence
  Description of Artificial Sequence: Synthetic oligonucleotide
  Sense strand starting at position 2530 of SEQ ID NO: 1560213
uucgauucuccgcgaguag

SEQ ID NO: 1584244 - RNA, 19 nt, Artificial Sequence
  Description of Artificial Sequence: Synthetic oligonucleotide
  Antisense strand to SEQ ID NO: 1584243
cuacucgcggagaaucgaa

SEQ ID NO: 1584245 - RNA, 19 nt, Artificial Sequence
  Description of Artificial Sequence: Synthetic oligonucleotide
  Sense strand starting at position 2641 of SEQ ID NO: 1560213
gcgggauggguuugagguu

SEQ ID NO: 1584246 - RNA, 19 nt, Artificial Sequence
  Description of Artificial Sequence: Synthetic oligonucleotide
  Antisense strand to SEQ ID NO: 1584245
aaccucaaacccaucccgc

SEQ ID NO: 1584247 - RNA, 19 nt, Artificial Sequence
  Description of Artificial Sequence: Synthetic oligonucleotide
  Sense strand starting at position 2978 of SEQ ID NO: 1560213
aagagccuucuccguguua

SEQ ID NO: 1584248 - RNA, 19 nt, Artificial Sequence
  Description of Artificial Sequence: Synthetic oligonucleotide
  Antisense strand to SEQ ID NO: 1584247
uaacacggagaaggcucuu

SEQ ID NO: 1584249 - RNA, 19 nt, Artificial Sequence
  Description of Artificial Sequence: Synthetic oligonucleotide
  Sense strand starting at position 2979 of SEQ ID NO: 1560213
agagccuucuccguguuau

SEQ ID NO: 1584250 - RNA, 19 nt, Artificial Sequence
  Description of Artificial Sequence: Synthetic oligonucleotide
  Antisense strand to SEQ ID NO: 1584249
auaacacggagaaggcucu

SEQ ID NO: 1584251 - RNA, 19 nt, Artificial Sequence
  Description of Artificial Sequence: Synthetic oligonucleotide
  Sense strand starting at position 2980 of SEQ ID NO: 1560213
gagccuucuccguguuauu

SEQ ID NO: 1584252 - RNA, 19 nt, Artificial Sequence
  Description of Artificial Sequence: Synthetic oligonucleotide
  Antisense strand to SEQ ID NO: 1584251
aauaacacggagaaggcuc

SEQ ID NO: 1584253 - RNA, 19 nt, Artificial Sequence
  Description of Artificial Sequence: Synthetic oligonucleotide
  Sense strand starting at position 2982 of SEQ ID NO: 1560213
gccuucuccguguuauuau

SEQ ID NO: 1584254 - RNA, 19 nt, Artificial Sequence
  Description of Artificial Sequence: Synthetic oligonucleotide
  Antisense strand to SEQ ID NO: 1584253
auaauaacacggagaaggc

SEQ ID NO: 1584255 - RNA, 19 nt, Artificial Sequence
  Description of Artificial Sequence: Synthetic oligonucleotide
  Sense strand starting at position 2983 of SEQ ID NO: 1560213
ccuucuccguguuauuauu

SEQ ID NO: 1584256 - RNA, 19 nt, Artificial Sequence
  Description of Artificial Sequence: Synthetic oligonucleotide
  Antisense strand to SEQ ID NO: 1584255
aauaauaacacggagaagg

SEQ ID NO: 1584257 - RNA, 19 nt, Artificial Sequence
  Description of Artificial Sequence: Synthetic oligonucleotide
  Sense strand starting at position 3003 of SEQ ID NO: 1560213
uuggccauugcucgaguuu

SEQ ID NO: 1584258 - RNA, 19 nt, Artificial Sequence
  Description of Artificial Sequence: Synthetic oligonucleotide
  Antisense strand to SEQ ID NO: 1584257
aaacucgagcaauggccaa

SEQ ID NO: 1584259 - RNA, 19 nt, Artificial Sequence
  Description of Artificial Sequence: Synthetic oligonucleotide
  Sense strand starting at position 3319 of SEQ ID NO: 1560213
ccauuugucugcccaagac

SEQ ID NO: 1584260 - RNA, 19 nt, Artificial Sequence
  Description of Artificial Sequence: Synthetic oligonucleotide
  Antisense strand to SEQ ID NO: 1584259
gucuugggcagacaaaugg

SEQ ID NO: 1584261 - RNA, 19 nt, Artificial Sequence
  Description of Artificial Sequence: Synthetic oligonucleotide
  Sense strand starting at position 3484 of SEQ ID NO: 1560213
gccauuuacuucgggaaac

SEQ ID NO: 1584262 - RNA, 19 nt, Artificial Sequence
  Description of Artificial Sequence: Synthetic oligonucleotide
  Antisense strand to SEQ ID NO: 1584261
guuucccgaaguaaauggc

SEQ ID NO: 1584263 - RNA, 19 nt, Artificial Sequence
  Description of Artificial Sequence: Synthetic oligonucleotide
  Sense strand starting at position 3554 of SEQ ID NO: 1560213
cuaggagcuucugugggaa

SEQ ID NO: 1584264 - RNA, 19 nt, Artificial Sequence
  Description of Artificial Sequence: Synthetic oligonucleotide
  Antisense strand to SEQ ID NO: 1584263
uucccacagaagcuccuag

SEQ ID NO: 1584265 - RNA, 19 nt, Artificial Sequence
  Description of Artificial Sequence: Synthetic oligonucleotide
  Sense strand starting at position 3556 of SEQ ID NO: 1560213
aggagcuucugugggaaga

SEQ ID NO: 1584266 - RNA, 19 nt, Artificial Sequence
  Description of Artificial Sequence: Synthetic oligonucleotide
  Antisense strand to SEQ ID NO: 1584265
ucuucccacagaagcuccu

SEQ ID NO: 1584267 - RNA, 19 nt, Artificial Sequence
  Description of Artificial Sequence: Synthetic oligonucleotide
  Sense strand starting at position 3583 of SEQ ID NO: 1560213
agcagaagucucuacaauc

SEQ ID NO: 1584268 - RNA, 19 nt, Artificial Sequence
  Description of Artificial Sequence: Synthetic oligonucleotide
  Antisense strand to SEQ ID NO: 1584267
gauuguagagacuucugcu

SEQ ID NO: 1584269 - RNA, 19 nt, Artificial Sequence
  Description of Artificial Sequence: Synthetic oligonucleotide
  Sense strand starting at position 3622 of SEQ ID NO: 1560213
ggaggauauccuggagcag

SEQ ID NO: 1584270 - RNA, 19 nt, Artificial Sequence
  Description of Artificial Sequence: Synthetic oligonucleotide
  Antisense strand to SEQ ID NO: 1584269
cugcuccaggauauccucc

SEQ ID NO: 1584271 - RNA, 19 nt, Artificial Sequence
  Description of Artificial Sequence: Synthetic oligonucleotide
  Sense strand starting at position 3726 of SEQ ID NO: 1560213
ggcaguccuuggcuggaau

SEQ ID NO: 1584272 - RNA, 19 nt, Artificial Sequence
  Description of Artificial Sequence: Synthetic oligonucleotide
  Antisense strand to SEQ ID NO: 1584271
auuccagccaaggacugcc

SEQ ID NO: 1584273 - RNA, 19 nt, Artificial Sequence
  Description of Artificial Sequence: Synthetic oligonucleotide
  Sense strand starting at position 3727 of SEQ ID NO: 1560213
gcaguccuuggcuggaauu

SEQ ID NO: 1584274 - RNA, 19 nt, Artificial Sequence
  Description of Artificial Sequence: Synthetic oligonucleotide
  Antisense strand to SEQ ID NO: 1584273
aauuccagccaaggacugc

SEQ ID NO: 1584275 - RNA, 19 nt, Artificial Sequence
  Description of Artificial Sequence: Synthetic oligonucleotide
  Sense strand starting at position 3729 of SEQ ID NO: 1560213
aguccuuggcuggaauuga

SEQ ID NO: 1584276 - RNA, 19 nt, Artificial Sequence
  Description of Artificial Sequence: Synthetic oligonucleotide
  Antisense strand to SEQ ID NO: 1584275
ucaauuccagccaaggacu

SEQ ID NO: 1584277 - RNA, 19 nt, Artificial Sequence
  Description of Artificial Sequence: Synthetic oligonucleotide
  Sense strand starting at position 3795 of SEQ ID NO: 1560213
ugcucucuguguggauaga

SEQ ID NO: 1584278 - RNA, 19 nt, Artificial Sequence
  Description of Artificial Sequence: Synthetic oligonucleotide
  Antisense strand to SEQ ID NO: 1584277
ucuauccacacagagagca

SEQ ID NO: 1584279 - RNA, 19 nt, Artificial Sequence
  Description of Artificial Sequence: Synthetic oligonucleotide
  Sense strand starting at position 3885 of SEQ ID NO: 1560213
cugcuucucuuccagucau

SEQ ID NO: 1584280 - RNA, 19 nt, Artificial Sequence
  Description of Artificial Sequence: Synthetic oligonucleotide
  Antisense strand to SEQ ID NO: 1584279
augacuggaagagaagcag

SEQ ID NO: 1584281 - RNA, 19 nt, Artificial Sequence
  Description of Artificial Sequence: Synthetic oligonucleotide
  Sense strand starting at position 3967 of SEQ ID NO: 1560213
cgugacaacucucuccuuu

SEQ ID NO: 1584282 - RNA, 19 nt, Artificial Sequence
  Description of Artificial Sequence: Synthetic oligonucleotide
  Antisense strand to SEQ ID NO: 1584281
aaaggagagaguugucacg

SEQ ID NO: 1584283 - RNA, 19 nt, Artificial Sequence
  Description of Artificial Sequence: Synthetic oligonucleotide
  Sense strand starting at position 288 of SEQ ID NO: 1560214
ucuacauccugagcaagaa

SEQ ID NO: 1584284 - RNA, 19 nt, Artificial Sequence
  Description of Artificial Sequence: Synthetic oligonucleotide
  Antisense strand to SEQ ID NO: 1584283
uucuugcucaggauguaga

SEQ ID NO: 1584285 - RNA, 19 nt, Artificial Sequence
  Description of Artificial Sequence: Synthetic oligonucleotide
  Sense strand starting at position 292 of SEQ ID NO: 1560214
cauccugagcaagaaugua

SEQ ID NO: 1584286 - RNA, 19 nt, Artificial Sequence
  Description of Artificial Sequence: Synthetic oligonucleotide
  Antisense strand to SEQ ID NO: 1584285
uacauucuugcucaggaug

SEQ ID NO: 1584287 - RNA, 19 nt, Artificial Sequence
  Description of Artificial Sequence: Synthetic oligonucleotide
  Sense strand starting at position 436 of SEQ ID NO: 1560214
gucacaaucucucagagaa

SEQ ID NO: 1584288 - RNA, 19 nt, Artificial Sequence
  Description of Artificial Sequence: Synthetic oligonucleotide
  Antisense strand to SEQ ID NO: 1584287
uucucugagagauugugac

SEQ ID NO: 1584289 - RNA, 19 nt, Artificial Sequence
  Description of Artificial Sequence: Synthetic oligonucleotide
  Sense strand starting at position 482 of SEQ ID NO: 1560214
gacugaaagugcuaccuaa

SEQ ID NO: 1584290 - RNA, 19 nt, Artificial Sequence
  Description of Artificial Sequence: Synthetic oligonucleotide
  Antisense strand to SEQ ID NO: 1584289
uuagguagcacuuucaguc

SEQ ID NO: 1584291 - RNA, 19 nt, Artificial Sequence
  Description of Artificial Sequence: Synthetic oligonucleotide
  Sense strand starting at position 489 of SEQ ID NO: 1560214
agugcuaccuaaggaauca

SEQ ID NO: 1584292 - RNA, 19 nt, Artificial Sequence
  Description of Artificial Sequence: Synthetic oligonucleotide
  Antisense strand to SEQ ID NO: 1584291
ugauuccuuagguagcacu

SEQ ID NO: 1584293 - RNA, 19 nt, Artificial Sequence
  Description of Artificial Sequence: Synthetic oligonucleotide
  Sense strand starting at position 513 of SEQ ID NO: 1560214
ugagguuaagucuaccuga

SEQ ID NO: 1584294 - RNA, 19 nt, Artificial Sequence
  Description of Artificial Sequence: Synthetic oligonucleotide
  Antisense strand to SEQ ID NO: 1584293
ucagguagacuuaaccuca

SEQ ID NO: 1584295 - RNA, 19 nt, Artificial Sequence
  Description of Artificial Sequence: Synthetic oligonucleotide
  Sense strand starting at position 701 of SEQ ID NO: 1560214
agaggaaggucuugcuaga

SEQ ID NO: 1584296 - RNA, 19 nt, Artificial Sequence
  Description of Artificial Sequence: Synthetic oligonucleotide
  Antisense strand to SEQ ID NO: 1584295
ucuagcaagaccuuccucu

SEQ ID NO: 1584297 - RNA, 19 nt, Artificial Sequence
  Description of Artificial Sequence: Synthetic oligonucleotide
  Sense strand starting at position 712 of SEQ ID NO: 1560214
uugcuagaaugccugacaa

SEQ ID NO: 1584298 - RNA, 19 nt, Artificial Sequence
  Description of Artificial Sequence: Synthetic oligonucleotide
  Antisense strand to SEQ ID NO: 1584297
uugucaggcauucuagcaa

SEQ ID NO: 1584299 - RNA, 19 nt, Artificial Sequence
  Description of Artificial Sequence: Synthetic oligonucleotide
  Sense strand starting at position 714 of SEQ ID NO: 1560214
gcuagaaugccugacaaga

SEQ ID NO: 1584300 - RNA, 19 nt, Artificial Sequence
  Description of Artificial Sequence: Synthetic oligonucleotide
  Antisense strand to SEQ ID NO: 1584299
ucuugucaggcauucuagc

SEQ ID NO: 1584301 - RNA, 19 nt, Artificial Sequence
  Description of Artificial Sequence: Synthetic oligonucleotide
  Sense strand starting at position 755 of SEQ ID NO: 1560214
gugccuugccgugcucaga

SEQ ID NO: 1584302 - RNA, 19 nt, Artificial Sequence
  Description of Artificial Sequence: Synthetic oligonucleotide
  Antisense strand to SEQ ID NO: 1584301
ucugagcacggcaaggcac

SEQ ID NO: 1584303 - RNA, 19 nt, Artificial Sequence
  Description of Artificial Sequence: Synthetic oligonucleotide
  Sense strand starting at position 805 of SEQ ID NO: 1560214
agcaacuucccaggugaga

SEQ ID NO: 1584304 - RNA, 19 nt, Artificial Sequence
  Description of Artificial Sequence: Synthetic oligonucleotide
  Antisense strand to SEQ ID NO: 1584303
ucucaccugggaaguugcu

SEQ ID NO: 1584305 - RNA, 19 nt, Artificial Sequence
  Description of Artificial Sequence: Synthetic oligonucleotide
  Sense strand starting at position 816 of SEQ ID NO: 1560214
aggugagauuugcagggua

SEQ ID NO: 1584306 - RNA, 19 nt, Artificial Sequence
  Description of Artificial Sequence: Synthetic oligonucleotide
  Antisense strand to SEQ ID NO: 1584305
uacccugcaaaucucaccu

SEQ ID NO: 1584307 - RNA, 19 nt, Artificial Sequence
  Description of Artificial Sequence: Synthetic oligonucleotide
  Sense strand starting at position 830 of SEQ ID NO: 1560214
ggguaucugcucugccaga

SEQ ID NO: 1584308 - RNA, 19 nt, Artificial Sequence
  Description of Artificial Sequence: Synthetic oligonucleotide
  Antisense strand to SEQ ID NO: 1584307
ucuggcagagcagauaccc

SEQ ID NO: 1584309 - RNA, 19 nt, Artificial Sequence
  Description of Artificial Sequence: Synthetic oligonucleotide
  Sense strand starting at position 1092 of SEQ ID NO: 1560214
gggacaggaucugaccauu

SEQ ID NO: 1584310 - RNA, 19 nt, Artificial Sequence
  Description of Artificial Sequence: Synthetic oligonucleotide
  Antisense strand to SEQ ID NO: 1584309
aauggucagauccuguccc

SEQ ID NO: 1584311 - RNA, 19 nt, Artificial Sequence
  Description of Artificial Sequence: Synthetic oligonucleotide
  Sense strand starting at position 1128 of SEQ ID NO: 1560214
gggagagaucccuguccca

SEQ ID NO: 1584312 - RNA, 19 nt, Artificial Sequence
  Description of Artificial Sequence: Synthetic oligonucleotide
  Antisense strand to SEQ ID NO: 1584311
ugggacagggaucucuccc

SEQ ID NO: 1584313 - RNA, 19 nt, Artificial Sequence
  Description of Artificial Sequence: Synthetic oligonucleotide
  Sense strand starting at position 1345 of SEQ ID NO: 1560214
cucauacaccugugucauc

SEQ ID NO: 1584314 - RNA, 19 nt, Artificial Sequence
  Description of Artificial Sequence: Synthetic oligonucleotide
  Antisense strand to SEQ ID NO: 1584313
gaugacacagguguaugag

SEQ ID NO: 1584315 - RNA, 19 nt, Artificial Sequence
  Description of Artificial Sequence: Synthetic oligonucleotide
  Sense strand starting at position 1399 of SEQ ID NO: 1560214
gucccuuccagguaguaau

SEQ ID NO: 1584316 - RNA, 19 nt, Artificial Sequence
  Description of Artificial Sequence: Synthetic oligonucleotide
  Antisense strand to SEQ ID NO: 1584315
auuacuaccuggaagggac

SEQ ID NO: 1584317 - RNA, 19 nt, Artificial Sequence
  Description of Artificial Sequence: Synthetic oligonucleotide
  Sense strand starting at position 1402 of SEQ ID NO: 1560214
ccuuccagguaguaauaau

SEQ ID NO: 1584318 - RNA, 19 nt, Artificial Sequence
  Description of Artificial Sequence: Synthetic oligonucleotide
  Antisense strand to SEQ ID NO: 1584317
auuauuacuaccuggaagg

SEQ ID NO: 1584319 - RNA, 19 nt, Artificial Sequence
  Description of Artificial Sequence: Synthetic oligonucleotide
  Sense strand starting at position 1498 of SEQ ID NO: 1560214
ccuguucccuccuaguagu

SEQ ID NO: 1584320 - RNA, 19 nt, Artificial Sequence
  Description of Artificial Sequence: Synthetic oligonucleotide
  Antisense strand to SEQ ID NO: 1584319
acuacuaggagggaacagg

SEQ ID NO: 1584321 - RNA, 19 nt, Artificial Sequence
  Description of Artificial Sequence: Synthetic oligonucleotide
  Sense strand starting at position 1501 of SEQ ID NO: 1560214
guucccuccuaguaguaau

SEQ ID NO: 1584322 - RNA, 19 nt, Artificial Sequence
  Description of Artificial Sequence: Synthetic oligonucleotide
  Antisense strand to SEQ ID NO: 1584321
auuacuacuaggagggaac

SEQ ID NO: 1584323 - RNA, 19 nt, Artificial Sequence
  Description of Artificial Sequence: Synthetic oligonucleotide
  Sense strand starting at position 1504 of SEQ ID NO: 1560214
cccuccuaguaguaaugau

SEQ ID NO: 1584324 - RNA, 19 nt, Artificial Sequence
  Description of Artificial Sequence: Synthetic oligonucleotide
  Antisense strand to SEQ ID NO: 1584323
aucauuacuacuaggaggg

SEQ ID NO: 1584325 - RNA, 19 nt, Artificial Sequence
  Description of Artificial Sequence: Synthetic oligonucleotide
  Sense strand starting at position 2383 of SEQ ID NO: 1560214
ggcguuggucacucaugca

SEQ ID NO: 1584326 - RNA, 19 nt, Artificial Sequence
  Description of Artificial Sequence: Synthetic oligonucleotide
  Antisense strand to SEQ ID NO: 1584325
ugcaugagugaccaacgcc

SEQ ID NO: 1584327 - RNA, 19 nt, Artificial Sequence
  Description of Artificial Sequence: Synthetic oligonucleotide
  Sense strand starting at position 2454 of SEQ ID NO: 1560214
ggaguacaggcgugaacaa

SEQ ID NO: 1584328 - RNA, 19 nt, Artificial Sequence
  Description of Artificial Sequence: Synthetic oligonucleotide
  Antisense strand to SEQ ID NO: 1584327
uuguucacgccuguacucc

SEQ ID NO: 1584329 - RNA, 19 nt, Artificial Sequence
  Description of Artificial Sequence: Synthetic oligonucleotide
  Sense strand starting at position 2558 of SEQ ID NO: 1560214
agguaaaugugaugcggua

SEQ ID NO: 1584330 - RNA, 19 nt, Artificial Sequence
  Description of Artificial Sequence: Synthetic oligonucleotide
  Antisense strand to SEQ ID NO: 1584329
uaccgcaucacauuuaccu

SEQ ID NO: 1584331 - RNA, 19 nt, Artificial Sequence
  Description of Artificial Sequence: Synthetic oligonucleotide
  Sense strand starting at position 2560 of SEQ ID NO: 1560214
guaaaugugaugcgguaaa

SEQ ID NO: 1584332 - RNA, 19 nt, Artificial Sequence
  Description of Artificial Sequence: Synthetic oligonucleotide
  Antisense strand to SEQ ID NO: 1584331
uuuaccgcaucacauuuac

SEQ ID NO: 1584333 - RNA, 19 nt, Artificial Sequence
  Description of Artificial Sequence: Synthetic oligonucleotide
  Sense strand starting at position 2644 of SEQ ID NO: 1560214
gcggaaaguuaucuuagcu

SEQ ID NO: 1584334 - RNA, 19 nt, Artificial Sequence
  Description of Artificial Sequence: Synthetic oligonucleotide
  Antisense strand to SEQ ID NO: 1584333
agcuaagauaacuuuccgc

SEQ ID NO: 1584335 - RNA, 19 nt, Artificial Sequence
  Description of Artificial Sequence: Synthetic oligonucleotide
  Sense strand starting at position 3067 of SEQ ID NO: 1560214
auugcuauucucuggauac

SEQ ID NO: 1584336 - RNA, 19 nt, Artificial Sequence
  Description of Artificial Sequence: Synthetic oligonucleotide
  Antisense strand to SEQ ID NO: 1584335
guauccagagaauagcaau

SEQ ID NO: 1584337 - RNA, 19 nt, Artificial Sequence
  Description of Artificial Sequence: Synthetic oligonucleotide
  Sense strand starting at position 3069 of SEQ ID NO: 1560214
ugcuauucucuggauaccu

SEQ ID NO: 1584338 - RNA, 19 nt, Artificial Sequence
  Description of Artificial Sequence: Synthetic oligonucleotide
  Antisense strand to SEQ ID NO: 1584337
agguauccagagaauagca

SEQ ID NO: 1584339 - RNA, 19 nt, Artificial Sequence
  Description of Artificial Sequence: Synthetic oligonucleotide
  Sense strand starting at position 3090 of SEQ ID NO: 1560214
gcccaaagaacuggaguua

SEQ ID NO: 1584340 - RNA, 19 nt, Artificial Sequence
  Description of Artificial Sequence: Synthetic oligonucleotide
  Antisense strand to SEQ ID NO: 1584339
uaacuccaguucuuugggc

SEQ ID NO: 1584341 - RNA, 19 nt, Artificial Sequence
  Description of Artificial Sequence: Synthetic oligonucleotide
  Sense strand starting at position 3400 of SEQ ID NO: 1560214
gggaauugaugauggcucu

SEQ ID NO: 1584342 - RNA, 19 nt, Artificial Sequence
  Description of Artificial Sequence: Synthetic oligonucleotide
  Antisense strand to SEQ ID NO: 1584341
agagccaucaucaauuccc

SEQ ID NO: 1584343 - RNA, 19 nt, Artificial Sequence
  Description of Artificial Sequence: Synthetic oligonucleotide
  Sense strand starting at position 3401 of SEQ ID NO: 1560214
ggaauugaugauggcucua

SEQ ID NO: 1584344 - RNA, 19 nt, Artificial Sequence
  Description of Artificial Sequence: Synthetic oligonucleotide
  Antisense strand to SEQ ID NO: 1584343
uagagccaucaucaauucc

SEQ ID NO: 1584345 - RNA, 19 nt, Artificial Sequence
  Description of Artificial Sequence: Synthetic oligonucleotide
  Sense strand starting at position 3561 of SEQ ID NO: 1560214
uuuagaaugccuuggauau

SEQ ID NO: 1584346 - RNA, 19 nt, Artificial Sequence
  Description of Artificial Sequence: Synthetic oligonucleotide
  Antisense strand to SEQ ID NO: 1584345
auauccaaggcauucuaaa

SEQ ID NO: 1584347 - RNA, 19 nt, Artificial Sequence
  Description of Artificial Sequence: Synthetic oligonucleotide
  Sense strand starting at position 3562 of SEQ ID NO: 1560214
uuagaaugccuuggauauu

SEQ ID NO: 1584348 - RNA, 19 nt, Artificial Sequence
  Description of Artificial Sequence: Synthetic oligonucleotide
  Antisense strand to SEQ ID NO: 1584347
aauauccaaggcauucuaa

SEQ ID NO: 1584349 - RNA, 19 nt, Artificial Sequence
  Description of Artificial Sequence: Synthetic oligonucleotide
  Sense strand starting at position 3574 of SEQ ID NO: 1560214
ggauauugccacugcccua

SEQ ID NO: 1584350 - RNA, 19 nt, Artificial Sequence
  Description of Artificial Sequence: Synthetic oligonucleotide
  Antisense strand to SEQ ID NO: 1584349
uagggcaguggcaauaucc

SEQ ID NO: 1584351 - RNA, 19 nt, Artificial Sequence
  Description of Artificial Sequence: Synthetic oligonucleotide
  Sense strand starting at position 386 of SEQ ID NO: 1560215
acaguuagagccugagcaa

SEQ ID NO: 1584352 - RNA, 19 nt, Artificial Sequence
  Description of Artificial Sequence: Synthetic oligonucleotide
  Antisense strand to SEQ ID NO: 1584351
uugcucaggcucuaacugu

SEQ ID NO: 1584353 - RNA, 19 nt, Artificial Sequence
  Description of Artificial Sequence: Synthetic oligonucleotide
  Sense strand starting at position 387 of SEQ ID NO: 1560215
caguuagagccugagcaaa

SEQ ID NO: 1584354 - RNA, 19 nt, Artificial Sequence
  Description of Artificial Sequence: Synthetic oligonucleotide
  Antisense strand to SEQ ID NO: 1584353
uuugcucaggcucuaacug

SEQ ID NO: 1584355 - RNA, 19 nt, Artificial Sequence
  Description of Artificial Sequence: Synthetic oligonucleotide
  Sense strand starting at position 401 of SEQ ID NO: 1560215
gcaaaucaacuccgugauc

SEQ ID NO: 1584356 - RNA, 19 nt, Artificial Sequence
  Description of Artificial Sequence: Synthetic oligonucleotide
  Antisense strand to SEQ ID NO: 1584355
gaucacggaguugauuugc

SEQ ID NO: 1584357 - RNA, 19 nt, Artificial Sequence
  Description of Artificial Sequence: Synthetic oligonucleotide
  Sense strand starting at position 406 of SEQ ID NO: 1560215
ucaacuccgugaucaacaa

SEQ ID NO: 1584358 - RNA, 19 nt, Artificial Sequence
  Description of Artificial Sequence: Synthetic oligonucleotide
  Antisense strand to SEQ ID NO: 1584357
uuguugaucacggaguuga

SEQ ID NO: 1584359 - RNA, 19 nt, Artificial Sequence
  Description of Artificial Sequence: Synthetic oligonucleotide
  Sense strand starting at position 413 of SEQ ID NO: 1560215
cgugaucaacaaugugauc

SEQ ID NO: 1584360 - RNA, 19 nt, Artificial Sequence
  Description of Artificial Sequence: Synthetic oligonucleotide
  Antisense strand to SEQ ID NO: 1584359
gaucacauuguugaucacg

SEQ ID NO: 1584361 - RNA, 19 nt, Artificial Sequence
  Description of Artificial Sequence: Synthetic oligonucleotide
  Sense strand starting at position 418 of SEQ ID NO: 1560215
ucaacaaugugaucccuga

SEQ ID NO: 1584362 - RNA, 19 nt, Artificial Sequence
  Description of Artificial Sequence: Synthetic oligonucleotide
  Antisense strand to SEQ ID NO: 1584361
ucagggaucacauuguuga

SEQ ID NO: 1584363 - RNA, 19 nt, Artificial Sequence
  Description of Artificial Sequence: Synthetic oligonucleotide
  Sense strand starting at position 422 of SEQ ID NO: 1560215
caaugugaucccugaagca

SEQ ID NO: 1584364 - RNA, 19 nt, Artificial Sequence
  Description of Artificial Sequence: Synthetic oligonucleotide
  Antisense strand to SEQ ID NO: 1584363
ugcuucagggaucacauug

SEQ ID NO: 1584365 - RNA, 19 nt, Artificial Sequence
  Description of Artificial Sequence: Synthetic oligonucleotide
  Sense strand starting at position 478 of SEQ ID NO: 1560215
gaccucacucuguggcaau

SEQ ID NO: 1584366 - RNA, 19 nt, Artificial Sequence
  Description of Artificial Sequence: Synthetic oligonucleotide
  Antisense strand to SEQ ID NO: 1584365
auugccacagagugagguc

SEQ ID NO: 1584367 - RNA, 19 nt, Artificial Sequence
  Description of Artificial Sequence: Synthetic oligonucleotide
  Sense strand starting at position 709 of SEQ ID NO: 1560215
cgggaaacaaggugucaau

SEQ ID NO: 1584368 - RNA, 19 nt, Artificial Sequence
  Description of Artificial Sequence: Synthetic oligonucleotide
  Antisense strand to SEQ ID NO: 1584367
auugacaccuuguuucccg

SEQ ID NO: 1584369 - RNA, 19 nt, Artificial Sequence
  Description of Artificial Sequence: Synthetic oligonucleotide
  Sense strand starting at position 712 of SEQ ID NO: 1560215
gaaacaaggugucaaucaa

SEQ ID NO: 1584370 - RNA, 19 nt, Artificial Sequence
  Description of Artificial Sequence: Synthetic oligonucleotide
  Antisense strand to SEQ ID NO: 1584369
uugauugacaccuuguuuc

SEQ ID NO: 1584371 - RNA, 19 nt, Artificial Sequence
  Description of Artificial Sequence: Synthetic oligonucleotide
  Sense strand starting at position 758 of SEQ ID NO: 1560215
agaggcucauacccauaau

SEQ ID NO: 1584372 - RNA, 19 nt, Artificial Sequence
  Description of Artificial Sequence: Synthetic oligonucleotide
  Antisense strand to SEQ ID NO: 1584371
auuauggguaugagccucu

SEQ ID NO: 1584373 - RNA, 19 nt, Artificial Sequence
  Description of Artificial Sequence: Synthetic oligonucleotide
  Sense strand starting at position 939 of SEQ ID NO: 1560215
gauggacuccuuggaccua

SEQ ID NO: 1584374 - RNA, 19 nt, Artificial Sequence
  Description of Artificial Sequence: Synthetic oligonucleotide
  Antisense strand to SEQ ID NO: 1584373
uagguccaaggaguccauc

SEQ ID NO: 1584375 - RNA, 19 nt, Artificial Sequence
  Description of Artificial Sequence: Synthetic oligonucleotide
  Sense strand starting at position 1072 of SEQ ID NO: 1560215
gagagugacugugcuggaa

SEQ ID NO: 1584376 - RNA, 19 nt, Artificial Sequence
  Description of Artificial Sequence: Synthetic oligonucleotide
  Antisense strand to SEQ ID NO: 1584375
uuccagcacagucacucuc

SEQ ID NO: 1584377 - RNA, 19 nt, Artificial Sequence
  Description of Artificial Sequence: Synthetic oligonucleotide
  Sense strand starting at position 1076 of SEQ ID NO: 1560215
gugacugugcuggaagcua

SEQ ID NO: 1584378 - RNA, 19 nt, Artificial Sequence
  Description of Artificial Sequence: Synthetic oligonucleotide
  Antisense strand to SEQ ID NO: 1584377
uagcuuccagcacagucac

SEQ ID NO: 1584379 - RNA, 19 nt, Artificial Sequence
  Description of Artificial Sequence: Synthetic oligonucleotide
  Sense strand starting at position 1171 of SEQ ID NO: 1560215
ggcccuaagugaucaauuc

SEQ ID NO: 1584380 - RNA, 19 nt, Artificial Sequence
  Description of Artificial Sequence: Synthetic oligonucleotide
  Antisense strand to SEQ ID NO: 1584379
gaauugaucacuuagggcc

SEQ ID NO: 1584381 - RNA, 19 nt, Artificial Sequence
  Description of Artificial Sequence: Synthetic oligonucleotide
  Sense strand starting at position 1281 of SEQ ID NO: 1560215
gggcucucugcguauaugu

SEQ ID NO: 1584382 - RNA, 19 nt, Artificial Sequence
  Description of Artificial Sequence: Synthetic oligonucleotide
  Antisense strand to SEQ ID NO: 1584381
acauauacgcagagagccc

SEQ ID NO: 1584383 - RNA, 19 nt, Artificial Sequence
  Description of Artificial Sequence: Synthetic oligonucleotide
  Sense strand starting at position 1425 of SEQ ID NO: 1560215
uggaucaucgcgcaaauga

SEQ ID NO: 1584384 - RNA, 19 nt, Artificial Sequence
  Description of Artificial Sequence: Synthetic oligonucleotide
  Antisense strand to SEQ ID NO: 1584383
ucauuugcgcgaugaucca

SEQ ID NO: 1584385 - RNA, 19 nt, Artificial Sequence
  Description of Artificial Sequence: Synthetic oligonucleotide
  Sense strand starting at position 1486 of SEQ ID NO: 1560215
agcgguaugcugaggaguu

SEQ ID NO: 1584386 - RNA, 19 nt, Artificial Sequence
  Description of Artificial Sequence: Synthetic oligonucleotide
  Antisense strand to SEQ ID NO: 1584385
aacuccucagcauaccgcu

SEQ ID NO: 1584387 - RNA, 19 nt, Artificial Sequence
  Description of Artificial Sequence: Synthetic oligonucleotide
  Sense strand starting at position 2084 of SEQ ID NO: 1560215
ccaugacaucuuggcaauu

SEQ ID NO: 1584388 - RNA, 19 nt, Artificial Sequence
  Description of Artificial Sequence: Synthetic oligonucleotide
  Antisense strand to SEQ ID NO: 1584387
aauugccaagaugucaugg

SEQ ID NO: 1584389 - RNA, 19 nt, Artificial Sequence
  Description of Artificial Sequence: Synthetic oligonucleotide
  Sense strand starting at position 2237 of SEQ ID NO: 1560215
gaaggagagcacugucaga

SEQ ID NO: 1584390 - RNA, 19 nt, Artificial Sequence
  Description of Artificial Sequence: Synthetic oligonucleotide
  Antisense strand to SEQ ID NO: 1584389
ucugacagugcucuccuuc

SEQ ID NO: 1584391 - RNA, 19 nt, Artificial Sequence
  Description of Artificial Sequence: Synthetic oligonucleotide
  Sense strand starting at position 2351 of SEQ ID NO: 1560215
cuaguuuaucucuguagug

SEQ ID NO: 1584392 - RNA, 19 nt, Artificial Sequence
  Description of Artificial Sequence: Synthetic oligonucleotide
  Antisense strand to SEQ ID NO: 1584391
cacuacagagauaaacuag

SEQ ID NO: 1584393 - RNA, 19 nt, Artificial Sequence
  Description of Artificial Sequence: Synthetic oligonucleotide
  Sense strand starting at position 2369 of SEQ ID NO: 1560215
gccucauuggucucgguuu

SEQ ID NO: 1584394 - RNA, 19 nt, Artificial Sequence
  Description of Artificial Sequence: Synthetic oligonucleotide
  Antisense strand to SEQ ID NO: 1584393
aaaccgagaccaaugaggc

SEQ ID NO: 1584395 - RNA, 19 nt, Artificial Sequence
  Description of Artificial Sequence: Synthetic oligonucleotide
  Sense strand starting at position 2381 of SEQ ID NO: 1560215
ucgguuucugccucaguuu

SEQ ID NO: 1584396 - RNA, 19 nt, Artificial Sequence
  Description of Artificial Sequence: Synthetic oligonucleotide
  Antisense strand to SEQ ID NO: 1584395
aaacugaggcagaaaccga

SEQ ID NO: 1584397 - RNA, 19 nt, Artificial Sequence
  Description of Artificial Sequence: Synthetic oligonucleotide
  Sense strand starting at position 2413 of SEQ ID NO: 1560215
cucuuugacuuggucaagu

SEQ ID NO: 1584398 - RNA, 19 nt, Artificial Sequence
  Description of Artificial Sequence: Synthetic oligonucleotide
  Antisense strand to SEQ ID NO: 1584397
acuugaccaagucaaagag

SEQ ID NO: 1584399 - RNA, 19 nt, Artificial Sequence
  Description of Artificial Sequence: Synthetic oligonucleotide
  Sense strand starting at position 2415 of SEQ ID NO: 1560215
cuuugacuuggucaagucu

SEQ ID NO: 1584400 - RNA, 19 nt, Artificial Sequence
  Description of Artificial Sequence: Synthetic oligonucleotide
  Antisense strand to SEQ ID NO: 1584399
agacuugaccaagucaaag

SEQ ID NO: 1584401 - RNA, 19 nt, Artificial Sequence
  Description of Artificial Sequence: Synthetic oligonucleotide
  Sense strand starting at position 2450 of SEQ ID NO: 1560215
gucucuguguugucagaca

SEQ ID NO: 1584402 - RNA, 19 nt, Artificial Sequence
  Description of Artificial Sequence: Synthetic oligonucleotide
  Antisense strand to SEQ ID NO: 1584401
ugucugacaacacagagac

SEQ ID NO: 1584403 - RNA, 19 nt, Artificial Sequence
  Description of Artificial Sequence: Synthetic oligonucleotide
  Sense strand starting at position 2455 of SEQ ID NO: 1560215
uguguugucagacaugaua

SEQ ID NO: 1584404 - RNA, 19 nt, Artificial Sequence
  Description of Artificial Sequence: Synthetic oligonucleotide
  Antisense strand to SEQ ID NO: 1584403
uaucaugucugacaacaca

SEQ ID NO: 1584405 - RNA, 19 nt, Artificial Sequence
  Description of Artificial Sequence: Synthetic oligonucleotide
  Sense strand starting at position 2505 of SEQ ID NO: 1560215
ggcugcuuccagcacugaa

SEQ ID NO: 1584406 - RNA, 19 nt, Artificial Sequence
  Description of Artificial Sequence: Synthetic oligonucleotide
  Antisense strand to SEQ ID NO: 1584405
uucagugcuggaagcagcc

SEQ ID NO: 1584407 - RNA, 19 nt, Artificial Sequence
  Description of Artificial Sequence: Synthetic oligonucleotide
  Sense strand starting at position 2533 of SEQ ID NO: 1560215
acuuauuagaaaggguguu

SEQ ID NO: 1584408 - RNA, 19 nt, Artificial Sequence
  Description of Artificial Sequence: Synthetic oligonucleotide
  Antisense strand to SEQ ID NO: 1584407
aacacccuuucuaauaagu

SEQ ID NO: 1584409 - RNA, 19 nt, Artificial Sequence
  Description of Artificial Sequence: Synthetic oligonucleotide
  Sense strand starting at position 2534 of SEQ ID NO: 1560215
cuuauuagaaaggguguuu

SEQ ID NO: 1584410 - RNA, 19 nt, Artificial Sequence
  Description of Artificial Sequence: Synthetic oligonucleotide
  Antisense strand to SEQ ID NO: 1584409
aaacacccuuucuaauaag

SEQ ID NO: 1584411 - RNA, 19 nt, Artificial Sequence
  Description of Artificial Sequence: Synthetic oligonucleotide
  Sense strand starting at position 2989 of SEQ ID NO: 1560215
uggcauuucugccuacuuu

SEQ ID NO: 1584412 - RNA, 19 nt, Artificial Sequence
  Description of Artificial Sequence: Synthetic oligonucleotide
  Antisense strand to SEQ ID NO: 1584411
aaaguaggcagaaaugcca

SEQ ID NO: 1584413 - RNA, 19 nt, Artificial Sequence
  Description of Artificial Sequence: Synthetic oligonucleotide
  Sense strand starting at position 3047 of SEQ ID NO: 1560215
gucccugucucuguugaua

SEQ ID NO: 1584414 - RNA, 19 nt, Artificial Sequence
  Description of Artificial Sequence: Synthetic oligonucleotide
  Antisense strand to SEQ ID NO: 1584413
uaucaacagagacagggac

SEQ ID NO: 1584415 - RNA, 19 nt, Artificial Sequence
  Description of Artificial Sequence: Synthetic oligonucleotide
  Sense strand starting at position 3553 of SEQ ID NO: 1560215
guugcucuguauuucugau

SEQ ID NO: 1584416 - RNA, 19 nt, Artificial Sequence
  Description of Artificial Sequence: Synthetic oligonucleotide
  Antisense strand to SEQ ID NO: 1584415
aucagaaauacagagcaac

SEQ ID NO: 1584417 - RNA, 19 nt, Artificial Sequence
  Description of Artificial Sequence: Synthetic oligonucleotide
  Sense strand starting at position 3609 of SEQ ID NO: 1560215
ucgucugucucucuagaua

SEQ ID NO: 1584418 - RNA, 19 nt, Artificial Sequence
  Description of Artificial Sequence: Synthetic oligonucleotide
  Antisense strand to SEQ ID NO: 1584417
uaucuagagagacagacga

SEQ ID NO: 1584419 - RNA, 19 nt, Artificial Sequence
  Description of Artificial Sequence: Synthetic oligonucleotide
  Sense strand starting at position 3612 of SEQ ID NO: 1560215
ucugucucucuagauauua

SEQ ID NO: 1584420 - RNA, 19 nt, Artificial Sequence
  Description of Artificial Sequence: Synthetic oligonucleotide
  Antisense strand to SEQ ID NO: 1584419
uaauaucuagagagacaga

SEQ ID NO: 1584421 - RNA, 19 nt, Artificial Sequence
  Description of Artificial Sequence: Synthetic oligonucleotide
  Sense strand starting at position 3627 of SEQ ID NO: 1560215
auuaauaugucccugagcu

SEQ ID NO: 1584422 - RNA, 19 nt, Artificial Sequence
  Description of Artificial Sequence: Synthetic oligonucleotide
  Antisense strand to SEQ ID NO: 1584421
agcucagggacauauuaau

SEQ ID NO: 1584423 - RNA, 19 nt, Artificial Sequence
  Description of Artificial Sequence: Synthetic oligonucleotide
  Sense strand starting at position 3628 of SEQ ID NO: 1560215
uuaauaugucccugagcuc

SEQ ID NO: 1584424 - RNA, 19 nt, Artificial Sequence
  Description of Artificial Sequence: Synthetic oligonucleotide
  Antisense strand to SEQ ID NO: 1584423
gagcucagggacauauuaa

SEQ ID NO: 1584425 - RNA, 19 nt, Artificial Sequence
  Description of Artificial Sequence: Synthetic oligonucleotide
  Sense strand starting at position 3817 of SEQ ID NO: 1560215
aggagagauuaaggcuaca

SEQ ID NO: 1584426 - RNA, 19 nt, Artificial Sequence
  Description of Artificial Sequence: Synthetic oligonucleotide
  Antisense strand to SEQ ID NO: 1584425
uguagccuuaaucucuccu

SEQ ID NO: 1584427 - RNA, 19 nt, Artificial Sequence
  Description of Artificial Sequence: Synthetic oligonucleotide
  Sense strand starting at position 3857 of SEQ ID NO: 1560215
caggucucauuagcuugaa

SEQ ID NO: 1584428 - RNA, 19 nt, Artificial Sequence
  Description of Artificial Sequence: Synthetic oligonucleotide
  Antisense strand to SEQ ID NO: 1584427
uucaagcuaaugagaccug

SEQ ID NO: 1584429 - RNA, 19 nt, Artificial Sequence
  Description of Artificial Sequence: Synthetic oligonucleotide
  Sense strand starting at position 3860 of SEQ ID NO: 1560215
gucucauuagcuugaagag

SEQ ID NO: 1584430 - RNA, 19 nt, Artificial Sequence
  Description of Artificial Sequence: Synthetic oligonucleotide
  Antisense strand to SEQ ID NO: 1584429
cucuucaagcuaaugagac

SEQ ID NO: 1584431 - RNA, 19 nt, Artificial Sequence
  Description of Artificial Sequence: Synthetic oligonucleotide
  Sense strand starting at position 254 of SEQ ID NO: 1560216
cugggaaacucaucaguca

SEQ ID NO: 1584432 - RNA, 19 nt, Artificial Sequence
  Description of Artificial Sequence: Synthetic oligonucleotide
  Antisense strand to SEQ ID NO: 1584431
ugacugaugaguuucccag

SEQ ID NO: 1584433 - RNA, 19 nt, Artificial Sequence
  Description of Artificial Sequence: Synthetic oligonucleotide
  Sense strand starting at position 380 of SEQ ID NO: 1560216
agucuuuccucugcacaga

SEQ ID NO: 1584434 - RNA, 19 nt, Artificial Sequence
  Description of Artificial Sequence: Synthetic oligonucleotide
  Antisense strand to SEQ ID NO: 1584433
ucugugcagaggaaagacu

SEQ ID NO: 1584435 - RNA, 19 nt, Artificial Sequence
  Description of Artificial Sequence: Synthetic oligonucleotide
  Sense strand starting at position 745 of SEQ ID NO: 1560216
gcccgcuuccugcaaacaa

SEQ ID NO: 1584436 - RNA, 19 nt, Artificial Sequence
  Description of Artificial Sequence: Synthetic oligonucleotide
  Antisense strand to SEQ ID NO: 1584435
uuguuugcaggaagcgggc

SEQ ID NO: 1584437 - RNA, 19 nt, Artificial Sequence
  Description of Artificial Sequence: Synthetic oligonucleotide
  Sense strand starting at position 881 of SEQ ID NO: 1560216
cuaagaaaguugggagaga

SEQ ID NO: 1584438 - RNA, 19 nt, Artificial Sequence
  Description of Artificial Sequence: Synthetic oligonucleotide
  Antisense strand to SEQ ID NO: 1584437
ucucucccaacuuucuuag

SEQ ID NO: 1584439 - RNA, 19 nt, Artificial Sequence
  Description of Artificial Sequence: Synthetic oligonucleotide
  Sense strand starting at position 965 of SEQ ID NO: 1560216
cucccugauccgugcguuu

SEQ ID NO: 1584440 - RNA, 19 nt, Artificial Sequence
  Description of Artificial Sequence: Synthetic oligonucleotide
  Antisense strand to SEQ ID NO: 1584439
aaacgcacggaucagggag

SEQ ID NO: 1584441 - RNA, 19 nt, Artificial Sequence
  Description of Artificial Sequence: Synthetic oligonucleotide
  Sense strand starting at position 972 of SEQ ID NO: 1560216
auccgugcguuuccggaaa

SEQ ID NO: 1584442 - RNA, 19 nt, Artificial Sequence
  Description of Artificial Sequence: Synthetic oligonucleotide
  Antisense strand to SEQ ID NO: 1584441
uuuccggaaacgcacggau

SEQ ID NO: 1584443 - RNA, 19 nt, Artificial Sequence
  Description of Artificial Sequence: Synthetic oligonucleotide
  Sense strand starting at position 1038 of SEQ ID NO: 1560216
ccgggaguucccaggcagu

SEQ ID NO: 1584444 - RNA, 19 nt, Artificial Sequence
  Description of Artificial Sequence: Synthetic oligonucleotide
  Antisense strand to SEQ ID NO: 1584443
acugccugggaacucccgg

SEQ ID NO: 1584445 - RNA, 19 nt, Artificial Sequence
  Description of Artificial Sequence: Synthetic oligonucleotide
  Sense strand starting at position 1428 of SEQ ID NO: 1560216
gcggcagacuccugagugu

SEQ ID NO: 1584446 - RNA, 19 nt, Artificial Sequence
  Description of Artificial Sequence: Synthetic oligonucleotide
  Antisense strand to SEQ ID NO: 1584445
acacucaggagucugccgc

SEQ ID NO: 1584447 - RNA, 19 nt, Artificial Sequence
  Description of Artificial Sequence: Synthetic oligonucleotide
  Sense strand starting at position 2352 of SEQ ID NO: 1560216
cgccguguguuacgucaca

SEQ ID NO: 1584448 - RNA, 19 nt, Artificial Sequence
  Description of Artificial Sequence: Synthetic oligonucleotide
  Antisense strand to SEQ ID NO: 1584447
ugugacguaacacacggcg

SEQ ID NO: 1584449 - RNA, 19 nt, Artificial Sequence
  Description of Artificial Sequence: Synthetic oligonucleotide
  Sense strand starting at position 2354 of SEQ ID NO: 1560216
ccguguguuacgucacagu

SEQ ID NO: 1584450 - RNA, 19 nt, Artificial Sequence
  Description of Artificial Sequence: Synthetic oligonucleotide
  Antisense strand to SEQ ID NO: 1584449
acugugacguaacacacgg

SEQ ID NO: 1584451 - RNA, 19 nt, Artificial Sequence
  Description of Artificial Sequence: Synthetic oligonucleotide
  Sense strand starting at position 2587 of SEQ ID NO: 1560216
uagaauaacugcuccgugu

SEQ ID NO: 1584452 - RNA, 19 nt, Artificial Sequence
  Description of Artificial Sequence: Synthetic oligonucleotide
  Antisense strand to SEQ ID NO: 1584451
acacggagcaguuauucua

SEQ ID NO: 1584453 - RNA, 19 nt, Artificial Sequence
  Description of Artificial Sequence: Synthetic oligonucleotide
  Sense strand starting at position 2589 of SEQ ID NO: 1560216
gaauaacugcuccguguuc

SEQ ID NO: 1584454 - RNA, 19 nt, Artificial Sequence
  Description of Artificial Sequence: Synthetic oligonucleotide
  Antisense strand to SEQ ID NO: 1584453
gaacacggagcaguuauuc

SEQ ID NO: 1584455 - RNA, 19 nt, Artificial Sequence
  Description of Artificial Sequence: Synthetic oligonucleotide
  Sense strand starting at position 2774 of SEQ ID NO: 1560216
agccgacuccuugcuugua

SEQ ID NO: 1584456 - RNA, 19 nt, Artificial Sequence
  Description of Artificial Sequence: Synthetic oligonucleotide
  Antisense strand to SEQ ID NO: 1584455
uacaagcaaggagucggcu

SEQ ID NO: 1584457 - RNA, 19 nt, Artificial Sequence
  Description of Artificial Sequence: Synthetic oligonucleotide
  Sense strand starting at position 3003 of SEQ ID NO: 1560216
guauuaagugccugccagu

SEQ ID NO: 1584458 - RNA, 19 nt, Artificial Sequence
  Description of Artificial Sequence: Synthetic oligonucleotide
  Antisense strand to SEQ ID NO: 1584457
acuggcaggcacuuaauac

SEQ ID NO: 1584459 - RNA, 19 nt, Artificial Sequence
  Description of Artificial Sequence: Synthetic oligonucleotide
  Sense strand starting at position 3016 of SEQ ID NO: 1560216
gccaguggcucugagaaua

SEQ ID NO: 1584460 - RNA, 19 nt, Artificial Sequence
  Description of Artificial Sequence: Synthetic oligonucleotide
  Antisense strand to SEQ ID NO: 1584459
uauucucagagccacuggc

SEQ ID NO: 1584461 - RNA, 19 nt, Artificial Sequence
  Description of Artificial Sequence: Synthetic oligonucleotide
  Sense strand starting at position 3029 of SEQ ID NO: 1560216
agaauagaacagugagcua

SEQ ID NO: 1584462 - RNA, 19 nt, Artificial Sequence
  Description of Artificial Sequence: Synthetic oligonucleotide
  Antisense strand to SEQ ID NO: 1584461
uagcucacuguucuauucu

SEQ ID NO: 1584463 - RNA, 19 nt, Artificial Sequence
  Description of Artificial Sequence: Synthetic oligonucleotide
  Sense strand starting at position 3042 of SEQ ID NO: 1560216
gagcuagacucuuggcauc

SEQ ID NO: 1584464 - RNA, 19 nt, Artificial Sequence
  Description of Artificial Sequence: Synthetic oligonucleotide
  Antisense strand to SEQ ID NO: 1584463
gaugccaagagucuagcuc

SEQ ID NO: 1584465 - RNA, 19 nt, Artificial Sequence
  Description of Artificial Sequence: Synthetic oligonucleotide
  Sense strand starting at position 3057 of SEQ ID NO: 1560216
caucguuuccuagggaguc

SEQ ID NO: 1584466 - RNA, 19 nt, Artificial Sequence
  Description of Artificial Sequence: Synthetic oligonucleotide
  Antisense strand to SEQ ID NO: 1584465
gacucccuaggaaacgaug

SEQ ID NO: 1584467 - RNA, 19 nt, Artificial Sequence
  Description of Artificial Sequence: Synthetic oligonucleotide
  Sense strand starting at position 3067 of SEQ ID NO: 1560216
uagggaguccucgguccua

SEQ ID NO: 1584468 - RNA, 19 nt, Artificial Sequence
  Description of Artificial Sequence: Synthetic oligonucleotide
  Antisense strand to SEQ ID NO: 1584467
uaggaccgaggacucccua

SEQ ID NO: 1584469 - RNA, 19 nt, Artificial Sequence
  Description of Artificial Sequence: Synthetic oligonucleotide
  Sense strand starting at position 3091 of SEQ ID NO: 1560216
aggagagagcccuguguaa

SEQ ID NO: 1584470 - RNA, 19 nt, Artificial Sequence
  Description of Artificial Sequence: Synthetic oligonucleotide
  Antisense strand to SEQ ID NO: 1584469
uuacacagggcucucuccu

SEQ ID NO: 1584471 - RNA, 19 nt, Artificial Sequence
  Description of Artificial Sequence: Synthetic oligonucleotide
  Sense strand starting at position 3093 of SEQ ID NO: 1560216
gagagagcccuguguaaug

SEQ ID NO: 1584472 - RNA, 19 nt, Artificial Sequence
  Description of Artificial Sequence: Synthetic oligonucleotide
  Antisense strand to SEQ ID NO: 1584471
cauuacacagggcucucuc

SEQ ID NO: 1584473 - RNA, 19 nt, Artificial Sequence
  Description of Artificial Sequence: Synthetic oligonucleotide
  Sense strand starting at position 3095 of SEQ ID NO: 1560216
gagagcccuguguaaugau

SEQ ID NO: 1584474 - RNA, 19 nt, Artificial Sequence
  Description of Artificial Sequence: Synthetic oligonucleotide
  Antisense strand to SEQ ID NO: 1584473
aucauuacacagggcucuc

SEQ ID NO: 1584475 - RNA, 19 nt, Artificial Sequence
  Description of Artificial Sequence: Synthetic oligonucleotide
  Sense strand starting at position 3404 of SEQ ID NO: 1560216
gcaagacugucuuaauaag

SEQ ID NO: 1584476 - RNA, 19 nt, Artificial Sequence
  Description of Artificial Sequence: Synthetic oligonucleotide
  Antisense strand to SEQ ID NO: 1584475
cuuauuaagacagucuugc

SEQ ID NO: 1584477 - RNA, 19 nt, Artificial Sequence
  Description of Artificial Sequence: Synthetic oligonucleotide
  Sense strand starting at position 3645 of SEQ ID NO: 1560216
guuguagucagccaggauc

SEQ ID NO: 1584478 - RNA, 19 nt, Artificial Sequence
  Description of Artificial Sequence: Synthetic oligonucleotide
  Antisense strand to SEQ ID NO: 1584477
gauccuggcugacuacaac

SEQ ID NO: 1584479 - RNA, 19 nt, Artificial Sequence
  Description of Artificial Sequence: Synthetic oligonucleotide
  Sense strand starting at position 3737 of SEQ ID NO: 1560216
ugcgauuccagguguaaac

SEQ ID NO: 1584480 - RNA, 19 nt, Artificial Sequence
  Description of Artificial Sequence: Synthetic oligonucleotide
  Antisense strand to SEQ ID NO: 1584479
guuuacaccuggaaucgca

SEQ ID NO: 1584481 - RNA, 19 nt, Artificial Sequence
  Description of Artificial Sequence: Synthetic oligonucleotide
  Sense strand starting at position 149 of SEQ ID NO: 1560217
cucuguuacccagguggaa

SEQ ID NO: 1584482 - RNA, 19 nt, Artificial Sequence
  Description of Artificial Sequence: Synthetic oligonucleotide
  Antisense strand to SEQ ID NO: 1584481
uuccaccuggguaacagag

SEQ ID NO: 1584483 - RNA, 19 nt, Artificial Sequence
  Description of Artificial Sequence: Synthetic oligonucleotide
  Sense strand starting at position 445 of SEQ ID NO: 1560217
gcgccucugaaucaugaua

SEQ ID NO: 1584484 - RNA, 19 nt, Artificial Sequence
  Description of Artificial Sequence: Synthetic oligonucleotide
  Antisense strand to SEQ ID NO: 1584483
uaucaugauucagaggcgc

SEQ ID NO: 1584485 - RNA, 19 nt, Artificial Sequence
  Description of Artificial Sequence: Synthetic oligonucleotide
  Sense strand starting at position 793 of SEQ ID NO: 1560217
guuuauucaggaggagaug

SEQ ID NO: 1584486 - RNA, 19 nt, Artificial Sequence
  Description of Artificial Sequence: Synthetic oligonucleotide
  Antisense strand to SEQ ID NO: 1584485
caucuccuccugaauaaac

SEQ ID NO: 1584487 - RNA, 19 nt, Artificial Sequence
  Description of Artificial Sequence: Synthetic oligonucleotide
  Sense strand starting at position 840 of SEQ ID NO: 1560217
agugguaugaucuggcaug

SEQ ID NO: 1584488 - RNA, 19 nt, Artificial Sequence
  Description of Artificial Sequence: Synthetic oligonucleotide
  Antisense strand to SEQ ID NO: 1584487
caugccagaucauaccacu

SEQ ID NO: 1584489 - RNA, 19 nt, Artificial Sequence
  Description of Artificial Sequence: Synthetic oligonucleotide
  Sense strand starting at position 867 of SEQ ID NO: 1560217
ggauuccuagacuggucaa

SEQ ID NO: 1584490 - RNA, 19 nt, Artificial Sequence
  Description of Artificial Sequence: Synthetic oligonucleotide
  Antisense strand to SEQ ID NO: 1584489
uugaccagucuaggaaucc

SEQ ID NO: 1584491 - RNA, 19 nt, Artificial Sequence
  Description of Artificial Sequence: Synthetic oligonucleotide
  Sense strand starting at position 870 of SEQ ID NO: 1560217
uuccuagacuggucaacau

SEQ ID NO: 1584492 - RNA, 19 nt, Artificial Sequence
  Description of Artificial Sequence: Synthetic oligonucleotide
  Antisense strand to SEQ ID NO: 1584491
auguugaccagucuaggaa

SEQ ID NO: 1584493 - RNA, 19 nt, Artificial Sequence
  Description of Artificial Sequence: Synthetic oligonucleotide
  Sense strand starting at position 1111 of SEQ ID NO: 1560217
ggaggacuguugguuguca

SEQ ID NO: 1584494 - RNA, 19 nt, Artificial Sequence
  Description of Artificial Sequence: Synthetic oligonucleotide
  Antisense strand to SEQ ID NO: 1584493
ugacaaccaacaguccucc

SEQ ID NO: 1584495 - RNA, 19 nt, Artificial Sequence
  Description of Artificial Sequence: Synthetic oligonucleotide
  Sense strand starting at position 1115 of SEQ ID NO: 1560217
gacuguugguugucaggga

SEQ ID NO: 1584496 - RNA, 19 nt, Artificial Sequence
  Description of Artificial Sequence: Synthetic oligonucleotide
  Antisense strand to SEQ ID NO: 1584495
ucccugacaaccaacaguc

SEQ ID NO: 1584497 - RNA, 19 nt, Artificial Sequence
  Description of Artificial Sequence: Synthetic oligonucleotide
  Sense strand starting at position 1119 of SEQ ID NO: 1560217
guugguugucagggacaag

SEQ ID NO: 1584498 - RNA, 19 nt, Artificial Sequence
  Description of Artificial Sequence: Synthetic oligonucleotide
  Antisense strand to SEQ ID NO: 1584497
cuugucccugacaaccaac

SEQ ID NO: 1584499 - RNA, 19 nt, Artificial Sequence
  Description of Artificial Sequence: Synthetic oligonucleotide
  Sense strand starting at position 1240 of SEQ ID NO: 1560217
guauaagacugauuggagu

SEQ ID NO: 1584500 - RNA, 19 nt, Artificial Sequence
  Description of Artificial Sequence: Synthetic oligonucleotide
  Antisense strand to SEQ ID NO: 1584499
acuccaaucagucuuauac

SEQ ID NO: 1584501 - RNA, 19 nt, Artificial Sequence
  Description of Artificial Sequence: Synthetic oligonucleotide
  Sense strand starting at position 1304 of SEQ ID NO: 1560217
agguucuggccugagcauu

SEQ ID NO: 1584502 - RNA, 19 nt, Artificial Sequence
  Description of Artificial Sequence: Synthetic oligonucleotide
  Antisense strand to SEQ ID NO: 1584501
aaugcucaggccagaaccu

SEQ ID NO: 1584503 - RNA, 19 nt, Artificial Sequence
  Description of Artificial Sequence: Synthetic oligonucleotide
  Sense strand starting at position 1383 of SEQ ID NO: 1560217
agguuugacaugcauguua

SEQ ID NO: 1584504 - RNA, 19 nt, Artificial Sequence
  Description of Artificial Sequence: Synthetic oligonucleotide
  Antisense strand to SEQ ID NO: 1584503
uaacaugcaugucaaaccu

SEQ ID NO: 1584505 - RNA, 19 nt, Artificial Sequence
  Description of Artificial Sequence: Synthetic oligonucleotide
  Sense strand starting at position 1385 of SEQ ID NO: 1560217
guuugacaugcauguuaag

SEQ ID NO: 1584506 - RNA, 19 nt, Artificial Sequence
  Description of Artificial Sequence: Synthetic oligonucleotide
  Antisense strand to SEQ ID NO: 1584505
cuuaacaugcaugucaaac

SEQ ID NO: 1584507 - RNA, 19 nt, Artificial Sequence
  Description of Artificial Sequence: Synthetic oligonucleotide
  Sense strand starting at position 1584 of SEQ ID NO: 1560217
caguaaguaucuguaggau

SEQ ID NO: 1584508 - RNA, 19 nt, Artificial Sequence
  Description of Artificial Sequence: Synthetic oligonucleotide
  Antisense strand to SEQ ID NO: 1584507
auccuacagauacuuacug

SEQ ID NO: 1584509 - RNA, 19 nt, Artificial Sequence
  Description of Artificial Sequence: Synthetic oligonucleotide
  Sense strand starting at position 1590 of SEQ ID NO: 1560217
guaucuguaggaugaggga

SEQ ID NO: 1584510 - RNA, 19 nt, Artificial Sequence
  Description of Artificial Sequence: Synthetic oligonucleotide
  Antisense strand to SEQ ID NO: 1584509
ucccucauccuacagauac

SEQ ID NO: 1584511 - RNA, 19 nt, Artificial Sequence
  Description of Artificial Sequence: Synthetic oligonucleotide
  Sense strand starting at position 1644 of SEQ ID NO: 1560217
cagggaugccucuggauug

SEQ ID NO: 1584512 - RNA, 19 nt, Artificial Sequence
  Description of Artificial Sequence: Synthetic oligonucleotide
  Antisense strand to SEQ ID NO: 1584511
caauccagaggcaucccug

SEQ ID NO: 1584513 - RNA, 19 nt, Artificial Sequence
  Description of Artificial Sequence: Synthetic oligonucleotide
  Sense strand starting at position 1678 of SEQ ID NO: 1560217
gacagauaauguguggcau

SEQ ID NO: 1584514 - RNA, 19 nt, Artificial Sequence
  Description of Artificial Sequence: Synthetic oligonucleotide
  Antisense strand to SEQ ID NO: 1584513
augccacacauuaucuguc

SEQ ID NO: 1584515 - RNA, 19 nt, Artificial Sequence
  Description of Artificial Sequence: Synthetic oligonucleotide
  Sense strand starting at position 1768 of SEQ ID NO: 1560217
ggaguggcccgguaagaga

SEQ ID NO: 1584516 - RNA, 19 nt, Artificial Sequence
  Description of Artificial Sequence: Synthetic oligonucleotide
  Antisense strand to SEQ ID NO: 1584515
ucucuuaccgggccacucc

SEQ ID NO: 1584517 - RNA, 19 nt, Artificial Sequence
  Description of Artificial Sequence: Synthetic oligonucleotide
  Sense strand starting at position 1811 of SEQ ID NO: 1560217
ugggaauccuggcuacaag

SEQ ID NO: 1584518 - RNA, 19 nt, Artificial Sequence
  Description of Artificial Sequence: Synthetic oligonucleotide
  Antisense strand to SEQ ID NO: 1584517
cuuguagccaggauuccca

SEQ ID NO: 1584519 - RNA, 19 nt, Artificial Sequence
  Description of Artificial Sequence: Synthetic oligonucleotide
  Sense strand starting at position 1851 of SEQ ID NO: 1560217
ggaaaucacagaggccuua

SEQ ID NO: 1584520 - RNA, 19 nt, Artificial Sequence
  Description of Artificial Sequence: Synthetic oligonucleotide
  Antisense strand to SEQ ID NO: 1584519
uaaggccucugugauuucc

SEQ ID NO: 1584521 - RNA, 19 nt, Artificial Sequence
  Description of Artificial Sequence: Synthetic oligonucleotide
  Sense strand starting at position 1863 of SEQ ID NO: 1560217
ggccuuacgcucgaagaga

SEQ ID NO: 1584522 - RNA, 19 nt, Artificial Sequence
  Description of Artificial Sequence: Synthetic oligonucleotide
  Antisense strand to SEQ ID NO: 1584521
ucucuucgagcguaaggcc

SEQ ID NO: 1584523 - RNA, 19 nt, Artificial Sequence
  Description of Artificial Sequence: Synthetic oligonucleotide
  Sense strand starting at position 2052 of SEQ ID NO: 1560217
gggcuuucuugccuagaac

SEQ ID NO: 1584524 - RNA, 19 nt, Artificial Sequence
  Description of Artificial Sequence: Synthetic oligonucleotide
  Antisense strand to SEQ ID NO: 1584523
guucuaggcaagaaagccc

SEQ ID NO: 1584525 - RNA, 19 nt, Artificial Sequence
  Description of Artificial Sequence: Synthetic oligonucleotide
  Sense strand starting at position 2053 of SEQ ID NO: 1560217
ggcuuucuugccuagaacu

SEQ ID NO: 1584526 - RNA, 19 nt, Artificial Sequence
  Description of Artificial Sequence: Synthetic oligonucleotide
  Antisense strand to SEQ ID NO: 1584525
aguucuaggcaagaaagcc

SEQ ID NO: 1584527 - RNA, 19 nt, Artificial Sequence
  Description of Artificial Sequence: Synthetic oligonucleotide
  Sense strand starting at position 2246 of SEQ ID NO: 1560217
cugcguguacuguugucau

SEQ ID NO: 1584528 - RNA, 19 nt, Artificial Sequence
  Description of Artificial Sequence: Synthetic oligonucleotide
  Antisense strand to SEQ ID NO: 1584527
augacaacaguacacgcag

SEQ ID NO: 1584529 - RNA, 19 nt, Artificial Sequence
  Description of Artificial Sequence: Synthetic oligonucleotide
  Sense strand starting at position 2308 of SEQ ID NO: 1560217
guuguauucugauuaacug

SEQ ID NO: 1584530 - RNA, 19 nt, Artificial Sequence
  Description of Artificial Sequence: Synthetic oligonucleotide
  Antisense strand to SEQ ID NO: 1584529
caguuaaucagaauacaac

SEQ ID NO: 1584531 - RNA, 19 nt, Artificial Sequence
  Description of Artificial Sequence: Synthetic oligonucleotide
  Sense strand starting at position 2309 of SEQ ID NO: 1560217
uuguauucugauuaacuga

SEQ ID NO: 1584532 - RNA, 19 nt, Artificial Sequence
  Description of Artificial Sequence: Synthetic oligonucleotide
  Antisense strand to SEQ ID NO: 1584531
ucaguuaaucagaauacaa

SEQ ID NO: 1584533 - RNA, 19 nt, Artificial Sequence
  Description of Artificial Sequence: Synthetic oligonucleotide
  Sense strand starting at position 2471 of SEQ ID NO: 1560217
gcagacuucgaggauugga

SEQ ID NO: 1584534 - RNA, 19 nt, Artificial Sequence
  Description of Artificial Sequence: Synthetic oligonucleotide
  Antisense strand to SEQ ID NO: 1584533
uccaauccucgaagucugc

SEQ ID NO: 1584535 - RNA, 19 nt, Artificial Sequence
  Description of Artificial Sequence: Synthetic oligonucleotide
  Sense strand starting at position 2479 of SEQ ID NO: 1560217
cgaggauuggaguggaacu

SEQ ID NO: 1584536 - RNA, 19 nt, Artificial Sequence
  Description of Artificial Sequence: Synthetic oligonucleotide
  Antisense strand to SEQ ID NO: 1584535
aguuccacuccaauccucg

SEQ ID NO: 1584537 - RNA, 19 nt, Artificial Sequence
  Description of Artificial Sequence: Synthetic oligonucleotide
  Sense strand starting at position 2604 of SEQ ID NO: 1560217
gacucagacccuugagacu

SEQ ID NO: 1584538 - RNA, 19 nt, Artificial Sequence
  Description of Artificial Sequence: Synthetic oligonucleotide
  Antisense strand to SEQ ID NO: 1584537
agucucaagggucugaguc

SEQ ID NO: 1584539 - RNA, 19 nt, Artificial Sequence
  Description of Artificial Sequence: Synthetic oligonucleotide
  Sense strand starting at position 2805 of SEQ ID NO: 1560217
aucugagacccuugagauc

SEQ ID NO: 1584540 - RNA, 19 nt, Artificial Sequence
  Description of Artificial Sequence: Synthetic oligonucleotide
  Antisense strand to SEQ ID NO: 1584539
gaucucaagggucucagau

SEQ ID NO: 1584541 - RNA, 19 nt, Artificial Sequence
  Description of Artificial Sequence: Synthetic oligonucleotide
  Sense strand starting at position 3415 of SEQ ID NO: 1560217
gaauuuauuuccugagguc

SEQ ID NO: 1584542 - RNA, 19 nt, Artificial Sequence
  Description of Artificial Sequence: Synthetic oligonucleotide
  Antisense strand to SEQ ID NO: 1584541
gaccucaggaaauaaauuc

SEQ ID NO: 1584543 - RNA, 19 nt, Artificial Sequence
  Description of Artificial Sequence: Synthetic oligonucleotide
  Sense strand starting at position 3478 of SEQ ID NO: 1560217
ugaaucagacuugguuacu

SEQ ID NO: 1584544 - RNA, 19 nt, Artificial Sequence
  Description of Artificial Sequence: Synthetic oligonucleotide
  Antisense strand to SEQ ID NO: 1584543
aguaaccaagucugauuca

SEQ ID NO: 1584545 - RNA, 19 nt, Artificial Sequence
  Description of Artificial Sequence: Synthetic oligonucleotide
  Sense strand starting at position 3479 of SEQ ID NO: 1560217
gaaucagacuugguuacug

SEQ ID NO: 1584546 - RNA, 19 nt, Artificial Sequence
  Description of Artificial Sequence: Synthetic oligonucleotide
  Antisense strand to SEQ ID NO: 1584545
caguaaccaagucugauuc

SEQ ID NO: 1584547 - RNA, 19 nt, Artificial Sequence
  Description of Artificial Sequence: Synthetic oligonucleotide
  Sense strand starting at position 3564 of SEQ ID NO: 1560217
gucaauauggagugauaaa

SEQ ID NO: 1584548 - RNA, 19 nt, Artificial Sequence
  Description of Artificial Sequence: Synthetic oligonucleotide
  Antisense strand to SEQ ID NO: 1584547
uuuaucacuccauauugac

SEQ ID NO: 1584549 - RNA, 19 nt, Artificial Sequence
  Description of Artificial Sequence: Synthetic oligonucleotide
  Sense strand starting at position 3574 of SEQ ID NO: 1560217
agugauaaagcuugacaug

SEQ ID NO: 1584550 - RNA, 19 nt, Artificial Sequence
  Description of Artificial Sequence: Synthetic oligonucleotide
  Antisense strand to SEQ ID NO: 1584549
caugucaagcuuuaucacu

SEQ ID NO: 1584551 - RNA, 19 nt, Artificial Sequence
  Description of Artificial Sequence: Synthetic oligonucleotide
  Sense strand starting at position 3585 of SEQ ID NO: 1560217
uugacauggaaguguuaag

SEQ ID NO: 1584552 - RNA, 19 nt, Artificial Sequence
  Description of Artificial Sequence: Synthetic oligonucleotide
  Antisense strand to SEQ ID NO: 1584551
cuuaacacuuccaugucaa

SEQ ID NO: 1584553 - RNA, 19 nt, Artificial Sequence
  Description of Artificial Sequence: Synthetic oligonucleotide
  Sense strand starting at position 3804 of SEQ ID NO: 1560217
auaguaugugcucaacaag

SEQ ID NO: 1584554 - RNA, 19 nt, Artificial Sequence
  Description of Artificial Sequence: Synthetic oligonucleotide
  Antisense strand to SEQ ID NO: 1584553
cuuguugagcacauacuau

SEQ ID NO: 1584555 - RNA, 19 nt, Artificial Sequence
  Description of Artificial Sequence: Synthetic oligonucleotide
  Sense strand starting at position 3814 of SEQ ID NO: 1560217
cucaacaagugguuauuau

SEQ ID NO: 1584556 - RNA, 19 nt, Artificial Sequence
  Description of Artificial Sequence: Synthetic oligonucleotide
  Antisense strand to SEQ ID NO: 1584555
auaauaaccacuuguugag

SEQ ID NO: 1584557 - RNA, 19 nt, Artificial Sequence
  Description of Artificial Sequence: Synthetic oligonucleotide
  Sense strand starting at position 3815 of SEQ ID NO: 1560217
ucaacaagugguuauuauu

SEQ ID NO: 1584558 - RNA, 19 nt, Artificial Sequence
  Description of Artificial Sequence: Synthetic oligonucleotide
  Antisense strand to SEQ ID NO: 1584557
aauaauaaccacuuguuga

SEQ ID NO: 1584559 - RNA, 19 nt, Artificial Sequence
  Description of Artificial Sequence: Synthetic oligonucleotide
  Sense strand starting at position 3869 of SEQ ID NO: 1560217
uacauaugaguuggguaca

SEQ ID NO: 1584560 - RNA, 19 nt, Artificial Sequence
  Description of Artificial Sequence: Synthetic oligonucleotide
  Antisense strand to SEQ ID NO: 1584559
uguacccaacucauaugua

SEQ ID NO: 1584561 - RNA, 19 nt, Artificial Sequence
  Description of Artificial Sequence: Synthetic oligonucleotide
  Sense strand starting at position 66 of SEQ ID NO: 1560218
ggugaaaggugcuugugau

SEQ ID NO: 1584562 - RNA, 19 nt, Artificial Sequence
  Description of Artificial Sequence: Synthetic oligonucleotide
  Antisense strand to SEQ ID NO: 1584561
aucacaagcaccuuucacc

SEQ ID NO: 1584563 - RNA, 19 nt, Artificial Sequence
  Description of Artificial Sequence: Synthetic oligonucleotide
  Sense strand starting at position 67 of SEQ ID NO: 1560218
gugaaaggugcuugugauc

SEQ ID NO: 1584564 - RNA, 19 nt, Artificial Sequence
  Description of Artificial Sequence: Synthetic oligonucleotide
  Antisense strand to SEQ ID NO: 1584563
gaucacaagcaccuuucac

SEQ ID NO: 1584565 - RNA, 19 nt, Artificial Sequence
  Description of Artificial Sequence: Synthetic oligonucleotide
  Sense strand starting at position 74 of SEQ ID NO: 1560218
gugcuugugaucuuggugu

SEQ ID NO: 1584566 - RNA, 19 nt, Artificial Sequence
  Description of Artificial Sequence: Synthetic oligonucleotide
  Antisense strand to SEQ ID NO: 1584565
acaccaagaucacaagcac

SEQ ID NO: 1584567 - RNA, 19 nt, Artificial Sequence
  Description of Artificial Sequence: Synthetic oligonucleotide
  Sense strand starting at position 76 of SEQ ID NO: 1560218
gcuugugaucuuggugucu

SEQ ID NO: 1584568 - RNA, 19 nt, Artificial Sequence
  Description of Artificial Sequence: Synthetic oligonucleotide
  Antisense strand to SEQ ID NO: 1584567
agacaccaagaucacaagc

SEQ ID NO: 1584569 - RNA, 19 nt, Artificial Sequence
  Description of Artificial Sequence: Synthetic oligonucleotide
  Sense strand starting at position 78 of SEQ ID NO: 1560218
uugugaucuuggugucuuu

SEQ ID NO: 1584570 - RNA, 19 nt, Artificial Sequence
  Description of Artificial Sequence: Synthetic oligonucleotide
  Antisense strand to SEQ ID NO: 1584569
aaagacaccaagaucacaa

SEQ ID NO: 1584571 - RNA, 19 nt, Artificial Sequence
  Description of Artificial Sequence: Synthetic oligonucleotide
  Sense strand starting at position 214 of SEQ ID NO: 1560218
ggucuccuggccuguagaa

SEQ ID NO: 1584572 - RNA, 19 nt, Artificial Sequence
  Description of Artificial Sequence: Synthetic oligonucleotide
  Antisense strand to SEQ ID NO: 1584571
uucuacaggccaggagacc

SEQ ID NO: 1584573 - RNA, 19 nt, Artificial Sequence
  Description of Artificial Sequence: Synthetic oligonucleotide
  Sense strand starting at position 216 of SEQ ID NO: 1560218
ucuccuggccuguagaaua

SEQ ID NO: 1584574 - RNA, 19 nt, Artificial Sequence
  Description of Artificial Sequence: Synthetic oligonucleotide
  Antisense strand to SEQ ID NO: 1584573
uauucuacaggccaggaga

SEQ ID NO: 1584575 - RNA, 19 nt, Artificial Sequence
  Description of Artificial Sequence: Synthetic oligonucleotide
  Sense strand starting at position 227 of SEQ ID NO: 1560218
guagaauagggaugcuaac

SEQ ID NO: 1584576 - RNA, 19 nt, Artificial Sequence
  Description of Artificial Sequence: Synthetic oligonucleotide
  Antisense strand to SEQ ID NO: 1584575
guuagcaucccuauucuac

SEQ ID NO: 1584577 - RNA, 19 nt, Artificial Sequence
  Description of Artificial Sequence: Synthetic oligonucleotide
  Sense strand starting at position 326 of SEQ ID NO: 1560218
gcaguaagcgcucaauaau

SEQ ID NO: 1584578 - RNA, 19 nt, Artificial Sequence
  Description of Artificial Sequence: Synthetic oligonucleotide
  Antisense strand to SEQ ID NO: 1584577
auuauugagcgcuuacugc

SEQ ID NO: 1584579 - RNA, 19 nt, Artificial Sequence
  Description of Artificial Sequence: Synthetic oligonucleotide
  Sense strand starting at position 353 of SEQ ID NO: 1560218
uuaucauguucggcucaga

SEQ ID NO: 1584580 - RNA, 19 nt, Artificial Sequence
  Description of Artificial Sequence: Synthetic oligonucleotide
  Antisense strand to SEQ ID NO: 1584579
ucugagccgaacaugauaa

SEQ ID NO: 1584581 - RNA, 19 nt, Artificial Sequence
  Description of Artificial Sequence: Synthetic oligonucleotide
  Sense strand starting at position 2212 of SEQ ID NO: 1560218
cugcauucuccuccgcgau

SEQ ID NO: 1584582 - RNA, 19 nt, Artificial Sequence
  Description of Artificial Sequence: Synthetic oligonucleotide
  Antisense strand to SEQ ID NO: 1584581
aucgcggaggagaaugcag

SEQ ID NO: 1584583 - RNA, 19 nt, Artificial Sequence
  Description of Artificial Sequence: Synthetic oligonucleotide
  Sense strand starting at position 2213 of SEQ ID NO: 1560218
ugcauucuccuccgcgaua

SEQ ID NO: 1584584 - RNA, 19 nt, Artificial Sequence
  Description of Artificial Sequence: Synthetic oligonucleotide
  Antisense strand to SEQ ID NO: 1584583
uaucgcggaggagaaugca

SEQ ID NO: 1584585 - RNA, 19 nt, Artificial Sequence
  Description of Artificial Sequence: Synthetic oligonucleotide
  Sense strand starting at position 2215 of SEQ ID NO: 1560218
cauucuccuccgcgauaga

SEQ ID NO: 1584586 - RNA, 19 nt, Artificial Sequence
  Description of Artificial Sequence: Synthetic oligonucleotide
  Antisense strand to SEQ ID NO: 1584585
ucuaucgcggaggagaaug

SEQ ID NO: 1584587 - RNA, 19 nt, Artificial Sequence
  Description of Artificial Sequence: Synthetic oligonucleotide
  Sense strand starting at position 2320 of SEQ ID NO: 1560218
ccucaauucucagagagcu

SEQ ID NO: 1584588 - RNA, 19 nt, Artificial Sequence
  Description of Artificial Sequence: Synthetic oligonucleotide
  Antisense strand to SEQ ID NO: 1584587
agcucucugagaauugagg

SEQ ID NO: 1584589 - RNA, 19 nt, Artificial Sequence
  Description of Artificial Sequence: Synthetic oligonucleotide
  Sense strand starting at position 2342 of SEQ ID NO: 1560218
gcaggucacugggaugagu

SEQ ID NO: 1584590 - RNA, 19 nt, Artificial Sequence
  Description of Artificial Sequence: Synthetic oligonucleotide
  Antisense strand to SEQ ID NO: 1584589
acucaucccagugaccugc

SEQ ID NO: 1584591 - RNA, 19 nt, Artificial Sequence
  Description of Artificial Sequence: Synthetic oligonucleotide
  Sense strand starting at position 2344 of SEQ ID NO: 1560218
aggucacugggaugaguaa

SEQ ID NO: 1584592 - RNA, 19 nt, Artificial Sequence
  Description of Artificial Sequence: Synthetic oligonucleotide
  Antisense strand to SEQ ID NO: 1584591
uuacucaucccagugaccu

SEQ ID NO: 1584593 - RNA, 19 nt, Artificial Sequence
  Description of Artificial Sequence: Synthetic oligonucleotide
  Sense strand starting at position 2547 of SEQ ID NO: 1560218
guagcugcucuucugcaau

SEQ ID NO: 1584594 - RNA, 19 nt, Artificial Sequence
  Description of Artificial Sequence: Synthetic oligonucleotide
  Antisense strand to SEQ ID NO: 1584593
auugcagaagagcagcuac

SEQ ID NO: 1584595 - RNA, 19 nt, Artificial Sequence
  Description of Artificial Sequence: Synthetic oligonucleotide
  Sense strand starting at position 2591 of SEQ ID NO: 1560218
caggcuuaugcacaagaug

SEQ ID NO: 1584596 - RNA, 19 nt, Artificial Sequence
  Description of Artificial Sequence: Synthetic oligonucleotide
  Antisense strand to SEQ ID NO: 1584595
caucuugugcauaagccug

SEQ ID NO: 1584597 - RNA, 19 nt, Artificial Sequence
  Description of Artificial Sequence: Synthetic oligonucleotide
  Sense strand starting at position 2607 of SEQ ID NO: 1560218
auggaagagcacuguuaaa

SEQ ID NO: 1584598 - RNA, 19 nt, Artificial Sequence
  Description of Artificial Sequence: Synthetic oligonucleotide
  Antisense strand to SEQ ID NO: 1584597
uuuaacagugcucuuccau

SEQ ID NO: 1584599 - RNA, 19 nt, Artificial Sequence
  Description of Artificial Sequence: Synthetic oligonucleotide
  Sense strand starting at position 2923 of SEQ ID NO: 1560218
cagucuuguucccagaggu

SEQ ID NO: 1584600 - RNA, 19 nt, Artificial Sequence
  Description of Artificial Sequence: Synthetic oligonucleotide
  Antisense strand to SEQ ID NO: 1584599
accucugggaacaagacug

SEQ ID NO: 1584601 - RNA, 19 nt, Artificial Sequence
  Description of Artificial Sequence: Synthetic oligonucleotide
  Sense strand starting at position 3289 of SEQ ID NO: 1560218
accacucagccuugguaaa

SEQ ID NO: 1584602 - RNA, 19 nt, Artificial Sequence
  Description of Artificial Sequence: Synthetic oligonucleotide
  Antisense strand to SEQ ID NO: 1584601
uuuaccaaggcugaguggu

SEQ ID NO: 1584603 - RNA, 19 nt, Artificial Sequence
  Description of Artificial Sequence: Synthetic oligonucleotide
  Sense strand starting at position 3623 of SEQ ID NO: 1560218
ggaugugccucagaggaca

SEQ ID NO: 1584604 - RNA, 19 nt, Artificial Sequence
  Description of Artificial Sequence: Synthetic oligonucleotide
  Antisense strand to SEQ ID NO: 1584603
uguccucugaggcacaucc

SEQ ID NO: 1584605 - RNA, 19 nt, Artificial Sequence
  Description of Artificial Sequence: Synthetic oligonucleotide
  Sense strand starting at position 3845 of SEQ ID NO: 1560218
gggccuugucugggccaua

SEQ ID NO: 1584606 - RNA, 19 nt, Artificial Sequence
  Description of Artificial Sequence: Synthetic oligonucleotide
  Antisense strand to SEQ ID NO: 1584605
uauggcccagacaaggccc

SEQ ID NO: 1584607 - RNA, 19 nt, Artificial Sequence
  Description of Artificial Sequence: Synthetic oligonucleotide
  Sense strand starting at position 3848 of SEQ ID NO: 1560218
ccuugucugggccauaguu

SEQ ID NO: 1584608 - RNA, 19 nt, Artificial Sequence
  Description of Artificial Sequence: Synthetic oligonucleotide
  Antisense strand to SEQ ID NO: 1584607
aacuauggcccagacaagg

SEQ ID NO: 1584609 - RNA, 19 nt, Artificial Sequence
  Description of Artificial Sequence: Synthetic oligonucleotide
  Sense strand starting at position 3907 of SEQ ID NO: 1560218
uuacgucgacguugucaau

SEQ ID NO: 1584610 - RNA, 19 nt, Artificial Sequence
  Description of Artificial Sequence: Synthetic oligonucleotide
  Antisense strand to SEQ ID NO: 1584609
auugacaacgucgacguaa

SEQ ID NO: 1584611 - RNA, 19 nt, Artificial Sequence
  Description of Artificial Sequence: Synthetic oligonucleotide
  Sense strand starting at position 3916 of SEQ ID NO: 1560218
cguugucaaugucuaggau

SEQ ID NO: 1584612 - RNA, 19 nt, Artificial Sequence
  Description of Artificial Sequence: Synthetic oligonucleotide
  Antisense strand to SEQ ID NO: 1584611
auccuagacauugacaacg

SEQ ID NO: 1584613 - RNA, 19 nt, Artificial Sequence
  Description of Artificial Sequence: Synthetic oligonucleotide
  Sense strand starting at position 3920 of SEQ ID NO: 1560218
gucaaugucuaggaugcga

SEQ ID NO: 1584614 - RNA, 19 nt, Artificial Sequence
  Description of Artificial Sequence: Synthetic oligonucleotide
  Antisense strand to SEQ ID NO: 1584613
ucgcauccuagacauugac

SEQ ID NO: 1584615 - RNA, 19 nt, Artificial Sequence
  Description of Artificial Sequence: Synthetic oligonucleotide
  Sense strand starting at position 3922 of SEQ ID NO: 1560218
caaugucuaggaugcgaga

SEQ ID NO: 1584616 - RNA, 19 nt, Artificial Sequence
  Description of Artificial Sequence: Synthetic oligonucleotide
  Antisense strand to SEQ ID NO: 1584615
ucucgcauccuagacauug

SEQ ID NO: 1584617 - RNA, 19 nt, Artificial Sequence
  Description of Artificial Sequence: Synthetic oligonucleotide
  Sense strand starting at position 3924 of SEQ ID NO: 1560218
augucuaggaugcgagaau

SEQ ID NO: 1584618 - RNA, 19 nt, Artificial Sequence
  Description of Artificial Sequence: Synthetic oligonucleotide
  Antisense strand to SEQ ID NO: 1584617
auucucgcauccuagacau

SEQ ID NO: 1584619 - RNA, 19 nt, Artificial Sequence
  Description of Artificial Sequence: Synthetic oligonucleotide
  Sense strand starting at position 39 of SEQ ID NO: 1560219
cccaaaugucaguagagcu

SEQ ID NO: 1584620 - RNA, 19 nt, Artificial Sequence
  Description of Artificial Sequence: Synthetic oligonucleotide
  Antisense strand to SEQ ID NO: 1584619
agcucuacugacauuuggg

SEQ ID NO: 1584621 - RNA, 19 nt, Artificial Sequence
  Description of Artificial Sequence: Synthetic oligonucleotide
  Sense strand starting at position 122 of SEQ ID NO: 1560219
ugaguacugagcuggauag

SEQ ID NO: 1584622 - RNA, 19 nt, Artificial Sequence
  Description of Artificial Sequence: Synthetic oligonucleotide
  Antisense strand to SEQ ID NO: 1584621
cuauccagcucaguacuca

SEQ ID NO: 1584623 - RNA, 19 nt, Artificial Sequence
  Description of Artificial Sequence: Synthetic oligonucleotide
  Sense strand starting at position 138 of SEQ ID NO: 1560219
uagcgugagggauauggaa

SEQ ID NO: 1584624 - RNA, 19 nt, Artificial Sequence
  Description of Artificial Sequence: Synthetic oligonucleotide
  Antisense strand to SEQ ID NO: 1584623
uuccauaucccucacgcua

SEQ ID NO: 1584625 - RNA, 19 nt, Artificial Sequence
  Description of Artificial Sequence: Synthetic oligonucleotide
  Sense strand starting at position 251 of SEQ ID NO: 1560219
gcagaugauaagugcaaga

SEQ ID NO: 1584626 - RNA, 19 nt, Artificial Sequence
  Description of Artificial Sequence: Synthetic oligonucleotide
  Antisense strand to SEQ ID NO: 1584625
ucuugcacuuaucaucugc

SEQ ID NO: 1584627 - RNA, 19 nt, Artificial Sequence
  Description of Artificial Sequence: Synthetic oligonucleotide
  Sense strand starting at position 536 of SEQ ID NO: 1560219
ggugucugucauagugaug

SEQ ID NO: 1584628 - RNA, 19 nt, Artificial Sequence
  Description of Artificial Sequence: Synthetic oligonucleotide
  Antisense strand to SEQ ID NO: 1584627
caucacuaugacagacacc

SEQ ID NO: 1584629 - RNA, 19 nt, Artificial Sequence
  Description of Artificial Sequence: Synthetic oligonucleotide
  Sense strand starting at position 539 of SEQ ID NO: 1560219
gucugucauagugauggaa

SEQ ID NO: 1584630 - RNA, 19 nt, Artificial Sequence
  Description of Artificial Sequence: Synthetic oligonucleotide
  Antisense strand to SEQ ID NO: 1584629
uuccaucacuaugacagac

SEQ ID NO: 1584631 - RNA, 19 nt, Artificial Sequence
  Description of Artificial Sequence: Synthetic oligonucleotide
  Sense strand starting at position 744 of SEQ ID NO: 1560219
gggagauggugcucacaag

SEQ ID NO: 1584632 - RNA, 19 nt, Artificial Sequence
  Description of Artificial Sequence: Synthetic oligonucleotide
  Antisense strand to SEQ ID NO: 1584631
cuugugagcaccaucuccc

SEQ ID NO: 1584633 - RNA, 19 nt, Artificial Sequence
  Description of Artificial Sequence: Synthetic oligonucleotide
  Sense strand starting at position 753 of SEQ ID NO: 1560219
ugcucacaagcggaaauau

SEQ ID NO: 1584634 - RNA, 19 nt, Artificial Sequence
  Description of Artificial Sequence: Synthetic oligonucleotide
  Antisense strand to SEQ ID NO: 1584633
auauuuccgcuugugagca

SEQ ID NO: 1584635 - RNA, 19 nt, Artificial Sequence
  Description of Artificial Sequence: Synthetic oligonucleotide
  Sense strand starting at position 828 of SEQ ID NO: 1560219
uagugaaagcuggagcaga

SEQ ID NO: 1584636 - RNA, 19 nt, Artificial Sequence
  Description of Artificial Sequence: Synthetic oligonucleotide
  Antisense strand to SEQ ID NO: 1584635
ucugcuccagcuuucacua

SEQ ID NO: 1584637 - RNA, 19 nt, Artificial Sequence
  Description of Artificial Sequence: Synthetic oligonucleotide
  Sense strand starting at position 899 of SEQ ID NO: 1560219
gggcuugcuauggauaaag

SEQ ID NO: 1584638 - RNA, 19 nt, Artificial Sequence
  Description of Artificial Sequence: Synthetic oligonucleotide
  Antisense strand to SEQ ID NO: 1584637
cuuuauccauagcaagccc

SEQ ID NO: 1584639 - RNA, 19 nt, Artificial Sequence
  Description of Artificial Sequence: Synthetic oligonucleotide
  Sense strand starting at position 962 of SEQ ID NO: 1560219
uuacguuaccaguaaauag

SEQ ID NO: 1584640 - RNA, 19 nt, Artificial Sequence
  Description of Artificial Sequence: Synthetic oligonucleotide
  Antisense strand to SEQ ID NO: 1584639
cuauuuacugguaacguaa

SEQ ID NO: 1584641 - RNA, 19 nt, Artificial Sequence
  Description of Artificial Sequence: Synthetic oligonucleotide
  Sense strand starting at position 1003 of SEQ ID NO: 1560219
uccagugcacuguaaagaa

SEQ ID NO: 1584642 - RNA, 19 nt, Artificial Sequence
  Description of Artificial Sequence: Synthetic oligonucleotide
  Antisense strand to SEQ ID NO: 1584641
uucuuuacagugcacugga

SEQ ID NO: 1584643 - RNA, 19 nt, Artificial Sequence
  Description of Artificial Sequence: Synthetic oligonucleotide
  Sense strand starting at position 1007 of SEQ ID NO: 1560219
gugcacuguaaagaauaga

SEQ ID NO: 1584644 - RNA, 19 nt, Artificial Sequence
  Description of Artificial Sequence: Synthetic oligonucleotide
  Antisense strand to SEQ ID NO: 1584643
ucuauucuuuacagugcac

SEQ ID NO: 1584645 - RNA, 19 nt, Artificial Sequence
  Description of Artificial Sequence: Synthetic oligonucleotide
  Sense strand starting at position 1030 of SEQ ID NO: 1560219
aggacuuccugaucuucua

SEQ ID NO: 1584646 - RNA, 19 nt, Artificial Sequence
  Description of Artificial Sequence: Synthetic oligonucleotide
  Antisense strand to SEQ ID NO: 1584645
uagaagaucaggaaguccu

SEQ ID NO: 1584647 - RNA, 19 nt, Artificial Sequence
  Description of Artificial Sequence: Synthetic oligonucleotide
  Sense strand starting at position 1037 of SEQ ID NO: 1560219
ccugaucuucuauaaaggu

SEQ ID NO: 1584648 - RNA, 19 nt, Artificial Sequence
  Description of Artificial Sequence: Synthetic oligonucleotide
  Antisense strand to SEQ ID NO: 1584647
accuuuauagaagaucagg

SEQ ID NO: 1584649 - RNA, 19 nt, Artificial Sequence
  Description of Artificial Sequence: Synthetic oligonucleotide
  Sense strand starting at position 1090 of SEQ ID NO: 1560219
uaaguuuagccaugagaau

SEQ ID NO: 1584650 - RNA, 19 nt, Artificial Sequence
  Description of Artificial Sequence: Synthetic oligonucleotide
  Antisense strand to SEQ ID NO: 1584649
auucucauggcuaaacuua

SEQ ID NO: 1584651 - RNA, 19 nt, Artificial Sequence
  Description of Artificial Sequence: Synthetic oligonucleotide
  Sense strand starting at position 1091 of SEQ ID NO: 1560219
aaguuuagccaugagaauu

SEQ ID NO: 1584652 - RNA, 19 nt, Artificial Sequence
  Description of Artificial Sequence: Synthetic oligonucleotide
  Antisense strand to SEQ ID NO: 1584651
aauucucauggcuaaacuu

SEQ ID NO: 1584653 - RNA, 19 nt, Artificial Sequence
  Description of Artificial Sequence: Synthetic oligonucleotide
  Sense strand starting at position 1148 of SEQ ID NO: 1560219
gggagcaaaucuuuguuga

SEQ ID NO: 1584654 - RNA, 19 nt, Artificial Sequence
  Description of Artificial Sequence: Synthetic oligonucleotide
  Antisense strand to SEQ ID NO: 1584653
ucaacaaagauuugcuccc

SEQ ID NO: 1584655 - RNA, 19 nt, Artificial Sequence
  Description of Artificial Sequence: Synthetic oligonucleotide
  Sense strand starting at position 1149 of SEQ ID NO: 1560219
ggagcaaaucuuuguugag

SEQ ID NO: 1584656 - RNA, 19 nt, Artificial Sequence
  Description of Artificial Sequence: Synthetic oligonucleotide
  Antisense strand to SEQ ID NO: 1584655
cucaacaaagauuugcucc

SEQ ID NO: 1584657 - RNA, 19 nt, Artificial Sequence
  Description of Artificial Sequence: Synthetic oligonucleotide
  Sense strand starting at position 1210 of SEQ ID NO: 1560219
gcuacaauugcagauaucu

SEQ ID NO: 1584658 - RNA, 19 nt, Artificial Sequence
  Description of Artificial Sequence: Synthetic oligonucleotide
  Antisense strand to SEQ ID NO: 1584657
agauaucugcaauuguagc

SEQ ID NO: 1584659 - RNA, 19 nt, Artificial Sequence
  Description of Artificial Sequence: Synthetic oligonucleotide
  Sense strand starting at position 1545 of SEQ ID NO: 1560219
cggccaguugcagauauuu

SEQ ID NO: 1584660 - RNA, 19 nt, Artificial Sequence
  Description of Artificial Sequence: Synthetic oligonucleotide
  Antisense strand to SEQ ID NO: 1584659
aaauaucugcaacuggccg

SEQ ID NO: 1584661 - RNA, 19 nt, Artificial Sequence
  Description of Artificial Sequence: Synthetic oligonucleotide
  Sense strand starting at position 2043 of SEQ ID NO: 1560219
gaccaugugcuuuauggga

SEQ ID NO: 1584662 - RNA, 19 nt, Artificial Sequence
  Description of Artificial Sequence: Synthetic oligonucleotide
  Antisense strand to SEQ ID NO: 1584661
ucccauaaagcacaugguc

SEQ ID NO: 1584663 - RNA, 19 nt, Artificial Sequence
  Description of Artificial Sequence: Synthetic oligonucleotide
  Sense strand starting at position 2067 of SEQ ID NO: 1560219
ggaggugaaacuggucaaa

SEQ ID NO: 1584664 - RNA, 19 nt, Artificial Sequence
  Description of Artificial Sequence: Synthetic oligonucleotide
  Antisense strand to SEQ ID NO: 1584663
uuugaccaguuucaccucc

SEQ ID NO: 1584665 - RNA, 19 nt, Artificial Sequence
  Description of Artificial Sequence: Synthetic oligonucleotide
  Sense strand starting at position 2069 of SEQ ID NO: 1560219
aggugaaacuggucaaaca

SEQ ID NO: 1584666 - RNA, 19 nt, Artificial Sequence
  Description of Artificial Sequence: Synthetic oligonucleotide
  Antisense strand to SEQ ID NO: 1584665
uguuugaccaguuucaccu

SEQ ID NO: 1584667 - RNA, 19 nt, Artificial Sequence
  Description of Artificial Sequence: Synthetic oligonucleotide
  Sense strand starting at position 2142 of SEQ ID NO: 1560219
gugccaguucucuccugua

SEQ ID NO: 1584668 - RNA, 19 nt, Artificial Sequence
  Description of Artificial Sequence: Synthetic oligonucleotide
  Antisense strand to SEQ ID NO: 1584667
uacaggagagaacuggcac

SEQ ID NO: 1584669 - RNA, 19 nt, Artificial Sequence
  Description of Artificial Sequence: Synthetic oligonucleotide
  Sense strand starting at position 2260 of SEQ ID NO: 1560219
cugaauauuuggcaggaaa

SEQ ID NO: 1584670 - RNA, 19 nt, Artificial Sequence
  Description of Artificial Sequence: Synthetic oligonucleotide
  Antisense strand to SEQ ID NO: 1584669
uuuccugccaaauauucag

SEQ ID NO: 1584671 - RNA, 19 nt, Artificial Sequence
  Description of Artificial Sequence: Synthetic oligonucleotide
  Sense strand starting at position 2283 of SEQ ID NO: 1560219
auacuaaguguugguagaa

SEQ ID NO: 1584672 - RNA, 19 nt, Artificial Sequence
  Description of Artificial Sequence: Synthetic oligonucleotide
  Antisense strand to SEQ ID NO: 1584671
uucuaccaacacuuaguau

SEQ ID NO: 1584673 - RNA, 19 nt, Artificial Sequence
  Description of Artificial Sequence: Synthetic oligonucleotide
  Sense strand starting at position 2284 of SEQ ID NO: 1560219
uacuaaguguugguagaag

SEQ ID NO: 1584674 - RNA, 19 nt, Artificial Sequence
  Description of Artificial Sequence: Synthetic oligonucleotide
  Antisense strand to SEQ ID NO: 1584673
cuucuaccaacacuuagua

SEQ ID NO: 1584675 - RNA, 19 nt, Artificial Sequence
  Description of Artificial Sequence: Synthetic oligonucleotide
  Sense strand starting at position 2355 of SEQ ID NO: 1560219
aaauaucggcaauaguagu

SEQ ID NO: 1584676 - RNA, 19 nt, Artificial Sequence
  Description of Artificial Sequence: Synthetic oligonucleotide
  Antisense strand to SEQ ID NO: 1584675
acuacuauugccgauauuu

SEQ ID NO: 1584677 - RNA, 19 nt, Artificial Sequence
  Description of Artificial Sequence: Synthetic oligonucleotide
  Sense strand starting at position 2741 of SEQ ID NO: 1560219
agguaauaauacuugaagu

SEQ ID NO: 1584678 - RNA, 19 nt, Artificial Sequence
  Description of Artificial Sequence: Synthetic oligonucleotide
  Antisense strand to SEQ ID NO: 1584677
acuucaaguauuauuaccu

SEQ ID NO: 1584679 - RNA, 19 nt, Artificial Sequence
  Description of Artificial Sequence: Synthetic oligonucleotide
  Sense strand starting at position 2817 of SEQ ID NO: 1560219
uaggaaaugugcucaaagg

SEQ ID NO: 1584680 - RNA, 19 nt, Artificial Sequence
  Description of Artificial Sequence: Synthetic oligonucleotide
  Antisense strand to SEQ ID NO: 1584679
ccuuugagcacauuuccua

SEQ ID NO: 1584681 - RNA, 19 nt, Artificial Sequence
  Description of Artificial Sequence: Synthetic oligonucleotide
  Sense strand starting at position 3055 of SEQ ID NO: 1560219
ugacuugucacagaguuga

SEQ ID NO: 1584682 - RNA, 19 nt, Artificial Sequence
  Description of Artificial Sequence: Synthetic oligonucleotide
  Antisense strand to SEQ ID NO: 1584681
ucaacucugugacaaguca

SEQ ID NO: 1584683 - RNA, 19 nt, Artificial Sequence
  Description of Artificial Sequence: Synthetic oligonucleotide
  Sense strand starting at position 3182 of SEQ ID NO: 1560219
gaugcaaaucacugaugug

SEQ ID NO: 1584684 - RNA, 19 nt, Artificial Sequence
  Description of Artificial Sequence: Synthetic oligonucleotide
  Antisense strand to SEQ ID NO: 1584683
cacaucagugauuugcauc

SEQ ID NO: 1584685 - RNA, 19 nt, Artificial Sequence
  Description of Artificial Sequence: Synthetic oligonucleotide
  Sense strand starting at position 3257 of SEQ ID NO: 1560219
gagauaugggugcagucau

SEQ ID NO: 1584686 - RNA, 19 nt, Artificial Sequence
  Description of Artificial Sequence: Synthetic oligonucleotide
  Antisense strand to SEQ ID NO: 1584685
augacugcacccauaucuc

SEQ ID NO: 1584687 - RNA, 19 nt, Artificial Sequence
  Description of Artificial Sequence: Synthetic oligonucleotide
  Sense strand starting at position 3452 of SEQ ID NO: 1560219
ggagcuguucguguucauu

SEQ ID NO: 1584688 - RNA, 19 nt, Artificial Sequence
  Description of Artificial Sequence: Synthetic oligonucleotide
  Antisense strand to SEQ ID NO: 1584687
aaugaacacgaacagcucc

SEQ ID NO: 1584689 - RNA, 19 nt, Artificial Sequence
  Description of Artificial Sequence: Synthetic oligonucleotide
  Sense strand starting at position 3516 of SEQ ID NO: 1560219
ucuauaaaugacuguugaa

SEQ ID NO: 1584690 - RNA, 19 nt, Artificial Sequence
  Description of Artificial Sequence: Synthetic oligonucleotide
  Antisense strand to SEQ ID NO: 1584689
uucaacagucauuuauaga

SEQ ID NO: 1584691 - RNA, 19 nt, Artificial Sequence
  Description of Artificial Sequence: Synthetic oligonucleotide
  Sense strand starting at position 3528 of SEQ ID NO: 1560219
uguugaauggaaugauugu

SEQ ID NO: 1584692 - RNA, 19 nt, Artificial Sequence
  Description of Artificial Sequence: Synthetic oligonucleotide
  Antisense strand to SEQ ID NO: 1584691
acaaucauuccauucaaca

SEQ ID NO: 1584693 - RNA, 19 nt, Artificial Sequence
  Description of Artificial Sequence: Synthetic oligonucleotide
  Sense strand starting at position 3529 of SEQ ID NO: 1560219
guugaauggaaugauuguu

SEQ ID NO: 1584694 - RNA, 19 nt, Artificial Sequence
  Description of Artificial Sequence: Synthetic oligonucleotide
  Antisense strand to SEQ ID NO: 1584693
aacaaucauuccauucaac

SEQ ID NO: 1584695 - RNA, 19 nt, Artificial Sequence
  Description of Artificial Sequence: Synthetic oligonucleotide
  Sense strand starting at position 3558 of SEQ ID NO: 1560219
uuaacugggccugauguau

SEQ ID NO: 1584696 - RNA, 19 nt, Artificial Sequence
  Description of Artificial Sequence: Synthetic oligonucleotide
  Antisense strand to SEQ ID NO: 1584695
auacaucaggcccaguuaa

SEQ ID NO: 1584697 - RNA, 19 nt, Artificial Sequence
  Description of Artificial Sequence: Synthetic oligonucleotide
  Sense strand starting at position 3562 of SEQ ID NO: 1560219
cugggccugauguauuaga

SEQ ID NO: 1584698 - RNA, 19 nt, Artificial Sequence
  Description of Artificial Sequence: Synthetic oligonucleotide
  Antisense strand to SEQ ID NO: 1584697
ucuaauacaucaggcccag

SEQ ID NO: 1584699 - RNA, 19 nt, Artificial Sequence
  Description of Artificial Sequence: Synthetic oligonucleotide
  Sense strand starting at position 108 of SEQ ID NO: 1560220
gucagaauuccaggaggca

SEQ ID NO: 1584700 - RNA, 19 nt, Artificial Sequence
  Description of Artificial Sequence: Synthetic oligonucleotide
  Antisense strand to SEQ ID NO: 1584699
ugccuccuggaauucugac

SEQ ID NO: 1584701 - RNA, 19 nt, Artificial Sequence
  Description of Artificial Sequence: Synthetic oligonucleotide
  Sense strand starting at position 661 of SEQ ID NO: 1560220
auaagagaaucagaagaga

SEQ ID NO: 1584702 - RNA, 19 nt, Artificial Sequence
  Description of Artificial Sequence: Synthetic oligonucleotide
  Antisense strand to SEQ ID NO: 1584701
ucucuucugauucucuuau

SEQ ID NO: 1584703 - RNA, 19 nt, Artificial Sequence
  Description of Artificial Sequence: Synthetic oligonucleotide
  Sense strand starting at position 826 of SEQ ID NO: 1560220
ggugaaagauucuuaagcu

SEQ ID NO: 1584704 - RNA, 19 nt, Artificial Sequence
  Description of Artificial Sequence: Synthetic oligonucleotide
  Antisense strand to SEQ ID NO: 1584703
agcuuaagaaucuuucacc

SEQ ID NO: 1584705 - RNA, 19 nt, Artificial Sequence
  Description of Artificial Sequence: Synthetic oligonucleotide
  Sense strand starting at position 940 of SEQ ID NO: 1560220
guaggaauacccugaaauc

SEQ ID NO: 1584706 - RNA, 19 nt, Artificial Sequence
  Description of Artificial Sequence: Synthetic oligonucleotide
  Antisense strand to SEQ ID NO: 1584705
gauuucaggguauuccuac

SEQ ID NO: 1584707 - RNA, 19 nt, Artificial Sequence
  Description of Artificial Sequence: Synthetic oligonucleotide
  Sense strand starting at position 1517 of SEQ ID NO: 1560220
cacugaucuguuggaggca

SEQ ID NO: 1584708 - RNA, 19 nt, Artificial Sequence
  Description of Artificial Sequence: Synthetic oligonucleotide
  Antisense strand to SEQ ID NO: 1584707
ugccuccaacagaucagug

SEQ ID NO: 1584709 - RNA, 19 nt, Artificial Sequence
  Description of Artificial Sequence: Synthetic oligonucleotide
  Sense strand starting at position 1574 of SEQ ID NO: 1560220
gggcccagcacugagauau

SEQ ID NO: 1584710 - RNA, 19 nt, Artificial Sequence
  Description of Artificial Sequence: Synthetic oligonucleotide
  Antisense strand to SEQ ID NO: 1584709
auaucucagugcugggccc

SEQ ID NO: 1584711 - RNA, 19 nt, Artificial Sequence
  Description of Artificial Sequence: Synthetic oligonucleotide
  Sense strand starting at position 2047 of SEQ ID NO: 1560220
gauggacuuugguugauua

SEQ ID NO: 1584712 - RNA, 19 nt, Artificial Sequence
  Description of Artificial Sequence: Synthetic oligonucleotide
  Antisense strand to SEQ ID NO: 1584711
uaaucaaccaaaguccauc

SEQ ID NO: 1584713 - RNA, 19 nt, Artificial Sequence
  Description of Artificial Sequence: Synthetic oligonucleotide
  Sense strand starting at position 2051 of SEQ ID NO: 1560220
gacuuugguugauuauaua

SEQ ID NO: 1584714 - RNA, 19 nt, Artificial Sequence
  Description of Artificial Sequence: Synthetic oligonucleotide
  Antisense strand to SEQ ID NO: 1584713
uauauaaucaaccaaaguc

SEQ ID NO: 1584715 - RNA, 19 nt, Artificial Sequence
  Description of Artificial Sequence: Synthetic oligonucleotide
  Sense strand starting at position 2641 of SEQ ID NO: 1560220
gucucuugaugcccagaau

SEQ ID NO: 1584716 - RNA, 19 nt, Artificial Sequence
  Description of Artificial Sequence: Synthetic oligonucleotide
  Antisense strand to SEQ ID NO: 1584715
auucugggcaucaagagac

SEQ ID NO: 1584717 - RNA, 19 nt, Artificial Sequence
  Description of Artificial Sequence: Synthetic oligonucleotide
  Sense strand starting at position 2644 of SEQ ID NO: 1560220
ucuugaugcccagaauccu

SEQ ID NO: 1584718 - RNA, 19 nt, Artificial Sequence
  Description of Artificial Sequence: Synthetic oligonucleotide
  Antisense strand to SEQ ID NO: 1584717
aggauucugggcaucaaga

SEQ ID NO: 1584719 - RNA, 19 nt, Artificial Sequence
  Description of Artificial Sequence: Synthetic oligonucleotide
  Sense strand starting at position 2713 of SEQ ID NO: 1560220
cccaucucuggcugggaaa

SEQ ID NO: 1584720 - RNA, 19 nt, Artificial Sequence
  Description of Artificial Sequence: Synthetic oligonucleotide
  Antisense strand to SEQ ID NO: 1584719
uuucccagccagagauggg

SEQ ID NO: 1584721 - RNA, 19 nt, Artificial Sequence
  Description of Artificial Sequence: Synthetic oligonucleotide
  Sense strand starting at position 2816 of SEQ ID NO: 1560220
auuggcuaggucuggagaa

SEQ ID NO: 1584722 - RNA, 19 nt, Artificial Sequence
  Description of Artificial Sequence: Synthetic oligonucleotide
  Antisense strand to SEQ ID NO: 1584721
uucuccagaccuagccaau

SEQ ID NO: 1584723 - RNA, 19 nt, Artificial Sequence
  Description of Artificial Sequence: Synthetic oligonucleotide
  Sense strand starting at position 2818 of SEQ ID NO: 1560220
uggcuaggucuggagaaau

SEQ ID NO: 1584724 - RNA, 19 nt, Artificial Sequence
  Description of Artificial Sequence: Synthetic oligonucleotide
  Antisense strand to SEQ ID NO: 1584723
auuucuccagaccuagcca

SEQ ID NO: 1584725 - RNA, 19 nt, Artificial Sequence
  Description of Artificial Sequence: Synthetic oligonucleotide
  Sense strand starting at position 2876 of SEQ ID NO: 1560220
ucccaaggguuguaauuua

SEQ ID NO: 1584726 - RNA, 19 nt, Artificial Sequence
  Description of Artificial Sequence: Synthetic oligonucleotide
  Antisense strand to SEQ ID NO: 1584725
uaaauuacaacccuuggga

SEQ ID NO: 1584727 - RNA, 19 nt, Artificial Sequence
  Description of Artificial Sequence: Synthetic oligonucleotide
  Sense strand starting at position 2884 of SEQ ID NO: 1560220
guuguaauuuacgaagaac

SEQ ID NO: 1584728 - RNA, 19 nt, Artificial Sequence
  Description of Artificial Sequence: Synthetic oligonucleotide
  Antisense strand to SEQ ID NO: 1584727
guucuucguaaauuacaac

SEQ ID NO: 1584729 - RNA, 19 nt, Artificial Sequence
  Description of Artificial Sequence: Synthetic oligonucleotide
  Sense strand starting at position 2896 of SEQ ID NO: 1560220
gaagaacuccacugguuuc

SEQ ID NO: 1584730 - RNA, 19 nt, Artificial Sequence
  Description of Artificial Sequence: Synthetic oligonucleotide
  Antisense strand to SEQ ID NO: 1584729
gaaaccaguggaguucuuc

SEQ ID NO: 1584731 - RNA, 19 nt, Artificial Sequence
  Description of Artificial Sequence: Synthetic oligonucleotide
  Sense strand starting at position 2937 of SEQ ID NO: 1560220
ccacuagauugauuguauc

SEQ ID NO: 1584732 - RNA, 19 nt, Artificial Sequence
  Description of Artificial Sequence: Synthetic oligonucleotide
  Antisense strand to SEQ ID NO: 1584731
gauacaaucaaucuagugg

SEQ ID NO: 1584733 - RNA, 19 nt, Artificial Sequence
  Description of Artificial Sequence: Synthetic oligonucleotide
  Sense strand starting at position 2945 of SEQ ID NO: 1560220
uugauuguaucaucccuau

SEQ ID NO: 1584734 - RNA, 19 nt, Artificial Sequence
  Description of Artificial Sequence: Synthetic oligonucleotide
  Antisense strand to SEQ ID NO: 1584733
auagggaugauacaaucaa

SEQ ID NO: 1584735 - RNA, 19 nt, Artificial Sequence
  Description of Artificial Sequence: Synthetic oligonucleotide
  Sense strand starting at position 3142 of SEQ ID NO: 1560220
aagagaagaccacguuuga

SEQ ID NO: 1584736 - RNA, 19 nt, Artificial Sequence
  Description of Artificial Sequence: Synthetic oligonucleotide
  Antisense strand to SEQ ID NO: 1584735
ucaaacguggucuucucuu

SEQ ID NO: 1584737 - RNA, 19 nt, Artificial Sequence
  Description of Artificial Sequence: Synthetic oligonucleotide
  Sense strand starting at position 3153 of SEQ ID NO: 1560220
acguuugagggugaguuaa

SEQ ID NO: 1584738 - RNA, 19 nt, Artificial Sequence
  Description of Artificial Sequence: Synthetic oligonucleotide
  Antisense strand to SEQ ID NO: 1584737
uuaacucacccucaaacgu

SEQ ID NO: 1584739 - RNA, 19 nt, Artificial Sequence
  Description of Artificial Sequence: Synthetic oligonucleotide
  Sense strand starting at position 3155 of SEQ ID NO: 1560220
guuugagggugaguuaagu

SEQ ID NO: 1584740 - RNA, 19 nt, Artificial Sequence
  Description of Artificial Sequence: Synthetic oligonucleotide
  Antisense strand to SEQ ID NO: 1584739
acuuaacucacccucaaac

SEQ ID NO: 1584741 - RNA, 19 nt, Artificial Sequence
  Description of Artificial Sequence: Synthetic oligonucleotide
  Sense strand starting at position 3164 of SEQ ID NO: 1560220
ugaguuaagucuccuuuaa

SEQ ID NO: 1584742 - RNA, 19 nt, Artificial Sequence
  Description of Artificial Sequence: Synthetic oligonucleotide
  Antisense strand to SEQ ID NO: 1584741
uuaaaggagacuuaacuca

SEQ ID NO: 1584743 - RNA, 19 nt, Artificial Sequence
  Description of Artificial Sequence: Synthetic oligonucleotide
  Sense strand starting at position 3166 of SEQ ID NO: 1560220
aguuaagucuccuuuaagg

SEQ ID NO: 1584744 - RNA, 19 nt, Artificial Sequence
  Description of Artificial Sequence: Synthetic oligonucleotide
  Antisense strand to SEQ ID NO: 1584743
ccuuaaaggagacuuaacu

SEQ ID NO: 1584745 - RNA, 19 nt, Artificial Sequence
  Description of Artificial Sequence: Synthetic oligonucleotide
  Sense strand starting at position 3183 of SEQ ID NO: 1560220
gggcgauuccugcuuuguc

SEQ ID NO: 1584746 - RNA, 19 nt, Artificial Sequence
  Description of Artificial Sequence: Synthetic oligonucleotide
  Antisense strand to SEQ ID NO: 1584745
gacaaagcaggaaucgccc

SEQ ID NO: 1584747 - RNA, 19 nt, Artificial Sequence
  Description of Artificial Sequence: Synthetic oligonucleotide
  Sense strand starting at position 3324 of SEQ ID NO: 1560220
cuguccuucccucaaggaa

SEQ ID NO: 1584748 - RNA, 19 nt, Artificial Sequence
  Description of Artificial Sequence: Synthetic oligonucleotide
  Antisense strand to SEQ ID NO: 1584747
uuccuugagggaaggacag

SEQ ID NO: 1584749 - RNA, 19 nt, Artificial Sequence
  Description of Artificial Sequence: Synthetic oligonucleotide
  Sense strand starting at position 3338 of SEQ ID NO: 1560220
aggaaauucuuccuuagua

SEQ ID NO: 1584750 - RNA, 19 nt, Artificial Sequence
  Description of Artificial Sequence: Synthetic oligonucleotide
  Antisense strand to SEQ ID NO: 1584749
uacuaaggaagaauuuccu

SEQ ID NO: 1584751 - RNA, 19 nt, Artificial Sequence
  Description of Artificial Sequence: Synthetic oligonucleotide
  Sense strand starting at position 3339 of SEQ ID NO: 1560220
ggaaauucuuccuuaguaa

SEQ ID NO: 1584752 - RNA, 19 nt, Artificial Sequence
  Description of Artificial Sequence: Synthetic oligonucleotide
  Antisense strand to SEQ ID NO: 1584751
uuacuaaggaagaauuucc

SEQ ID NO: 1584753 - RNA, 19 nt, Artificial Sequence
  Description of Artificial Sequence: Synthetic oligonucleotide
  Sense strand starting at position 3375 of SEQ ID NO: 1560220
uggugagcauggucauaua

SEQ ID NO: 1584754 - RNA, 19 nt, Artificial Sequence
  Description of Artificial Sequence: Synthetic oligonucleotide
  Antisense strand to SEQ ID NO: 1584753
uauaugaccaugcucacca

SEQ ID NO: 1584755 - RNA, 19 nt, Artificial Sequence
  Description of Artificial Sequence: Synthetic oligonucleotide
  Sense strand starting at position 3397 of SEQ ID NO: 1560220
gaagauuaagucuaggugu

SEQ ID NO: 1584756 - RNA, 19 nt, Artificial Sequence
  Description of Artificial Sequence: Synthetic oligonucleotide
  Antisense strand to SEQ ID NO: 1584755
acaccuagacuuaaucuuc

SEQ ID NO: 1584757 - RNA, 19 nt, Artificial Sequence
  Description of Artificial Sequence: Synthetic oligonucleotide
  Sense strand starting at position 3405 of SEQ ID NO: 1560220
agucuagguguguaugauc

SEQ ID NO: 1584758 - RNA, 19 nt, Artificial Sequence
  Description of Artificial Sequence: Synthetic oligonucleotide
  Antisense strand to SEQ ID NO: 1584757
gaucauacacaccuagacu

SEQ ID NO: 1584759 - RNA, 19 nt, Artificial Sequence
  Description of Artificial Sequence: Synthetic oligonucleotide
  Sense strand starting at position 3416 of SEQ ID NO: 1560220
guaugaucugguugaaucu

SEQ ID NO: 1584760 - RNA, 19 nt, Artificial Sequence
  Description of Artificial Sequence: Synthetic oligonucleotide
  Antisense strand to SEQ ID NO: 1584759
agauucaaccagaucauac

SEQ ID NO: 1584761 - RNA, 19 nt, Artificial Sequence
  Description of Artificial Sequence: Synthetic oligonucleotide
  Sense strand starting at position 3417 of SEQ ID NO: 1560220
uaugaucugguugaaucuu

SEQ ID NO: 1584762 - RNA, 19 nt, Artificial Sequence
  Description of Artificial Sequence: Synthetic oligonucleotide
  Antisense strand to SEQ ID NO: 1584761
aagauucaaccagaucaua

SEQ ID NO: 1584763 - RNA, 19 nt, Artificial Sequence
  Description of Artificial Sequence: Synthetic oligonucleotide
  Sense strand starting at position 3423 of SEQ ID NO: 1560220
cugguugaaucuuuguaac

SEQ ID NO: 1584764 - RNA, 19 nt, Artificial Sequence
  Description of Artificial Sequence: Synthetic oligonucleotide
  Antisense strand to SEQ ID NO: 1584763
guuacaaagauucaaccag

SEQ ID NO: 1584765 - RNA, 19 nt, Artificial Sequence
  Description of Artificial Sequence: Synthetic oligonucleotide
  Sense strand starting at position 3425 of SEQ ID NO: 1560220
gguugaaucuuuguaacag

SEQ ID NO: 1584766 - RNA, 19 nt, Artificial Sequence
  Description of Artificial Sequence: Synthetic oligonucleotide
  Antisense strand to SEQ ID NO: 1584765
cuguuacaaagauucaacc

SEQ ID NO: 1584767 - RNA, 19 nt, Artificial Sequence
  Description of Artificial Sequence: Synthetic oligonucleotide
  Sense strand starting at position 3574 of SEQ ID NO: 1560220
cauugacuggccuagauca

SEQ ID NO: 1584768 - RNA, 19 nt, Artificial Sequence
  Description of Artificial Sequence: Synthetic oligonucleotide
  Antisense strand to SEQ ID NO: 1584767
ugaucuaggccagucaaug

SEQ ID NO: 1584769 - RNA, 19 nt, Artificial Sequence
  Description of Artificial Sequence: Synthetic oligonucleotide
  Sense strand starting at position 3584 of SEQ ID NO: 1560220
ccuagaucacccugggagu

SEQ ID NO: 1584770 - RNA, 19 nt, Artificial Sequence
  Description of Artificial Sequence: Synthetic oligonucleotide
  Antisense strand to SEQ ID NO: 1584769
acucccagggugaucuagg

SEQ ID NO: 1584771 - RNA, 19 nt, Artificial Sequence
  Description of Artificial Sequence: Synthetic oligonucleotide
  Sense strand starting at position 3845 of SEQ ID NO: 1560220
ggugucauugagggcauaa

SEQ ID NO: 1584772 - RNA, 19 nt, Artificial Sequence
  Description of Artificial Sequence: Synthetic oligonucleotide
  Antisense strand to SEQ ID NO: 1584771
uuaugcccucaaugacacc

SEQ ID NO: 1584773 - RNA, 19 nt, Artificial Sequence
  Description of Artificial Sequence: Synthetic oligonucleotide
  Sense strand starting at position 3898 of SEQ ID NO: 1560220
ccauauagggucugagguu

SEQ ID NO: 1584774 - RNA, 19 nt, Artificial Sequence
  Description of Artificial Sequence: Synthetic oligonucleotide
  Antisense strand to SEQ ID NO: 1584773
aaccucagacccuauaugg

SEQ ID NO: 1584775 - RNA, 19 nt, Artificial Sequence
  Description of Artificial Sequence: Synthetic oligonucleotide
  Sense strand starting at position 3925 of SEQ ID NO: 1560220
ugggcucugacaugagcau

SEQ ID NO: 1584776 - RNA, 19 nt, Artificial Sequence
  Description of Artificial Sequence: Synthetic oligonucleotide
  Antisense strand to SEQ ID NO: 1584775
augcucaugucagagccca

SEQ ID NO: 1584777 - RNA, 19 nt, Artificial Sequence
  Description of Artificial Sequence: Synthetic oligonucleotide
  Sense strand starting at position 3952 of SEQ ID NO: 1560220
uguugauauugguccuaug

SEQ ID NO: 1584778 - RNA, 19 nt, Artificial Sequence
  Description of Artificial Sequence: Synthetic oligonucleotide
  Antisense strand to SEQ ID NO: 1584777
cauaggaccaauaucaaca

SEQ ID NO: 1584779 - RNA, 19 nt, Artificial Sequence
  Description of Artificial Sequence: Synthetic oligonucleotide
  Sense strand starting at position 836 of SEQ ID NO: 1560221
ggugaaagauucuuaagcu

SEQ ID NO: 1584780 - RNA, 19 nt, Artificial Sequence
  Description of Artificial Sequence: Synthetic oligonucleotide
  Antisense strand to SEQ ID NO: 1584779
agcuuaagaaucuuucacc

SEQ ID NO: 1584781 - RNA, 19 nt, Artificial Sequence
  Description of Artificial Sequence: Synthetic oligonucleotide
  Sense strand starting at position 837 of SEQ ID NO: 1560221
gugaaagauucuuaagcug

SEQ ID NO: 1584782 - RNA, 19 nt, Artificial Sequence
  Description of Artificial Sequence: Synthetic oligonucleotide
  Antisense strand to SEQ ID NO: 1584781
cagcuuaagaaucuuucac

SEQ ID NO: 1584783 - RNA, 19 nt, Artificial Sequence
  Description of Artificial Sequence: Synthetic oligonucleotide
  Sense strand starting at position 950 of SEQ ID NO: 1560221
guaggaauacccugaaauc

SEQ ID NO: 1584784 - RNA, 19 nt, Artificial Sequence
  Description of Artificial Sequence: Synthetic oligonucleotide
  Antisense strand to SEQ ID NO: 1584783
gauuucaggguauuccuac

SEQ ID NO: 1584785 - RNA, 19 nt, Artificial Sequence
  Description of Artificial Sequence: Synthetic oligonucleotide
  Sense strand starting at position 1665 of SEQ ID NO: 1560221
cugucuuucugaugcugaa

SEQ ID NO: 1584786 - RNA, 19 nt, Artificial Sequence
  Description of Artificial Sequence: Synthetic oligonucleotide
  Antisense strand to SEQ ID NO: 1584785
uucagcaucagaaagacag

SEQ ID NO: 1584787 - RNA, 19 nt, Artificial Sequence
  Description of Artificial Sequence: Synthetic oligonucleotide
  Sense strand starting at position 1668 of SEQ ID NO: 1560221
ucuuucugaugcugaaacu

SEQ ID NO: 1584788 - RNA, 19 nt, Artificial Sequence
  Description of Artificial Sequence: Synthetic oligonucleotide
  Antisense strand to SEQ ID NO: 1584787
aguuucagcaucagaaaga

SEQ ID NO: 1584789 - RNA, 19 nt, Artificial Sequence
  Description of Artificial Sequence: Synthetic oligonucleotide
  Sense strand starting at position 1802 of SEQ ID NO: 1560221
ucaugagggaguuguacau

SEQ ID NO: 1584790 - RNA, 19 nt, Artificial Sequence
  Description of Artificial Sequence: Synthetic oligonucleotide
  Antisense strand to SEQ ID NO: 1584789
auguacaacucccucauga

SEQ ID NO: 1584791 - RNA, 19 nt, Artificial Sequence
  Description of Artificial Sequence: Synthetic oligonucleotide
  Sense strand starting at position 1838 of SEQ ID NO: 1560221
gcagguaguuuccaaugaa

SEQ ID NO: 1584792 - RNA, 19 nt, Artificial Sequence
  Description of Artificial Sequence: Synthetic oligonucleotide
  Antisense strand to SEQ ID NO: 1584791
uucauuggaaacuaccugc

SEQ ID NO: 1584793 - RNA, 19 nt, Artificial Sequence
  Description of Artificial Sequence: Synthetic oligonucleotide
  Sense strand starting at position 1979 of SEQ ID NO: 1560221
uggugguagugggaugaua

SEQ ID NO: 1584794 - RNA, 19 nt, Artificial Sequence
  Description of Artificial Sequence: Synthetic oligonucleotide
  Antisense strand to SEQ ID NO: 1584793
uaucaucccacuaccacca

SEQ ID NO: 1584795 - RNA, 19 nt, Artificial Sequence
  Description of Artificial Sequence: Synthetic oligonucleotide
  Sense strand starting at position 1981 of SEQ ID NO: 1560221
gugguagugggaugauaga

SEQ ID NO: 1584796 - RNA, 19 nt, Artificial Sequence
  Description of Artificial Sequence: Synthetic oligonucleotide
  Antisense strand to SEQ ID NO: 1584795
ucuaucaucccacuaccac

SEQ ID NO: 1584797 - RNA, 19 nt, Artificial Sequence
  Description of Artificial Sequence: Synthetic oligonucleotide
  Sense strand starting at position 2046 of SEQ ID NO: 1560221
gauggacuuuggcugauua

SEQ ID NO: 1584798 - RNA, 19 nt, Artificial Sequence
  Description of Artificial Sequence: Synthetic oligonucleotide
  Antisense strand to SEQ ID NO: 1584797
uaaucagccaaaguccauc

SEQ ID NO: 1584799 - RNA, 19 nt, Artificial Sequence
  Description of Artificial Sequence: Synthetic oligonucleotide
  Sense strand starting at position 2048 of SEQ ID NO: 1560221
uggacuuuggcugauuaca

SEQ ID NO: 1584800 - RNA, 19 nt, Artificial Sequence
  Description of Artificial Sequence: Synthetic oligonucleotide
  Antisense strand to SEQ ID NO: 1584799
uguaaucagccaaagucca

SEQ ID NO: 1584801 - RNA, 19 nt, Artificial Sequence
  Description of Artificial Sequence: Synthetic oligonucleotide
  Sense strand starting at position 2050 of SEQ ID NO: 1560221
gacuuuggcugauuacaua

SEQ ID NO: 1584802 - RNA, 19 nt, Artificial Sequence
  Description of Artificial Sequence: Synthetic oligonucleotide
  Antisense strand to SEQ ID NO: 1584801
uauguaaucagccaaaguc

SEQ ID NO: 1584803 - RNA, 19 nt, Artificial Sequence
  Description of Artificial Sequence: Synthetic oligonucleotide
  Sense strand starting at position 2053 of SEQ ID NO: 1560221
uuuggcugauuacauaauu

SEQ ID NO: 1584804 - RNA, 19 nt, Artificial Sequence
  Description of Artificial Sequence: Synthetic oligonucleotide
  Antisense strand to SEQ ID NO: 1584803
aauuauguaaucagccaaa

SEQ ID NO: 1584805 - RNA, 19 nt, Artificial Sequence
  Description of Artificial Sequence: Synthetic oligonucleotide
  Sense strand starting at position 2405 of SEQ ID NO: 1560221
aaguguggcugugcauuua

SEQ ID NO: 1584806 - RNA, 19 nt, Artificial Sequence
  Description of Artificial Sequence: Synthetic oligonucleotide
  Antisense strand to SEQ ID NO: 1584805
uaaaugcacagccacacuu

SEQ ID NO: 1584807 - RNA, 19 nt, Artificial Sequence
  Description of Artificial Sequence: Synthetic oligonucleotide
  Sense strand starting at position 2450 of SEQ ID NO: 1560221
gguuaagggucucaggaag

SEQ ID NO: 1584808 - RNA, 19 nt, Artificial Sequence
  Description of Artificial Sequence: Synthetic oligonucleotide
  Antisense strand to SEQ ID NO: 1584807
cuuccugagacccuuaacc

SEQ ID NO: 1584809 - RNA, 19 nt, Artificial Sequence
  Description of Artificial Sequence: Synthetic oligonucleotide
  Sense strand starting at position 2641 of SEQ ID NO: 1560221
gucucuugaugcccagaau

SEQ ID NO: 1584810 - RNA, 19 nt, Artificial Sequence
  Description of Artificial Sequence: Synthetic oligonucleotide
  Antisense strand to SEQ ID NO: 1584809
auucugggcaucaagagac

SEQ ID NO: 1584811 - RNA, 19 nt, Artificial Sequence
  Description of Artificial Sequence: Synthetic oligonucleotide
  Sense strand starting at position 2685 of SEQ ID NO: 1560221
caggaugggugccauagaa

SEQ ID NO: 1584812 - RNA, 19 nt, Artificial Sequence
  Description of Artificial Sequence: Synthetic oligonucleotide
  Antisense strand to SEQ ID NO: 1584811
uucuauggcacccauccug

SEQ ID NO: 1584813 - RNA, 19 nt, Artificial Sequence
  Description of Artificial Sequence: Synthetic oligonucleotide
  Sense strand starting at position 2712 of SEQ ID NO: 1560221
gcccaucucugauugggaa

SEQ ID NO: 1584814 - RNA, 19 nt, Artificial Sequence
  Description of Artificial Sequence: Synthetic oligonucleotide
  Antisense strand to SEQ ID NO: 1584813
uucccaaucagagaugggc

SEQ ID NO: 1584815 - RNA, 19 nt, Artificial Sequence
  Description of Artificial Sequence: Synthetic oligonucleotide
  Sense strand starting at position 3133 of SEQ ID NO: 1560221
aucacauucgagggugagu

SEQ ID NO: 1584816 - RNA, 19 nt, Artificial Sequence
  Description of Artificial Sequence: Synthetic oligonucleotide
  Antisense strand to SEQ ID NO: 1584815
acucacccucgaaugugau

SEQ ID NO: 1584817 - RNA, 19 nt, Artificial Sequence
  Description of Artificial Sequence: Synthetic oligonucleotide
  Sense strand starting at position 3135 of SEQ ID NO: 1560221
cacauucgagggugaguua

SEQ ID NO: 1584818 - RNA, 19 nt, Artificial Sequence
  Description of Artificial Sequence: Synthetic oligonucleotide
  Antisense strand to SEQ ID NO: 1584817
uaacucacccucgaaugug

SEQ ID NO: 1584819 - RNA, 19 nt, Artificial Sequence
  Description of Artificial Sequence: Synthetic oligonucleotide
  Sense strand starting at position 3136 of SEQ ID NO: 1560221
acauucgagggugaguuaa

SEQ ID NO: 1584820 - RNA, 19 nt, Artificial Sequence
  Description of Artificial Sequence: Synthetic oligonucleotide
  Antisense strand to SEQ ID NO: 1584819
uuaacucacccucgaaugu

SEQ ID NO: 1584821 - RNA, 19 nt, Artificial Sequence
  Description of Artificial Sequence: Synthetic oligonucleotide
  Sense strand starting at position 3149 of SEQ ID NO: 1560221
aguuaagucuccuuuaaga

SEQ ID NO: 1584822 - RNA, 19 nt, Artificial Sequence
  Description of Artificial Sequence: Synthetic oligonucleotide
  Antisense strand to SEQ ID NO: 1584821
ucuuaaaggagacuuaacu

SEQ ID NO: 1584823 - RNA, 19 nt, Artificial Sequence
  Description of Artificial Sequence: Synthetic oligonucleotide
  Sense strand starting at position 3368 of SEQ ID NO: 1560221
ggucguauacgggaagauu

SEQ ID NO: 1584824 - RNA, 19 nt, Artificial Sequence
  Description of Artificial Sequence: Synthetic oligonucleotide
  Antisense strand to SEQ ID NO: 1584823
aaucuucccguauacgacc

SEQ ID NO: 1584825 - RNA, 19 nt, Artificial Sequence
  Description of Artificial Sequence: Synthetic oligonucleotide
  Sense strand starting at position 3408 of SEQ ID NO: 1560221
gguugaaucuuuguaacaa

SEQ ID NO: 1584826 - RNA, 19 nt, Artificial Sequence
  Description of Artificial Sequence: Synthetic oligonucleotide
  Antisense strand to SEQ ID NO: 1584825
uuguuacaaagauucaacc

SEQ ID NO: 1584827 - RNA, 19 nt, Artificial Sequence
  Description of Artificial Sequence: Synthetic oligonucleotide
  Sense strand starting at position 3409 of SEQ ID NO: 1560221
guugaaucuuuguaacaau

SEQ ID NO: 1584828 - RNA, 19 nt, Artificial Sequence
  Description of Artificial Sequence: Synthetic oligonucleotide
  Antisense strand to SEQ ID NO: 1584827
auuguuacaaagauucaac

SEQ ID NO: 1584829 - RNA, 19 nt, Artificial Sequence
  Description of Artificial Sequence: Synthetic oligonucleotide
  Sense strand starting at position 3650 of SEQ ID NO: 1560221
ugacauugguggguucuga

SEQ ID NO: 1584830 - RNA, 19 nt, Artificial Sequence
  Description of Artificial Sequence: Synthetic oligonucleotide
  Antisense strand to SEQ ID NO: 1584829
ucagaacccaccaauguca

SEQ ID NO: 1584831 - RNA, 19 nt, Artificial Sequence
  Description of Artificial Sequence: Synthetic oligonucleotide
  Sense strand starting at position 3654 of SEQ ID NO: 1560221
auugguggguucugauauc

SEQ ID NO: 1584832 - RNA, 19 nt, Artificial Sequence
  Description of Artificial Sequence: Synthetic oligonucleotide
  Antisense strand to SEQ ID NO: 1584831
gauaucagaacccaccaau

SEQ ID NO: 1584833 - RNA, 19 nt, Artificial Sequence
  Description of Artificial Sequence: Synthetic oligonucleotide
  Sense strand starting at position 124 of SEQ ID NO: 1560222
auaagagaaucagaagaga

SEQ ID NO: 1584834 - RNA, 19 nt, Artificial Sequence
  Description of Artificial Sequence: Synthetic oligonucleotide
  Antisense strand to SEQ ID NO: 1584833
ucucuucugauucucuuau

SEQ ID NO: 1584835 - RNA, 19 nt, Artificial Sequence
  Description of Artificial Sequence: Synthetic oligonucleotide
  Sense strand starting at position 156 of SEQ ID NO: 1560222
gauagagaugcgcagagaa

SEQ ID NO: 1584836 - RNA, 19 nt, Artificial Sequence
  Description of Artificial Sequence: Synthetic oligonucleotide
  Antisense strand to SEQ ID NO: 1584835
uucucugcgcaucucuauc

SEQ ID NO: 1584837 - RNA, 19 nt, Artificial Sequence
  Description of Artificial Sequence: Synthetic oligonucleotide
  Sense strand starting at position 302 of SEQ ID NO: 1560222
ggugaaacauucuuaagcu

SEQ ID NO: 1584838 - RNA, 19 nt, Artificial Sequence
  Description of Artificial Sequence: Synthetic oligonucleotide
  Antisense strand to SEQ ID NO: 1584837
agcuuaagaauguuucacc

SEQ ID NO: 1584839 - RNA, 19 nt, Artificial Sequence
  Description of Artificial Sequence: Synthetic oligonucleotide
  Sense strand starting at position 303 of SEQ ID NO: 1560222
gugaaacauucuuaagcug

SEQ ID NO: 1584840 - RNA, 19 nt, Artificial Sequence
  Description of Artificial Sequence: Synthetic oligonucleotide
  Antisense strand to SEQ ID NO: 1584839
cagcuuaagaauguuucac

SEQ ID NO: 1584841 - RNA, 19 nt, Artificial Sequence
  Description of Artificial Sequence: Synthetic oligonucleotide
  Sense strand starting at position 401 of SEQ ID NO: 1560222
gcuggagauguggaaguaa

SEQ ID NO: 1584842 - RNA, 19 nt, Artificial Sequence
  Description of Artificial Sequence: Synthetic oligonucleotide
  Antisense strand to SEQ ID NO: 1584841
uuacuuccacaucuccagc

SEQ ID NO: 1584843 - RNA, 19 nt, Artificial Sequence
  Description of Artificial Sequence: Synthetic oligonucleotide
  Sense strand starting at position 416 of SEQ ID NO: 1560222
guaagaauagcaugaaauc

SEQ ID NO: 1584844 - RNA, 19 nt, Artificial Sequence
  Description of Artificial Sequence: Synthetic oligonucleotide
  Antisense strand to SEQ ID NO: 1584843
gauuucaugcuauucuuac

SEQ ID NO: 1584845 - RNA, 19 nt, Artificial Sequence
  Description of Artificial Sequence: Synthetic oligonucleotide
  Sense strand starting at position 1009 of SEQ ID NO: 1560222
gcgagugggagugguuaga

SEQ ID NO: 1584846 - RNA, 19 nt, Artificial Sequence
  Description of Artificial Sequence: Synthetic oligonucleotide
  Antisense strand to SEQ ID NO: 1584845
ucuaaccacucccacucgc

SEQ ID NO: 1584847 - RNA, 19 nt, Artificial Sequence
  Description of Artificial Sequence: Synthetic oligonucleotide
  Sense strand starting at position 1305 of SEQ ID NO: 1560222
cuguguucagcuggaggua

SEQ ID NO: 1584848 - RNA, 19 nt, Artificial Sequence
  Description of Artificial Sequence: Synthetic oligonucleotide
  Antisense strand to SEQ ID NO: 1584847
uaccuccagcugaacacag

SEQ ID NO: 1584849 - RNA, 19 nt, Artificial Sequence
  Description of Artificial Sequence: Synthetic oligonucleotide
  Sense strand starting at position 1317 of SEQ ID NO: 1560222
ggagguaguuuccaaugaa

SEQ ID NO: 1584850 - RNA, 19 nt, Artificial Sequence
  Description of Artificial Sequence: Synthetic oligonucleotide
  Antisense strand to SEQ ID NO: 1584849
uucauuggaaacuaccucc

SEQ ID NO: 1584851 - RNA, 19 nt, Artificial Sequence
  Description of Artificial Sequence: Synthetic oligonucleotide
  Sense strand starting at position 1460 of SEQ ID NO: 1560222
gugguagugagaugacaga

SEQ ID NO: 1584852 - RNA, 19 nt, Artificial Sequence
  Description of Artificial Sequence: Synthetic oligonucleotide
  Antisense strand to SEQ ID NO: 1584851
ucugucaucucacuaccac

SEQ ID NO: 1584853 - RNA, 19 nt, Artificial Sequence
  Description of Artificial Sequence: Synthetic oligonucleotide
  Sense strand starting at position 1522 of SEQ ID NO: 1560222
agggauggacuuuggcuaa

SEQ ID NO: 1584854 - RNA, 19 nt, Artificial Sequence
  Description of Artificial Sequence: Synthetic oligonucleotide
  Antisense strand to SEQ ID NO: 1584853
uuagccaaaguccaucccu

SEQ ID NO: 1584855 - RNA, 19 nt, Artificial Sequence
  Description of Artificial Sequence: Synthetic oligonucleotide
  Sense strand starting at position 1525 of SEQ ID NO: 1560222
gauggacuuuggcuaauua

SEQ ID NO: 1584856 - RNA, 19 nt, Artificial Sequence
  Description of Artificial Sequence: Synthetic oligonucleotide
  Antisense strand to SEQ ID NO: 1584855
uaauuagccaaaguccauc

SEQ ID NO: 1584857 - RNA, 19 nt, Artificial Sequence
  Description of Artificial Sequence: Synthetic oligonucleotide
  Sense strand starting at position 1741 of SEQ ID NO: 1560222
acugaagaguuuggaauau

SEQ ID NO: 1584858 - RNA, 19 nt, Artificial Sequence
  Description of Artificial Sequence: Synthetic oligonucleotide
  Antisense strand to SEQ ID NO: 1584857
auauuccaaacucuucagu

SEQ ID NO: 1584859 - RNA, 19 nt, Artificial Sequence
  Description of Artificial Sequence: Synthetic oligonucleotide
  Sense strand starting at position 1907 of SEQ ID NO: 1560222
gucuucuguugcggaggau

SEQ ID NO: 1584860 - RNA, 19 nt, Artificial Sequence
  Description of Artificial Sequence: Synthetic oligonucleotide
  Antisense strand to SEQ ID NO: 1584859
auccuccgcaacagaagac

SEQ ID NO: 1584861 - RNA, 19 nt, Artificial Sequence
  Description of Artificial Sequence: Synthetic oligonucleotide
  Sense strand starting at position 2120 of SEQ ID NO: 1560222
aucucuugaugcccagaau

SEQ ID NO: 1584862 - RNA, 19 nt, Artificial Sequence
  Description of Artificial Sequence: Synthetic oligonucleotide
  Antisense strand to SEQ ID NO: 1584861
auucugggcaucaagagau

SEQ ID NO: 1584863 - RNA, 19 nt, Artificial Sequence
  Description of Artificial Sequence: Synthetic oligonucleotide
  Sense strand starting at position 2191 of SEQ ID NO: 1560222
gcccaucucugguugggaa

SEQ ID NO: 1584864 - RNA, 19 nt, Artificial Sequence
  Description of Artificial Sequence: Synthetic oligonucleotide
  Antisense strand to SEQ ID NO: 1584863
uucccaaccagagaugggc

SEQ ID NO: 1584865 - RNA, 19 nt, Artificial Sequence
  Description of Artificial Sequence: Synthetic oligonucleotide
  Sense strand starting at position 2192 of SEQ ID NO: 1560222
cccaucucugguugggaaa

SEQ ID NO: 1584866 - RNA, 19 nt, Artificial Sequence
  Description of Artificial Sequence: Synthetic oligonucleotide
  Antisense strand to SEQ ID NO: 1584865
uuucccaaccagagauggg

SEQ ID NO: 1584867 - RNA, 19 nt, Artificial Sequence
  Description of Artificial Sequence: Synthetic oligonucleotide
  Sense strand starting at position 2690 of SEQ ID NO: 1560222
agggaacagucgcagaaga

SEQ ID NO: 1584868 - RNA, 19 nt, Artificial Sequence
  Description of Artificial Sequence: Synthetic oligonucleotide
  Antisense strand to SEQ ID NO: 1584867
ucuucugcgacuguucccu

SEQ ID NO: 1584869 - RNA, 19 nt, Artificial Sequence
  Description of Artificial Sequence: Synthetic oligonucleotide
  Sense strand starting at position 2836 of SEQ ID NO: 1560222
uuuggugagcauggucaua

SEQ ID NO: 1584870 - RNA, 19 nt, Artificial Sequence
  Description of Artificial Sequence: Synthetic oligonucleotide
  Antisense strand to SEQ ID NO: 1584869
uaugaccaugcucaccaaa

SEQ ID NO: 1584871 - RNA, 19 nt, Artificial Sequence
  Description of Artificial Sequence: Synthetic oligonucleotide
  Sense strand starting at position 2838 of SEQ ID NO: 1560222
uggugagcauggucauaua

SEQ ID NO: 1584872 - RNA, 19 nt, Artificial Sequence
  Description of Artificial Sequence: Synthetic oligonucleotide
  Antisense strand to SEQ ID NO: 1584871
uauaugaccaugcucacca

SEQ ID NO: 1584873 - RNA, 19 nt, Artificial Sequence
  Description of Artificial Sequence: Synthetic oligonucleotide
  Sense strand starting at position 2848 of SEQ ID NO: 1560222
ggucauauaugggaagauu

SEQ ID NO: 1584874 - RNA, 19 nt, Artificial Sequence
  Description of Artificial Sequence: Synthetic oligonucleotide
  Antisense strand to SEQ ID NO: 1584873
aaucuucccauauaugacc

SEQ ID NO: 1584875 - RNA, 19 nt, Artificial Sequence
  Description of Artificial Sequence: Synthetic oligonucleotide
  Sense strand starting at position 2888 of SEQ ID NO: 1560222
gguugaaucuuuguaacag

SEQ ID NO: 1584876 - RNA, 19 nt, Artificial Sequence
  Description of Artificial Sequence: Synthetic oligonucleotide
  Antisense strand to SEQ ID NO: 1584875
cuguuacaaagauucaacc

SEQ ID NO: 1584877 - RNA, 19 nt, Artificial Sequence
  Description of Artificial Sequence: Synthetic oligonucleotide
  Sense strand starting at position 2889 of SEQ ID NO: 1560222
guugaaucuuuguaacagu

SEQ ID NO: 1584878 - RNA, 19 nt, Artificial Sequence
  Description of Artificial Sequence: Synthetic oligonucleotide
  Antisense strand to SEQ ID NO: 1584877
acuguuacaaagauucaac

SEQ ID NO: 1584879 - RNA, 19 nt, Artificial Sequence
  Description of Artificial Sequence: Synthetic oligonucleotide
  Sense strand starting at position 2908 of SEQ ID NO: 1560222
gagguugguucaucgugau

SEQ ID NO: 1584880 - RNA, 19 nt, Artificial Sequence
  Description of Artificial Sequence: Synthetic oligonucleotide
  Antisense strand to SEQ ID NO: 1584879
aucacgaugaaccaaccuc

SEQ ID NO: 1584881 - RNA, 19 nt, Artificial Sequence
  Description of Artificial Sequence: Synthetic oligonucleotide
  Sense strand starting at position 2911 of SEQ ID NO: 1560222
guugguucaucgugaucau

SEQ ID NO: 1584882 - RNA, 19 nt, Artificial Sequence
  Description of Artificial Sequence: Synthetic oligonucleotide
  Antisense strand to SEQ ID NO: 1584881
augaucacgaugaaccaac

SEQ ID NO: 1584883 - RNA, 19 nt, Artificial Sequence
  Description of Artificial Sequence: Synthetic oligonucleotide
  Sense strand starting at position 3388 of SEQ ID NO: 1560222
ugggcucugacaugagcau

SEQ ID NO: 1584884 - RNA, 19 nt, Artificial Sequence
  Description of Artificial Sequence: Synthetic oligonucleotide
  Antisense strand to SEQ ID NO: 1584883
augcucaugucagagccca

SEQ ID NO: 1584885 - RNA, 19 nt, Artificial Sequence
  Description of Artificial Sequence: Synthetic oligonucleotide
  Sense strand starting at position 3817 of SEQ ID NO: 1560222
acagaaaucugaggaguuu

SEQ ID NO: 1584886 - RNA, 19 nt, Artificial Sequence
  Description of Artificial Sequence: Synthetic oligonucleotide
  Antisense strand to SEQ ID NO: 1584885
aaacuccucagauuucugu

SEQ ID NO: 1584887 - RNA, 19 nt, Artificial Sequence
  Description of Artificial Sequence: Synthetic oligonucleotide
  Sense strand starting at position 3826 of SEQ ID NO: 1560222
ugaggaguuuguuucucag

SEQ ID NO: 1584888 - RNA, 19 nt, Artificial Sequence
  Description of Artificial Sequence: Synthetic oligonucleotide
  Antisense strand to SEQ ID NO: 1584887
cugagaaacaaacuccuca

SEQ ID NO: 1584889 - RNA, 19 nt, Artificial Sequence
  Description of Artificial Sequence: Synthetic oligonucleotide
  Sense strand starting at position 3828 of SEQ ID NO: 1560222
aggaguuuguuucucagug

SEQ ID NO: 1584890 - RNA, 19 nt, Artificial Sequence
  Description of Artificial Sequence: Synthetic oligonucleotide
  Antisense strand to SEQ ID NO: 1584889
cacugagaaacaaacuccu

SEQ ID NO: 1584891 - RNA, 19 nt, Artificial Sequence
  Description of Artificial Sequence: Synthetic oligonucleotide
  Sense strand starting at position 3857 of SEQ ID NO: 1560222
uaagaagugcacugaguga

SEQ ID NO: 1584892 - RNA, 19 nt, Artificial Sequence
  Description of Artificial Sequence: Synthetic oligonucleotide
  Antisense strand to SEQ ID NO: 1584891
ucacucagugcacuucuua

SEQ ID NO: 1584893 - RNA, 19 nt, Artificial Sequence
  Description of Artificial Sequence: Synthetic oligonucleotide
  Sense strand starting at position 92 of SEQ ID NO: 1560223
gugggucuccaggauacua

SEQ ID NO: 1584894 - RNA, 19 nt, Artificial Sequence
  Description of Artificial Sequence: Synthetic oligonucleotide
  Antisense strand to SEQ ID NO: 1584893
uaguauccuggagacccac

SEQ ID NO: 1584895 - RNA, 19 nt, Artificial Sequence
  Description of Artificial Sequence: Synthetic oligonucleotide
  Sense strand starting at position 247 of SEQ ID NO: 1560223
uugucugaacuucgaauua

SEQ ID NO: 1584896 - RNA, 19 nt, Artificial Sequence
  Description of Artificial Sequence: Synthetic oligonucleotide
  Antisense strand to SEQ ID NO: 1584895
uaauucgaaguucagacaa

SEQ ID NO: 1584897 - RNA, 19 nt, Artificial Sequence
  Description of Artificial Sequence: Synthetic oligonucleotide
  Sense strand starting at position 367 of SEQ ID NO: 1560223
aguccacauuccucaaagu

SEQ ID NO: 1584898 - RNA, 19 nt, Artificial Sequence
  Description of Artificial Sequence: Synthetic oligonucleotide
  Antisense strand to SEQ ID NO: 1584897
acuuugaggaauguggacu

SEQ ID NO: 1584899 - RNA, 19 nt, Artificial Sequence
  Description of Artificial Sequence: Synthetic oligonucleotide
  Sense strand starting at position 368 of SEQ ID NO: 1560223
guccacauuccucaaaguu

SEQ ID NO: 1584900 - RNA, 19 nt, Artificial Sequence
  Description of Artificial Sequence: Synthetic oligonucleotide
  Antisense strand to SEQ ID NO: 1584899
aacuuugaggaauguggac

SEQ ID NO: 1584901 - RNA, 19 nt, Artificial Sequence
  Description of Artificial Sequence: Synthetic oligonucleotide
  Sense strand starting at position 819 of SEQ ID NO: 1560223
ggcucauuacagugggaac

SEQ ID NO: 1584902 - RNA, 19 nt, Artificial Sequence
  Description of Artificial Sequence: Synthetic oligonucleotide
  Antisense strand to SEQ ID NO: 1584901
guucccacuguaaugagcc

SEQ ID NO: 1584903 - RNA, 19 nt, Artificial Sequence
  Description of Artificial Sequence: Synthetic oligonucleotide
  Sense strand starting at position 820 of SEQ ID NO: 1560223
gcucauuacagugggaaca

SEQ ID NO: 1584904 - RNA, 19 nt, Artificial Sequence
  Description of Artificial Sequence: Synthetic oligonucleotide
  Antisense strand to SEQ ID NO: 1584903
uguucccacuguaaugagc

SEQ ID NO: 1584905 - RNA, 19 nt, Artificial Sequence
  Description of Artificial Sequence: Synthetic oligonucleotide
  Sense strand starting at position 868 of SEQ ID NO: 1560223
acucaacuacguugacauu

SEQ ID NO: 1584906 - RNA, 19 nt, Artificial Sequence
  Description of Artificial Sequence: Synthetic oligonucleotide
  Antisense strand to SEQ ID NO: 1584905
aaugucaacguaguugagu

SEQ ID NO: 1584907 - RNA, 19 nt, Artificial Sequence
  Description of Artificial Sequence: Synthetic oligonucleotide
  Sense strand starting at position 1057 of SEQ ID NO: 1560223
aaccuaacuugggaguaua

SEQ ID NO: 1584908 - RNA, 19 nt, Artificial Sequence
  Description of Artificial Sequence: Synthetic oligonucleotide
  Antisense strand to SEQ ID NO: 1584907
uauacucccaaguuagguu

SEQ ID NO: 1584909 - RNA, 19 nt, Artificial Sequence
  Description of Artificial Sequence: Synthetic oligonucleotide
  Sense strand starting at position 1406 of SEQ ID NO: 1560223
agccaaguguuggcuaauc

SEQ ID NO: 1584910 - RNA, 19 nt, Artificial Sequence
  Description of Artificial Sequence: Synthetic oligonucleotide
  Antisense strand to SEQ ID NO: 1584909
gauuagccaacacuuggcu

SEQ ID NO: 1584911 - RNA, 19 nt, Artificial Sequence
  Description of Artificial Sequence: Synthetic oligonucleotide
  Sense strand starting at position 1408 of SEQ ID NO: 1560223
ccaaguguuggcuaaucag

SEQ ID NO: 1584912 - RNA, 19 nt, Artificial Sequence
  Description of Artificial Sequence: Synthetic oligonucleotide
  Antisense strand to SEQ ID NO: 1584911
cugauuagccaacacuugg

SEQ ID NO: 1584913 - RNA, 19 nt, Artificial Sequence
  Description of Artificial Sequence: Synthetic oligonucleotide
  Sense strand starting at position 1453 of SEQ ID NO: 1560223
gcugcaaacugcucagauu

SEQ ID NO: 1584914 - RNA, 19 nt, Artificial Sequence
  Description of Artificial Sequence: Synthetic oligonucleotide
  Antisense strand to SEQ ID NO: 1584913
aaucugagcaguuugcagc

SEQ ID NO: 1584915 - RNA, 19 nt, Artificial Sequence
  Description of Artificial Sequence: Synthetic oligonucleotide
  Sense strand starting at position 1464 of SEQ ID NO: 1560223
cucagauugugaccaagua

SEQ ID NO: 1584916 - RNA, 19 nt, Artificial Sequence
  Description of Artificial Sequence: Synthetic oligonucleotide
  Antisense strand to SEQ ID NO: 1584915
uacuuggucacaaucugag

SEQ ID NO: 1584917 - RNA, 19 nt, Artificial Sequence
  Description of Artificial Sequence: Synthetic oligonucleotide
  Sense strand starting at position 1491 of SEQ ID NO: 1560223
ugugaucuguggccaauca

SEQ ID NO: 1584918 - RNA, 19 nt, Artificial Sequence
  Description of Artificial Sequence: Synthetic oligonucleotide
  Antisense strand to SEQ ID NO: 1584917
ugauuggccacagaucaca

SEQ ID NO: 1584919 - RNA, 19 nt, Artificial Sequence
  Description of Artificial Sequence: Synthetic oligonucleotide
  Sense strand starting at position 1585 of SEQ ID NO: 1560223
gguuuagggagcuguccaa

SEQ ID NO: 1584920 - RNA, 19 nt, Artificial Sequence
  Description of Artificial Sequence: Synthetic oligonucleotide
  Antisense strand to SEQ ID NO: 1584919
uuggacagcucccuaaacc

SEQ ID NO: 1584921 - RNA, 19 nt, Artificial Sequence
  Description of Artificial Sequence: Synthetic oligonucleotide
  Sense strand starting at position 1603 of SEQ ID NO: 1560223
acucaugagucacuucuuu

SEQ ID NO: 1584922 - RNA, 19 nt, Artificial Sequence
  Description of Artificial Sequence: Synthetic oligonucleotide
  Antisense strand to SEQ ID NO: 1584921
aaagaagugacucaugagu

SEQ ID NO: 1584923 - RNA, 19 nt, Artificial Sequence
  Description of Artificial Sequence: Synthetic oligonucleotide
  Sense strand starting at position 2107 of SEQ ID NO: 1560223
aucaucauccaggagcauu

SEQ ID NO: 1584924 - RNA, 19 nt, Artificial Sequence
  Description of Artificial Sequence: Synthetic oligonucleotide
  Antisense strand to SEQ ID NO: 1584923
aaugcuccuggaugaugau

SEQ ID NO: 1584925 - RNA, 19 nt, Artificial Sequence
  Description of Artificial Sequence: Synthetic oligonucleotide
  Sense strand starting at position 2115 of SEQ ID NO: 1560223
ccaggagcauuagcuuaga

SEQ ID NO: 1584926 - RNA, 19 nt, Artificial Sequence
  Description of Artificial Sequence: Synthetic oligonucleotide
  Antisense strand to SEQ ID NO: 1584925
ucuaagcuaaugcuccugg

SEQ ID NO: 1584927 - RNA, 19 nt, Artificial Sequence
  Description of Artificial Sequence: Synthetic oligonucleotide
  Sense strand starting at position 2195 of SEQ ID NO: 1560223
uuuacccacucuguagaua

SEQ ID NO: 1584928 - RNA, 19 nt, Artificial Sequence
  Description of Artificial Sequence: Synthetic oligonucleotide
  Antisense strand to SEQ ID NO: 1584927
uaucuacagaguggguaaa

SEQ ID NO: 1584929 - RNA, 19 nt, Artificial Sequence
  Description of Artificial Sequence: Synthetic oligonucleotide
  Sense strand starting at position 2196 of SEQ ID NO: 1560223
uuacccacucuguagauau

SEQ ID NO: 1584930 - RNA, 19 nt, Artificial Sequence
  Description of Artificial Sequence: Synthetic oligonucleotide
  Antisense strand to SEQ ID NO: 1584929
auaucuacagaguggguaa

SEQ ID NO: 1584931 - RNA, 19 nt, Artificial Sequence
  Description of Artificial Sequence: Synthetic oligonucleotide
  Sense strand starting at position 2208 of SEQ ID NO: 1560223
uagauauuggcagggauac

SEQ ID NO: 1584932 - RNA, 19 nt, Artificial Sequence
  Description of Artificial Sequence: Synthetic oligonucleotide
  Antisense strand to SEQ ID NO: 1584931
guaucccugccaauaucua

SEQ ID NO: 1584933 - RNA, 19 nt, Artificial Sequence
  Description of Artificial Sequence: Synthetic oligonucleotide
  Sense strand starting at position 2276 of SEQ ID NO: 1560223
uggguuuguggguauaugu

SEQ ID NO: 1584934 - RNA, 19 nt, Artificial Sequence
  Description of Artificial Sequence: Synthetic oligonucleotide
  Antisense strand to SEQ ID NO: 1584933
acauauacccacaaaccca

SEQ ID NO: 1584935 - RNA, 19 nt, Artificial Sequence
  Description of Artificial Sequence: Synthetic oligonucleotide
  Sense strand starting at position 2284 of SEQ ID NO: 1560223
uggguauauguaugucuau

SEQ ID NO: 1584936 - RNA, 19 nt, Artificial Sequence
  Description of Artificial Sequence: Synthetic oligonucleotide
  Antisense strand to SEQ ID NO: 1584935
auagacauacauauaccca

SEQ ID NO: 1584937 - RNA, 19 nt, Artificial Sequence
  Description of Artificial Sequence: Synthetic oligonucleotide
  Sense strand starting at position 2285 of SEQ ID NO: 1560223
ggguauauguaugucuauu

SEQ ID NO: 1584938 - RNA, 19 nt, Artificial Sequence
  Description of Artificial Sequence: Synthetic oligonucleotide
  Antisense strand to SEQ ID NO: 1584937
aauagacauacauauaccc

SEQ ID NO: 1584939 - RNA, 19 nt, Artificial Sequence
  Description of Artificial Sequence: Synthetic oligonucleotide
  Sense strand starting at position 2389 of SEQ ID NO: 1560223
aucccuguaugugcuuaua

SEQ ID NO: 1584940 - RNA, 19 nt, Artificial Sequence
  Description of Artificial Sequence: Synthetic oligonucleotide
  Antisense strand to SEQ ID NO: 1584939
uauaagcacauacagggau

SEQ ID NO: 1584941 - RNA, 19 nt, Artificial Sequence
  Description of Artificial Sequence: Synthetic oligonucleotide
  Sense strand starting at position 2391 of SEQ ID NO: 1560223
cccuguaugugcuuauaug

SEQ ID NO: 1584942 - RNA, 19 nt, Artificial Sequence
  Description of Artificial Sequence: Synthetic oligonucleotide
  Antisense strand to SEQ ID NO: 1584941
cauauaagcacauacaggg

SEQ ID NO: 1584943 - RNA, 19 nt, Artificial Sequence
  Description of Artificial Sequence: Synthetic oligonucleotide
  Sense strand starting at position 2455 of SEQ ID NO: 1560223
cguauauuucugugguuga

SEQ ID NO: 1584944 - RNA, 19 nt, Artificial Sequence
  Description of Artificial Sequence: Synthetic oligonucleotide
  Antisense strand to SEQ ID NO: 1584943
ucaaccacagaaauauacg

SEQ ID NO: 1584945 - RNA, 19 nt, Artificial Sequence
  Description of Artificial Sequence: Synthetic oligonucleotide
  Sense strand starting at position 2490 of SEQ ID NO: 1560223
guguguauccuugcaugug

SEQ ID NO: 1584946 - RNA, 19 nt, Artificial Sequence
  Description of Artificial Sequence: Synthetic oligonucleotide
  Antisense strand to SEQ ID NO: 1584945
cacaugcaaggauacacac

SEQ ID NO: 1584947 - RNA, 19 nt, Artificial Sequence
  Description of Artificial Sequence: Synthetic oligonucleotide
  Sense strand starting at position 2508 of SEQ ID NO: 1560223
guaugagcuuccuuguauu

SEQ ID NO: 1584948 - RNA, 19 nt, Artificial Sequence
  Description of Artificial Sequence: Synthetic oligonucleotide
  Antisense strand to SEQ ID NO: 1584947
aauacaaggaagcucauac

SEQ ID NO: 1584949 - RNA, 19 nt, Artificial Sequence
  Description of Artificial Sequence: Synthetic oligonucleotide
  Sense strand starting at position 2968 of SEQ ID NO: 1560223
gccuuuguagcauagcaaa

SEQ ID NO: 1584950 - RNA, 19 nt, Artificial Sequence
  Description of Artificial Sequence: Synthetic oligonucleotide
  Antisense strand to SEQ ID NO: 1584949
uuugcuaugcuacaaaggc

SEQ ID NO: 1584951 - RNA, 19 nt, Artificial Sequence
  Description of Artificial Sequence: Synthetic oligonucleotide
  Sense strand starting at position 2989 of SEQ ID NO: 1560223
guaaccuagcaauacauga

SEQ ID NO: 1584952 - RNA, 19 nt, Artificial Sequence
  Description of Artificial Sequence: Synthetic oligonucleotide
  Antisense strand to SEQ ID NO: 1584951
ucauguauugcuagguuac

SEQ ID NO: 1584953 - RNA, 19 nt, Artificial Sequence
  Description of Artificial Sequence: Synthetic oligonucleotide
  Sense strand starting at position 3149 of SEQ ID NO: 1560223
gguggaaguggucggagaa

SEQ ID NO: 1584954 - RNA, 19 nt, Artificial Sequence
  Description of Artificial Sequence: Synthetic oligonucleotide
  Antisense strand to SEQ ID NO: 1584953
uucuccgaccacuuccacc

SEQ ID NO: 1584955 - RNA, 19 nt, Artificial Sequence
  Description of Artificial Sequence: Synthetic oligonucleotide
  Sense strand starting at position 3150 of SEQ ID NO: 1560223
guggaaguggucggagaaa

SEQ ID NO: 1584956 - RNA, 19 nt, Artificial Sequence
  Description of Artificial Sequence: Synthetic oligonucleotide
  Antisense strand to SEQ ID NO: 1584955
uuucuccgaccacuuccac

SEQ ID NO: 1584957 - RNA, 19 nt, Artificial Sequence
  Description of Artificial Sequence: Synthetic oligonucleotide
  Sense strand starting at position 3426 of SEQ ID NO: 1560223
cugaguccaguuugauuga

SEQ ID NO: 1584958 - RNA, 19 nt, Artificial Sequence
  Description of Artificial Sequence: Synthetic oligonucleotide
  Antisense strand to SEQ ID NO: 1584957
ucaaucaaacuggacucag

SEQ ID NO: 1584959 - RNA, 19 nt, Artificial Sequence
  Description of Artificial Sequence: Synthetic oligonucleotide
  Sense strand starting at position 3429 of SEQ ID NO: 1560223
aguccaguuugauugaugu

SEQ ID NO: 1584960 - RNA, 19 nt, Artificial Sequence
  Description of Artificial Sequence: Synthetic oligonucleotide
  Antisense strand to SEQ ID NO: 1584959
acaucaaucaaacuggacu

SEQ ID NO: 1584961 - RNA, 19 nt, Artificial Sequence
  Description of Artificial Sequence: Synthetic oligonucleotide
  Sense strand starting at position 3511 of SEQ ID NO: 1560223
gucaguccaucuuugcaaa

SEQ ID NO: 1584962 - RNA, 19 nt, Artificial Sequence
  Description of Artificial Sequence: Synthetic oligonucleotide
  Antisense strand to SEQ ID NO: 1584961
uuugcaaagauggacugac

SEQ ID NO: 1584963 - RNA, 19 nt, Artificial Sequence
  Description of Artificial Sequence: Synthetic oligonucleotide
  Sense strand starting at position 3548 of SEQ ID NO: 1560223
gcgugucugccugucucau

SEQ ID NO: 1584964 - RNA, 19 nt, Artificial Sequence
  Description of Artificial Sequence: Synthetic oligonucleotide
  Antisense strand to SEQ ID NO: 1584963
augagacaggcagacacgc

SEQ ID NO: 1584965 - RNA, 19 nt, Artificial Sequence
  Description of Artificial Sequence: Synthetic oligonucleotide
  Sense strand starting at position 3598 of SEQ ID NO: 1560223
ucuuucuugcaauguuaag

SEQ ID NO: 1584966 - RNA, 19 nt, Artificial Sequence
  Description of Artificial Sequence: Synthetic oligonucleotide
  Antisense strand to SEQ ID NO: 1584965
cuuaacauugcaagaaaga

SEQ ID NO: 1584967 - RNA, 19 nt, Artificial Sequence
  Description of Artificial Sequence: Synthetic oligonucleotide
  Sense strand starting at position 3708 of SEQ ID NO: 1560223
guacuuuccugacccugaa

SEQ ID NO: 1584968 - RNA, 19 nt, Artificial Sequence
  Description of Artificial Sequence: Synthetic oligonucleotide
  Antisense strand to SEQ ID NO: 1584967
uucagggucaggaaaguac

SEQ ID NO: 1584969 - RNA, 19 nt, Artificial Sequence
  Description of Artificial Sequence: Synthetic oligonucleotide
  Sense strand starting at position 3861 of SEQ ID NO: 1560223
guaacucagucuuuacacu

SEQ ID NO: 1584970 - RNA, 19 nt, Artificial Sequence
  Description of Artificial Sequence: Synthetic oligonucleotide
  Antisense strand to SEQ ID NO: 1584969
aguguaaagacugaguuac

SEQ ID NO: 1584971 - RNA, 19 nt, Artificial Sequence
  Description of Artificial Sequence: Synthetic oligonucleotide
  Sense strand starting at position 3878 of SEQ ID NO: 1560223
cucuuagugagguauuguu

SEQ ID NO: 1584972 - RNA, 19 nt, Artificial Sequence
  Description of Artificial Sequence: Synthetic oligonucleotide
  Antisense strand to SEQ ID NO: 1584971
aacaauaccucacuaagag

SEQ ID NO: 1584973 - RNA, 19 nt, Artificial Sequence
  Description of Artificial Sequence: Synthetic oligonucleotide
  Sense strand starting at position 345 of SEQ ID NO: 1560224
uucccuaggcccuggaaau

SEQ ID NO: 1584974 - RNA, 19 nt, Artificial Sequence
  Description of Artificial Sequence: Synthetic oligonucleotide
  Antisense strand to SEQ ID NO: 1584973
auuuccagggccuagggaa

SEQ ID NO: 1584975 - RNA, 19 nt, Artificial Sequence
  Description of Artificial Sequence: Synthetic oligonucleotide
  Sense strand starting at position 541 of SEQ ID NO: 1560224
gcauaaagauaaugagaga

SEQ ID NO: 1584976 - RNA, 19 nt, Artificial Sequence
  Description of Artificial Sequence: Synthetic oligonucleotide
  Antisense strand to SEQ ID NO: 1584975
ucucucauuaucuuuaugc

SEQ ID NO: 1584977 - RNA, 19 nt, Artificial Sequence
  Description of Artificial Sequence: Synthetic oligonucleotide
  Sense strand starting at position 572 of SEQ ID NO: 1560224
gugagcgaucuacauaucu

SEQ ID NO: 1584978 - RNA, 19 nt, Artificial Sequence
  Description of Artificial Sequence: Synthetic oligonucleotide
  Antisense strand to SEQ ID NO: 1584977
agauauguagaucgcucac

SEQ ID NO: 1584979 - RNA, 19 nt, Artificial Sequence
  Description of Artificial Sequence: Synthetic oligonucleotide
  Sense strand starting at position 577 of SEQ ID NO: 1560224
cgaucuacauaucuacaga

SEQ ID NO: 1584980 - RNA, 19 nt, Artificial Sequence
  Description of Artificial Sequence: Synthetic oligonucleotide
  Antisense strand to SEQ ID NO: 1584979
ucuguagauauguagaucg

SEQ ID NO: 1584981 - RNA, 19 nt, Artificial Sequence
  Description of Artificial Sequence: Synthetic oligonucleotide
  Sense strand starting at position 591 of SEQ ID NO: 1560224
acagaugucugucuaccua

SEQ ID NO: 1584982 - RNA, 19 nt, Artificial Sequence
  Description of Artificial Sequence: Synthetic oligonucleotide
  Antisense strand to SEQ ID NO: 1584981
uagguagacagacaucugu

SEQ ID NO: 1584983 - RNA, 19 nt, Artificial Sequence
  Description of Artificial Sequence: Synthetic oligonucleotide
  Sense strand starting at position 873 of SEQ ID NO: 1560224
ucuaucaucuguguaucau

SEQ ID NO: 1584984 - RNA, 19 nt, Artificial Sequence
  Description of Artificial Sequence: Synthetic oligonucleotide
  Antisense strand to SEQ ID NO: 1584983
augauacacagaugauaga

SEQ ID NO: 1584985 - RNA, 19 nt, Artificial Sequence
  Description of Artificial Sequence: Synthetic oligonucleotide
  Sense strand starting at position 874 of SEQ ID NO: 1560224
cuaucaucuguguaucauc

SEQ ID NO: 1584986 - RNA, 19 nt, Artificial Sequence
  Description of Artificial Sequence: Synthetic oligonucleotide
  Antisense strand to SEQ ID NO: 1584985
gaugauacacagaugauag

SEQ ID NO: 1584987 - RNA, 19 nt, Artificial Sequence
  Description of Artificial Sequence: Synthetic oligonucleotide
  Sense strand starting at position 882 of SEQ ID NO: 1560224
uguguaucaucugucuauu

SEQ ID NO: 1584988 - RNA, 19 nt, Artificial Sequence
  Description of Artificial Sequence: Synthetic oligonucleotide
  Antisense strand to SEQ ID NO: 1584987
aauagacagaugauacaca

SEQ ID NO: 1584989 - RNA, 19 nt, Artificial Sequence
  Description of Artificial Sequence: Synthetic oligonucleotide
  Sense strand starting at position 884 of SEQ ID NO: 1560224
uguaucaucugucuauuau

SEQ ID NO: 1584990 - RNA, 19 nt, Artificial Sequence
  Description of Artificial Sequence: Synthetic oligonucleotide
  Antisense strand to SEQ ID NO: 1584989
auaauagacagaugauaca

SEQ ID NO: 1584991 - RNA, 19 nt, Artificial Sequence
  Description of Artificial Sequence: Synthetic oligonucleotide
  Sense strand starting at position 885 of SEQ ID NO: 1560224
guaucaucugucuauuauc

SEQ ID NO: 1584992 - RNA, 19 nt, Artificial Sequence
  Description of Artificial Sequence: Synthetic oligonucleotide
  Antisense strand to SEQ ID NO: 1584991
gauaauagacagaugauac

SEQ ID NO: 1584993 - RNA, 19 nt, Artificial Sequence
  Description of Artificial Sequence: Synthetic oligonucleotide
  Sense strand starting at position 913 of SEQ ID NO: 1560224
ucaccugucugucaagaga

SEQ ID NO: 1584994 - RNA, 19 nt, Artificial Sequence
  Description of Artificial Sequence: Synthetic oligonucleotide
  Antisense strand to SEQ ID NO: 1584993
ucucuugacagacagguga

SEQ ID NO: 1584995 - RNA, 19 nt, Artificial Sequence
  Description of Artificial Sequence: Synthetic oligonucleotide
  Sense strand starting at position 921 of SEQ ID NO: 1560224
cugucaagagacugucaua

SEQ ID NO: 1584996 - RNA, 19 nt, Artificial Sequence
  Description of Artificial Sequence: Synthetic oligonucleotide
  Antisense strand to SEQ ID NO: 1584995
uaugacagucucuugacag

SEQ ID NO: 1584997 - RNA, 19 nt, Artificial Sequence
  Description of Artificial Sequence: Synthetic oligonucleotide
  Sense strand starting at position 926 of SEQ ID NO: 1560224
aagagacugucauacagag

SEQ ID NO: 1584998 - RNA, 19 nt, Artificial Sequence
  Description of Artificial Sequence: Synthetic oligonucleotide
  Antisense strand to SEQ ID NO: 1584997
cucuguaugacagucucuu

SEQ ID NO: 1584999 - RNA, 19 nt, Artificial Sequence
  Description of Artificial Sequence: Synthetic oligonucleotide
  Sense strand starting at position 1513 of SEQ ID NO: 1560224
uuagucaggcgugguguua

SEQ ID NO: 1585000 - RNA, 19 nt, Artificial Sequence
  Description of Artificial Sequence: Synthetic oligonucleotide
  Antisense strand to SEQ ID NO: 1584999
uaacaccacgccugacuaa

SEQ ID NO: 1585001 - RNA, 19 nt, Artificial Sequence
  Description of Artificial Sequence: Synthetic oligonucleotide
  Sense strand starting at position 1799 of SEQ ID NO: 1560224
aagaaaucccagugcucag

SEQ ID NO: 1585002 - RNA, 19 nt, Artificial Sequence
  Description of Artificial Sequence: Synthetic oligonucleotide
  Antisense strand to SEQ ID NO: 1585001
cugagcacugggauuucuu

SEQ ID NO: 1585003 - RNA, 19 nt, Artificial Sequence
  Description of Artificial Sequence: Synthetic oligonucleotide
  Sense strand starting at position 2030 of SEQ ID NO: 1560224
ggcagagguuguucuuaag

SEQ ID NO: 1585004 - RNA, 19 nt, Artificial Sequence
  Description of Artificial Sequence: Synthetic oligonucleotide
  Antisense strand to SEQ ID NO: 1585003
cuuaagaacaaccucugcc

SEQ ID NO: 1585005 - RNA, 19 nt, Artificial Sequence
  Description of Artificial Sequence: Synthetic oligonucleotide
  Sense strand starting at position 2036 of SEQ ID NO: 1560224
gguuguucuuaaguuguuu

SEQ ID NO: 1585006 - RNA, 19 nt, Artificial Sequence
  Description of Artificial Sequence: Synthetic oligonucleotide
  Antisense strand to SEQ ID NO: 1585005
aaacaacuuaagaacaacc

SEQ ID NO: 1585007 - RNA, 19 nt, Artificial Sequence
  Description of Artificial Sequence: Synthetic oligonucleotide
  Sense strand starting at position 2084 of SEQ ID NO: 1560224
uuucuuguucucgcuguga

SEQ ID NO: 1585008 - RNA, 19 nt, Artificial Sequence
  Description of Artificial Sequence: Synthetic oligonucleotide
  Antisense strand to SEQ ID NO: 1585007
ucacagcgagaacaagaaa

SEQ ID NO: 1585009 - RNA, 19 nt, Artificial Sequence
  Description of Artificial Sequence: Synthetic oligonucleotide
  Sense strand starting at position 2086 of SEQ ID NO: 1560224
ucuuguucucgcugugaac

SEQ ID NO: 1585010 - RNA, 19 nt, Artificial Sequence
  Description of Artificial Sequence: Synthetic oligonucleotide
  Antisense strand to SEQ ID NO: 1585009
guucacagcgagaacaaga

SEQ ID NO: 1585011 - RNA, 19 nt, Artificial Sequence
  Description of Artificial Sequence: Synthetic oligonucleotide
  Sense strand starting at position 2087 of SEQ ID NO: 1560224
cuuguucucgcugugaacu

SEQ ID NO: 1585012 - RNA, 19 nt, Artificial Sequence
  Description of Artificial Sequence: Synthetic oligonucleotide
  Antisense strand to SEQ ID NO: 1585011
aguucacagcgagaacaag

SEQ ID NO: 1585013 - RNA, 19 nt, Artificial Sequence
  Description of Artificial Sequence: Synthetic oligonucleotide
  Sense strand starting at position 2088 of SEQ ID NO: 1560224
uuguucucgcugugaacuu

SEQ ID NO: 1585014 - RNA, 19 nt, Artificial Sequence
  Description of Artificial Sequence: Synthetic oligonucleotide
  Antisense strand to SEQ ID NO: 1585013
aaguucacagcgagaacaa

SEQ ID NO: 1585015 - RNA, 19 nt, Artificial Sequence
  Description of Artificial Sequence: Synthetic oligonucleotide
  Sense strand starting at position 2214 of SEQ ID NO: 1560224
gggcaaagcuuucuuucuu

SEQ ID NO: 1585016 - RNA, 19 nt, Artificial Sequence
  Description of Artificial Sequence: Synthetic oligonucleotide
  Antisense strand to SEQ ID NO: 1585015
aagaaagaaagcuuugccc

SEQ ID NO: 1585017 - RNA, 19 nt, Artificial Sequence
  Description of Artificial Sequence: Synthetic oligonucleotide
  Sense strand starting at position 2215 of SEQ ID NO: 1560224
ggcaaagcuuucuuucuuu

SEQ ID NO: 1585018 - RNA, 19 nt, Artificial Sequence
  Description of Artificial Sequence: Synthetic oligonucleotide
  Antisense strand to SEQ ID NO: 1585017
aaagaaagaaagcuuugcc

SEQ ID NO: 1585019 - RNA, 19 nt, Artificial Sequence
  Description of Artificial Sequence: Synthetic oligonucleotide
  Sense strand starting at position 2328 of SEQ ID NO: 1560224
cuggguuccuuugguauuu

SEQ ID NO: 1585020 - RNA, 19 nt, Artificial Sequence
  Description of Artificial Sequence: Synthetic oligonucleotide
  Antisense strand to SEQ ID NO: 1585019
aaauaccaaaggaacccag

SEQ ID NO: 1585021 - RNA, 19 nt, Artificial Sequence
  Description of Artificial Sequence: Synthetic oligonucleotide
  Sense strand starting at position 2378 of SEQ ID NO: 1560224
guccauuucugccacugau

SEQ ID NO: 1585022 - RNA, 19 nt, Artificial Sequence
  Description of Artificial Sequence: Synthetic oligonucleotide
  Antisense strand to SEQ ID NO: 1585021
aucaguggcagaaauggac

SEQ ID NO: 1585023 - RNA, 19 nt, Artificial Sequence
  Description of Artificial Sequence: Synthetic oligonucleotide
  Sense strand starting at position 2500 of SEQ ID NO: 1560224
ugccgugggucucugaaau

SEQ ID NO: 1585024 - RNA, 19 nt, Artificial Sequence
  Description of Artificial Sequence: Synthetic oligonucleotide
  Antisense strand to SEQ ID NO: 1585023
auuucagagacccacggca

SEQ ID NO: 1585025 - RNA, 19 nt, Artificial Sequence
  Description of Artificial Sequence: Synthetic oligonucleotide
  Sense strand starting at position 2511 of SEQ ID NO: 1560224
ucugaaaugcucugugucu

SEQ ID NO: 1585026 - RNA, 19 nt, Artificial Sequence
  Description of Artificial Sequence: Synthetic oligonucleotide
  Antisense strand to SEQ ID NO: 1585025
agacacagagcauuucaga

SEQ ID NO: 1585027 - RNA, 19 nt, Artificial Sequence
  Description of Artificial Sequence: Synthetic oligonucleotide
  Sense strand starting at position 2512 of SEQ ID NO: 1560224
cugaaaugcucugugucuu

SEQ ID NO: 1585028 - RNA, 19 nt, Artificial Sequence
  Description of Artificial Sequence: Synthetic oligonucleotide
  Antisense strand to SEQ ID NO: 1585027
aagacacagagcauuucag

SEQ ID NO: 1585029 - RNA, 19 nt, Artificial Sequence
  Description of Artificial Sequence: Synthetic oligonucleotide
  Sense strand starting at position 2664 of SEQ ID NO: 1560224
cccugaucucccuguaagu

SEQ ID NO: 1585030 - RNA, 19 nt, Artificial Sequence
  Description of Artificial Sequence: Synthetic oligonucleotide
  Antisense strand to SEQ ID NO: 1585029
acuuacagggagaucaggg

SEQ ID NO: 1585031 - RNA, 19 nt, Artificial Sequence
  Description of Artificial Sequence: Synthetic oligonucleotide
  Sense strand starting at position 2732 of SEQ ID NO: 1560224
cucucaugucuccacgagu

SEQ ID NO: 1585032 - RNA, 19 nt, Artificial Sequence
  Description of Artificial Sequence: Synthetic oligonucleotide
  Antisense strand to SEQ ID NO: 1585031
acucguggagacaugagag

SEQ ID NO: 1585033 - RNA, 19 nt, Artificial Sequence
  Description of Artificial Sequence: Synthetic oligonucleotide
  Sense strand starting at position 3432 of SEQ ID NO: 1560224
gugggugugcaccaggauu

SEQ ID NO: 1585034 - RNA, 19 nt, Artificial Sequence
  Description of Artificial Sequence: Synthetic oligonucleotide
  Antisense strand to SEQ ID NO: 1585033
aauccuggugcacacccac

SEQ ID NO: 1585035 - RNA, 19 nt, Artificial Sequence
  Description of Artificial Sequence: Synthetic oligonucleotide
  Sense strand starting at position 3444 of SEQ ID NO: 1560224
caggauugcuguucucaga

SEQ ID NO: 1585036 - RNA, 19 nt, Artificial Sequence
  Description of Artificial Sequence: Synthetic oligonucleotide
  Antisense strand to SEQ ID NO: 1585035
ucugagaacagcaauccug

SEQ ID NO: 1585037 - RNA, 19 nt, Artificial Sequence
  Description of Artificial Sequence: Synthetic oligonucleotide
  Sense strand starting at position 3471 of SEQ ID NO: 1560224
ggaggaaguguuuggaggu

SEQ ID NO: 1585038 - RNA, 19 nt, Artificial Sequence
  Description of Artificial Sequence: Synthetic oligonucleotide
  Antisense strand to SEQ ID NO: 1585037
accuccaaacacuuccucc

SEQ ID NO: 1585039 - RNA, 19 nt, Artificial Sequence
  Description of Artificial Sequence: Synthetic oligonucleotide
  Sense strand starting at position 3597 of SEQ ID NO: 1560224
ggcugaaggcuugaugaug

SEQ ID NO: 1585040 - RNA, 19 nt, Artificial Sequence
  Description of Artificial Sequence: Synthetic oligonucleotide
  Antisense strand to SEQ ID NO: 1585039
caucaucaagccuucagcc

SEQ ID NO: 1585041 - RNA, 19 nt, Artificial Sequence
  Description of Artificial Sequence: Synthetic oligonucleotide
  Sense strand starting at position 3602 of SEQ ID NO: 1560224
aaggcuugaugaugggauu

SEQ ID NO: 1585042 - RNA, 19 nt, Artificial Sequence
  Description of Artificial Sequence: Synthetic oligonucleotide
  Antisense strand to SEQ ID NO: 1585041
aaucccaucaucaagccuu

SEQ ID NO: 1585043 - RNA, 19 nt, Artificial Sequence
  Description of Artificial Sequence: Synthetic oligonucleotide
  Sense strand starting at position 3603 of SEQ ID NO: 1560224
aggcuugaugaugggauua

SEQ ID NO: 1585044 - RNA, 19 nt, Artificial Sequence
  Description of Artificial Sequence: Synthetic oligonucleotide
  Antisense strand to SEQ ID NO: 1585043
uaaucccaucaucaagccu

SEQ ID NO: 1585045 - RNA, 19 nt, Artificial Sequence
  Description of Artificial Sequence: Synthetic oligonucleotide
  Sense strand starting at position 3605 of SEQ ID NO: 1560224
gcuugaugaugggauuaua

SEQ ID NO: 1585046 - RNA, 19 nt, Artificial Sequence
  Description of Artificial Sequence: Synthetic oligonucleotide
  Antisense strand to SEQ ID NO: 1585045
uauaaucccaucaucaagc

SEQ ID NO: 1585047 - RNA, 19 nt, Artificial Sequence
  Description of Artificial Sequence: Synthetic oligonucleotide
  Sense strand starting at position 3615 of SEQ ID NO: 1560224
gggauuauauagcucuagu

SEQ ID NO: 1585048 - RNA, 19 nt, Artificial Sequence
  Description of Artificial Sequence: Synthetic oligonucleotide
  Antisense strand to SEQ ID NO: 1585047
acuagagcuauauaauccc

SEQ ID NO: 1585049 - RNA, 19 nt, Artificial Sequence
  Description of Artificial Sequence: Synthetic oligonucleotide
  Sense strand starting at position 3669 of SEQ ID NO: 1560224
gguguagugcuguauccac

SEQ ID NO: 1585050 - RNA, 19 nt, Artificial Sequence
  Description of Artificial Sequence: Synthetic oligonucleotide
  Antisense strand to SEQ ID NO: 1585049
guggauacagcacuacacc

SEQ ID NO: 1585051 - RNA, 19 nt, Artificial Sequence
  Description of Artificial Sequence: Synthetic oligonucleotide
  Sense strand starting at position 3717 of SEQ ID NO: 1560224
ccuagaacuugguuaagag

SEQ ID NO: 1585052 - RNA, 19 nt, Artificial Sequence
  Description of Artificial Sequence: Synthetic oligonucleotide
  Antisense strand to SEQ ID NO: 1585051
cucuuaaccaaguucuagg

SEQ ID NO: 1585053 - RNA, 19 nt, Artificial Sequence
  Description of Artificial Sequence: Synthetic oligonucleotide
  Sense strand starting at position 4 of SEQ ID NO: 1560225
ggugauuagugagugcuca

SEQ ID NO: 1585054 - RNA, 19 nt, Artificial Sequence
  Description of Artificial Sequence: Synthetic oligonucleotide
  Antisense strand to SEQ ID NO: 1585053
ugagcacucacuaaucacc

SEQ ID NO: 1585055 - RNA, 19 nt, Artificial Sequence
  Description of Artificial Sequence: Synthetic oligonucleotide
  Sense strand starting at position 8 of SEQ ID NO: 1560225
auuagugagugcucacuuu

SEQ ID NO: 1585056 - RNA, 19 nt, Artificial Sequence
  Description of Artificial Sequence: Synthetic oligonucleotide
  Antisense strand to SEQ ID NO: 1585055
aaagugagcacucacuaau

SEQ ID NO: 1585057 - RNA, 19 nt, Artificial Sequence
  Description of Artificial Sequence: Synthetic oligonucleotide
  Sense strand starting at position 14 of SEQ ID NO: 1560225
gagugcucacuuugcacaa

SEQ ID NO: 1585058 - RNA, 19 nt, Artificial Sequence
  Description of Artificial Sequence: Synthetic oligonucleotide
  Antisense strand to SEQ ID NO: 1585057
uugugcaaagugagcacuc

SEQ ID NO: 1585059 - RNA, 19 nt, Artificial Sequence
  Description of Artificial Sequence: Synthetic oligonucleotide
  Sense strand starting at position 32 of SEQ ID NO: 1560225
aggcucaguccucacucaa

SEQ ID NO: 1585060 - RNA, 19 nt, Artificial Sequence
  Description of Artificial Sequence: Synthetic oligonucleotide
  Antisense strand to SEQ ID NO: 1585059
uugagugaggacugagccu

SEQ ID NO: 1585061 - RNA, 19 nt, Artificial Sequence
  Description of Artificial Sequence: Synthetic oligonucleotide
  Sense strand starting at position 421 of SEQ ID NO: 1560225
gggacuaagccaugugcaa

SEQ ID NO: 1585062 - RNA, 19 nt, Artificial Sequence
  Description of Artificial Sequence: Synthetic oligonucleotide
  Antisense strand to SEQ ID NO: 1585061
uugcacauggcuuaguccc

SEQ ID NO: 1585063 - RNA, 19 nt, Artificial Sequence
  Description of Artificial Sequence: Synthetic oligonucleotide
  Sense strand starting at position 482 of SEQ ID NO: 1560225
ccuagcagcccuugacuua

SEQ ID NO: 1585064 - RNA, 19 nt, Artificial Sequence
  Description of Artificial Sequence: Synthetic oligonucleotide
  Antisense strand to SEQ ID NO: 1585063
uaagucaagggcugcuagg

SEQ ID NO: 1585065 - RNA, 19 nt, Artificial Sequence
  Description of Artificial Sequence: Synthetic oligonucleotide
  Sense strand starting at position 699 of SEQ ID NO: 1560225
cugugaccucuucgaucca

SEQ ID NO: 1585066 - RNA, 19 nt, Artificial Sequence
  Description of Artificial Sequence: Synthetic oligonucleotide
  Antisense strand to SEQ ID NO: 1585065
uggaucgaagaggucacag

SEQ ID NO: 1585067 - RNA, 19 nt, Artificial Sequence
  Description of Artificial Sequence: Synthetic oligonucleotide
  Sense strand starting at position 949 of SEQ ID NO: 1560225
caguuugggucucccuuaa

SEQ ID NO: 1585068 - RNA, 19 nt, Artificial Sequence
  Description of Artificial Sequence: Synthetic oligonucleotide
  Antisense strand to SEQ ID NO: 1585067
uuaagggagacccaaacug

SEQ ID NO: 1585069 - RNA, 19 nt, Artificial Sequence
  Description of Artificial Sequence: Synthetic oligonucleotide
  Sense strand starting at position 1666 of SEQ ID NO: 1560225
cugccuccucccuaggaua

SEQ ID NO: 1585070 - RNA, 19 nt, Artificial Sequence
  Description of Artificial Sequence: Synthetic oligonucleotide
  Antisense strand to SEQ ID NO: 1585069
uauccuagggaggaggcag

SEQ ID NO: 1585071 - RNA, 19 nt, Artificial Sequence
  Description of Artificial Sequence: Synthetic oligonucleotide
  Sense strand starting at position 1712 of SEQ ID NO: 1560225
ggguuucucucccaggaau

SEQ ID NO: 1585072 - RNA, 19 nt, Artificial Sequence
  Description of Artificial Sequence: Synthetic oligonucleotide
  Antisense strand to SEQ ID NO: 1585071
auuccugggagagaaaccc

SEQ ID NO: 1585073 - RNA, 19 nt, Artificial Sequence
  Description of Artificial Sequence: Synthetic oligonucleotide
  Sense strand starting at position 2129 of SEQ ID NO: 1560225
gccugaugucgggaacuca

SEQ ID NO: 1585074 - RNA, 19 nt, Artificial Sequence
  Description of Artificial Sequence: Synthetic oligonucleotide
  Antisense strand to SEQ ID NO: 1585073
ugaguucccgacaucaggc

SEQ ID NO: 1585075 - RNA, 19 nt, Artificial Sequence
  Description of Artificial Sequence: Synthetic oligonucleotide
  Sense strand starting at position 2379 of SEQ ID NO: 1560225
gggugucuuugagucaauu

SEQ ID NO: 1585076 - RNA, 19 nt, Artificial Sequence
  Description of Artificial Sequence: Synthetic oligonucleotide
  Antisense strand to SEQ ID NO: 1585075
aauugacucaaagacaccc

SEQ ID NO: 1585077 - RNA, 19 nt, Artificial Sequence
  Description of Artificial Sequence: Synthetic oligonucleotide
  Sense strand starting at position 2438 of SEQ ID NO: 1560225
cuugaccuuuaaggauaaa

SEQ ID NO: 1585078 - RNA, 19 nt, Artificial Sequence
  Description of Artificial Sequence: Synthetic oligonucleotide
  Antisense strand to SEQ ID NO: 1585077
uuuauccuuaaaggucaag

SEQ ID NO: 1585079 - RNA, 19 nt, Artificial Sequence
  Description of Artificial Sequence: Synthetic oligonucleotide
  Sense strand starting at position 2503 of SEQ ID NO: 1560225
ggcugaguggcagaguuaa

SEQ ID NO: 1585080 - RNA, 19 nt, Artificial Sequence
  Description of Artificial Sequence: Synthetic oligonucleotide
  Antisense strand to SEQ ID NO: 1585079
uuaacucugccacucagcc

SEQ ID NO: 1585081 - RNA, 19 nt, Artificial Sequence
  Description of Artificial Sequence: Synthetic oligonucleotide
  Sense strand starting at position 2537 of SEQ ID NO: 1560225
caguuagaaugauugaguc

SEQ ID NO: 1585082 - RNA, 19 nt, Artificial Sequence
  Description of Artificial Sequence: Synthetic oligonucleotide
  Antisense strand to SEQ ID NO: 1585081
gacucaaucauucuaacug

SEQ ID NO: 1585083 - RNA, 19 nt, Artificial Sequence
  Description of Artificial Sequence: Synthetic oligonucleotide
  Sense strand starting at position 2576 of SEQ ID NO: 1560225
gcaguuugcagagcgguua

SEQ ID NO: 1585084 - RNA, 19 nt, Artificial Sequence
  Description of Artificial Sequence: Synthetic oligonucleotide
  Antisense strand to SEQ ID NO: 1585083
uaaccgcucugcaaacugc

SEQ ID NO: 1585085 - RNA, 19 nt, Artificial Sequence
  Description of Artificial Sequence: Synthetic oligonucleotide
  Sense strand starting at position 2633 of SEQ ID NO: 1560225
gccuaauuccucugugccu

SEQ ID NO: 1585086 - RNA, 19 nt, Artificial Sequence
  Description of Artificial Sequence: Synthetic oligonucleotide
  Antisense strand to SEQ ID NO: 1585085
aggcacagaggaauuaggc

SEQ ID NO: 1585087 - RNA, 19 nt, Artificial Sequence
  Description of Artificial Sequence: Synthetic oligonucleotide
  Sense strand starting at position 2746 of SEQ ID NO: 1560225
cuaaauagauguuagcuaa

SEQ ID NO: 1585088 - RNA, 19 nt, Artificial Sequence
  Description of Artificial Sequence: Synthetic oligonucleotide
  Antisense strand to SEQ ID NO: 1585087
uuagcuaacaucuauuuag

SEQ ID NO: 1585089 - RNA, 19 nt, Artificial Sequence
  Description of Artificial Sequence: Synthetic oligonucleotide
  Sense strand starting at position 2772 of SEQ ID NO: 1560225
gcaacuaacuguuauugag

SEQ ID NO: 1585090 - RNA, 19 nt, Artificial Sequence
  Description of Artificial Sequence: Synthetic oligonucleotide
  Antisense strand to SEQ ID NO: 1585089
cucaauaacaguuaguugc

SEQ ID NO: 1585091 - RNA, 19 nt, Artificial Sequence
  Description of Artificial Sequence: Synthetic oligonucleotide
  Sense strand starting at position 2859 of SEQ ID NO: 1560225
uggccuuccugagcucaua

SEQ ID NO: 1585092 - RNA, 19 nt, Artificial Sequence
  Description of Artificial Sequence: Synthetic oligonucleotide
  Antisense strand to SEQ ID NO: 1585091
uaugagcucaggaaggcca

SEQ ID NO: 1585093 - RNA, 19 nt, Artificial Sequence
  Description of Artificial Sequence: Synthetic oligonucleotide
  Sense strand starting at position 2887 of SEQ ID NO: 1560225
agaugaagaugagaugaaa

SEQ ID NO: 1585094 - RNA, 19 nt, Artificial Sequence
  Description of Artificial Sequence: Synthetic oligonucleotide
  Antisense strand to SEQ ID NO: 1585093
uuucaucucaucuucaucu

SEQ ID NO: 1585095 - RNA, 19 nt, Artificial Sequence
  Description of Artificial Sequence: Synthetic oligonucleotide
  Sense strand starting at position 2941 of SEQ ID NO: 1560225
ugggcuucuugagaaggaa

SEQ ID NO: 1585096 - RNA, 19 nt, Artificial Sequence
  Description of Artificial Sequence: Synthetic oligonucleotide
  Antisense strand to SEQ ID NO: 1585095
uuccuucucaagaagccca

SEQ ID NO: 1585097 - RNA, 19 nt, Artificial Sequence
  Description of Artificial Sequence: Synthetic oligonucleotide
  Sense strand starting at position 2956 of SEQ ID NO: 1560225
ggaagaauguuagaaccau

SEQ ID NO: 1585098 - RNA, 19 nt, Artificial Sequence
  Description of Artificial Sequence: Synthetic oligonucleotide
  Antisense strand to SEQ ID NO: 1585097
augguucuaacauucuucc

SEQ ID NO: 1585099 - RNA, 19 nt, Artificial Sequence
  Description of Artificial Sequence: Synthetic oligonucleotide
  Sense strand starting at position 2983 of SEQ ID NO: 1560225
gaauuauuguagguuuggu

SEQ ID NO: 1585100 - RNA, 19 nt, Artificial Sequence
  Description of Artificial Sequence: Synthetic oligonucleotide
  Antisense strand to SEQ ID NO: 1585099
accaaaccuacaauaauuc

SEQ ID NO: 1585101 - RNA, 19 nt, Artificial Sequence
  Description of Artificial Sequence: Synthetic oligonucleotide
  Sense strand starting at position 3080 of SEQ ID NO: 1560225
gauugaauguaggagauaa

SEQ ID NO: 1585102 - RNA, 19 nt, Artificial Sequence
  Description of Artificial Sequence: Synthetic oligonucleotide
  Antisense strand to SEQ ID NO: 1585101
uuaucuccuacauucaauc

SEQ ID NO: 1585103 - RNA, 19 nt, Artificial Sequence
  Description of Artificial Sequence: Synthetic oligonucleotide
  Sense strand starting at position 3205 of SEQ ID NO: 1560225
cuuuguuugcuuugcauuu

SEQ ID NO: 1585104 - RNA, 19 nt, Artificial Sequence
  Description of Artificial Sequence: Synthetic oligonucleotide
  Antisense strand to SEQ ID NO: 1585103
aaaugcaaagcaaacaaag

SEQ ID NO: 1585105 - RNA, 19 nt, Artificial Sequence
  Description of Artificial Sequence: Synthetic oligonucleotide
  Sense strand starting at position 3277 of SEQ ID NO: 1560225
cuguauacccaucagauuc

SEQ ID NO: 1585106 - RNA, 19 nt, Artificial Sequence
  Description of Artificial Sequence: Synthetic oligonucleotide
  Antisense strand to SEQ ID NO: 1585105
gaaucugauggguauacag

SEQ ID NO: 1585107 - RNA, 19 nt, Artificial Sequence
  Description of Artificial Sequence: Synthetic oligonucleotide
  Sense strand starting at position 3372 of SEQ ID NO: 1560225
aguggagugcaauagcaua

SEQ ID NO: 1585108 - RNA, 19 nt, Artificial Sequence
  Description of Artificial Sequence: Synthetic oligonucleotide
  Antisense strand to SEQ ID NO: 1585107
uaugcuauugcacuccacu

SEQ ID NO: 1585109 - RNA, 19 nt, Artificial Sequence
  Description of Artificial Sequence: Synthetic oligonucleotide
  Sense strand starting at position 3734 of SEQ ID NO: 1560225
gcaugcauaucaguagcua

SEQ ID NO: 1585110 - RNA, 19 nt, Artificial Sequence
  Description of Artificial Sequence: Synthetic oligonucleotide
  Antisense strand to SEQ ID NO: 1585109
uagcuacugauaugcaugc

SEQ ID NO: 1585111 - RNA, 19 nt, Artificial Sequence
  Description of Artificial Sequence: Synthetic oligonucleotide
  Sense strand starting at position 3746 of SEQ ID NO: 1560225
guagcuagagcucaguauu

SEQ ID NO: 1585112 - RNA, 19 nt, Artificial Sequence
  Description of Artificial Sequence: Synthetic oligonucleotide
  Antisense strand to SEQ ID NO: 1585111
aauacugagcucuagcuac

SEQ ID NO: 1585113 - RNA, 19 nt, Artificial Sequence
  Description of Artificial Sequence: Synthetic oligonucleotide
  Sense strand starting at position 3749 of SEQ ID NO: 1560225
gcuagagcucaguauuugu

SEQ ID NO: 1585114 - RNA, 19 nt, Artificial Sequence
  Description of Artificial Sequence: Synthetic oligonucleotide
  Antisense strand to SEQ ID NO: 1585113
acaaauacugagcucuagc

SEQ ID NO: 1585115 - RNA, 19 nt, Artificial Sequence
  Description of Artificial Sequence: Synthetic oligonucleotide
  Sense strand starting at position 3752 of SEQ ID NO: 1560225
agagcucaguauuuguuua

SEQ ID NO: 1585116 - RNA, 19 nt, Artificial Sequence
  Description of Artificial Sequence: Synthetic oligonucleotide
  Antisense strand to SEQ ID NO: 1585115
uaaacaaauacugagcucu

SEQ ID NO: 1585117 - RNA, 19 nt, Artificial Sequence
  Description of Artificial Sequence: Synthetic oligonucleotide
  Sense strand starting at position 3754 of SEQ ID NO: 1560225
agcucaguauuuguuuaca

SEQ ID NO: 1585118 - RNA, 19 nt, Artificial Sequence
  Description of Artificial Sequence: Synthetic oligonucleotide
  Antisense strand to SEQ ID NO: 1585117
uguaaacaaauacugagcu

SEQ ID NO: 1585119 - RNA, 19 nt, Artificial Sequence
  Description of Artificial Sequence: Synthetic oligonucleotide
  Sense strand starting at position 3759 of SEQ ID NO: 1560225
aguauuuguuuacagauac

SEQ ID NO: 1585120 - RNA, 19 nt, Artificial Sequence
  Description of Artificial Sequence: Synthetic oligonucleotide
  Antisense strand to SEQ ID NO: 1585119
guaucuguaaacaaauacu

SEQ ID NO: 1585121 - RNA, 19 nt, Artificial Sequence
  Description of Artificial Sequence: Synthetic oligonucleotide
  Sense strand starting at position 3812 of SEQ ID NO: 1560225
auacauaacucuuaagugu

SEQ ID NO: 1585122 - RNA, 19 nt, Artificial Sequence
  Description of Artificial Sequence: Synthetic oligonucleotide
  Antisense strand to SEQ ID NO: 1585121
acacuuaagaguuauguau

SEQ ID NO: 1585123 - RNA, 19 nt, Artificial Sequence
  Description of Artificial Sequence: Synthetic oligonucleotide
  Sense strand starting at position 3820 of SEQ ID NO: 1560225
cucuuaaguguauaauuag

SEQ ID NO: 1585124 - RNA, 19 nt, Artificial Sequence
  Description of Artificial Sequence: Synthetic oligonucleotide
  Antisense strand to SEQ ID NO: 1585123
cuaauuauacacuuaagag

SEQ ID NO: 1585125 - RNA, 19 nt, Artificial Sequence
  Description of Artificial Sequence: Synthetic oligonucleotide
  Sense strand starting at position 3829 of SEQ ID NO: 1560225
guauaauuagaugagcuuu

SEQ ID NO: 1585126 - RNA, 19 nt, Artificial Sequence
  Description of Artificial Sequence: Synthetic oligonucleotide
  Antisense strand to SEQ ID NO: 1585125
aaagcucaucuaauuauac

SEQ ID NO: 1585127 - RNA, 19 nt, Artificial Sequence
  Description of Artificial Sequence: Synthetic oligonucleotide
  Sense strand starting at position 3831 of SEQ ID NO: 1560225
auaauuagaugagcuuuga

SEQ ID NO: 1585128 - RNA, 19 nt, Artificial Sequence
  Description of Artificial Sequence: Synthetic oligonucleotide
  Antisense strand to SEQ ID NO: 1585127
ucaaagcucaucuaauuau

SEQ ID NO: 1585129 - RNA, 19 nt, Artificial Sequence
  Description of Artificial Sequence: Synthetic oligonucleotide
  Sense strand starting at position 3840 of SEQ ID NO: 1560225
ugagcuuugaguugcauau

SEQ ID NO: 1585130 - RNA, 19 nt, Artificial Sequence
  Description of Artificial Sequence: Synthetic oligonucleotide
  Antisense strand to SEQ ID NO: 1585129
auaugcaacucaaagcuca

SEQ ID NO: 1585131 - RNA, 19 nt, Artificial Sequence
  Description of Artificial Sequence: Synthetic oligonucleotide
  Sense strand starting at position 3850 of SEQ ID NO: 1560225
guugcauaugcuggaguuu

SEQ ID NO: 1585132 - RNA, 19 nt, Artificial Sequence
  Description of Artificial Sequence: Synthetic oligonucleotide
  Antisense strand to SEQ ID NO: 1585131
aaacuccagcauaugcaac

SEQ ID NO: 1585133 - RNA, 19 nt, Artificial Sequence
  Description of Artificial Sequence: Synthetic oligonucleotide
  Sense strand starting at position 1408 of SEQ ID NO: 1560226
gcaguugucauagaaggug

SEQ ID NO: 1585134 - RNA, 19 nt, Artificial Sequence
  Description of Artificial Sequence: Synthetic oligonucleotide
  Antisense strand to SEQ ID NO: 1585133
caccuucuaugacaacugc

SEQ ID NO: 1585135 - RNA, 19 nt, Artificial Sequence
  Description of Artificial Sequence: Synthetic oligonucleotide
  Sense strand starting at position 1656 of SEQ ID NO: 1560226
aaggcucugagauggguaa

SEQ ID NO: 1585136 - RNA, 19 nt, Artificial Sequence
  Description of Artificial Sequence: Synthetic oligonucleotide
  Antisense strand to SEQ ID NO: 1585135
uuacccaucucagagccuu

SEQ ID NO: 1585137 - RNA, 19 nt, Artificial Sequence
  Description of Artificial Sequence: Synthetic oligonucleotide
  Sense strand starting at position 1657 of SEQ ID NO: 1560226
aggcucugagauggguaaa

SEQ ID NO: 1585138 - RNA, 19 nt, Artificial Sequence
  Description of Artificial Sequence: Synthetic oligonucleotide
  Antisense strand to SEQ ID NO: 1585137
uuuacccaucucagagccu

SEQ ID NO: 1585139 - RNA, 19 nt, Artificial Sequence
  Description of Artificial Sequence: Synthetic oligonucleotide
  Sense strand starting at position 2303 of SEQ ID NO: 1560226
gagaguucagguggcaaga

SEQ ID NO: 1585140 - RNA, 19 nt, Artificial Sequence
  Description of Artificial Sequence: Synthetic oligonucleotide
  Antisense strand to SEQ ID NO: 1585139
ucuugccaccugaacucuc

SEQ ID NO: 1585141 - RNA, 19 nt, Artificial Sequence
  Description of Artificial Sequence: Synthetic oligonucleotide
  Sense strand starting at position 2338 of SEQ ID NO: 1560226
accauugugccagaucaug

SEQ ID NO: 1585142 - RNA, 19 nt, Artificial Sequence
  Description of Artificial Sequence: Synthetic oligonucleotide
  Antisense strand to SEQ ID NO: 1585141
caugaucuggcacaauggu

SEQ ID NO: 1585143 - RNA, 19 nt, Artificial Sequence
  Description of Artificial Sequence: Synthetic oligonucleotide
  Sense strand starting at position 2371 of SEQ ID NO: 1560226
ccacaugugguccaggagu

SEQ ID NO: 1585144 - RNA, 19 nt, Artificial Sequence
  Description of Artificial Sequence: Synthetic oligonucleotide
  Antisense strand to SEQ ID NO: 1585143
acuccuggaccacaugugg

SEQ ID NO: 1585145 - RNA, 19 nt, Artificial Sequence
  Description of Artificial Sequence: Synthetic oligonucleotide
  Sense strand starting at position 2609 of SEQ ID NO: 1560226
ggaggcuagguucagcaua

SEQ ID NO: 1585146 - RNA, 19 nt, Artificial Sequence
  Description of Artificial Sequence: Synthetic oligonucleotide
  Antisense strand to SEQ ID NO: 1585145
uaugcugaaccuagccucc

SEQ ID NO: 1585147 - RNA, 19 nt, Artificial Sequence
  Description of Artificial Sequence: Synthetic oligonucleotide
  Sense strand starting at position 2871 of SEQ ID NO: 1560226
gaugaaagauucugaggag

SEQ ID NO: 1585148 - RNA, 19 nt, Artificial Sequence
  Description of Artificial Sequence: Synthetic oligonucleotide
  Antisense strand to SEQ ID NO: 1585147
cuccucagaaucuuucauc

SEQ ID NO: 1585149 - RNA, 19 nt, Artificial Sequence
  Description of Artificial Sequence: Synthetic oligonucleotide
  Sense strand starting at position 2874 of SEQ ID NO: 1560226
gaaagauucugaggaggga

SEQ ID NO: 1585150 - RNA, 19 nt, Artificial Sequence
  Description of Artificial Sequence: Synthetic oligonucleotide
  Antisense strand to SEQ ID NO: 1585149
ucccuccucagaaucuuuc

SEQ ID NO: 1585151 - RNA, 19 nt, Artificial Sequence
  Description of Artificial Sequence: Synthetic oligonucleotide
  Sense strand starting at position 2938 of SEQ ID NO: 1560226
agucucugcucuuugcaaa

SEQ ID NO: 1585152 - RNA, 19 nt, Artificial Sequence
  Description of Artificial Sequence: Synthetic oligonucleotide
  Antisense strand to SEQ ID NO: 1585151
uuugcaaagagcagagacu

SEQ ID NO: 1585153 - RNA, 19 nt, Artificial Sequence
  Description of Artificial Sequence: Synthetic oligonucleotide
  Sense strand starting at position 3019 of SEQ ID NO: 1560226
ccagguacucuguauacau

SEQ ID NO: 1585154 - RNA, 19 nt, Artificial Sequence
  Description of Artificial Sequence: Synthetic oligonucleotide
  Antisense strand to SEQ ID NO: 1585153
auguauacagaguaccugg

SEQ ID NO: 1585155 - RNA, 19 nt, Artificial Sequence
  Description of Artificial Sequence: Synthetic oligonucleotide
  Sense strand starting at position 3049 of SEQ ID NO: 1560226
ugugccaagugcucuauga

SEQ ID NO: 1585156 - RNA, 19 nt, Artificial Sequence
  Description of Artificial Sequence: Synthetic oligonucleotide
  Antisense strand to SEQ ID NO: 1585155
ucauagagcacuuggcaca

SEQ ID NO: 1585157 - RNA, 19 nt, Artificial Sequence
  Description of Artificial Sequence: Synthetic oligonucleotide
  Sense strand starting at position 3051 of SEQ ID NO: 1560226
ugccaagugcucuaugaaa

SEQ ID NO: 1585158 - RNA, 19 nt, Artificial Sequence
  Description of Artificial Sequence: Synthetic oligonucleotide
  Antisense strand to SEQ ID NO: 1585157
uuucauagagcacuuggca

SEQ ID NO: 1585159 - RNA, 19 nt, Artificial Sequence
  Description of Artificial Sequence: Synthetic oligonucleotide
  Sense strand starting at position 3117 of SEQ ID NO: 1560226
uguucucgguccucuauau

SEQ ID NO: 1585160 - RNA, 19 nt, Artificial Sequence
  Description of Artificial Sequence: Synthetic oligonucleotide
  Antisense strand to SEQ ID NO: 1585159
auauagaggaccgagaaca

SEQ ID NO: 1585161 - RNA, 19 nt, Artificial Sequence
  Description of Artificial Sequence: Synthetic oligonucleotide
  Sense strand starting at position 3121 of SEQ ID NO: 1560226
cucgguccucuauauaaag

SEQ ID NO: 1585162 - RNA, 19 nt, Artificial Sequence
  Description of Artificial Sequence: Synthetic oligonucleotide
  Antisense strand to SEQ ID NO: 1585161
cuuuauauagaggaccgag

SEQ ID NO: 1585163 - RNA, 19 nt, Artificial Sequence
  Description of Artificial Sequence: Synthetic oligonucleotide
  Sense strand starting at position 3138 of SEQ ID NO: 1560226
agugaaauuugugcggagu

SEQ ID NO: 1585164 - RNA, 19 nt, Artificial Sequence
  Description of Artificial Sequence: Synthetic oligonucleotide
  Antisense strand to SEQ ID NO: 1585163
acuccgcacaaauuucacu

SEQ ID NO: 1585165 - RNA, 19 nt, Artificial Sequence
  Description of Artificial Sequence: Synthetic oligonucleotide
  Sense strand starting at position 3139 of SEQ ID NO: 1560226
gugaaauuugugcggagua

SEQ ID NO: 1585166 - RNA, 19 nt, Artificial Sequence
  Description of Artificial Sequence: Synthetic oligonucleotide
  Antisense strand to SEQ ID NO: 1585165
uacuccgcacaaauuucac

SEQ ID NO: 1585167 - RNA, 19 nt, Artificial Sequence
  Description of Artificial Sequence: Synthetic oligonucleotide
  Sense strand starting at position 3140 of SEQ ID NO: 1560226
ugaaauuugugcggaguaa

SEQ ID NO: 1585168 - RNA, 19 nt, Artificial Sequence
  Description of Artificial Sequence: Synthetic oligonucleotide
  Antisense strand to SEQ ID NO: 1585167
uuacuccgcacaaauuuca

SEQ ID NO: 1585169 - RNA, 19 nt, Artificial Sequence
  Description of Artificial Sequence: Synthetic oligonucleotide
  Sense strand starting at position 3149 of SEQ ID NO: 1560226
ugcggaguaacuuauguaa

SEQ ID NO: 1585170 - RNA, 19 nt, Artificial Sequence
  Description of Artificial Sequence: Synthetic oligonucleotide
  Antisense strand to SEQ ID NO: 1585169
uuacauaaguuacuccgca

SEQ ID NO: 1585171 - RNA, 19 nt, Artificial Sequence
  Description of Artificial Sequence: Synthetic oligonucleotide
  Sense strand starting at position 3152 of SEQ ID NO: 1560226
ggaguaacuuauguaaagu

SEQ ID NO: 1585172 - RNA, 19 nt, Artificial Sequence
  Description of Artificial Sequence: Synthetic oligonucleotide
  Antisense strand to SEQ ID NO: 1585171
acuuuacauaaguuacucc

SEQ ID NO: 1585173 - RNA, 19 nt, Artificial Sequence
  Description of Artificial Sequence: Synthetic oligonucleotide
  Sense strand starting at position 3205 of SEQ ID NO: 1560226
acaccuacugugugucaga

SEQ ID NO: 1585174 - RNA, 19 nt, Artificial Sequence
  Description of Artificial Sequence: Synthetic oligonucleotide
  Antisense strand to SEQ ID NO: 1585173
ucugacacacaguaggugu

SEQ ID NO: 1585175 - RNA, 19 nt, Artificial Sequence
  Description of Artificial Sequence: Synthetic oligonucleotide
  Sense strand starting at position 3206 of SEQ ID NO: 1560226
caccuacugugugucagau

SEQ ID NO: 1585176 - RNA, 19 nt, Artificial Sequence
  Description of Artificial Sequence: Synthetic oligonucleotide
  Antisense strand to SEQ ID NO: 1585175
aucugacacacaguaggug

SEQ ID NO: 1585177 - RNA, 19 nt, Artificial Sequence
  Description of Artificial Sequence: Synthetic oligonucleotide
  Sense strand starting at position 3212 of SEQ ID NO: 1560226
cugugugucagauguucua

SEQ ID NO: 1585178 - RNA, 19 nt, Artificial Sequence
  Description of Artificial Sequence: Synthetic oligonucleotide
  Antisense strand to SEQ ID NO: 1585177
uagaacaucugacacacag

SEQ ID NO: 1585179 - RNA, 19 nt, Artificial Sequence
  Description of Artificial Sequence: Synthetic oligonucleotide
  Sense strand starting at position 3215 of SEQ ID NO: 1560226
ugugucagauguucuaugu

SEQ ID NO: 1585180 - RNA, 19 nt, Artificial Sequence
  Description of Artificial Sequence: Synthetic oligonucleotide
  Antisense strand to SEQ ID NO: 1585179
acauagaacaucugacaca

SEQ ID NO: 1585181 - RNA, 19 nt, Artificial Sequence
  Description of Artificial Sequence: Synthetic oligonucleotide
  Sense strand starting at position 3219 of SEQ ID NO: 1560226
ucagauguucuauguagag

SEQ ID NO: 1585182 - RNA, 19 nt, Artificial Sequence
  Description of Artificial Sequence: Synthetic oligonucleotide
  Antisense strand to SEQ ID NO: 1585181
cucuacauagaacaucuga

SEQ ID NO: 1585183 - RNA, 19 nt, Artificial Sequence
  Description of Artificial Sequence: Synthetic oligonucleotide
  Sense strand starting at position 3221 of SEQ ID NO: 1560226
agauguucuauguagagca

SEQ ID NO: 1585184 - RNA, 19 nt, Artificial Sequence
  Description of Artificial Sequence: Synthetic oligonucleotide
  Antisense strand to SEQ ID NO: 1585183
ugcucuacauagaacaucu

SEQ ID NO: 1585185 - RNA, 19 nt, Artificial Sequence
  Description of Artificial Sequence: Synthetic oligonucleotide
  Sense strand starting at position 3253 of SEQ ID NO: 1560226
ccuggugaucuaugucaag

SEQ ID NO: 1585186 - RNA, 19 nt, Artificial Sequence
  Description of Artificial Sequence: Synthetic oligonucleotide
  Antisense strand to SEQ ID NO: 1585185
cuugacauagaucaccagg

SEQ ID NO: 1585187 - RNA, 19 nt, Artificial Sequence
  Description of Artificial Sequence: Synthetic oligonucleotide
  Sense strand starting at position 3283 of SEQ ID NO: 1560226
ugugucaagugcucuacau

SEQ ID NO: 1585188 - RNA, 19 nt, Artificial Sequence
  Description of Artificial Sequence: Synthetic oligonucleotide
  Antisense strand to SEQ ID NO: 1585187
auguagagcacuugacaca

SEQ ID NO: 1585189 - RNA, 19 nt, Artificial Sequence
  Description of Artificial Sequence: Synthetic oligonucleotide
  Sense strand starting at position 3285 of SEQ ID NO: 1560226
ugucaagugcucuacauaa

SEQ ID NO: 1585190 - RNA, 19 nt, Artificial Sequence
  Description of Artificial Sequence: Synthetic oligonucleotide
  Antisense strand to SEQ ID NO: 1585189
uuauguagagcacuugaca

SEQ ID NO: 1585191 - RNA, 19 nt, Artificial Sequence
  Description of Artificial Sequence: Synthetic oligonucleotide
  Sense strand starting at position 3287 of SEQ ID NO: 1560226
ucaagugcucuacauaaag

SEQ ID NO: 1585192 - RNA, 19 nt, Artificial Sequence
  Description of Artificial Sequence: Synthetic oligonucleotide
  Antisense strand to SEQ ID NO: 1585191
cuuuauguagagcacuuga

SEQ ID NO: 1585193 - RNA, 19 nt, Artificial Sequence
  Description of Artificial Sequence: Synthetic oligonucleotide
  Sense strand starting at position 3349 of SEQ ID NO: 1560226
ccauguguccgguacucua

SEQ ID NO: 1585194 - RNA, 19 nt, Artificial Sequence
  Description of Artificial Sequence: Synthetic oligonucleotide
  Antisense strand to SEQ ID NO: 1585193
uagaguaccggacacaugg

SEQ ID NO: 1585195 - RNA, 19 nt, Artificial Sequence
  Description of Artificial Sequence: Synthetic oligonucleotide
  Sense strand starting at position 3410 of SEQ ID NO: 1560226
guucuuucugugugucaag

SEQ ID NO: 1585196 - RNA, 19 nt, Artificial Sequence
  Description of Artificial Sequence: Synthetic oligonucleotide
  Antisense strand to SEQ ID NO: 1585195
cuugacacacagaaagaac

SEQ ID NO: 1585197 - RNA, 19 nt, Artificial Sequence
  Description of Artificial Sequence: Synthetic oligonucleotide
  Sense strand starting at position 3493 of SEQ ID NO: 1560226
gccgguacucuacauaaug

SEQ ID NO: 1585198 - RNA, 19 nt, Artificial Sequence
  Description of Artificial Sequence: Synthetic oligonucleotide
  Antisense strand to SEQ ID NO: 1585197
cauuauguagaguaccggc

SEQ ID NO: 1585199 - RNA, 19 nt, Artificial Sequence
  Description of Artificial Sequence: Synthetic oligonucleotide
  Sense strand starting at position 3557 of SEQ ID NO: 1560226
ugugucaagugcuccacau

SEQ ID NO: 1585200 - RNA, 19 nt, Artificial Sequence
  Description of Artificial Sequence: Synthetic oligonucleotide
  Antisense strand to SEQ ID NO: 1585199
auguggagcacuugacaca

SEQ ID NO: 1585201 - RNA, 19 nt, Artificial Sequence
  Description of Artificial Sequence: Synthetic oligonucleotide
  Sense strand starting at position 3559 of SEQ ID NO: 1560226
ugucaagugcuccacauaa

SEQ ID NO: 1585202 - RNA, 19 nt, Artificial Sequence
  Description of Artificial Sequence: Synthetic oligonucleotide
  Antisense strand to SEQ ID NO: 1585201
uuauguggagcacuugaca

SEQ ID NO: 1585203 - RNA, 19 nt, Artificial Sequence
  Description of Artificial Sequence: Synthetic oligonucleotide
  Sense strand starting at position 3561 of SEQ ID NO: 1560226
ucaagugcuccacauaaag

SEQ ID NO: 1585204 - RNA, 19 nt, Artificial Sequence
  Description of Artificial Sequence: Synthetic oligonucleotide
  Antisense strand to SEQ ID NO: 1585203
cuuuauguggagcacuuga

SEQ ID NO: 1585205 - RNA, 19 nt, Artificial Sequence
  Description of Artificial Sequence: Synthetic oligonucleotide
  Sense strand starting at position 3593 of SEQ ID NO: 1560226
uguaaaguucuugacauaa

SEQ ID NO: 1585206 - RNA, 19 nt, Artificial Sequence
  Description of Artificial Sequence: Synthetic oligonucleotide
  Antisense strand to SEQ ID NO: 1585205
uuaugucaagaacuuuaca

SEQ ID NO: 1585207 - RNA, 19 nt, Artificial Sequence
  Description of Artificial Sequence: Synthetic oligonucleotide
  Sense strand starting at position 3810 of SEQ ID NO: 1560226
guuggagagaccugaguga

SEQ ID NO: 1585208 - RNA, 19 nt, Artificial Sequence
  Description of Artificial Sequence: Synthetic oligonucleotide
  Antisense strand to SEQ ID NO: 1585207
ucacucaggucucuccaac

SEQ ID NO: 1585209 - RNA, 19 nt, Artificial Sequence
  Description of Artificial Sequence: Synthetic oligonucleotide
  Sense strand starting at position 3921 of SEQ ID NO: 1560226
ggaagccagguuugugaga

SEQ ID NO: 1585210 - RNA, 19 nt, Artificial Sequence
  Description of Artificial Sequence: Synthetic oligonucleotide
  Antisense strand to SEQ ID NO: 1585209
ucucacaaaccuggcuucc

SEQ ID NO: 1585211 - RNA, 19 nt, Artificial Sequence
  Description of Artificial Sequence: Synthetic oligonucleotide
  Sense strand starting at position 3922 of SEQ ID NO: 1560226
gaagccagguuugugagau

SEQ ID NO: 1585212 - RNA, 19 nt, Artificial Sequence
  Description of Artificial Sequence: Synthetic oligonucleotide
  Antisense strand to SEQ ID NO: 1585211
aucucacaaaccuggcuuc

SEQ ID NO: 1585213 - RNA, 19 nt, Artificial Sequence
  Description of Artificial Sequence: Synthetic oligonucleotide
  Sense strand starting at position 1 of SEQ ID NO: 1560227
agauaauuccugcgggaaa

SEQ ID NO: 1585214 - RNA, 19 nt, Artificial Sequence
  Description of Artificial Sequence: Synthetic oligonucleotide
  Antisense strand to SEQ ID NO: 1585213
uuucccgcaggaauuaucu

SEQ ID NO: 1585215 - RNA, 19 nt, Artificial Sequence
  Description of Artificial Sequence: Synthetic oligonucleotide
  Sense strand starting at position 245 of SEQ ID NO: 1560227
gugagaaagguuuggcaug

SEQ ID NO: 1585216 - RNA, 19 nt, Artificial Sequence
  Description of Artificial Sequence: Synthetic oligonucleotide
  Antisense strand to SEQ ID NO: 1585215
caugccaaaccuuucucac

SEQ ID NO: 1585217 - RNA, 19 nt, Artificial Sequence
  Description of Artificial Sequence: Synthetic oligonucleotide
  Sense strand starting at position 247 of SEQ ID NO: 1560227
gagaaagguuuggcaugga

SEQ ID NO: 1585218 - RNA, 19 nt, Artificial Sequence
  Description of Artificial Sequence: Synthetic oligonucleotide
  Antisense strand to SEQ ID NO: 1585217
uccaugccaaaccuuucuc

SEQ ID NO: 1585219 - RNA, 19 nt, Artificial Sequence
  Description of Artificial Sequence: Synthetic oligonucleotide
  Sense strand starting at position 250 of SEQ ID NO: 1560227
aaagguuuggcauggaacu

SEQ ID NO: 1585220 - RNA, 19 nt, Artificial Sequence
  Description of Artificial Sequence: Synthetic oligonucleotide
  Antisense strand to SEQ ID NO: 1585219
aguuccaugccaaaccuuu

SEQ ID NO: 1585221 - RNA, 19 nt, Artificial Sequence
  Description of Artificial Sequence: Synthetic oligonucleotide
  Sense strand starting at position 293 of SEQ ID NO: 1560227
aggaaugagucggugggua

SEQ ID NO: 1585222 - RNA, 19 nt, Artificial Sequence
  Description of Artificial Sequence: Synthetic oligonucleotide
  Antisense strand to SEQ ID NO: 1585221
uacccaccgacucauuccu

SEQ ID NO: 1585223 - RNA, 19 nt, Artificial Sequence
  Description of Artificial Sequence: Synthetic oligonucleotide
  Sense strand starting at position 295 of SEQ ID NO: 1560227
gaaugagucgguggguaga

SEQ ID NO: 1585224 - RNA, 19 nt, Artificial Sequence
  Description of Artificial Sequence: Synthetic oligonucleotide
  Antisense strand to SEQ ID NO: 1585223
ucuacccaccgacucauuc

SEQ ID NO: 1585225 - RNA, 19 nt, Artificial Sequence
  Description of Artificial Sequence: Synthetic oligonucleotide
  Sense strand starting at position 381 of SEQ ID NO: 1560227
gugaguggauagaggaaua

SEQ ID NO: 1585226 - RNA, 19 nt, Artificial Sequence
  Description of Artificial Sequence: Synthetic oligonucleotide
  Antisense strand to SEQ ID NO: 1585225
uauuccucuauccacucac

SEQ ID NO: 1585227 - RNA, 19 nt, Artificial Sequence
  Description of Artificial Sequence: Synthetic oligonucleotide
  Sense strand starting at position 578 of SEQ ID NO: 1560227
gagaggaaugcgcgaguga

SEQ ID NO: 1585228 - RNA, 19 nt, Artificial Sequence
  Description of Artificial Sequence: Synthetic oligonucleotide
  Antisense strand to SEQ ID NO: 1585227
ucacucgcgcauuccucuc

SEQ ID NO: 1585229 - RNA, 19 nt, Artificial Sequence
  Description of Artificial Sequence: Synthetic oligonucleotide
  Sense strand starting at position 757 of SEQ ID NO: 1560227
ggcaaugugugagugggua

SEQ ID NO: 1585230 - RNA, 19 nt, Artificial Sequence
  Description of Artificial Sequence: Synthetic oligonucleotide
  Antisense strand to SEQ ID NO: 1585229
uacccacucacacauugcc

SEQ ID NO: 1585231 - RNA, 19 nt, Artificial Sequence
  Description of Artificial Sequence: Synthetic oligonucleotide
  Sense strand starting at position 792 of SEQ ID NO: 1560227
gguagaggauugagugagu

SEQ ID NO: 1585232 - RNA, 19 nt, Artificial Sequence
  Description of Artificial Sequence: Synthetic oligonucleotide
  Antisense strand to SEQ ID NO: 1585231
acucacucaauccucuacc

SEQ ID NO: 1585233 - RNA, 19 nt, Artificial Sequence
  Description of Artificial Sequence: Synthetic oligonucleotide
  Sense strand starting at position 1131 of SEQ ID NO: 1560227
gaaugagugaguuagcaga

SEQ ID NO: 1585234 - RNA, 19 nt, Artificial Sequence
  Description of Artificial Sequence: Synthetic oligonucleotide
  Antisense strand to SEQ ID NO: 1585233
ucugcuaacucacucauuc

SEQ ID NO: 1585235 - RNA, 19 nt, Artificial Sequence
  Description of Artificial Sequence: Synthetic oligonucleotide
  Sense strand starting at position 1138 of SEQ ID NO: 1560227
ugaguuagcagaggaauga

SEQ ID NO: 1585236 - RNA, 19 nt, Artificial Sequence
  Description of Artificial Sequence: Synthetic oligonucleotide
  Antisense strand to SEQ ID NO: 1585235
ucauuccucugcuaacuca

SEQ ID NO: 1585237 - RNA, 19 nt, Artificial Sequence
  Description of Artificial Sequence: Synthetic oligonucleotide
  Sense strand starting at position 1736 of SEQ ID NO: 1560227
accugaauccuugggaguu

SEQ ID NO: 1585238 - RNA, 19 nt, Artificial Sequence
  Description of Artificial Sequence: Synthetic oligonucleotide
  Antisense strand to SEQ ID NO: 1585237
aacucccaaggauucaggu

SEQ ID NO: 1585239 - RNA, 19 nt, Artificial Sequence
  Description of Artificial Sequence: Synthetic oligonucleotide
  Sense strand starting at position 2213 of SEQ ID NO: 1560227
agacaaggguguucagaua

SEQ ID NO: 1585240 - RNA, 19 nt, Artificial Sequence
  Description of Artificial Sequence: Synthetic oligonucleotide
  Antisense strand to SEQ ID NO: 1585239
uaucugaacacccuugucu

SEQ ID NO: 1585241 - RNA, 19 nt, Artificial Sequence
  Description of Artificial Sequence: Synthetic oligonucleotide
  Sense strand starting at position 2284 of SEQ ID NO: 1560227
acccuugucccagaucauc

SEQ ID NO: 1585242 - RNA, 19 nt, Artificial Sequence
  Description of Artificial Sequence: Synthetic oligonucleotide
  Antisense strand to SEQ ID NO: 1585241
gaugaucugggacaagggu

SEQ ID NO: 1585243 - RNA, 19 nt, Artificial Sequence
  Description of Artificial Sequence: Synthetic oligonucleotide
  Sense strand starting at position 2303 of SEQ ID NO: 1560227
ugggcuccucuccaaacau

SEQ ID NO: 1585244 - RNA, 19 nt, Artificial Sequence
  Description of Artificial Sequence: Synthetic oligonucleotide
  Antisense strand to SEQ ID NO: 1585243
auguuuggagaggagccca

SEQ ID NO: 1585245 - RNA, 19 nt, Artificial Sequence
  Description of Artificial Sequence: Synthetic oligonucleotide
  Sense strand starting at position 2503 of SEQ ID NO: 1560227
gaggauuaccuucgucaga

SEQ ID NO: 1585246 - RNA, 19 nt, Artificial Sequence
  Description of Artificial Sequence: Synthetic oligonucleotide
  Antisense strand to SEQ ID NO: 1585245
ucugacgaagguaauccuc

SEQ ID NO: 1585247 - RNA, 19 nt, Artificial Sequence
  Description of Artificial Sequence: Synthetic oligonucleotide
  Sense strand starting at position 2504 of SEQ ID NO: 1560227
aggauuaccuucgucagau

SEQ ID NO: 1585248 - RNA, 19 nt, Artificial Sequence
  Description of Artificial Sequence: Synthetic oligonucleotide
  Antisense strand to SEQ ID NO: 1585247
aucugacgaagguaauccu

SEQ ID NO: 1585249 - RNA, 19 nt, Artificial Sequence
  Description of Artificial Sequence: Synthetic oligonucleotide
  Sense strand starting at position 2505 of SEQ ID NO: 1560227
ggauuaccuucgucagauu

SEQ ID NO: 1585250 - RNA, 19 nt, Artificial Sequence
  Description of Artificial Sequence: Synthetic oligonucleotide
  Antisense strand to SEQ ID NO: 1585249
aaucugacgaagguaaucc

SEQ ID NO: 1585251 - RNA, 19 nt, Artificial Sequence
  Description of Artificial Sequence: Synthetic oligonucleotide
  Sense strand starting at position 2732 of SEQ ID NO: 1560227
aggcuucccaucugggaaa

SEQ ID NO: 1585252 - RNA, 19 nt, Artificial Sequence
  Description of Artificial Sequence: Synthetic oligonucleotide
  Antisense strand to SEQ ID NO: 1585251
uuucccagaugggaagccu

SEQ ID NO: 1585253 - RNA, 19 nt, Artificial Sequence
  Description of Artificial Sequence: Synthetic oligonucleotide
  Sense strand starting at position 2783 of SEQ ID NO: 1560227
gaggaaggcuccuaagaaa

SEQ ID NO: 1585254 - RNA, 19 nt, Artificial Sequence
  Description of Artificial Sequence: Synthetic oligonucleotide
  Antisense strand to SEQ ID NO: 1585253
uuucuuaggagccuuccuc

SEQ ID NO: 1585255 - RNA, 19 nt, Artificial Sequence
  Description of Artificial Sequence: Synthetic oligonucleotide
  Sense strand starting at position 2869 of SEQ ID NO: 1560227
gucucuacuccaugcgaaa

SEQ ID NO: 1585256 - RNA, 19 nt, Artificial Sequence
  Description of Artificial Sequence: Synthetic oligonucleotide
  Antisense strand to SEQ ID NO: 1585255
uuucgcauggaguagagac

SEQ ID NO: 1585257 - RNA, 19 nt, Artificial Sequence
  Description of Artificial Sequence: Synthetic oligonucleotide
  Sense strand starting at position 2947 of SEQ ID NO: 1560227
gcacuuacuguguaucaga

SEQ ID NO: 1585258 - RNA, 19 nt, Artificial Sequence
  Description of Artificial Sequence: Synthetic oligonucleotide
  Antisense strand to SEQ ID NO: 1585257
ucugauacacaguaagugc

SEQ ID NO: 1585259 - RNA, 19 nt, Artificial Sequence
  Description of Artificial Sequence: Synthetic oligonucleotide
  Sense strand starting at position 2954 of SEQ ID NO: 1560227
cuguguaucagauacugua

SEQ ID NO: 1585260 - RNA, 19 nt, Artificial Sequence
  Description of Artificial Sequence: Synthetic oligonucleotide
  Antisense strand to SEQ ID NO: 1585259
uacaguaucugauacacag

SEQ ID NO: 1585261 - RNA, 19 nt, Artificial Sequence
  Description of Artificial Sequence: Synthetic oligonucleotide
  Sense strand starting at position 2995 of SEQ ID NO: 1560227
ccagguaugccacauaaag

SEQ ID NO: 1585262 - RNA, 19 nt, Artificial Sequence
  Description of Artificial Sequence: Synthetic oligonucleotide
  Antisense strand to SEQ ID NO: 1585261
cuuuauguggcauaccugg

SEQ ID NO: 1585263 - RNA, 19 nt, Artificial Sequence
  Description of Artificial Sequence: Synthetic oligonucleotide
  Sense strand starting at position 3027 of SEQ ID NO: 1560227
ugcagcaugcuguacauaa

SEQ ID NO: 1585264 - RNA, 19 nt, Artificial Sequence
  Description of Artificial Sequence: Synthetic oligonucleotide
  Antisense strand to SEQ ID NO: 1585263
uuauguacagcaugcugca

SEQ ID NO: 1585265 - RNA, 19 nt, Artificial Sequence
  Description of Artificial Sequence: Synthetic oligonucleotide
  Sense strand starting at position 3050 of SEQ ID NO: 1560227
agcuuacuuuaugcagagu

SEQ ID NO: 1585266 - RNA, 19 nt, Artificial Sequence
  Description of Artificial Sequence: Synthetic oligonucleotide
  Antisense strand to SEQ ID NO: 1585265
acucugcauaaaguaagcu

SEQ ID NO: 1585267 - RNA, 19 nt, Artificial Sequence
  Description of Artificial Sequence: Synthetic oligonucleotide
  Sense strand starting at position 3053 of SEQ ID NO: 1560227
uuacuuuaugcagaguacu

SEQ ID NO: 1585268 - RNA, 19 nt, Artificial Sequence
  Description of Artificial Sequence: Synthetic oligonucleotide
  Antisense strand to SEQ ID NO: 1585267
aguacucugcauaaaguaa

SEQ ID NO: 1585269 - RNA, 19 nt, Artificial Sequence
  Description of Artificial Sequence: Synthetic oligonucleotide
  Sense strand starting at position 3095 of SEQ ID NO: 1560227
ugccaugugcuguauauaa

SEQ ID NO: 1585270 - RNA, 19 nt, Artificial Sequence
  Description of Artificial Sequence: Synthetic oligonucleotide
  Antisense strand to SEQ ID NO: 1585269
uuauauacagcacauggca

SEQ ID NO: 1585271 - RNA, 19 nt, Artificial Sequence
  Description of Artificial Sequence: Synthetic oligonucleotide
  Sense strand starting at position 3097 of SEQ ID NO: 1560227
ccaugugcuguauauaaag

SEQ ID NO: 1585272 - RNA, 19 nt, Artificial Sequence
  Description of Artificial Sequence: Synthetic oligonucleotide
  Antisense strand to SEQ ID NO: 1585271
cuuuauauacagcacaugg

SEQ ID NO: 1585273 - RNA, 19 nt, Artificial Sequence
  Description of Artificial Sequence: Synthetic oligonucleotide
  Sense strand starting at position 3226 of SEQ ID NO: 1560227
cugugugcuggcuauucua

SEQ ID NO: 1585274 - RNA, 19 nt, Artificial Sequence
  Description of Artificial Sequence: Synthetic oligonucleotide
  Antisense strand to SEQ ID NO: 1585273
uagaauagccagcacacag

SEQ ID NO: 1585275 - RNA, 19 nt, Artificial Sequence
  Description of Artificial Sequence: Synthetic oligonucleotide
  Sense strand starting at position 3280 of SEQ ID NO: 1560227
auaaauacugucuacugua

SEQ ID NO: 1585276 - RNA, 19 nt, Artificial Sequence
  Description of Artificial Sequence: Synthetic oligonucleotide
  Antisense strand to SEQ ID NO: 1585275
uacaguagacaguauuuau

SEQ ID NO: 1585277 - RNA, 19 nt, Artificial Sequence
  Description of Artificial Sequence: Synthetic oligonucleotide
  Sense strand starting at position 3459 of SEQ ID NO: 1560227
aacuacucggugcaacaua

SEQ ID NO: 1585278 - RNA, 19 nt, Artificial Sequence
  Description of Artificial Sequence: Synthetic oligonucleotide
  Antisense strand to SEQ ID NO: 1585277
uauguugcaccgaguaguu

SEQ ID NO: 1585279 - RNA, 19 nt, Artificial Sequence
  Description of Artificial Sequence: Synthetic oligonucleotide
  Sense strand starting at position 3467 of SEQ ID NO: 1560227
ggugcaacauacuugacau

SEQ ID NO: 1585280 - RNA, 19 nt, Artificial Sequence
  Description of Artificial Sequence: Synthetic oligonucleotide
  Antisense strand to SEQ ID NO: 1585279
augucaaguauguugcacc

SEQ ID NO: 1585281 - RNA, 19 nt, Artificial Sequence
  Description of Artificial Sequence: Synthetic oligonucleotide
  Sense strand starting at position 3514 of SEQ ID NO: 1560227
cuauauaaagugugccuua

SEQ ID NO: 1585282 - RNA, 19 nt, Artificial Sequence
  Description of Artificial Sequence: Synthetic oligonucleotide
  Antisense strand to SEQ ID NO: 1585281
uaaggcacacuuuauauag

SEQ ID NO: 1585283 - RNA, 19 nt, Artificial Sequence
  Description of Artificial Sequence: Synthetic oligonucleotide
  Sense strand starting at position 3533 of SEQ ID NO: 1560227
uugugugccagauaugcua

SEQ ID NO: 1585284 - RNA, 19 nt, Artificial Sequence
  Description of Artificial Sequence: Synthetic oligonucleotide
  Antisense strand to SEQ ID NO: 1585283
uagcauaucuggcacacaa

SEQ ID NO: 1585285 - RNA, 19 nt, Artificial Sequence
  Description of Artificial Sequence: Synthetic oligonucleotide
  Sense strand starting at position 3574 of SEQ ID NO: 1560227
ccagguaugccgcauaaag

SEQ ID NO: 1585286 - RNA, 19 nt, Artificial Sequence
  Description of Artificial Sequence: Synthetic oligonucleotide
  Antisense strand to SEQ ID NO: 1585285
cuuuaugcggcauaccugg

SEQ ID NO: 1585287 - RNA, 19 nt, Artificial Sequence
  Description of Artificial Sequence: Synthetic oligonucleotide
  Sense strand starting at position 3781 of SEQ ID NO: 1560227
cugggcauuguugaagaga

SEQ ID NO: 1585288 - RNA, 19 nt, Artificial Sequence
  Description of Artificial Sequence: Synthetic oligonucleotide
  Antisense strand to SEQ ID NO: 1585287
ucucuucaacaaugcccag

SEQ ID NO: 1585289 - RNA, 19 nt, Artificial Sequence
  Description of Artificial Sequence: Synthetic oligonucleotide
  Sense strand starting at position 3790 of SEQ ID NO: 1560227
guugaagagaccugaguga

SEQ ID NO: 1585290 - RNA, 19 nt, Artificial Sequence
  Description of Artificial Sequence: Synthetic oligonucleotide
  Antisense strand to SEQ ID NO: 1585289
ucacucaggucucuucaac

SEQ ID NO: 1585291 - RNA, 19 nt, Artificial Sequence
  Description of Artificial Sequence: Synthetic oligonucleotide
  Sense strand starting at position 3973 of SEQ ID NO: 1560227
gugucaaugccauauuaau

SEQ ID NO: 1585292 - RNA, 19 nt, Artificial Sequence
  Description of Artificial Sequence: Synthetic oligonucleotide
  Antisense strand to SEQ ID NO: 1585291
auuaauauggcauugacac

SEQ ID NO: 1585293 - RNA, 19 nt, Artificial Sequence
  Description of Artificial Sequence: Synthetic oligonucleotide
  Sense strand starting at position 79 of SEQ ID NO: 1560228
auccuaucugugcaucuau

SEQ ID NO: 1585294 - RNA, 19 nt, Artificial Sequence
  Description of Artificial Sequence: Synthetic oligonucleotide
  Antisense strand to SEQ ID NO: 1585293
auagaugcacagauaggau

SEQ ID NO: 1585295 - RNA, 19 nt, Artificial Sequence
  Description of Artificial Sequence: Synthetic oligonucleotide
  Sense strand starting at position 280 of SEQ ID NO: 1560228
aggcccaguuaucuugaga

SEQ ID NO: 1585296 - RNA, 19 nt, Artificial Sequence
  Description of Artificial Sequence: Synthetic oligonucleotide
  Antisense strand to SEQ ID NO: 1585295
ucucaagauaacugggccu

SEQ ID NO: 1585297 - RNA, 19 nt, Artificial Sequence
  Description of Artificial Sequence: Synthetic oligonucleotide
  Sense strand starting at position 381 of SEQ ID NO: 1560228
gcaguaucgccucaggaca

SEQ ID NO: 1585298 - RNA, 19 nt, Artificial Sequence
  Description of Artificial Sequence: Synthetic oligonucleotide
  Antisense strand to SEQ ID NO: 1585297
uguccugaggcgauacugc

SEQ ID NO: 1585299 - RNA, 19 nt, Artificial Sequence
  Description of Artificial Sequence: Synthetic oligonucleotide
  Sense strand starting at position 394 of SEQ ID NO: 1560228
aggacaugucccuaaggcu

SEQ ID NO: 1585300 - RNA, 19 nt, Artificial Sequence
  Description of Artificial Sequence: Synthetic oligonucleotide
  Antisense strand to SEQ ID NO: 1585299
agccuuagggacauguccu

SEQ ID NO: 1585301 - RNA, 19 nt, Artificial Sequence
  Description of Artificial Sequence: Synthetic oligonucleotide
  Sense strand starting at position 456 of SEQ ID NO: 1560228
caguuccucccauggagaa

SEQ ID NO: 1585302 - RNA, 19 nt, Artificial Sequence
  Description of Artificial Sequence: Synthetic oligonucleotide
  Antisense strand to SEQ ID NO: 1585301
uucuccaugggaggaacug

SEQ ID NO: 1585303 - RNA, 19 nt, Artificial Sequence
  Description of Artificial Sequence: Synthetic oligonucleotide
  Sense strand starting at position 469 of SEQ ID NO: 1560228
ggagaagguucugcacaug

SEQ ID NO: 1585304 - RNA, 19 nt, Artificial Sequence
  Description of Artificial Sequence: Synthetic oligonucleotide
  Antisense strand to SEQ ID NO: 1585303
caugugcagaaccuucucc

SEQ ID NO: 1585305 - RNA, 19 nt, Artificial Sequence
  Description of Artificial Sequence: Synthetic oligonucleotide
  Sense strand starting at position 472 of SEQ ID NO: 1560228
gaagguucugcacauggga

SEQ ID NO: 1585306 - RNA, 19 nt, Artificial Sequence
  Description of Artificial Sequence: Synthetic oligonucleotide
  Antisense strand to SEQ ID NO: 1585305
ucccaugugcagaaccuuc

SEQ ID NO: 1585307 - RNA, 19 nt, Artificial Sequence
  Description of Artificial Sequence: Synthetic oligonucleotide
  Sense strand starting at position 614 of SEQ ID NO: 1560228
uccacuuuaucuguggaca

SEQ ID NO: 1585308 - RNA, 19 nt, Artificial Sequence
  Description of Artificial Sequence: Synthetic oligonucleotide
  Antisense strand to SEQ ID NO: 1585307
uguccacagauaaagugga

SEQ ID NO: 1585309 - RNA, 19 nt, Artificial Sequence
  Description of Artificial Sequence: Synthetic oligonucleotide
  Sense strand starting at position 615 of SEQ ID NO: 1560228
ccacuuuaucuguggacac

SEQ ID NO: 1585310 - RNA, 19 nt, Artificial Sequence
  Description of Artificial Sequence: Synthetic oligonucleotide
  Antisense strand to SEQ ID NO: 1585309
guguccacagauaaagugg

SEQ ID NO: 1585311 - RNA, 19 nt, Artificial Sequence
  Description of Artificial Sequence: Synthetic oligonucleotide
  Sense strand starting at position 617 of SEQ ID NO: 1560228
acuuuaucuguggacacau

SEQ ID NO: 1585312 - RNA, 19 nt, Artificial Sequence
  Description of Artificial Sequence: Synthetic oligonucleotide
  Antisense strand to SEQ ID NO: 1585311
auguguccacagauaaagu

SEQ ID NO: 1585313 - RNA, 19 nt, Artificial Sequence
  Description of Artificial Sequence: Synthetic oligonucleotide
  Sense strand starting at position 688 of SEQ ID NO: 1560228
aggagagcggucuaaguca

SEQ ID NO: 1585314 - RNA, 19 nt, Artificial Sequence
  Description of Artificial Sequence: Synthetic oligonucleotide
  Antisense strand to SEQ ID NO: 1585313
ugacuuagaccgcucuccu

SEQ ID NO: 1585315 - RNA, 19 nt, Artificial Sequence
  Description of Artificial Sequence: Synthetic oligonucleotide
  Sense strand starting at position 1035 of SEQ ID NO: 1560228
cccgcagaggugcauuaau

SEQ ID NO: 1585316 - RNA, 19 nt, Artificial Sequence
  Description of Artificial Sequence: Synthetic oligonucleotide
  Antisense strand to SEQ ID NO: 1585315
auuaaugcaccucugcggg

SEQ ID NO: 1585317 - RNA, 19 nt, Artificial Sequence
  Description of Artificial Sequence: Synthetic oligonucleotide
  Sense strand starting at position 1043 of SEQ ID NO: 1560228
ggugcauuaaugugggaag

SEQ ID NO: 1585318 - RNA, 19 nt, Artificial Sequence
  Description of Artificial Sequence: Synthetic oligonucleotide
  Antisense strand to SEQ ID NO: 1585317
cuucccacauuaaugcacc

SEQ ID NO: 1585319 - RNA, 19 nt, Artificial Sequence
  Description of Artificial Sequence: Synthetic oligonucleotide
  Sense strand starting at position 1678 of SEQ ID NO: 1560228
ccuccaguucccuaguaag

SEQ ID NO: 1585320 - RNA, 19 nt, Artificial Sequence
  Description of Artificial Sequence: Synthetic oligonucleotide
  Antisense strand to SEQ ID NO: 1585319
cuuacuagggaacuggagg

SEQ ID NO: 1585321 - RNA, 19 nt, Artificial Sequence
  Description of Artificial Sequence: Synthetic oligonucleotide
  Sense strand starting at position 1750 of SEQ ID NO: 1560228
ccugaaucacugugagguu

SEQ ID NO: 1585322 - RNA, 19 nt, Artificial Sequence
  Description of Artificial Sequence: Synthetic oligonucleotide
  Antisense strand to SEQ ID NO: 1585321
aaccucacagugauucagg

SEQ ID NO: 1585323 - RNA, 19 nt, Artificial Sequence
  Description of Artificial Sequence: Synthetic oligonucleotide
  Sense strand starting at position 1780 of SEQ ID NO: 1560228
gguuucaguuacucggaaa

SEQ ID NO: 1585324 - RNA, 19 nt, Artificial Sequence
  Description of Artificial Sequence: Synthetic oligonucleotide
  Antisense strand to SEQ ID NO: 1585323
uuuccgaguaacugaaacc

SEQ ID NO: 1585325 - RNA, 19 nt, Artificial Sequence
  Description of Artificial Sequence: Synthetic oligonucleotide
  Sense strand starting at position 1966 of SEQ ID NO: 1560228
gacccuggcccuugauaua

SEQ ID NO: 1585326 - RNA, 19 nt, Artificial Sequence
  Description of Artificial Sequence: Synthetic oligonucleotide
  Antisense strand to SEQ ID NO: 1585325
uauaucaagggccaggguc

SEQ ID NO: 1585327 - RNA, 19 nt, Artificial Sequence
  Description of Artificial Sequence: Synthetic oligonucleotide
  Sense strand starting at position 2119 of SEQ ID NO: 1560228
uccagauggauggguagau

SEQ ID NO: 1585328 - RNA, 19 nt, Artificial Sequence
  Description of Artificial Sequence: Synthetic oligonucleotide
  Antisense strand to SEQ ID NO: 1585327
aucuacccauccaucugga

SEQ ID NO: 1585329 - RNA, 19 nt, Artificial Sequence
  Description of Artificial Sequence: Synthetic oligonucleotide
  Sense strand starting at position 2312 of SEQ ID NO: 1560228
gauggauggguaggcaaau

SEQ ID NO: 1585330 - RNA, 19 nt, Artificial Sequence
  Description of Artificial Sequence: Synthetic oligonucleotide
  Antisense strand to SEQ ID NO: 1585329
auuugccuacccauccauc

SEQ ID NO: 1585331 - RNA, 19 nt, Artificial Sequence
  Description of Artificial Sequence: Synthetic oligonucleotide
  Sense strand starting at position 2349 of SEQ ID NO: 1560228
uuagauagauaggaugaau

SEQ ID NO: 1585332 - RNA, 19 nt, Artificial Sequence
  Description of Artificial Sequence: Synthetic oligonucleotide
  Antisense strand to SEQ ID NO: 1585331
auucauccuaucuaucuaa

SEQ ID NO: 1585333 - RNA, 19 nt, Artificial Sequence
  Description of Artificial Sequence: Synthetic oligonucleotide
  Sense strand starting at position 2401 of SEQ ID NO: 1560228
aucucugucccagauaugu

SEQ ID NO: 1585334 - RNA, 19 nt, Artificial Sequence
  Description of Artificial Sequence: Synthetic oligonucleotide
  Antisense strand to SEQ ID NO: 1585333
acauaucugggacagagau

SEQ ID NO: 1585335 - RNA, 19 nt, Artificial Sequence
  Description of Artificial Sequence: Synthetic oligonucleotide
  Sense strand starting at position 2407 of SEQ ID NO: 1560228
gucccagauaugugggauc

SEQ ID NO: 1585336 - RNA, 19 nt, Artificial Sequence
  Description of Artificial Sequence: Synthetic oligonucleotide
  Antisense strand to SEQ ID NO: 1585335
gaucccacauaucugggac

SEQ ID NO: 1585337 - RNA, 19 nt, Artificial Sequence
  Description of Artificial Sequence: Synthetic oligonucleotide
  Sense strand starting at position 2409 of SEQ ID NO: 1560228
cccagauaugugggauccu

SEQ ID NO: 1585338 - RNA, 19 nt, Artificial Sequence
  Description of Artificial Sequence: Synthetic oligonucleotide
  Antisense strand to SEQ ID NO: 1585337
aggaucccacauaucuggg

SEQ ID NO: 1585339 - RNA, 19 nt, Artificial Sequence
  Description of Artificial Sequence: Synthetic oligonucleotide
  Sense strand starting at position 2425 of SEQ ID NO: 1560228
ccucauuugugacauggga

SEQ ID NO: 1585340 - RNA, 19 nt, Artificial Sequence
  Description of Artificial Sequence: Synthetic oligonucleotide
  Antisense strand to SEQ ID NO: 1585339
ucccaugucacaaaugagg

SEQ ID NO: 1585341 - RNA, 19 nt, Artificial Sequence
  Description of Artificial Sequence: Synthetic oligonucleotide
  Sense strand starting at position 2480 of SEQ ID NO: 1560228
cuacaaggccagugacuua

SEQ ID NO: 1585342 - RNA, 19 nt, Artificial Sequence
  Description of Artificial Sequence: Synthetic oligonucleotide
  Antisense strand to SEQ ID NO: 1585341
uaagucacuggccuuguag

SEQ ID NO: 1585343 - RNA, 19 nt, Artificial Sequence
  Description of Artificial Sequence: Synthetic oligonucleotide
  Sense strand starting at position 2491 of SEQ ID NO: 1560228
gugacuuacucaguaugau

SEQ ID NO: 1585344 - RNA, 19 nt, Artificial Sequence
  Description of Artificial Sequence: Synthetic oligonucleotide
  Antisense strand to SEQ ID NO: 1585343
aucauacugaguaagucac

SEQ ID NO: 1585345 - RNA, 19 nt, Artificial Sequence
  Description of Artificial Sequence: Synthetic oligonucleotide
  Sense strand starting at position 2536 of SEQ ID NO: 1560228
ggaucagagucacucucaa

SEQ ID NO: 1585346 - RNA, 19 nt, Artificial Sequence
  Description of Artificial Sequence: Synthetic oligonucleotide
  Antisense strand to SEQ ID NO: 1585345
uugagagugacucugaucc

SEQ ID NO: 1585347 - RNA, 19 nt, Artificial Sequence
  Description of Artificial Sequence: Synthetic oligonucleotide
  Sense strand starting at position 2746 of SEQ ID NO: 1560228
gcgugaaauuucuuaugcu

SEQ ID NO: 1585348 - RNA, 19 nt, Artificial Sequence
  Description of Artificial Sequence: Synthetic oligonucleotide
  Antisense strand to SEQ ID NO: 1585347
agcauaagaaauuucacgc

SEQ ID NO: 1585349 - RNA, 19 nt, Artificial Sequence
  Description of Artificial Sequence: Synthetic oligonucleotide
  Sense strand starting at position 2763 of SEQ ID NO: 1560228
cuagguuucuuucugauaa

SEQ ID NO: 1585350 - RNA, 19 nt, Artificial Sequence
  Description of Artificial Sequence: Synthetic oligonucleotide
  Antisense strand to SEQ ID NO: 1585349
uuaucagaaagaaaccuag

SEQ ID NO: 1585351 - RNA, 19 nt, Artificial Sequence
  Description of Artificial Sequence: Synthetic oligonucleotide
  Sense strand starting at position 2788 of SEQ ID NO: 1560228
agagauuaguaucucuaca

SEQ ID NO: 1585352 - RNA, 19 nt, Artificial Sequence
  Description of Artificial Sequence: Synthetic oligonucleotide
  Antisense strand to SEQ ID NO: 1585351
uguagagauacuaaucucu

SEQ ID NO: 1585353 - RNA, 19 nt, Artificial Sequence
  Description of Artificial Sequence: Synthetic oligonucleotide
  Sense strand starting at position 2790 of SEQ ID NO: 1560228
agauuaguaucucuacauu

SEQ ID NO: 1585354 - RNA, 19 nt, Artificial Sequence
  Description of Artificial Sequence: Synthetic oligonucleotide
  Antisense strand to SEQ ID NO: 1585353
aauguagagauacuaaucu

SEQ ID NO: 1585355 - RNA, 19 nt, Artificial Sequence
  Description of Artificial Sequence: Synthetic oligonucleotide
  Sense strand starting at position 2831 of SEQ ID NO: 1560228
cucuguauucuagguuaaa

SEQ ID NO: 1585356 - RNA, 19 nt, Artificial Sequence
  Description of Artificial Sequence: Synthetic oligonucleotide
  Antisense strand to SEQ ID NO: 1585355
uuuaaccuagaauacagag

SEQ ID NO: 1585357 - RNA, 19 nt, Artificial Sequence
  Description of Artificial Sequence: Synthetic oligonucleotide
  Sense strand starting at position 2832 of SEQ ID NO: 1560228
ucuguauucuagguuaaau

SEQ ID NO: 1585358 - RNA, 19 nt, Artificial Sequence
  Description of Artificial Sequence: Synthetic oligonucleotide
  Antisense strand to SEQ ID NO: 1585357
auuuaaccuagaauacaga

SEQ ID NO: 1585359 - RNA, 19 nt, Artificial Sequence
  Description of Artificial Sequence: Synthetic oligonucleotide
  Sense strand starting at position 2877 of SEQ ID NO: 1560228
ggcugauacaccuagcuga

SEQ ID NO: 1585360 - RNA, 19 nt, Artificial Sequence
  Description of Artificial Sequence: Synthetic oligonucleotide
  Antisense strand to SEQ ID NO: 1585359
ucagcuagguguaucagcc

SEQ ID NO: 1585361 - RNA, 19 nt, Artificial Sequence
  Description of Artificial Sequence: Synthetic oligonucleotide
  Sense strand starting at position 2925 of SEQ ID NO: 1560228
gagguuaauugggucaaag

SEQ ID NO: 1585362 - RNA, 19 nt, Artificial Sequence
  Description of Artificial Sequence: Synthetic oligonucleotide
  Antisense strand to SEQ ID NO: 1585361
cuuugacccaauuaaccuc

SEQ ID NO: 1585363 - RNA, 19 nt, Artificial Sequence
  Description of Artificial Sequence: Synthetic oligonucleotide
  Sense strand starting at position 2969 of SEQ ID NO: 1560228
agccuaucaggguggauua

SEQ ID NO: 1585364 - RNA, 19 nt, Artificial Sequence
  Description of Artificial Sequence: Synthetic oligonucleotide
  Antisense strand to SEQ ID NO: 1585363
uaauccacccugauaggcu

SEQ ID NO: 1585365 - RNA, 19 nt, Artificial Sequence
  Description of Artificial Sequence: Synthetic oligonucleotide
  Sense strand starting at position 2970 of SEQ ID NO: 1560228
gccuaucaggguggauuaa

SEQ ID NO: 1585366 - RNA, 19 nt, Artificial Sequence
  Description of Artificial Sequence: Synthetic oligonucleotide
  Antisense strand to SEQ ID NO: 1585365
uuaauccacccugauaggc

SEQ ID NO: 1585367 - RNA, 19 nt, Artificial Sequence
  Description of Artificial Sequence: Synthetic oligonucleotide
  Sense strand starting at position 3394 of SEQ ID NO: 1560228
uguucucauuguguaggga

SEQ ID NO: 1585368 - RNA, 19 nt, Artificial Sequence
  Description of Artificial Sequence: Synthetic oligonucleotide
  Antisense strand to SEQ ID NO: 1585367
ucccuacacaaugagaaca

SEQ ID NO: 1585369 - RNA, 19 nt, Artificial Sequence
  Description of Artificial Sequence: Synthetic oligonucleotide
  Sense strand starting at position 3397 of SEQ ID NO: 1560228
ucucauuguguagggacau

SEQ ID NO: 1585370 - RNA, 19 nt, Artificial Sequence
  Description of Artificial Sequence: Synthetic oligonucleotide
  Antisense strand to SEQ ID NO: 1585369
augucccuacacaaugaga

SEQ ID NO: 1585371 - RNA, 19 nt, Artificial Sequence
  Description of Artificial Sequence: Synthetic oligonucleotide
  Sense strand starting at position 3483 of SEQ ID NO: 1560228
cucacuuauagguguagga

SEQ ID NO: 1585372 - RNA, 19 nt, Artificial Sequence
  Description of Artificial Sequence: Synthetic oligonucleotide
  Antisense strand to SEQ ID NO: 1585371
uccuacaccuauaagugag

SEQ ID NO: 1585373 - RNA, 19 nt, Artificial Sequence
  Description of Artificial Sequence: Synthetic oligonucleotide
  Sense strand starting at position 105 of SEQ ID NO: 1560229
ugcaaucuuccaggcacau

SEQ ID NO: 1585374 - RNA, 19 nt, Artificial Sequence
  Description of Artificial Sequence: Synthetic oligonucleotide
  Antisense strand to SEQ ID NO: 1585373
augugccuggaagauugca

SEQ ID NO: 1585375 - RNA, 19 nt, Artificial Sequence
  Description of Artificial Sequence: Synthetic oligonucleotide
  Sense strand starting at position 122 of SEQ ID NO: 1560229
auaguaagccuuugaucaa

SEQ ID NO: 1585376 - RNA, 19 nt, Artificial Sequence
  Description of Artificial Sequence: Synthetic oligonucleotide
  Antisense strand to SEQ ID NO: 1585375
uugaucaaaggcuuacuau

SEQ ID NO: 1585377 - RNA, 19 nt, Artificial Sequence
  Description of Artificial Sequence: Synthetic oligonucleotide
  Sense strand starting at position 125 of SEQ ID NO: 1560229
guaagccuuugaucaauga

SEQ ID NO: 1585378 - RNA, 19 nt, Artificial Sequence
  Description of Artificial Sequence: Synthetic oligonucleotide
  Antisense strand to SEQ ID NO: 1585377
ucauugaucaaaggcuuac

SEQ ID NO: 1585379 - RNA, 19 nt, Artificial Sequence
  Description of Artificial Sequence: Synthetic oligonucleotide
  Sense strand starting at position 129 of SEQ ID NO: 1560229
gccuuugaucaaugauauc

SEQ ID NO: 1585380 - RNA, 19 nt, Artificial Sequence
  Description of Artificial Sequence: Synthetic oligonucleotide
  Antisense strand to SEQ ID NO: 1585379
gauaucauugaucaaaggc

SEQ ID NO: 1585381 - RNA, 19 nt, Artificial Sequence
  Description of Artificial Sequence: Synthetic oligonucleotide
  Sense strand starting at position 141 of SEQ ID NO: 1560229
ugauaucucucauuaccgu

SEQ ID NO: 1585382 - RNA, 19 nt, Artificial Sequence
  Description of Artificial Sequence: Synthetic oligonucleotide
  Antisense strand to SEQ ID NO: 1585381
acgguaaugagagauauca

SEQ ID NO: 1585383 - RNA, 19 nt, Artificial Sequence
  Description of Artificial Sequence: Synthetic oligonucleotide
  Sense strand starting at position 689 of SEQ ID NO: 1560229
cugaaugccucucaaguca

SEQ ID NO: 1585384 - RNA, 19 nt, Artificial Sequence
  Description of Artificial Sequence: Synthetic oligonucleotide
  Antisense strand to SEQ ID NO: 1585383
ugacuugagaggcauucag

SEQ ID NO: 1585385 - RNA, 19 nt, Artificial Sequence
  Description of Artificial Sequence: Synthetic oligonucleotide
  Sense strand starting at position 757 of SEQ ID NO: 1560229
cagaguuaauguuacuguu

SEQ ID NO: 1585386 - RNA, 19 nt, Artificial Sequence
  Description of Artificial Sequence: Synthetic oligonucleotide
  Antisense strand to SEQ ID NO: 1585385
aacaguaacauuaacucug

SEQ ID NO: 1585387 - RNA, 19 nt, Artificial Sequence
  Description of Artificial Sequence: Synthetic oligonucleotide
  Sense strand starting at position 924 of SEQ ID NO: 1560229
ucaguuuccgugccuguaa

SEQ ID NO: 1585388 - RNA, 19 nt, Artificial Sequence
  Description of Artificial Sequence: Synthetic oligonucleotide
  Antisense strand to SEQ ID NO: 1585387
uuacaggcacggaaacuga

SEQ ID NO: 1585389 - RNA, 19 nt, Artificial Sequence
  Description of Artificial Sequence: Synthetic oligonucleotide
  Sense strand starting at position 925 of SEQ ID NO: 1560229
caguuuccgugccuguaaa

SEQ ID NO: 1585390 - RNA, 19 nt, Artificial Sequence
  Description of Artificial Sequence: Synthetic oligonucleotide
  Antisense strand to SEQ ID NO: 1585389
uuuacaggcacggaaacug

SEQ ID NO: 1585391 - RNA, 19 nt, Artificial Sequence
  Description of Artificial Sequence: Synthetic oligonucleotide
  Sense strand starting at position 1146 of SEQ ID NO: 1560229
ucacaaugagugcaugaau

SEQ ID NO: 1585392 - RNA, 19 nt, Artificial Sequence
  Description of Artificial Sequence: Synthetic oligonucleotide
  Antisense strand to SEQ ID NO: 1585391
auucaugcacucauuguga

SEQ ID NO: 1585393 - RNA, 19 nt, Artificial Sequence
  Description of Artificial Sequence: Synthetic oligonucleotide
  Sense strand starting at position 1191 of SEQ ID NO: 1560229
gagagaugcccugagccua

SEQ ID NO: 1585394 - RNA, 19 nt, Artificial Sequence
  Description of Artificial Sequence: Synthetic oligonucleotide
  Antisense strand to SEQ ID NO: 1585393
uaggcucagggcaucucuc

SEQ ID NO: 1585395 - RNA, 19 nt, Artificial Sequence
  Description of Artificial Sequence: Synthetic oligonucleotide
  Sense strand starting at position 1310 of SEQ ID NO: 1560229
gcaucuaucagacgaagau

SEQ ID NO: 1585396 - RNA, 19 nt, Artificial Sequence
  Description of Artificial Sequence: Synthetic oligonucleotide
  Antisense strand to SEQ ID NO: 1585395
aucuucgucugauagaugc

SEQ ID NO: 1585397 - RNA, 19 nt, Artificial Sequence
  Description of Artificial Sequence: Synthetic oligonucleotide
  Sense strand starting at position 1436 of SEQ ID NO: 1560229
gaggguuccugauagcagu

SEQ ID NO: 1585398 - RNA, 19 nt, Artificial Sequence
  Description of Artificial Sequence: Synthetic oligonucleotide
  Antisense strand to SEQ ID NO: 1585397
acugcuaucaggaacccuc

SEQ ID NO: 1585399 - RNA, 19 nt, Artificial Sequence
  Description of Artificial Sequence: Synthetic oligonucleotide
  Sense strand starting at position 1520 of SEQ ID NO: 1560229
ggugaaaucucagggcgaa

SEQ ID NO: 1585400 - RNA, 19 nt, Artificial Sequence
  Description of Artificial Sequence: Synthetic oligonucleotide
  Antisense strand to SEQ ID NO: 1585399
uucgcccugagauuucacc

SEQ ID NO: 1585401 - RNA, 19 nt, Artificial Sequence
  Description of Artificial Sequence: Synthetic oligonucleotide
  Sense strand starting at position 1521 of SEQ ID NO: 1560229
gugaaaucucagggcgaau

SEQ ID NO: 1585402 - RNA, 19 nt, Artificial Sequence
  Description of Artificial Sequence: Synthetic oligonucleotide
  Antisense strand to SEQ ID NO: 1585401
auucgcccugagauuucac

SEQ ID NO: 1585403 - RNA, 19 nt, Artificial Sequence
  Description of Artificial Sequence: Synthetic oligonucleotide
  Sense strand starting at position 1652 of SEQ ID NO: 1560229
aaaggaugcgccuaggacu

SEQ ID NO: 1585404 - RNA, 19 nt, Artificial Sequence
  Description of Artificial Sequence: Synthetic oligonucleotide
  Antisense strand to SEQ ID NO: 1585403
aguccuaggcgcauccuuu

SEQ ID NO: 1585405 - RNA, 19 nt, Artificial Sequence
  Description of Artificial Sequence: Synthetic oligonucleotide
  Sense strand starting at position 2350 of SEQ ID NO: 1560229
cagguuugcucccaagcuu

SEQ ID NO: 1585406 - RNA, 19 nt, Artificial Sequence
  Description of Artificial Sequence: Synthetic oligonucleotide
  Antisense strand to SEQ ID NO: 1585405
aagcuugggagcaaaccug

SEQ ID NO: 1585407 - RNA, 19 nt, Artificial Sequence
  Description of Artificial Sequence: Synthetic oligonucleotide
  Sense strand starting at position 2662 of SEQ ID NO: 1560229
ggauguuguccuuggccaa

SEQ ID NO: 1585408 - RNA, 19 nt, Artificial Sequence
  Description of Artificial Sequence: Synthetic oligonucleotide
  Antisense strand to SEQ ID NO: 1585407
uuggccaaggacaacaucc

SEQ ID NO: 1585409 - RNA, 19 nt, Artificial Sequence
  Description of Artificial Sequence: Synthetic oligonucleotide
  Sense strand starting at position 2682 of SEQ ID NO: 1560229
ccgucuacuccagaugugu

SEQ ID NO: 1585410 - RNA, 19 nt, Artificial Sequence
  Description of Artificial Sequence: Synthetic oligonucleotide
  Antisense strand to SEQ ID NO: 1585409
acacaucuggaguagacgg

SEQ ID NO: 1585411 - RNA, 19 nt, Artificial Sequence
  Description of Artificial Sequence: Synthetic oligonucleotide
  Sense strand starting at position 2755 of SEQ ID NO: 1560229
ggauguguggcugaccuua

SEQ ID NO: 1585412 - RNA, 19 nt, Artificial Sequence
  Description of Artificial Sequence: Synthetic oligonucleotide
  Antisense strand to SEQ ID NO: 1585411
uaaggucagccacacaucc

SEQ ID NO: 1585413 - RNA, 19 nt, Artificial Sequence
  Description of Artificial Sequence: Synthetic oligonucleotide
  Sense strand starting at position 2824 of SEQ ID NO: 1560229
gugguaaacuuagaagacu

SEQ ID NO: 1585414 - RNA, 19 nt, Artificial Sequence
  Description of Artificial Sequence: Synthetic oligonucleotide
  Antisense strand to SEQ ID NO: 1585413
agucuucuaaguuuaccac

SEQ ID NO: 1585415 - RNA, 19 nt, Artificial Sequence
  Description of Artificial Sequence: Synthetic oligonucleotide
  Sense strand starting at position 2918 of SEQ ID NO: 1560229
gggcaugucuccuggugaa

SEQ ID NO: 1585416 - RNA, 19 nt, Artificial Sequence
  Description of Artificial Sequence: Synthetic oligonucleotide
  Antisense strand to SEQ ID NO: 1585415
uucaccaggagacaugccc

SEQ ID NO: 1585417 - RNA, 19 nt, Artificial Sequence
  Description of Artificial Sequence: Synthetic oligonucleotide
  Sense strand starting at position 2921 of SEQ ID NO: 1560229
caugucuccuggugaagaa

SEQ ID NO: 1585418 - RNA, 19 nt, Artificial Sequence
  Description of Artificial Sequence: Synthetic oligonucleotide
  Antisense strand to SEQ ID NO: 1585417
uucuucaccaggagacaug

SEQ ID NO: 1585419 - RNA, 19 nt, Artificial Sequence
  Description of Artificial Sequence: Synthetic oligonucleotide
  Sense strand starting at position 3099 of SEQ ID NO: 1560229
gagggugugacuuagcaga

SEQ ID NO: 1585420 - RNA, 19 nt, Artificial Sequence
  Description of Artificial Sequence: Synthetic oligonucleotide
  Antisense strand to SEQ ID NO: 1585419
ucugcuaagucacacccuc

SEQ ID NO: 1585421 - RNA, 19 nt, Artificial Sequence
  Description of Artificial Sequence: Synthetic oligonucleotide
  Sense strand starting at position 3101 of SEQ ID NO: 1560229
gggugugacuuagcagaug

SEQ ID NO: 1585422 - RNA, 19 nt, Artificial Sequence
  Description of Artificial Sequence: Synthetic oligonucleotide
  Antisense strand to SEQ ID NO: 1585421
caucugcuaagucacaccc

SEQ ID NO: 1585423 - RNA, 19 nt, Artificial Sequence
  Description of Artificial Sequence: Synthetic oligonucleotide
  Sense strand starting at position 3166 of SEQ ID NO: 1560229
gcaggaguugacugugaag

SEQ ID NO: 1585424 - RNA, 19 nt, Artificial Sequence
  Description of Artificial Sequence: Synthetic oligonucleotide
  Antisense strand to SEQ ID NO: 1585423
cuucacagucaacuccugc

SEQ ID NO: 1585425 - RNA, 19 nt, Artificial Sequence
  Description of Artificial Sequence: Synthetic oligonucleotide
  Sense strand starting at position 3189 of SEQ ID NO: 1560229
guuugaauggcuggaucuu

SEQ ID NO: 1585426 - RNA, 19 nt, Artificial Sequence
  Description of Artificial Sequence: Synthetic oligonucleotide
  Antisense strand to SEQ ID NO: 1585425
aagauccagccauucaaac

SEQ ID NO: 1585427 - RNA, 19 nt, Artificial Sequence
  Description of Artificial Sequence: Synthetic oligonucleotide
  Sense strand starting at position 3204 of SEQ ID NO: 1560229
ucuugaucuggugggcagu

SEQ ID NO: 1585428 - RNA, 19 nt, Artificial Sequence
  Description of Artificial Sequence: Synthetic oligonucleotide
  Antisense strand to SEQ ID NO: 1585427
acugcccaccagaucaaga

SEQ ID NO: 1585429 - RNA, 19 nt, Artificial Sequence
  Description of Artificial Sequence: Synthetic oligonucleotide
  Sense strand starting at position 3230 of SEQ ID NO: 1560229
cauggauggugcuugagua

SEQ ID NO: 1585430 - RNA, 19 nt, Artificial Sequence
  Description of Artificial Sequence: Synthetic oligonucleotide
  Antisense strand to SEQ ID NO: 1585429
uacucaagcaccauccaug

SEQ ID NO: 1585431 - RNA, 19 nt, Artificial Sequence
  Description of Artificial Sequence: Synthetic oligonucleotide
  Sense strand starting at position 3265 of SEQ ID NO: 1560229
uuaguugauuggucucacu

SEQ ID NO: 1585432 - RNA, 19 nt, Artificial Sequence
  Description of Artificial Sequence: Synthetic oligonucleotide
  Antisense strand to SEQ ID NO: 1585431
agugagaccaaucaacuaa

SEQ ID NO: 1585433 - RNA, 19 nt, Artificial Sequence
  Description of Artificial Sequence: Synthetic oligonucleotide
  Sense strand starting at position 3299 of SEQ ID NO: 1560229
gggugacuccugggcucaa

SEQ ID NO: 1585434 - RNA, 19 nt, Artificial Sequence
  Description of Artificial Sequence: Synthetic oligonucleotide
  Antisense strand to SEQ ID NO: 1585433
uugagcccaggagucaccc

SEQ ID NO: 1585435 - RNA, 19 nt, Artificial Sequence
  Description of Artificial Sequence: Synthetic oligonucleotide
  Sense strand starting at position 3615 of SEQ ID NO: 1560229
gccaguaauucuggccaag

SEQ ID NO: 1585436 - RNA, 19 nt, Artificial Sequence
  Description of Artificial Sequence: Synthetic oligonucleotide
  Antisense strand to SEQ ID NO: 1585435
cuuggccagaauuacuggc

SEQ ID NO: 1585437 - RNA, 19 nt, Artificial Sequence
  Description of Artificial Sequence: Synthetic oligonucleotide
  Sense strand starting at position 3849 of SEQ ID NO: 1560229
uggcuucucugcucucaaa

SEQ ID NO: 1585438 - RNA, 19 nt, Artificial Sequence
  Description of Artificial Sequence: Synthetic oligonucleotide
  Antisense strand to SEQ ID NO: 1585437
uuugagagcagagaagcca

SEQ ID NO: 1585439 - RNA, 19 nt, Artificial Sequence
  Description of Artificial Sequence: Synthetic oligonucleotide
  Sense strand starting at position 3915 of SEQ ID NO: 1560229
aagagugggcuucguggau

SEQ ID NO: 1585440 - RNA, 19 nt, Artificial Sequence
  Description of Artificial Sequence: Synthetic oligonucleotide
  Antisense strand to SEQ ID NO: 1585439
auccacgaagcccacucuu

SEQ ID NO: 1585441 - RNA, 19 nt, Artificial Sequence
  Description of Artificial Sequence: Synthetic oligonucleotide
  Sense strand starting at position 375 of SEQ ID NO: 1560230
aggacaugucccuaaggcu

SEQ ID NO: 1585442 - RNA, 19 nt, Artificial Sequence
  Description of Artificial Sequence: Synthetic oligonucleotide
  Antisense strand to SEQ ID NO: 1585441
agccuuagggacauguccu

SEQ ID NO: 1585443 - RNA, 19 nt, Artificial Sequence
  Description of Artificial Sequence: Synthetic oligonucleotide
  Sense strand starting at position 461 of SEQ ID NO: 1560230
ggagaagguucugcacaca

SEQ ID NO: 1585444 - RNA, 19 nt, Artificial Sequence
  Description of Artificial Sequence: Synthetic oligonucleotide
  Antisense strand to SEQ ID NO: 1585443
ugugugcagaaccuucucc

SEQ ID NO: 1585445 - RNA, 19 nt, Artificial Sequence
  Description of Artificial Sequence: Synthetic oligonucleotide
  Sense strand starting at position 1028 of SEQ ID NO: 1560230
cccgcagaggugcauuaau

SEQ ID NO: 1585446 - RNA, 19 nt, Artificial Sequence
  Description of Artificial Sequence: Synthetic oligonucleotide
  Antisense strand to SEQ ID NO: 1585445
auuaaugcaccucugcggg

SEQ ID NO: 1585447 - RNA, 19 nt, Artificial Sequence
  Description of Artificial Sequence: Synthetic oligonucleotide
  Sense strand starting at position 1036 of SEQ ID NO: 1560230
ggugcauuaauguggaaag

SEQ ID NO: 1585448 - RNA, 19 nt, Artificial Sequence
  Description of Artificial Sequence: Synthetic oligonucleotide
  Antisense strand to SEQ ID NO: 1585447
cuuuccacauuaaugcacc

SEQ ID NO: 1585449 - RNA, 19 nt, Artificial Sequence
  Description of Artificial Sequence: Synthetic oligonucleotide
  Sense strand starting at position 1569 of SEQ ID NO: 1560230
acgggcagugcuggagaua

SEQ ID NO: 1585450 - RNA, 19 nt, Artificial Sequence
  Description of Artificial Sequence: Synthetic oligonucleotide
  Antisense strand to SEQ ID NO: 1585449
uaucuccagcacugcccgu

SEQ ID NO: 1585451 - RNA, 19 nt, Artificial Sequence
  Description of Artificial Sequence: Synthetic oligonucleotide
  Sense strand starting at position 1572 of SEQ ID NO: 1560230
ggcagugcuggagauagaa

SEQ ID NO: 1585452 - RNA, 19 nt, Artificial Sequence
  Description of Artificial Sequence: Synthetic oligonucleotide
  Antisense strand to SEQ ID NO: 1585451
uucuaucuccagcacugcc

SEQ ID NO: 1585453 - RNA, 19 nt, Artificial Sequence
  Description of Artificial Sequence: Synthetic oligonucleotide
  Sense strand starting at position 1585 of SEQ ID NO: 1560230
auagaacaguaagaguaaa

SEQ ID NO: 1585454 - RNA, 19 nt, Artificial Sequence
  Description of Artificial Sequence: Synthetic oligonucleotide
  Antisense strand to SEQ ID NO: 1585453
uuuacucuuacuguucuau

SEQ ID NO: 1585455 - RNA, 19 nt, Artificial Sequence
  Description of Artificial Sequence: Synthetic oligonucleotide
  Sense strand starting at position 1684 of SEQ ID NO: 1560230
ccgguaagcacuuagauug

SEQ ID NO: 1585456 - RNA, 19 nt, Artificial Sequence
  Description of Artificial Sequence: Synthetic oligonucleotide
  Antisense strand to SEQ ID NO: 1585455
caaucuaagugcuuaccgg

SEQ ID NO: 1585457 - RNA, 19 nt, Artificial Sequence
  Description of Artificial Sequence: Synthetic oligonucleotide
  Sense strand starting at position 2246 of SEQ ID NO: 1560230
uagaguuuccacuguguga

SEQ ID NO: 1585458 - RNA, 19 nt, Artificial Sequence
  Description of Artificial Sequence: Synthetic oligonucleotide
  Antisense strand to SEQ ID NO: 1585457
ucacacaguggaaacucua

SEQ ID NO: 1585459 - RNA, 19 nt, Artificial Sequence
  Description of Artificial Sequence: Synthetic oligonucleotide
  Sense strand starting at position 2248 of SEQ ID NO: 1560230
gaguuuccacugugugaca

SEQ ID NO: 1585460 - RNA, 19 nt, Artificial Sequence
  Description of Artificial Sequence: Synthetic oligonucleotide
  Antisense strand to SEQ ID NO: 1585459
ugucacacaguggaaacuc

SEQ ID NO: 1585461 - RNA, 19 nt, Artificial Sequence
  Description of Artificial Sequence: Synthetic oligonucleotide
  Sense strand starting at position 2354 of SEQ ID NO: 1560230
agccuuguuccagaucauc

SEQ ID NO: 1585462 - RNA, 19 nt, Artificial Sequence
  Description of Artificial Sequence: Synthetic oligonucleotide
  Antisense strand to SEQ ID NO: 1585461
gaugaucuggaacaaggcu

SEQ ID NO: 1585463 - RNA, 19 nt, Artificial Sequence
  Description of Artificial Sequence: Synthetic oligonucleotide
  Sense strand starting at position 2415 of SEQ ID NO: 1560230
accacuucuggaugcugaa

SEQ ID NO: 1585464 - RNA, 19 nt, Artificial Sequence
  Description of Artificial Sequence: Synthetic oligonucleotide
  Antisense strand to SEQ ID NO: 1585463
uucagcauccagaaguggu

SEQ ID NO: 1585465 - RNA, 19 nt, Artificial Sequence
  Description of Artificial Sequence: Synthetic oligonucleotide
  Sense strand starting at position 2565 of SEQ ID NO: 1560230
gaggauuaccugggucaga

SEQ ID NO: 1585466 - RNA, 19 nt, Artificial Sequence
  Description of Artificial Sequence: Synthetic oligonucleotide
  Antisense strand to SEQ ID NO: 1585465
ucugacccagguaauccuc

SEQ ID NO: 1585467 - RNA, 19 nt, Artificial Sequence
  Description of Artificial Sequence: Synthetic oligonucleotide
  Sense strand starting at position 2566 of SEQ ID NO: 1560230
aggauuaccugggucagau

SEQ ID NO: 1585468 - RNA, 19 nt, Artificial Sequence
  Description of Artificial Sequence: Synthetic oligonucleotide
  Antisense strand to SEQ ID NO: 1585467
aucugacccagguaauccu

SEQ ID NO: 1585469 - RNA, 19 nt, Artificial Sequence
  Description of Artificial Sequence: Synthetic oligonucleotide
  Sense strand starting at position 2802 of SEQ ID NO: 1560230
ugggaaaugggauguucga

SEQ ID NO: 1585470 - RNA, 19 nt, Artificial Sequence
  Description of Artificial Sequence: Synthetic oligonucleotide
  Antisense strand to SEQ ID NO: 1585469
ucgaacaucccauuuccca

SEQ ID NO: 1585471 - RNA, 19 nt, Artificial Sequence
  Description of Artificial Sequence: Synthetic oligonucleotide
  Sense strand starting at position 2965 of SEQ ID NO: 1560230
gugugccaauacucuaaau

SEQ ID NO: 1585472 - RNA, 19 nt, Artificial Sequence
  Description of Artificial Sequence: Synthetic oligonucleotide
  Antisense strand to SEQ ID NO: 1585471
auuuagaguauuggcacac

SEQ ID NO: 1585473 - RNA, 19 nt, Artificial Sequence
  Description of Artificial Sequence: Synthetic oligonucleotide
  Sense strand starting at position 2967 of SEQ ID NO: 1560230
gugccaauacucuaaauga

SEQ ID NO: 1585474 - RNA, 19 nt, Artificial Sequence
  Description of Artificial Sequence: Synthetic oligonucleotide
  Antisense strand to SEQ ID NO: 1585473
ucauuuagaguauuggcac

SEQ ID NO: 1585475 - RNA, 19 nt, Artificial Sequence
  Description of Artificial Sequence: Synthetic oligonucleotide
  Sense strand starting at position 3033 of SEQ ID NO: 1560230
aagugcuuuccauaaagug

SEQ ID NO: 1585476 - RNA, 19 nt, Artificial Sequence
  Description of Artificial Sequence: Synthetic oligonucleotide
  Antisense strand to SEQ ID NO: 1585475
cacuuuauggaaagcacuu

SEQ ID NO: 1585477 - RNA, 19 nt, Artificial Sequence
  Description of Artificial Sequence: Synthetic oligonucleotide
  Sense strand starting at position 3065 of SEQ ID NO: 1560230
ccaggugcucuacauuaac

SEQ ID NO: 1585478 - RNA, 19 nt, Artificial Sequence
  Description of Artificial Sequence: Synthetic oligonucleotide
  Antisense strand to SEQ ID NO: 1585477
guuaauguagagcaccugg

SEQ ID NO: 1585479 - RNA, 19 nt, Artificial Sequence
  Description of Artificial Sequence: Synthetic oligonucleotide
  Sense strand starting at position 3143 of SEQ ID NO: 1560230
cauagugagugccuauuga

SEQ ID NO: 1585480 - RNA, 19 nt, Artificial Sequence
  Description of Artificial Sequence: Synthetic oligonucleotide
  Antisense strand to SEQ ID NO: 1585479
ucaauaggcacucacuaug

SEQ ID NO: 1585481 - RNA, 19 nt, Artificial Sequence
  Description of Artificial Sequence: Synthetic oligonucleotide
  Sense strand starting at position 3199 of SEQ ID NO: 1560230
ccaguugcugucuacauaa

SEQ ID NO: 1585482 - RNA, 19 nt, Artificial Sequence
  Description of Artificial Sequence: Synthetic oligonucleotide
  Antisense strand to SEQ ID NO: 1585481
uuauguagacagcaacugg

SEQ ID NO: 1585483 - RNA, 19 nt, Artificial Sequence
  Description of Artificial Sequence: Synthetic oligonucleotide
  Sense strand starting at position 3201 of SEQ ID NO: 1560230
aguugcugucuacauaaca

SEQ ID NO: 1585484 - RNA, 19 nt, Artificial Sequence
  Description of Artificial Sequence: Synthetic oligonucleotide
  Antisense strand to SEQ ID NO: 1585483
uguuauguagacagcaacu

SEQ ID NO: 1585485 - RNA, 19 nt, Artificial Sequence
  Description of Artificial Sequence: Synthetic oligonucleotide
  Sense strand starting at position 3233 of SEQ ID NO: 1560230
ugccaagugcucuacauaa

SEQ ID NO: 1585486 - RNA, 19 nt, Artificial Sequence
  Description of Artificial Sequence: Synthetic oligonucleotide
  Antisense strand to SEQ ID NO: 1585485
uuauguagagcacuuggca

SEQ ID NO: 1585487 - RNA, 19 nt, Artificial Sequence
  Description of Artificial Sequence: Synthetic oligonucleotide
  Sense strand starting at position 3276 of SEQ ID NO: 1560230
ucuauauggugacuuccua

SEQ ID NO: 1585488 - RNA, 19 nt, Artificial Sequence
  Description of Artificial Sequence: Synthetic oligonucleotide
  Antisense strand to SEQ ID NO: 1585487
uaggaagucaccauauaga

SEQ ID NO: 1585489 - RNA, 19 nt, Artificial Sequence
  Description of Artificial Sequence: Synthetic oligonucleotide
  Sense strand starting at position 3291 of SEQ ID NO: 1560230
ccuacugaguguuuccuga

SEQ ID NO: 1585490 - RNA, 19 nt, Artificial Sequence
  Description of Artificial Sequence: Synthetic oligonucleotide
  Antisense strand to SEQ ID NO: 1585489
ucaggaaacacucaguagg

SEQ ID NO: 1585491 - RNA, 19 nt, Artificial Sequence
  Description of Artificial Sequence: Synthetic oligonucleotide
  Sense strand starting at position 3293 of SEQ ID NO: 1560230
uacugaguguuuccugauc

SEQ ID NO: 1585492 - RNA, 19 nt, Artificial Sequence
  Description of Artificial Sequence: Synthetic oligonucleotide
  Antisense strand to SEQ ID NO: 1585491
gaucaggaaacacucagua

SEQ ID NO: 1585493 - RNA, 19 nt, Artificial Sequence
  Description of Artificial Sequence: Synthetic oligonucleotide
  Sense strand starting at position 3298 of SEQ ID NO: 1560230
aguguuuccugaucuacau

SEQ ID NO: 1585494 - RNA, 19 nt, Artificial Sequence
  Description of Artificial Sequence: Synthetic oligonucleotide
  Antisense strand to SEQ ID NO: 1585493
auguagaucaggaaacacu

SEQ ID NO: 1585495 - RNA, 19 nt, Artificial Sequence
  Description of Artificial Sequence: Synthetic oligonucleotide
  Sense strand starting at position 3331 of SEQ ID NO: 1560230
gagugcugccugcucgagu

SEQ ID NO: 1585496 - RNA, 19 nt, Artificial Sequence
  Description of Artificial Sequence: Synthetic oligonucleotide
  Antisense strand to SEQ ID NO: 1585495
acucgagcaggcagcacuc

SEQ ID NO: 1585497 - RNA, 19 nt, Artificial Sequence
  Description of Artificial Sequence: Synthetic oligonucleotide
  Sense strand starting at position 3351 of SEQ ID NO: 1560230
uugccugugcuccauaaag

SEQ ID NO: 1585498 - RNA, 19 nt, Artificial Sequence
  Description of Artificial Sequence: Synthetic oligonucleotide
  Antisense strand to SEQ ID NO: 1585497
cuuuauggagcacaggcaa

SEQ ID NO: 1585499 - RNA, 19 nt, Artificial Sequence
  Description of Artificial Sequence: Synthetic oligonucleotide
  Sense strand starting at position 3383 of SEQ ID NO: 1560230
ggcugccuucuguacauaa

SEQ ID NO: 1585500 - RNA, 19 nt, Artificial Sequence
  Description of Artificial Sequence: Synthetic oligonucleotide
  Antisense strand to SEQ ID NO: 1585499
uuauguacagaaggcagcc

SEQ ID NO: 1585501 - RNA, 19 nt, Artificial Sequence
  Description of Artificial Sequence: Synthetic oligonucleotide
  Sense strand starting at position 3421 of SEQ ID NO: 1560230
gcuugcucuacaugaagag

SEQ ID NO: 1585502 - RNA, 19 nt, Artificial Sequence
  Description of Artificial Sequence: Synthetic oligonucleotide
  Antisense strand to SEQ ID NO: 1585501
cucuucauguagagcaagc

SEQ ID NO: 1585503 - RNA, 19 nt, Artificial Sequence
  Description of Artificial Sequence: Synthetic oligonucleotide
  Sense strand starting at position 3828 of SEQ ID NO: 1560230
ugccacuugcucuagauaa

SEQ ID NO: 1585504 - RNA, 19 nt, Artificial Sequence
  Description of Artificial Sequence: Synthetic oligonucleotide
  Antisense strand to SEQ ID NO: 1585503
uuaucuagagcaaguggca

SEQ ID NO: 1585505 - RNA, 19 nt, Artificial Sequence
  Description of Artificial Sequence: Synthetic oligonucleotide
  Sense strand starting at position 3830 of SEQ ID NO: 1560230
ccacuugcucuagauaaag

SEQ ID NO: 1585506 - RNA, 19 nt, Artificial Sequence
  Description of Artificial Sequence: Synthetic oligonucleotide
  Antisense strand to SEQ ID NO: 1585505
cuuuaucuagagcaagugg

SEQ ID NO: 1585507 - RNA, 19 nt, Artificial Sequence
  Description of Artificial Sequence: Synthetic oligonucleotide
  Sense strand starting at position 3872 of SEQ ID NO: 1560230
cuauauaaagaguguuuac

SEQ ID NO: 1585508 - RNA, 19 nt, Artificial Sequence
  Description of Artificial Sequence: Synthetic oligonucleotide
  Antisense strand to SEQ ID NO: 1585507
guaaacacucuuuauauag

SEQ ID NO: 1585509 - RNA, 19 nt, Artificial Sequence
  Description of Artificial Sequence: Synthetic oligonucleotide
  Sense strand starting at position 3875 of SEQ ID NO: 1560230
uauaaagaguguuuacuga

SEQ ID NO: 1585510 - RNA, 19 nt, Artificial Sequence
  Description of Artificial Sequence: Synthetic oligonucleotide
  Antisense strand to SEQ ID NO: 1585509
ucaguaaacacucuuuaua

SEQ ID NO: 1585511 - RNA, 19 nt, Artificial Sequence
  Description of Artificial Sequence: Synthetic oligonucleotide
  Sense strand starting at position 3882 of SEQ ID NO: 1560230
aguguuuacugaguaucau

SEQ ID NO: 1585512 - RNA, 19 nt, Artificial Sequence
  Description of Artificial Sequence: Synthetic oligonucleotide
  Antisense strand to SEQ ID NO: 1585511
augauacucaguaaacacu

SEQ ID NO: 1585513 - RNA, 19 nt, Artificial Sequence
  Description of Artificial Sequence: Synthetic oligonucleotide
  Sense strand starting at position 3883 of SEQ ID NO: 1560230
guguuuacugaguaucauc

SEQ ID NO: 1585514 - RNA, 19 nt, Artificial Sequence
  Description of Artificial Sequence: Synthetic oligonucleotide
  Antisense strand to SEQ ID NO: 1585513
gaugauacucaguaaacac

SEQ ID NO: 1585515 - RNA, 19 nt, Artificial Sequence
  Description of Artificial Sequence: Synthetic oligonucleotide
  Sense strand starting at position 3893 of SEQ ID NO: 1560230
aguaucaucugcuccugau

SEQ ID NO: 1585516 - RNA, 19 nt, Artificial Sequence
  Description of Artificial Sequence: Synthetic oligonucleotide
  Antisense strand to SEQ ID NO: 1585515
aucaggagcagaugauacu

SEQ ID NO: 1585517 - RNA, 19 nt, Artificial Sequence
  Description of Artificial Sequence: Synthetic oligonucleotide
  Sense strand starting at position 3897 of SEQ ID NO: 1560230
ucaucugcuccugauaaag

SEQ ID NO: 1585518 - RNA, 19 nt, Artificial Sequence
  Description of Artificial Sequence: Synthetic oligonucleotide
  Antisense strand to SEQ ID NO: 1585517
cuuuaucaggagcagauga

SEQ ID NO: 1585519 - RNA, 19 nt, Artificial Sequence
  Description of Artificial Sequence: Synthetic oligonucleotide
  Sense strand starting at position 3909 of SEQ ID NO: 1560230
gauaaagagugccuacuca

SEQ ID NO: 1585520 - RNA, 19 nt, Artificial Sequence
  Description of Artificial Sequence: Synthetic oligonucleotide
  Antisense strand to SEQ ID NO: 1585519
ugaguaggcacucuuuauc

SEQ ID NO: 1585521 - RNA, 19 nt, Artificial Sequence
  Description of Artificial Sequence: Synthetic oligonucleotide
  Sense strand starting at position 189 of SEQ ID NO: 1560231
gguggaacuuccuuucuca

SEQ ID NO: 1585522 - RNA, 19 nt, Artificial Sequence
  Description of Artificial Sequence: Synthetic oligonucleotide
  Antisense strand to SEQ ID NO: 1585521
ugagaaaggaaguuccacc

SEQ ID NO: 1585523 - RNA, 19 nt, Artificial Sequence
  Description of Artificial Sequence: Synthetic oligonucleotide
  Sense strand starting at position 237 of SEQ ID NO: 1560231
aacugucugucaggaagaa

SEQ ID NO: 1585524 - RNA, 19 nt, Artificial Sequence
  Description of Artificial Sequence: Synthetic oligonucleotide
  Antisense strand to SEQ ID NO: 1585523
uucuuccugacagacaguu

SEQ ID NO: 1585525 - RNA, 19 nt, Artificial Sequence
  Description of Artificial Sequence: Synthetic oligonucleotide
  Sense strand starting at position 352 of SEQ ID NO: 1560231
ccugccauuugccaaagaa

SEQ ID NO: 1585526 - RNA, 19 nt, Artificial Sequence
  Description of Artificial Sequence: Synthetic oligonucleotide
  Antisense strand to SEQ ID NO: 1585525
uucuuuggcaaauggcagg

SEQ ID NO: 1585527 - RNA, 19 nt, Artificial Sequence
  Description of Artificial Sequence: Synthetic oligonucleotide
  Sense strand starting at position 367 of SEQ ID NO: 1560231
agaacagacugaugccaaa

SEQ ID NO: 1585528 - RNA, 19 nt, Artificial Sequence
  Description of Artificial Sequence: Synthetic oligonucleotide
  Antisense strand to SEQ ID NO: 1585527
uuuggcaucagucuguucu

SEQ ID NO: 1585529 - RNA, 19 nt, Artificial Sequence
  Description of Artificial Sequence: Synthetic oligonucleotide
  Sense strand starting at position 433 of SEQ ID NO: 1560231
ggucaaagguaacuuuaaa

SEQ ID NO: 1585530 - RNA, 19 nt, Artificial Sequence
  Description of Artificial Sequence: Synthetic oligonucleotide
  Antisense strand to SEQ ID NO: 1585529
uuuaaaguuaccuuugacc

SEQ ID NO: 1585531 - RNA, 19 nt, Artificial Sequence
  Description of Artificial Sequence: Synthetic oligonucleotide
  Sense strand starting at position 605 of SEQ ID NO: 1560231
guguauagcuacuuccuau

SEQ ID NO: 1585532 - RNA, 19 nt, Artificial Sequence
  Description of Artificial Sequence: Synthetic oligonucleotide
  Antisense strand to SEQ ID NO: 1585531
auaggaaguagcuauacac

SEQ ID NO: 1585533 - RNA, 19 nt, Artificial Sequence
  Description of Artificial Sequence: Synthetic oligonucleotide
  Sense strand starting at position 609 of SEQ ID NO: 1560231
auagcuacuuccuauggga

SEQ ID NO: 1585534 - RNA, 19 nt, Artificial Sequence
  Description of Artificial Sequence: Synthetic oligonucleotide
  Antisense strand to SEQ ID NO: 1585533
ucccauaggaaguagcuau

SEQ ID NO: 1585535 - RNA, 19 nt, Artificial Sequence
  Description of Artificial Sequence: Synthetic oligonucleotide
  Sense strand starting at position 611 of SEQ ID NO: 1560231
agcuacuuccuaugggaaa

SEQ ID NO: 1585536 - RNA, 19 nt, Artificial Sequence
  Description of Artificial Sequence: Synthetic oligonucleotide
  Antisense strand to SEQ ID NO: 1585535
uuucccauaggaaguagcu

SEQ ID NO: 1585537 - RNA, 19 nt, Artificial Sequence
  Description of Artificial Sequence: Synthetic oligonucleotide
  Sense strand starting at position 728 of SEQ ID NO: 1560231
uguggaaauaauggugaau

SEQ ID NO: 1585538 - RNA, 19 nt, Artificial Sequence
  Description of Artificial Sequence: Synthetic oligonucleotide
  Antisense strand to SEQ ID NO: 1585537
auucaccauuauuuccaca

SEQ ID NO: 1585539 - RNA, 19 nt, Artificial Sequence
  Description of Artificial Sequence: Synthetic oligonucleotide
  Sense strand starting at position 730 of SEQ ID NO: 1560231
uggaaauaauggugaauac

SEQ ID NO: 1585540 - RNA, 19 nt, Artificial Sequence
  Description of Artificial Sequence: Synthetic oligonucleotide
  Antisense strand to SEQ ID NO: 1585539
guauucaccauuauuucca

SEQ ID NO: 1585541 - RNA, 19 nt, Artificial Sequence
  Description of Artificial Sequence: Synthetic oligonucleotide
  Sense strand starting at position 864 of SEQ ID NO: 1560231
augagaaaggcuuggcaug

SEQ ID NO: 1585542 - RNA, 19 nt, Artificial Sequence
  Description of Artificial Sequence: Synthetic oligonucleotide
  Antisense strand to SEQ ID NO: 1585541
caugccaagccuuucucau

SEQ ID NO: 1585543 - RNA, 19 nt, Artificial Sequence
  Description of Artificial Sequence: Synthetic oligonucleotide
  Sense strand starting at position 869 of SEQ ID NO: 1560231
aaaggcuuggcauggcaaa

SEQ ID NO: 1585544 - RNA, 19 nt, Artificial Sequence
  Description of Artificial Sequence: Synthetic oligonucleotide
  Antisense strand to SEQ ID NO: 1585543
uuugccaugccaagccuuu

SEQ ID NO: 1585545 - RNA, 19 nt, Artificial Sequence
  Description of Artificial Sequence: Synthetic oligonucleotide
  Sense strand starting at position 1109 of SEQ ID NO: 1560231
aggaaugagugaggagaau

SEQ ID NO: 1585546 - RNA, 19 nt, Artificial Sequence
  Description of Artificial Sequence: Synthetic oligonucleotide
  Antisense strand to SEQ ID NO: 1585545
auucuccucacucauuccu

SEQ ID NO: 1585547 - RNA, 19 nt, Artificial Sequence
  Description of Artificial Sequence: Synthetic oligonucleotide
  Sense strand starting at position 1169 of SEQ ID NO: 1560231
agugagugcgcagaggaau

SEQ ID NO: 1585548 - RNA, 19 nt, Artificial Sequence
  Description of Artificial Sequence: Synthetic oligonucleotide
  Antisense strand to SEQ ID NO: 1585547
auuccucugcgcacucacu

SEQ ID NO: 1585549 - RNA, 19 nt, Artificial Sequence
  Description of Artificial Sequence: Synthetic oligonucleotide
  Sense strand starting at position 1206 of SEQ ID NO: 1560231
augagugagugaggagaau

SEQ ID NO: 1585550 - RNA, 19 nt, Artificial Sequence
  Description of Artificial Sequence: Synthetic oligonucleotide
  Antisense strand to SEQ ID NO: 1585549
auucuccucacucacucau

SEQ ID NO: 1585551 - RNA, 19 nt, Artificial Sequence
  Description of Artificial Sequence: Synthetic oligonucleotide
  Sense strand starting at position 1301 of SEQ ID NO: 1560231
gagugaguuucucugccgu

SEQ ID NO: 1585552 - RNA, 19 nt, Artificial Sequence
  Description of Artificial Sequence: Synthetic oligonucleotide
  Antisense strand to SEQ ID NO: 1585551
acggcagagaaacucacuc

SEQ ID NO: 1585553 - RNA, 19 nt, Artificial Sequence
  Description of Artificial Sequence: Synthetic oligonucleotide
  Sense strand starting at position 1631 of SEQ ID NO: 1560231
gguccugaggccuaggaaa

SEQ ID NO: 1585554 - RNA, 19 nt, Artificial Sequence
  Description of Artificial Sequence: Synthetic oligonucleotide
  Antisense strand to SEQ ID NO: 1585553
uuuccuaggccucaggacc

SEQ ID NO: 1585555 - RNA, 19 nt, Artificial Sequence
  Description of Artificial Sequence: Synthetic oligonucleotide
  Sense strand starting at position 2322 of SEQ ID NO: 1560231
ggccaagccuucucccaaa

SEQ ID NO: 1585556 - RNA, 19 nt, Artificial Sequence
  Description of Artificial Sequence: Synthetic oligonucleotide
  Antisense strand to SEQ ID NO: 1585555
uuugggagaaggcuuggcc

SEQ ID NO: 1585557 - RNA, 19 nt, Artificial Sequence
  Description of Artificial Sequence: Synthetic oligonucleotide
  Sense strand starting at position 2362 of SEQ ID NO: 1560231
aaaugugggccaggagaau

SEQ ID NO: 1585558 - RNA, 19 nt, Artificial Sequence
  Description of Artificial Sequence: Synthetic oligonucleotide
  Antisense strand to SEQ ID NO: 1585557
auucuccuggcccacauuu

SEQ ID NO: 1585559 - RNA, 19 nt, Artificial Sequence
  Description of Artificial Sequence: Synthetic oligonucleotide
  Sense strand starting at position 2373 of SEQ ID NO: 1560231
aggagaaugcugugcacca

SEQ ID NO: 1585560 - RNA, 19 nt, Artificial Sequence
  Description of Artificial Sequence: Synthetic oligonucleotide
  Antisense strand to SEQ ID NO: 1585559
uggugcacagcauucuccu

SEQ ID NO: 1585561 - RNA, 19 nt, Artificial Sequence
  Description of Artificial Sequence: Synthetic oligonucleotide
  Sense strand starting at position 2374 of SEQ ID NO: 1560231
ggagaaugcugugcaccau

SEQ ID NO: 1585562 - RNA, 19 nt, Artificial Sequence
  Description of Artificial Sequence: Synthetic oligonucleotide
  Antisense strand to SEQ ID NO: 1585561
auggugcacagcauucucc

SEQ ID NO: 1585563 - RNA, 19 nt, Artificial Sequence
  Description of Artificial Sequence: Synthetic oligonucleotide
  Sense strand starting at position 2375 of SEQ ID NO: 1560231
gagaaugcugugcaccauu

SEQ ID NO: 1585564 - RNA, 19 nt, Artificial Sequence
  Description of Artificial Sequence: Synthetic oligonucleotide
  Antisense strand to SEQ ID NO: 1585563
aauggugcacagcauucuc

SEQ ID NO: 1585565 - RNA, 19 nt, Artificial Sequence
  Description of Artificial Sequence: Synthetic oligonucleotide
  Sense strand starting at position 2398 of SEQ ID NO: 1560231
agugcagauuuaggagauu

SEQ ID NO: 1585566 - RNA, 19 nt, Artificial Sequence
  Description of Artificial Sequence: Synthetic oligonucleotide
  Antisense strand to SEQ ID NO: 1585565
aaucuccuaaaucugcacu

SEQ ID NO: 1585567 - RNA, 19 nt, Artificial Sequence
  Description of Artificial Sequence: Synthetic oligonucleotide
  Sense strand starting at position 2543 of SEQ ID NO: 1560231
gggauuacccagggucaga

SEQ ID NO: 1585568 - RNA, 19 nt, Artificial Sequence
  Description of Artificial Sequence: Synthetic oligonucleotide
  Antisense strand to SEQ ID NO: 1585567
ucugacccuggguaauccc

SEQ ID NO: 1585569 - RNA, 19 nt, Artificial Sequence
  Description of Artificial Sequence: Synthetic oligonucleotide
  Sense strand starting at position 2553 of SEQ ID NO: 1560231
agggucagauucuggagau

SEQ ID NO: 1585570 - RNA, 19 nt, Artificial Sequence
  Description of Artificial Sequence: Synthetic oligonucleotide
  Antisense strand to SEQ ID NO: 1585569
aucuccagaaucugacccu

SEQ ID NO: 1585571 - RNA, 19 nt, Artificial Sequence
  Description of Artificial Sequence: Synthetic oligonucleotide
  Sense strand starting at position 2554 of SEQ ID NO: 1560231
gggucagauucuggagaua

SEQ ID NO: 1585572 - RNA, 19 nt, Artificial Sequence
  Description of Artificial Sequence: Synthetic oligonucleotide
  Antisense strand to SEQ ID NO: 1585571
uaucuccagaaucugaccc

SEQ ID NO: 1585573 - RNA, 19 nt, Artificial Sequence
  Description of Artificial Sequence: Synthetic oligonucleotide
  Sense strand starting at position 3046 of SEQ ID NO: 1560231
cccaaauugcugugagcuc

SEQ ID NO: 1585574 - RNA, 19 nt, Artificial Sequence
  Description of Artificial Sequence: Synthetic oligonucleotide
  Antisense strand to SEQ ID NO: 1585573
gagcucacagcaauuuggg

SEQ ID NO: 1585575 - RNA, 19 nt, Artificial Sequence
  Description of Artificial Sequence: Synthetic oligonucleotide
  Sense strand starting at position 3182 of SEQ ID NO: 1560231
gcacuuuaacuguaaggcu

SEQ ID NO: 1585576 - RNA, 19 nt, Artificial Sequence
  Description of Artificial Sequence: Synthetic oligonucleotide
  Antisense strand to SEQ ID NO: 1585575
agccuuacaguuaaagugc

SEQ ID NO: 1585577 - RNA, 19 nt, Artificial Sequence
  Description of Artificial Sequence: Synthetic oligonucleotide
  Sense strand starting at position 3196 of SEQ ID NO: 1560231
aggcucaguuacucaaagu

SEQ ID NO: 1585578 - RNA, 19 nt, Artificial Sequence
  Description of Artificial Sequence: Synthetic oligonucleotide
  Antisense strand to SEQ ID NO: 1585577
acuuugaguaacugagccu

SEQ ID NO: 1585579 - RNA, 19 nt, Artificial Sequence
  Description of Artificial Sequence: Synthetic oligonucleotide
  Sense strand starting at position 3197 of SEQ ID NO: 1560231
ggcucaguuacucaaagug

SEQ ID NO: 1585580 - RNA, 19 nt, Artificial Sequence
  Description of Artificial Sequence: Synthetic oligonucleotide
  Antisense strand to SEQ ID NO: 1585579
cacuuugaguaacugagcc

SEQ ID NO: 1585581 - RNA, 19 nt, Artificial Sequence
  Description of Artificial Sequence: Synthetic oligonucleotide
  Sense strand starting at position 3233 of SEQ ID NO: 1560231
ccaugagcauuaccugaga

SEQ ID NO: 1585582 - RNA, 19 nt, Artificial Sequence
  Description of Artificial Sequence: Synthetic oligonucleotide
  Antisense strand to SEQ ID NO: 1585581
ucucagguaaugcucaugg

SEQ ID NO: 1585583 - RNA, 19 nt, Artificial Sequence
  Description of Artificial Sequence: Synthetic oligonucleotide
  Sense strand starting at position 3236 of SEQ ID NO: 1560231
ugagcauuaccugagagcu

SEQ ID NO: 1585584 - RNA, 19 nt, Artificial Sequence
  Description of Artificial Sequence: Synthetic oligonucleotide
  Antisense strand to SEQ ID NO: 1585583
agcucucagguaaugcuca

SEQ ID NO: 1585585 - RNA, 19 nt, Artificial Sequence
  Description of Artificial Sequence: Synthetic oligonucleotide
  Sense strand starting at position 3301 of SEQ ID NO: 1560231
aggauugcaucuuaauaga

SEQ ID NO: 1585586 - RNA, 19 nt, Artificial Sequence
  Description of Artificial Sequence: Synthetic oligonucleotide
  Antisense strand to SEQ ID NO: 1585585
ucuauuaagaugcaauccu

SEQ ID NO: 1585587 - RNA, 19 nt, Artificial Sequence
  Description of Artificial Sequence: Synthetic oligonucleotide
  Sense strand starting at position 3392 of SEQ ID NO: 1560231
cagggaugcugggaguuaa

SEQ ID NO: 1585588 - RNA, 19 nt, Artificial Sequence
  Description of Artificial Sequence: Synthetic oligonucleotide
  Antisense strand to SEQ ID NO: 1585587
uuaacucccagcaucccug

SEQ ID NO: 1585589 - RNA, 19 nt, Artificial Sequence
  Description of Artificial Sequence: Synthetic oligonucleotide
  Sense strand starting at position 3491 of SEQ ID NO: 1560231
gcaacuauauguuucuuga

SEQ ID NO: 1585590 - RNA, 19 nt, Artificial Sequence
  Description of Artificial Sequence: Synthetic oligonucleotide
  Antisense strand to SEQ ID NO: 1585589
ucaagaaacauauaguugc

SEQ ID NO: 1585591 - RNA, 19 nt, Artificial Sequence
  Description of Artificial Sequence: Synthetic oligonucleotide
  Sense strand starting at position 3494 of SEQ ID NO: 1560231
acuauauguuucuugagca

SEQ ID NO: 1585592 - RNA, 19 nt, Artificial Sequence
  Description of Artificial Sequence: Synthetic oligonucleotide
  Antisense strand to SEQ ID NO: 1585591
ugcucaagaaacauauagu

SEQ ID NO: 1585593 - RNA, 19 nt, Artificial Sequence
  Description of Artificial Sequence: Synthetic oligonucleotide
  Sense strand starting at position 3558 of SEQ ID NO: 1560231
ugucaaagguaucacauca

SEQ ID NO: 1585594 - RNA, 19 nt, Artificial Sequence
  Description of Artificial Sequence: Synthetic oligonucleotide
  Antisense strand to SEQ ID NO: 1585593
ugaugugauaccuuugaca

SEQ ID NO: 1585595 - RNA, 19 nt, Artificial Sequence
  Description of Artificial Sequence: Synthetic oligonucleotide
  Sense strand starting at position 3563 of SEQ ID NO: 1560231
aagguaucacaucacguaa

SEQ ID NO: 1585596 - RNA, 19 nt, Artificial Sequence
  Description of Artificial Sequence: Synthetic oligonucleotide
  Antisense strand to SEQ ID NO: 1585595
uuacgugaugugauaccuu

SEQ ID NO: 1585597 - RNA, 19 nt, Artificial Sequence
  Description of Artificial Sequence: Synthetic oligonucleotide
  Sense strand starting at position 3825 of SEQ ID NO: 1560231
agugaaaucuggcccaaua

SEQ ID NO: 1585598 - RNA, 19 nt, Artificial Sequence
  Description of Artificial Sequence: Synthetic oligonucleotide
  Antisense strand to SEQ ID NO: 1585597
uauugggccagauuucacu

SEQ ID NO: 1585599 - RNA, 19 nt, Artificial Sequence
  Description of Artificial Sequence: Synthetic oligonucleotide
  Sense strand starting at position 3827 of SEQ ID NO: 1560231
ugaaaucuggcccaauauu

SEQ ID NO: 1585600 - RNA, 19 nt, Artificial Sequence
  Description of Artificial Sequence: Synthetic oligonucleotide
  Antisense strand to SEQ ID NO: 1585599
aauauugggccagauuuca

SEQ ID NO: 1585601 - RNA, 19 nt, Artificial Sequence
  Description of Artificial Sequence: Synthetic oligonucleotide
  Sense strand starting at position 111 of SEQ ID NO: 1560232
augucuccuccucaaggaa

SEQ ID NO: 1585602 - RNA, 19 nt, Artificial Sequence
  Description of Artificial Sequence: Synthetic oligonucleotide
  Antisense strand to SEQ ID NO: 1585601
uuccuugaggaggagacau

SEQ ID NO: 1585603 - RNA, 19 nt, Artificial Sequence
  Description of Artificial Sequence: Synthetic oligonucleotide
  Sense strand starting at position 196 of SEQ ID NO: 1560232
ggcaccuuugugggagaga

SEQ ID NO: 1585604 - RNA, 19 nt, Artificial Sequence
  Description of Artificial Sequence: Synthetic oligonucleotide
  Antisense strand to SEQ ID NO: 1585603
ucucucccacaaaggugcc

SEQ ID NO: 1585605 - RNA, 19 nt, Artificial Sequence
  Description of Artificial Sequence: Synthetic oligonucleotide
  Sense strand starting at position 232 of SEQ ID NO: 1560232
gcaugucacuuuguccaca

SEQ ID NO: 1585606 - RNA, 19 nt, Artificial Sequence
  Description of Artificial Sequence: Synthetic oligonucleotide
  Antisense strand to SEQ ID NO: 1585605
uguggacaaagugacaugc

SEQ ID NO: 1585607 - RNA, 19 nt, Artificial Sequence
  Description of Artificial Sequence: Synthetic oligonucleotide
  Sense strand starting at position 267 of SEQ ID NO: 1560232
agcucaucuugggaccaga

SEQ ID NO: 1585608 - RNA, 19 nt, Artificial Sequence
  Description of Artificial Sequence: Synthetic oligonucleotide
  Antisense strand to SEQ ID NO: 1585607
ucuggucccaagaugagcu

SEQ ID NO: 1585609 - RNA, 19 nt, Artificial Sequence
  Description of Artificial Sequence: Synthetic oligonucleotide
  Sense strand starting at position 351 of SEQ ID NO: 1560232
gcuggaacacuuggucagu

SEQ ID NO: 1585610 - RNA, 19 nt, Artificial Sequence
  Description of Artificial Sequence: Synthetic oligonucleotide
  Antisense strand to SEQ ID NO: 1585609
acugaccaaguguuccagc

SEQ ID NO: 1585611 - RNA, 19 nt, Artificial Sequence
  Description of Artificial Sequence: Synthetic oligonucleotide
  Sense strand starting at position 354 of SEQ ID NO: 1560232
ggaacacuuggucaguguu

SEQ ID NO: 1585612 - RNA, 19 nt, Artificial Sequence
  Description of Artificial Sequence: Synthetic oligonucleotide
  Antisense strand to SEQ ID NO: 1585611
aacacugaccaaguguucc

SEQ ID NO: 1585613 - RNA, 19 nt, Artificial Sequence
  Description of Artificial Sequence: Synthetic oligonucleotide
  Sense strand starting at position 935 of SEQ ID NO: 1560232
gcugggagaggauguguaa

SEQ ID NO: 1585614 - RNA, 19 nt, Artificial Sequence
  Description of Artificial Sequence: Synthetic oligonucleotide
  Antisense strand to SEQ ID NO: 1585613
uuacacauccucucccagc

SEQ ID NO: 1585615 - RNA, 19 nt, Artificial Sequence
  Description of Artificial Sequence: Synthetic oligonucleotide
  Sense strand starting at position 958 of SEQ ID NO: 1560232
cuuccuaugucugcacaga

SEQ ID NO: 1585616 - RNA, 19 nt, Artificial Sequence
  Description of Artificial Sequence: Synthetic oligonucleotide
  Antisense strand to SEQ ID NO: 1585615
ucugugcagacauaggaag

SEQ ID NO: 1585617 - RNA, 19 nt, Artificial Sequence
  Description of Artificial Sequence: Synthetic oligonucleotide
  Sense strand starting at position 959 of SEQ ID NO: 1560232
uuccuaugucugcacagaa

SEQ ID NO: 1585618 - RNA, 19 nt, Artificial Sequence
  Description of Artificial Sequence: Synthetic oligonucleotide
  Antisense strand to SEQ ID NO: 1585617
uucugugcagacauaggaa

SEQ ID NO: 1585619 - RNA, 19 nt, Artificial Sequence
  Description of Artificial Sequence: Synthetic oligonucleotide
  Sense strand starting at position 993 of SEQ ID NO: 1560232
cuggauuccucccugcaga

SEQ ID NO: 1585620 - RNA, 19 nt, Artificial Sequence
  Description of Artificial Sequence: Synthetic oligonucleotide
  Antisense strand to SEQ ID NO: 1585619
ucugcagggaggaauccag

SEQ ID NO: 1585621 - RNA, 19 nt, Artificial Sequence
  Description of Artificial Sequence: Synthetic oligonucleotide
  Sense strand starting at position 994 of SEQ ID NO: 1560232
uggauuccucccugcagag

SEQ ID NO: 1585622 - RNA, 19 nt, Artificial Sequence
  Description of Artificial Sequence: Synthetic oligonucleotide
  Antisense strand to SEQ ID NO: 1585621
cucugcagggaggaaucca

SEQ ID NO: 1585623 - RNA, 19 nt, Artificial Sequence
  Description of Artificial Sequence: Synthetic oligonucleotide
  Sense strand starting at position 1110 of SEQ ID NO: 1560232
agcucuuagaucugaggga

SEQ ID NO: 1585624 - RNA, 19 nt, Artificial Sequence
  Description of Artificial Sequence: Synthetic oligonucleotide
  Antisense strand to SEQ ID NO: 1585623
ucccucagaucuaagagcu

SEQ ID NO: 1585625 - RNA, 19 nt, Artificial Sequence
  Description of Artificial Sequence: Synthetic oligonucleotide
  Sense strand starting at position 1111 of SEQ ID NO: 1560232
gcucuuagaucugagggaa

SEQ ID NO: 1585626 - RNA, 19 nt, Artificial Sequence
  Description of Artificial Sequence: Synthetic oligonucleotide
  Antisense strand to SEQ ID NO: 1585625
uucccucagaucuaagagc

SEQ ID NO: 1585627 - RNA, 19 nt, Artificial Sequence
  Description of Artificial Sequence: Synthetic oligonucleotide
  Sense strand starting at position 1148 of SEQ ID NO: 1560232
ggcuucuagguccauuacu

SEQ ID NO: 1585628 - RNA, 19 nt, Artificial Sequence
  Description of Artificial Sequence: Synthetic oligonucleotide
  Antisense strand to SEQ ID NO: 1585627
aguaauggaccuagaagcc

SEQ ID NO: 1585629 - RNA, 19 nt, Artificial Sequence
  Description of Artificial Sequence: Synthetic oligonucleotide
  Sense strand starting at position 1224 of SEQ ID NO: 1560232
ccugguuauccggacuacu

SEQ ID NO: 1585630 - RNA, 19 nt, Artificial Sequence
  Description of Artificial Sequence: Synthetic oligonucleotide
  Antisense strand to SEQ ID NO: 1585629
aguaguccggauaaccagg

SEQ ID NO: 1585631 - RNA, 19 nt, Artificial Sequence
  Description of Artificial Sequence: Synthetic oligonucleotide
  Sense strand starting at position 1557 of SEQ ID NO: 1560232
gcgacaagucuacgacuga

SEQ ID NO: 1585632 - RNA, 19 nt, Artificial Sequence
  Description of Artificial Sequence: Synthetic oligonucleotide
  Antisense strand to SEQ ID NO: 1585631
ucagucguagacuugucgc

SEQ ID NO: 1585633 - RNA, 19 nt, Artificial Sequence
  Description of Artificial Sequence: Synthetic oligonucleotide
  Sense strand starting at position 1620 of SEQ ID NO: 1560232
gcggaacguucaggagaaa

SEQ ID NO: 1585634 - RNA, 19 nt, Artificial Sequence
  Description of Artificial Sequence: Synthetic oligonucleotide
  Antisense strand to SEQ ID NO: 1585633
uuucuccugaacguuccgc

SEQ ID NO: 1585635 - RNA, 19 nt, Artificial Sequence
  Description of Artificial Sequence: Synthetic oligonucleotide
  Sense strand starting at position 1998 of SEQ ID NO: 1560232
guauguccggccagaggua

SEQ ID NO: 1585636 - RNA, 19 nt, Artificial Sequence
  Description of Artificial Sequence: Synthetic oligonucleotide
  Antisense strand to SEQ ID NO: 1585635
uaccucuggccggacauac

SEQ ID NO: 1585637 - RNA, 19 nt, Artificial Sequence
  Description of Artificial Sequence: Synthetic oligonucleotide
  Sense strand starting at position 2094 of SEQ ID NO: 1560232
cuugcucuccaaugagaag

SEQ ID NO: 1585638 - RNA, 19 nt, Artificial Sequence
  Description of Artificial Sequence: Synthetic oligonucleotide
  Antisense strand to SEQ ID NO: 1585637
cuucucauuggagagcaag

SEQ ID NO: 1585639 - RNA, 19 nt, Artificial Sequence
  Description of Artificial Sequence: Synthetic oligonucleotide
  Sense strand starting at position 2215 of SEQ ID NO: 1560232
cuccgauaauacguugcua

SEQ ID NO: 1585640 - RNA, 19 nt, Artificial Sequence
  Description of Artificial Sequence: Synthetic oligonucleotide
  Antisense strand to SEQ ID NO: 1585639
uagcaacguauuaucggag

SEQ ID NO: 1585641 - RNA, 19 nt, Artificial Sequence
  Description of Artificial Sequence: Synthetic oligonucleotide
  Sense strand starting at position 2241 of SEQ ID NO: 1560232
guacuuuguuagucuuguu

SEQ ID NO: 1585642 - RNA, 19 nt, Artificial Sequence
  Description of Artificial Sequence: Synthetic oligonucleotide
  Antisense strand to SEQ ID NO: 1585641
aacaagacuaacaaaguac

SEQ ID NO: 1585643 - RNA, 19 nt, Artificial Sequence
  Description of Artificial Sequence: Synthetic oligonucleotide
  Sense strand starting at position 2245 of SEQ ID NO: 1560232
uuuguuagucuuguugcua

SEQ ID NO: 1585644 - RNA, 19 nt, Artificial Sequence
  Description of Artificial Sequence: Synthetic oligonucleotide
  Antisense strand to SEQ ID NO: 1585643
uagcaacaagacuaacaaa

SEQ ID NO: 1585645 - RNA, 19 nt, Artificial Sequence
  Description of Artificial Sequence: Synthetic oligonucleotide
  Sense strand starting at position 2246 of SEQ ID NO: 1560232
uuguuagucuuguugcuag

SEQ ID NO: 1585646 - RNA, 19 nt, Artificial Sequence
  Description of Artificial Sequence: Synthetic oligonucleotide
  Antisense strand to SEQ ID NO: 1585645
cuagcaacaagacuaacaa

SEQ ID NO: 1585647 - RNA, 19 nt, Artificial Sequence
  Description of Artificial Sequence: Synthetic oligonucleotide
  Sense strand starting at position 2319 of SEQ ID NO: 1560232
gcuggcuucugaccgcaaa

SEQ ID NO: 1585648 - RNA, 19 nt, Artificial Sequence
  Description of Artificial Sequence: Synthetic oligonucleotide
  Antisense strand to SEQ ID NO: 1585647
uuugcggucagaagccagc

SEQ ID NO: 1585649 - RNA, 19 nt, Artificial Sequence
  Description of Artificial Sequence: Synthetic oligonucleotide
  Sense strand starting at position 2322 of SEQ ID NO: 1560232
ggcuucugaccgcaaaggu

SEQ ID NO: 1585650 - RNA, 19 nt, Artificial Sequence
  Description of Artificial Sequence: Synthetic oligonucleotide
  Antisense strand to SEQ ID NO: 1585649
accuuugcggucagaagcc

SEQ ID NO: 1585651 - RNA, 19 nt, Artificial Sequence
  Description of Artificial Sequence: Synthetic oligonucleotide
  Sense strand starting at position 2381 of SEQ ID NO: 1560232
ugcauuucuucuccgcgua

SEQ ID NO: 1585652 - RNA, 19 nt, Artificial Sequence
  Description of Artificial Sequence: Synthetic oligonucleotide
  Antisense strand to SEQ ID NO: 1585651
uacgcggagaagaaaugca

SEQ ID NO: 1585653 - RNA, 19 nt, Artificial Sequence
  Description of Artificial Sequence: Synthetic oligonucleotide
  Sense strand starting at position 2382 of SEQ ID NO: 1560232
gcauuucuucuccgcguau

SEQ ID NO: 1585654 - RNA, 19 nt, Artificial Sequence
  Description of Artificial Sequence: Synthetic oligonucleotide
  Antisense strand to SEQ ID NO: 1585653
auacgcggagaagaaaugc

SEQ ID NO: 1585655 - RNA, 19 nt, Artificial Sequence
  Description of Artificial Sequence: Synthetic oligonucleotide
  Sense strand starting at position 2383 of SEQ ID NO: 1560232
cauuucuucuccgcguauu

SEQ ID NO: 1585656 - RNA, 19 nt, Artificial Sequence
  Description of Artificial Sequence: Synthetic oligonucleotide
  Antisense strand to SEQ ID NO: 1585655
aauacgcggagaagaaaug

SEQ ID NO: 1585657 - RNA, 19 nt, Artificial Sequence
  Description of Artificial Sequence: Synthetic oligonucleotide
  Sense strand starting at position 2384 of SEQ ID NO: 1560232
auuucuucuccgcguauuu

SEQ ID NO: 1585658 - RNA, 19 nt, Artificial Sequence
  Description of Artificial Sequence: Synthetic oligonucleotide
  Antisense strand to SEQ ID NO: 1585657
aaauacgcggagaagaaau

SEQ ID NO: 1585659 - RNA, 19 nt, Artificial Sequence
  Description of Artificial Sequence: Synthetic oligonucleotide
  Sense strand starting at position 2848 of SEQ ID NO: 1560232
augcuaugcuauuugguau

SEQ ID NO: 1585660 - RNA, 19 nt, Artificial Sequence
  Description of Artificial Sequence: Synthetic oligonucleotide
  Antisense strand to SEQ ID NO: 1585659
auaccaaauagcauagcau

SEQ ID NO: 1585661 - RNA, 19 nt, Artificial Sequence
  Description of Artificial Sequence: Synthetic oligonucleotide
  Sense strand starting at position 2855 of SEQ ID NO: 1560232
gcuauuugguaucggucau

SEQ ID NO: 1585662 - RNA, 19 nt, Artificial Sequence
  Description of Artificial Sequence: Synthetic oligonucleotide
  Antisense strand to SEQ ID NO: 1585661
augaccgauaccaaauagc

SEQ ID NO: 1585663 - RNA, 19 nt, Artificial Sequence
  Description of Artificial Sequence: Synthetic oligonucleotide
  Sense strand starting at position 2893 of SEQ ID NO: 1560232
ggugaaauuuagugaaagc

SEQ ID NO: 1585664 - RNA, 19 nt, Artificial Sequence
  Description of Artificial Sequence: Synthetic oligonucleotide
  Antisense strand to SEQ ID NO: 1585663
gcuuucacuaaauuucacc

SEQ ID NO: 1585665 - RNA, 19 nt, Artificial Sequence
  Description of Artificial Sequence: Synthetic oligonucleotide
  Sense strand starting at position 3017 of SEQ ID NO: 1560232
gcauccuccugcuaagaca

SEQ ID NO: 1585666 - RNA, 19 nt, Artificial Sequence
  Description of Artificial Sequence: Synthetic oligonucleotide
  Antisense strand to SEQ ID NO: 1585665
ugucuuagcaggaggaugc

SEQ ID NO: 1585667 - RNA, 19 nt, Artificial Sequence
  Description of Artificial Sequence: Synthetic oligonucleotide
  Sense strand starting at position 3258 of SEQ ID NO: 1560232
acgcgauacuccuaccuca

SEQ ID NO: 1585668 - RNA, 19 nt, Artificial Sequence
  Description of Artificial Sequence: Synthetic oligonucleotide
  Antisense strand to SEQ ID NO: 1585667
ugagguaggaguaucgcgu

SEQ ID NO: 1585669 - RNA, 19 nt, Artificial Sequence
  Description of Artificial Sequence: Synthetic oligonucleotide
  Sense strand starting at position 3541 of SEQ ID NO: 1560232
ucccauuauuuguaacgga

SEQ ID NO: 1585670 - RNA, 19 nt, Artificial Sequence
  Description of Artificial Sequence: Synthetic oligonucleotide
  Antisense strand to SEQ ID NO: 1585669
uccguuacaaauaauggga

SEQ ID NO: 1585671 - RNA, 19 nt, Artificial Sequence
  Description of Artificial Sequence: Synthetic oligonucleotide
  Sense strand starting at position 3544 of SEQ ID NO: 1560232
cauuauuuguaacggaaug

SEQ ID NO: 1585672 - RNA, 19 nt, Artificial Sequence
  Description of Artificial Sequence: Synthetic oligonucleotide
  Antisense strand to SEQ ID NO: 1585671
cauuccguuacaaauaaug

SEQ ID NO: 1585673 - RNA, 19 nt, Artificial Sequence
  Description of Artificial Sequence: Synthetic oligonucleotide
  Sense strand starting at position 3707 of SEQ ID NO: 1560232
aguuaagcugucggauuag

SEQ ID NO: 1585674 - RNA, 19 nt, Artificial Sequence
  Description of Artificial Sequence: Synthetic oligonucleotide
  Antisense strand to SEQ ID NO: 1585673
cuaauccgacagcuuaacu

SEQ ID NO: 1585675 - RNA, 19 nt, Artificial Sequence
  Description of Artificial Sequence: Synthetic oligonucleotide
  Sense strand starting at position 3746 of SEQ ID NO: 1560232
cucacugaccuuuaugagu

SEQ ID NO: 1585676 - RNA, 19 nt, Artificial Sequence
  Description of Artificial Sequence: Synthetic oligonucleotide
  Antisense strand to SEQ ID NO: 1585675
acucauaaaggucagugag

SEQ ID NO: 1585677 - RNA, 19 nt, Artificial Sequence
  Description of Artificial Sequence: Synthetic oligonucleotide
  Sense strand starting at position 3752 of SEQ ID NO: 1560232
gaccuuuaugaguggccca

SEQ ID NO: 1585678 - RNA, 19 nt, Artificial Sequence
  Description of Artificial Sequence: Synthetic oligonucleotide
  Antisense strand to SEQ ID NO: 1585677
ugggccacucauaaagguc

SEQ ID NO: 1585679 - RNA, 19 nt, Artificial Sequence
  Description of Artificial Sequence: Synthetic oligonucleotide
  Sense strand starting at position 3952 of SEQ ID NO: 1560232
aucccauccgguuauuaca

SEQ ID NO: 1585680 - RNA, 19 nt, Artificial Sequence
  Description of Artificial Sequence: Synthetic oligonucleotide
  Antisense strand to SEQ ID NO: 1585679
uguaauaaccggaugggau

SEQ ID NO: 1585681 - RNA, 19 nt, Artificial Sequence
  Description of Artificial Sequence: Synthetic oligonucleotide
  Sense strand starting at position 101 of SEQ ID NO: 1560233
aagguugaggguggugaau

SEQ ID NO: 1585682 - RNA, 19 nt, Artificial Sequence
  Description of Artificial Sequence: Synthetic oligonucleotide
  Antisense strand to SEQ ID NO: 1585681
auucaccacccucaaccuu

SEQ ID NO: 1585683 - RNA, 19 nt, Artificial Sequence
  Description of Artificial Sequence: Synthetic oligonucleotide
  Sense strand starting at position 153 of SEQ ID NO: 1560233
agccuaaauuuccaggaga

SEQ ID NO: 1585684 - RNA, 19 nt, Artificial Sequence
  Description of Artificial Sequence: Synthetic oligonucleotide
  Antisense strand to SEQ ID NO: 1585683
ucuccuggaaauuuaggcu

SEQ ID NO: 1585685 - RNA, 19 nt, Artificial Sequence
  Description of Artificial Sequence: Synthetic oligonucleotide
  Sense strand starting at position 594 of SEQ ID NO: 1560233
auuagaaaguccuucugac

SEQ ID NO: 1585686 - RNA, 19 nt, Artificial Sequence
  Description of Artificial Sequence: Synthetic oligonucleotide
  Antisense strand to SEQ ID NO: 1585685
gucagaaggacuuucuaau

SEQ ID NO: 1585687 - RNA, 19 nt, Artificial Sequence
  Description of Artificial Sequence: Synthetic oligonucleotide
  Sense strand starting at position 698 of SEQ ID NO: 1560233
cugucuuuaucaguugcua

SEQ ID NO: 1585688 - RNA, 19 nt, Artificial Sequence
  Description of Artificial Sequence: Synthetic oligonucleotide
  Antisense strand to SEQ ID NO: 1585687
uagcaacugauaaagacag

SEQ ID NO: 1585689 - RNA, 19 nt, Artificial Sequence
  Description of Artificial Sequence: Synthetic oligonucleotide
  Sense strand starting at position 748 of SEQ ID NO: 1560233
ugauuagaaugucccucuu

SEQ ID NO: 1585690 - RNA, 19 nt, Artificial Sequence
  Description of Artificial Sequence: Synthetic oligonucleotide
  Antisense strand to SEQ ID NO: 1585689
aagagggacauucuaauca

SEQ ID NO: 1585691 - RNA, 19 nt, Artificial Sequence
  Description of Artificial Sequence: Synthetic oligonucleotide
  Sense strand starting at position 778 of SEQ ID NO: 1560233
ucaggauugcuguaaggac

SEQ ID NO: 1585692 - RNA, 19 nt, Artificial Sequence
  Description of Artificial Sequence: Synthetic oligonucleotide
  Antisense strand to SEQ ID NO: 1585691
guccuuacagcaauccuga

SEQ ID NO: 1585693 - RNA, 19 nt, Artificial Sequence
  Description of Artificial Sequence: Synthetic oligonucleotide
  Sense strand starting at position 1263 of SEQ ID NO: 1560233
uugugagucuuccuuaagu

SEQ ID NO: 1585694 - RNA, 19 nt, Artificial Sequence
  Description of Artificial Sequence: Synthetic oligonucleotide
  Antisense strand to SEQ ID NO: 1585693
acuuaaggaagacucacaa

SEQ ID NO: 1585695 - RNA, 19 nt, Artificial Sequence
  Description of Artificial Sequence: Synthetic oligonucleotide
  Sense strand starting at position 1386 of SEQ ID NO: 1560233
uagacaguccugugagucu

SEQ ID NO: 1585696 - RNA, 19 nt, Artificial Sequence
  Description of Artificial Sequence: Synthetic oligonucleotide
  Antisense strand to SEQ ID NO: 1585695
agacucacaggacugucua

SEQ ID NO: 1585697 - RNA, 19 nt, Artificial Sequence
  Description of Artificial Sequence: Synthetic oligonucleotide
  Sense strand starting at position 1395 of SEQ ID NO: 1560233
cugugagucuagccuuacu

SEQ ID NO: 1585698 - RNA, 19 nt, Artificial Sequence
  Description of Artificial Sequence: Synthetic oligonucleotide
  Antisense strand to SEQ ID NO: 1585697
aguaaggcuagacucacag

SEQ ID NO: 1585699 - RNA, 19 nt, Artificial Sequence
  Description of Artificial Sequence: Synthetic oligonucleotide
  Sense strand starting at position 1439 of SEQ ID NO: 1560233
guuccuuugcccuagagac

SEQ ID NO: 1585700 - RNA, 19 nt, Artificial Sequence
  Description of Artificial Sequence: Synthetic oligonucleotide
  Antisense strand to SEQ ID NO: 1585699
gucucuagggcaaaggaac

SEQ ID NO: 1585701 - RNA, 19 nt, Artificial Sequence
  Description of Artificial Sequence: Synthetic oligonucleotide
  Sense strand starting at position 1493 of SEQ ID NO: 1560233
ggaagcuccagugagucua

SEQ ID NO: 1585702 - RNA, 19 nt, Artificial Sequence
  Description of Artificial Sequence: Synthetic oligonucleotide
  Antisense strand to SEQ ID NO: 1585701
uagacucacuggagcuucc

SEQ ID NO: 1585703 - RNA, 19 nt, Artificial Sequence
  Description of Artificial Sequence: Synthetic oligonucleotide
  Sense strand starting at position 1514 of SEQ ID NO: 1560233
uuuccucaucgccaugaga

SEQ ID NO: 1585704 - RNA, 19 nt, Artificial Sequence
  Description of Artificial Sequence: Synthetic oligonucleotide
  Antisense strand to SEQ ID NO: 1585703
ucucauggcgaugaggaaa

SEQ ID NO: 1585705 - RNA, 19 nt, Artificial Sequence
  Description of Artificial Sequence: Synthetic oligonucleotide
  Sense strand starting at position 1516 of SEQ ID NO: 1560233
uccucaucgccaugagaaa

SEQ ID NO: 1585706 - RNA, 19 nt, Artificial Sequence
  Description of Artificial Sequence: Synthetic oligonucleotide
  Antisense strand to SEQ ID NO: 1585705
uuucucauggcgaugagga

SEQ ID NO: 1585707 - RNA, 19 nt, Artificial Sequence
  Description of Artificial Sequence: Synthetic oligonucleotide
  Sense strand starting at position 1517 of SEQ ID NO: 1560233
ccucaucgccaugagaaau

SEQ ID NO: 1585708 - RNA, 19 nt, Artificial Sequence
  Description of Artificial Sequence: Synthetic oligonucleotide
  Antisense strand to SEQ ID NO: 1585707
auuucucauggcgaugagg

SEQ ID NO: 1585709 - RNA, 19 nt, Artificial Sequence
  Description of Artificial Sequence: Synthetic oligonucleotide
  Sense strand starting at position 1647 of SEQ ID NO: 1560233
ggugaaaccuugucucccu

SEQ ID NO: 1585710 - RNA, 19 nt, Artificial Sequence
  Description of Artificial Sequence: Synthetic oligonucleotide
  Antisense strand to SEQ ID NO: 1585709
agggagacaagguuucacc

SEQ ID NO: 1585711 - RNA, 19 nt, Artificial Sequence
  Description of Artificial Sequence: Synthetic oligonucleotide
  Sense strand starting at position 1861 of SEQ ID NO: 1560233
ccaugagucuacccuggau

SEQ ID NO: 1585712 - RNA, 19 nt, Artificial Sequence
  Description of Artificial Sequence: Synthetic oligonucleotide
  Antisense strand to SEQ ID NO: 1585711
auccaggguagacucaugg

SEQ ID NO: 1585713 - RNA, 19 nt, Artificial Sequence
  Description of Artificial Sequence: Synthetic oligonucleotide
  Sense strand starting at position 1879 of SEQ ID NO: 1560233
uccuucuugcugcaggaaa

SEQ ID NO: 1585714 - RNA, 19 nt, Artificial Sequence
  Description of Artificial Sequence: Synthetic oligonucleotide
  Antisense strand to SEQ ID NO: 1585713
uuuccugcagcaagaagga

SEQ ID NO: 1585715 - RNA, 19 nt, Artificial Sequence
  Description of Artificial Sequence: Synthetic oligonucleotide
  Sense strand starting at position 1923 of SEQ ID NO: 1560233
ccaagacauuaggacuuaa

SEQ ID NO: 1585716 - RNA, 19 nt, Artificial Sequence
  Description of Artificial Sequence: Synthetic oligonucleotide
  Antisense strand to SEQ ID NO: 1585715
uuaaguccuaaugucuugg

SEQ ID NO: 1585717 - RNA, 19 nt, Artificial Sequence
  Description of Artificial Sequence: Synthetic oligonucleotide
  Sense strand starting at position 1981 of SEQ ID NO: 1560233
cucacaugggucugaguga

SEQ ID NO: 1585718 - RNA, 19 nt, Artificial Sequence
  Description of Artificial Sequence: Synthetic oligonucleotide
  Antisense strand to SEQ ID NO: 1585717
ucacucagacccaugugag

SEQ ID NO: 1585719 - RNA, 19 nt, Artificial Sequence
  Description of Artificial Sequence: Synthetic oligonucleotide
  Sense strand starting at position 2030 of SEQ ID NO: 1560233
acgguugacccucagacaa

SEQ ID NO: 1585720 - RNA, 19 nt, Artificial Sequence
  Description of Artificial Sequence: Synthetic oligonucleotide
  Antisense strand to SEQ ID NO: 1585719
uugucugagggucaaccgu

SEQ ID NO: 1585721 - RNA, 19 nt, Artificial Sequence
  Description of Artificial Sequence: Synthetic oligonucleotide
  Sense strand starting at position 2118 of SEQ ID NO: 1560233
cugccuauuuagggcagaa

SEQ ID NO: 1585722 - RNA, 19 nt, Artificial Sequence
  Description of Artificial Sequence: Synthetic oligonucleotide
  Antisense strand to SEQ ID NO: 1585721
uucugcccuaaauaggcag

SEQ ID NO: 1585723 - RNA, 19 nt, Artificial Sequence
  Description of Artificial Sequence: Synthetic oligonucleotide
  Sense strand starting at position 2237 of SEQ ID NO: 1560233
gccuguuuauuugaggaag

SEQ ID NO: 1585724 - RNA, 19 nt, Artificial Sequence
  Description of Artificial Sequence: Synthetic oligonucleotide
  Antisense strand to SEQ ID NO: 1585723
cuuccucaaauaaacaggc

SEQ ID NO: 1585725 - RNA, 19 nt, Artificial Sequence
  Description of Artificial Sequence: Synthetic oligonucleotide
  Sense strand starting at position 2239 of SEQ ID NO: 1560233
cuguuuauuugaggaaggu

SEQ ID NO: 1585726 - RNA, 19 nt, Artificial Sequence
  Description of Artificial Sequence: Synthetic oligonucleotide
  Antisense strand to SEQ ID NO: 1585725
accuuccucaaauaaacag

SEQ ID NO: 1585727 - RNA, 19 nt, Artificial Sequence
  Description of Artificial Sequence: Synthetic oligonucleotide
  Sense strand starting at position 2291 of SEQ ID NO: 1560233
gguauauugagaugcucac

SEQ ID NO: 1585728 - RNA, 19 nt, Artificial Sequence
  Description of Artificial Sequence: Synthetic oligonucleotide
  Antisense strand to SEQ ID NO: 1585727
gugagcaucucaauauacc

SEQ ID NO: 1585729 - RNA, 19 nt, Artificial Sequence
  Description of Artificial Sequence: Synthetic oligonucleotide
  Sense strand starting at position 2316 of SEQ ID NO: 1560233
gucaucuuugagcggaacu

SEQ ID NO: 1585730 - RNA, 19 nt, Artificial Sequence
  Description of Artificial Sequence: Synthetic oligonucleotide
  Antisense strand to SEQ ID NO: 1585729
aguuccgcucaaagaugac

SEQ ID NO: 1585731 - RNA, 19 nt, Artificial Sequence
  Description of Artificial Sequence: Synthetic oligonucleotide
  Sense strand starting at position 2318 of SEQ ID NO: 1560233
caucuuugagcggaacuca

SEQ ID NO: 1585732 - RNA, 19 nt, Artificial Sequence
  Description of Artificial Sequence: Synthetic oligonucleotide
  Antisense strand to SEQ ID NO: 1585731
ugaguuccgcucaaagaug

SEQ ID NO: 1585733 - RNA, 19 nt, Artificial Sequence
  Description of Artificial Sequence: Synthetic oligonucleotide
  Sense strand starting at position 2408 of SEQ ID NO: 1560233
ugucacguccgucacaaau

SEQ ID NO: 1585734 - RNA, 19 nt, Artificial Sequence
  Description of Artificial Sequence: Synthetic oligonucleotide
  Antisense strand to SEQ ID NO: 1585733
auuugugacggacgugaca

SEQ ID NO: 1585735 - RNA, 19 nt, Artificial Sequence
  Description of Artificial Sequence: Synthetic oligonucleotide
  Sense strand starting at position 2552 of SEQ ID NO: 1560233
ggugaucucuucucugaca

SEQ ID NO: 1585736 - RNA, 19 nt, Artificial Sequence
  Description of Artificial Sequence: Synthetic oligonucleotide
  Antisense strand to SEQ ID NO: 1585735
ugucagagaagagaucacc

SEQ ID NO: 1585737 - RNA, 19 nt, Artificial Sequence
  Description of Artificial Sequence: Synthetic oligonucleotide
  Sense strand starting at position 2978 of SEQ ID NO: 1560233
aguauacaucaagguauca

SEQ ID NO: 1585738 - RNA, 19 nt, Artificial Sequence
  Description of Artificial Sequence: Synthetic oligonucleotide
  Antisense strand to SEQ ID NO: 1585737
ugauaccuugauguauacu

SEQ ID NO: 1585739 - RNA, 19 nt, Artificial Sequence
  Description of Artificial Sequence: Synthetic oligonucleotide
  Sense strand starting at position 2988 of SEQ ID NO: 1560233
aagguaucauuuguuuguu

SEQ ID NO: 1585740 - RNA, 19 nt, Artificial Sequence
  Description of Artificial Sequence: Synthetic oligonucleotide
  Antisense strand to SEQ ID NO: 1585739
aacaaacaaaugauaccuu

SEQ ID NO: 1585741 - RNA, 19 nt, Artificial Sequence
  Description of Artificial Sequence: Synthetic oligonucleotide
  Sense strand starting at position 2990 of SEQ ID NO: 1560233
gguaucauuuguuuguuga

SEQ ID NO: 1585742 - RNA, 19 nt, Artificial Sequence
  Description of Artificial Sequence: Synthetic oligonucleotide
  Antisense strand to SEQ ID NO: 1585741
ucaacaaacaaaugauacc

SEQ ID NO: 1585743 - RNA, 19 nt, Artificial Sequence
  Description of Artificial Sequence: Synthetic oligonucleotide
  Sense strand starting at position 2991 of SEQ ID NO: 1560233
guaucauuuguuuguugaa

SEQ ID NO: 1585744 - RNA, 19 nt, Artificial Sequence
  Description of Artificial Sequence: Synthetic oligonucleotide
  Antisense strand to SEQ ID NO: 1585743
uucaacaaacaaaugauac

SEQ ID NO: 1585745 - RNA, 19 nt, Artificial Sequence
  Description of Artificial Sequence: Synthetic oligonucleotide
  Sense strand starting at position 2994 of SEQ ID NO: 1560233
ucauuuguuuguugaaucu

SEQ ID NO: 1585746 - RNA, 19 nt, Artificial Sequence
  Description of Artificial Sequence: Synthetic oligonucleotide
  Antisense strand to SEQ ID NO: 1585745
agauucaacaaacaaauga

SEQ ID NO: 1585747 - RNA, 19 nt, Artificial Sequence
  Description of Artificial Sequence: Synthetic oligonucleotide
  Sense strand starting at position 3003 of SEQ ID NO: 1560233
uguugaaucucucacuaga

SEQ ID NO: 1585748 - RNA, 19 nt, Artificial Sequence
  Description of Artificial Sequence: Synthetic oligonucleotide
  Antisense strand to SEQ ID NO: 1585747
ucuagugagagauucaaca

SEQ ID NO: 1585749 - RNA, 19 nt, Artificial Sequence
  Description of Artificial Sequence: Synthetic oligonucleotide
  Sense strand starting at position 3020 of SEQ ID NO: 1560233
gaaugucagcccuaggaac

SEQ ID NO: 1585750 - RNA, 19 nt, Artificial Sequence
  Description of Artificial Sequence: Synthetic oligonucleotide
  Antisense strand to SEQ ID NO: 1585749
guuccuagggcugacauuc

SEQ ID NO: 1585751 - RNA, 19 nt, Artificial Sequence
  Description of Artificial Sequence: Synthetic oligonucleotide
  Sense strand starting at position 3038 of SEQ ID NO: 1560233
cgcggagauuugucuguuu

SEQ ID NO: 1585752 - RNA, 19 nt, Artificial Sequence
  Description of Artificial Sequence: Synthetic oligonucleotide
  Antisense strand to SEQ ID NO: 1585751
aaacagacaaaucuccgcg

SEQ ID NO: 1585753 - RNA, 19 nt, Artificial Sequence
  Description of Artificial Sequence: Synthetic oligonucleotide
  Sense strand starting at position 3040 of SEQ ID NO: 1560233
cggagauuugucuguuuag

SEQ ID NO: 1585754 - RNA, 19 nt, Artificial Sequence
  Description of Artificial Sequence: Synthetic oligonucleotide
  Antisense strand to SEQ ID NO: 1585753
cuaaacagacaaaucuccg

SEQ ID NO: 1585755 - RNA, 19 nt, Artificial Sequence
  Description of Artificial Sequence: Synthetic oligonucleotide
  Sense strand starting at position 3041 of SEQ ID NO: 1560233
ggagauuugucuguuuagc

SEQ ID NO: 1585756 - RNA, 19 nt, Artificial Sequence
  Description of Artificial Sequence: Synthetic oligonucleotide
  Antisense strand to SEQ ID NO: 1585755
gcuaaacagacaaaucucc

SEQ ID NO: 1585757 - RNA, 19 nt, Artificial Sequence
  Description of Artificial Sequence: Synthetic oligonucleotide
  Sense strand starting at position 3043 of SEQ ID NO: 1560233
agauuugucuguuuagcuc

SEQ ID NO: 1585758 - RNA, 19 nt, Artificial Sequence
  Description of Artificial Sequence: Synthetic oligonucleotide
  Antisense strand to SEQ ID NO: 1585757
gagcuaaacagacaaaucu

SEQ ID NO: 1585759 - RNA, 19 nt, Artificial Sequence
  Description of Artificial Sequence: Synthetic oligonucleotide
  Sense strand starting at position 3897 of SEQ ID NO: 1560233
ugcauaggcuugucucgaa

SEQ ID NO: 1585760 - RNA, 19 nt, Artificial Sequence
  Description of Artificial Sequence: Synthetic oligonucleotide
  Antisense strand to SEQ ID NO: 1585759
uucgagacaagccuaugca

SEQ ID NO: 1585761 - RNA, 19 nt, Artificial Sequence
  Description of Artificial Sequence: Synthetic oligonucleotide
  Sense strand starting at position 76 of SEQ ID NO: 1560234
gggacaagcuuugccuaga

SEQ ID NO: 1585762 - RNA, 19 nt, Artificial Sequence
  Description of Artificial Sequence: Synthetic oligonucleotide
  Antisense strand to SEQ ID NO: 1585761
ucuaggcaaagcuuguccc

SEQ ID NO: 1585763 - RNA, 19 nt, Artificial Sequence
  Description of Artificial Sequence: Synthetic oligonucleotide
  Sense strand starting at position 297 of SEQ ID NO: 1560234
gcauucuccuugucaggau

SEQ ID NO: 1585764 - RNA, 19 nt, Artificial Sequence
  Description of Artificial Sequence: Synthetic oligonucleotide
  Antisense strand to SEQ ID NO: 1585763
auccugacaaggagaaugc

SEQ ID NO: 1585765 - RNA, 19 nt, Artificial Sequence
  Description of Artificial Sequence: Synthetic oligonucleotide
  Sense strand starting at position 414 of SEQ ID NO: 1560234
agcuguuucuguuuccaga

SEQ ID NO: 1585766 - RNA, 19 nt, Artificial Sequence
  Description of Artificial Sequence: Synthetic oligonucleotide
  Antisense strand to SEQ ID NO: 1585765
ucuggaaacagaaacagcu

SEQ ID NO: 1585767 - RNA, 19 nt, Artificial Sequence
  Description of Artificial Sequence: Synthetic oligonucleotide
  Sense strand starting at position 416 of SEQ ID NO: 1560234
cuguuucuguuuccagaaa

SEQ ID NO: 1585768 - RNA, 19 nt, Artificial Sequence
  Description of Artificial Sequence: Synthetic oligonucleotide
  Antisense strand to SEQ ID NO: 1585767
uuucuggaaacagaaacag

SEQ ID NO: 1585769 - RNA, 19 nt, Artificial Sequence
  Description of Artificial Sequence: Synthetic oligonucleotide
  Sense strand starting at position 818 of SEQ ID NO: 1560234
cacagaaagucacagggau

SEQ ID NO: 1585770 - RNA, 19 nt, Artificial Sequence
  Description of Artificial Sequence: Synthetic oligonucleotide
  Antisense strand to SEQ ID NO: 1585769
aucccugugacuuucugug

SEQ ID NO: 1585771 - RNA, 19 nt, Artificial Sequence
  Description of Artificial Sequence: Synthetic oligonucleotide
  Sense strand starting at position 925 of SEQ ID NO: 1560234
caagucauuccggagaccu

SEQ ID NO: 1585772 - RNA, 19 nt, Artificial Sequence
  Description of Artificial Sequence: Synthetic oligonucleotide
  Antisense strand to SEQ ID NO: 1585771
aggucuccggaaugacuug

SEQ ID NO: 1585773 - RNA, 19 nt, Artificial Sequence
  Description of Artificial Sequence: Synthetic oligonucleotide
  Sense strand starting at position 1104 of SEQ ID NO: 1560234
ugagcuuccucucagcagu

SEQ ID NO: 1585774 - RNA, 19 nt, Artificial Sequence
  Description of Artificial Sequence: Synthetic oligonucleotide
  Antisense strand to SEQ ID NO: 1585773
acugcugagaggaagcuca

SEQ ID NO: 1585775 - RNA, 19 nt, Artificial Sequence
  Description of Artificial Sequence: Synthetic oligonucleotide
  Sense strand starting at position 1296 of SEQ ID NO: 1560234
ucaauuuguuucucuguua

SEQ ID NO: 1585776 - RNA, 19 nt, Artificial Sequence
  Description of Artificial Sequence: Synthetic oligonucleotide
  Antisense strand to SEQ ID NO: 1585775
uaacagagaaacaaauuga

SEQ ID NO: 1585777 - RNA, 19 nt, Artificial Sequence
  Description of Artificial Sequence: Synthetic oligonucleotide
  Sense strand starting at position 1377 of SEQ ID NO: 1560234
ucggguuugacacauacuu

SEQ ID NO: 1585778 - RNA, 19 nt, Artificial Sequence
  Description of Artificial Sequence: Synthetic oligonucleotide
  Antisense strand to SEQ ID NO: 1585777
aaguaugugucaaacccga

SEQ ID NO: 1585779 - RNA, 19 nt, Artificial Sequence
  Description of Artificial Sequence: Synthetic oligonucleotide
  Sense strand starting at position 1908 of SEQ ID NO: 1560234
acgagaaggcccggaucau

SEQ ID NO: 1585780 - RNA, 19 nt, Artificial Sequence
  Description of Artificial Sequence: Synthetic oligonucleotide
  Antisense strand to SEQ ID NO: 1585779
augauccgggccuucucgu

SEQ ID NO: 1585781 - RNA, 19 nt, Artificial Sequence
  Description of Artificial Sequence: Synthetic oligonucleotide
  Sense strand starting at position 2119 of SEQ ID NO: 1560234
gccgccuauuggcgaauaa

SEQ ID NO: 1585782 - RNA, 19 nt, Artificial Sequence
  Description of Artificial Sequence: Synthetic oligonucleotide
  Antisense strand to SEQ ID NO: 1585781
uuauucgccaauaggcggc

SEQ ID NO: 1585783 - RNA, 19 nt, Artificial Sequence
  Description of Artificial Sequence: Synthetic oligonucleotide
  Sense strand starting at position 2131 of SEQ ID NO: 1560234
cgaauaagcuuccugacga

SEQ ID NO: 1585784 - RNA, 19 nt, Artificial Sequence
  Description of Artificial Sequence: Synthetic oligonucleotide
  Antisense strand to SEQ ID NO: 1585783
ucgucaggaagcuuauucg

SEQ ID NO: 1585785 - RNA, 19 nt, Artificial Sequence
  Description of Artificial Sequence: Synthetic oligonucleotide
  Sense strand starting at position 2132 of SEQ ID NO: 1560234
gaauaagcuuccugacgaa

SEQ ID NO: 1585786 - RNA, 19 nt, Artificial Sequence
  Description of Artificial Sequence: Synthetic oligonucleotide
  Antisense strand to SEQ ID NO: 1585785
uucgucaggaagcuuauuc

SEQ ID NO: 1585787 - RNA, 19 nt, Artificial Sequence
  Description of Artificial Sequence: Synthetic oligonucleotide
  Sense strand starting at position 2267 of SEQ ID NO: 1560234
acgcgucacaaugaaacaa

SEQ ID NO: 1585788 - RNA, 19 nt, Artificial Sequence
  Description of Artificial Sequence: Synthetic oligonucleotide
  Antisense strand to SEQ ID NO: 1585787
uuguuucauugugacgcgu

SEQ ID NO: 1585789 - RNA, 19 nt, Artificial Sequence
  Description of Artificial Sequence: Synthetic oligonucleotide
  Sense strand starting at position 3298 of SEQ ID NO: 1560234
gggugagucacagaucugu

SEQ ID NO: 1585790 - RNA, 19 nt, Artificial Sequence
  Description of Artificial Sequence: Synthetic oligonucleotide
  Antisense strand to SEQ ID NO: 1585789
acagaucugugacucaccc

SEQ ID NO: 1585791 - RNA, 19 nt, Artificial Sequence
  Description of Artificial Sequence: Synthetic oligonucleotide
  Sense strand starting at position 3303 of SEQ ID NO: 1560234
agucacagaucugucacuu

SEQ ID NO: 1585792 - RNA, 19 nt, Artificial Sequence
  Description of Artificial Sequence: Synthetic oligonucleotide
  Antisense strand to SEQ ID NO: 1585791
aagugacagaucugugacu

SEQ ID NO: 1585793 - RNA, 19 nt, Artificial Sequence
  Description of Artificial Sequence: Synthetic oligonucleotide
  Sense strand starting at position 3375 of SEQ ID NO: 1560234
ucaucugaucacgggauca

SEQ ID NO: 1585794 - RNA, 19 nt, Artificial Sequence
  Description of Artificial Sequence: Synthetic oligonucleotide
  Antisense strand to SEQ ID NO: 1585793
ugaucccgugaucagauga

SEQ ID NO: 1585795 - RNA, 19 nt, Artificial Sequence
  Description of Artificial Sequence: Synthetic oligonucleotide
  Sense strand starting at position 3433 of SEQ ID NO: 1560234
ugaaauguauuagguacuu

SEQ ID NO: 1585796 - RNA, 19 nt, Artificial Sequence
  Description of Artificial Sequence: Synthetic oligonucleotide
  Antisense strand to SEQ ID NO: 1585795
aaguaccuaauacauuuca

SEQ ID NO: 1585797 - RNA, 19 nt, Artificial Sequence
  Description of Artificial Sequence: Synthetic oligonucleotide
  Sense strand starting at position 3454 of SEQ ID NO: 1560234
agcagugucuuccauggau

SEQ ID NO: 1585798 - RNA, 19 nt, Artificial Sequence
  Description of Artificial Sequence: Synthetic oligonucleotide
  Antisense strand to SEQ ID NO: 1585797
auccauggaagacacugcu

SEQ ID NO: 1585799 - RNA, 19 nt, Artificial Sequence
  Description of Artificial Sequence: Synthetic oligonucleotide
  Sense strand starting at position 3456 of SEQ ID NO: 1560234
cagugucuuccauggauua

SEQ ID NO: 1585800 - RNA, 19 nt, Artificial Sequence
  Description of Artificial Sequence: Synthetic oligonucleotide
  Antisense strand to SEQ ID NO: 1585799
uaauccauggaagacacug

SEQ ID NO: 1585801 - RNA, 19 nt, Artificial Sequence
  Description of Artificial Sequence: Synthetic oligonucleotide
  Sense strand starting at position 3457 of SEQ ID NO: 1560234
agugucuuccauggauuaa

SEQ ID NO: 1585802 - RNA, 19 nt, Artificial Sequence
  Description of Artificial Sequence: Synthetic oligonucleotide
  Antisense strand to SEQ ID NO: 1585801
uuaauccauggaagacacu

SEQ ID NO: 1585803 - RNA, 19 nt, Artificial Sequence
  Description of Artificial Sequence: Synthetic oligonucleotide
  Sense strand starting at position 3458 of SEQ ID NO: 1560234
gugucuuccauggauuaag

SEQ ID NO: 1585804 - RNA, 19 nt, Artificial Sequence
  Description of Artificial Sequence: Synthetic oligonucleotide
  Antisense strand to SEQ ID NO: 1585803
cuuaauccauggaagacac

SEQ ID NO: 1585805 - RNA, 19 nt, Artificial Sequence
  Description of Artificial Sequence: Synthetic oligonucleotide
  Sense strand starting at position 3481 of SEQ ID NO: 1560234
acagaaggguuugacaaau

SEQ ID NO: 1585806 - RNA, 19 nt, Artificial Sequence
  Description of Artificial Sequence: Synthetic oligonucleotide
  Antisense strand to SEQ ID NO: 1585805
auuugucaaacccuucugu

SEQ ID NO: 1585807 - RNA, 19 nt, Artificial Sequence
  Description of Artificial Sequence: Synthetic oligonucleotide
  Sense strand starting at position 3541 of SEQ ID NO: 1560234
cuugaaauuuauuagagac

SEQ ID NO: 1585808 - RNA, 19 nt, Artificial Sequence
  Description of Artificial Sequence: Synthetic oligonucleotide
  Antisense strand to SEQ ID NO: 1585807
gucucuaauaaauuucaag

SEQ ID NO: 1585809 - RNA, 19 nt, Artificial Sequence
  Description of Artificial Sequence: Synthetic oligonucleotide
  Sense strand starting at position 186 of SEQ ID NO: 1560235
gguggcgugugcuuguaaa

SEQ ID NO: 1585810 - RNA, 19 nt, Artificial Sequence
  Description of Artificial Sequence: Synthetic oligonucleotide
  Antisense strand to SEQ ID NO: 1585809
uuuacaagcacacgccacc

SEQ ID NO: 1585811 - RNA, 19 nt, Artificial Sequence
  Description of Artificial Sequence: Synthetic oligonucleotide
  Sense strand starting at position 380 of SEQ ID NO: 1560235
aggauaugaugauaagaug

SEQ ID NO: 1585812 - RNA, 19 nt, Artificial Sequence
  Description of Artificial Sequence: Synthetic oligonucleotide
  Antisense strand to SEQ ID NO: 1585811
caucuuaucaucauauccu

SEQ ID NO: 1585813 - RNA, 19 nt, Artificial Sequence
  Description of Artificial Sequence: Synthetic oligonucleotide
  Sense strand starting at position 399 of SEQ ID NO: 1560235
gccugaugaugguaccagu

SEQ ID NO: 1585814 - RNA, 19 nt, Artificial Sequence
  Description of Artificial Sequence: Synthetic oligonucleotide
  Antisense strand to SEQ ID NO: 1585813
acugguaccaucaucaggc

SEQ ID NO: 1585815 - RNA, 19 nt, Artificial Sequence
  Description of Artificial Sequence: Synthetic oligonucleotide
  Sense strand starting at position 527 of SEQ ID NO: 1560235
gcauguuaguuccuccuau

SEQ ID NO: 1585816 - RNA, 19 nt, Artificial Sequence
  Description of Artificial Sequence: Synthetic oligonucleotide
  Antisense strand to SEQ ID NO: 1585815
auaggaggaacuaacaugc

SEQ ID NO: 1585817 - RNA, 19 nt, Artificial Sequence
  Description of Artificial Sequence: Synthetic oligonucleotide
  Sense strand starting at position 531 of SEQ ID NO: 1560235
guuaguuccuccuaugauc

SEQ ID NO: 1585818 - RNA, 19 nt, Artificial Sequence
  Description of Artificial Sequence: Synthetic oligonucleotide
  Antisense strand to SEQ ID NO: 1585817
gaucauaggaggaacuaac

SEQ ID NO: 1585819 - RNA, 19 nt, Artificial Sequence
  Description of Artificial Sequence: Synthetic oligonucleotide
  Sense strand starting at position 586 of SEQ ID NO: 1560235
ugguccuucucugcuuaaa

SEQ ID NO: 1585820 - RNA, 19 nt, Artificial Sequence
  Description of Artificial Sequence: Synthetic oligonucleotide
  Antisense strand to SEQ ID NO: 1585819
uuuaagcagagaaggacca

SEQ ID NO: 1585821 - RNA, 19 nt, Artificial Sequence
  Description of Artificial Sequence: Synthetic oligonucleotide
  Sense strand starting at position 596 of SEQ ID NO: 1560235
cugcuuaaauccugagcca

SEQ ID NO: 1585822 - RNA, 19 nt, Artificial Sequence
  Description of Artificial Sequence: Synthetic oligonucleotide
  Antisense strand to SEQ ID NO: 1585821
uggcucaggauuuaagcag

SEQ ID NO: 1585823 - RNA, 19 nt, Artificial Sequence
  Description of Artificial Sequence: Synthetic oligonucleotide
  Sense strand starting at position 597 of SEQ ID NO: 1560235
ugcuuaaauccugagccau

SEQ ID NO: 1585824 - RNA, 19 nt, Artificial Sequence
  Description of Artificial Sequence: Synthetic oligonucleotide
  Antisense strand to SEQ ID NO: 1585823
auggcucaggauuuaagca

SEQ ID NO: 1585825 - RNA, 19 nt, Artificial Sequence
  Description of Artificial Sequence: Synthetic oligonucleotide
  Sense strand starting at position 1044 of SEQ ID NO: 1560235
gaaagaaaguugguauauc

SEQ ID NO: 1585826 - RNA, 19 nt, Artificial Sequence
  Description of Artificial Sequence: Synthetic oligonucleotide
  Antisense strand to SEQ ID NO: 1585825
gauauaccaacuuucuuuc

SEQ ID NO: 1585827 - RNA, 19 nt, Artificial Sequence
  Description of Artificial Sequence: Synthetic oligonucleotide
  Sense strand starting at position 1045 of SEQ ID NO: 1560235
aaagaaaguugguauauca

SEQ ID NO: 1585828 - RNA, 19 nt, Artificial Sequence
  Description of Artificial Sequence: Synthetic oligonucleotide
  Antisense strand to SEQ ID NO: 1585827
ugauauaccaacuuucuuu

SEQ ID NO: 1585829 - RNA, 19 nt, Artificial Sequence
  Description of Artificial Sequence: Synthetic oligonucleotide
  Sense strand starting at position 1154 of SEQ ID NO: 1560235
gcgagacucccgugucuaa

SEQ ID NO: 1585830 - RNA, 19 nt, Artificial Sequence
  Description of Artificial Sequence: Synthetic oligonucleotide
  Antisense strand to SEQ ID NO: 1585829
uuagacacgggagucucgc

SEQ ID NO: 1585831 - RNA, 19 nt, Artificial Sequence
  Description of Artificial Sequence: Synthetic oligonucleotide
  Sense strand starting at position 1181 of SEQ ID NO: 1560235
aaagaaaguuggugucuga

SEQ ID NO: 1585832 - RNA, 19 nt, Artificial Sequence
  Description of Artificial Sequence: Synthetic oligonucleotide
  Antisense strand to SEQ ID NO: 1585831
ucagacaccaacuuucuuu

SEQ ID NO: 1585833 - RNA, 19 nt, Artificial Sequence
  Description of Artificial Sequence: Synthetic oligonucleotide
  Sense strand starting at position 1184 of SEQ ID NO: 1560235
gaaaguuggugucugagga

SEQ ID NO: 1585834 - RNA, 19 nt, Artificial Sequence
  Description of Artificial Sequence: Synthetic oligonucleotide
  Antisense strand to SEQ ID NO: 1585833
uccucagacaccaacuuuc

SEQ ID NO: 1585835 - RNA, 19 nt, Artificial Sequence
  Description of Artificial Sequence: Synthetic oligonucleotide
  Sense strand starting at position 1185 of SEQ ID NO: 1560235
aaaguuggugucugaggaa

SEQ ID NO: 1585836 - RNA, 19 nt, Artificial Sequence
  Description of Artificial Sequence: Synthetic oligonucleotide
  Antisense strand to SEQ ID NO: 1585835
uuccucagacaccaacuuu

SEQ ID NO: 1585837 - RNA, 19 nt, Artificial Sequence
  Description of Artificial Sequence: Synthetic oligonucleotide
  Sense strand starting at position 1209 of SEQ ID NO: 1560235
ggcugauguguagaagcaa

SEQ ID NO: 1585838 - RNA, 19 nt, Artificial Sequence
  Description of Artificial Sequence: Synthetic oligonucleotide
  Antisense strand to SEQ ID NO: 1585837
uugcuucuacacaucagcc

SEQ ID NO: 1585839 - RNA, 19 nt, Artificial Sequence
  Description of Artificial Sequence: Synthetic oligonucleotide
  Sense strand starting at position 1269 of SEQ ID NO: 1560235
guaacaggaucagagagua

SEQ ID NO: 1585840 - RNA, 19 nt, Artificial Sequence
  Description of Artificial Sequence: Synthetic oligonucleotide
  Antisense strand to SEQ ID NO: 1585839
uacucucugauccuguuac

SEQ ID NO: 1585841 - RNA, 19 nt, Artificial Sequence
  Description of Artificial Sequence: Synthetic oligonucleotide
  Sense strand starting at position 1287 of SEQ ID NO: 1560235
acagaaauuugugggcugu

SEQ ID NO: 1585842 - RNA, 19 nt, Artificial Sequence
  Description of Artificial Sequence: Synthetic oligonucleotide
  Antisense strand to SEQ ID NO: 1585841
acagcccacaaauuucugu

SEQ ID NO: 1585843 - RNA, 19 nt, Artificial Sequence
  Description of Artificial Sequence: Synthetic oligonucleotide
  Sense strand starting at position 1443 of SEQ ID NO: 1560235
gggcaugauaguggaauca

SEQ ID NO: 1585844 - RNA, 19 nt, Artificial Sequence
  Description of Artificial Sequence: Synthetic oligonucleotide
  Antisense strand to SEQ ID NO: 1585843
ugauuccacuaucaugccc

SEQ ID NO: 1585845 - RNA, 19 nt, Artificial Sequence
  Description of Artificial Sequence: Synthetic oligonucleotide
  Sense strand starting at position 1575 of SEQ ID NO: 1560235
gccugugccuucugccaau

SEQ ID NO: 1585846 - RNA, 19 nt, Artificial Sequence
  Description of Artificial Sequence: Synthetic oligonucleotide
  Antisense strand to SEQ ID NO: 1585845
auuggcagaaggcacaggc

SEQ ID NO: 1585847 - RNA, 19 nt, Artificial Sequence
  Description of Artificial Sequence: Synthetic oligonucleotide
  Sense strand starting at position 1582 of SEQ ID NO: 1560235
ccuucugccaauggugaga

SEQ ID NO: 1585848 - RNA, 19 nt, Artificial Sequence
  Description of Artificial Sequence: Synthetic oligonucleotide
  Antisense strand to SEQ ID NO: 1585847
ucucaccauuggcagaagg

SEQ ID NO: 1585849 - RNA, 19 nt, Artificial Sequence
  Description of Artificial Sequence: Synthetic oligonucleotide
  Sense strand starting at position 2168 of SEQ ID NO: 1560235
cucccaacuugcugagaga

SEQ ID NO: 1585850 - RNA, 19 nt, Artificial Sequence
  Description of Artificial Sequence: Synthetic oligonucleotide
  Antisense strand to SEQ ID NO: 1585849
ucucucagcaaguugggag

SEQ ID NO: 1585851 - RNA, 19 nt, Artificial Sequence
  Description of Artificial Sequence: Synthetic oligonucleotide
  Sense strand starting at position 2171 of SEQ ID NO: 1560235
ccaacuugcugagagacau

SEQ ID NO: 1585852 - RNA, 19 nt, Artificial Sequence
  Description of Artificial Sequence: Synthetic oligonucleotide
  Antisense strand to SEQ ID NO: 1585851
augucucucagcaaguugg

SEQ ID NO: 1585853 - RNA, 19 nt, Artificial Sequence
  Description of Artificial Sequence: Synthetic oligonucleotide
  Sense strand starting at position 3431 of SEQ ID NO: 1560235
cggccuaggcauugcaauu

SEQ ID NO: 1585854 - RNA, 19 nt, Artificial Sequence
  Description of Artificial Sequence: Synthetic oligonucleotide
  Antisense strand to SEQ ID NO: 1585853
aauugcaaugccuaggccg

SEQ ID NO: 1585855 - RNA, 19 nt, Artificial Sequence
  Description of Artificial Sequence: Synthetic oligonucleotide
  Sense strand starting at position 3444 of SEQ ID NO: 1560235
gcaauuuccuggcugugca

SEQ ID NO: 1585856 - RNA, 19 nt, Artificial Sequence
  Description of Artificial Sequence: Synthetic oligonucleotide
  Antisense strand to SEQ ID NO: 1585855
ugcacagccaggaaauugc

SEQ ID NO: 1585857 - RNA, 19 nt, Artificial Sequence
  Description of Artificial Sequence: Synthetic oligonucleotide
  Sense strand starting at position 3445 of SEQ ID NO: 1560235
caauuuccuggcugugcaa

SEQ ID NO: 1585858 - RNA, 19 nt, Artificial Sequence
  Description of Artificial Sequence: Synthetic oligonucleotide
  Antisense strand to SEQ ID NO: 1585857
uugcacagccaggaaauug

SEQ ID NO: 1585859 - RNA, 19 nt, Artificial Sequence
  Description of Artificial Sequence: Synthetic oligonucleotide
  Sense strand starting at position 3456 of SEQ ID NO: 1560235
cugugcaaccuugaguaaa

SEQ ID NO: 1585860 - RNA, 19 nt, Artificial Sequence
  Description of Artificial Sequence: Synthetic oligonucleotide
  Antisense strand to SEQ ID NO: 1585859
uuuacucaagguugcacag

SEQ ID NO: 1585861 - RNA, 19 nt, Artificial Sequence
  Description of Artificial Sequence: Synthetic oligonucleotide
  Sense strand starting at position 3458 of SEQ ID NO: 1560235
gugcaaccuugaguaaauc

SEQ ID NO: 1585862 - RNA, 19 nt, Artificial Sequence
  Description of Artificial Sequence: Synthetic oligonucleotide
  Antisense strand to SEQ ID NO: 1585861
gauuuacucaagguugcac

SEQ ID NO: 1585863 - RNA, 19 nt, Artificial Sequence
  Description of Artificial Sequence: Synthetic oligonucleotide
  Sense strand starting at position 3502 of SEQ ID NO: 1560235
cuucuucuguaauaugaag

SEQ ID NO: 1585864 - RNA, 19 nt, Artificial Sequence
  Description of Artificial Sequence: Synthetic oligonucleotide
  Antisense strand to SEQ ID NO: 1585863
cuucauauuacagaagaag

SEQ ID NO: 1585865 - RNA, 19 nt, Artificial Sequence
  Description of Artificial Sequence: Synthetic oligonucleotide
  Sense strand starting at position 3529 of SEQ ID NO: 1560235
gucccuaucucauuggguu

SEQ ID NO: 1585866 - RNA, 19 nt, Artificial Sequence
  Description of Artificial Sequence: Synthetic oligonucleotide
  Antisense strand to SEQ ID NO: 1585865
aacccaaugagauagggac

SEQ ID NO: 1585867 - RNA, 19 nt, Artificial Sequence
  Description of Artificial Sequence: Synthetic oligonucleotide
  Sense strand starting at position 3530 of SEQ ID NO: 1560235
ucccuaucucauuggguua

SEQ ID NO: 1585868 - RNA, 19 nt, Artificial Sequence
  Description of Artificial Sequence: Synthetic oligonucleotide
  Antisense strand to SEQ ID NO: 1585867
uaacccaaugagauaggga

SEQ ID NO: 1585869 - RNA, 19 nt, Artificial Sequence
  Description of Artificial Sequence: Synthetic oligonucleotide
  Sense strand starting at position 3541 of SEQ ID NO: 1560235
uuggguuauucugaggacu

SEQ ID NO: 1585870 - RNA, 19 nt, Artificial Sequence
  Description of Artificial Sequence: Synthetic oligonucleotide
  Antisense strand to SEQ ID NO: 1585869
aguccucagaauaacccaa

SEQ ID NO: 1585871 - RNA, 19 nt, Artificial Sequence
  Description of Artificial Sequence: Synthetic oligonucleotide
  Sense strand starting at position 3543 of SEQ ID NO: 1560235
ggguuauucugaggacuca

SEQ ID NO: 1585872 - RNA, 19 nt, Artificial Sequence
  Description of Artificial Sequence: Synthetic oligonucleotide
  Antisense strand to SEQ ID NO: 1585871
ugaguccucagaauaaccc

SEQ ID NO: 1585873 - RNA, 19 nt, Artificial Sequence
  Description of Artificial Sequence: Synthetic oligonucleotide
  Sense strand starting at position 3568 of SEQ ID NO: 1560235
uaauuuauguaaggagcuu

SEQ ID NO: 1585874 - RNA, 19 nt, Artificial Sequence
  Description of Artificial Sequence: Synthetic oligonucleotide
  Antisense strand to SEQ ID NO: 1585873
aagcuccuuacauaaauua

SEQ ID NO: 1585875 - RNA, 19 nt, Artificial Sequence
  Description of Artificial Sequence: Synthetic oligonucleotide
  Sense strand starting at position 3615 of SEQ ID NO: 1560235
augaaucagcucugaguaa

SEQ ID NO: 1585876 - RNA, 19 nt, Artificial Sequence
  Description of Artificial Sequence: Synthetic oligonucleotide
  Antisense strand to SEQ ID NO: 1585875
uuacucagagcugauucau

SEQ ID NO: 1585877 - RNA, 19 nt, Artificial Sequence
  Description of Artificial Sequence: Synthetic oligonucleotide
  Sense strand starting at position 3619 of SEQ ID NO: 1560235
aucagcucugaguaacauu

SEQ ID NO: 1585878 - RNA, 19 nt, Artificial Sequence
  Description of Artificial Sequence: Synthetic oligonucleotide
  Antisense strand to SEQ ID NO: 1585877
aauguuacucagagcugau

SEQ ID NO: 1585879 - RNA, 19 nt, Artificial Sequence
  Description of Artificial Sequence: Synthetic oligonucleotide
  Sense strand starting at position 3622 of SEQ ID NO: 1560235
agcucugaguaacauuauu

SEQ ID NO: 1585880 - RNA, 19 nt, Artificial Sequence
  Description of Artificial Sequence: Synthetic oligonucleotide
  Antisense strand to SEQ ID NO: 1585879
aauaauguuacucagagcu

SEQ ID NO: 1585881 - RNA, 19 nt, Artificial Sequence
  Description of Artificial Sequence: Synthetic oligonucleotide
  Sense strand starting at position 310 of SEQ ID NO: 1560236
gcugcuguaacggcucaau

SEQ ID NO: 1585882 - RNA, 19 nt, Artificial Sequence
  Description of Artificial Sequence: Synthetic oligonucleotide
  Antisense strand to SEQ ID NO: 1585881
auugagccguuacagcagc

SEQ ID NO: 1585883 - RNA, 19 nt, Artificial Sequence
  Description of Artificial Sequence: Synthetic oligonucleotide
  Sense strand starting at position 313 of SEQ ID NO: 1560236
gcuguaacggcucaauuac

SEQ ID NO: 1585884 - RNA, 19 nt, Artificial Sequence
  Description of Artificial Sequence: Synthetic oligonucleotide
  Antisense strand to SEQ ID NO: 1585883
guaauugagccguuacagc

SEQ ID NO: 1585885 - RNA, 19 nt, Artificial Sequence
  Description of Artificial Sequence: Synthetic oligonucleotide
  Sense strand starting at position 424 of SEQ ID NO: 1560236
gcaugauacugacucauuc

SEQ ID NO: 1585886 - RNA, 19 nt, Artificial Sequence
  Description of Artificial Sequence: Synthetic oligonucleotide
  Antisense strand to SEQ ID NO: 1585885
gaaugagucaguaucaugc

SEQ ID NO: 1585887 - RNA, 19 nt, Artificial Sequence
  Description of Artificial Sequence: Synthetic oligonucleotide
  Sense strand starting at position 772 of SEQ ID NO: 1560236
gacagaccuguccagcaaa

SEQ ID NO: 1585888 - RNA, 19 nt, Artificial Sequence
  Description of Artificial Sequence: Synthetic oligonucleotide
  Antisense strand to SEQ ID NO: 1585887
uuugcuggacaggucuguc

SEQ ID NO: 1585889 - RNA, 19 nt, Artificial Sequence
  Description of Artificial Sequence: Synthetic oligonucleotide
  Sense strand starting at position 864 of SEQ ID NO: 1560236
ccugucaugucaccucuua

SEQ ID NO: 1585890 - RNA, 19 nt, Artificial Sequence
  Description of Artificial Sequence: Synthetic oligonucleotide
  Antisense strand to SEQ ID NO: 1585889
uaagaggugacaugacagg

SEQ ID NO: 1585891 - RNA, 19 nt, Artificial Sequence
  Description of Artificial Sequence: Synthetic oligonucleotide
  Sense strand starting at position 1097 of SEQ ID NO: 1560236
uggccaaugucuuaacgaa

SEQ ID NO: 1585892 - RNA, 19 nt, Artificial Sequence
  Description of Artificial Sequence: Synthetic oligonucleotide
  Antisense strand to SEQ ID NO: 1585891
uucguuaagacauuggcca

SEQ ID NO: 1585893 - RNA, 19 nt, Artificial Sequence
  Description of Artificial Sequence: Synthetic oligonucleotide
  Sense strand starting at position 1109 of SEQ ID NO: 1560236
uaacgaaguucucaagucu

SEQ ID NO: 1585894 - RNA, 19 nt, Artificial Sequence
  Description of Artificial Sequence: Synthetic oligonucleotide
  Antisense strand to SEQ ID NO: 1585893
agacuugagaacuucguua

SEQ ID NO: 1585895 - RNA, 19 nt, Artificial Sequence
  Description of Artificial Sequence: Synthetic oligonucleotide
  Sense strand starting at position 1266 of SEQ ID NO: 1560236
ugcugccauuccgaucaaa

SEQ ID NO: 1585896 - RNA, 19 nt, Artificial Sequence
  Description of Artificial Sequence: Synthetic oligonucleotide
  Antisense strand to SEQ ID NO: 1585895
uuugaucggaauggcagca

SEQ ID NO: 1585897 - RNA, 19 nt, Artificial Sequence
  Description of Artificial Sequence: Synthetic oligonucleotide
  Sense strand starting at position 1324 of SEQ ID NO: 1560236
cucggcaggucucuuaaga

SEQ ID NO: 1585898 - RNA, 19 nt, Artificial Sequence
  Description of Artificial Sequence: Synthetic oligonucleotide
  Antisense strand to SEQ ID NO: 1585897
ucuuaagagaccugccgag

SEQ ID NO: 1585899 - RNA, 19 nt, Artificial Sequence
  Description of Artificial Sequence: Synthetic oligonucleotide
  Sense strand starting at position 1335 of SEQ ID NO: 1560236
ucuuaagacccucaucgau

SEQ ID NO: 1585900 - RNA, 19 nt, Artificial Sequence
  Description of Artificial Sequence: Synthetic oligonucleotide
  Antisense strand to SEQ ID NO: 1585899
aucgaugagggucuuaaga

SEQ ID NO: 1585901 - RNA, 19 nt, Artificial Sequence
  Description of Artificial Sequence: Synthetic oligonucleotide
  Sense strand starting at position 1341 of SEQ ID NO: 1560236
gacccucaucgauggaaca

SEQ ID NO: 1585902 - RNA, 19 nt, Artificial Sequence
  Description of Artificial Sequence: Synthetic oligonucleotide
  Antisense strand to SEQ ID NO: 1585901
uguuccaucgaugaggguc

SEQ ID NO: 1585903 - RNA, 19 nt, Artificial Sequence
  Description of Artificial Sequence: Synthetic oligonucleotide
  Sense strand starting at position 1476 of SEQ ID NO: 1560236
cuguccucgcaagauuaac

SEQ ID NO: 1585904 - RNA, 19 nt, Artificial Sequence
  Description of Artificial Sequence: Synthetic oligonucleotide
  Antisense strand to SEQ ID NO: 1585903
guuaaucuugcgaggacag

SEQ ID NO: 1585905 - RNA, 19 nt, Artificial Sequence
  Description of Artificial Sequence: Synthetic oligonucleotide
  Sense strand starting at position 1648 of SEQ ID NO: 1560236
aguggcucccuuugcagaa

SEQ ID NO: 1585906 - RNA, 19 nt, Artificial Sequence
  Description of Artificial Sequence: Synthetic oligonucleotide
  Antisense strand to SEQ ID NO: 1585905
uucugcaaagggagccacu

SEQ ID NO: 1585907 - RNA, 19 nt, Artificial Sequence
  Description of Artificial Sequence: Synthetic oligonucleotide
  Sense strand starting at position 2405 of SEQ ID NO: 1560236
ggcaguuuccuccacugaa

SEQ ID NO: 1585908 - RNA, 19 nt, Artificial Sequence
  Description of Artificial Sequence: Synthetic oligonucleotide
  Antisense strand to SEQ ID NO: 1585907
uucaguggaggaaacugcc

SEQ ID NO: 1585909 - RNA, 19 nt, Artificial Sequence
  Description of Artificial Sequence: Synthetic oligonucleotide
  Sense strand starting at position 2489 of SEQ ID NO: 1560236
ggucccucuucgucucaaa

SEQ ID NO: 1585910 - RNA, 19 nt, Artificial Sequence
  Description of Artificial Sequence: Synthetic oligonucleotide
  Antisense strand to SEQ ID NO: 1585909
uuugagacgaagagggacc

SEQ ID NO: 1585911 - RNA, 19 nt, Artificial Sequence
  Description of Artificial Sequence: Synthetic oligonucleotide
  Sense strand starting at position 2535 of SEQ ID NO: 1560236
gagacauaguaugugccaa

SEQ ID NO: 1585912 - RNA, 19 nt, Artificial Sequence
  Description of Artificial Sequence: Synthetic oligonucleotide
  Antisense strand to SEQ ID NO: 1585911
uuggcacauacuaugucuc

SEQ ID NO: 1585913 - RNA, 19 nt, Artificial Sequence
  Description of Artificial Sequence: Synthetic oligonucleotide
  Sense strand starting at position 2539 of SEQ ID NO: 1560236
cauaguaugugccaacuga

SEQ ID NO: 1585914 - RNA, 19 nt, Artificial Sequence
  Description of Artificial Sequence: Synthetic oligonucleotide
  Antisense strand to SEQ ID NO: 1585913
ucaguuggcacauacuaug

SEQ ID NO: 1585915 - RNA, 19 nt, Artificial Sequence
  Description of Artificial Sequence: Synthetic oligonucleotide
  Sense strand starting at position 3583 of SEQ ID NO: 1560236
ggucacuugaaguaggagu

SEQ ID NO: 1585916 - RNA, 19 nt, Artificial Sequence
  Description of Artificial Sequence: Synthetic oligonucleotide
  Antisense strand to SEQ ID NO: 1585915
acuccuacuucaagugacc

SEQ ID NO: 1585917 - RNA, 19 nt, Artificial Sequence
  Description of Artificial Sequence: Synthetic oligonucleotide
  Sense strand starting at position 3702 of SEQ ID NO: 1560236
aggcuagcgcaggagaauu

SEQ ID NO: 1585918 - RNA, 19 nt, Artificial Sequence
  Description of Artificial Sequence: Synthetic oligonucleotide
  Antisense strand to SEQ ID NO: 1585917
aauucuccugcgcuagccu

SEQ ID NO: 1585919 - RNA, 19 nt, Artificial Sequence
  Description of Artificial Sequence: Synthetic oligonucleotide
  Sense strand starting at position 92 of SEQ ID NO: 1560237
gccuauuugugcugugggu

SEQ ID NO: 1585920 - RNA, 19 nt, Artificial Sequence
  Description of Artificial Sequence: Synthetic oligonucleotide
  Antisense strand to SEQ ID NO: 1585919
acccacagcacaaauaggc

SEQ ID NO: 1585921 - RNA, 19 nt, Artificial Sequence
  Description of Artificial Sequence: Synthetic oligonucleotide
  Sense strand starting at position 534 of SEQ ID NO: 1560237
acaagugugaccuguagcu

SEQ ID NO: 1585922 - RNA, 19 nt, Artificial Sequence
  Description of Artificial Sequence: Synthetic oligonucleotide
  Antisense strand to SEQ ID NO: 1585921
agcuacaggucacacuugu

SEQ ID NO: 1585923 - RNA, 19 nt, Artificial Sequence
  Description of Artificial Sequence: Synthetic oligonucleotide
  Sense strand starting at position 655 of SEQ ID NO: 1560237
ccgagaaauuuacaccaga

SEQ ID NO: 1585924 - RNA, 19 nt, Artificial Sequence
  Description of Artificial Sequence: Synthetic oligonucleotide
  Antisense strand to SEQ ID NO: 1585923
ucugguguaaauuucucgg

SEQ ID NO: 1585925 - RNA, 19 nt, Artificial Sequence
  Description of Artificial Sequence: Synthetic oligonucleotide
  Sense strand starting at position 2330 of SEQ ID NO: 1560237
ugccgcuuccucuuuaacu

SEQ ID NO: 1585926 - RNA, 19 nt, Artificial Sequence
  Description of Artificial Sequence: Synthetic oligonucleotide
  Antisense strand to SEQ ID NO: 1585925
aguuaaagaggaagcggca

SEQ ID NO: 1585927 - RNA, 19 nt, Artificial Sequence
  Description of Artificial Sequence: Synthetic oligonucleotide
  Sense strand starting at position 2653 of SEQ ID NO: 1560237
uuaguugcaucuguuaauu

SEQ ID NO: 1585928 - RNA, 19 nt, Artificial Sequence
  Description of Artificial Sequence: Synthetic oligonucleotide
  Antisense strand to SEQ ID NO: 1585927
aauuaacagaugcaacuaa

SEQ ID NO: 1585929 - RNA, 19 nt, Artificial Sequence
  Description of Artificial Sequence: Synthetic oligonucleotide
  Sense strand starting at position 2658 of SEQ ID NO: 1560237
ugcaucuguuaauugcaua

SEQ ID NO: 1585930 - RNA, 19 nt, Artificial Sequence
  Description of Artificial Sequence: Synthetic oligonucleotide
  Antisense strand to SEQ ID NO: 1585929
uaugcaauuaacagaugca

SEQ ID NO: 1585931 - RNA, 19 nt, Artificial Sequence
  Description of Artificial Sequence: Synthetic oligonucleotide
  Sense strand starting at position 2683 of SEQ ID NO: 1560237
ugguucuucuucuggguga

SEQ ID NO: 1585932 - RNA, 19 nt, Artificial Sequence
  Description of Artificial Sequence: Synthetic oligonucleotide
  Antisense strand to SEQ ID NO: 1585931
ucacccagaagaagaacca

SEQ ID NO: 1585933 - RNA, 19 nt, Artificial Sequence
  Description of Artificial Sequence: Synthetic oligonucleotide
  Sense strand starting at position 2687 of SEQ ID NO: 1560237
ucuucuucugggugacuuu

SEQ ID NO: 1585934 - RNA, 19 nt, Artificial Sequence
  Description of Artificial Sequence: Synthetic oligonucleotide
  Antisense strand to SEQ ID NO: 1585933
aaagucacccagaagaaga

SEQ ID NO: 1585935 - RNA, 19 nt, Artificial Sequence
  Description of Artificial Sequence: Synthetic oligonucleotide
  Sense strand starting at position 2898 of SEQ ID NO: 1560237
cuaggcugacgguaguaaa

SEQ ID NO: 1585936 - RNA, 19 nt, Artificial Sequence
  Description of Artificial Sequence: Synthetic oligonucleotide
  Antisense strand to SEQ ID NO: 1585935
uuuacuaccgucagccuag

SEQ ID NO: 1585937 - RNA, 19 nt, Artificial Sequence
  Description of Artificial Sequence: Synthetic oligonucleotide
  Sense strand starting at position 2987 of SEQ ID NO: 1560237
cauugacagccugaucguu

SEQ ID NO: 1585938 - RNA, 19 nt, Artificial Sequence
  Description of Artificial Sequence: Synthetic oligonucleotide
  Antisense strand to SEQ ID NO: 1585937
aacgaucaggcugucaaug

SEQ ID NO: 1585939 - RNA, 19 nt, Artificial Sequence
  Description of Artificial Sequence: Synthetic oligonucleotide
  Sense strand starting at position 2995 of SEQ ID NO: 1560237
gccugaucguuugguuuau

SEQ ID NO: 1585940 - RNA, 19 nt, Artificial Sequence
  Description of Artificial Sequence: Synthetic oligonucleotide
  Antisense strand to SEQ ID NO: 1585939
auaaaccaaacgaucaggc

SEQ ID NO: 1585941 - RNA, 19 nt, Artificial Sequence
  Description of Artificial Sequence: Synthetic oligonucleotide
  Sense strand starting at position 2996 of SEQ ID NO: 1560237
ccugaucguuugguuuauu

SEQ ID NO: 1585942 - RNA, 19 nt, Artificial Sequence
  Description of Artificial Sequence: Synthetic oligonucleotide
  Antisense strand to SEQ ID NO: 1585941
aauaaaccaaacgaucagg

SEQ ID NO: 1585943 - RNA, 19 nt, Artificial Sequence
  Description of Artificial Sequence: Synthetic oligonucleotide
  Sense strand starting at position 3228 of SEQ ID NO: 1560237
aagcuaaggccggagaaau

SEQ ID NO: 1585944 - RNA, 19 nt, Artificial Sequence
  Description of Artificial Sequence: Synthetic oligonucleotide
  Antisense strand to SEQ ID NO: 1585943
auuucuccggccuuagcuu

SEQ ID NO: 1585945 - RNA, 19 nt, Artificial Sequence
  Description of Artificial Sequence: Synthetic oligonucleotide
  Sense strand starting at position 3641 of SEQ ID NO: 1560237
ggaacaagaucacagacaa

SEQ ID NO: 1585946 - RNA, 19 nt, Artificial Sequence
  Description of Artificial Sequence: Synthetic oligonucleotide
  Antisense strand to SEQ ID NO: 1585945
uugucugugaucuuguucc

SEQ ID NO: 1585947 - RNA, 19 nt, Artificial Sequence
  Description of Artificial Sequence: Synthetic oligonucleotide
  Sense strand starting at position 1161 of SEQ ID NO: 1560238
gccuaaacaccugaguaau

SEQ ID NO: 1585948 - RNA, 19 nt, Artificial Sequence
  Description of Artificial Sequence: Synthetic oligonucleotide
  Antisense strand to SEQ ID NO: 1585947
auuacucagguguuuaggc

SEQ ID NO: 1585949 - RNA, 19 nt, Artificial Sequence
  Description of Artificial Sequence: Synthetic oligonucleotide
  Sense strand starting at position 1167 of SEQ ID NO: 1560238
acaccugaguaauugagua

SEQ ID NO: 1585950 - RNA, 19 nt, Artificial Sequence
  Description of Artificial Sequence: Synthetic oligonucleotide
  Antisense strand to SEQ ID NO: 1585949
uacucaauuacucaggugu

SEQ ID NO: 1585951 - RNA, 19 nt, Artificial Sequence
  Description of Artificial Sequence: Synthetic oligonucleotide
  Sense strand starting at position 1171 of SEQ ID NO: 1560238
cugaguaauugaguagauu

SEQ ID NO: 1585952 - RNA, 19 nt, Artificial Sequence
  Description of Artificial Sequence: Synthetic oligonucleotide
  Antisense strand to SEQ ID NO: 1585951
aaucuacucaauuacucag

SEQ ID NO: 1585953 - RNA, 19 nt, Artificial Sequence
  Description of Artificial Sequence: Synthetic oligonucleotide
  Sense strand starting at position 1183 of SEQ ID NO: 1560238
guagauuaagguugggaag

SEQ ID NO: 1585954 - RNA, 19 nt, Artificial Sequence
  Description of Artificial Sequence: Synthetic oligonucleotide
  Antisense strand to SEQ ID NO: 1585953
cuucccaaccuuaaucuac

SEQ ID NO: 1585955 - RNA, 19 nt, Artificial Sequence
  Description of Artificial Sequence: Synthetic oligonucleotide
  Sense strand starting at position 1185 of SEQ ID NO: 1560238
agauuaagguugggaagau

SEQ ID NO: 1585956 - RNA, 19 nt, Artificial Sequence
  Description of Artificial Sequence: Synthetic oligonucleotide
  Antisense strand to SEQ ID NO: 1585955
aucuucccaaccuuaaucu

SEQ ID NO: 1585957 - RNA, 19 nt, Artificial Sequence
  Description of Artificial Sequence: Synthetic oligonucleotide
  Sense strand starting at position 1186 of SEQ ID NO: 1560238
gauuaagguugggaagaug

SEQ ID NO: 1585958 - RNA, 19 nt, Artificial Sequence
  Description of Artificial Sequence: Synthetic oligonucleotide
  Antisense strand to SEQ ID NO: 1585957
caucuucccaaccuuaauc

SEQ ID NO: 1585959 - RNA, 19 nt, Artificial Sequence
  Description of Artificial Sequence: Synthetic oligonucleotide
  Sense strand starting at position 1615 of SEQ ID NO: 1560238
ugagguccucggugcagaa

SEQ ID NO: 1585960 - RNA, 19 nt, Artificial Sequence
  Description of Artificial Sequence: Synthetic oligonucleotide
  Antisense strand to SEQ ID NO: 1585959
uucugcaccgaggaccuca

SEQ ID NO: 1585961 - RNA, 19 nt, Artificial Sequence
  Description of Artificial Sequence: Synthetic oligonucleotide
  Sense strand starting at position 1886 of SEQ ID NO: 1560238
caaacuucuuucgcggaaa

SEQ ID NO: 1585962 - RNA, 19 nt, Artificial Sequence
  Description of Artificial Sequence: Synthetic oligonucleotide
  Antisense strand to SEQ ID NO: 1585961
uuuccgcgaaagaaguuug

SEQ ID NO: 1585963 - RNA, 19 nt, Artificial Sequence
  Description of Artificial Sequence: Synthetic oligonucleotide
  Sense strand starting at position 2125 of SEQ ID NO: 1560238
cgugaaguugccuugccuu

SEQ ID NO: 1585964 - RNA, 19 nt, Artificial Sequence
  Description of Artificial Sequence: Synthetic oligonucleotide
  Antisense strand to SEQ ID NO: 1585963
aaggcaaggcaacuucacg

SEQ ID NO: 1585965 - RNA, 19 nt, Artificial Sequence
  Description of Artificial Sequence: Synthetic oligonucleotide
  Sense strand starting at position 2387 of SEQ ID NO: 1560238
gaagauugguuuccggaag

SEQ ID NO: 1585966 - RNA, 19 nt, Artificial Sequence
  Description of Artificial Sequence: Synthetic oligonucleotide
  Antisense strand to SEQ ID NO: 1585965
cuuccggaaaccaaucuuc

SEQ ID NO: 1585967 - RNA, 19 nt, Artificial Sequence
  Description of Artificial Sequence: Synthetic oligonucleotide
  Sense strand starting at position 2388 of SEQ ID NO: 1560238
aagauugguuuccggaaga

SEQ ID NO: 1585968 - RNA, 19 nt, Artificial Sequence
  Description of Artificial Sequence: Synthetic oligonucleotide
  Antisense strand to SEQ ID NO: 1585967
ucuuccggaaaccaaucuu

SEQ ID NO: 1585969 - RNA, 19 nt, Artificial Sequence
  Description of Artificial Sequence: Synthetic oligonucleotide
  Sense strand starting at position 2399 of SEQ ID NO: 1560238
ccggaagaagucuguucuu

SEQ ID NO: 1585970 - RNA, 19 nt, Artificial Sequence
  Description of Artificial Sequence: Synthetic oligonucleotide
  Antisense strand to SEQ ID NO: 1585969
aagaacagacuucuuccgg

SEQ ID NO: 1585971 - RNA, 19 nt, Artificial Sequence
  Description of Artificial Sequence: Synthetic oligonucleotide
  Sense strand starting at position 2473 of SEQ ID NO: 1560238
aguauucugucccuuuaau

SEQ ID NO: 1585972 - RNA, 19 nt, Artificial Sequence
  Description of Artificial Sequence: Synthetic oligonucleotide
  Antisense strand to SEQ ID NO: 1585971
auuaaagggacagaauacu

SEQ ID NO: 1585973 - RNA, 19 nt, Artificial Sequence
  Description of Artificial Sequence: Synthetic oligonucleotide
  Sense strand starting at position 2718 of SEQ ID NO: 1560238
aauguacuaggucgagaag

SEQ ID NO: 1585974 - RNA, 19 nt, Artificial Sequence
  Description of Artificial Sequence: Synthetic oligonucleotide
  Antisense strand to SEQ ID NO: 1585973
cuucucgaccuaguacauu

SEQ ID NO: 1585975 - RNA, 19 nt, Artificial Sequence
  Description of Artificial Sequence: Synthetic oligonucleotide
  Sense strand starting at position 2800 of SEQ ID NO: 1560238
ggcugaacuacuugaaggu

SEQ ID NO: 1585976 - RNA, 19 nt, Artificial Sequence
  Description of Artificial Sequence: Synthetic oligonucleotide
  Antisense strand to SEQ ID NO: 1585975
accuucaaguaguucagcc

SEQ ID NO: 1585977 - RNA, 19 nt, Artificial Sequence
  Description of Artificial Sequence: Synthetic oligonucleotide
  Sense strand starting at position 2872 of SEQ ID NO: 1560238
gugagauuccugggcuaaa

SEQ ID NO: 1585978 - RNA, 19 nt, Artificial Sequence
  Description of Artificial Sequence: Synthetic oligonucleotide
  Antisense strand to SEQ ID NO: 1585977
uuuagcccaggaaucucac

SEQ ID NO: 1585979 - RNA, 19 nt, Artificial Sequence
  Description of Artificial Sequence: Synthetic oligonucleotide
  Sense strand starting at position 2873 of SEQ ID NO: 1560238
ugagauuccugggcuaaac

SEQ ID NO: 1585980 - RNA, 19 nt, Artificial Sequence
  Description of Artificial Sequence: Synthetic oligonucleotide
  Antisense strand to SEQ ID NO: 1585979
guuuagcccaggaaucuca

SEQ ID NO: 1585981 - RNA, 19 nt, Artificial Sequence
  Description of Artificial Sequence: Synthetic oligonucleotide
  Sense strand starting at position 2926 of SEQ ID NO: 1560238
ccuuguagauucucaguaa

SEQ ID NO: 1585982 - RNA, 19 nt, Artificial Sequence
  Description of Artificial Sequence: Synthetic oligonucleotide
  Antisense strand to SEQ ID NO: 1585981
uuacugagaaucuacaagg

SEQ ID NO: 1585983 - RNA, 19 nt, Artificial Sequence
  Description of Artificial Sequence: Synthetic oligonucleotide
  Sense strand starting at position 2927 of SEQ ID NO: 1560238
cuuguagauucucaguaag

SEQ ID NO: 1585984 - RNA, 19 nt, Artificial Sequence
  Description of Artificial Sequence: Synthetic oligonucleotide
  Antisense strand to SEQ ID NO: 1585983
cuuacugagaaucuacaag

SEQ ID NO: 1585985 - RNA, 19 nt, Artificial Sequence
  Description of Artificial Sequence: Synthetic oligonucleotide
  Sense strand starting at position 2929 of SEQ ID NO: 1560238
uguagauucucaguaaggg

SEQ ID NO: 1585986 - RNA, 19 nt, Artificial Sequence
  Description of Artificial Sequence: Synthetic oligonucleotide
  Antisense strand to SEQ ID NO: 1585985
cccuuacugagaaucuaca

SEQ ID NO: 1585987 - RNA, 19 nt, Artificial Sequence
  Description of Artificial Sequence: Synthetic oligonucleotide
  Sense strand starting at position 2953 of SEQ ID NO: 1560238
ggagcaucagauuguggaa

SEQ ID NO: 1585988 - RNA, 19 nt, Artificial Sequence
  Description of Artificial Sequence: Synthetic oligonucleotide
  Antisense strand to SEQ ID NO: 1585987
uuccacaaucugaugcucc

SEQ ID NO: 1585989 - RNA, 19 nt, Artificial Sequence
  Description of Artificial Sequence: Synthetic oligonucleotide
  Sense strand starting at position 2980 of SEQ ID NO: 1560238
gguaguacgacuuggaaag

SEQ ID NO: 1585990 - RNA, 19 nt, Artificial Sequence
  Description of Artificial Sequence: Synthetic oligonucleotide
  Antisense strand to SEQ ID NO: 1585989
cuuuccaagucguacuacc

SEQ ID NO: 1585991 - RNA, 19 nt, Artificial Sequence
  Description of Artificial Sequence: Synthetic oligonucleotide
  Sense strand starting at position 3006 of SEQ ID NO: 1560238
ggauccaaauuguaccauu

SEQ ID NO: 1585992 - RNA, 19 nt, Artificial Sequence
  Description of Artificial Sequence: Synthetic oligonucleotide
  Antisense strand to SEQ ID NO: 1585991
aaugguacaauuuggaucc

SEQ ID NO: 1585993 - RNA, 19 nt, Artificial Sequence
  Description of Artificial Sequence: Synthetic oligonucleotide
  Sense strand starting at position 3049 of SEQ ID NO: 1560238
cacagaacaguagguaauu

SEQ ID NO: 1585994 - RNA, 19 nt, Artificial Sequence
  Description of Artificial Sequence: Synthetic oligonucleotide
  Antisense strand to SEQ ID NO: 1585993
aauuaccuacuguucugug

SEQ ID NO: 1585995 - RNA, 19 nt, Artificial Sequence
  Description of Artificial Sequence: Synthetic oligonucleotide
  Sense strand starting at position 3131 of SEQ ID NO: 1560238
caaaucgugggcuagcaau

SEQ ID NO: 1585996 - RNA, 19 nt, Artificial Sequence
  Description of Artificial Sequence: Synthetic oligonucleotide
  Antisense strand to SEQ ID NO: 1585995
auugcuagcccacgauuug

SEQ ID NO: 1585997 - RNA, 19 nt, Artificial Sequence
  Description of Artificial Sequence: Synthetic oligonucleotide
  Sense strand starting at position 3296 of SEQ ID NO: 1560238
ggguuagcccaagacuuag

SEQ ID NO: 1585998 - RNA, 19 nt, Artificial Sequence
  Description of Artificial Sequence: Synthetic oligonucleotide
  Antisense strand to SEQ ID NO: 1585997
cuaagucuugggcuaaccc

SEQ ID NO: 1585999 - RNA, 19 nt, Artificial Sequence
  Description of Artificial Sequence: Synthetic oligonucleotide
  Sense strand starting at position 3471 of SEQ ID NO: 1560238
aggauucuggcucaggagu

SEQ ID NO: 1586000 - RNA, 19 nt, Artificial Sequence
  Description of Artificial Sequence: Synthetic oligonucleotide
  Antisense strand to SEQ ID NO: 1585999
acuccugagccagaauccu

SEQ ID NO: 1586001 - RNA, 19 nt, Artificial Sequence
  Description of Artificial Sequence: Synthetic oligonucleotide
  Sense strand starting at position 3534 of SEQ ID NO: 1560238
gugaauagugaauggucuu

SEQ ID NO: 1586002 - RNA, 19 nt, Artificial Sequence
  Description of Artificial Sequence: Synthetic oligonucleotide
  Antisense strand to SEQ ID NO: 1586001
aagaccauucacuauucac

SEQ ID NO: 1586003 - RNA, 19 nt, Artificial Sequence
  Description of Artificial Sequence: Synthetic oligonucleotide
  Sense strand starting at position 3553 of SEQ ID NO: 1560238
ggugacgucacgcaggaaa

SEQ ID NO: 1586004 - RNA, 19 nt, Artificial Sequence
  Description of Artificial Sequence: Synthetic oligonucleotide
  Antisense strand to SEQ ID NO: 1586003
uuuccugcgugacgucacc

SEQ ID NO: 1586005 - RNA, 19 nt, Artificial Sequence
  Description of Artificial Sequence: Synthetic oligonucleotide
  Sense strand starting at position 3638 of SEQ ID NO: 1560238
ccucuuaccuacuugaguu

SEQ ID NO: 1586006 - RNA, 19 nt, Artificial Sequence
  Description of Artificial Sequence: Synthetic oligonucleotide
  Antisense strand to SEQ ID NO: 1586005
aacucaaguagguaagagg

SEQ ID NO: 1586007 - RNA, 19 nt, Artificial Sequence
  Description of Artificial Sequence: Synthetic oligonucleotide
  Sense strand starting at position 3653 of SEQ ID NO: 1560238
aguucagucuaugaggaga

SEQ ID NO: 1586008 - RNA, 19 nt, Artificial Sequence
  Description of Artificial Sequence: Synthetic oligonucleotide
  Antisense strand to SEQ ID NO: 1586007
ucuccucauagacugaacu

SEQ ID NO: 1586009 - RNA, 19 nt, Artificial Sequence
  Description of Artificial Sequence: Synthetic oligonucleotide
  Sense strand starting at position 3754 of SEQ ID NO: 1560238
ccugaagggaggugauauu

SEQ ID NO: 1586010 - RNA, 19 nt, Artificial Sequence
  Description of Artificial Sequence: Synthetic oligonucleotide
  Antisense strand to SEQ ID NO: 1586009
aauaucaccucccuucagg

SEQ ID NO: 1586011 - RNA, 19 nt, Artificial Sequence
  Description of Artificial Sequence: Synthetic oligonucleotide
  Sense strand starting at position 3769 of SEQ ID NO: 1560238
uauugagggcccggucaau

SEQ ID NO: 1586012 - RNA, 19 nt, Artificial Sequence
  Description of Artificial Sequence: Synthetic oligonucleotide
  Antisense strand to SEQ ID NO: 1586011
auugaccgggcccucaaua

SEQ ID NO: 1586013 - RNA, 19 nt, Artificial Sequence
  Description of Artificial Sequence: Synthetic oligonucleotide
  Sense strand starting at position 3787 of SEQ ID NO: 1560238
ugaggauccaggugacagu

SEQ ID NO: 1586014 - RNA, 19 nt, Artificial Sequence
  Description of Artificial Sequence: Synthetic oligonucleotide
  Antisense strand to SEQ ID NO: 1586013
acugucaccuggauccuca

SEQ ID NO: 1586015 - RNA, 19 nt, Artificial Sequence
  Description of Artificial Sequence: Synthetic oligonucleotide
  Sense strand starting at position 3832 of SEQ ID NO: 1560238
agcccugauaggugaugaa

SEQ ID NO: 1586016 - RNA, 19 nt, Artificial Sequence
  Description of Artificial Sequence: Synthetic oligonucleotide
  Antisense strand to SEQ ID NO: 1586015
uucaucaccuaucagggcu

SEQ ID NO: 1586017 - RNA, 19 nt, Artificial Sequence
  Description of Artificial Sequence: Synthetic oligonucleotide
  Sense strand starting at position 3842 of SEQ ID NO: 1560238
ggugaugaagccgaaggau

SEQ ID NO: 1586018 - RNA, 19 nt, Artificial Sequence
  Description of Artificial Sequence: Synthetic oligonucleotide
  Antisense strand to SEQ ID NO: 1586017
auccuucggcuucaucacc

SEQ ID NO: 1586019 - RNA, 19 nt, Artificial Sequence
  Description of Artificial Sequence: Synthetic oligonucleotide
  Sense strand starting at position 3891 of SEQ ID NO: 1560238
ugaagaaaguaggcaucau

SEQ ID NO: 1586020 - RNA, 19 nt, Artificial Sequence
  Description of Artificial Sequence: Synthetic oligonucleotide
  Antisense strand to SEQ ID NO: 1586019
augaugccuacuuucuuca

SEQ ID NO: 1586021 - RNA, 19 nt, Artificial Sequence
  Description of Artificial Sequence: Synthetic oligonucleotide
  Sense strand starting at position 3901 of SEQ ID NO: 1560238
aggcaucaucugcgggaau

SEQ ID NO: 1586022 - RNA, 19 nt, Artificial Sequence
  Description of Artificial Sequence: Synthetic oligonucleotide
  Antisense strand to SEQ ID NO: 1586021
auucccgcagaugaugccu

SEQ ID NO: 1586023 - RNA, 19 nt, Artificial Sequence
  Description of Artificial Sequence: Synthetic oligonucleotide
  Sense strand starting at position 3903 of SEQ ID NO: 1560238
gcaucaucugcgggaauau

SEQ ID NO: 1586024 - RNA, 19 nt, Artificial Sequence
  Description of Artificial Sequence: Synthetic oligonucleotide
  Antisense strand to SEQ ID NO: 1586023
auauucccgcagaugaugc

SEQ ID NO: 1586025 - RNA, 19 nt, Artificial Sequence
  Description of Artificial Sequence: Synthetic oligonucleotide
  Sense strand starting at position 3904 of SEQ ID NO: 1560238
caucaucugcgggaauauc

SEQ ID NO: 1586026 - RNA, 19 nt, Artificial Sequence
  Description of Artificial Sequence: Synthetic oligonucleotide
  Antisense strand to SEQ ID NO: 1586025
gauauucccgcagaugaug

SEQ ID NO: 1586027 - RNA, 19 nt, Artificial Sequence
  Description of Artificial Sequence: Synthetic oligonucleotide
  Sense strand starting at position 520 of SEQ ID NO: 1560239
gucccuaagcuguggguau

SEQ ID NO: 1586028 - RNA, 19 nt, Artificial Sequence
  Description of Artificial Sequence: Synthetic oligonucleotide
  Antisense strand to SEQ ID NO: 1586027
auacccacagcuuagggac

SEQ ID NO: 1586029 - RNA, 19 nt, Artificial Sequence
  Description of Artificial Sequence: Synthetic oligonucleotide
  Sense strand starting at position 533 of SEQ ID NO: 1560239
ggguauuuauccuacuaag

SEQ ID NO: 1586030 - RNA, 19 nt, Artificial Sequence
  Description of Artificial Sequence: Synthetic oligonucleotide
  Antisense strand to SEQ ID NO: 1586029
cuuaguaggauaaauaccc

SEQ ID NO: 1586031 - RNA, 19 nt, Artificial Sequence
  Description of Artificial Sequence: Synthetic oligonucleotide
  Sense strand starting at position 860 of SEQ ID NO: 1560239
auuccaaucugaugggaag

SEQ ID NO: 1586032 - RNA, 19 nt, Artificial Sequence
  Description of Artificial Sequence: Synthetic oligonucleotide
  Antisense strand to SEQ ID NO: 1586031
cuucccaucagauuggaau

SEQ ID NO: 1586033 - RNA, 19 nt, Artificial Sequence
  Description of Artificial Sequence: Synthetic oligonucleotide
  Sense strand starting at position 863 of SEQ ID NO: 1560239
ccaaucugaugggaagagu

SEQ ID NO: 1586034 - RNA, 19 nt, Artificial Sequence
  Description of Artificial Sequence: Synthetic oligonucleotide
  Antisense strand to SEQ ID NO: 1586033
acucuucccaucagauugg

SEQ ID NO: 1586035 - RNA, 19 nt, Artificial Sequence
  Description of Artificial Sequence: Synthetic oligonucleotide
  Sense strand starting at position 888 of SEQ ID NO: 1560239
ugggaagcucccugucuga

SEQ ID NO: 1586036 - RNA, 19 nt, Artificial Sequence
  Description of Artificial Sequence: Synthetic oligonucleotide
  Antisense strand to SEQ ID NO: 1586035
ucagacagggagcuuccca

SEQ ID NO: 1586037 - RNA, 19 nt, Artificial Sequence
  Description of Artificial Sequence: Synthetic oligonucleotide
  Sense strand starting at position 897 of SEQ ID NO: 1560239
cccugucugaugggagaca

SEQ ID NO: 1586038 - RNA, 19 nt, Artificial Sequence
  Description of Artificial Sequence: Synthetic oligonucleotide
  Antisense strand to SEQ ID NO: 1586037
ugucucccaucagacaggg

SEQ ID NO: 1586039 - RNA, 19 nt, Artificial Sequence
  Description of Artificial Sequence: Synthetic oligonucleotide
  Sense strand starting at position 1500 of SEQ ID NO: 1560239
uccauuauggagcaaccau

SEQ ID NO: 1586040 - RNA, 19 nt, Artificial Sequence
  Description of Artificial Sequence: Synthetic oligonucleotide
  Antisense strand to SEQ ID NO: 1586039
augguugcuccauaaugga

SEQ ID NO: 1586041 - RNA, 19 nt, Artificial Sequence
  Description of Artificial Sequence: Synthetic oligonucleotide
  Sense strand starting at position 2111 of SEQ ID NO: 1560239
gcgcuaugccuguccauca

SEQ ID NO: 1586042 - RNA, 19 nt, Artificial Sequence
  Description of Artificial Sequence: Synthetic oligonucleotide
  Antisense strand to SEQ ID NO: 1586041
ugauggacaggcauagcgc

SEQ ID NO: 1586043 - RNA, 19 nt, Artificial Sequence
  Description of Artificial Sequence: Synthetic oligonucleotide
  Sense strand starting at position 2112 of SEQ ID NO: 1560239
cgcuaugccuguccaucaa

SEQ ID NO: 1586044 - RNA, 19 nt, Artificial Sequence
  Description of Artificial Sequence: Synthetic oligonucleotide
  Antisense strand to SEQ ID NO: 1586043
uugauggacaggcauagcg

SEQ ID NO: 1586045 - RNA, 19 nt, Artificial Sequence
  Description of Artificial Sequence: Synthetic oligonucleotide
  Sense strand starting at position 2140 of SEQ ID NO: 1560239
gacucuugauugguagcga

SEQ ID NO: 1586046 - RNA, 19 nt, Artificial Sequence
  Description of Artificial Sequence: Synthetic oligonucleotide
  Antisense strand to SEQ ID NO: 1586045
ucgcuaccaaucaagaguc

SEQ ID NO: 1586047 - RNA, 19 nt, Artificial Sequence
  Description of Artificial Sequence: Synthetic oligonucleotide
  Sense strand starting at position 2145 of SEQ ID NO: 1560239
uugauugguagcgacagua

SEQ ID NO: 1586048 - RNA, 19 nt, Artificial Sequence
  Description of Artificial Sequence: Synthetic oligonucleotide
  Antisense strand to SEQ ID NO: 1586047
uacugucgcuaccaaucaa

SEQ ID NO: 1586049 - RNA, 19 nt, Artificial Sequence
  Description of Artificial Sequence: Synthetic oligonucleotide
  Sense strand starting at position 2242 of SEQ ID NO: 1560239
cccagauaacuuugaucug

SEQ ID NO: 1586050 - RNA, 19 nt, Artificial Sequence
  Description of Artificial Sequence: Synthetic oligonucleotide
  Antisense strand to SEQ ID NO: 1586049
cagaucaaaguuaucuggg

SEQ ID NO: 1586051 - RNA, 19 nt, Artificial Sequence
  Description of Artificial Sequence: Synthetic oligonucleotide
  Sense strand starting at position 2243 of SEQ ID NO: 1560239
ccagauaacuuugaucuga

SEQ ID NO: 1586052 - RNA, 19 nt, Artificial Sequence
  Description of Artificial Sequence: Synthetic oligonucleotide
  Antisense strand to SEQ ID NO: 1586051
ucagaucaaaguuaucugg

SEQ ID NO: 1586053 - RNA, 19 nt, Artificial Sequence
  Description of Artificial Sequence: Synthetic oligonucleotide
  Sense strand starting at position 2248 of SEQ ID NO: 1560239
uaacuuugaucugauaggu

SEQ ID NO: 1586054 - RNA, 19 nt, Artificial Sequence
  Description of Artificial Sequence: Synthetic oligonucleotide
  Antisense strand to SEQ ID NO: 1586053
accuaucagaucaaaguua

SEQ ID NO: 1586055 - RNA, 19 nt, Artificial Sequence
  Description of Artificial Sequence: Synthetic oligonucleotide
  Sense strand starting at position 2252 of SEQ ID NO: 1560239
uuugaucugauaggugaau

SEQ ID NO: 1586056 - RNA, 19 nt, Artificial Sequence
  Description of Artificial Sequence: Synthetic oligonucleotide
  Antisense strand to SEQ ID NO: 1586055
auucaccuaucagaucaaa

SEQ ID NO: 1586057 - RNA, 19 nt, Artificial Sequence
  Description of Artificial Sequence: Synthetic oligonucleotide
  Sense strand starting at position 2253 of SEQ ID NO: 1560239
uugaucugauaggugaaua

SEQ ID NO: 1586058 - RNA, 19 nt, Artificial Sequence
  Description of Artificial Sequence: Synthetic oligonucleotide
  Antisense strand to SEQ ID NO: 1586057
uauucaccuaucagaucaa

SEQ ID NO: 1586059 - RNA, 19 nt, Artificial Sequence
  Description of Artificial Sequence: Synthetic oligonucleotide
  Sense strand starting at position 2254 of SEQ ID NO: 1560239
ugaucugauaggugaauau

SEQ ID NO: 1586060 - RNA, 19 nt, Artificial Sequence
  Description of Artificial Sequence: Synthetic oligonucleotide
  Antisense strand to SEQ ID NO: 1586059
auauucaccuaucagauca

SEQ ID NO: 1586061 - RNA, 19 nt, Artificial Sequence
  Description of Artificial Sequence: Synthetic oligonucleotide
  Sense strand starting at position 2264 of SEQ ID NO: 1560239
ggugaauaucucugucugu

SEQ ID NO: 1586062 - RNA, 19 nt, Artificial Sequence
  Description of Artificial Sequence: Synthetic oligonucleotide
  Antisense strand to SEQ ID NO: 1586061
acagacagagauauucacc

SEQ ID NO: 1586063 - RNA, 19 nt, Artificial Sequence
  Description of Artificial Sequence: Synthetic oligonucleotide
  Sense strand starting at position 2265 of SEQ ID NO: 1560239
gugaauaucucugucuguc

SEQ ID NO: 1586064 - RNA, 19 nt, Artificial Sequence
  Description of Artificial Sequence: Synthetic oligonucleotide
  Antisense strand to SEQ ID NO: 1586063
gacagacagagauauucac

SEQ ID NO: 1586065 - RNA, 19 nt, Artificial Sequence
  Description of Artificial Sequence: Synthetic oligonucleotide
  Sense strand starting at position 2497 of SEQ ID NO: 1560239
aacgaugggauucgaugaa

SEQ ID NO: 1586066 - RNA, 19 nt, Artificial Sequence
  Description of Artificial Sequence: Synthetic oligonucleotide
  Antisense strand to SEQ ID NO: 1586065
uucaucgaaucccaucguu

SEQ ID NO: 1586067 - RNA, 19 nt, Artificial Sequence
  Description of Artificial Sequence: Synthetic oligonucleotide
  Sense strand starting at position 2510 of SEQ ID NO: 1560239
gaugaaagcuuguuuccga

SEQ ID NO: 1586068 - RNA, 19 nt, Artificial Sequence
  Description of Artificial Sequence: Synthetic oligonucleotide
  Antisense strand to SEQ ID NO: 1586067
ucggaaacaagcuuucauc

SEQ ID NO: 1586069 - RNA, 19 nt, Artificial Sequence
  Description of Artificial Sequence: Synthetic oligonucleotide
  Sense strand starting at position 2511 of SEQ ID NO: 1560239
augaaagcuuguuuccgau

SEQ ID NO: 1586070 - RNA, 19 nt, Artificial Sequence
  Description of Artificial Sequence: Synthetic oligonucleotide
  Antisense strand to SEQ ID NO: 1586069
aucggaaacaagcuuucau

SEQ ID NO: 1586071 - RNA, 19 nt, Artificial Sequence
  Description of Artificial Sequence: Synthetic oligonucleotide
  Sense strand starting at position 2541 of SEQ ID NO: 1560239
ugggaugaugguggugaua

SEQ ID NO: 1586072 - RNA, 19 nt, Artificial Sequence
  Description of Artificial Sequence: Synthetic oligonucleotide
  Antisense strand to SEQ ID NO: 1586071
uaucaccaccaucauccca

SEQ ID NO: 1586073 - RNA, 19 nt, Artificial Sequence
  Description of Artificial Sequence: Synthetic oligonucleotide
  Sense strand starting at position 2543 of SEQ ID NO: 1560239
ggaugaugguggugauaau

SEQ ID NO: 1586074 - RNA, 19 nt, Artificial Sequence
  Description of Artificial Sequence: Synthetic oligonucleotide
  Antisense strand to SEQ ID NO: 1586073
auuaucaccaccaucaucc

SEQ ID NO: 1586075 - RNA, 19 nt, Artificial Sequence
  Description of Artificial Sequence: Synthetic oligonucleotide
  Sense strand starting at position 2550 of SEQ ID NO: 1560239
gguggugauaaugauagca

SEQ ID NO: 1586076 - RNA, 19 nt, Artificial Sequence
  Description of Artificial Sequence: Synthetic oligonucleotide
  Antisense strand to SEQ ID NO: 1586075
ugcuaucauuaucaccacc

SEQ ID NO: 1586077 - RNA, 19 nt, Artificial Sequence
  Description of Artificial Sequence: Synthetic oligonucleotide
  Sense strand starting at position 2552 of SEQ ID NO: 1560239
uggugauaaugauagcauc

SEQ ID NO: 1586078 - RNA, 19 nt, Artificial Sequence
  Description of Artificial Sequence: Synthetic oligonucleotide
  Antisense strand to SEQ ID NO: 1586077
gaugcuaucauuaucacca

SEQ ID NO: 1586079 - RNA, 19 nt, Artificial Sequence
  Description of Artificial Sequence: Synthetic oligonucleotide
  Sense strand starting at position 2555 of SEQ ID NO: 1560239
ugauaaugauagcaucaau

SEQ ID NO: 1586080 - RNA, 19 nt, Artificial Sequence
  Description of Artificial Sequence: Synthetic oligonucleotide
  Antisense strand to SEQ ID NO: 1586079
auugaugcuaucauuauca

SEQ ID NO: 1586081 - RNA, 19 nt, Artificial Sequence
  Description of Artificial Sequence: Synthetic oligonucleotide
  Sense strand starting at position 2574 of SEQ ID NO: 1560239
cauggaucgcuccacaugu

SEQ ID NO: 1586082 - RNA, 19 nt, Artificial Sequence
  Description of Artificial Sequence: Synthetic oligonucleotide
  Antisense strand to SEQ ID NO: 1586081
acauguggagcgauccaug

SEQ ID NO: 1586083 - RNA, 19 nt, Artificial Sequence
  Description of Artificial Sequence: Synthetic oligonucleotide
  Sense strand starting at position 2613 of SEQ ID NO: 1560239
uaaacaguucgauguggca

SEQ ID NO: 1586084 - RNA, 19 nt, Artificial Sequence
  Description of Artificial Sequence: Synthetic oligonucleotide
  Antisense strand to SEQ ID NO: 1586083
ugccacaucgaacuguuua

SEQ ID NO: 1586085 - RNA, 19 nt, Artificial Sequence
  Description of Artificial Sequence: Synthetic oligonucleotide
  Sense strand starting at position 2644 of SEQ ID NO: 1560239
gccaauuaugcagaucaua

SEQ ID NO: 1586086 - RNA, 19 nt, Artificial Sequence
  Description of Artificial Sequence: Synthetic oligonucleotide
  Antisense strand to SEQ ID NO: 1586085
uaugaucugcauaauuggc

SEQ ID NO: 1586087 - RNA, 19 nt, Artificial Sequence
  Description of Artificial Sequence: Synthetic oligonucleotide
  Sense strand starting at position 2649 of SEQ ID NO: 1560239
uuaugcagaucauagcaau

SEQ ID NO: 1586088 - RNA, 19 nt, Artificial Sequence
  Description of Artificial Sequence: Synthetic oligonucleotide
  Antisense strand to SEQ ID NO: 1586087
auugcuaugaucugcauaa

SEQ ID NO: 1586089 - RNA, 19 nt, Artificial Sequence
  Description of Artificial Sequence: Synthetic oligonucleotide
  Sense strand starting at position 2685 of SEQ ID NO: 1560239
guccgcuccgugcaucaua

SEQ ID NO: 1586090 - RNA, 19 nt, Artificial Sequence
  Description of Artificial Sequence: Synthetic oligonucleotide
  Antisense strand to SEQ ID NO: 1586089
uaugaugcacggagcggac

SEQ ID NO: 1586091 - RNA, 19 nt, Artificial Sequence
  Description of Artificial Sequence: Synthetic oligonucleotide
  Sense strand starting at position 2692 of SEQ ID NO: 1560239
ccgugcaucauauucguau

SEQ ID NO: 1586092 - RNA, 19 nt, Artificial Sequence
  Description of Artificial Sequence: Synthetic oligonucleotide
  Antisense strand to SEQ ID NO: 1586091
auacgaauaugaugcacgg

SEQ ID NO: 1586093 - RNA, 19 nt, Artificial Sequence
  Description of Artificial Sequence: Synthetic oligonucleotide
  Sense strand starting at position 2693 of SEQ ID NO: 1560239
cgugcaucauauucguaua

SEQ ID NO: 1586094 - RNA, 19 nt, Artificial Sequence
  Description of Artificial Sequence: Synthetic oligonucleotide
  Antisense strand to SEQ ID NO: 1586093
uauacgaauaugaugcacg

SEQ ID NO: 1586095 - RNA, 19 nt, Artificial Sequence
  Description of Artificial Sequence: Synthetic oligonucleotide
  Sense strand starting at position 2695 of SEQ ID NO: 1560239
ugcaucauauucguauaca

SEQ ID NO: 1586096 - RNA, 19 nt, Artificial Sequence
  Description of Artificial Sequence: Synthetic oligonucleotide
  Antisense strand to SEQ ID NO: 1586095
uguauacgaauaugaugca

SEQ ID NO: 1586097 - RNA, 19 nt, Artificial Sequence
  Description of Artificial Sequence: Synthetic oligonucleotide
  Sense strand starting at position 2705 of SEQ ID NO: 1560239
ucguauacauuaccucauu

SEQ ID NO: 1586098 - RNA, 19 nt, Artificial Sequence
  Description of Artificial Sequence: Synthetic oligonucleotide
  Antisense strand to SEQ ID NO: 1586097
aaugagguaauguauacga

SEQ ID NO: 1586099 - RNA, 19 nt, Artificial Sequence
  Description of Artificial Sequence: Synthetic oligonucleotide
  Sense strand starting at position 3881 of SEQ ID NO: 1560239
agugauaagucauacugac

SEQ ID NO: 1586100 - RNA, 19 nt, Artificial Sequence
  Description of Artificial Sequence: Synthetic oligonucleotide
  Antisense strand to SEQ ID NO: 1586099
gucaguaugacuuaucacu

SEQ ID NO: 1586101 - RNA, 19 nt, Artificial Sequence
  Description of Artificial Sequence: Synthetic oligonucleotide
  Sense strand starting at position 3925 of SEQ ID NO: 1560239
ggaggacauuuguaacugu

SEQ ID NO: 1586102 - RNA, 19 nt, Artificial Sequence
  Description of Artificial Sequence: Synthetic oligonucleotide
  Antisense strand to SEQ ID NO: 1586101
acaguuacaaauguccucc

SEQ ID NO: 1586103 - RNA, 19 nt, Artificial Sequence
  Description of Artificial Sequence: Synthetic oligonucleotide
  Sense strand starting at position 3933 of SEQ ID NO: 1560239
uuuguaacugucugauauu

SEQ ID NO: 1586104 - RNA, 19 nt, Artificial Sequence
  Description of Artificial Sequence: Synthetic oligonucleotide
  Antisense strand to SEQ ID NO: 1586103
aauaucagacaguuacaaa

SEQ ID NO: 1586105 - RNA, 19 nt, Artificial Sequence
  Description of Artificial Sequence: Synthetic oligonucleotide
  Sense strand starting at position 3934 of SEQ ID NO: 1560239
uuguaacugucugauauua

SEQ ID NO: 1586106 - RNA, 19 nt, Artificial Sequence
  Description of Artificial Sequence: Synthetic oligonucleotide
  Antisense strand to SEQ ID NO: 1586105
uaauaucagacaguuacaa

SEQ ID NO: 1586107 - RNA, 19 nt, Artificial Sequence
  Description of Artificial Sequence: Synthetic oligonucleotide
  Sense strand starting at position 39 of SEQ ID NO: 1560240
gguaucauuugaugcacau

SEQ ID NO: 1586108 - RNA, 19 nt, Artificial Sequence
  Description of Artificial Sequence: Synthetic oligonucleotide
  Antisense strand to SEQ ID NO: 1586107
augugcaucaaaugauacc

SEQ ID NO: 1586109 - RNA, 19 nt, Artificial Sequence
  Description of Artificial Sequence: Synthetic oligonucleotide
  Sense strand starting at position 693 of SEQ ID NO: 1560240
gcaugaagccauggaugaa

SEQ ID NO: 1586110 - RNA, 19 nt, Artificial Sequence
  Description of Artificial Sequence: Synthetic oligonucleotide
  Antisense strand to SEQ ID NO: 1586109
uucauccauggcuucaugc

SEQ ID NO: 1586111 - RNA, 19 nt, Artificial Sequence
  Description of Artificial Sequence: Synthetic oligonucleotide
  Sense strand starting at position 751 of SEQ ID NO: 1560240
uaugauuggcuguagggau

SEQ ID NO: 1586112 - RNA, 19 nt, Artificial Sequence
  Description of Artificial Sequence: Synthetic oligonucleotide
  Antisense strand to SEQ ID NO: 1586111
aucccuacagccaaucaua

SEQ ID NO: 1586113 - RNA, 19 nt, Artificial Sequence
  Description of Artificial Sequence: Synthetic oligonucleotide
  Sense strand starting at position 768 of SEQ ID NO: 1560240
augagacuguaccaaggua

SEQ ID NO: 1586114 - RNA, 19 nt, Artificial Sequence
  Description of Artificial Sequence: Synthetic oligonucleotide
  Antisense strand to SEQ ID NO: 1586113
uaccuugguacagucucau

SEQ ID NO: 1586115 - RNA, 19 nt, Artificial Sequence
  Description of Artificial Sequence: Synthetic oligonucleotide
  Sense strand starting at position 837 of SEQ ID NO: 1560240
ccauuuccuuccugaaagg

SEQ ID NO: 1586116 - RNA, 19 nt, Artificial Sequence
  Description of Artificial Sequence: Synthetic oligonucleotide
  Antisense strand to SEQ ID NO: 1586115
ccuuucaggaaggaaaugg

SEQ ID NO: 1586117 - RNA, 19 nt, Artificial Sequence
  Description of Artificial Sequence: Synthetic oligonucleotide
  Sense strand starting at position 937 of SEQ ID NO: 1560240
gagguaucuugaccaagcu

SEQ ID NO: 1586118 - RNA, 19 nt, Artificial Sequence
  Description of Artificial Sequence: Synthetic oligonucleotide
  Antisense strand to SEQ ID NO: 1586117
agcuuggucaagauaccuc

SEQ ID NO: 1586119 - RNA, 19 nt, Artificial Sequence
  Description of Artificial Sequence: Synthetic oligonucleotide
  Sense strand starting at position 938 of SEQ ID NO: 1560240
agguaucuugaccaagcuu

SEQ ID NO: 1586120 - RNA, 19 nt, Artificial Sequence
  Description of Artificial Sequence: Synthetic oligonucleotide
  Antisense strand to SEQ ID NO: 1586119
aagcuuggucaagauaccu

SEQ ID NO: 1586121 - RNA, 19 nt, Artificial Sequence
  Description of Artificial Sequence: Synthetic oligonucleotide
  Sense strand starting at position 1210 of SEQ ID NO: 1560240
agcucaucuguugagcauu

SEQ ID NO: 1586122 - RNA, 19 nt, Artificial Sequence
  Description of Artificial Sequence: Synthetic oligonucleotide
  Antisense strand to SEQ ID NO: 1586121
aaugcucaacagaugagcu

SEQ ID NO: 1586123 - RNA, 19 nt, Artificial Sequence
  Description of Artificial Sequence: Synthetic oligonucleotide
  Sense strand starting at position 1228 of SEQ ID NO: 1560240
ucacuauccugaguccuuu

SEQ ID NO: 1586124 - RNA, 19 nt, Artificial Sequence
  Description of Artificial Sequence: Synthetic oligonucleotide
  Antisense strand to SEQ ID NO: 1586123
aaaggacucaggauaguga

SEQ ID NO: 1586125 - RNA, 19 nt, Artificial Sequence
  Description of Artificial Sequence: Synthetic oligonucleotide
  Sense strand starting at position 1232 of SEQ ID NO: 1560240
uauccugaguccuuuacga

SEQ ID NO: 1586126 - RNA, 19 nt, Artificial Sequence
  Description of Artificial Sequence: Synthetic oligonucleotide
  Antisense strand to SEQ ID NO: 1586125
ucguaaaggacucaggaua

SEQ ID NO: 1586127 - RNA, 19 nt, Artificial Sequence
  Description of Artificial Sequence: Synthetic oligonucleotide
  Sense strand starting at position 1248 of SEQ ID NO: 1560240
cgacgucaguuaccuaaau

SEQ ID NO: 1586128 - RNA, 19 nt, Artificial Sequence
  Description of Artificial Sequence: Synthetic oligonucleotide
  Antisense strand to SEQ ID NO: 1586127
auuuagguaacugacgucg

SEQ ID NO: 1586129 - RNA, 19 nt, Artificial Sequence
  Description of Artificial Sequence: Synthetic oligonucleotide
  Sense strand starting at position 1249 of SEQ ID NO: 1560240
gacgucaguuaccuaaauu

SEQ ID NO: 1586130 - RNA, 19 nt, Artificial Sequence
  Description of Artificial Sequence: Synthetic oligonucleotide
  Antisense strand to SEQ ID NO: 1586129
aauuuagguaacugacguc

SEQ ID NO: 1586131 - RNA, 19 nt, Artificial Sequence
  Description of Artificial Sequence: Synthetic oligonucleotide
  Sense strand starting at position 1348 of SEQ ID NO: 1560240
cauucuuagaggcggguaa

SEQ ID NO: 1586132 - RNA, 19 nt, Artificial Sequence
  Description of Artificial Sequence: Synthetic oligonucleotide
  Antisense strand to SEQ ID NO: 1586131
uuacccgccucuaagaaug

SEQ ID NO: 1586133 - RNA, 19 nt, Artificial Sequence
  Description of Artificial Sequence: Synthetic oligonucleotide
  Sense strand starting at position 1426 of SEQ ID NO: 1560240
gcacuuccuuuggcgacaa

SEQ ID NO: 1586134 - RNA, 19 nt, Artificial Sequence
  Description of Artificial Sequence: Synthetic oligonucleotide
  Antisense strand to SEQ ID NO: 1586133
uugucgccaaaggaagugc

SEQ ID NO: 1586135 - RNA, 19 nt, Artificial Sequence
  Description of Artificial Sequence: Synthetic oligonucleotide
  Sense strand starting at position 1438 of SEQ ID NO: 1560240
gcgacaaagcccugcauau

SEQ ID NO: 1586136 - RNA, 19 nt, Artificial Sequence
  Description of Artificial Sequence: Synthetic oligonucleotide
  Antisense strand to SEQ ID NO: 1586135
auaugcagggcuuugucgc

SEQ ID NO: 1586137 - RNA, 19 nt, Artificial Sequence
  Description of Artificial Sequence: Synthetic oligonucleotide
  Sense strand starting at position 1620 of SEQ ID NO: 1560240
ggaaaugaaugaguuguca

SEQ ID NO: 1586138 - RNA, 19 nt, Artificial Sequence
  Description of Artificial Sequence: Synthetic oligonucleotide
  Antisense strand to SEQ ID NO: 1586137
ugacaacucauucauuucc

SEQ ID NO: 1586139 - RNA, 19 nt, Artificial Sequence
  Description of Artificial Sequence: Synthetic oligonucleotide
  Sense strand starting at position 2010 of SEQ ID NO: 1560240
gucauuggugugcagucua

SEQ ID NO: 1586140 - RNA, 19 nt, Artificial Sequence
  Description of Artificial Sequence: Synthetic oligonucleotide
  Antisense strand to SEQ ID NO: 1586139
uagacugcacaccaaugac

SEQ ID NO: 1586141 - RNA, 19 nt, Artificial Sequence
  Description of Artificial Sequence: Synthetic oligonucleotide
  Sense strand starting at position 2112 of SEQ ID NO: 1560240
cucccauuguggucaaguu

SEQ ID NO: 1586142 - RNA, 19 nt, Artificial Sequence
  Description of Artificial Sequence: Synthetic oligonucleotide
  Antisense strand to SEQ ID NO: 1586141
aacuugaccacaaugggag

SEQ ID NO: 1586143 - RNA, 19 nt, Artificial Sequence
  Description of Artificial Sequence: Synthetic oligonucleotide
  Sense strand starting at position 2121 of SEQ ID NO: 1560240
uggucaaguucgguugaag

SEQ ID NO: 1586144 - RNA, 19 nt, Artificial Sequence
  Description of Artificial Sequence: Synthetic oligonucleotide
  Antisense strand to SEQ ID NO: 1586143
cuucaaccgaacuugacca

SEQ ID NO: 1586145 - RNA, 19 nt, Artificial Sequence
  Description of Artificial Sequence: Synthetic oligonucleotide
  Sense strand starting at position 2124 of SEQ ID NO: 1560240
ucaaguucgguugaagaag

SEQ ID NO: 1586146 - RNA, 19 nt, Artificial Sequence
  Description of Artificial Sequence: Synthetic oligonucleotide
  Antisense strand to SEQ ID NO: 1586145
cuucuucaaccgaacuuga

SEQ ID NO: 1586147 - RNA, 19 nt, Artificial Sequence
  Description of Artificial Sequence: Synthetic oligonucleotide
  Sense strand starting at position 2172 of SEQ ID NO: 1560240
gaaagugagauccggaagu

SEQ ID NO: 1586148 - RNA, 19 nt, Artificial Sequence
  Description of Artificial Sequence: Synthetic oligonucleotide
  Antisense strand to SEQ ID NO: 1586147
acuuccggaucucacuuuc

SEQ ID NO: 1586149 - RNA, 19 nt, Artificial Sequence
  Description of Artificial Sequence: Synthetic oligonucleotide
  Sense strand starting at position 2214 of SEQ ID NO: 1560240
ucucuugggagcuguaguu

SEQ ID NO: 1586150 - RNA, 19 nt, Artificial Sequence
  Description of Artificial Sequence: Synthetic oligonucleotide
  Antisense strand to SEQ ID NO: 1586149
aacuacagcucccaagaga

SEQ ID NO: 1586151 - RNA, 19 nt, Artificial Sequence
  Description of Artificial Sequence: Synthetic oligonucleotide
  Sense strand starting at position 2404 of SEQ ID NO: 1560240
ccaucucugcgccuguaau

SEQ ID NO: 1586152 - RNA, 19 nt, Artificial Sequence
  Description of Artificial Sequence: Synthetic oligonucleotide
  Antisense strand to SEQ ID NO: 1586151
auuacaggcgcagagaugg

SEQ ID NO: 1586153 - RNA, 19 nt, Artificial Sequence
  Description of Artificial Sequence: Synthetic oligonucleotide
  Sense strand starting at position 2405 of SEQ ID NO: 1560240
caucucugcgccuguaauu

SEQ ID NO: 1586154 - RNA, 19 nt, Artificial Sequence
  Description of Artificial Sequence: Synthetic oligonucleotide
  Antisense strand to SEQ ID NO: 1586153
aauuacaggcgcagagaug

SEQ ID NO: 1586155 - RNA, 19 nt, Artificial Sequence
  Description of Artificial Sequence: Synthetic oligonucleotide
  Sense strand starting at position 2756 of SEQ ID NO: 1560240
cggcgugaaccgugaguga

SEQ ID NO: 1586156 - RNA, 19 nt, Artificial Sequence
  Description of Artificial Sequence: Synthetic oligonucleotide
  Antisense strand to SEQ ID NO: 1586155
ucacucacgguucacgccg

SEQ ID NO: 1586157 - RNA, 19 nt, Artificial Sequence
  Description of Artificial Sequence: Synthetic oligonucleotide
  Sense strand starting at position 3081 of SEQ ID NO: 1560240
gugucagucagccgagauu

SEQ ID NO: 1586158 - RNA, 19 nt, Artificial Sequence
  Description of Artificial Sequence: Synthetic oligonucleotide
  Antisense strand to SEQ ID NO: 1586157
aaucucggcugacugacac

SEQ ID NO: 1586159 - RNA, 19 nt, Artificial Sequence
  Description of Artificial Sequence: Synthetic oligonucleotide
  Sense strand starting at position 3264 of SEQ ID NO: 1560240
cggcaucuucuuguguuua

SEQ ID NO: 1586160 - RNA, 19 nt, Artificial Sequence
  Description of Artificial Sequence: Synthetic oligonucleotide
  Antisense strand to SEQ ID NO: 1586159
uaaacacaagaagaugccg

SEQ ID NO: 1586161 - RNA, 19 nt, Artificial Sequence
  Description of Artificial Sequence: Synthetic oligonucleotide
  Sense strand starting at position 3266 of SEQ ID NO: 1560240
gcaucuucuuguguuuauu

SEQ ID NO: 1586162 - RNA, 19 nt, Artificial Sequence
  Description of Artificial Sequence: Synthetic oligonucleotide
  Antisense strand to SEQ ID NO: 1586161
aauaaacacaagaagaugc

SEQ ID NO: 1586163 - RNA, 19 nt, Artificial Sequence
  Description of Artificial Sequence: Synthetic oligonucleotide
  Sense strand starting at position 3363 of SEQ ID NO: 1560240
ucccguaacucccuaguau

SEQ ID NO: 1586164 - RNA, 19 nt, Artificial Sequence
  Description of Artificial Sequence: Synthetic oligonucleotide
  Antisense strand to SEQ ID NO: 1586163
auacuagggaguuacggga

SEQ ID NO: 1586165 - RNA, 19 nt, Artificial Sequence
  Description of Artificial Sequence: Synthetic oligonucleotide
  Sense strand starting at position 3364 of SEQ ID NO: 1560240
cccguaacucccuaguauu

SEQ ID NO: 1586166 - RNA, 19 nt, Artificial Sequence
  Description of Artificial Sequence: Synthetic oligonucleotide
  Antisense strand to SEQ ID NO: 1586165
aauacuagggaguuacggg

SEQ ID NO: 1586167 - RNA, 19 nt, Artificial Sequence
  Description of Artificial Sequence: Synthetic oligonucleotide
  Sense strand starting at position 3502 of SEQ ID NO: 1560240
agacuucccugacugcauu

SEQ ID NO: 1586168 - RNA, 19 nt, Artificial Sequence
  Description of Artificial Sequence: Synthetic oligonucleotide
  Antisense strand to SEQ ID NO: 1586167
aaugcagucagggaagucu

SEQ ID NO: 1586169 - RNA, 19 nt, Artificial Sequence
  Description of Artificial Sequence: Synthetic oligonucleotide
  Sense strand starting at position 3586 of SEQ ID NO: 1560240
cugacaccucuguguccaa

SEQ ID NO: 1586170 - RNA, 19 nt, Artificial Sequence
  Description of Artificial Sequence: Synthetic oligonucleotide
  Antisense strand to SEQ ID NO: 1586169
uuggacacagaggugucag

SEQ ID NO: 1586171 - RNA, 19 nt, Artificial Sequence
  Description of Artificial Sequence: Synthetic oligonucleotide
  Sense strand starting at position 3587 of SEQ ID NO: 1560240
ugacaccucuguguccaaa

SEQ ID NO: 1586172 - RNA, 19 nt, Artificial Sequence
  Description of Artificial Sequence: Synthetic oligonucleotide
  Antisense strand to SEQ ID NO: 1586171
uuuggacacagagguguca

SEQ ID NO: 1586173 - RNA, 19 nt, Artificial Sequence
  Description of Artificial Sequence: Synthetic oligonucleotide
  Sense strand starting at position 3612 of SEQ ID NO: 1560240
uccugacuuccagggcaaa

SEQ ID NO: 1586174 - RNA, 19 nt, Artificial Sequence
  Description of Artificial Sequence: Synthetic oligonucleotide
  Antisense strand to SEQ ID NO: 1586173
uuugcccuggaagucagga

SEQ ID NO: 1586175 - RNA, 19 nt, Artificial Sequence
  Description of Artificial Sequence: Synthetic oligonucleotide
  Sense strand starting at position 3648 of SEQ ID NO: 1560240
acagcaauugcacagugaa

SEQ ID NO: 1586176 - RNA, 19 nt, Artificial Sequence
  Description of Artificial Sequence: Synthetic oligonucleotide
  Antisense strand to SEQ ID NO: 1586175
uucacugugcaauugcugu

SEQ ID NO: 1586177 - RNA, 19 nt, Artificial Sequence
  Description of Artificial Sequence: Synthetic oligonucleotide
  Sense strand starting at position 3651 of SEQ ID NO: 1560240
gcaauugcacagugaaguu

SEQ ID NO: 1586178 - RNA, 19 nt, Artificial Sequence
  Description of Artificial Sequence: Synthetic oligonucleotide
  Antisense strand to SEQ ID NO: 1586177
aacuucacugugcaauugc

SEQ ID NO: 1586179 - RNA, 19 nt, Artificial Sequence
  Description of Artificial Sequence: Synthetic oligonucleotide
  Sense strand starting at position 3674 of SEQ ID NO: 1560240
aguggaagcuacuaaguau

SEQ ID NO: 1586180 - RNA, 19 nt, Artificial Sequence
  Description of Artificial Sequence: Synthetic oligonucleotide
  Antisense strand to SEQ ID NO: 1586179
auacuuaguagcuuccacu

SEQ ID NO: 1586181 - RNA, 19 nt, Artificial Sequence
  Description of Artificial Sequence: Synthetic oligonucleotide
  Sense strand starting at position 3677 of SEQ ID NO: 1560240
ggaagcuacuaaguauuau

SEQ ID NO: 1586182 - RNA, 19 nt, Artificial Sequence
  Description of Artificial Sequence: Synthetic oligonucleotide
  Antisense strand to SEQ ID NO: 1586181
auaauacuuaguagcuucc

SEQ ID NO: 1586183 - RNA, 19 nt, Artificial Sequence
  Description of Artificial Sequence: Synthetic oligonucleotide
  Sense strand starting at position 3753 of SEQ ID NO: 1560240
ugcaccucacaguguuaaa

SEQ ID NO: 1586184 - RNA, 19 nt, Artificial Sequence
  Description of Artificial Sequence: Synthetic oligonucleotide
  Antisense strand to SEQ ID NO: 1586183
uuuaacacugugaggugca

SEQ ID NO: 1586185 - RNA, 19 nt, Artificial Sequence
  Description of Artificial Sequence: Synthetic oligonucleotide
  Sense strand starting at position 3763 of SEQ ID NO: 1560240
aguguuaaauucuugcuca

SEQ ID NO: 1586186 - RNA, 19 nt, Artificial Sequence
  Description of Artificial Sequence: Synthetic oligonucleotide
  Antisense strand to SEQ ID NO: 1586185
ugagcaagaauuuaacacu

SEQ ID NO: 1586187 - RNA, 19 nt, Artificial Sequence
  Description of Artificial Sequence: Synthetic oligonucleotide
  Sense strand starting at position 55 of SEQ ID NO: 1560241
agucgagaccgcgucuaua

SEQ ID NO: 1586188 - RNA, 19 nt, Artificial Sequence
  Description of Artificial Sequence: Synthetic oligonucleotide
  Antisense strand to SEQ ID NO: 1586187
uauagacgcggucucgacu

SEQ ID NO: 1586189 - RNA, 19 nt, Artificial Sequence
  Description of Artificial Sequence: Synthetic oligonucleotide
  Sense strand starting at position 640 of SEQ ID NO: 1560241
gccggaugugcuugcuuga

SEQ ID NO: 1586190 - RNA, 19 nt, Artificial Sequence
  Description of Artificial Sequence: Synthetic oligonucleotide
  Antisense strand to SEQ ID NO: 1586189
ucaagcaagcacauccggc

SEQ ID NO: 1586191 - RNA, 19 nt, Artificial Sequence
  Description of Artificial Sequence: Synthetic oligonucleotide
  Sense strand starting at position 650 of SEQ ID NO: 1560241
cuugcuugaacccggaaga

SEQ ID NO: 1586192 - RNA, 19 nt, Artificial Sequence
  Description of Artificial Sequence: Synthetic oligonucleotide
  Antisense strand to SEQ ID NO: 1586191
ucuuccggguucaagcaag

SEQ ID NO: 1586193 - RNA, 19 nt, Artificial Sequence
  Description of Artificial Sequence: Synthetic oligonucleotide
  Sense strand starting at position 929 of SEQ ID NO: 1560241
gcgcaugaacuugaaaggu

SEQ ID NO: 1586194 - RNA, 19 nt, Artificial Sequence
  Description of Artificial Sequence: Synthetic oligonucleotide
  Antisense strand to SEQ ID NO: 1586193
accuuucaaguucaugcgc

SEQ ID NO: 1586195 - RNA, 19 nt, Artificial Sequence
  Description of Artificial Sequence: Synthetic oligonucleotide
  Sense strand starting at position 986 of SEQ ID NO: 1560241
cccaguuacccucaagugu

SEQ ID NO: 1586196 - RNA, 19 nt, Artificial Sequence
  Description of Artificial Sequence: Synthetic oligonucleotide
  Antisense strand to SEQ ID NO: 1586195
acacuugaggguaacuggg

SEQ ID NO: 1586197 - RNA, 19 nt, Artificial Sequence
  Description of Artificial Sequence: Synthetic oligonucleotide
  Sense strand starting at position 1328 of SEQ ID NO: 1560241
cuuggucucucccaaagua

SEQ ID NO: 1586198 - RNA, 19 nt, Artificial Sequence
  Description of Artificial Sequence: Synthetic oligonucleotide
  Antisense strand to SEQ ID NO: 1586197
uacuuugggagagaccaag

SEQ ID NO: 1586199 - RNA, 19 nt, Artificial Sequence
  Description of Artificial Sequence: Synthetic oligonucleotide
  Sense strand starting at position 1584 of SEQ ID NO: 1560241
ggucuauucggacgaacug

SEQ ID NO: 1586200 - RNA, 19 nt, Artificial Sequence
  Description of Artificial Sequence: Synthetic oligonucleotide
  Antisense strand to SEQ ID NO: 1586199
caguucguccgaauagacc

SEQ ID NO: 1586201 - RNA, 19 nt, Artificial Sequence
  Description of Artificial Sequence: Synthetic oligonucleotide
  Sense strand starting at position 1585 of SEQ ID NO: 1560241
gucuauucggacgaacuga

SEQ ID NO: 1586202 - RNA, 19 nt, Artificial Sequence
  Description of Artificial Sequence: Synthetic oligonucleotide
  Antisense strand to SEQ ID NO: 1586201
ucaguucguccgaauagac

SEQ ID NO: 1586203 - RNA, 19 nt, Artificial Sequence
  Description of Artificial Sequence: Synthetic oligonucleotide
  Sense strand starting at position 2046 of SEQ ID NO: 1560241
gugauuggguccuguggaa

SEQ ID NO: 1586204 - RNA, 19 nt, Artificial Sequence
  Description of Artificial Sequence: Synthetic oligonucleotide
  Antisense strand to SEQ ID NO: 1586203
uuccacaggacccaaucac

SEQ ID NO: 1586205 - RNA, 19 nt, Artificial Sequence
  Description of Artificial Sequence: Synthetic oligonucleotide
  Sense strand starting at position 2071 of SEQ ID NO: 1560241
gggagauuauuggcggaga

SEQ ID NO: 1586206 - RNA, 19 nt, Artificial Sequence
  Description of Artificial Sequence: Synthetic oligonucleotide
  Antisense strand to SEQ ID NO: 1586205
ucuccgccaauaaucuccc

SEQ ID NO: 1586207 - RNA, 19 nt, Artificial Sequence
  Description of Artificial Sequence: Synthetic oligonucleotide
  Sense strand starting at position 2072 of SEQ ID NO: 1560241
ggagauuauuggcggagac

SEQ ID NO: 1586208 - RNA, 19 nt, Artificial Sequence
  Description of Artificial Sequence: Synthetic oligonucleotide
  Antisense strand to SEQ ID NO: 1586207
gucuccgccaauaaucucc

SEQ ID NO: 1586209 - RNA, 19 nt, Artificial Sequence
  Description of Artificial Sequence: Synthetic oligonucleotide
  Sense strand starting at position 2118 of SEQ ID NO: 1560241
ucgcguuuauuggucaauc

SEQ ID NO: 1586210 - RNA, 19 nt, Artificial Sequence
  Description of Artificial Sequence: Synthetic oligonucleotide
  Antisense strand to SEQ ID NO: 1586209
gauugaccaauaaacgcga

SEQ ID NO: 1586211 - RNA, 19 nt, Artificial Sequence
  Description of Artificial Sequence: Synthetic oligonucleotide
  Sense strand starting at position 2119 of SEQ ID NO: 1560241
cgcguuuauuggucaaucu

SEQ ID NO: 1586212 - RNA, 19 nt, Artificial Sequence
  Description of Artificial Sequence: Synthetic oligonucleotide
  Antisense strand to SEQ ID NO: 1586211
agauugaccaauaaacgcg

SEQ ID NO: 1586213 - RNA, 19 nt, Artificial Sequence
  Description of Artificial Sequence: Synthetic oligonucleotide
  Sense strand starting at position 2120 of SEQ ID NO: 1560241
gcguuuauuggucaaucua

SEQ ID NO: 1586214 - RNA, 19 nt, Artificial Sequence
  Description of Artificial Sequence: Synthetic oligonucleotide
  Antisense strand to SEQ ID NO: 1586213
uagauugaccaauaaacgc

SEQ ID NO: 1586215 - RNA, 19 nt, Artificial Sequence
  Description of Artificial Sequence: Synthetic oligonucleotide
  Sense strand starting at position 2221 of SEQ ID NO: 1560241
ccgccauguuuaguacuga

SEQ ID NO: 1586216 - RNA, 19 nt, Artificial Sequence
  Description of Artificial Sequence: Synthetic oligonucleotide
  Antisense strand to SEQ ID NO: 1586215
ucaguacuaaacauggcgg

SEQ ID NO: 1586217 - RNA, 19 nt, Artificial Sequence
  Description of Artificial Sequence: Synthetic oligonucleotide
  Sense strand starting at position 2222 of SEQ ID NO: 1560241
cgccauguuuaguacugau

SEQ ID NO: 1586218 - RNA, 19 nt, Artificial Sequence
  Description of Artificial Sequence: Synthetic oligonucleotide
  Antisense strand to SEQ ID NO: 1586217
aucaguacuaaacauggcg

SEQ ID NO: 1586219 - RNA, 19 nt, Artificial Sequence
  Description of Artificial Sequence: Synthetic oligonucleotide
  Sense strand starting at position 2324 of SEQ ID NO: 1560241
ugucccaguugcuaucaau

SEQ ID NO: 1586220 - RNA, 19 nt, Artificial Sequence
  Description of Artificial Sequence: Synthetic oligonucleotide
  Antisense strand to SEQ ID NO: 1586219
auugauagcaacugggaca

SEQ ID NO: 1586221 - RNA, 19 nt, Artificial Sequence
  Description of Artificial Sequence: Synthetic oligonucleotide
  Sense strand starting at position 2387 of SEQ ID NO: 1560241
gggagcuuggaaugacuca

SEQ ID NO: 1586222 - RNA, 19 nt, Artificial Sequence
  Description of Artificial Sequence: Synthetic oligonucleotide
  Antisense strand to SEQ ID NO: 1586221
ugagucauuccaagcuccc

SEQ ID NO: 1586223 - RNA, 19 nt, Artificial Sequence
  Description of Artificial Sequence: Synthetic oligonucleotide
  Sense strand starting at position 2435 of SEQ ID NO: 1560241
uuucuaucgcuccacgaua

SEQ ID NO: 1586224 - RNA, 19 nt, Artificial Sequence
  Description of Artificial Sequence: Synthetic oligonucleotide
  Antisense strand to SEQ ID NO: 1586223
uaucguggagcgauagaaa

SEQ ID NO: 1586225 - RNA, 19 nt, Artificial Sequence
  Description of Artificial Sequence: Synthetic oligonucleotide
  Sense strand starting at position 2477 of SEQ ID NO: 1560241
uuaguagaagcaugcaaua

SEQ ID NO: 1586226 - RNA, 19 nt, Artificial Sequence
  Description of Artificial Sequence: Synthetic oligonucleotide
  Antisense strand to SEQ ID NO: 1586225
uauugcaugcuucuacuaa

SEQ ID NO: 1586227 - RNA, 19 nt, Artificial Sequence
  Description of Artificial Sequence: Synthetic oligonucleotide
  Sense strand starting at position 2487 of SEQ ID NO: 1560241
caugcaauagguugucuuu

SEQ ID NO: 1586228 - RNA, 19 nt, Artificial Sequence
  Description of Artificial Sequence: Synthetic oligonucleotide
  Antisense strand to SEQ ID NO: 1586227
aaagacaaccuauugcaug

SEQ ID NO: 1586229 - RNA, 19 nt, Artificial Sequence
  Description of Artificial Sequence: Synthetic oligonucleotide
  Sense strand starting at position 2856 of SEQ ID NO: 1560241
auaucaacagcucguuauu

SEQ ID NO: 1586230 - RNA, 19 nt, Artificial Sequence
  Description of Artificial Sequence: Synthetic oligonucleotide
  Antisense strand to SEQ ID NO: 1586229
aauaacgagcuguugauau

SEQ ID NO: 1586231 - RNA, 19 nt, Artificial Sequence
  Description of Artificial Sequence: Synthetic oligonucleotide
  Sense strand starting at position 2889 of SEQ ID NO: 1560241
gguauuucauuguguggcu

SEQ ID NO: 1586232 - RNA, 19 nt, Artificial Sequence
  Description of Artificial Sequence: Synthetic oligonucleotide
  Antisense strand to SEQ ID NO: 1586231
agccacacaaugaaauacc

SEQ ID NO: 1586233 - RNA, 19 nt, Artificial Sequence
  Description of Artificial Sequence: Synthetic oligonucleotide
  Sense strand starting at position 2902 of SEQ ID NO: 1560241
guggcuauacuauaaugua

SEQ ID NO: 1586234 - RNA, 19 nt, Artificial Sequence
  Description of Artificial Sequence: Synthetic oligonucleotide
  Antisense strand to SEQ ID NO: 1586233
uacauuauaguauagccac

SEQ ID NO: 1586235 - RNA, 19 nt, Artificial Sequence
  Description of Artificial Sequence: Synthetic oligonucleotide
  Sense strand starting at position 2937 of SEQ ID NO: 1560241
ucaccuguucuuggccaau

SEQ ID NO: 1586236 - RNA, 19 nt, Artificial Sequence
  Description of Artificial Sequence: Synthetic oligonucleotide
  Antisense strand to SEQ ID NO: 1586235
auuggccaagaacagguga

SEQ ID NO: 1586237 - RNA, 19 nt, Artificial Sequence
  Description of Artificial Sequence: Synthetic oligonucleotide
  Sense strand starting at position 2940 of SEQ ID NO: 1560241
ccuguucuuggccaauuga

SEQ ID NO: 1586238 - RNA, 19 nt, Artificial Sequence
  Description of Artificial Sequence: Synthetic oligonucleotide
  Antisense strand to SEQ ID NO: 1586237
ucaauuggccaagaacagg

SEQ ID NO: 1586239 - RNA, 19 nt, Artificial Sequence
  Description of Artificial Sequence: Synthetic oligonucleotide
  Sense strand starting at position 2968 of SEQ ID NO: 1560241
gucuuuggccacuguuaau

SEQ ID NO: 1586240 - RNA, 19 nt, Artificial Sequence
  Description of Artificial Sequence: Synthetic oligonucleotide
  Antisense strand to SEQ ID NO: 1586239
auuaacaguggccaaagac

SEQ ID NO: 1586241 - RNA, 19 nt, Artificial Sequence
  Description of Artificial Sequence: Synthetic oligonucleotide
  Sense strand starting at position 2971 of SEQ ID NO: 1560241
uuuggccacuguuaauaga

SEQ ID NO: 1586242 - RNA, 19 nt, Artificial Sequence
  Description of Artificial Sequence: Synthetic oligonucleotide
  Antisense strand to SEQ ID NO: 1586241
ucuauuaacaguggccaaa

SEQ ID NO: 1586243 - RNA, 19 nt, Artificial Sequence
  Description of Artificial Sequence: Synthetic oligonucleotide
  Sense strand starting at position 2981 of SEQ ID NO: 1560241
guuaauagagcuuguacug

SEQ ID NO: 1586244 - RNA, 19 nt, Artificial Sequence
  Description of Artificial Sequence: Synthetic oligonucleotide
  Antisense strand to SEQ ID NO: 1586243
caguacaagcucuauuaac

SEQ ID NO: 1586245 - RNA, 19 nt, Artificial Sequence
  Description of Artificial Sequence: Synthetic oligonucleotide
  Sense strand starting at position 2986 of SEQ ID NO: 1560241
uagagcuuguacuguaaga

SEQ ID NO: 1586246 - RNA, 19 nt, Artificial Sequence
  Description of Artificial Sequence: Synthetic oligonucleotide
  Antisense strand to SEQ ID NO: 1586245
ucuuacaguacaagcucua

SEQ ID NO: 1586247 - RNA, 19 nt, Artificial Sequence
  Description of Artificial Sequence: Synthetic oligonucleotide
  Sense strand starting at position 2988 of SEQ ID NO: 1560241
gagcuuguacuguaagagu

SEQ ID NO: 1586248 - RNA, 19 nt, Artificial Sequence
  Description of Artificial Sequence: Synthetic oligonucleotide
  Antisense strand to SEQ ID NO: 1586247
acucuuacaguacaagcuc

SEQ ID NO: 1586249 - RNA, 19 nt, Artificial Sequence
  Description of Artificial Sequence: Synthetic oligonucleotide
  Sense strand starting at position 2991 of SEQ ID NO: 1560241
cuuguacuguaagaguauu

SEQ ID NO: 1586250 - RNA, 19 nt, Artificial Sequence
  Description of Artificial Sequence: Synthetic oligonucleotide
  Antisense strand to SEQ ID NO: 1586249
aauacucuuacaguacaag

SEQ ID NO: 1586251 - RNA, 19 nt, Artificial Sequence
  Description of Artificial Sequence: Synthetic oligonucleotide
  Sense strand starting at position 3058 of SEQ ID NO: 1560241
guggcauggucacuaagcu

SEQ ID NO: 1586252 - RNA, 19 nt, Artificial Sequence
  Description of Artificial Sequence: Synthetic oligonucleotide
  Antisense strand to SEQ ID NO: 1586251
agcuuagugaccaugccac

SEQ ID NO: 1586253 - RNA, 19 nt, Artificial Sequence
  Description of Artificial Sequence: Synthetic oligonucleotide
  Sense strand starting at position 3059 of SEQ ID NO: 1560241
uggcauggucacuaagcuu

SEQ ID NO: 1586254 - RNA, 19 nt, Artificial Sequence
  Description of Artificial Sequence: Synthetic oligonucleotide
  Antisense strand to SEQ ID NO: 1586253
aagcuuagugaccaugcca

SEQ ID NO: 1586255 - RNA, 19 nt, Artificial Sequence
  Description of Artificial Sequence: Synthetic oligonucleotide
  Sense strand starting at position 3066 of SEQ ID NO: 1560241
gucacuaagcuuuauuaga

SEQ ID NO: 1586256 - RNA, 19 nt, Artificial Sequence
  Description of Artificial Sequence: Synthetic oligonucleotide
  Antisense strand to SEQ ID NO: 1586255
ucuaauaaagcuuagugac

SEQ ID NO: 1586257 - RNA, 19 nt, Artificial Sequence
  Description of Artificial Sequence: Synthetic oligonucleotide
  Sense strand starting at position 3076 of SEQ ID NO: 1560241
uuuauuagauccuggcaga

SEQ ID NO: 1586258 - RNA, 19 nt, Artificial Sequence
  Description of Artificial Sequence: Synthetic oligonucleotide
  Antisense strand to SEQ ID NO: 1586257
ucugccaggaucuaauaaa

SEQ ID NO: 1586259 - RNA, 19 nt, Artificial Sequence
  Description of Artificial Sequence: Synthetic oligonucleotide
  Sense strand starting at position 3077 of SEQ ID NO: 1560241
uuauuagauccuggcagau

SEQ ID NO: 1586260 - RNA, 19 nt, Artificial Sequence
  Description of Artificial Sequence: Synthetic oligonucleotide
  Antisense strand to SEQ ID NO: 1586259
aucugccaggaucuaauaa

SEQ ID NO: 1586261 - RNA, 19 nt, Artificial Sequence
  Description of Artificial Sequence: Synthetic oligonucleotide
  Sense strand starting at position 3079 of SEQ ID NO: 1560241
auuagauccuggcagauuu

SEQ ID NO: 1586262 - RNA, 19 nt, Artificial Sequence
  Description of Artificial Sequence: Synthetic oligonucleotide
  Antisense strand to SEQ ID NO: 1586261
aaaucugccaggaucuaau

SEQ ID NO: 1586263 - RNA, 19 nt, Artificial Sequence
  Description of Artificial Sequence: Synthetic oligonucleotide
  Sense strand starting at position 3924 of SEQ ID NO: 1560241
ggugguugauaccuguacu

SEQ ID NO: 1586264 - RNA, 19 nt, Artificial Sequence
  Description of Artificial Sequence: Synthetic oligonucleotide
  Antisense strand to SEQ ID NO: 1586263
aguacagguaucaaccacc

SEQ ID NO: 1586265 - RNA, 19 nt, Artificial Sequence
  Description of Artificial Sequence: Synthetic oligonucleotide
  Sense strand starting at position 3925 of SEQ ID NO: 1560241
gugguugauaccuguacuc

SEQ ID NO: 1586266 - RNA, 19 nt, Artificial Sequence
  Description of Artificial Sequence: Synthetic oligonucleotide
  Antisense strand to SEQ ID NO: 1586265
gaguacagguaucaaccac

SEQ ID NO: 1586267 - RNA, 19 nt, Artificial Sequence
  Description of Artificial Sequence: Synthetic oligonucleotide
  Sense strand starting at position 320 of SEQ ID NO: 1560242
gccagagggucucaagcau

SEQ ID NO: 1586268 - RNA, 19 nt, Artificial Sequence
  Description of Artificial Sequence: Synthetic oligonucleotide
  Antisense strand to SEQ ID NO: 1586267
augcuugagacccucuggc

SEQ ID NO: 1586269 - RNA, 19 nt, Artificial Sequence
  Description of Artificial Sequence: Synthetic oligonucleotide
  Sense strand starting at position 814 of SEQ ID NO: 1560242
gggccaucuuguuuaauuc

SEQ ID NO: 1586270 - RNA, 19 nt, Artificial Sequence
  Description of Artificial Sequence: Synthetic oligonucleotide
  Antisense strand to SEQ ID NO: 1586269
gaauuaaacaagauggccc

SEQ ID NO: 1586271 - RNA, 19 nt, Artificial Sequence
  Description of Artificial Sequence: Synthetic oligonucleotide
  Sense strand starting at position 815 of SEQ ID NO: 1560242
ggccaucuuguuuaauucu

SEQ ID NO: 1586272 - RNA, 19 nt, Artificial Sequence
  Description of Artificial Sequence: Synthetic oligonucleotide
  Antisense strand to SEQ ID NO: 1586271
agaauuaaacaagauggcc

SEQ ID NO: 1586273 - RNA, 19 nt, Artificial Sequence
  Description of Artificial Sequence: Synthetic oligonucleotide
  Sense strand starting at position 821 of SEQ ID NO: 1560242
cuuguuuaauucugcagga

SEQ ID NO: 1586274 - RNA, 19 nt, Artificial Sequence
  Description of Artificial Sequence: Synthetic oligonucleotide
  Antisense strand to SEQ ID NO: 1586273
uccugcagaauuaaacaag

SEQ ID NO: 1586275 - RNA, 19 nt, Artificial Sequence
  Description of Artificial Sequence: Synthetic oligonucleotide
  Sense strand starting at position 872 of SEQ ID NO: 1560242
ucaucucacacgugggaaa

SEQ ID NO: 1586276 - RNA, 19 nt, Artificial Sequence
  Description of Artificial Sequence: Synthetic oligonucleotide
  Antisense strand to SEQ ID NO: 1586275
uuucccacgugugagauga

SEQ ID NO: 1586277 - RNA, 19 nt, Artificial Sequence
  Description of Artificial Sequence: Synthetic oligonucleotide
  Sense strand starting at position 1385 of SEQ ID NO: 1560242
ucucuuuaauggcgaaacu

SEQ ID NO: 1586278 - RNA, 19 nt, Artificial Sequence
  Description of Artificial Sequence: Synthetic oligonucleotide
  Antisense strand to SEQ ID NO: 1586277
aguuucgccauuaaagaga

SEQ ID NO: 1586279 - RNA, 19 nt, Artificial Sequence
  Description of Artificial Sequence: Synthetic oligonucleotide
  Sense strand starting at position 1526 of SEQ ID NO: 1560242
guaccaggucugcaggauu

SEQ ID NO: 1586280 - RNA, 19 nt, Artificial Sequence
  Description of Artificial Sequence: Synthetic oligonucleotide
  Antisense strand to SEQ ID NO: 1586279
aauccugcagaccugguac

SEQ ID NO: 1586281 - RNA, 19 nt, Artificial Sequence
  Description of Artificial Sequence: Synthetic oligonucleotide
  Sense strand starting at position 1547 of SEQ ID NO: 1560242
gcgauacuaucggacuagu

SEQ ID NO: 1586282 - RNA, 19 nt, Artificial Sequence
  Description of Artificial Sequence: Synthetic oligonucleotide
  Antisense strand to SEQ ID NO: 1586281
acuaguccgauaguaucgc

SEQ ID NO: 1586283 - RNA, 19 nt, Artificial Sequence
  Description of Artificial Sequence: Synthetic oligonucleotide
  Sense strand starting at position 1550 of SEQ ID NO: 1560242
auacuaucggacuagucau

SEQ ID NO: 1586284 - RNA, 19 nt, Artificial Sequence
  Description of Artificial Sequence: Synthetic oligonucleotide
  Antisense strand to SEQ ID NO: 1586283
augacuaguccgauaguau

SEQ ID NO: 1586285 - RNA, 19 nt, Artificial Sequence
  Description of Artificial Sequence: Synthetic oligonucleotide
  Sense strand starting at position 1556 of SEQ ID NO: 1560242
ucggacuagucauccauca

SEQ ID NO: 1586286 - RNA, 19 nt, Artificial Sequence
  Description of Artificial Sequence: Synthetic oligonucleotide
  Antisense strand to SEQ ID NO: 1586285
ugauggaugacuaguccga

SEQ ID NO: 1586287 - RNA, 19 nt, Artificial Sequence
  Description of Artificial Sequence: Synthetic oligonucleotide
  Sense strand starting at position 1583 of SEQ ID NO: 1560242
cugugcugagacuaugaaa

SEQ ID NO: 1586288 - RNA, 19 nt, Artificial Sequence
  Description of Artificial Sequence: Synthetic oligonucleotide
  Antisense strand to SEQ ID NO: 1586287
uuucauagucucagcacag

SEQ ID NO: 1586289 - RNA, 19 nt, Artificial Sequence
  Description of Artificial Sequence: Synthetic oligonucleotide
  Sense strand starting at position 1608 of SEQ ID NO: 1560242
gagauuacaucacuugcgu

SEQ ID NO: 1586290 - RNA, 19 nt, Artificial Sequence
  Description of Artificial Sequence: Synthetic oligonucleotide
  Antisense strand to SEQ ID NO: 1586289
acgcaagugauguaaucuc

SEQ ID NO: 1586291 - RNA, 19 nt, Artificial Sequence
  Description of Artificial Sequence: Synthetic oligonucleotide
  Sense strand starting at position 1726 of SEQ ID NO: 1560242
ccucgugggaccggaauaa

SEQ ID NO: 1586292 - RNA, 19 nt, Artificial Sequence
  Description of Artificial Sequence: Synthetic oligonucleotide
  Antisense strand to SEQ ID NO: 1586291
uuauuccggucccacgagg

SEQ ID NO: 1586293 - RNA, 19 nt, Artificial Sequence
  Description of Artificial Sequence: Synthetic oligonucleotide
  Sense strand starting at position 2091 of SEQ ID NO: 1560242
accgcauccuuaucauguu

SEQ ID NO: 1586294 - RNA, 19 nt, Artificial Sequence
  Description of Artificial Sequence: Synthetic oligonucleotide
  Antisense strand to SEQ ID NO: 1586293
aacaugauaaggaugcggu

SEQ ID NO: 1586295 - RNA, 19 nt, Artificial Sequence
  Description of Artificial Sequence: Synthetic oligonucleotide
  Sense strand starting at position 2117 of SEQ ID NO: 1560242
aucccauuggcuugcagaa

SEQ ID NO: 1586296 - RNA, 19 nt, Artificial Sequence
  Description of Artificial Sequence: Synthetic oligonucleotide
  Antisense strand to SEQ ID NO: 1586295
uucugcaagccaaugggau

SEQ ID NO: 1586297 - RNA, 19 nt, Artificial Sequence
  Description of Artificial Sequence: Synthetic oligonucleotide
  Sense strand starting at position 2138 of SEQ ID NO: 1560242
acacuacaauucccgagau

SEQ ID NO: 1586298 - RNA, 19 nt, Artificial Sequence
  Description of Artificial Sequence: Synthetic oligonucleotide
  Antisense strand to SEQ ID NO: 1586297
aucucgggaauuguagugu

SEQ ID NO: 1586299 - RNA, 19 nt, Artificial Sequence
  Description of Artificial Sequence: Synthetic oligonucleotide
  Sense strand starting at position 2153 of SEQ ID NO: 1560242
agaugcucuccgugacgca

SEQ ID NO: 1586300 - RNA, 19 nt, Artificial Sequence
  Description of Artificial Sequence: Synthetic oligonucleotide
  Antisense strand to SEQ ID NO: 1586299
ugcgucacggagagcaucu

SEQ ID NO: 1586301 - RNA, 19 nt, Artificial Sequence
  Description of Artificial Sequence: Synthetic oligonucleotide
  Sense strand starting at position 2204 of SEQ ID NO: 1560242
ggagcuucccauuggcuua

SEQ ID NO: 1586302 - RNA, 19 nt, Artificial Sequence
  Description of Artificial Sequence: Synthetic oligonucleotide
  Antisense strand to SEQ ID NO: 1586301
uaagccaaugggaagcucc

SEQ ID NO: 1586303 - RNA, 19 nt, Artificial Sequence
  Description of Artificial Sequence: Synthetic oligonucleotide
  Sense strand starting at position 2283 of SEQ ID NO: 1560242
gcugacgugucuuucagga

SEQ ID NO: 1586304 - RNA, 19 nt, Artificial Sequence
  Description of Artificial Sequence: Synthetic oligonucleotide
  Antisense strand to SEQ ID NO: 1586303
uccugaaagacacgucagc

SEQ ID NO: 1586305 - RNA, 19 nt, Artificial Sequence
  Description of Artificial Sequence: Synthetic oligonucleotide
  Sense strand starting at position 2285 of SEQ ID NO: 1560242
ugacgugucuuucaggaag

SEQ ID NO: 1586306 - RNA, 19 nt, Artificial Sequence
  Description of Artificial Sequence: Synthetic oligonucleotide
  Antisense strand to SEQ ID NO: 1586305
cuuccugaaagacacguca

SEQ ID NO: 1586307 - RNA, 19 nt, Artificial Sequence
  Description of Artificial Sequence: Synthetic oligonucleotide
  Sense strand starting at position 2287 of SEQ ID NO: 1560242
acgugucuuucaggaagag

SEQ ID NO: 1586308 - RNA, 19 nt, Artificial Sequence
  Description of Artificial Sequence: Synthetic oligonucleotide
  Antisense strand to SEQ ID NO: 1586307
cucuuccugaaagacacgu

SEQ ID NO: 1586309 - RNA, 19 nt, Artificial Sequence
  Description of Artificial Sequence: Synthetic oligonucleotide
  Sense strand starting at position 2375 of SEQ ID NO: 1560242
agacgagcuguucgacgua

SEQ ID NO: 1586310 - RNA, 19 nt, Artificial Sequence
  Description of Artificial Sequence: Synthetic oligonucleotide
  Antisense strand to SEQ ID NO: 1586309
uacgucgaacagcucgucu

SEQ ID NO: 1586311 - RNA, 19 nt, Artificial Sequence
  Description of Artificial Sequence: Synthetic oligonucleotide
  Sense strand starting at position 2377 of SEQ ID NO: 1560242
acgagcuguucgacguaaa

SEQ ID NO: 1586312 - RNA, 19 nt, Artificial Sequence
  Description of Artificial Sequence: Synthetic oligonucleotide
  Antisense strand to SEQ ID NO: 1586311
uuuacgucgaacagcucgu

SEQ ID NO: 1586313 - RNA, 19 nt, Artificial Sequence
  Description of Artificial Sequence: Synthetic oligonucleotide
  Sense strand starting at position 2378 of SEQ ID NO: 1560242
cgagcuguucgacguaaag

SEQ ID NO: 1586314 - RNA, 19 nt, Artificial Sequence
  Description of Artificial Sequence: Synthetic oligonucleotide
  Antisense strand to SEQ ID NO: 1586313
cuuuacgucgaacagcucg

SEQ ID NO: 1586315 - RNA, 19 nt, Artificial Sequence
  Description of Artificial Sequence: Synthetic oligonucleotide
  Sense strand starting at position 2380 of SEQ ID NO: 1560242
agcuguucgacguaaagaa

SEQ ID NO: 1586316 - RNA, 19 nt, Artificial Sequence
  Description of Artificial Sequence: Synthetic oligonucleotide
  Antisense strand to SEQ ID NO: 1586315
uucuuuacgucgaacagcu

SEQ ID NO: 1586317 - RNA, 19 nt, Artificial Sequence
  Description of Artificial Sequence: Synthetic oligonucleotide
  Sense strand starting at position 2599 of SEQ ID NO: 1560242
gucacugucccgugacaga

SEQ ID NO: 1586318 - RNA, 19 nt, Artificial Sequence
  Description of Artificial Sequence: Synthetic oligonucleotide
  Antisense strand to SEQ ID NO: 1586317
ucugucacgggacagugac

SEQ ID NO: 1586319 - RNA, 19 nt, Artificial Sequence
  Description of Artificial Sequence: Synthetic oligonucleotide
  Sense strand starting at position 2625 of SEQ ID NO: 1560242
gcaguaacaguuuacggua

SEQ ID NO: 1586320 - RNA, 19 nt, Artificial Sequence
  Description of Artificial Sequence: Synthetic oligonucleotide
  Antisense strand to SEQ ID NO: 1586319
uaccguaaacuguuacugc

SEQ ID NO: 1586321 - RNA, 19 nt, Artificial Sequence
  Description of Artificial Sequence: Synthetic oligonucleotide
  Sense strand starting at position 2687 of SEQ ID NO: 1560242
uugaguaagggagguguuu

SEQ ID NO: 1586322 - RNA, 19 nt, Artificial Sequence
  Description of Artificial Sequence: Synthetic oligonucleotide
  Antisense strand to SEQ ID NO: 1586321
aaacaccucccuuacucaa

SEQ ID NO: 1586323 - RNA, 19 nt, Artificial Sequence
  Description of Artificial Sequence: Synthetic oligonucleotide
  Sense strand starting at position 2689 of SEQ ID NO: 1560242
gaguaagggagguguuuau

SEQ ID NO: 1586324 - RNA, 19 nt, Artificial Sequence
  Description of Artificial Sequence: Synthetic oligonucleotide
  Antisense strand to SEQ ID NO: 1586323
auaaacaccucccuuacuc

SEQ ID NO: 1586325 - RNA, 19 nt, Artificial Sequence
  Description of Artificial Sequence: Synthetic oligonucleotide
  Sense strand starting at position 2706 of SEQ ID NO: 1560242
augccacuguagugacaau

SEQ ID NO: 1586326 - RNA, 19 nt, Artificial Sequence
  Description of Artificial Sequence: Synthetic oligonucleotide
  Antisense strand to SEQ ID NO: 1586325
auugucacuacaguggcau

SEQ ID NO: 1586327 - RNA, 19 nt, Artificial Sequence
  Description of Artificial Sequence: Synthetic oligonucleotide
  Sense strand starting at position 2763 of SEQ ID NO: 1560242
gauggagacuguugcuuau

SEQ ID NO: 1586328 - RNA, 19 nt, Artificial Sequence
  Description of Artificial Sequence: Synthetic oligonucleotide
  Antisense strand to SEQ ID NO: 1586327
auaagcaacagucuccauc

SEQ ID NO: 1586329 - RNA, 19 nt, Artificial Sequence
  Description of Artificial Sequence: Synthetic oligonucleotide
  Sense strand starting at position 2844 of SEQ ID NO: 1560242
gguuauuucucccagagcu

SEQ ID NO: 1586330 - RNA, 19 nt, Artificial Sequence
  Description of Artificial Sequence: Synthetic oligonucleotide
  Antisense strand to SEQ ID NO: 1586329
agcucugggagaaauaacc

SEQ ID NO: 1586331 - RNA, 19 nt, Artificial Sequence
  Description of Artificial Sequence: Synthetic oligonucleotide
  Sense strand starting at position 2911 of SEQ ID NO: 1560242
cuguauuccgcuggacuca

SEQ ID NO: 1586332 - RNA, 19 nt, Artificial Sequence
  Description of Artificial Sequence: Synthetic oligonucleotide
  Antisense strand to SEQ ID NO: 1586331
ugaguccagcggaauacag

SEQ ID NO: 1586333 - RNA, 19 nt, Artificial Sequence
  Description of Artificial Sequence: Synthetic oligonucleotide
  Sense strand starting at position 3195 of SEQ ID NO: 1560242
gggugacaaaguuguaaga

SEQ ID NO: 1586334 - RNA, 19 nt, Artificial Sequence
  Description of Artificial Sequence: Synthetic oligonucleotide
  Antisense strand to SEQ ID NO: 1586333
ucuuacaacuuugucaccc

SEQ ID NO: 1586335 - RNA, 19 nt, Artificial Sequence
  Description of Artificial Sequence: Synthetic oligonucleotide
  Sense strand starting at position 3197 of SEQ ID NO: 1560242
gugacaaaguuguaagaau

SEQ ID NO: 1586336 - RNA, 19 nt, Artificial Sequence
  Description of Artificial Sequence: Synthetic oligonucleotide
  Antisense strand to SEQ ID NO: 1586335
auucuuacaacuuugucac

SEQ ID NO: 1586337 - RNA, 19 nt, Artificial Sequence
  Description of Artificial Sequence: Synthetic oligonucleotide
  Sense strand starting at position 3299 of SEQ ID NO: 1560242
gcggaguugggucagagua

SEQ ID NO: 1586338 - RNA, 19 nt, Artificial Sequence
  Description of Artificial Sequence: Synthetic oligonucleotide
  Antisense strand to SEQ ID NO: 1586337
uacucugacccaacuccgc

SEQ ID NO: 1586339 - RNA, 19 nt, Artificial Sequence
  Description of Artificial Sequence: Synthetic oligonucleotide
  Sense strand starting at position 3301 of SEQ ID NO: 1560242
ggaguugggucagaguaac

SEQ ID NO: 1586340 - RNA, 19 nt, Artificial Sequence
  Description of Artificial Sequence: Synthetic oligonucleotide
  Antisense strand to SEQ ID NO: 1586339
guuacucugacccaacucc

SEQ ID NO: 1586341 - RNA, 19 nt, Artificial Sequence
  Description of Artificial Sequence: Synthetic oligonucleotide
  Sense strand starting at position 3348 of SEQ ID NO: 1560242
gauucagggucggagaguu

SEQ ID NO: 1586342 - RNA, 19 nt, Artificial Sequence
  Description of Artificial Sequence: Synthetic oligonucleotide
  Antisense strand to SEQ ID NO: 1586341
aacucuccgacccugaauc

SEQ ID NO: 1586343 - RNA, 19 nt, Artificial Sequence
  Description of Artificial Sequence: Synthetic oligonucleotide
  Sense strand starting at position 3888 of SEQ ID NO: 1560242
guuguaugaaggugaaguu

SEQ ID NO: 1586344 - RNA, 19 nt, Artificial Sequence
  Description of Artificial Sequence: Synthetic oligonucleotide
  Antisense strand to SEQ ID NO: 1586343
aacuucaccuucauacaac

SEQ ID NO: 1586345 - RNA, 19 nt, Artificial Sequence
  Description of Artificial Sequence: Synthetic oligonucleotide
  Sense strand starting at position 3949 of SEQ ID NO: 1560242
cgagcugucuuucuguguu

SEQ ID NO: 1586346 - RNA, 19 nt, Artificial Sequence
  Description of Artificial Sequence: Synthetic oligonucleotide
  Antisense strand to SEQ ID NO: 1586345
aacacagaaagacagcucg

SEQ ID NO: 1586347 - RNA, 19 nt, Artificial Sequence
  Description of Artificial Sequence: Synthetic oligonucleotide
  Sense strand starting at position 49 of SEQ ID NO: 1560243
gcucucucgugaucccaaa

SEQ ID NO: 1586348 - RNA, 19 nt, Artificial Sequence
  Description of Artificial Sequence: Synthetic oligonucleotide
  Antisense strand to SEQ ID NO: 1586347
uuugggaucacgagagagc

SEQ ID NO: 1586349 - RNA, 19 nt, Artificial Sequence
  Description of Artificial Sequence: Synthetic oligonucleotide
  Sense strand starting at position 56 of SEQ ID NO: 1560243
cgugaucccaaauggaaau

SEQ ID NO: 1586350 - RNA, 19 nt, Artificial Sequence
  Description of Artificial Sequence: Synthetic oligonucleotide
  Antisense strand to SEQ ID NO: 1586349
auuuccauuugggaucacg

SEQ ID NO: 1586351 - RNA, 19 nt, Artificial Sequence
  Description of Artificial Sequence: Synthetic oligonucleotide
  Sense strand starting at position 347 of SEQ ID NO: 1560243
gggucugucagggagucua

SEQ ID NO: 1586352 - RNA, 19 nt, Artificial Sequence
  Description of Artificial Sequence: Synthetic oligonucleotide
  Antisense strand to SEQ ID NO: 1586351
uagacucccugacagaccc

SEQ ID NO: 1586353 - RNA, 19 nt, Artificial Sequence
  Description of Artificial Sequence: Synthetic oligonucleotide
  Sense strand starting at position 453 of SEQ ID NO: 1560243
cugcauguacuugagacaa

SEQ ID NO: 1586354 - RNA, 19 nt, Artificial Sequence
  Description of Artificial Sequence: Synthetic oligonucleotide
  Antisense strand to SEQ ID NO: 1586353
uugucucaaguacaugcag

SEQ ID NO: 1586355 - RNA, 19 nt, Artificial Sequence
  Description of Artificial Sequence: Synthetic oligonucleotide
  Sense strand starting at position 1545 of SEQ ID NO: 1560243
aagcauaguccugggcuaa

SEQ ID NO: 1586356 - RNA, 19 nt, Artificial Sequence
  Description of Artificial Sequence: Synthetic oligonucleotide
  Antisense strand to SEQ ID NO: 1586355
uuagcccaggacuaugcuu

SEQ ID NO: 1586357 - RNA, 19 nt, Artificial Sequence
  Description of Artificial Sequence: Synthetic oligonucleotide
  Sense strand starting at position 1546 of SEQ ID NO: 1560243
agcauaguccugggcuaaa

SEQ ID NO: 1586358 - RNA, 19 nt, Artificial Sequence
  Description of Artificial Sequence: Synthetic oligonucleotide
  Antisense strand to SEQ ID NO: 1586357
uuuagcccaggacuaugcu

SEQ ID NO: 1586359 - RNA, 19 nt, Artificial Sequence
  Description of Artificial Sequence: Synthetic oligonucleotide
  Sense strand starting at position 1577 of SEQ ID NO: 1560243
ccugguaagugacuaucau

SEQ ID NO: 1586360 - RNA, 19 nt, Artificial Sequence
  Description of Artificial Sequence: Synthetic oligonucleotide
  Antisense strand to SEQ ID NO: 1586359
augauagucacuuaccagg

SEQ ID NO: 1586361 - RNA, 19 nt, Artificial Sequence
  Description of Artificial Sequence: Synthetic oligonucleotide
  Sense strand starting at position 1578 of SEQ ID NO: 1560243
cugguaagugacuaucauu

SEQ ID NO: 1586362 - RNA, 19 nt, Artificial Sequence
  Description of Artificial Sequence: Synthetic oligonucleotide
  Antisense strand to SEQ ID NO: 1586361
aaugauagucacuuaccag

SEQ ID NO: 1586363 - RNA, 19 nt, Artificial Sequence
  Description of Artificial Sequence: Synthetic oligonucleotide
  Sense strand starting at position 1633 of SEQ ID NO: 1560243
uuaacaaacugugaaggau

SEQ ID NO: 1586364 - RNA, 19 nt, Artificial Sequence
  Description of Artificial Sequence: Synthetic oligonucleotide
  Antisense strand to SEQ ID NO: 1586363
auccuucacaguuuguuaa

SEQ ID NO: 1586365 - RNA, 19 nt, Artificial Sequence
  Description of Artificial Sequence: Synthetic oligonucleotide
  Sense strand starting at position 1645 of SEQ ID NO: 1560243
gaaggauucugucuugcua

SEQ ID NO: 1586366 - RNA, 19 nt, Artificial Sequence
  Description of Artificial Sequence: Synthetic oligonucleotide
  Antisense strand to SEQ ID NO: 1586365
uagcaagacagaauccuuc

SEQ ID NO: 1586367 - RNA, 19 nt, Artificial Sequence
  Description of Artificial Sequence: Synthetic oligonucleotide
  Sense strand starting at position 1834 of SEQ ID NO: 1560243
ucagaaaugcuccgucucu

SEQ ID NO: 1586368 - RNA, 19 nt, Artificial Sequence
  Description of Artificial Sequence: Synthetic oligonucleotide
  Antisense strand to SEQ ID NO: 1586367
agagacggagcauuucuga

SEQ ID NO: 1586369 - RNA, 19 nt, Artificial Sequence
  Description of Artificial Sequence: Synthetic oligonucleotide
  Sense strand starting at position 1835 of SEQ ID NO: 1560243
cagaaaugcuccgucucuu

SEQ ID NO: 1586370 - RNA, 19 nt, Artificial Sequence
  Description of Artificial Sequence: Synthetic oligonucleotide
  Antisense strand to SEQ ID NO: 1586369
aagagacggagcauuucug

SEQ ID NO: 1586371 - RNA, 19 nt, Artificial Sequence
  Description of Artificial Sequence: Synthetic oligonucleotide
  Sense strand starting at position 1930 of SEQ ID NO: 1560243
gcccgaguuucucuacaga

SEQ ID NO: 1586372 - RNA, 19 nt, Artificial Sequence
  Description of Artificial Sequence: Synthetic oligonucleotide
  Antisense strand to SEQ ID NO: 1586371
ucuguagagaaacucgggc

SEQ ID NO: 1586373 - RNA, 19 nt, Artificial Sequence
  Description of Artificial Sequence: Synthetic oligonucleotide
  Sense strand starting at position 1933 of SEQ ID NO: 1560243
cgaguuucucuacagaacu

SEQ ID NO: 1586374 - RNA, 19 nt, Artificial Sequence
  Description of Artificial Sequence: Synthetic oligonucleotide
  Antisense strand to SEQ ID NO: 1586373
aguucuguagagaaacucg

SEQ ID NO: 1586375 - RNA, 19 nt, Artificial Sequence
  Description of Artificial Sequence: Synthetic oligonucleotide
  Sense strand starting at position 2028 of SEQ ID NO: 1560243
gaagaugugugcguggaua

SEQ ID NO: 1586376 - RNA, 19 nt, Artificial Sequence
  Description of Artificial Sequence: Synthetic oligonucleotide
  Antisense strand to SEQ ID NO: 1586375
uauccacgcacacaucuuc

SEQ ID NO: 1586377 - RNA, 19 nt, Artificial Sequence
  Description of Artificial Sequence: Synthetic oligonucleotide
  Sense strand starting at position 2030 of SEQ ID NO: 1560243
agaugugugcguggauaac

SEQ ID NO: 1586378 - RNA, 19 nt, Artificial Sequence
  Description of Artificial Sequence: Synthetic oligonucleotide
  Antisense strand to SEQ ID NO: 1586377
guuauccacgcacacaucu

SEQ ID NO: 1586379 - RNA, 19 nt, Artificial Sequence
  Description of Artificial Sequence: Synthetic oligonucleotide
  Sense strand starting at position 2484 of SEQ ID NO: 1560243
guaggagacaagcguugua

SEQ ID NO: 1586380 - RNA, 19 nt, Artificial Sequence
  Description of Artificial Sequence: Synthetic oligonucleotide
  Antisense strand to SEQ ID NO: 1586379
uacaacgcuugucuccuac

SEQ ID NO: 1586381 - RNA, 19 nt, Artificial Sequence
  Description of Artificial Sequence: Synthetic oligonucleotide
  Sense strand starting at position 2487 of SEQ ID NO: 1560243
ggagacaagcguuguaaag

SEQ ID NO: 1586382 - RNA, 19 nt, Artificial Sequence
  Description of Artificial Sequence: Synthetic oligonucleotide
  Antisense strand to SEQ ID NO: 1586381
cuuuacaacgcuugucucc

SEQ ID NO: 1586383 - RNA, 19 nt, Artificial Sequence
  Description of Artificial Sequence: Synthetic oligonucleotide
  Sense strand starting at position 2494 of SEQ ID NO: 1560243
agcguuguaaagcgggaaa

SEQ ID NO: 1586384 - RNA, 19 nt, Artificial Sequence
  Description of Artificial Sequence: Synthetic oligonucleotide
  Antisense strand to SEQ ID NO: 1586383
uuucccgcuuuacaacgcu

SEQ ID NO: 1586385 - RNA, 19 nt, Artificial Sequence
  Description of Artificial Sequence: Synthetic oligonucleotide
  Sense strand starting at position 2497 of SEQ ID NO: 1560243
guuguaaagcgggaaaguu

SEQ ID NO: 1586386 - RNA, 19 nt, Artificial Sequence
  Description of Artificial Sequence: Synthetic oligonucleotide
  Antisense strand to SEQ ID NO: 1586385
aacuuucccgcuuuacaac

SEQ ID NO: 1586387 - RNA, 19 nt, Artificial Sequence
  Description of Artificial Sequence: Synthetic oligonucleotide
  Sense strand starting at position 2533 of SEQ ID NO: 1560243
guggguuccuuccuggaaa

SEQ ID NO: 1586388 - RNA, 19 nt, Artificial Sequence
  Description of Artificial Sequence: Synthetic oligonucleotide
  Antisense strand to SEQ ID NO: 1586387
uuuccaggaaggaacccac

SEQ ID NO: 1586389 - RNA, 19 nt, Artificial Sequence
  Description of Artificial Sequence: Synthetic oligonucleotide
  Sense strand starting at position 2535 of SEQ ID NO: 1560243
ggguuccuuccuggaaaga

SEQ ID NO: 1586390 - RNA, 19 nt, Artificial Sequence
  Description of Artificial Sequence: Synthetic oligonucleotide
  Antisense strand to SEQ ID NO: 1586389
ucuuuccaggaaggaaccc

SEQ ID NO: 1586391 - RNA, 19 nt, Artificial Sequence
  Description of Artificial Sequence: Synthetic oligonucleotide
  Sense strand starting at position 2557 of SEQ ID NO: 1560243
acugauauacugugugaaa

SEQ ID NO: 1586392 - RNA, 19 nt, Artificial Sequence
  Description of Artificial Sequence: Synthetic oligonucleotide
  Antisense strand to SEQ ID NO: 1586391
uuucacacaguauaucagu

SEQ ID NO: 1586393 - RNA, 19 nt, Artificial Sequence
  Description of Artificial Sequence: Synthetic oligonucleotide
  Sense strand starting at position 2618 of SEQ ID NO: 1560243
gagaaagaaucguagacga

SEQ ID NO: 1586394 - RNA, 19 nt, Artificial Sequence
  Description of Artificial Sequence: Synthetic oligonucleotide
  Antisense strand to SEQ ID NO: 1586393
ucgucuacgauucuuucuc

SEQ ID NO: 1586395 - RNA, 19 nt, Artificial Sequence
  Description of Artificial Sequence: Synthetic oligonucleotide
  Sense strand starting at position 2622 of SEQ ID NO: 1560243
aagaaucguagacgaggaa

SEQ ID NO: 1586396 - RNA, 19 nt, Artificial Sequence
  Description of Artificial Sequence: Synthetic oligonucleotide
  Antisense strand to SEQ ID NO: 1586395
uuccucgucuacgauucuu

SEQ ID NO: 1586397 - RNA, 19 nt, Artificial Sequence
  Description of Artificial Sequence: Synthetic oligonucleotide
  Sense strand starting at position 2737 of SEQ ID NO: 1560243
gaguucucuguuggaaaug

SEQ ID NO: 1586398 - RNA, 19 nt, Artificial Sequence
  Description of Artificial Sequence: Synthetic oligonucleotide
  Antisense strand to SEQ ID NO: 1586397
cauuuccaacagagaacuc

SEQ ID NO: 1586399 - RNA, 19 nt, Artificial Sequence
  Description of Artificial Sequence: Synthetic oligonucleotide
  Sense strand starting at position 2932 of SEQ ID NO: 1560243
ggaguauguauugggcauu

SEQ ID NO: 1586400 - RNA, 19 nt, Artificial Sequence
  Description of Artificial Sequence: Synthetic oligonucleotide
  Antisense strand to SEQ ID NO: 1586399
aaugcccaauacauacucc

SEQ ID NO: 1586401 - RNA, 19 nt, Artificial Sequence
  Description of Artificial Sequence: Synthetic oligonucleotide
  Sense strand starting at position 2935 of SEQ ID NO: 1560243
guauguauugggcauuaac

SEQ ID NO: 1586402 - RNA, 19 nt, Artificial Sequence
  Description of Artificial Sequence: Synthetic oligonucleotide
  Antisense strand to SEQ ID NO: 1586401
guuaaugcccaauacauac

SEQ ID NO: 1586403 - RNA, 19 nt, Artificial Sequence
  Description of Artificial Sequence: Synthetic oligonucleotide
  Sense strand starting at position 2938 of SEQ ID NO: 1560243
uguauugggcauuaacuga

SEQ ID NO: 1586404 - RNA, 19 nt, Artificial Sequence
  Description of Artificial Sequence: Synthetic oligonucleotide
  Antisense strand to SEQ ID NO: 1586403
ucaguuaaugcccaauaca

SEQ ID NO: 1586405 - RNA, 19 nt, Artificial Sequence
  Description of Artificial Sequence: Synthetic oligonucleotide
  Sense strand starting at position 3007 of SEQ ID NO: 1560243
gggaaguuggucugguaga

SEQ ID NO: 1586406 - RNA, 19 nt, Artificial Sequence
  Description of Artificial Sequence: Synthetic oligonucleotide
  Antisense strand to SEQ ID NO: 1586405
ucuaccagaccaacuuccc

SEQ ID NO: 1586407 - RNA, 19 nt, Artificial Sequence
  Description of Artificial Sequence: Synthetic oligonucleotide
  Sense strand starting at position 3021 of SEQ ID NO: 1560243
guagaaauggacugugcau

SEQ ID NO: 1586408 - RNA, 19 nt, Artificial Sequence
  Description of Artificial Sequence: Synthetic oligonucleotide
  Antisense strand to SEQ ID NO: 1586407
augcacaguccauuucuac

SEQ ID NO: 1586409 - RNA, 19 nt, Artificial Sequence
  Description of Artificial Sequence: Synthetic oligonucleotide
  Sense strand starting at position 3833 of SEQ ID NO: 1560243
aaauauguacugugugcua

SEQ ID NO: 1586410 - RNA, 19 nt, Artificial Sequence
  Description of Artificial Sequence: Synthetic oligonucleotide
  Antisense strand to SEQ ID NO: 1586409
uagcacacaguacauauuu

SEQ ID NO: 1586411 - RNA, 19 nt, Artificial Sequence
  Description of Artificial Sequence: Synthetic oligonucleotide
  Sense strand starting at position 3835 of SEQ ID NO: 1560243
auauguacugugugcuaga

SEQ ID NO: 1586412 - RNA, 19 nt, Artificial Sequence
  Description of Artificial Sequence: Synthetic oligonucleotide
  Antisense strand to SEQ ID NO: 1586411
ucuagcacacaguacauau

SEQ ID NO: 1586413 - RNA, 19 nt, Artificial Sequence
  Description of Artificial Sequence: Synthetic oligonucleotide
  Sense strand starting at position 3845 of SEQ ID NO: 1560243
ugugcuagacauuguucuu

SEQ ID NO: 1586414 - RNA, 19 nt, Artificial Sequence
  Description of Artificial Sequence: Synthetic oligonucleotide
  Antisense strand to SEQ ID NO: 1586413
aagaacaaugucuagcaca

SEQ ID NO: 1586415 - RNA, 19 nt, Artificial Sequence
  Description of Artificial Sequence: Synthetic oligonucleotide
  Sense strand starting at position 3880 of SEQ ID NO: 1560243
cagugaugugcaggcuaaa

SEQ ID NO: 1586416 - RNA, 19 nt, Artificial Sequence
  Description of Artificial Sequence: Synthetic oligonucleotide
  Antisense strand to SEQ ID NO: 1586415
uuuagccugcacaucacug

SEQ ID NO: 1586417 - RNA, 19 nt, Artificial Sequence
  Description of Artificial Sequence: Synthetic oligonucleotide
  Sense strand starting at position 3905 of SEQ ID NO: 1560243
ccgucuaggugcuuaauau

SEQ ID NO: 1586418 - RNA, 19 nt, Artificial Sequence
  Description of Artificial Sequence: Synthetic oligonucleotide
  Antisense strand to SEQ ID NO: 1586417
auauuaagcaccuagacgg

SEQ ID NO: 1586419 - RNA, 19 nt, Artificial Sequence
  Description of Artificial Sequence: Synthetic oligonucleotide
  Sense strand starting at position 3906 of SEQ ID NO: 1560243
cgucuaggugcuuaauaug

SEQ ID NO: 1586420 - RNA, 19 nt, Artificial Sequence
  Description of Artificial Sequence: Synthetic oligonucleotide
  Antisense strand to SEQ ID NO: 1586419
cauauuaagcaccuagacg

SEQ ID NO: 1586421 - RNA, 19 nt, Artificial Sequence
  Description of Artificial Sequence: Synthetic oligonucleotide
  Sense strand starting at position 3911 of SEQ ID NO: 1560243
aggugcuuaauaugagcaa

SEQ ID NO: 1586422 - RNA, 19 nt, Artificial Sequence
  Description of Artificial Sequence: Synthetic oligonucleotide
  Antisense strand to SEQ ID NO: 1586421
uugcucauauuaagcaccu

SEQ ID NO: 1586423 - RNA, 19 nt, Artificial Sequence
  Description of Artificial Sequence: Synthetic oligonucleotide
  Sense strand starting at position 3914 of SEQ ID NO: 1560243
ugcuuaauaugagcaacuu

SEQ ID NO: 1586424 - RNA, 19 nt, Artificial Sequence
  Description of Artificial Sequence: Synthetic oligonucleotide
  Antisense strand to SEQ ID NO: 1586423
aaguugcucauauuaagca

SEQ ID NO: 1586425 - RNA, 19 nt, Artificial Sequence
  Description of Artificial Sequence: Synthetic oligonucleotide
  Sense strand starting at position 3915 of SEQ ID NO: 1560243
gcuuaauaugagcaacuuu

SEQ ID NO: 1586426 - RNA, 19 nt, Artificial Sequence
  Description of Artificial Sequence: Synthetic oligonucleotide
  Antisense strand to SEQ ID NO: 1586425
aaaguugcucauauuaagc

SEQ ID NO: 1586427 - RNA, 19 nt, Artificial Sequence
  Description of Artificial Sequence: Synthetic oligonucleotide
  Sense strand starting at position 92 of SEQ ID NO: 1560244
gggacaaguuggcuagguu

SEQ ID NO: 1586428 - RNA, 19 nt, Artificial Sequence
  Description of Artificial Sequence: Synthetic oligonucleotide
  Antisense strand to SEQ ID NO: 1586427
aaccuagccaacuuguccc

SEQ ID NO: 1586429 - RNA, 19 nt, Artificial Sequence
  Description of Artificial Sequence: Synthetic oligonucleotide
  Sense strand starting at position 93 of SEQ ID NO: 1560244
ggacaaguuggcuagguuu

SEQ ID NO: 1586430 - RNA, 19 nt, Artificial Sequence
  Description of Artificial Sequence: Synthetic oligonucleotide
  Antisense strand to SEQ ID NO: 1586429
aaaccuagccaacuugucc

SEQ ID NO: 1586431 - RNA, 19 nt, Artificial Sequence
  Description of Artificial Sequence: Synthetic oligonucleotide
  Sense strand starting at position 95 of SEQ ID NO: 1560244
acaaguuggcuagguuuga

SEQ ID NO: 1586432 - RNA, 19 nt, Artificial Sequence
  Description of Artificial Sequence: Synthetic oligonucleotide
  Antisense strand to SEQ ID NO: 1586431
ucaaaccuagccaacuugu

SEQ ID NO: 1586433 - RNA, 19 nt, Artificial Sequence
  Description of Artificial Sequence: Synthetic oligonucleotide
  Sense strand starting at position 96 of SEQ ID NO: 1560244
caaguuggcuagguuugaa

SEQ ID NO: 1586434 - RNA, 19 nt, Artificial Sequence
  Description of Artificial Sequence: Synthetic oligonucleotide
  Antisense strand to SEQ ID NO: 1586433
uucaaaccuagccaacuug

SEQ ID NO: 1586435 - RNA, 19 nt, Artificial Sequence
  Description of Artificial Sequence: Synthetic oligonucleotide
  Sense strand starting at position 133 of SEQ ID NO: 1560244
ccagcuacguucucugcaa

SEQ ID NO: 1586436 - RNA, 19 nt, Artificial Sequence
  Description of Artificial Sequence: Synthetic oligonucleotide
  Antisense strand to SEQ ID NO: 1586435
uugcagagaacguagcugg

SEQ ID NO: 1586437 - RNA, 19 nt, Artificial Sequence
  Description of Artificial Sequence: Synthetic oligonucleotide
  Sense strand starting at position 216 of SEQ ID NO: 1560244
cacacuggccucugaugau

SEQ ID NO: 1586438 - RNA, 19 nt, Artificial Sequence
  Description of Artificial Sequence: Synthetic oligonucleotide
  Antisense strand to SEQ ID NO: 1586437
aucaucagaggccagugug

SEQ ID NO: 1586439 - RNA, 19 nt, Artificial Sequence
  Description of Artificial Sequence: Synthetic oligonucleotide
  Sense strand starting at position 406 of SEQ ID NO: 1560244
guucucuuauuaucugauu

SEQ ID NO: 1586440 - RNA, 19 nt, Artificial Sequence
  Description of Artificial Sequence: Synthetic oligonucleotide
  Antisense strand to SEQ ID NO: 1586439
aaucagauaauaagagaac

SEQ ID NO: 1586441 - RNA, 19 nt, Artificial Sequence
  Description of Artificial Sequence: Synthetic oligonucleotide
  Sense strand starting at position 497 of SEQ ID NO: 1560244
agcaaacaggauuguuauu

SEQ ID NO: 1586442 - RNA, 19 nt, Artificial Sequence
  Description of Artificial Sequence: Synthetic oligonucleotide
  Antisense strand to SEQ ID NO: 1586441
aauaacaauccuguuugcu

SEQ ID NO: 1586443 - RNA, 19 nt, Artificial Sequence
  Description of Artificial Sequence: Synthetic oligonucleotide
  Sense strand starting at position 508 of SEQ ID NO: 1560244
uuguuauuauacgugcaaa

SEQ ID NO: 1586444 - RNA, 19 nt, Artificial Sequence
  Description of Artificial Sequence: Synthetic oligonucleotide
  Antisense strand to SEQ ID NO: 1586443
uuugcacguauaauaacaa

SEQ ID NO: 1586445 - RNA, 19 nt, Artificial Sequence
  Description of Artificial Sequence: Synthetic oligonucleotide
  Sense strand starting at position 511 of SEQ ID NO: 1560244
uuauuauacgugcaaacug

SEQ ID NO: 1586446 - RNA, 19 nt, Artificial Sequence
  Description of Artificial Sequence: Synthetic oligonucleotide
  Antisense strand to SEQ ID NO: 1586445
caguuugcacguauaauaa

SEQ ID NO: 1586447 - RNA, 19 nt, Artificial Sequence
  Description of Artificial Sequence: Synthetic oligonucleotide
  Sense strand starting at position 519 of SEQ ID NO: 1560244
cgugcaaacugcuuaacuu

SEQ ID NO: 1586448 - RNA, 19 nt, Artificial Sequence
  Description of Artificial Sequence: Synthetic oligonucleotide
  Antisense strand to SEQ ID NO: 1586447
aaguuaagcaguuugcacg

SEQ ID NO: 1586449 - RNA, 19 nt, Artificial Sequence
  Description of Artificial Sequence: Synthetic oligonucleotide
  Sense strand starting at position 520 of SEQ ID NO: 1560244
gugcaaacugcuuaacuuc

SEQ ID NO: 1586450 - RNA, 19 nt, Artificial Sequence
  Description of Artificial Sequence: Synthetic oligonucleotide
  Antisense strand to SEQ ID NO: 1586449
gaaguuaagcaguuugcac

SEQ ID NO: 1586451 - RNA, 19 nt, Artificial Sequence
  Description of Artificial Sequence: Synthetic oligonucleotide
  Sense strand starting at position 578 of SEQ ID NO: 1560244
acaggacuuccuugugaga

SEQ ID NO: 1586452 - RNA, 19 nt, Artificial Sequence
  Description of Artificial Sequence: Synthetic oligonucleotide
  Antisense strand to SEQ ID NO: 1586451
ucucacaaggaaguccugu

SEQ ID NO: 1586453 - RNA, 19 nt, Artificial Sequence
  Description of Artificial Sequence: Synthetic oligonucleotide
  Sense strand starting at position 591 of SEQ ID NO: 1560244
gugagauuacugggagacu

SEQ ID NO: 1586454 - RNA, 19 nt, Artificial Sequence
  Description of Artificial Sequence: Synthetic oligonucleotide
  Antisense strand to SEQ ID NO: 1586453
agucucccaguaaucucac

SEQ ID NO: 1586455 - RNA, 19 nt, Artificial Sequence
  Description of Artificial Sequence: Synthetic oligonucleotide
  Sense strand starting at position 592 of SEQ ID NO: 1560244
ugagauuacugggagacua

SEQ ID NO: 1586456 - RNA, 19 nt, Artificial Sequence
  Description of Artificial Sequence: Synthetic oligonucleotide
  Antisense strand to SEQ ID NO: 1586455
uagucucccaguaaucuca

SEQ ID NO: 1586457 - RNA, 19 nt, Artificial Sequence
  Description of Artificial Sequence: Synthetic oligonucleotide
  Sense strand starting at position 693 of SEQ ID NO: 1560244
cacugauguggccaaauuc

SEQ ID NO: 1586458 - RNA, 19 nt, Artificial Sequence
  Description of Artificial Sequence: Synthetic oligonucleotide
  Antisense strand to SEQ ID NO: 1586457
gaauuuggccacaucagug

SEQ ID NO: 1586459 - RNA, 19 nt, Artificial Sequence
  Description of Artificial Sequence: Synthetic oligonucleotide
  Sense strand starting at position 731 of SEQ ID NO: 1560244
cucuuauguugcucauuga

SEQ ID NO: 1586460 - RNA, 19 nt, Artificial Sequence
  Description of Artificial Sequence: Synthetic oligonucleotide
  Antisense strand to SEQ ID NO: 1586459
ucaaugagcaacauaagag

SEQ ID NO: 1586461 - RNA, 19 nt, Artificial Sequence
  Description of Artificial Sequence: Synthetic oligonucleotide
  Sense strand starting at position 732 of SEQ ID NO: 1560244
ucuuauguugcucauugau

SEQ ID NO: 1586462 - RNA, 19 nt, Artificial Sequence
  Description of Artificial Sequence: Synthetic oligonucleotide
  Antisense strand to SEQ ID NO: 1586461
aucaaugagcaacauaaga

SEQ ID NO: 1586463 - RNA, 19 nt, Artificial Sequence
  Description of Artificial Sequence: Synthetic oligonucleotide
  Sense strand starting at position 734 of SEQ ID NO: 1560244
uuauguugcucauugauau

SEQ ID NO: 1586464 - RNA, 19 nt, Artificial Sequence
  Description of Artificial Sequence: Synthetic oligonucleotide
  Antisense strand to SEQ ID NO: 1586463
auaucaaugagcaacauaa

SEQ ID NO: 1586465 - RNA, 19 nt, Artificial Sequence
  Description of Artificial Sequence: Synthetic oligonucleotide
  Sense strand starting at position 746 of SEQ ID NO: 1560244
uugauauugugggaagaga

SEQ ID NO: 1586466 - RNA, 19 nt, Artificial Sequence
  Description of Artificial Sequence: Synthetic oligonucleotide
  Antisense strand to SEQ ID NO: 1586465
ucucuucccacaauaucaa

SEQ ID NO: 1586467 - RNA, 19 nt, Artificial Sequence
  Description of Artificial Sequence: Synthetic oligonucleotide
  Sense strand starting at position 780 of SEQ ID NO: 1560244
acauaagcugccugauaug

SEQ ID NO: 1586468 - RNA, 19 nt, Artificial Sequence
  Description of Artificial Sequence: Synthetic oligonucleotide
  Antisense strand to SEQ ID NO: 1586467
cauaucaggcagcuuaugu

SEQ ID NO: 1586469 - RNA, 19 nt, Artificial Sequence
  Description of Artificial Sequence: Synthetic oligonucleotide
  Sense strand starting at position 1142 of SEQ ID NO: 1560244
gacagcaucccguaguagu

SEQ ID NO: 1586470 - RNA, 19 nt, Artificial Sequence
  Description of Artificial Sequence: Synthetic oligonucleotide
  Antisense strand to SEQ ID NO: 1586469
acuacuacgggaugcuguc

SEQ ID NO: 1586471 - RNA, 19 nt, Artificial Sequence
  Description of Artificial Sequence: Synthetic oligonucleotide
  Sense strand starting at position 1635 of SEQ ID NO: 1560244
cggcucuacgcaaguggua

SEQ ID NO: 1586472 - RNA, 19 nt, Artificial Sequence
  Description of Artificial Sequence: Synthetic oligonucleotide
  Antisense strand to SEQ ID NO: 1586471
uaccacuugcguagagccg

SEQ ID NO: 1586473 - RNA, 19 nt, Artificial Sequence
  Description of Artificial Sequence: Synthetic oligonucleotide
  Sense strand starting at position 1827 of SEQ ID NO: 1560244
ucuggauccucaccagauu

SEQ ID NO: 1586474 - RNA, 19 nt, Artificial Sequence
  Description of Artificial Sequence: Synthetic oligonucleotide
  Antisense strand to SEQ ID NO: 1586473
aaucuggugaggauccaga

SEQ ID NO: 1586475 - RNA, 19 nt, Artificial Sequence
  Description of Artificial Sequence: Synthetic oligonucleotide
  Sense strand starting at position 2050 of SEQ ID NO: 1560244
gaagcaucuugguucgcga

SEQ ID NO: 1586476 - RNA, 19 nt, Artificial Sequence
  Description of Artificial Sequence: Synthetic oligonucleotide
  Antisense strand to SEQ ID NO: 1586475
ucgcgaaccaagaugcuuc

SEQ ID NO: 1586477 - RNA, 19 nt, Artificial Sequence
  Description of Artificial Sequence: Synthetic oligonucleotide
  Sense strand starting at position 2312 of SEQ ID NO: 1560244
aguaaacucccaggccuua

SEQ ID NO: 1586478 - RNA, 19 nt, Artificial Sequence
  Description of Artificial Sequence: Synthetic oligonucleotide
  Antisense strand to SEQ ID NO: 1586477
uaaggccugggaguuuacu

SEQ ID NO: 1586479 - RNA, 19 nt, Artificial Sequence
  Description of Artificial Sequence: Synthetic oligonucleotide
  Sense strand starting at position 2344 of SEQ ID NO: 1560244
ugggcacuccuccauuaga

SEQ ID NO: 1586480 - RNA, 19 nt, Artificial Sequence
  Description of Artificial Sequence: Synthetic oligonucleotide
  Antisense strand to SEQ ID NO: 1586479
ucuaauggaggagugccca

SEQ ID NO: 1586481 - RNA, 19 nt, Artificial Sequence
  Description of Artificial Sequence: Synthetic oligonucleotide
  Sense strand starting at position 2347 of SEQ ID NO: 1560244
gcacuccuccauuagauug

SEQ ID NO: 1586482 - RNA, 19 nt, Artificial Sequence
  Description of Artificial Sequence: Synthetic oligonucleotide
  Antisense strand to SEQ ID NO: 1586481
caaucuaauggaggagugc

SEQ ID NO: 1586483 - RNA, 19 nt, Artificial Sequence
  Description of Artificial Sequence: Synthetic oligonucleotide
  Sense strand starting at position 2354 of SEQ ID NO: 1560244
uccauuagauugucccuca

SEQ ID NO: 1586484 - RNA, 19 nt, Artificial Sequence
  Description of Artificial Sequence: Synthetic oligonucleotide
  Antisense strand to SEQ ID NO: 1586483
ugagggacaaucuaaugga

SEQ ID NO: 1586485 - RNA, 19 nt, Artificial Sequence
  Description of Artificial Sequence: Synthetic oligonucleotide
  Sense strand starting at position 2357 of SEQ ID NO: 1560244
auuagauugucccucacuu

SEQ ID NO: 1586486 - RNA, 19 nt, Artificial Sequence
  Description of Artificial Sequence: Synthetic oligonucleotide
  Antisense strand to SEQ ID NO: 1586485
aagugagggacaaucuaau

SEQ ID NO: 1586487 - RNA, 19 nt, Artificial Sequence
  Description of Artificial Sequence: Synthetic oligonucleotide
  Sense strand starting at position 2409 of SEQ ID NO: 1560244
gcucucucgugaucccaaa

SEQ ID NO: 1586488 - RNA, 19 nt, Artificial Sequence
  Description of Artificial Sequence: Synthetic oligonucleotide
  Antisense strand to SEQ ID NO: 1586487
uuugggaucacgagagagc

SEQ ID NO: 1586489 - RNA, 19 nt, Artificial Sequence
  Description of Artificial Sequence: Synthetic oligonucleotide
  Sense strand starting at position 2416 of SEQ ID NO: 1560244
cgugaucccaaauggaaau

SEQ ID NO: 1586490 - RNA, 19 nt, Artificial Sequence
  Description of Artificial Sequence: Synthetic oligonucleotide
  Antisense strand to SEQ ID NO: 1586489
auuuccauuugggaucacg

SEQ ID NO: 1586491 - RNA, 19 nt, Artificial Sequence
  Description of Artificial Sequence: Synthetic oligonucleotide
  Sense strand starting at position 2707 of SEQ ID NO: 1560244
gggucugucagggagucua

SEQ ID NO: 1586492 - RNA, 19 nt, Artificial Sequence
  Description of Artificial Sequence: Synthetic oligonucleotide
  Antisense strand to SEQ ID NO: 1586491
uagacucccugacagaccc

SEQ ID NO: 1586493 - RNA, 19 nt, Artificial Sequence
  Description of Artificial Sequence: Synthetic oligonucleotide
  Sense strand starting at position 2719 of SEQ ID NO: 1560244
gagucuaggcuguggugua

SEQ ID NO: 1586494 - RNA, 19 nt, Artificial Sequence
  Description of Artificial Sequence: Synthetic oligonucleotide
  Antisense strand to SEQ ID NO: 1586493
uacaccacagccuagacuc

SEQ ID NO: 1586495 - RNA, 19 nt, Artificial Sequence
  Description of Artificial Sequence: Synthetic oligonucleotide
  Sense strand starting at position 2813 of SEQ ID NO: 1560244
cugcauguacuugagacaa

SEQ ID NO: 1586496 - RNA, 19 nt, Artificial Sequence
  Description of Artificial Sequence: Synthetic oligonucleotide
  Antisense strand to SEQ ID NO: 1586495
uugucucaaguacaugcag

SEQ ID NO: 1586497 - RNA, 19 nt, Artificial Sequence
  Description of Artificial Sequence: Synthetic oligonucleotide
  Sense strand starting at position 3905 of SEQ ID NO: 1560244
aagcauaguccugggcuaa

SEQ ID NO: 1586498 - RNA, 19 nt, Artificial Sequence
  Description of Artificial Sequence: Synthetic oligonucleotide
  Antisense strand to SEQ ID NO: 1586497
uuagcccaggacuaugcuu

SEQ ID NO: 1586499 - RNA, 19 nt, Artificial Sequence
  Description of Artificial Sequence: Synthetic oligonucleotide
  Sense strand starting at position 3906 of SEQ ID NO: 1560244
agcauaguccugggcuaaa

SEQ ID NO: 1586500 - RNA, 19 nt, Artificial Sequence
  Description of Artificial Sequence: Synthetic oligonucleotide
  Antisense strand to SEQ ID NO: 1586499
uuuagcccaggacuaugcu

SEQ ID NO: 1586501 - RNA, 19 nt, Artificial Sequence
  Description of Artificial Sequence: Synthetic oligonucleotide
  Sense strand starting at position 3937 of SEQ ID NO: 1560244
ccugguaagugacuaucau

SEQ ID NO: 1586502 - RNA, 19 nt, Artificial Sequence
  Description of Artificial Sequence: Synthetic oligonucleotide
  Antisense strand to SEQ ID NO: 1586501
augauagucacuuaccagg

SEQ ID NO: 1586503 - RNA, 19 nt, Artificial Sequence
  Description of Artificial Sequence: Synthetic oligonucleotide
  Sense strand starting at position 3938 of SEQ ID NO: 1560244
cugguaagugacuaucauu

SEQ ID NO: 1586504 - RNA, 19 nt, Artificial Sequence
  Description of Artificial Sequence: Synthetic oligonucleotide
  Antisense strand to SEQ ID NO: 1586503
aaugauagucacuuaccag

SEQ ID NO: 1586505 - RNA, 19 nt, Artificial Sequence
  Description of Artificial Sequence: Synthetic oligonucleotide
  Sense strand starting at position 3941 of SEQ ID NO: 1560244
guaagugacuaucauuaaa

SEQ ID NO: 1586506 - RNA, 19 nt, Artificial Sequence
  Description of Artificial Sequence: Synthetic oligonucleotide
  Antisense strand to SEQ ID NO: 1586505
uuuaaugauagucacuuac

SEQ ID NO: 1586507 - RNA, 19 nt, Artificial Sequence
  Description of Artificial Sequence: Synthetic oligonucleotide
  Sense strand starting at position 43 of SEQ ID NO: 1560245
cugaauaccuggucccuga

SEQ ID NO: 1586508 - RNA, 19 nt, Artificial Sequence
  Description of Artificial Sequence: Synthetic oligonucleotide
  Antisense strand to SEQ ID NO: 1586507
ucagggaccagguauucag

SEQ ID NO: 1586509 - RNA, 19 nt, Artificial Sequence
  Description of Artificial Sequence: Synthetic oligonucleotide
  Sense strand starting at position 240 of SEQ ID NO: 1560245
cccucugugggaugcagaa

SEQ ID NO: 1586510 - RNA, 19 nt, Artificial Sequence
  Description of Artificial Sequence: Synthetic oligonucleotide
  Antisense strand to SEQ ID NO: 1586509
uucugcaucccacagaggg

SEQ ID NO: 1586511 - RNA, 19 nt, Artificial Sequence
  Description of Artificial Sequence: Synthetic oligonucleotide
  Sense strand starting at position 263 of SEQ ID NO: 1560245
uccagagacuugcuucuau

SEQ ID NO: 1586512 - RNA, 19 nt, Artificial Sequence
  Description of Artificial Sequence: Synthetic oligonucleotide
  Antisense strand to SEQ ID NO: 1586511
auagaagcaagucucugga

SEQ ID NO: 1586513 - RNA, 19 nt, Artificial Sequence
  Description of Artificial Sequence: Synthetic oligonucleotide
  Sense strand starting at position 275 of SEQ ID NO: 1560245
cuucuaugcaugugugguu

SEQ ID NO: 1586514 - RNA, 19 nt, Artificial Sequence
  Description of Artificial Sequence: Synthetic oligonucleotide
  Antisense strand to SEQ ID NO: 1586513
aaccacacaugcauagaag

SEQ ID NO: 1586515 - RNA, 19 nt, Artificial Sequence
  Description of Artificial Sequence: Synthetic oligonucleotide
  Sense strand starting at position 288 of SEQ ID NO: 1560245
gugguugugucugccacuu

SEQ ID NO: 1586516 - RNA, 19 nt, Artificial Sequence
  Description of Artificial Sequence: Synthetic oligonucleotide
  Antisense strand to SEQ ID NO: 1586515
aaguggcagacacaaccac

SEQ ID NO: 1586517 - RNA, 19 nt, Artificial Sequence
  Description of Artificial Sequence: Synthetic oligonucleotide
  Sense strand starting at position 406 of SEQ ID NO: 1560245
gugugugcagcaguguuaa

SEQ ID NO: 1586518 - RNA, 19 nt, Artificial Sequence
  Description of Artificial Sequence: Synthetic oligonucleotide
  Antisense strand to SEQ ID NO: 1586517
uuaacacugcugcacacac

SEQ ID NO: 1586519 - RNA, 19 nt, Artificial Sequence
  Description of Artificial Sequence: Synthetic oligonucleotide
  Sense strand starting at position 408 of SEQ ID NO: 1560245
gugugcagcaguguuaauu

SEQ ID NO: 1586520 - RNA, 19 nt, Artificial Sequence
  Description of Artificial Sequence: Synthetic oligonucleotide
  Antisense strand to SEQ ID NO: 1586519
aauuaacacugcugcacac

SEQ ID NO: 1586521 - RNA, 19 nt, Artificial Sequence
  Description of Artificial Sequence: Synthetic oligonucleotide
  Sense strand starting at position 469 of SEQ ID NO: 1560245
guguguggcuguguaugau

SEQ ID NO: 1586522 - RNA, 19 nt, Artificial Sequence
  Description of Artificial Sequence: Synthetic oligonucleotide
  Antisense strand to SEQ ID NO: 1586521
aucauacacagccacacac

SEQ ID NO: 1586523 - RNA, 19 nt, Artificial Sequence
  Description of Artificial Sequence: Synthetic oligonucleotide
  Sense strand starting at position 531 of SEQ ID NO: 1560245
gugugauccugucugcugu

SEQ ID NO: 1586524 - RNA, 19 nt, Artificial Sequence
  Description of Artificial Sequence: Synthetic oligonucleotide
  Antisense strand to SEQ ID NO: 1586523
acagcagacaggaucacac

SEQ ID NO: 1586525 - RNA, 19 nt, Artificial Sequence
  Description of Artificial Sequence: Synthetic oligonucleotide
  Sense strand starting at position 560 of SEQ ID NO: 1560245
agaugagacugucuccuau

SEQ ID NO: 1586526 - RNA, 19 nt, Artificial Sequence
  Description of Artificial Sequence: Synthetic oligonucleotide
  Antisense strand to SEQ ID NO: 1586525
auaggagacagucucaucu

SEQ ID NO: 1586527 - RNA, 19 nt, Artificial Sequence
  Description of Artificial Sequence: Synthetic oligonucleotide
  Sense strand starting at position 562 of SEQ ID NO: 1560245
augagacugucuccuauau

SEQ ID NO: 1586528 - RNA, 19 nt, Artificial Sequence
  Description of Artificial Sequence: Synthetic oligonucleotide
  Antisense strand to SEQ ID NO: 1586527
auauaggagacagucucau

SEQ ID NO: 1586529 - RNA, 19 nt, Artificial Sequence
  Description of Artificial Sequence: Synthetic oligonucleotide
  Sense strand starting at position 571 of SEQ ID NO: 1560245
ucuccuauaucuguggcau

SEQ ID NO: 1586530 - RNA, 19 nt, Artificial Sequence
  Description of Artificial Sequence: Synthetic oligonucleotide
  Antisense strand to SEQ ID NO: 1586529
augccacagauauaggaga

SEQ ID NO: 1586531 - RNA, 19 nt, Artificial Sequence
  Description of Artificial Sequence: Synthetic oligonucleotide
  Sense strand starting at position 572 of SEQ ID NO: 1560245
cuccuauaucuguggcaug

SEQ ID NO: 1586532 - RNA, 19 nt, Artificial Sequence
  Description of Artificial Sequence: Synthetic oligonucleotide
  Antisense strand to SEQ ID NO: 1586531
caugccacagauauaggag

SEQ ID NO: 1586533 - RNA, 19 nt, Artificial Sequence
  Description of Artificial Sequence: Synthetic oligonucleotide
  Sense strand starting at position 575 of SEQ ID NO: 1560245
cuauaucuguggcaugaga

SEQ ID NO: 1586534 - RNA, 19 nt, Artificial Sequence
  Description of Artificial Sequence: Synthetic oligonucleotide
  Antisense strand to SEQ ID NO: 1586533
ucucaugccacagauauag

SEQ ID NO: 1586535 - RNA, 19 nt, Artificial Sequence
  Description of Artificial Sequence: Synthetic oligonucleotide
  Sense strand starting at position 577 of SEQ ID NO: 1560245
auaucuguggcaugagacu

SEQ ID NO: 1586536 - RNA, 19 nt, Artificial Sequence
  Description of Artificial Sequence: Synthetic oligonucleotide
  Antisense strand to SEQ ID NO: 1586535
agucucaugccacagauau

SEQ ID NO: 1586537 - RNA, 19 nt, Artificial Sequence
  Description of Artificial Sequence: Synthetic oligonucleotide
  Sense strand starting at position 623 of SEQ ID NO: 1560245
gucccaagcuaagugaauu

SEQ ID NO: 1586538 - RNA, 19 nt, Artificial Sequence
  Description of Artificial Sequence: Synthetic oligonucleotide
  Antisense strand to SEQ ID NO: 1586537
aauucacuuagcuugggac

SEQ ID NO: 1586539 - RNA, 19 nt, Artificial Sequence
  Description of Artificial Sequence: Synthetic oligonucleotide
  Sense strand starting at position 1112 of SEQ ID NO: 1560245
cuuguauagaugugagugu

SEQ ID NO: 1586540 - RNA, 19 nt, Artificial Sequence
  Description of Artificial Sequence: Synthetic oligonucleotide
  Antisense strand to SEQ ID NO: 1586539
acacucacaucuauacaag

SEQ ID NO: 1586541 - RNA, 19 nt, Artificial Sequence
  Description of Artificial Sequence: Synthetic oligonucleotide
  Sense strand starting at position 1114 of SEQ ID NO: 1560245
uguauagaugugagugugu

SEQ ID NO: 1586542 - RNA, 19 nt, Artificial Sequence
  Description of Artificial Sequence: Synthetic oligonucleotide
  Antisense strand to SEQ ID NO: 1586541
acacacucacaucuauaca

SEQ ID NO: 1586543 - RNA, 19 nt, Artificial Sequence
  Description of Artificial Sequence: Synthetic oligonucleotide
  Sense strand starting at position 1141 of SEQ ID NO: 1560245
gcaagugaaugacaucuau

SEQ ID NO: 1586544 - RNA, 19 nt, Artificial Sequence
  Description of Artificial Sequence: Synthetic oligonucleotide
  Antisense strand to SEQ ID NO: 1586543
auagaugucauucacuugc

SEQ ID NO: 1586545 - RNA, 19 nt, Artificial Sequence
  Description of Artificial Sequence: Synthetic oligonucleotide
  Sense strand starting at position 1174 of SEQ ID NO: 1560245
cugugagugucacugggua

SEQ ID NO: 1586546 - RNA, 19 nt, Artificial Sequence
  Description of Artificial Sequence: Synthetic oligonucleotide
  Antisense strand to SEQ ID NO: 1586545
uacccagugacacucacag

SEQ ID NO: 1586547 - RNA, 19 nt, Artificial Sequence
  Description of Artificial Sequence: Synthetic oligonucleotide
  Sense strand starting at position 1176 of SEQ ID NO: 1560245
gugagugucacuggguaac

SEQ ID NO: 1586548 - RNA, 19 nt, Artificial Sequence
  Description of Artificial Sequence: Synthetic oligonucleotide
  Antisense strand to SEQ ID NO: 1586547
guuacccagugacacucac

SEQ ID NO: 1586549 - RNA, 19 nt, Artificial Sequence
  Description of Artificial Sequence: Synthetic oligonucleotide
  Sense strand starting at position 1263 of SEQ ID NO: 1560245
ucccacaugucucaucaga

SEQ ID NO: 1586550 - RNA, 19 nt, Artificial Sequence
  Description of Artificial Sequence: Synthetic oligonucleotide
  Antisense strand to SEQ ID NO: 1586549
ucugaugagacauguggga

SEQ ID NO: 1586551 - RNA, 19 nt, Artificial Sequence
  Description of Artificial Sequence: Synthetic oligonucleotide
  Sense strand starting at position 1265 of SEQ ID NO: 1560245
ccacaugucucaucagaga

SEQ ID NO: 1586552 - RNA, 19 nt, Artificial Sequence
  Description of Artificial Sequence: Synthetic oligonucleotide
  Antisense strand to SEQ ID NO: 1586551
ucucugaugagacaugugg

SEQ ID NO: 1586553 - RNA, 19 nt, Artificial Sequence
  Description of Artificial Sequence: Synthetic oligonucleotide
  Sense strand starting at position 1268 of SEQ ID NO: 1560245
caugucucaucagagaaag

SEQ ID NO: 1586554 - RNA, 19 nt, Artificial Sequence
  Description of Artificial Sequence: Synthetic oligonucleotide
  Antisense strand to SEQ ID NO: 1586553
cuuucucugaugagacaug

SEQ ID NO: 1586555 - RNA, 19 nt, Artificial Sequence
  Description of Artificial Sequence: Synthetic oligonucleotide
  Sense strand starting at position 1291 of SEQ ID NO: 1560245
gcaggauaccuagguacuu

SEQ ID NO: 1586556 - RNA, 19 nt, Artificial Sequence
  Description of Artificial Sequence: Synthetic oligonucleotide
  Antisense strand to SEQ ID NO: 1586555
aaguaccuagguauccugc

SEQ ID NO: 1586557 - RNA, 19 nt, Artificial Sequence
  Description of Artificial Sequence: Synthetic oligonucleotide
  Sense strand starting at position 1292 of SEQ ID NO: 1560245
caggauaccuagguacuua

SEQ ID NO: 1586558 - RNA, 19 nt, Artificial Sequence
  Description of Artificial Sequence: Synthetic oligonucleotide
  Antisense strand to SEQ ID NO: 1586557
uaaguaccuagguauccug

SEQ ID NO: 1586559 - RNA, 19 nt, Artificial Sequence
  Description of Artificial Sequence: Synthetic oligonucleotide
  Sense strand starting at position 1694 of SEQ ID NO: 1560245
uggccugucccagagugaa

SEQ ID NO: 1586560 - RNA, 19 nt, Artificial Sequence
  Description of Artificial Sequence: Synthetic oligonucleotide
  Antisense strand to SEQ ID NO: 1586559
uucacucugggacaggcca

SEQ ID NO: 1586561 - RNA, 19 nt, Artificial Sequence
  Description of Artificial Sequence: Synthetic oligonucleotide
  Sense strand starting at position 1729 of SEQ ID NO: 1560245
cauggaguaucugauucca

SEQ ID NO: 1586562 - RNA, 19 nt, Artificial Sequence
  Description of Artificial Sequence: Synthetic oligonucleotide
  Antisense strand to SEQ ID NO: 1586561
uggaaucagauacuccaug

SEQ ID NO: 1586563 - RNA, 19 nt, Artificial Sequence
  Description of Artificial Sequence: Synthetic oligonucleotide
  Sense strand starting at position 1827 of SEQ ID NO: 1560245
ccgggaaucuuguaccaga

SEQ ID NO: 1586564 - RNA, 19 nt, Artificial Sequence
  Description of Artificial Sequence: Synthetic oligonucleotide
  Antisense strand to SEQ ID NO: 1586563
ucugguacaagauucccgg

SEQ ID NO: 1586565 - RNA, 19 nt, Artificial Sequence
  Description of Artificial Sequence: Synthetic oligonucleotide
  Sense strand starting at position 1830 of SEQ ID NO: 1560245
ggaaucuuguaccagagaa

SEQ ID NO: 1586566 - RNA, 19 nt, Artificial Sequence
  Description of Artificial Sequence: Synthetic oligonucleotide
  Antisense strand to SEQ ID NO: 1586565
uucucugguacaagauucc

SEQ ID NO: 1586567 - RNA, 19 nt, Artificial Sequence
  Description of Artificial Sequence: Synthetic oligonucleotide
  Sense strand starting at position 2050 of SEQ ID NO: 1560245
aggcauccugccugcuaau

SEQ ID NO: 1586568 - RNA, 19 nt, Artificial Sequence
  Description of Artificial Sequence: Synthetic oligonucleotide
  Antisense strand to SEQ ID NO: 1586567
auuagcaggcaggaugccu

SEQ ID NO: 1586569 - RNA, 19 nt, Artificial Sequence
  Description of Artificial Sequence: Synthetic oligonucleotide
  Sense strand starting at position 2294 of SEQ ID NO: 1560245
gagggagccaccuguaaag

SEQ ID NO: 1586570 - RNA, 19 nt, Artificial Sequence
  Description of Artificial Sequence: Synthetic oligonucleotide
  Antisense strand to SEQ ID NO: 1586569
cuuuacagguggcucccuc

SEQ ID NO: 1586571 - RNA, 19 nt, Artificial Sequence
  Description of Artificial Sequence: Synthetic oligonucleotide
  Sense strand starting at position 2404 of SEQ ID NO: 1560245
ucaggaagucaucagcaca

SEQ ID NO: 1586572 - RNA, 19 nt, Artificial Sequence
  Description of Artificial Sequence: Synthetic oligonucleotide
  Antisense strand to SEQ ID NO: 1586571
ugugcugaugacuuccuga

SEQ ID NO: 1586573 - RNA, 19 nt, Artificial Sequence
  Description of Artificial Sequence: Synthetic oligonucleotide
  Sense strand starting at position 2474 of SEQ ID NO: 1560245
guccuacagcuggaucaua

SEQ ID NO: 1586574 - RNA, 19 nt, Artificial Sequence
  Description of Artificial Sequence: Synthetic oligonucleotide
  Antisense strand to SEQ ID NO: 1586573
uaugauccagcuguaggac

SEQ ID NO: 1586575 - RNA, 19 nt, Artificial Sequence
  Description of Artificial Sequence: Synthetic oligonucleotide
  Sense strand starting at position 2600 of SEQ ID NO: 1560245
gcgaaacccugugucuaua

SEQ ID NO: 1586576 - RNA, 19 nt, Artificial Sequence
  Description of Artificial Sequence: Synthetic oligonucleotide
  Antisense strand to SEQ ID NO: 1586575
uauagacacaggguuucgc

SEQ ID NO: 1586577 - RNA, 19 nt, Artificial Sequence
  Description of Artificial Sequence: Synthetic oligonucleotide
  Sense strand starting at position 2819 of SEQ ID NO: 1560245
cacccauugugcgcagaaa

SEQ ID NO: 1586578 - RNA, 19 nt, Artificial Sequence
  Description of Artificial Sequence: Synthetic oligonucleotide
  Antisense strand to SEQ ID NO: 1586577
uuucugcgcacaaugggug

SEQ ID NO: 1586579 - RNA, 19 nt, Artificial Sequence
  Description of Artificial Sequence: Synthetic oligonucleotide
  Sense strand starting at position 3111 of SEQ ID NO: 1560245
gcagaauuauuugaaccug

SEQ ID NO: 1586580 - RNA, 19 nt, Artificial Sequence
  Description of Artificial Sequence: Synthetic oligonucleotide
  Antisense strand to SEQ ID NO: 1586579
cagguucaaauaauucugc

SEQ ID NO: 1586581 - RNA, 19 nt, Artificial Sequence
  Description of Artificial Sequence: Synthetic oligonucleotide
  Sense strand starting at position 3650 of SEQ ID NO: 1560245
cgugcugcagacuaugaaa

SEQ ID NO: 1586582 - RNA, 19 nt, Artificial Sequence
  Description of Artificial Sequence: Synthetic oligonucleotide
  Antisense strand to SEQ ID NO: 1586581
uuucauagucugcagcacg

SEQ ID NO: 1586583 - RNA, 19 nt, Artificial Sequence
  Description of Artificial Sequence: Synthetic oligonucleotide
  Sense strand starting at position 3652 of SEQ ID NO: 1560245
ugcugcagacuaugaaaga

SEQ ID NO: 1586584 - RNA, 19 nt, Artificial Sequence
  Description of Artificial Sequence: Synthetic oligonucleotide
  Antisense strand to SEQ ID NO: 1586583
ucuuucauagucugcagca

SEQ ID NO: 1586585 - RNA, 19 nt, Artificial Sequence
  Description of Artificial Sequence: Synthetic oligonucleotide
  Sense strand starting at position 3682 of SEQ ID NO: 1560245
gaggcaguggcucaguaau

SEQ ID NO: 1586586 - RNA, 19 nt, Artificial Sequence
  Description of Artificial Sequence: Synthetic oligonucleotide
  Antisense strand to SEQ ID NO: 1586585
auuacugagccacugccuc

SEQ ID NO: 1586587 - RNA, 19 nt, Artificial Sequence
  Description of Artificial Sequence: Synthetic oligonucleotide
  Sense strand starting at position 373 of SEQ ID NO: 1560246
gaacgcuaaguguaguuua

SEQ ID NO: 1586588 - RNA, 19 nt, Artificial Sequence
  Description of Artificial Sequence: Synthetic oligonucleotide
  Antisense strand to SEQ ID NO: 1586587
uaaacuacacuuagcguuc

SEQ ID NO: 1586589 - RNA, 19 nt, Artificial Sequence
  Description of Artificial Sequence: Synthetic oligonucleotide
  Sense strand starting at position 376 of SEQ ID NO: 1560246
cgcuaaguguaguuuaaca

SEQ ID NO: 1586590 - RNA, 19 nt, Artificial Sequence
  Description of Artificial Sequence: Synthetic oligonucleotide
  Antisense strand to SEQ ID NO: 1586589
uguuaaacuacacuuagcg

SEQ ID NO: 1586591 - RNA, 19 nt, Artificial Sequence
  Description of Artificial Sequence: Synthetic oligonucleotide
  Sense strand starting at position 445 of SEQ ID NO: 1560246
agccaaaggucuuuaugga

SEQ ID NO: 1586592 - RNA, 19 nt, Artificial Sequence
  Description of Artificial Sequence: Synthetic oligonucleotide
  Antisense strand to SEQ ID NO: 1586591
uccauaaagaccuuuggcu

SEQ ID NO: 1586593 - RNA, 19 nt, Artificial Sequence
  Description of Artificial Sequence: Synthetic oligonucleotide
  Sense strand starting at position 446 of SEQ ID NO: 1560246
gccaaaggucuuuauggaa

SEQ ID NO: 1586594 - RNA, 19 nt, Artificial Sequence
  Description of Artificial Sequence: Synthetic oligonucleotide
  Antisense strand to SEQ ID NO: 1586593
uuccauaaagaccuuuggc

SEQ ID NO: 1586595 - RNA, 19 nt, Artificial Sequence
  Description of Artificial Sequence: Synthetic oligonucleotide
  Sense strand starting at position 692 of SEQ ID NO: 1560246
gcacaagaaucggauuuga

SEQ ID NO: 1586596 - RNA, 19 nt, Artificial Sequence
  Description of Artificial Sequence: Synthetic oligonucleotide
  Antisense strand to SEQ ID NO: 1586595
ucaaauccgauucuugugc

SEQ ID NO: 1586597 - RNA, 19 nt, Artificial Sequence
  Description of Artificial Sequence: Synthetic oligonucleotide
  Sense strand starting at position 1091 of SEQ ID NO: 1560246
guaacagagcaguaucacu

SEQ ID NO: 1586598 - RNA, 19 nt, Artificial Sequence
  Description of Artificial Sequence: Synthetic oligonucleotide
  Antisense strand to SEQ ID NO: 1586597
agugauacugcucuguuac

SEQ ID NO: 1586599 - RNA, 19 nt, Artificial Sequence
  Description of Artificial Sequence: Synthetic oligonucleotide
  Sense strand starting at position 1168 of SEQ ID NO: 1560246
augggaaugguccgcuuua

SEQ ID NO: 1586600 - RNA, 19 nt, Artificial Sequence
  Description of Artificial Sequence: Synthetic oligonucleotide
  Antisense strand to SEQ ID NO: 1586599
uaaagcggaccauucccau

SEQ ID NO: 1586601 - RNA, 19 nt, Artificial Sequence
  Description of Artificial Sequence: Synthetic oligonucleotide
  Sense strand starting at position 1169 of SEQ ID NO: 1560246
ugggaaugguccgcuuuac

SEQ ID NO: 1586602 - RNA, 19 nt, Artificial Sequence
  Description of Artificial Sequence: Synthetic oligonucleotide
  Antisense strand to SEQ ID NO: 1586601
guaaagcggaccauuccca

SEQ ID NO: 1586603 - RNA, 19 nt, Artificial Sequence
  Description of Artificial Sequence: Synthetic oligonucleotide
  Sense strand starting at position 1178 of SEQ ID NO: 1560246
uccgcuuuacacugagaca

SEQ ID NO: 1586604 - RNA, 19 nt, Artificial Sequence
  Description of Artificial Sequence: Synthetic oligonucleotide
  Antisense strand to SEQ ID NO: 1586603
ugucucaguguaaagcgga

SEQ ID NO: 1586605 - RNA, 19 nt, Artificial Sequence
  Description of Artificial Sequence: Synthetic oligonucleotide
  Sense strand starting at position 1313 of SEQ ID NO: 1560246
gauguaaggucuuccuuuc

SEQ ID NO: 1586606 - RNA, 19 nt, Artificial Sequence
  Description of Artificial Sequence: Synthetic oligonucleotide
  Antisense strand to SEQ ID NO: 1586605
gaaaggaagaccuuacauc

SEQ ID NO: 1586607 - RNA, 19 nt, Artificial Sequence
  Description of Artificial Sequence: Synthetic oligonucleotide
  Sense strand starting at position 1410 of SEQ ID NO: 1560246
gcggcuuuccgcagugcaa

SEQ ID NO: 1586608 - RNA, 19 nt, Artificial Sequence
  Description of Artificial Sequence: Synthetic oligonucleotide
  Antisense strand to SEQ ID NO: 1586607
uugcacugcggaaagccgc

SEQ ID NO: 1586609 - RNA, 19 nt, Artificial Sequence
  Description of Artificial Sequence: Synthetic oligonucleotide
  Sense strand starting at position 1411 of SEQ ID NO: 1560246
cggcuuuccgcagugcaau

SEQ ID NO: 1586610 - RNA, 19 nt, Artificial Sequence
  Description of Artificial Sequence: Synthetic oligonucleotide
  Antisense strand to SEQ ID NO: 1586609
auugcacugcggaaagccg

SEQ ID NO: 1586611 - RNA, 19 nt, Artificial Sequence
  Description of Artificial Sequence: Synthetic oligonucleotide
  Sense strand starting at position 2002 of SEQ ID NO: 1560246
gcgcgaauuaaguaccuga

SEQ ID NO: 1586612 - RNA, 19 nt, Artificial Sequence
  Description of Artificial Sequence: Synthetic oligonucleotide
  Antisense strand to SEQ ID NO: 1586611
ucagguacuuaauucgcgc

SEQ ID NO: 1586613 - RNA, 19 nt, Artificial Sequence
  Description of Artificial Sequence: Synthetic oligonucleotide
  Sense strand starting at position 2106 of SEQ ID NO: 1560246
gucauuuaguucuagcuuc

SEQ ID NO: 1586614 - RNA, 19 nt, Artificial Sequence
  Description of Artificial Sequence: Synthetic oligonucleotide
  Antisense strand to SEQ ID NO: 1586613
gaagcuagaacuaaaugac

SEQ ID NO: 1586615 - RNA, 19 nt, Artificial Sequence
  Description of Artificial Sequence: Synthetic oligonucleotide
  Sense strand starting at position 2143 of SEQ ID NO: 1560246
cguuuagcuccgccuuaca

SEQ ID NO: 1586616 - RNA, 19 nt, Artificial Sequence
  Description of Artificial Sequence: Synthetic oligonucleotide
  Antisense strand to SEQ ID NO: 1586615
uguaaggcggagcuaaacg

SEQ ID NO: 1586617 - RNA, 19 nt, Artificial Sequence
  Description of Artificial Sequence: Synthetic oligonucleotide
  Sense strand starting at position 2177 of SEQ ID NO: 1560246
ugacgucgcuucuacagau

SEQ ID NO: 1586618 - RNA, 19 nt, Artificial Sequence
  Description of Artificial Sequence: Synthetic oligonucleotide
  Antisense strand to SEQ ID NO: 1586617
aucuguagaagcgacguca

SEQ ID NO: 1586619 - RNA, 19 nt, Artificial Sequence
  Description of Artificial Sequence: Synthetic oligonucleotide
  Sense strand starting at position 2206 of SEQ ID NO: 1560246
ugacuuuaggcucgucgga

SEQ ID NO: 1586620 - RNA, 19 nt, Artificial Sequence
  Description of Artificial Sequence: Synthetic oligonucleotide
  Antisense strand to SEQ ID NO: 1586619
uccgacgagccuaaaguca

SEQ ID NO: 1586621 - RNA, 19 nt, Artificial Sequence
  Description of Artificial Sequence: Synthetic oligonucleotide
  Sense strand starting at position 2208 of SEQ ID NO: 1560246
acuuuaggcucgucggaua

SEQ ID NO: 1586622 - RNA, 19 nt, Artificial Sequence
  Description of Artificial Sequence: Synthetic oligonucleotide
  Antisense strand to SEQ ID NO: 1586621
uauccgacgagccuaaagu

SEQ ID NO: 1586623 - RNA, 19 nt, Artificial Sequence
  Description of Artificial Sequence: Synthetic oligonucleotide
  Sense strand starting at position 2254 of SEQ ID NO: 1560246
gagguuugcuuucuugcca

SEQ ID NO: 1586624 - RNA, 19 nt, Artificial Sequence
  Description of Artificial Sequence: Synthetic oligonucleotide
  Antisense strand to SEQ ID NO: 1586623
uggcaagaaagcaaaccuc

SEQ ID NO: 1586625 - RNA, 19 nt, Artificial Sequence
  Description of Artificial Sequence: Synthetic oligonucleotide
  Sense strand starting at position 2255 of SEQ ID NO: 1560246
agguuugcuuucuugccaa

SEQ ID NO: 1586626 - RNA, 19 nt, Artificial Sequence
  Description of Artificial Sequence: Synthetic oligonucleotide
  Antisense strand to SEQ ID NO: 1586625
uuggcaagaaagcaaaccu

SEQ ID NO: 1586627 - RNA, 19 nt, Artificial Sequence
  Description of Artificial Sequence: Synthetic oligonucleotide
  Sense strand starting at position 2281 of SEQ ID NO: 1560246
ccuugagaguuagauuuaa

SEQ ID NO: 1586628 - RNA, 19 nt, Artificial Sequence
  Description of Artificial Sequence: Synthetic oligonucleotide
  Antisense strand to SEQ ID NO: 1586627
uuaaaucuaacucucaagg

SEQ ID NO: 1586629 - RNA, 19 nt, Artificial Sequence
  Description of Artificial Sequence: Synthetic oligonucleotide
  Sense strand starting at position 2390 of SEQ ID NO: 1560246
agaggauuguaacagcaaa

SEQ ID NO: 1586630 - RNA, 19 nt, Artificial Sequence
  Description of Artificial Sequence: Synthetic oligonucleotide
  Antisense strand to SEQ ID NO: 1586629
uuugcuguuacaauccucu

SEQ ID NO: 1586631 - RNA, 19 nt, Artificial Sequence
  Description of Artificial Sequence: Synthetic oligonucleotide
  Sense strand starting at position 2550 of SEQ ID NO: 1560246
cuccaagaucccuggucau

SEQ ID NO: 1586632 - RNA, 19 nt, Artificial Sequence
  Description of Artificial Sequence: Synthetic oligonucleotide
  Antisense strand to SEQ ID NO: 1586631
augaccagggaucuuggag

SEQ ID NO: 1586633 - RNA, 19 nt, Artificial Sequence
  Description of Artificial Sequence: Synthetic oligonucleotide
  Sense strand starting at position 2593 of SEQ ID NO: 1560246
gguaaagaccugugaauug

SEQ ID NO: 1586634 - RNA, 19 nt, Artificial Sequence
  Description of Artificial Sequence: Synthetic oligonucleotide
  Antisense strand to SEQ ID NO: 1586633
caauucacaggucuuuacc

SEQ ID NO: 1586635 - RNA, 19 nt, Artificial Sequence
  Description of Artificial Sequence: Synthetic oligonucleotide
  Sense strand starting at position 2605 of SEQ ID NO: 1560246
ugaauuggcugcuuccaga

SEQ ID NO: 1586636 - RNA, 19 nt, Artificial Sequence
  Description of Artificial Sequence: Synthetic oligonucleotide
  Antisense strand to SEQ ID NO: 1586635
ucuggaagcagccaauuca

SEQ ID NO: 1586637 - RNA, 19 nt, Artificial Sequence
  Description of Artificial Sequence: Synthetic oligonucleotide
  Sense strand starting at position 2645 of SEQ ID NO: 1560246
gcugcuuugcuuguuagga

SEQ ID NO: 1586638 - RNA, 19 nt, Artificial Sequence
  Description of Artificial Sequence: Synthetic oligonucleotide
  Antisense strand to SEQ ID NO: 1586637
uccuaacaagcaaagcagc

SEQ ID NO: 1586639 - RNA, 19 nt, Artificial Sequence
  Description of Artificial Sequence: Synthetic oligonucleotide
  Sense strand starting at position 2674 of SEQ ID NO: 1560246
cuggccgacugguuucaaa

SEQ ID NO: 1586640 - RNA, 19 nt, Artificial Sequence
  Description of Artificial Sequence: Synthetic oligonucleotide
  Antisense strand to SEQ ID NO: 1586639
uuugaaaccagucggccag

SEQ ID NO: 1586641 - RNA, 19 nt, Artificial Sequence
  Description of Artificial Sequence: Synthetic oligonucleotide
  Sense strand starting at position 2820 of SEQ ID NO: 1560246
cauugagcucuauggucua

SEQ ID NO: 1586642 - RNA, 19 nt, Artificial Sequence
  Description of Artificial Sequence: Synthetic oligonucleotide
  Antisense strand to SEQ ID NO: 1586641
uagaccauagagcucaaug

SEQ ID NO: 1586643 - RNA, 19 nt, Artificial Sequence
  Description of Artificial Sequence: Synthetic oligonucleotide
  Sense strand starting at position 2823 of SEQ ID NO: 1560246
ugagcucuauggucuauua

SEQ ID NO: 1586644 - RNA, 19 nt, Artificial Sequence
  Description of Artificial Sequence: Synthetic oligonucleotide
  Antisense strand to SEQ ID NO: 1586643
uaauagaccauagagcuca

SEQ ID NO: 1586645 - RNA, 19 nt, Artificial Sequence
  Description of Artificial Sequence: Synthetic oligonucleotide
  Sense strand starting at position 2946 of SEQ ID NO: 1560246
uccuuagcucaaggaauua

SEQ ID NO: 1586646 - RNA, 19 nt, Artificial Sequence
  Description of Artificial Sequence: Synthetic oligonucleotide
  Antisense strand to SEQ ID NO: 1586645
uaauuccuugagcuaagga

SEQ ID NO: 1586647 - RNA, 19 nt, Artificial Sequence
  Description of Artificial Sequence: Synthetic oligonucleotide
  Sense strand starting at position 2958 of SEQ ID NO: 1560246
ggaauuagcuccugccuua

SEQ ID NO: 1586648 - RNA, 19 nt, Artificial Sequence
  Description of Artificial Sequence: Synthetic oligonucleotide
  Antisense strand to SEQ ID NO: 1586647
uaaggcaggagcuaauucc

SEQ ID NO: 1586649 - RNA, 19 nt, Artificial Sequence
  Description of Artificial Sequence: Synthetic oligonucleotide
  Sense strand starting at position 3590 of SEQ ID NO: 1560246
gggugaucaugcaguggca

SEQ ID NO: 1586650 - RNA, 19 nt, Artificial Sequence
  Description of Artificial Sequence: Synthetic oligonucleotide
  Antisense strand to SEQ ID NO: 1586649
ugccacugcaugaucaccc

SEQ ID NO: 1586651 - RNA, 19 nt, Artificial Sequence
  Description of Artificial Sequence: Synthetic oligonucleotide
  Sense strand starting at position 3592 of SEQ ID NO: 1560246
gugaucaugcaguggcaua

SEQ ID NO: 1586652 - RNA, 19 nt, Artificial Sequence
  Description of Artificial Sequence: Synthetic oligonucleotide
  Antisense strand to SEQ ID NO: 1586651
uaugccacugcaugaucac

SEQ ID NO: 1586653 - RNA, 19 nt, Artificial Sequence
  Description of Artificial Sequence: Synthetic oligonucleotide
  Sense strand starting at position 105 of SEQ ID NO: 1560247
cacgccuaucuguguuuga

SEQ ID NO: 1586654 - RNA, 19 nt, Artificial Sequence
  Description of Artificial Sequence: Synthetic oligonucleotide
  Antisense strand to SEQ ID NO: 1586653
ucaaacacagauaggcgug

SEQ ID NO: 1586655 - RNA, 19 nt, Artificial Sequence
  Description of Artificial Sequence: Synthetic oligonucleotide
  Sense strand starting at position 107 of SEQ ID NO: 1560247
cgccuaucuguguuugagu

SEQ ID NO: 1586656 - RNA, 19 nt, Artificial Sequence
  Description of Artificial Sequence: Synthetic oligonucleotide
  Antisense strand to SEQ ID NO: 1586655
acucaaacacagauaggcg

SEQ ID NO: 1586657 - RNA, 19 nt, Artificial Sequence
  Description of Artificial Sequence: Synthetic oligonucleotide
  Sense strand starting at position 108 of SEQ ID NO: 1560247
gccuaucuguguuugaguc

SEQ ID NO: 1586658 - RNA, 19 nt, Artificial Sequence
  Description of Artificial Sequence: Synthetic oligonucleotide
  Antisense strand to SEQ ID NO: 1586657
gacucaaacacagauaggc

SEQ ID NO: 1586659 - RNA, 19 nt, Artificial Sequence
  Description of Artificial Sequence: Synthetic oligonucleotide
  Sense strand starting at position 116 of SEQ ID NO: 1560247
guguuugagucuccucauc

SEQ ID NO: 1586660 - RNA, 19 nt, Artificial Sequence
  Description of Artificial Sequence: Synthetic oligonucleotide
  Antisense strand to SEQ ID NO: 1586659
gaugaggagacucaaacac

SEQ ID NO: 1586661 - RNA, 19 nt, Artificial Sequence
  Description of Artificial Sequence: Synthetic oligonucleotide
  Sense strand starting at position 118 of SEQ ID NO: 1560247
guuugagucuccucaucua

SEQ ID NO: 1586662 - RNA, 19 nt, Artificial Sequence
  Description of Artificial Sequence: Synthetic oligonucleotide
  Antisense strand to SEQ ID NO: 1586661
uagaugaggagacucaaac

SEQ ID NO: 1586663 - RNA, 19 nt, Artificial Sequence
  Description of Artificial Sequence: Synthetic oligonucleotide
  Sense strand starting at position 121 of SEQ ID NO: 1560247
ugagucuccucaucuaaga

SEQ ID NO: 1586664 - RNA, 19 nt, Artificial Sequence
  Description of Artificial Sequence: Synthetic oligonucleotide
  Antisense strand to SEQ ID NO: 1586663
ucuuagaugaggagacuca

SEQ ID NO: 1586665 - RNA, 19 nt, Artificial Sequence
  Description of Artificial Sequence: Synthetic oligonucleotide
  Sense strand starting at position 129 of SEQ ID NO: 1560247
cucaucuaagagugaggau

SEQ ID NO: 1586666 - RNA, 19 nt, Artificial Sequence
  Description of Artificial Sequence: Synthetic oligonucleotide
  Antisense strand to SEQ ID NO: 1586665
auccucacucuuagaugag

SEQ ID NO: 1586667 - RNA, 19 nt, Artificial Sequence
  Description of Artificial Sequence: Synthetic oligonucleotide
  Sense strand starting at position 138 of SEQ ID NO: 1560247
gagugaggaugcugagaau

SEQ ID NO: 1586668 - RNA, 19 nt, Artificial Sequence
  Description of Artificial Sequence: Synthetic oligonucleotide
  Antisense strand to SEQ ID NO: 1586667
auucucagcauccucacuc

SEQ ID NO: 1586669 - RNA, 19 nt, Artificial Sequence
  Description of Artificial Sequence: Synthetic oligonucleotide
  Sense strand starting at position 141 of SEQ ID NO: 1560247
ugaggaugcugagaauaac

SEQ ID NO: 1586670 - RNA, 19 nt, Artificial Sequence
  Description of Artificial Sequence: Synthetic oligonucleotide
  Antisense strand to SEQ ID NO: 1586669
guuauucucagcauccuca

SEQ ID NO: 1586671 - RNA, 19 nt, Artificial Sequence
  Description of Artificial Sequence: Synthetic oligonucleotide
  Sense strand starting at position 207 of SEQ ID NO: 1560247
gccaaagucuggcuacuuu

SEQ ID NO: 1586672 - RNA, 19 nt, Artificial Sequence
  Description of Artificial Sequence: Synthetic oligonucleotide
  Antisense strand to SEQ ID NO: 1586671
aaaguagccagacuuuggc

SEQ ID NO: 1586673 - RNA, 19 nt, Artificial Sequence
  Description of Artificial Sequence: Synthetic oligonucleotide
  Sense strand starting at position 218 of SEQ ID NO: 1560247
gcuacuuugcucccgcuua

SEQ ID NO: 1586674 - RNA, 19 nt, Artificial Sequence
  Description of Artificial Sequence: Synthetic oligonucleotide
  Antisense strand to SEQ ID NO: 1586673
uaagcgggagcaaaguagc

SEQ ID NO: 1586675 - RNA, 19 nt, Artificial Sequence
  Description of Artificial Sequence: Synthetic oligonucleotide
  Sense strand starting at position 244 of SEQ ID NO: 1560247
accuucugggcccaguaau

SEQ ID NO: 1586676 - RNA, 19 nt, Artificial Sequence
  Description of Artificial Sequence: Synthetic oligonucleotide
  Antisense strand to SEQ ID NO: 1586675
auuacugggcccagaaggu

SEQ ID NO: 1586677 - RNA, 19 nt, Artificial Sequence
  Description of Artificial Sequence: Synthetic oligonucleotide
  Sense strand starting at position 299 of SEQ ID NO: 1560247
gggcgaucaucuuagaagg

SEQ ID NO: 1586678 - RNA, 19 nt, Artificial Sequence
  Description of Artificial Sequence: Synthetic oligonucleotide
  Antisense strand to SEQ ID NO: 1586677
ccuucuaagaugaucgccc

SEQ ID NO: 1586679 - RNA, 19 nt, Artificial Sequence
  Description of Artificial Sequence: Synthetic oligonucleotide
  Sense strand starting at position 310 of SEQ ID NO: 1560247
uuagaaggcguccacuuua

SEQ ID NO: 1586680 - RNA, 19 nt, Artificial Sequence
  Description of Artificial Sequence: Synthetic oligonucleotide
  Antisense strand to SEQ ID NO: 1586679
uaaaguggacgccuucuaa

SEQ ID NO: 1586681 - RNA, 19 nt, Artificial Sequence
  Description of Artificial Sequence: Synthetic oligonucleotide
  Sense strand starting at position 473 of SEQ ID NO: 1560247
caguaauucucauugggca

SEQ ID NO: 1586682 - RNA, 19 nt, Artificial Sequence
  Description of Artificial Sequence: Synthetic oligonucleotide
  Antisense strand to SEQ ID NO: 1586681
ugcccaaugagaauuacug

SEQ ID NO: 1586683 - RNA, 19 nt, Artificial Sequence
  Description of Artificial Sequence: Synthetic oligonucleotide
  Sense strand starting at position 499 of SEQ ID NO: 1560247
guuuccgauccugagaaca

SEQ ID NO: 1586684 - RNA, 19 nt, Artificial Sequence
  Description of Artificial Sequence: Synthetic oligonucleotide
  Antisense strand to SEQ ID NO: 1586683
uguucucaggaucggaaac

SEQ ID NO: 1586685 - RNA, 19 nt, Artificial Sequence
  Description of Artificial Sequence: Synthetic oligonucleotide
  Sense strand starting at position 628 of SEQ ID NO: 1560247
gcuaaacucgcccaaguau

SEQ ID NO: 1586686 - RNA, 19 nt, Artificial Sequence
  Description of Artificial Sequence: Synthetic oligonucleotide
  Antisense strand to SEQ ID NO: 1586685
auacuugggcgaguuuagc

SEQ ID NO: 1586687 - RNA, 19 nt, Artificial Sequence
  Description of Artificial Sequence: Synthetic oligonucleotide
  Sense strand starting at position 685 of SEQ ID NO: 1560247
gccagcuguggucaccaau

SEQ ID NO: 1586688 - RNA, 19 nt, Artificial Sequence
  Description of Artificial Sequence: Synthetic oligonucleotide
  Antisense strand to SEQ ID NO: 1586687
auuggugaccacagcuggc

SEQ ID NO: 1586689 - RNA, 19 nt, Artificial Sequence
  Description of Artificial Sequence: Synthetic oligonucleotide
  Sense strand starting at position 757 of SEQ ID NO: 1560247
cccucauucugggcagaac

SEQ ID NO: 1586690 - RNA, 19 nt, Artificial Sequence
  Description of Artificial Sequence: Synthetic oligonucleotide
  Antisense strand to SEQ ID NO: 1586689
guucugcccagaaugaggg

SEQ ID NO: 1586691 - RNA, 19 nt, Artificial Sequence
  Description of Artificial Sequence: Synthetic oligonucleotide
  Sense strand starting at position 758 of SEQ ID NO: 1560247
ccucauucugggcagaacu

SEQ ID NO: 1586692 - RNA, 19 nt, Artificial Sequence
  Description of Artificial Sequence: Synthetic oligonucleotide
  Antisense strand to SEQ ID NO: 1586691
aguucugcccagaaugagg

SEQ ID NO: 1586693 - RNA, 19 nt, Artificial Sequence
  Description of Artificial Sequence: Synthetic oligonucleotide
  Sense strand starting at position 795 of SEQ ID NO: 1560247
cagugacucuuaugaggga

SEQ ID NO: 1586694 - RNA, 19 nt, Artificial Sequence
  Description of Artificial Sequence: Synthetic oligonucleotide
  Antisense strand to SEQ ID NO: 1586693
ucccucauaagagucacug

SEQ ID NO: 1586695 - RNA, 19 nt, Artificial Sequence
  Description of Artificial Sequence: Synthetic oligonucleotide
  Sense strand starting at position 995 of SEQ ID NO: 1560247
acugaugagguuggaugua

SEQ ID NO: 1586696 - RNA, 19 nt, Artificial Sequence
  Description of Artificial Sequence: Synthetic oligonucleotide
  Antisense strand to SEQ ID NO: 1586695
uacauccaaccucaucagu

SEQ ID NO: 1586697 - RNA, 19 nt, Artificial Sequence
  Description of Artificial Sequence: Synthetic oligonucleotide
  Sense strand starting at position 1096 of SEQ ID NO: 1560247
guuccagcuucuucucgau

SEQ ID NO: 1586698 - RNA, 19 nt, Artificial Sequence
  Description of Artificial Sequence: Synthetic oligonucleotide
  Antisense strand to SEQ ID NO: 1586697
aucgagaagaagcuggaac

SEQ ID NO: 1586699 - RNA, 19 nt, Artificial Sequence
  Description of Artificial Sequence: Synthetic oligonucleotide
  Sense strand starting at position 1104 of SEQ ID NO: 1560247
uucuucucgaucugugagu

SEQ ID NO: 1586700 - RNA, 19 nt, Artificial Sequence
  Description of Artificial Sequence: Synthetic oligonucleotide
  Antisense strand to SEQ ID NO: 1586699
acucacagaucgagaagaa

SEQ ID NO: 1586701 - RNA, 19 nt, Artificial Sequence
  Description of Artificial Sequence: Synthetic oligonucleotide
  Sense strand starting at position 1105 of SEQ ID NO: 1560247
ucuucucgaucugugagua

SEQ ID NO: 1586702 - RNA, 19 nt, Artificial Sequence
  Description of Artificial Sequence: Synthetic oligonucleotide
  Antisense strand to SEQ ID NO: 1586701
uacucacagaucgagaaga

SEQ ID NO: 1586703 - RNA, 19 nt, Artificial Sequence
  Description of Artificial Sequence: Synthetic oligonucleotide
  Sense strand starting at position 1106 of SEQ ID NO: 1560247
cuucucgaucugugaguaa

SEQ ID NO: 1586704 - RNA, 19 nt, Artificial Sequence
  Description of Artificial Sequence: Synthetic oligonucleotide
  Antisense strand to SEQ ID NO: 1586703
uuacucacagaucgagaag

SEQ ID NO: 1586705 - RNA, 19 nt, Artificial Sequence
  Description of Artificial Sequence: Synthetic oligonucleotide
  Sense strand starting at position 2223 of SEQ ID NO: 1560247
ccaacuauugggcaacuca

SEQ ID NO: 1586706 - RNA, 19 nt, Artificial Sequence
  Description of Artificial Sequence: Synthetic oligonucleotide
  Antisense strand to SEQ ID NO: 1586705
ugaguugcccaauaguugg

SEQ ID NO: 1586707 - RNA, 19 nt, Artificial Sequence
  Description of Artificial Sequence: Synthetic oligonucleotide
  Sense strand starting at position 2350 of SEQ ID NO: 1560247
auggcauugacuugcugua

SEQ ID NO: 1586708 - RNA, 19 nt, Artificial Sequence
  Description of Artificial Sequence: Synthetic oligonucleotide
  Antisense strand to SEQ ID NO: 1586707
uacagcaagucaaugccau

SEQ ID NO: 1586709 - RNA, 19 nt, Artificial Sequence
  Description of Artificial Sequence: Synthetic oligonucleotide
  Sense strand starting at position 2352 of SEQ ID NO: 1560247
ggcauugacuugcuguaca

SEQ ID NO: 1586710 - RNA, 19 nt, Artificial Sequence
  Description of Artificial Sequence: Synthetic oligonucleotide
  Antisense strand to SEQ ID NO: 1586709
uguacagcaagucaaugcc

SEQ ID NO: 1586711 - RNA, 19 nt, Artificial Sequence
  Description of Artificial Sequence: Synthetic oligonucleotide
  Sense strand starting at position 2419 of SEQ ID NO: 1560247
agcagugcgcgguaauuca

SEQ ID NO: 1586712 - RNA, 19 nt, Artificial Sequence
  Description of Artificial Sequence: Synthetic oligonucleotide
  Antisense strand to SEQ ID NO: 1586711
ugaauuaccgcgcacugcu

SEQ ID NO: 1586713 - RNA, 19 nt, Artificial Sequence
  Description of Artificial Sequence: Synthetic oligonucleotide
  Sense strand starting at position 2608 of SEQ ID NO: 1560247
ggcccagaaacgcguuaaa

SEQ ID NO: 1586714 - RNA, 19 nt, Artificial Sequence
  Description of Artificial Sequence: Synthetic oligonucleotide
  Antisense strand to SEQ ID NO: 1586713
uuuaacgcguuucugggcc

SEQ ID NO: 1586715 - RNA, 19 nt, Artificial Sequence
  Description of Artificial Sequence: Synthetic oligonucleotide
  Sense strand starting at position 2668 of SEQ ID NO: 1560247
acgugcuuugggcgaaaga

SEQ ID NO: 1586716 - RNA, 19 nt, Artificial Sequence
  Description of Artificial Sequence: Synthetic oligonucleotide
  Antisense strand to SEQ ID NO: 1586715
ucuuucgcccaaagcacgu

SEQ ID NO: 1586717 - RNA, 19 nt, Artificial Sequence
  Description of Artificial Sequence: Synthetic oligonucleotide
  Sense strand starting at position 2686 of SEQ ID NO: 1560247
accggaaguugguuuauca

SEQ ID NO: 1586718 - RNA, 19 nt, Artificial Sequence
  Description of Artificial Sequence: Synthetic oligonucleotide
  Antisense strand to SEQ ID NO: 1586717
ugauaaaccaacuuccggu

SEQ ID NO: 1586719 - RNA, 19 nt, Artificial Sequence
  Description of Artificial Sequence: Synthetic oligonucleotide
  Sense strand starting at position 2695 of SEQ ID NO: 1560247
ugguuuaucacgugaccau

SEQ ID NO: 1586720 - RNA, 19 nt, Artificial Sequence
  Description of Artificial Sequence: Synthetic oligonucleotide
  Antisense strand to SEQ ID NO: 1586719
auggucacgugauaaacca

SEQ ID NO: 1586721 - RNA, 19 nt, Artificial Sequence
  Description of Artificial Sequence: Synthetic oligonucleotide
  Sense strand starting at position 2696 of SEQ ID NO: 1560247
gguuuaucacgugaccauu

SEQ ID NO: 1586722 - RNA, 19 nt, Artificial Sequence
  Description of Artificial Sequence: Synthetic oligonucleotide
  Antisense strand to SEQ ID NO: 1586721
aauggucacgugauaaacc

SEQ ID NO: 1586723 - RNA, 19 nt, Artificial Sequence
  Description of Artificial Sequence: Synthetic oligonucleotide
  Sense strand starting at position 2748 of SEQ ID NO: 1560247
ugugcguguguuccguaau

SEQ ID NO: 1586724 - RNA, 19 nt, Artificial Sequence
  Description of Artificial Sequence: Synthetic oligonucleotide
  Antisense strand to SEQ ID NO: 1586723
auuacggaacacacgcaca

SEQ ID NO: 1586725 - RNA, 19 nt, Artificial Sequence
  Description of Artificial Sequence: Synthetic oligonucleotide
  Sense strand starting at position 3172 of SEQ ID NO: 1560247
gugcaauugcccgaucuca

SEQ ID NO: 1586726 - RNA, 19 nt, Artificial Sequence
  Description of Artificial Sequence: Synthetic oligonucleotide
  Antisense strand to SEQ ID NO: 1586725
ugagaucgggcaauugcac

SEQ ID NO: 1586727 - RNA, 19 nt, Artificial Sequence
  Description of Artificial Sequence: Synthetic oligonucleotide
  Sense strand starting at position 3441 of SEQ ID NO: 1560247
cucgacuucccaugaauga

SEQ ID NO: 1586728 - RNA, 19 nt, Artificial Sequence
  Description of Artificial Sequence: Synthetic oligonucleotide
  Antisense strand to SEQ ID NO: 1586727
ucauucaugggaagucgag

SEQ ID NO: 1586729 - RNA, 19 nt, Artificial Sequence
  Description of Artificial Sequence: Synthetic oligonucleotide
  Sense strand starting at position 3908 of SEQ ID NO: 1560247
guuuguuugagcuagaguc

SEQ ID NO: 1586730 - RNA, 19 nt, Artificial Sequence
  Description of Artificial Sequence: Synthetic oligonucleotide
  Antisense strand to SEQ ID NO: 1586729
gacucuagcucaaacaaac

SEQ ID NO: 1586731 - RNA, 19 nt, Artificial Sequence
  Description of Artificial Sequence: Synthetic oligonucleotide
  Sense strand starting at position 3910 of SEQ ID NO: 1560247
uuguuugagcuagagucuu

SEQ ID NO: 1586732 - RNA, 19 nt, Artificial Sequence
  Description of Artificial Sequence: Synthetic oligonucleotide
  Antisense strand to SEQ ID NO: 1586731
aagacucuagcucaaacaa

SEQ ID NO: 1586733 - RNA, 19 nt, Artificial Sequence
  Description of Artificial Sequence: Synthetic oligonucleotide
  Sense strand starting at position 9 of SEQ ID NO: 1560248
gccagcuguggucaccaau

SEQ ID NO: 1586734 - RNA, 19 nt, Artificial Sequence
  Description of Artificial Sequence: Synthetic oligonucleotide
  Antisense strand to SEQ ID NO: 1586733
auuggugaccacagcuggc

SEQ ID NO: 1586735 - RNA, 19 nt, Artificial Sequence
  Description of Artificial Sequence: Synthetic oligonucleotide
  Sense strand starting at position 81 of SEQ ID NO: 1560248
cccucauucugggcagaac

SEQ ID NO: 1586736 - RNA, 19 nt, Artificial Sequence
  Description of Artificial Sequence: Synthetic oligonucleotide
  Antisense strand to SEQ ID NO: 1586735
guucugcccagaaugaggg

SEQ ID NO: 1586737 - RNA, 19 nt, Artificial Sequence
  Description of Artificial Sequence: Synthetic oligonucleotide
  Sense strand starting at position 82 of SEQ ID NO: 1560248
ccucauucugggcagaacu

SEQ ID NO: 1586738 - RNA, 19 nt, Artificial Sequence
  Description of Artificial Sequence: Synthetic oligonucleotide
  Antisense strand to SEQ ID NO: 1586737
aguucugcccagaaugagg

SEQ ID NO: 1586739 - RNA, 19 nt, Artificial Sequence
  Description of Artificial Sequence: Synthetic oligonucleotide
  Sense strand starting at position 119 of SEQ ID NO: 1560248
cagugacucuuaugaggga

SEQ ID NO: 1586740 - RNA, 19 nt, Artificial Sequence
  Description of Artificial Sequence: Synthetic oligonucleotide
  Antisense strand to SEQ ID NO: 1586739
ucccucauaagagucacug

SEQ ID NO: 1586741 - RNA, 19 nt, Artificial Sequence
  Description of Artificial Sequence: Synthetic oligonucleotide
  Sense strand starting at position 294 of SEQ ID NO: 1560248
agcgaauggucucacggau

SEQ ID NO: 1586742 - RNA, 19 nt, Artificial Sequence
  Description of Artificial Sequence: Synthetic oligonucleotide
  Antisense strand to SEQ ID NO: 1586741
auccgugagaccauucgcu

SEQ ID NO: 1586743 - RNA, 19 nt, Artificial Sequence
  Description of Artificial Sequence: Synthetic oligonucleotide
  Sense strand starting at position 319 of SEQ ID NO: 1560248
acugaugagguuggaugua

SEQ ID NO: 1586744 - RNA, 19 nt, Artificial Sequence
  Description of Artificial Sequence: Synthetic oligonucleotide
  Antisense strand to SEQ ID NO: 1586743
uacauccaaccucaucagu

SEQ ID NO: 1586745 - RNA, 19 nt, Artificial Sequence
  Description of Artificial Sequence: Synthetic oligonucleotide
  Sense strand starting at position 420 of SEQ ID NO: 1560248
guuccagcuucuucucgau

SEQ ID NO: 1586746 - RNA, 19 nt, Artificial Sequence
  Description of Artificial Sequence: Synthetic oligonucleotide
  Antisense strand to SEQ ID NO: 1586745
aucgagaagaagcuggaac

SEQ ID NO: 1586747 - RNA, 19 nt, Artificial Sequence
  Description of Artificial Sequence: Synthetic oligonucleotide
  Sense strand starting at position 428 of SEQ ID NO: 1560248
uucuucucgaucugugagu

SEQ ID NO: 1586748 - RNA, 19 nt, Artificial Sequence
  Description of Artificial Sequence: Synthetic oligonucleotide
  Antisense strand to SEQ ID NO: 1586747
acucacagaucgagaagaa

SEQ ID NO: 1586749 - RNA, 19 nt, Artificial Sequence
  Description of Artificial Sequence: Synthetic oligonucleotide
  Sense strand starting at position 429 of SEQ ID NO: 1560248
ucuucucgaucugugagua

SEQ ID NO: 1586750 - RNA, 19 nt, Artificial Sequence
  Description of Artificial Sequence: Synthetic oligonucleotide
  Antisense strand to SEQ ID NO: 1586749
uacucacagaucgagaaga

SEQ ID NO: 1586751 - RNA, 19 nt, Artificial Sequence
  Description of Artificial Sequence: Synthetic oligonucleotide
  Sense strand starting at position 430 of SEQ ID NO: 1560248
cuucucgaucugugaguaa

SEQ ID NO: 1586752 - RNA, 19 nt, Artificial Sequence
  Description of Artificial Sequence: Synthetic oligonucleotide
  Antisense strand to SEQ ID NO: 1586751
uuacucacagaucgagaag

SEQ ID NO: 1586753 - RNA, 19 nt, Artificial Sequence
  Description of Artificial Sequence: Synthetic oligonucleotide
  Sense strand starting at position 573 of SEQ ID NO: 1560248
aggaacaucuccuguguaa

SEQ ID NO: 1586754 - RNA, 19 nt, Artificial Sequence
  Description of Artificial Sequence: Synthetic oligonucleotide
  Antisense strand to SEQ ID NO: 1586753
uuacacaggagauguuccu

SEQ ID NO: 1586755 - RNA, 19 nt, Artificial Sequence
  Description of Artificial Sequence: Synthetic oligonucleotide
  Sense strand starting at position 1547 of SEQ ID NO: 1560248
ccaacuauugggcaacuca

SEQ ID NO: 1586756 - RNA, 19 nt, Artificial Sequence
  Description of Artificial Sequence: Synthetic oligonucleotide
  Antisense strand to SEQ ID NO: 1586755
ugaguugcccaauaguugg

SEQ ID NO: 1586757 - RNA, 19 nt, Artificial Sequence
  Description of Artificial Sequence: Synthetic oligonucleotide
  Sense strand starting at position 1674 of SEQ ID NO: 1560248
auggcauugacuugcugua

SEQ ID NO: 1586758 - RNA, 19 nt, Artificial Sequence
  Description of Artificial Sequence: Synthetic oligonucleotide
  Antisense strand to SEQ ID NO: 1586757
uacagcaagucaaugccau

SEQ ID NO: 1586759 - RNA, 19 nt, Artificial Sequence
  Description of Artificial Sequence: Synthetic oligonucleotide
  Sense strand starting at position 1676 of SEQ ID NO: 1560248
ggcauugacuugcuguaca

SEQ ID NO: 1586760 - RNA, 19 nt, Artificial Sequence
  Description of Artificial Sequence: Synthetic oligonucleotide
  Antisense strand to SEQ ID NO: 1586759
uguacagcaagucaaugcc

SEQ ID NO: 1586761 - RNA, 19 nt, Artificial Sequence
  Description of Artificial Sequence: Synthetic oligonucleotide
  Sense strand starting at position 1741 of SEQ ID NO: 1560248
ccagcagugcgcgguaauu

SEQ ID NO: 1586762 - RNA, 19 nt, Artificial Sequence
  Description of Artificial Sequence: Synthetic oligonucleotide
  Antisense strand to SEQ ID NO: 1586761
aauuaccgcgcacugcugg

SEQ ID NO: 1586763 - RNA, 19 nt, Artificial Sequence
  Description of Artificial Sequence: Synthetic oligonucleotide
  Sense strand starting at position 1743 of SEQ ID NO: 1560248
agcagugcgcgguaauuca

SEQ ID NO: 1586764 - RNA, 19 nt, Artificial Sequence
  Description of Artificial Sequence: Synthetic oligonucleotide
  Antisense strand to SEQ ID NO: 1586763
ugaauuaccgcgcacugcu

SEQ ID NO: 1586765 - RNA, 19 nt, Artificial Sequence
  Description of Artificial Sequence: Synthetic oligonucleotide
  Sense strand starting at position 1932 of SEQ ID NO: 1560248
ggcccagaaacgcguuaaa

SEQ ID NO: 1586766 - RNA, 19 nt, Artificial Sequence
  Description of Artificial Sequence: Synthetic oligonucleotide
  Antisense strand to SEQ ID NO: 1586765
uuuaacgcguuucugggcc

SEQ ID NO: 1586767 - RNA, 19 nt, Artificial Sequence
  Description of Artificial Sequence: Synthetic oligonucleotide
  Sense strand starting at position 1990 of SEQ ID NO: 1560248
gaacgugcuuugggcgaaa

SEQ ID NO: 1586768 - RNA, 19 nt, Artificial Sequence
  Description of Artificial Sequence: Synthetic oligonucleotide
  Antisense strand to SEQ ID NO: 1586767
uuucgcccaaagcacguuc

SEQ ID NO: 1586769 - RNA, 19 nt, Artificial Sequence
  Description of Artificial Sequence: Synthetic oligonucleotide
  Sense strand starting at position 1992 of SEQ ID NO: 1560248
acgugcuuugggcgaaaga

SEQ ID NO: 1586770 - RNA, 19 nt, Artificial Sequence
  Description of Artificial Sequence: Synthetic oligonucleotide
  Antisense strand to SEQ ID NO: 1586769
ucuuucgcccaaagcacgu

SEQ ID NO: 1586771 - RNA, 19 nt, Artificial Sequence
  Description of Artificial Sequence: Synthetic oligonucleotide
  Sense strand starting at position 2010 of SEQ ID NO: 1560248
accggaaguugguuuauca

SEQ ID NO: 1586772 - RNA, 19 nt, Artificial Sequence
  Description of Artificial Sequence: Synthetic oligonucleotide
  Antisense strand to SEQ ID NO: 1586771
ugauaaaccaacuuccggu

SEQ ID NO: 1586773 - RNA, 19 nt, Artificial Sequence
  Description of Artificial Sequence: Synthetic oligonucleotide
  Sense strand starting at position 2019 of SEQ ID NO: 1560248
ugguuuaucacgugaccau

SEQ ID NO: 1586774 - RNA, 19 nt, Artificial Sequence
  Description of Artificial Sequence: Synthetic oligonucleotide
  Antisense strand to SEQ ID NO: 1586773
auggucacgugauaaacca

SEQ ID NO: 1586775 - RNA, 19 nt, Artificial Sequence
  Description of Artificial Sequence: Synthetic oligonucleotide
  Sense strand starting at position 2020 of SEQ ID NO: 1560248
gguuuaucacgugaccauu

SEQ ID NO: 1586776 - RNA, 19 nt, Artificial Sequence
  Description of Artificial Sequence: Synthetic oligonucleotide
  Antisense strand to SEQ ID NO: 1586775
aauggucacgugauaaacc

SEQ ID NO: 1586777 - RNA, 19 nt, Artificial Sequence
  Description of Artificial Sequence: Synthetic oligonucleotide
  Sense strand starting at position 2071 of SEQ ID NO: 1560248
uugugcguguguuccguaa

SEQ ID NO: 1586778 - RNA, 19 nt, Artificial Sequence
  Description of Artificial Sequence: Synthetic oligonucleotide
  Antisense strand to SEQ ID NO: 1586777
uuacggaacacacgcacaa

SEQ ID NO: 1586779 - RNA, 19 nt, Artificial Sequence
  Description of Artificial Sequence: Synthetic oligonucleotide
  Sense strand starting at position 2072 of SEQ ID NO: 1560248
ugugcguguguuccguaau

SEQ ID NO: 1586780 - RNA, 19 nt, Artificial Sequence
  Description of Artificial Sequence: Synthetic oligonucleotide
  Antisense strand to SEQ ID NO: 1586779
auuacggaacacacgcaca

SEQ ID NO: 1586781 - RNA, 19 nt, Artificial Sequence
  Description of Artificial Sequence: Synthetic oligonucleotide
  Sense strand starting at position 2073 of SEQ ID NO: 1560248
gugcguguguuccguaaua

SEQ ID NO: 1586782 - RNA, 19 nt, Artificial Sequence
  Description of Artificial Sequence: Synthetic oligonucleotide
  Antisense strand to SEQ ID NO: 1586781
uauuacggaacacacgcac

SEQ ID NO: 1586783 - RNA, 19 nt, Artificial Sequence
  Description of Artificial Sequence: Synthetic oligonucleotide
  Sense strand starting at position 2075 of SEQ ID NO: 1560248
gcguguguuccguaauacg

SEQ ID NO: 1586784 - RNA, 19 nt, Artificial Sequence
  Description of Artificial Sequence: Synthetic oligonucleotide
  Antisense strand to SEQ ID NO: 1586783
cguauuacggaacacacgc

SEQ ID NO: 1586785 - RNA, 19 nt, Artificial Sequence
  Description of Artificial Sequence: Synthetic oligonucleotide
  Sense strand starting at position 2078 of SEQ ID NO: 1560248
uguguuccguaauacggaa

SEQ ID NO: 1586786 - RNA, 19 nt, Artificial Sequence
  Description of Artificial Sequence: Synthetic oligonucleotide
  Antisense strand to SEQ ID NO: 1586785
uuccguauuacggaacaca

SEQ ID NO: 1586787 - RNA, 19 nt, Artificial Sequence
  Description of Artificial Sequence: Synthetic oligonucleotide
  Sense strand starting at position 2496 of SEQ ID NO: 1560248
gugcaauugcccgaucuca

SEQ ID NO: 1586788 - RNA, 19 nt, Artificial Sequence
  Description of Artificial Sequence: Synthetic oligonucleotide
  Antisense strand to SEQ ID NO: 1586787
ugagaucgggcaauugcac

SEQ ID NO: 1586789 - RNA, 19 nt, Artificial Sequence
  Description of Artificial Sequence: Synthetic oligonucleotide
  Sense strand starting at position 2765 of SEQ ID NO: 1560248
cucgacuucccaugaauga

SEQ ID NO: 1586790 - RNA, 19 nt, Artificial Sequence
  Description of Artificial Sequence: Synthetic oligonucleotide
  Antisense strand to SEQ ID NO: 1586789
ucauucaugggaagucgag

SEQ ID NO: 1586791 - RNA, 19 nt, Artificial Sequence
  Description of Artificial Sequence: Synthetic oligonucleotide
  Sense strand starting at position 3232 of SEQ ID NO: 1560248
guuuguuugagcuagaguc

SEQ ID NO: 1586792 - RNA, 19 nt, Artificial Sequence
  Description of Artificial Sequence: Synthetic oligonucleotide
  Antisense strand to SEQ ID NO: 1586791
gacucuagcucaaacaaac

SEQ ID NO: 1586793 - RNA, 19 nt, Artificial Sequence
  Description of Artificial Sequence: Synthetic oligonucleotide
  Sense strand starting at position 3234 of SEQ ID NO: 1560248
uuguuugagcuagagucuu

SEQ ID NO: 1586794 - RNA, 19 nt, Artificial Sequence
  Description of Artificial Sequence: Synthetic oligonucleotide
  Antisense strand to SEQ ID NO: 1586793
aagacucuagcucaaacaa

SEQ ID NO: 1586795 - RNA, 19 nt, Artificial Sequence
  Description of Artificial Sequence: Synthetic oligonucleotide
  Sense strand starting at position 124 of SEQ ID NO: 1560249
agagcauucuucugaggcu

SEQ ID NO: 1586796 - RNA, 19 nt, Artificial Sequence
  Description of Artificial Sequence: Synthetic oligonucleotide
  Antisense strand to SEQ ID NO: 1586795
agccucagaagaaugcucu

SEQ ID NO: 1586797 - RNA, 19 nt, Artificial Sequence
  Description of Artificial Sequence: Synthetic oligonucleotide
  Sense strand starting at position 125 of SEQ ID NO: 1560249
gagcauucuucugaggcua

SEQ ID NO: 1586798 - RNA, 19 nt, Artificial Sequence
  Description of Artificial Sequence: Synthetic oligonucleotide
  Antisense strand to SEQ ID NO: 1586797
uagccucagaagaaugcuc

SEQ ID NO: 1586799 - RNA, 19 nt, Artificial Sequence
  Description of Artificial Sequence: Synthetic oligonucleotide
  Sense strand starting at position 127 of SEQ ID NO: 1560249
gcauucuucugaggcuaga

SEQ ID NO: 1586800 - RNA, 19 nt, Artificial Sequence
  Description of Artificial Sequence: Synthetic oligonucleotide
  Antisense strand to SEQ ID NO: 1586799
ucuagccucagaagaaugc

SEQ ID NO: 1586801 - RNA, 19 nt, Artificial Sequence
  Description of Artificial Sequence: Synthetic oligonucleotide
  Sense strand starting at position 141 of SEQ ID NO: 1560249
cuagaaacugcuuaugcau

SEQ ID NO: 1586802 - RNA, 19 nt, Artificial Sequence
  Description of Artificial Sequence: Synthetic oligonucleotide
  Antisense strand to SEQ ID NO: 1586801
augcauaagcaguuucuag

SEQ ID NO: 1586803 - RNA, 19 nt, Artificial Sequence
  Description of Artificial Sequence: Synthetic oligonucleotide
  Sense strand starting at position 229 of SEQ ID NO: 1560249
aucuucuaguuucuguaua

SEQ ID NO: 1586804 - RNA, 19 nt, Artificial Sequence
  Description of Artificial Sequence: Synthetic oligonucleotide
  Antisense strand to SEQ ID NO: 1586803
uauacagaaacuagaagau

SEQ ID NO: 1586805 - RNA, 19 nt, Artificial Sequence
  Description of Artificial Sequence: Synthetic oligonucleotide
  Sense strand starting at position 230 of SEQ ID NO: 1560249
ucuucuaguuucuguauaa

SEQ ID NO: 1586806 - RNA, 19 nt, Artificial Sequence
  Description of Artificial Sequence: Synthetic oligonucleotide
  Antisense strand to SEQ ID NO: 1586805
uuauacagaaacuagaaga

SEQ ID NO: 1586807 - RNA, 19 nt, Artificial Sequence
  Description of Artificial Sequence: Synthetic oligonucleotide
  Sense strand starting at position 231 of SEQ ID NO: 1560249
cuucuaguuucuguauaac

SEQ ID NO: 1586808 - RNA, 19 nt, Artificial Sequence
  Description of Artificial Sequence: Synthetic oligonucleotide
  Antisense strand to SEQ ID NO: 1586807
guuauacagaaacuagaag

SEQ ID NO: 1586809 - RNA, 19 nt, Artificial Sequence
  Description of Artificial Sequence: Synthetic oligonucleotide
  Sense strand starting at position 234 of SEQ ID NO: 1560249
cuaguuucuguauaacugu

SEQ ID NO: 1586810 - RNA, 19 nt, Artificial Sequence
  Description of Artificial Sequence: Synthetic oligonucleotide
  Antisense strand to SEQ ID NO: 1586809
acaguuauacagaaacuag

SEQ ID NO: 1586811 - RNA, 19 nt, Artificial Sequence
  Description of Artificial Sequence: Synthetic oligonucleotide
  Sense strand starting at position 442 of SEQ ID NO: 1560249
acuuaugagucauucugua

SEQ ID NO: 1586812 - RNA, 19 nt, Artificial Sequence
  Description of Artificial Sequence: Synthetic oligonucleotide
  Antisense strand to SEQ ID NO: 1586811
uacagaaugacucauaagu

SEQ ID NO: 1586813 - RNA, 19 nt, Artificial Sequence
  Description of Artificial Sequence: Synthetic oligonucleotide
  Sense strand starting at position 446 of SEQ ID NO: 1560249
augagucauucuguagucu

SEQ ID NO: 1586814 - RNA, 19 nt, Artificial Sequence
  Description of Artificial Sequence: Synthetic oligonucleotide
  Antisense strand to SEQ ID NO: 1586813
agacuacagaaugacucau

SEQ ID NO: 1586815 - RNA, 19 nt, Artificial Sequence
  Description of Artificial Sequence: Synthetic oligonucleotide
  Sense strand starting at position 450 of SEQ ID NO: 1560249
gucauucuguagucugauu

SEQ ID NO: 1586816 - RNA, 19 nt, Artificial Sequence
  Description of Artificial Sequence: Synthetic oligonucleotide
  Antisense strand to SEQ ID NO: 1586815
aaucagacuacagaaugac

SEQ ID NO: 1586817 - RNA, 19 nt, Artificial Sequence
  Description of Artificial Sequence: Synthetic oligonucleotide
  Sense strand starting at position 983 of SEQ ID NO: 1560249
cccaaagugcuguggauga

SEQ ID NO: 1586818 - RNA, 19 nt, Artificial Sequence
  Description of Artificial Sequence: Synthetic oligonucleotide
  Antisense strand to SEQ ID NO: 1586817
ucauccacagcacuuuggg

SEQ ID NO: 1586819 - RNA, 19 nt, Artificial Sequence
  Description of Artificial Sequence: Synthetic oligonucleotide
  Sense strand starting at position 985 of SEQ ID NO: 1560249
caaagugcuguggaugaca

SEQ ID NO: 1586820 - RNA, 19 nt, Artificial Sequence
  Description of Artificial Sequence: Synthetic oligonucleotide
  Antisense strand to SEQ ID NO: 1586819
ugucauccacagcacuuug

SEQ ID NO: 1586821 - RNA, 19 nt, Artificial Sequence
  Description of Artificial Sequence: Synthetic oligonucleotide
  Sense strand starting at position 1131 of SEQ ID NO: 1560249
ucagaagcuuuaguaauag

SEQ ID NO: 1586822 - RNA, 19 nt, Artificial Sequence
  Description of Artificial Sequence: Synthetic oligonucleotide
  Antisense strand to SEQ ID NO: 1586821
cuauuacuaaagcuucuga

SEQ ID NO: 1586823 - RNA, 19 nt, Artificial Sequence
  Description of Artificial Sequence: Synthetic oligonucleotide
  Sense strand starting at position 1140 of SEQ ID NO: 1560249
uuaguaauagcucaugcuu

SEQ ID NO: 1586824 - RNA, 19 nt, Artificial Sequence
  Description of Artificial Sequence: Synthetic oligonucleotide
  Antisense strand to SEQ ID NO: 1586823
aagcaugagcuauuacuaa

SEQ ID NO: 1586825 - RNA, 19 nt, Artificial Sequence
  Description of Artificial Sequence: Synthetic oligonucleotide
  Sense strand starting at position 1142 of SEQ ID NO: 1560249
aguaauagcucaugcuuac

SEQ ID NO: 1586826 - RNA, 19 nt, Artificial Sequence
  Description of Artificial Sequence: Synthetic oligonucleotide
  Antisense strand to SEQ ID NO: 1586825
guaagcaugagcuauuacu

SEQ ID NO: 1586827 - RNA, 19 nt, Artificial Sequence
  Description of Artificial Sequence: Synthetic oligonucleotide
  Sense strand starting at position 1300 of SEQ ID NO: 1560249
aagugaguagccgaguguu

SEQ ID NO: 1586828 - RNA, 19 nt, Artificial Sequence
  Description of Artificial Sequence: Synthetic oligonucleotide
  Antisense strand to SEQ ID NO: 1586827
aacacucggcuacucacuu

SEQ ID NO: 1586829 - RNA, 19 nt, Artificial Sequence
  Description of Artificial Sequence: Synthetic oligonucleotide
  Sense strand starting at position 1302 of SEQ ID NO: 1560249
gugaguagccgaguguuac

SEQ ID NO: 1586830 - RNA, 19 nt, Artificial Sequence
  Description of Artificial Sequence: Synthetic oligonucleotide
  Antisense strand to SEQ ID NO: 1586829
guaacacucggcuacucac

SEQ ID NO: 1586831 - RNA, 19 nt, Artificial Sequence
  Description of Artificial Sequence: Synthetic oligonucleotide
  Sense strand starting at position 1303 of SEQ ID NO: 1560249
ugaguagccgaguguuaca

SEQ ID NO: 1586832 - RNA, 19 nt, Artificial Sequence
  Description of Artificial Sequence: Synthetic oligonucleotide
  Antisense strand to SEQ ID NO: 1586831
uguaacacucggcuacuca

SEQ ID NO: 1586833 - RNA, 19 nt, Artificial Sequence
  Description of Artificial Sequence: Synthetic oligonucleotide
  Sense strand starting at position 1310 of SEQ ID NO: 1560249
ccgaguguuacaugagcca

SEQ ID NO: 1586834 - RNA, 19 nt, Artificial Sequence
  Description of Artificial Sequence: Synthetic oligonucleotide
  Antisense strand to SEQ ID NO: 1586833
uggcucauguaacacucgg

SEQ ID NO: 1586835 - RNA, 19 nt, Artificial Sequence
  Description of Artificial Sequence: Synthetic oligonucleotide
  Sense strand starting at position 1374 of SEQ ID NO: 1560249
ucagcaucguucuccauua

SEQ ID NO: 1586836 - RNA, 19 nt, Artificial Sequence
  Description of Artificial Sequence: Synthetic oligonucleotide
  Antisense strand to SEQ ID NO: 1586835
uaauggagaacgaugcuga

SEQ ID NO: 1586837 - RNA, 19 nt, Artificial Sequence
  Description of Artificial Sequence: Synthetic oligonucleotide
  Sense strand starting at position 1460 of SEQ ID NO: 1560249
cgugauucagugucucguu

SEQ ID NO: 1586838 - RNA, 19 nt, Artificial Sequence
  Description of Artificial Sequence: Synthetic oligonucleotide
  Antisense strand to SEQ ID NO: 1586837
aacgagacacugaaucacg

SEQ ID NO: 1586839 - RNA, 19 nt, Artificial Sequence
  Description of Artificial Sequence: Synthetic oligonucleotide
  Sense strand starting at position 1461 of SEQ ID NO: 1560249
gugauucagugucucguuu

SEQ ID NO: 1586840 - RNA, 19 nt, Artificial Sequence
  Description of Artificial Sequence: Synthetic oligonucleotide
  Antisense strand to SEQ ID NO: 1586839
aaacgagacacugaaucac

SEQ ID NO: 1586841 - RNA, 19 nt, Artificial Sequence
  Description of Artificial Sequence: Synthetic oligonucleotide
  Sense strand starting at position 1507 of SEQ ID NO: 1560249
ucuaguguccacgaucagu

SEQ ID NO: 1586842 - RNA, 19 nt, Artificial Sequence
  Description of Artificial Sequence: Synthetic oligonucleotide
  Antisense strand to SEQ ID NO: 1586841
acugaucguggacacuaga

SEQ ID NO: 1586843 - RNA, 19 nt, Artificial Sequence
  Description of Artificial Sequence: Synthetic oligonucleotide
  Sense strand starting at position 1577 of SEQ ID NO: 1560249
ccucgugggcucuaagacu

SEQ ID NO: 1586844 - RNA, 19 nt, Artificial Sequence
  Description of Artificial Sequence: Synthetic oligonucleotide
  Antisense strand to SEQ ID NO: 1586843
agucuuagagcccacgagg

SEQ ID NO: 1586845 - RNA, 19 nt, Artificial Sequence
  Description of Artificial Sequence: Synthetic oligonucleotide
  Sense strand starting at position 1588 of SEQ ID NO: 1560249
cuaagacucucgcuggaac

SEQ ID NO: 1586846 - RNA, 19 nt, Artificial Sequence
  Description of Artificial Sequence: Synthetic oligonucleotide
  Antisense strand to SEQ ID NO: 1586845
guuccagcgagagucuuag

SEQ ID NO: 1586847 - RNA, 19 nt, Artificial Sequence
  Description of Artificial Sequence: Synthetic oligonucleotide
  Sense strand starting at position 1809 of SEQ ID NO: 1560249
ucuccucaucucgagacuu

SEQ ID NO: 1586848 - RNA, 19 nt, Artificial Sequence
  Description of Artificial Sequence: Synthetic oligonucleotide
  Antisense strand to SEQ ID NO: 1586847
aagucucgagaugaggaga

SEQ ID NO: 1586849 - RNA, 19 nt, Artificial Sequence
  Description of Artificial Sequence: Synthetic oligonucleotide
  Sense strand starting at position 2105 of SEQ ID NO: 1560249
gggcggagccucgagugau

SEQ ID NO: 1586850 - RNA, 19 nt, Artificial Sequence
  Description of Artificial Sequence: Synthetic oligonucleotide
  Antisense strand to SEQ ID NO: 1586849
aucacucgaggcuccgccc

SEQ ID NO: 1586851 - RNA, 19 nt, Artificial Sequence
  Description of Artificial Sequence: Synthetic oligonucleotide
  Sense strand starting at position 2106 of SEQ ID NO: 1560249
ggcggagccucgagugauu

SEQ ID NO: 1586852 - RNA, 19 nt, Artificial Sequence
  Description of Artificial Sequence: Synthetic oligonucleotide
  Antisense strand to SEQ ID NO: 1586851
aaucacucgaggcuccgcc

SEQ ID NO: 1586853 - RNA, 19 nt, Artificial Sequence
  Description of Artificial Sequence: Synthetic oligonucleotide
  Sense strand starting at position 2334 of SEQ ID NO: 1560249
ggcguuaucucaccucauu

SEQ ID NO: 1586854 - RNA, 19 nt, Artificial Sequence
  Description of Artificial Sequence: Synthetic oligonucleotide
  Antisense strand to SEQ ID NO: 1586853
aaugaggugagauaacgcc

SEQ ID NO: 1586855 - RNA, 19 nt, Artificial Sequence
  Description of Artificial Sequence: Synthetic oligonucleotide
  Sense strand starting at position 2854 of SEQ ID NO: 1560249
aaguuagucggauauggua

SEQ ID NO: 1586856 - RNA, 19 nt, Artificial Sequence
  Description of Artificial Sequence: Synthetic oligonucleotide
  Antisense strand to SEQ ID NO: 1586855
uaccauauccgacuaacuu

SEQ ID NO: 1586857 - RNA, 19 nt, Artificial Sequence
  Description of Artificial Sequence: Synthetic oligonucleotide
  Sense strand starting at position 2860 of SEQ ID NO: 1560249
gucggauaugguagugugu

SEQ ID NO: 1586858 - RNA, 19 nt, Artificial Sequence
  Description of Artificial Sequence: Synthetic oligonucleotide
  Antisense strand to SEQ ID NO: 1586857
acacacuaccauauccgac

SEQ ID NO: 1586859 - RNA, 19 nt, Artificial Sequence
  Description of Artificial Sequence: Synthetic oligonucleotide
  Sense strand starting at position 3373 of SEQ ID NO: 1560249
gccugagcauuuggaaaua

SEQ ID NO: 1586860 - RNA, 19 nt, Artificial Sequence
  Description of Artificial Sequence: Synthetic oligonucleotide
  Antisense strand to SEQ ID NO: 1586859
uauuuccaaaugcucaggc

SEQ ID NO: 1586861 - RNA, 19 nt, Artificial Sequence
  Description of Artificial Sequence: Synthetic oligonucleotide
  Sense strand starting at position 3462 of SEQ ID NO: 1560249
ucagcauauuguuugaguu

SEQ ID NO: 1586862 - RNA, 19 nt, Artificial Sequence
  Description of Artificial Sequence: Synthetic oligonucleotide
  Antisense strand to SEQ ID NO: 1586861
aacucaaacaauaugcuga

SEQ ID NO: 1586863 - RNA, 19 nt, Artificial Sequence
  Description of Artificial Sequence: Synthetic oligonucleotide
  Sense strand starting at position 3463 of SEQ ID NO: 1560249
cagcauauuguuugaguua

SEQ ID NO: 1586864 - RNA, 19 nt, Artificial Sequence
  Description of Artificial Sequence: Synthetic oligonucleotide
  Antisense strand to SEQ ID NO: 1586863
uaacucaaacaauaugcug

SEQ ID NO: 1586865 - RNA, 19 nt, Artificial Sequence
  Description of Artificial Sequence: Synthetic oligonucleotide
  Sense strand starting at position 3464 of SEQ ID NO: 1560249
agcauauuguuugaguuau

SEQ ID NO: 1586866 - RNA, 19 nt, Artificial Sequence
  Description of Artificial Sequence: Synthetic oligonucleotide
  Antisense strand to SEQ ID NO: 1586865
auaacucaaacaauaugcu

SEQ ID NO: 1586867 - RNA, 19 nt, Artificial Sequence
  Description of Artificial Sequence: Synthetic oligonucleotide
  Sense strand starting at position 3472 of SEQ ID NO: 1560249
guuugaguuaugcauugga

SEQ ID NO: 1586868 - RNA, 19 nt, Artificial Sequence
  Description of Artificial Sequence: Synthetic oligonucleotide
  Antisense strand to SEQ ID NO: 1586867
uccaaugcauaacucaaac

SEQ ID NO: 1586869 - RNA, 19 nt, Artificial Sequence
  Description of Artificial Sequence: Synthetic oligonucleotide
  Sense strand starting at position 3475 of SEQ ID NO: 1560249
ugaguuaugcauuggacau

SEQ ID NO: 1586870 - RNA, 19 nt, Artificial Sequence
  Description of Artificial Sequence: Synthetic oligonucleotide
  Antisense strand to SEQ ID NO: 1586869
auguccaaugcauaacuca

SEQ ID NO: 1586871 - RNA, 19 nt, Artificial Sequence
  Description of Artificial Sequence: Synthetic oligonucleotide
  Sense strand starting at position 3509 of SEQ ID NO: 1560249
aguggaacguuggauauaa

SEQ ID NO: 1586872 - RNA, 19 nt, Artificial Sequence
  Description of Artificial Sequence: Synthetic oligonucleotide
  Antisense strand to SEQ ID NO: 1586871
uuauauccaacguuccacu

SEQ ID NO: 1586873 - RNA, 19 nt, Artificial Sequence
  Description of Artificial Sequence: Synthetic oligonucleotide
  Sense strand starting at position 3520 of SEQ ID NO: 1560249
ggauauaauuaucaagccu

SEQ ID NO: 1586874 - RNA, 19 nt, Artificial Sequence
  Description of Artificial Sequence: Synthetic oligonucleotide
  Antisense strand to SEQ ID NO: 1586873
aggcuugauaauuauaucc

SEQ ID NO: 1586875 - RNA, 19 nt, Artificial Sequence
  Description of Artificial Sequence: Synthetic oligonucleotide
  Sense strand starting at position 128 of SEQ ID NO: 1560250
gguggcuuaucuccagaau

SEQ ID NO: 1586876 - RNA, 19 nt, Artificial Sequence
  Description of Artificial Sequence: Synthetic oligonucleotide
  Antisense strand to SEQ ID NO: 1586875
auucuggagauaagccacc

SEQ ID NO: 1586877 - RNA, 19 nt, Artificial Sequence
  Description of Artificial Sequence: Synthetic oligonucleotide
  Sense strand starting at position 129 of SEQ ID NO: 1560250
guggcuuaucuccagaauu

SEQ ID NO: 1586878 - RNA, 19 nt, Artificial Sequence
  Description of Artificial Sequence: Synthetic oligonucleotide
  Antisense strand to SEQ ID NO: 1586877
aauucuggagauaagccac

SEQ ID NO: 1586879 - RNA, 19 nt, Artificial Sequence
  Description of Artificial Sequence: Synthetic oligonucleotide
  Sense strand starting at position 131 of SEQ ID NO: 1560250
ggcuuaucuccagaauuga

SEQ ID NO: 1586880 - RNA, 19 nt, Artificial Sequence
  Description of Artificial Sequence: Synthetic oligonucleotide
  Antisense strand to SEQ ID NO: 1586879
ucaauucuggagauaagcc

SEQ ID NO: 1586881 - RNA, 19 nt, Artificial Sequence
  Description of Artificial Sequence: Synthetic oligonucleotide
  Sense strand starting at position 318 of SEQ ID NO: 1560250
gggucagugguuugaaccu

SEQ ID NO: 1586882 - RNA, 19 nt, Artificial Sequence
  Description of Artificial Sequence: Synthetic oligonucleotide
  Antisense strand to SEQ ID NO: 1586881
agguucaaaccacugaccc

SEQ ID NO: 1586883 - RNA, 19 nt, Artificial Sequence
  Description of Artificial Sequence: Synthetic oligonucleotide
  Sense strand starting at position 464 of SEQ ID NO: 1560250
ucacaauugugaucacagu

SEQ ID NO: 1586884 - RNA, 19 nt, Artificial Sequence
  Description of Artificial Sequence: Synthetic oligonucleotide
  Antisense strand to SEQ ID NO: 1586883
acugugaucacaauuguga

SEQ ID NO: 1586885 - RNA, 19 nt, Artificial Sequence
  Description of Artificial Sequence: Synthetic oligonucleotide
  Sense strand starting at position 546 of SEQ ID NO: 1560250
cuggauuaucaaggguaac

SEQ ID NO: 1586886 - RNA, 19 nt, Artificial Sequence
  Description of Artificial Sequence: Synthetic oligonucleotide
  Antisense strand to SEQ ID NO: 1586885
guuacccuugauaauccag

SEQ ID NO: 1586887 - RNA, 19 nt, Artificial Sequence
  Description of Artificial Sequence: Synthetic oligonucleotide
  Sense strand starting at position 552 of SEQ ID NO: 1560250
uaucaaggguaacagauuu

SEQ ID NO: 1586888 - RNA, 19 nt, Artificial Sequence
  Description of Artificial Sequence: Synthetic oligonucleotide
  Antisense strand to SEQ ID NO: 1586887
aaaucuguuacccuugaua

SEQ ID NO: 1586889 - RNA, 19 nt, Artificial Sequence
  Description of Artificial Sequence: Synthetic oligonucleotide
  Sense strand starting at position 625 of SEQ ID NO: 1560250
ugaugagccaggcaaacuu

SEQ ID NO: 1586890 - RNA, 19 nt, Artificial Sequence
  Description of Artificial Sequence: Synthetic oligonucleotide
  Antisense strand to SEQ ID NO: 1586889
aaguuugccuggcucauca

SEQ ID NO: 1586891 - RNA, 19 nt, Artificial Sequence
  Description of Artificial Sequence: Synthetic oligonucleotide
  Sense strand starting at position 690 of SEQ ID NO: 1560250
guggacuacaugcauagua

SEQ ID NO: 1586892 - RNA, 19 nt, Artificial Sequence
  Description of Artificial Sequence: Synthetic oligonucleotide
  Antisense strand to SEQ ID NO: 1586891
uacuaugcauguaguccac

SEQ ID NO: 1586893 - RNA, 19 nt, Artificial Sequence
  Description of Artificial Sequence: Synthetic oligonucleotide
  Sense strand starting at position 692 of SEQ ID NO: 1560250
ggacuacaugcauaguaau

SEQ ID NO: 1586894 - RNA, 19 nt, Artificial Sequence
  Description of Artificial Sequence: Synthetic oligonucleotide
  Antisense strand to SEQ ID NO: 1586893
auuacuaugcauguagucc

SEQ ID NO: 1586895 - RNA, 19 nt, Artificial Sequence
  Description of Artificial Sequence: Synthetic oligonucleotide
  Sense strand starting at position 702 of SEQ ID NO: 1560250
cauaguaauuucucggcau

SEQ ID NO: 1586896 - RNA, 19 nt, Artificial Sequence
  Description of Artificial Sequence: Synthetic oligonucleotide
  Antisense strand to SEQ ID NO: 1586895
augccgagaaauuacuaug

SEQ ID NO: 1586897 - RNA, 19 nt, Artificial Sequence
  Description of Artificial Sequence: Synthetic oligonucleotide
  Sense strand starting at position 703 of SEQ ID NO: 1560250
auaguaauuucucggcauu

SEQ ID NO: 1586898 - RNA, 19 nt, Artificial Sequence
  Description of Artificial Sequence: Synthetic oligonucleotide
  Antisense strand to SEQ ID NO: 1586897
aaugccgagaaauuacuau

SEQ ID NO: 1586899 - RNA, 19 nt, Artificial Sequence
  Description of Artificial Sequence: Synthetic oligonucleotide
  Sense strand starting at position 704 of SEQ ID NO: 1560250
uaguaauuucucggcauuc

SEQ ID NO: 1586900 - RNA, 19 nt, Artificial Sequence
  Description of Artificial Sequence: Synthetic oligonucleotide
  Antisense strand to SEQ ID NO: 1586899
gaaugccgagaaauuacua

SEQ ID NO: 1586901 - RNA, 19 nt, Artificial Sequence
  Description of Artificial Sequence: Synthetic oligonucleotide
  Sense strand starting at position 1410 of SEQ ID NO: 1560250
ggagaaagggccugcucua

SEQ ID NO: 1586902 - RNA, 19 nt, Artificial Sequence
  Description of Artificial Sequence: Synthetic oligonucleotide
  Antisense strand to SEQ ID NO: 1586901
uagagcaggcccuuucucc

SEQ ID NO: 1586903 - RNA, 19 nt, Artificial Sequence
  Description of Artificial Sequence: Synthetic oligonucleotide
  Sense strand starting at position 2321 of SEQ ID NO: 1560250
ggcagaaaugcggauaaag

SEQ ID NO: 1586904 - RNA, 19 nt, Artificial Sequence
  Description of Artificial Sequence: Synthetic oligonucleotide
  Antisense strand to SEQ ID NO: 1586903
cuuuauccgcauuucugcc

SEQ ID NO: 1586905 - RNA, 19 nt, Artificial Sequence
  Description of Artificial Sequence: Synthetic oligonucleotide
  Sense strand starting at position 2408 of SEQ ID NO: 1560250
ugcguugugaaaugaguaa

SEQ ID NO: 1586906 - RNA, 19 nt, Artificial Sequence
  Description of Artificial Sequence: Synthetic oligonucleotide
  Antisense strand to SEQ ID NO: 1586905
uuacucauuucacaacgca

SEQ ID NO: 1586907 - RNA, 19 nt, Artificial Sequence
  Description of Artificial Sequence: Synthetic oligonucleotide
  Sense strand starting at position 2415 of SEQ ID NO: 1560250
ugaaaugaguaagucgaua

SEQ ID NO: 1586908 - RNA, 19 nt, Artificial Sequence
  Description of Artificial Sequence: Synthetic oligonucleotide
  Antisense strand to SEQ ID NO: 1586907
uaucgacuuacucauuuca

SEQ ID NO: 1586909 - RNA, 19 nt, Artificial Sequence
  Description of Artificial Sequence: Synthetic oligonucleotide
  Sense strand starting at position 2420 of SEQ ID NO: 1560250
ugaguaagucgauaaucaa

SEQ ID NO: 1586910 - RNA, 19 nt, Artificial Sequence
  Description of Artificial Sequence: Synthetic oligonucleotide
  Antisense strand to SEQ ID NO: 1586909
uugauuaucgacuuacuca

SEQ ID NO: 1586911 - RNA, 19 nt, Artificial Sequence
  Description of Artificial Sequence: Synthetic oligonucleotide
  Sense strand starting at position 2423 of SEQ ID NO: 1560250
guaagucgauaaucaacaa

SEQ ID NO: 1586912 - RNA, 19 nt, Artificial Sequence
  Description of Artificial Sequence: Synthetic oligonucleotide
  Antisense strand to SEQ ID NO: 1586911
uuguugauuaucgacuuac

SEQ ID NO: 1586913 - RNA, 19 nt, Artificial Sequence
  Description of Artificial Sequence: Synthetic oligonucleotide
  Sense strand starting at position 2985 of SEQ ID NO: 1560250
gagccaucagugggugaga

SEQ ID NO: 1586914 - RNA, 19 nt, Artificial Sequence
  Description of Artificial Sequence: Synthetic oligonucleotide
  Antisense strand to SEQ ID NO: 1586913
ucucacccacugauggcuc

SEQ ID NO: 1586915 - RNA, 19 nt, Artificial Sequence
  Description of Artificial Sequence: Synthetic oligonucleotide
  Sense strand starting at position 2998 of SEQ ID NO: 1560250
gugagaggcuggucuggaa

SEQ ID NO: 1586916 - RNA, 19 nt, Artificial Sequence
  Description of Artificial Sequence: Synthetic oligonucleotide
  Antisense strand to SEQ ID NO: 1586915
uuccagaccagccucucac

SEQ ID NO: 1586917 - RNA, 19 nt, Artificial Sequence
  Description of Artificial Sequence: Synthetic oligonucleotide
  Sense strand starting at position 3589 of SEQ ID NO: 1560250
ggaagugccuucucaagca

SEQ ID NO: 1586918 - RNA, 19 nt, Artificial Sequence
  Description of Artificial Sequence: Synthetic oligonucleotide
  Antisense strand to SEQ ID NO: 1586917
ugcuugagaaggcacuucc

SEQ ID NO: 1586919 - RNA, 19 nt, Artificial Sequence
  Description of Artificial Sequence: Synthetic oligonucleotide
  Sense strand starting at position 3752 of SEQ ID NO: 1560250
gccuucgucuccugaguga

SEQ ID NO: 1586920 - RNA, 19 nt, Artificial Sequence
  Description of Artificial Sequence: Synthetic oligonucleotide
  Antisense strand to SEQ ID NO: 1586919
ucacucaggagacgaaggc

SEQ ID NO: 1586921 - RNA, 19 nt, Artificial Sequence
  Description of Artificial Sequence: Synthetic oligonucleotide
  Sense strand starting at position 3840 of SEQ ID NO: 1560250
ggcugacucaugcguagga

SEQ ID NO: 1586922 - RNA, 19 nt, Artificial Sequence
  Description of Artificial Sequence: Synthetic oligonucleotide
  Antisense strand to SEQ ID NO: 1586921
uccuacgcaugagucagcc

SEQ ID NO: 1586923 - RNA, 19 nt, Artificial Sequence
  Description of Artificial Sequence: Synthetic oligonucleotide
  Sense strand starting at position 3842 of SEQ ID NO: 1560250
cugacucaugcguaggaga

SEQ ID NO: 1586924 - RNA, 19 nt, Artificial Sequence
  Description of Artificial Sequence: Synthetic oligonucleotide
  Antisense strand to SEQ ID NO: 1586923
ucuccuacgcaugagucag

SEQ ID NO: 1586925 - RNA, 19 nt, Artificial Sequence
  Description of Artificial Sequence: Synthetic oligonucleotide
  Sense strand starting at position 3844 of SEQ ID NO: 1560250
gacucaugcguaggagagu

SEQ ID NO: 1586926 - RNA, 19 nt, Artificial Sequence
  Description of Artificial Sequence: Synthetic oligonucleotide
  Antisense strand to SEQ ID NO: 1586925
acucuccuacgcaugaguc

SEQ ID NO: 1586927 - RNA, 19 nt, Artificial Sequence
  Description of Artificial Sequence: Synthetic oligonucleotide
  Sense strand starting at position 3958 of SEQ ID NO: 1560250
ccucgcugucccugaggaa

SEQ ID NO: 1586928 - RNA, 19 nt, Artificial Sequence
  Description of Artificial Sequence: Synthetic oligonucleotide
  Antisense strand to SEQ ID NO: 1586927
uuccucagggacagcgagg

SEQ ID NO: 1586929 - RNA, 19 nt, Artificial Sequence
  Description of Artificial Sequence: Synthetic oligonucleotide
  Sense strand starting at position 583 of SEQ ID NO: 1560251
ucucuuauuuaugcacgua

SEQ ID NO: 1586930 - RNA, 19 nt, Artificial Sequence
  Description of Artificial Sequence: Synthetic oligonucleotide
  Antisense strand to SEQ ID NO: 1586929
uacgugcauaaauaagaga

SEQ ID NO: 1586931 - RNA, 19 nt, Artificial Sequence
  Description of Artificial Sequence: Synthetic oligonucleotide
  Sense strand starting at position 586 of SEQ ID NO: 1560251
cuuauuuaugcacguauau

SEQ ID NO: 1586932 - RNA, 19 nt, Artificial Sequence
  Description of Artificial Sequence: Synthetic oligonucleotide
  Antisense strand to SEQ ID NO: 1586931
auauacgugcauaaauaag

SEQ ID NO: 1586933 - RNA, 19 nt, Artificial Sequence
  Description of Artificial Sequence: Synthetic oligonucleotide
  Sense strand starting at position 823 of SEQ ID NO: 1560251
aguacugggcuccaaugau

SEQ ID NO: 1586934 - RNA, 19 nt, Artificial Sequence
  Description of Artificial Sequence: Synthetic oligonucleotide
  Antisense strand to SEQ ID NO: 1586933
aucauuggagcccaguacu

SEQ ID NO: 1586935 - RNA, 19 nt, Artificial Sequence
  Description of Artificial Sequence: Synthetic oligonucleotide
  Sense strand starting at position 1404 of SEQ ID NO: 1560251
gguucugucucauaugcuu

SEQ ID NO: 1586936 - RNA, 19 nt, Artificial Sequence
  Description of Artificial Sequence: Synthetic oligonucleotide
  Antisense strand to SEQ ID NO: 1586935
aagcauaugagacagaacc

SEQ ID NO: 1586937 - RNA, 19 nt, Artificial Sequence
  Description of Artificial Sequence: Synthetic oligonucleotide
  Sense strand starting at position 1715 of SEQ ID NO: 1560251
ggccucauccaauggucuu

SEQ ID NO: 1586938 - RNA, 19 nt, Artificial Sequence
  Description of Artificial Sequence: Synthetic oligonucleotide
  Antisense strand to SEQ ID NO: 1586937
aagaccauuggaugaggcc

SEQ ID NO: 1586939 - RNA, 19 nt, Artificial Sequence
  Description of Artificial Sequence: Synthetic oligonucleotide
  Sense strand starting at position 2146 of SEQ ID NO: 1560251
gagaccaaguccuggaagu

SEQ ID NO: 1586940 - RNA, 19 nt, Artificial Sequence
  Description of Artificial Sequence: Synthetic oligonucleotide
  Antisense strand to SEQ ID NO: 1586939
acuuccaggacuuggucuc

SEQ ID NO: 1586941 - RNA, 19 nt, Artificial Sequence
  Description of Artificial Sequence: Synthetic oligonucleotide
  Sense strand starting at position 2374 of SEQ ID NO: 1560251
cucucacucuaauugugua

SEQ ID NO: 1586942 - RNA, 19 nt, Artificial Sequence
  Description of Artificial Sequence: Synthetic oligonucleotide
  Antisense strand to SEQ ID NO: 1586941
uacacaauuagagugagag

SEQ ID NO: 1586943 - RNA, 19 nt, Artificial Sequence
  Description of Artificial Sequence: Synthetic oligonucleotide
  Sense strand starting at position 2379 of SEQ ID NO: 1560251
acucuaauuguguaucugu

SEQ ID NO: 1586944 - RNA, 19 nt, Artificial Sequence
  Description of Artificial Sequence: Synthetic oligonucleotide
  Antisense strand to SEQ ID NO: 1586943
acagauacacaauuagagu

SEQ ID NO: 1586945 - RNA, 19 nt, Artificial Sequence
  Description of Artificial Sequence: Synthetic oligonucleotide
  Sense strand starting at position 2386 of SEQ ID NO: 1560251
uuguguaucuguuucggaa

SEQ ID NO: 1586946 - RNA, 19 nt, Artificial Sequence
  Description of Artificial Sequence: Synthetic oligonucleotide
  Antisense strand to SEQ ID NO: 1586945
uuccgaaacagauacacaa

SEQ ID NO: 1586947 - RNA, 19 nt, Artificial Sequence
  Description of Artificial Sequence: Synthetic oligonucleotide
  Sense strand starting at position 2390 of SEQ ID NO: 1560251
guaucuguuucggaaccuu

SEQ ID NO: 1586948 - RNA, 19 nt, Artificial Sequence
  Description of Artificial Sequence: Synthetic oligonucleotide
  Antisense strand to SEQ ID NO: 1586947
aagguuccgaaacagauac

SEQ ID NO: 1586949 - RNA, 19 nt, Artificial Sequence
  Description of Artificial Sequence: Synthetic oligonucleotide
  Sense strand starting at position 2455 of SEQ ID NO: 1560251
ucccguugucuccggaaac

SEQ ID NO: 1586950 - RNA, 19 nt, Artificial Sequence
  Description of Artificial Sequence: Synthetic oligonucleotide
  Antisense strand to SEQ ID NO: 1586949
guuuccggagacaacggga

SEQ ID NO: 1586951 - RNA, 19 nt, Artificial Sequence
  Description of Artificial Sequence: Synthetic oligonucleotide
  Sense strand starting at position 2690 of SEQ ID NO: 1560251
gcgccuguagaugaggaau

SEQ ID NO: 1586952 - RNA, 19 nt, Artificial Sequence
  Description of Artificial Sequence: Synthetic oligonucleotide
  Antisense strand to SEQ ID NO: 1586951
auuccucaucuacaggcgc

SEQ ID NO: 1586953 - RNA, 19 nt, Artificial Sequence
  Description of Artificial Sequence: Synthetic oligonucleotide
  Sense strand starting at position 2692 of SEQ ID NO: 1560251
gccuguagaugaggaaucu

SEQ ID NO: 1586954 - RNA, 19 nt, Artificial Sequence
  Description of Artificial Sequence: Synthetic oligonucleotide
  Antisense strand to SEQ ID NO: 1586953
agauuccucaucuacaggc

SEQ ID NO: 1586955 - RNA, 19 nt, Artificial Sequence
  Description of Artificial Sequence: Synthetic oligonucleotide
  Sense strand starting at position 2780 of SEQ ID NO: 1560251
aggaaaccaggucgucaua

SEQ ID NO: 1586956 - RNA, 19 nt, Artificial Sequence
  Description of Artificial Sequence: Synthetic oligonucleotide
  Antisense strand to SEQ ID NO: 1586955
uaugacgaccugguuuccu

SEQ ID NO: 1586957 - RNA, 19 nt, Artificial Sequence
  Description of Artificial Sequence: Synthetic oligonucleotide
  Sense strand starting at position 2792 of SEQ ID NO: 1560251
cgucauaggaaucagucaa

SEQ ID NO: 1586958 - RNA, 19 nt, Artificial Sequence
  Description of Artificial Sequence: Synthetic oligonucleotide
  Antisense strand to SEQ ID NO: 1586957
uugacugauuccuaugacg

SEQ ID NO: 1586959 - RNA, 19 nt, Artificial Sequence
  Description of Artificial Sequence: Synthetic oligonucleotide
  Sense strand starting at position 2920 of SEQ ID NO: 1560251
aguaaagacucuuuguauu

SEQ ID NO: 1586960 - RNA, 19 nt, Artificial Sequence
  Description of Artificial Sequence: Synthetic oligonucleotide
  Antisense strand to SEQ ID NO: 1586959
aauacaaagagucuuuacu

SEQ ID NO: 1586961 - RNA, 19 nt, Artificial Sequence
  Description of Artificial Sequence: Synthetic oligonucleotide
  Sense strand starting at position 2926 of SEQ ID NO: 1560251
gacucuuuguauucguauc

SEQ ID NO: 1586962 - RNA, 19 nt, Artificial Sequence
  Description of Artificial Sequence: Synthetic oligonucleotide
  Antisense strand to SEQ ID NO: 1586961
gauacgaauacaaagaguc

SEQ ID NO: 1586963 - RNA, 19 nt, Artificial Sequence
  Description of Artificial Sequence: Synthetic oligonucleotide
  Sense strand starting at position 3471 of SEQ ID NO: 1560251
gggaguugcuucuuaggag

SEQ ID NO: 1586964 - RNA, 19 nt, Artificial Sequence
  Description of Artificial Sequence: Synthetic oligonucleotide
  Antisense strand to SEQ ID NO: 1586963
cuccuaagaagcaacuccc

SEQ ID NO: 1586965 - RNA, 19 nt, Artificial Sequence
  Description of Artificial Sequence: Synthetic oligonucleotide
  Sense strand starting at position 3475 of SEQ ID NO: 1560251
guugcuucuuaggagguga

SEQ ID NO: 1586966 - RNA, 19 nt, Artificial Sequence
  Description of Artificial Sequence: Synthetic oligonucleotide
  Antisense strand to SEQ ID NO: 1586965
ucaccuccuaagaagcaac

SEQ ID NO: 1586967 - RNA, 19 nt, Artificial Sequence
  Description of Artificial Sequence: Synthetic oligonucleotide
  Sense strand starting at position 3590 of SEQ ID NO: 1560251
ggaacucuggccggaguua

SEQ ID NO: 1586968 - RNA, 19 nt, Artificial Sequence
  Description of Artificial Sequence: Synthetic oligonucleotide
  Antisense strand to SEQ ID NO: 1586967
uaacuccggccagaguucc

SEQ ID NO: 1586969 - RNA, 19 nt, Artificial Sequence
  Description of Artificial Sequence: Synthetic oligonucleotide
  Sense strand starting at position 3700 of SEQ ID NO: 1560251
cggugucacuuuggaguga

SEQ ID NO: 1586970 - RNA, 19 nt, Artificial Sequence
  Description of Artificial Sequence: Synthetic oligonucleotide
  Antisense strand to SEQ ID NO: 1586969
ucacuccaaagugacaccg

SEQ ID NO: 1586971 - RNA, 19 nt, Artificial Sequence
  Description of Artificial Sequence: Synthetic oligonucleotide
  Sense strand starting at position 3704 of SEQ ID NO: 1560251
gucacuuuggagugagaag

SEQ ID NO: 1586972 - RNA, 19 nt, Artificial Sequence
  Description of Artificial Sequence: Synthetic oligonucleotide
  Antisense strand to SEQ ID NO: 1586971
cuucucacuccaaagugac

SEQ ID NO: 1586973 - RNA, 19 nt, Artificial Sequence
  Description of Artificial Sequence: Synthetic oligonucleotide
  Sense strand starting at position 3750 of SEQ ID NO: 1560251
ugguccuucuuacggagaa

SEQ ID NO: 1586974 - RNA, 19 nt, Artificial Sequence
  Description of Artificial Sequence: Synthetic oligonucleotide
  Antisense strand to SEQ ID NO: 1586973
uucuccguaagaaggacca

SEQ ID NO: 1586975 - RNA, 19 nt, Artificial Sequence
  Description of Artificial Sequence: Synthetic oligonucleotide
  Sense strand starting at position 3751 of SEQ ID NO: 1560251
gguccuucuuacggagaag

SEQ ID NO: 1586976 - RNA, 19 nt, Artificial Sequence
  Description of Artificial Sequence: Synthetic oligonucleotide
  Antisense strand to SEQ ID NO: 1586975
cuucuccguaagaaggacc

SEQ ID NO: 1586977 - RNA, 19 nt, Artificial Sequence
  Description of Artificial Sequence: Synthetic oligonucleotide
  Sense strand starting at position 528 of SEQ ID NO: 1560252
ucucuuauuuaugcacgua

SEQ ID NO: 1586978 - RNA, 19 nt, Artificial Sequence
  Description of Artificial Sequence: Synthetic oligonucleotide
  Antisense strand to SEQ ID NO: 1586977
uacgugcauaaauaagaga

SEQ ID NO: 1586979 - RNA, 19 nt, Artificial Sequence
  Description of Artificial Sequence: Synthetic oligonucleotide
  Sense strand starting at position 531 of SEQ ID NO: 1560252
cuuauuuaugcacguauau

SEQ ID NO: 1586980 - RNA, 19 nt, Artificial Sequence
  Description of Artificial Sequence: Synthetic oligonucleotide
  Antisense strand to SEQ ID NO: 1586979
auauacgugcauaaauaag

SEQ ID NO: 1586981 - RNA, 19 nt, Artificial Sequence
  Description of Artificial Sequence: Synthetic oligonucleotide
  Sense strand starting at position 768 of SEQ ID NO: 1560252
aguacugggcuccaaugau

SEQ ID NO: 1586982 - RNA, 19 nt, Artificial Sequence
  Description of Artificial Sequence: Synthetic oligonucleotide
  Antisense strand to SEQ ID NO: 1586981
aucauuggagcccaguacu

SEQ ID NO: 1586983 - RNA, 19 nt, Artificial Sequence
  Description of Artificial Sequence: Synthetic oligonucleotide
  Sense strand starting at position 1349 of SEQ ID NO: 1560252
gguucugucucauaugcuu

SEQ ID NO: 1586984 - RNA, 19 nt, Artificial Sequence
  Description of Artificial Sequence: Synthetic oligonucleotide
  Antisense strand to SEQ ID NO: 1586983
aagcauaugagacagaacc

SEQ ID NO: 1586985 - RNA, 19 nt, Artificial Sequence
  Description of Artificial Sequence: Synthetic oligonucleotide
  Sense strand starting at position 1660 of SEQ ID NO: 1560252
ggccucauccaauggucuu

SEQ ID NO: 1586986 - RNA, 19 nt, Artificial Sequence
  Description of Artificial Sequence: Synthetic oligonucleotide
  Antisense strand to SEQ ID NO: 1586985
aagaccauuggaugaggcc

SEQ ID NO: 1586987 - RNA, 19 nt, Artificial Sequence
  Description of Artificial Sequence: Synthetic oligonucleotide
  Sense strand starting at position 2091 of SEQ ID NO: 1560252
gagaccaaguccuggaagu

SEQ ID NO: 1586988 - RNA, 19 nt, Artificial Sequence
  Description of Artificial Sequence: Synthetic oligonucleotide
  Antisense strand to SEQ ID NO: 1586987
acuuccaggacuuggucuc

SEQ ID NO: 1586989 - RNA, 19 nt, Artificial Sequence
  Description of Artificial Sequence: Synthetic oligonucleotide
  Sense strand starting at position 2319 of SEQ ID NO: 1560252
cucucacucuaauugugua

SEQ ID NO: 1586990 - RNA, 19 nt, Artificial Sequence
  Description of Artificial Sequence: Synthetic oligonucleotide
  Antisense strand to SEQ ID NO: 1586989
uacacaauuagagugagag

SEQ ID NO: 1586991 - RNA, 19 nt, Artificial Sequence
  Description of Artificial Sequence: Synthetic oligonucleotide
  Sense strand starting at position 2324 of SEQ ID NO: 1560252
acucuaauuguguaucugu

SEQ ID NO: 1586992 - RNA, 19 nt, Artificial Sequence
  Description of Artificial Sequence: Synthetic oligonucleotide
  Antisense strand to SEQ ID NO: 1586991
acagauacacaauuagagu

SEQ ID NO: 1586993 - RNA, 19 nt, Artificial Sequence
  Description of Artificial Sequence: Synthetic oligonucleotide
  Sense strand starting at position 2331 of SEQ ID NO: 1560252
uuguguaucuguuucggaa

SEQ ID NO: 1586994 - RNA, 19 nt, Artificial Sequence
  Description of Artificial Sequence: Synthetic oligonucleotide
  Antisense strand to SEQ ID NO: 1586993
uuccgaaacagauacacaa

SEQ ID NO: 1586995 - RNA, 19 nt, Artificial Sequence
  Description of Artificial Sequence: Synthetic oligonucleotide
  Sense strand starting at position 2335 of SEQ ID NO: 1560252
guaucuguuucggaaccuu

SEQ ID NO: 1586996 - RNA, 19 nt, Artificial Sequence
  Description of Artificial Sequence: Synthetic oligonucleotide
  Antisense strand to SEQ ID NO: 1586995
aagguuccgaaacagauac

SEQ ID NO: 1586997 - RNA, 19 nt, Artificial Sequence
  Description of Artificial Sequence: Synthetic oligonucleotide
  Sense strand starting at position 2400 of SEQ ID NO: 1560252
ucccguugucuccggaaac

SEQ ID NO: 1586998 - RNA, 19 nt, Artificial Sequence
  Description of Artificial Sequence: Synthetic oligonucleotide
  Antisense strand to SEQ ID NO: 1586997
guuuccggagacaacggga

SEQ ID NO: 1586999 - RNA, 19 nt, Artificial Sequence
  Description of Artificial Sequence: Synthetic oligonucleotide
  Sense strand starting at position 2635 of SEQ ID NO: 1560252
gcgccuguagaugaggaau

SEQ ID NO: 1587000 - RNA, 19 nt, Artificial Sequence
  Description of Artificial Sequence: Synthetic oligonucleotide
  Antisense strand to SEQ ID NO: 1586999
auuccucaucuacaggcgc

SEQ ID NO: 1587001 - RNA, 19 nt, Artificial Sequence
  Description of Artificial Sequence: Synthetic oligonucleotide
  Sense strand starting at position 2637 of SEQ ID NO: 1560252
gccuguagaugaggaaucu

SEQ ID NO: 1587002 - RNA, 19 nt, Artificial Sequence
  Description of Artificial Sequence: Synthetic oligonucleotide
  Antisense strand to SEQ ID NO: 1587001
agauuccucaucuacaggc

SEQ ID NO: 1587003 - RNA, 19 nt, Artificial Sequence
  Description of Artificial Sequence: Synthetic oligonucleotide
  Sense strand starting at position 2725 of SEQ ID NO: 1560252
aggaaaccaggucgucaua

SEQ ID NO: 1587004 - RNA, 19 nt, Artificial Sequence
  Description of Artificial Sequence: Synthetic oligonucleotide
  Antisense strand to SEQ ID NO: 1587003
uaugacgaccugguuuccu

SEQ ID NO: 1587005 - RNA, 19 nt, Artificial Sequence
  Description of Artificial Sequence: Synthetic oligonucleotide
  Sense strand starting at position 2737 of SEQ ID NO: 1560252
cgucauaggaaucagucaa

SEQ ID NO: 1587006 - RNA, 19 nt, Artificial Sequence
  Description of Artificial Sequence: Synthetic oligonucleotide
  Antisense strand to SEQ ID NO: 1587005
uugacugauuccuaugacg

SEQ ID NO: 1587007 - RNA, 19 nt, Artificial Sequence
  Description of Artificial Sequence: Synthetic oligonucleotide
  Sense strand starting at position 2865 of SEQ ID NO: 1560252
aguaaagacucuuuguauu

SEQ ID NO: 1587008 - RNA, 19 nt, Artificial Sequence
  Description of Artificial Sequence: Synthetic oligonucleotide
  Antisense strand to SEQ ID NO: 1587007
aauacaaagagucuuuacu

SEQ ID NO: 1587009 - RNA, 19 nt, Artificial Sequence
  Description of Artificial Sequence: Synthetic oligonucleotide
  Sense strand starting at position 2871 of SEQ ID NO: 1560252
gacucuuuguauucguauc

SEQ ID NO: 1587010 - RNA, 19 nt, Artificial Sequence
  Description of Artificial Sequence: Synthetic oligonucleotide
  Antisense strand to SEQ ID NO: 1587009
gauacgaauacaaagaguc

SEQ ID NO: 1587011 - RNA, 19 nt, Artificial Sequence
  Description of Artificial Sequence: Synthetic oligonucleotide
  Sense strand starting at position 3416 of SEQ ID NO: 1560252
gggaguugcuucuuaggag

SEQ ID NO: 1587012 - RNA, 19 nt, Artificial Sequence
  Description of Artificial Sequence: Synthetic oligonucleotide
  Antisense strand to SEQ ID NO: 1587011
cuccuaagaagcaacuccc

SEQ ID NO: 1587013 - RNA, 19 nt, Artificial Sequence
  Description of Artificial Sequence: Synthetic oligonucleotide
  Sense strand starting at position 3420 of SEQ ID NO: 1560252
guugcuucuuaggagguga

SEQ ID NO: 1587014 - RNA, 19 nt, Artificial Sequence
  Description of Artificial Sequence: Synthetic oligonucleotide
  Antisense strand to SEQ ID NO: 1587013
ucaccuccuaagaagcaac

SEQ ID NO: 1587015 - RNA, 19 nt, Artificial Sequence
  Description of Artificial Sequence: Synthetic oligonucleotide
  Sense strand starting at position 3535 of SEQ ID NO: 1560252
ggaacucuggccggaguua

SEQ ID NO: 1587016 - RNA, 19 nt, Artificial Sequence
  Description of Artificial Sequence: Synthetic oligonucleotide
  Antisense strand to SEQ ID NO: 1587015
uaacuccggccagaguucc

SEQ ID NO: 1587017 - RNA, 19 nt, Artificial Sequence
  Description of Artificial Sequence: Synthetic oligonucleotide
  Sense strand starting at position 3645 of SEQ ID NO: 1560252
cggugucacuuuggaguga

SEQ ID NO: 1587018 - RNA, 19 nt, Artificial Sequence
  Description of Artificial Sequence: Synthetic oligonucleotide
  Antisense strand to SEQ ID NO: 1587017
ucacuccaaagugacaccg

SEQ ID NO: 1587019 - RNA, 19 nt, Artificial Sequence
  Description of Artificial Sequence: Synthetic oligonucleotide
  Sense strand starting at position 3649 of SEQ ID NO: 1560252
gucacuuuggagugagaag

SEQ ID NO: 1587020 - RNA, 19 nt, Artificial Sequence
  Description of Artificial Sequence: Synthetic oligonucleotide
  Antisense strand to SEQ ID NO: 1587019
cuucucacuccaaagugac

SEQ ID NO: 1587021 - RNA, 19 nt, Artificial Sequence
  Description of Artificial Sequence: Synthetic oligonucleotide
  Sense strand starting at position 3695 of SEQ ID NO: 1560252
ugguccuucuuacggagaa

SEQ ID NO: 1587022 - RNA, 19 nt, Artificial Sequence
  Description of Artificial Sequence: Synthetic oligonucleotide
  Antisense strand to SEQ ID NO: 1587021
uucuccguaagaaggacca

SEQ ID NO: 1587023 - RNA, 19 nt, Artificial Sequence
  Description of Artificial Sequence: Synthetic oligonucleotide
  Sense strand starting at position 3696 of SEQ ID NO: 1560252
gguccuucuuacggagaag

SEQ ID NO: 1587024 - RNA, 19 nt, Artificial Sequence
  Description of Artificial Sequence: Synthetic oligonucleotide
  Antisense strand to SEQ ID NO: 1587023
cuucuccguaagaaggacc

SEQ ID NO: 1587025 - RNA, 19 nt, Artificial Sequence
  Description of Artificial Sequence: Synthetic oligonucleotide
  Sense strand starting at position 350 of SEQ ID NO: 1560253
uaggguaaguacucaauga

SEQ ID NO: 1587026 - RNA, 19 nt, Artificial Sequence
  Description of Artificial Sequence: Synthetic oligonucleotide
  Antisense strand to SEQ ID NO: 1587025
ucauugaguacuuacccua

SEQ ID NO: 1587027 - RNA, 19 nt, Artificial Sequence
  Description of Artificial Sequence: Synthetic oligonucleotide
  Sense strand starting at position 460 of SEQ ID NO: 1560253
gggaaugacaucuguggcu

SEQ ID NO: 1587028 - RNA, 19 nt, Artificial Sequence
  Description of Artificial Sequence: Synthetic oligonucleotide
  Antisense strand to SEQ ID NO: 1587027
agccacagaugucauuccc

SEQ ID NO: 1587029 - RNA, 19 nt, Artificial Sequence
  Description of Artificial Sequence: Synthetic oligonucleotide
  Sense strand starting at position 462 of SEQ ID NO: 1560253
gaaugacaucuguggcuuu

SEQ ID NO: 1587030 - RNA, 19 nt, Artificial Sequence
  Description of Artificial Sequence: Synthetic oligonucleotide
  Antisense strand to SEQ ID NO: 1587029
aaagccacagaugucauuc

SEQ ID NO: 1587031 - RNA, 19 nt, Artificial Sequence
  Description of Artificial Sequence: Synthetic oligonucleotide
  Sense strand starting at position 495 of SEQ ID NO: 1560253
gggagaaucucacuuuguc

SEQ ID NO: 1587032 - RNA, 19 nt, Artificial Sequence
  Description of Artificial Sequence: Synthetic oligonucleotide
  Antisense strand to SEQ ID NO: 1587031
gacaaagugagauucuccc

SEQ ID NO: 1587033 - RNA, 19 nt, Artificial Sequence
  Description of Artificial Sequence: Synthetic oligonucleotide
  Sense strand starting at position 677 of SEQ ID NO: 1560253
uacugagacuggucucaaa

SEQ ID NO: 1587034 - RNA, 19 nt, Artificial Sequence
  Description of Artificial Sequence: Synthetic oligonucleotide
  Antisense strand to SEQ ID NO: 1587033
uuugagaccagucucagua

SEQ ID NO: 1587035 - RNA, 19 nt, Artificial Sequence
  Description of Artificial Sequence: Synthetic oligonucleotide
  Sense strand starting at position 741 of SEQ ID NO: 1560253
ggaauuacagugugagcga

SEQ ID NO: 1587036 - RNA, 19 nt, Artificial Sequence
  Description of Artificial Sequence: Synthetic oligonucleotide
  Antisense strand to SEQ ID NO: 1587035
ucgcucacacuguaauucc

SEQ ID NO: 1587037 - RNA, 19 nt, Artificial Sequence
  Description of Artificial Sequence: Synthetic oligonucleotide
  Sense strand starting at position 771 of SEQ ID NO: 1560253
uugcuuuauugagcacuua

SEQ ID NO: 1587038 - RNA, 19 nt, Artificial Sequence
  Description of Artificial Sequence: Synthetic oligonucleotide
  Antisense strand to SEQ ID NO: 1587037
uaagugcucaauaaagcaa

SEQ ID NO: 1587039 - RNA, 19 nt, Artificial Sequence
  Description of Artificial Sequence: Synthetic oligonucleotide
  Sense strand starting at position 782 of SEQ ID NO: 1560253
agcacuuacuacgugguaa

SEQ ID NO: 1587040 - RNA, 19 nt, Artificial Sequence
  Description of Artificial Sequence: Synthetic oligonucleotide
  Antisense strand to SEQ ID NO: 1587039
uuaccacguaguaagugcu

SEQ ID NO: 1587041 - RNA, 19 nt, Artificial Sequence
  Description of Artificial Sequence: Synthetic oligonucleotide
  Sense strand starting at position 783 of SEQ ID NO: 1560253
gcacuuacuacgugguaag

SEQ ID NO: 1587042 - RNA, 19 nt, Artificial Sequence
  Description of Artificial Sequence: Synthetic oligonucleotide
  Antisense strand to SEQ ID NO: 1587041
cuuaccacguaguaagugc

SEQ ID NO: 1587043 - RNA, 19 nt, Artificial Sequence
  Description of Artificial Sequence: Synthetic oligonucleotide
  Sense strand starting at position 926 of SEQ ID NO: 1560253
agggucaagcauugcaaua

SEQ ID NO: 1587044 - RNA, 19 nt, Artificial Sequence
  Description of Artificial Sequence: Synthetic oligonucleotide
  Antisense strand to SEQ ID NO: 1587043
uauugcaaugcuugacccu

SEQ ID NO: 1587045 - RNA, 19 nt, Artificial Sequence
  Description of Artificial Sequence: Synthetic oligonucleotide
  Sense strand starting at position 1156 of SEQ ID NO: 1560253
gagguaggguuccuugagu

SEQ ID NO: 1587046 - RNA, 19 nt, Artificial Sequence
  Description of Artificial Sequence: Synthetic oligonucleotide
  Antisense strand to SEQ ID NO: 1587045
acucaaggaacccuaccuc

SEQ ID NO: 1587047 - RNA, 19 nt, Artificial Sequence
  Description of Artificial Sequence: Synthetic oligonucleotide
  Sense strand starting at position 1164 of SEQ ID NO: 1560253
guuccuugaguuuaggauu

SEQ ID NO: 1587048 - RNA, 19 nt, Artificial Sequence
  Description of Artificial Sequence: Synthetic oligonucleotide
  Antisense strand to SEQ ID NO: 1587047
aauccuaaacucaaggaac

SEQ ID NO: 1587049 - RNA, 19 nt, Artificial Sequence
  Description of Artificial Sequence: Synthetic oligonucleotide
  Sense strand starting at position 1182 of SEQ ID NO: 1560253
uucagagcuuggguuugaa

SEQ ID NO: 1587050 - RNA, 19 nt, Artificial Sequence
  Description of Artificial Sequence: Synthetic oligonucleotide
  Antisense strand to SEQ ID NO: 1587049
uucaaacccaagcucugaa

SEQ ID NO: 1587051 - RNA, 19 nt, Artificial Sequence
  Description of Artificial Sequence: Synthetic oligonucleotide
  Sense strand starting at position 1185 of SEQ ID NO: 1560253
agagcuuggguuugaaauu

SEQ ID NO: 1587052 - RNA, 19 nt, Artificial Sequence
  Description of Artificial Sequence: Synthetic oligonucleotide
  Antisense strand to SEQ ID NO: 1587051
aauuucaaacccaagcucu

SEQ ID NO: 1587053 - RNA, 19 nt, Artificial Sequence
  Description of Artificial Sequence: Synthetic oligonucleotide
  Sense strand starting at position 1196 of SEQ ID NO: 1560253
uugaaauucugggaauuug

SEQ ID NO: 1587054 - RNA, 19 nt, Artificial Sequence
  Description of Artificial Sequence: Synthetic oligonucleotide
  Antisense strand to SEQ ID NO: 1587053
caaauucccagaauuucaa

SEQ ID NO: 1587055 - RNA, 19 nt, Artificial Sequence
  Description of Artificial Sequence: Synthetic oligonucleotide
  Sense strand starting at position 1270 of SEQ ID NO: 1560253
aguuuagaggucugugaau

SEQ ID NO: 1587056 - RNA, 19 nt, Artificial Sequence
  Description of Artificial Sequence: Synthetic oligonucleotide
  Antisense strand to SEQ ID NO: 1587055
auucacagaccucuaaacu

SEQ ID NO: 1587057 - RNA, 19 nt, Artificial Sequence
  Description of Artificial Sequence: Synthetic oligonucleotide
  Sense strand starting at position 1272 of SEQ ID NO: 1560253
uuuagaggucugugaaugu

SEQ ID NO: 1587058 - RNA, 19 nt, Artificial Sequence
  Description of Artificial Sequence: Synthetic oligonucleotide
  Antisense strand to SEQ ID NO: 1587057
acauucacagaccucuaaa

SEQ ID NO: 1587059 - RNA, 19 nt, Artificial Sequence
  Description of Artificial Sequence: Synthetic oligonucleotide
  Sense strand starting at position 1305 of SEQ ID NO: 1560253
uagaguuacuggucuggga

SEQ ID NO: 1587060 - RNA, 19 nt, Artificial Sequence
  Description of Artificial Sequence: Synthetic oligonucleotide
  Antisense strand to SEQ ID NO: 1587059
ucccagaccaguaacucua

SEQ ID NO: 1587061 - RNA, 19 nt, Artificial Sequence
  Description of Artificial Sequence: Synthetic oligonucleotide
  Sense strand starting at position 1307 of SEQ ID NO: 1560253
gaguuacuggucugggaau

SEQ ID NO: 1587062 - RNA, 19 nt, Artificial Sequence
  Description of Artificial Sequence: Synthetic oligonucleotide
  Antisense strand to SEQ ID NO: 1587061
auucccagaccaguaacuc

SEQ ID NO: 1587063 - RNA, 19 nt, Artificial Sequence
  Description of Artificial Sequence: Synthetic oligonucleotide
  Sense strand starting at position 1992 of SEQ ID NO: 1560253
ccuuauaucugagagaaug

SEQ ID NO: 1587064 - RNA, 19 nt, Artificial Sequence
  Description of Artificial Sequence: Synthetic oligonucleotide
  Antisense strand to SEQ ID NO: 1587063
cauucucucagauauaagg

SEQ ID NO: 1587065 - RNA, 19 nt, Artificial Sequence
  Description of Artificial Sequence: Synthetic oligonucleotide
  Sense strand starting at position 2104 of SEQ ID NO: 1560253
gcgagauuccgucuguggu

SEQ ID NO: 1587066 - RNA, 19 nt, Artificial Sequence
  Description of Artificial Sequence: Synthetic oligonucleotide
  Antisense strand to SEQ ID NO: 1587065
accacagacggaaucucgc

SEQ ID NO: 1587067 - RNA, 19 nt, Artificial Sequence
  Description of Artificial Sequence: Synthetic oligonucleotide
  Sense strand starting at position 2146 of SEQ ID NO: 1560253
gugggugaucccgcgacuu

SEQ ID NO: 1587068 - RNA, 19 nt, Artificial Sequence
  Description of Artificial Sequence: Synthetic oligonucleotide
  Antisense strand to SEQ ID NO: 1587067
aagucgcgggaucacccac

SEQ ID NO: 1587069 - RNA, 19 nt, Artificial Sequence
  Description of Artificial Sequence: Synthetic oligonucleotide
  Sense strand starting at position 2276 of SEQ ID NO: 1560253
augacuuugucauugugag

SEQ ID NO: 1587070 - RNA, 19 nt, Artificial Sequence
  Description of Artificial Sequence: Synthetic oligonucleotide
  Antisense strand to SEQ ID NO: 1587069
cucacaaugacaaagucau

SEQ ID NO: 1587071 - RNA, 19 nt, Artificial Sequence
  Description of Artificial Sequence: Synthetic oligonucleotide
  Sense strand starting at position 2277 of SEQ ID NO: 1560253
ugacuuugucauugugagu

SEQ ID NO: 1587072 - RNA, 19 nt, Artificial Sequence
  Description of Artificial Sequence: Synthetic oligonucleotide
  Antisense strand to SEQ ID NO: 1587071
acucacaaugacaaaguca

SEQ ID NO: 1587073 - RNA, 19 nt, Artificial Sequence
  Description of Artificial Sequence: Synthetic oligonucleotide
  Sense strand starting at position 2342 of SEQ ID NO: 1560253
uugacacauuuaugagguu

SEQ ID NO: 1587074 - RNA, 19 nt, Artificial Sequence
  Description of Artificial Sequence: Synthetic oligonucleotide
  Antisense strand to SEQ ID NO: 1587073
aaccucauaaaugugucaa

SEQ ID NO: 1587075 - RNA, 19 nt, Artificial Sequence
  Description of Artificial Sequence: Synthetic oligonucleotide
  Sense strand starting at position 2345 of SEQ ID NO: 1560253
acacauuuaugagguugua

SEQ ID NO: 1587076 - RNA, 19 nt, Artificial Sequence
  Description of Artificial Sequence: Synthetic oligonucleotide
  Antisense strand to SEQ ID NO: 1587075
uacaaccucauaaaugugu

SEQ ID NO: 1587077 - RNA, 19 nt, Artificial Sequence
  Description of Artificial Sequence: Synthetic oligonucleotide
  Sense strand starting at position 2492 of SEQ ID NO: 1560253
ccuguauaggcguauaaac

SEQ ID NO: 1587078 - RNA, 19 nt, Artificial Sequence
  Description of Artificial Sequence: Synthetic oligonucleotide
  Antisense strand to SEQ ID NO: 1587077
guuuauacgccuauacagg

SEQ ID NO: 1587079 - RNA, 19 nt, Artificial Sequence
  Description of Artificial Sequence: Synthetic oligonucleotide
  Sense strand starting at position 2500 of SEQ ID NO: 1560253
ggcguauaaaccugugacu

SEQ ID NO: 1587080 - RNA, 19 nt, Artificial Sequence
  Description of Artificial Sequence: Synthetic oligonucleotide
  Antisense strand to SEQ ID NO: 1587079
agucacagguuuauacgcc

SEQ ID NO: 1587081 - RNA, 19 nt, Artificial Sequence
  Description of Artificial Sequence: Synthetic oligonucleotide
  Sense strand starting at position 2502 of SEQ ID NO: 1560253
cguauaaaccugugacuuu

SEQ ID NO: 1587082 - RNA, 19 nt, Artificial Sequence
  Description of Artificial Sequence: Synthetic oligonucleotide
  Antisense strand to SEQ ID NO: 1587081
aaagucacagguuuauacg

SEQ ID NO: 1587083 - RNA, 19 nt, Artificial Sequence
  Description of Artificial Sequence: Synthetic oligonucleotide
  Sense strand starting at position 2581 of SEQ ID NO: 1560253
ugugaaugagacuggguuu

SEQ ID NO: 1587084 - RNA, 19 nt, Artificial Sequence
  Description of Artificial Sequence: Synthetic oligonucleotide
  Antisense strand to SEQ ID NO: 1587083
aaacccagucucauucaca

SEQ ID NO: 1587085 - RNA, 19 nt, Artificial Sequence
  Description of Artificial Sequence: Synthetic oligonucleotide
  Sense strand starting at position 2596 of SEQ ID NO: 1560253
guuugagagguccacggau

SEQ ID NO: 1587086 - RNA, 19 nt, Artificial Sequence
  Description of Artificial Sequence: Synthetic oligonucleotide
  Antisense strand to SEQ ID NO: 1587085
auccguggaccucucaaac

SEQ ID NO: 1587087 - RNA, 19 nt, Artificial Sequence
  Description of Artificial Sequence: Synthetic oligonucleotide
  Sense strand starting at position 2623 of SEQ ID NO: 1560253
gugugaauacgaugaagau

SEQ ID NO: 1587088 - RNA, 19 nt, Artificial Sequence
  Description of Artificial Sequence: Synthetic oligonucleotide
  Antisense strand to SEQ ID NO: 1587087
aucuucaucguauucacac

SEQ ID NO: 1587089 - RNA, 19 nt, Artificial Sequence
  Description of Artificial Sequence: Synthetic oligonucleotide
  Sense strand starting at position 2633 of SEQ ID NO: 1560253
gaugaagauccggaguucu

SEQ ID NO: 1587090 - RNA, 19 nt, Artificial Sequence
  Description of Artificial Sequence: Synthetic oligonucleotide
  Antisense strand to SEQ ID NO: 1587089
agaacuccggaucuucauc

SEQ ID NO: 1587091 - RNA, 19 nt, Artificial Sequence
  Description of Artificial Sequence: Synthetic oligonucleotide
  Sense strand starting at position 2641 of SEQ ID NO: 1560253
uccggaguucuuuguagac

SEQ ID NO: 1587092 - RNA, 19 nt, Artificial Sequence
  Description of Artificial Sequence: Synthetic oligonucleotide
  Antisense strand to SEQ ID NO: 1587091
gucuacaaagaacuccgga

SEQ ID NO: 1587093 - RNA, 19 nt, Artificial Sequence
  Description of Artificial Sequence: Synthetic oligonucleotide
  Sense strand starting at position 2871 of SEQ ID NO: 1560253
cucccagcuguauguaaau

SEQ ID NO: 1587094 - RNA, 19 nt, Artificial Sequence
  Description of Artificial Sequence: Synthetic oligonucleotide
  Antisense strand to SEQ ID NO: 1587093
auuuacauacagcugggag

SEQ ID NO: 1587095 - RNA, 19 nt, Artificial Sequence
  Description of Artificial Sequence: Synthetic oligonucleotide
  Sense strand starting at position 2943 of SEQ ID NO: 1560253
gcccguuuggccuccggaa

SEQ ID NO: 1587096 - RNA, 19 nt, Artificial Sequence
  Description of Artificial Sequence: Synthetic oligonucleotide
  Antisense strand to SEQ ID NO: 1587095
uuccggaggccaaacgggc

SEQ ID NO: 1587097 - RNA, 19 nt, Artificial Sequence
  Description of Artificial Sequence: Synthetic oligonucleotide
  Sense strand starting at position 2971 of SEQ ID NO: 1560253
agcaaaugggcaggaaauu

SEQ ID NO: 1587098 - RNA, 19 nt, Artificial Sequence
  Description of Artificial Sequence: Synthetic oligonucleotide
  Antisense strand to SEQ ID NO: 1587097
aauuuccugcccauuugcu

SEQ ID NO: 1587099 - RNA, 19 nt, Artificial Sequence
  Description of Artificial Sequence: Synthetic oligonucleotide
  Sense strand starting at position 3064 of SEQ ID NO: 1560253
acccuuuaguauuccagga

SEQ ID NO: 1587100 - RNA, 19 nt, Artificial Sequence
  Description of Artificial Sequence: Synthetic oligonucleotide
  Antisense strand to SEQ ID NO: 1587099
uccuggaauacuaaagggu

SEQ ID NO: 1587101 - RNA, 19 nt, Artificial Sequence
  Description of Artificial Sequence: Synthetic oligonucleotide
  Sense strand starting at position 3069 of SEQ ID NO: 1560253
uuaguauuccaggaccuca

SEQ ID NO: 1587102 - RNA, 19 nt, Artificial Sequence
  Description of Artificial Sequence: Synthetic oligonucleotide
  Antisense strand to SEQ ID NO: 1587101
ugagguccuggaauacuaa

SEQ ID NO: 1587103 - RNA, 19 nt, Artificial Sequence
  Description of Artificial Sequence: Synthetic oligonucleotide
  Sense strand starting at position 3215 of SEQ ID NO: 1560253
gugcuuagaggcuaauaau

SEQ ID NO: 1587104 - RNA, 19 nt, Artificial Sequence
  Description of Artificial Sequence: Synthetic oligonucleotide
  Antisense strand to SEQ ID NO: 1587103
auuauuagccucuaagcac

SEQ ID NO: 1587105 - RNA, 19 nt, Artificial Sequence
  Description of Artificial Sequence: Synthetic oligonucleotide
  Sense strand starting at position 56 of SEQ ID NO: 1560254
ggucuugacugaguacuuc

SEQ ID NO: 1587106 - RNA, 19 nt, Artificial Sequence
  Description of Artificial Sequence: Synthetic oligonucleotide
  Antisense strand to SEQ ID NO: 1587105
gaaguacucagucaagacc

SEQ ID NO: 1587107 - RNA, 19 nt, Artificial Sequence
  Description of Artificial Sequence: Synthetic oligonucleotide
  Sense strand starting at position 76 of SEQ ID NO: 1560254
caccauaggcagugggaua

SEQ ID NO: 1587108 - RNA, 19 nt, Artificial Sequence
  Description of Artificial Sequence: Synthetic oligonucleotide
  Antisense strand to SEQ ID NO: 1587107
uaucccacugccuauggug

SEQ ID NO: 1587109 - RNA, 19 nt, Artificial Sequence
  Description of Artificial Sequence: Synthetic oligonucleotide
  Sense strand starting at position 109 of SEQ ID NO: 1560254
aauuguaguucuguggaag

SEQ ID NO: 1587110 - RNA, 19 nt, Artificial Sequence
  Description of Artificial Sequence: Synthetic oligonucleotide
  Antisense strand to SEQ ID NO: 1587109
cuuccacagaacuacaauu

SEQ ID NO: 1587111 - RNA, 19 nt, Artificial Sequence
  Description of Artificial Sequence: Synthetic oligonucleotide
  Sense strand starting at position 112 of SEQ ID NO: 1560254
uguaguucuguggaagaag

SEQ ID NO: 1587112 - RNA, 19 nt, Artificial Sequence
  Description of Artificial Sequence: Synthetic oligonucleotide
  Antisense strand to SEQ ID NO: 1587111
cuucuuccacagaacuaca

SEQ ID NO: 1587113 - RNA, 19 nt, Artificial Sequence
  Description of Artificial Sequence: Synthetic oligonucleotide
  Sense strand starting at position 132 of SEQ ID NO: 1560254
gggcauggcgguuagaaca

SEQ ID NO: 1587114 - RNA, 19 nt, Artificial Sequence
  Description of Artificial Sequence: Synthetic oligonucleotide
  Antisense strand to SEQ ID NO: 1587113
uguucuaaccgccaugccc

SEQ ID NO: 1587115 - RNA, 19 nt, Artificial Sequence
  Description of Artificial Sequence: Synthetic oligonucleotide
  Sense strand starting at position 167 of SEQ ID NO: 1560254
uuugcucuggaauaaacau

SEQ ID NO: 1587116 - RNA, 19 nt, Artificial Sequence
  Description of Artificial Sequence: Synthetic oligonucleotide
  Antisense strand to SEQ ID NO: 1587115
auguuuauuccagagcaaa

SEQ ID NO: 1587117 - RNA, 19 nt, Artificial Sequence
  Description of Artificial Sequence: Synthetic oligonucleotide
  Sense strand starting at position 419 of SEQ ID NO: 1560254
aaagaagugccaggacgua

SEQ ID NO: 1587118 - RNA, 19 nt, Artificial Sequence
  Description of Artificial Sequence: Synthetic oligonucleotide
  Antisense strand to SEQ ID NO: 1587117
uacguccuggcacuucuuu

SEQ ID NO: 1587119 - RNA, 19 nt, Artificial Sequence
  Description of Artificial Sequence: Synthetic oligonucleotide
  Sense strand starting at position 447 of SEQ ID NO: 1560254
guccaugguagaugucuca

SEQ ID NO: 1587120 - RNA, 19 nt, Artificial Sequence
  Description of Artificial Sequence: Synthetic oligonucleotide
  Antisense strand to SEQ ID NO: 1587119
ugagacaucuaccauggac

SEQ ID NO: 1587121 - RNA, 19 nt, Artificial Sequence
  Description of Artificial Sequence: Synthetic oligonucleotide
  Sense strand starting at position 454 of SEQ ID NO: 1560254
guagaugucucaccuugga

SEQ ID NO: 1587122 - RNA, 19 nt, Artificial Sequence
  Description of Artificial Sequence: Synthetic oligonucleotide
  Antisense strand to SEQ ID NO: 1587121
uccaaggugagacaucuac

SEQ ID NO: 1587123 - RNA, 19 nt, Artificial Sequence
  Description of Artificial Sequence: Synthetic oligonucleotide
  Sense strand starting at position 457 of SEQ ID NO: 1560254
gaugucucaccuuggaagu

SEQ ID NO: 1587124 - RNA, 19 nt, Artificial Sequence
  Description of Artificial Sequence: Synthetic oligonucleotide
  Antisense strand to SEQ ID NO: 1587123
acuuccaaggugagacauc

SEQ ID NO: 1587125 - RNA, 19 nt, Artificial Sequence
  Description of Artificial Sequence: Synthetic oligonucleotide
  Sense strand starting at position 458 of SEQ ID NO: 1560254
augucucaccuuggaaguu

SEQ ID NO: 1587126 - RNA, 19 nt, Artificial Sequence
  Description of Artificial Sequence: Synthetic oligonucleotide
  Antisense strand to SEQ ID NO: 1587125
aacuuccaaggugagacau

SEQ ID NO: 1587127 - RNA, 19 nt, Artificial Sequence
  Description of Artificial Sequence: Synthetic oligonucleotide
  Sense strand starting at position 767 of SEQ ID NO: 1560254
acgugcuaccuauagagaa

SEQ ID NO: 1587128 - RNA, 19 nt, Artificial Sequence
  Description of Artificial Sequence: Synthetic oligonucleotide
  Antisense strand to SEQ ID NO: 1587127
uucucuauagguagcacgu

SEQ ID NO: 1587129 - RNA, 19 nt, Artificial Sequence
  Description of Artificial Sequence: Synthetic oligonucleotide
  Sense strand starting at position 804 of SEQ ID NO: 1560254
gcugauggcccagauagau

SEQ ID NO: 1587130 - RNA, 19 nt, Artificial Sequence
  Description of Artificial Sequence: Synthetic oligonucleotide
  Antisense strand to SEQ ID NO: 1587129
aucuaucugggccaucagc

SEQ ID NO: 1587131 - RNA, 19 nt, Artificial Sequence
  Description of Artificial Sequence: Synthetic oligonucleotide
  Sense strand starting at position 920 of SEQ ID NO: 1560254
gccuaagacugagcuagaa

SEQ ID NO: 1587132 - RNA, 19 nt, Artificial Sequence
  Description of Artificial Sequence: Synthetic oligonucleotide
  Antisense strand to SEQ ID NO: 1587131
uucuagcucagucuuaggc

SEQ ID NO: 1587133 - RNA, 19 nt, Artificial Sequence
  Description of Artificial Sequence: Synthetic oligonucleotide
  Sense strand starting at position 1090 of SEQ ID NO: 1560254
gguuguuaucugcagaagc

SEQ ID NO: 1587134 - RNA, 19 nt, Artificial Sequence
  Description of Artificial Sequence: Synthetic oligonucleotide
  Antisense strand to SEQ ID NO: 1587133
gcuucugcagauaacaacc

SEQ ID NO: 1587135 - RNA, 19 nt, Artificial Sequence
  Description of Artificial Sequence: Synthetic oligonucleotide
  Sense strand starting at position 1229 of SEQ ID NO: 1560254
gagaaacucuaagcguuga

SEQ ID NO: 1587136 - RNA, 19 nt, Artificial Sequence
  Description of Artificial Sequence: Synthetic oligonucleotide
  Antisense strand to SEQ ID NO: 1587135
ucaacgcuuagaguuucuc

SEQ ID NO: 1587137 - RNA, 19 nt, Artificial Sequence
  Description of Artificial Sequence: Synthetic oligonucleotide
  Sense strand starting at position 1230 of SEQ ID NO: 1560254
agaaacucuaagcguugaa

SEQ ID NO: 1587138 - RNA, 19 nt, Artificial Sequence
  Description of Artificial Sequence: Synthetic oligonucleotide
  Antisense strand to SEQ ID NO: 1587137
uucaacgcuuagaguuucu

SEQ ID NO: 1587139 - RNA, 19 nt, Artificial Sequence
  Description of Artificial Sequence: Synthetic oligonucleotide
  Sense strand starting at position 1322 of SEQ ID NO: 1560254
cagugaaguccugacucca

SEQ ID NO: 1587140 - RNA, 19 nt, Artificial Sequence
  Description of Artificial Sequence: Synthetic oligonucleotide
  Antisense strand to SEQ ID NO: 1587139
uggagucaggacuucacug

SEQ ID NO: 1587141 - RNA, 19 nt, Artificial Sequence
  Description of Artificial Sequence: Synthetic oligonucleotide
  Sense strand starting at position 1490 of SEQ ID NO: 1560254
cauccugguucuucgugaa

SEQ ID NO: 1587142 - RNA, 19 nt, Artificial Sequence
  Description of Artificial Sequence: Synthetic oligonucleotide
  Antisense strand to SEQ ID NO: 1587141
uucacgaagaaccaggaug

SEQ ID NO: 1587143 - RNA, 19 nt, Artificial Sequence
  Description of Artificial Sequence: Synthetic oligonucleotide
  Sense strand starting at position 1494 of SEQ ID NO: 1560254
cugguucuucgugaaacau

SEQ ID NO: 1587144 - RNA, 19 nt, Artificial Sequence
  Description of Artificial Sequence: Synthetic oligonucleotide
  Antisense strand to SEQ ID NO: 1587143
auguuucacgaagaaccag

SEQ ID NO: 1587145 - RNA, 19 nt, Artificial Sequence
  Description of Artificial Sequence: Synthetic oligonucleotide
  Sense strand starting at position 1694 of SEQ ID NO: 1560254
gcagaauuggagugugguc

SEQ ID NO: 1587146 - RNA, 19 nt, Artificial Sequence
  Description of Artificial Sequence: Synthetic oligonucleotide
  Antisense strand to SEQ ID NO: 1587145
gaccacacuccaauucugc

SEQ ID NO: 1587147 - RNA, 19 nt, Artificial Sequence
  Description of Artificial Sequence: Synthetic oligonucleotide
  Sense strand starting at position 1696 of SEQ ID NO: 1560254
agaauuggaguguggucuu

SEQ ID NO: 1587148 - RNA, 19 nt, Artificial Sequence
  Description of Artificial Sequence: Synthetic oligonucleotide
  Antisense strand to SEQ ID NO: 1587147
aagaccacacuccaauucu

SEQ ID NO: 1587149 - RNA, 19 nt, Artificial Sequence
  Description of Artificial Sequence: Synthetic oligonucleotide
  Sense strand starting at position 2106 of SEQ ID NO: 1560254
gcacaaagccugggaaagu

SEQ ID NO: 1587150 - RNA, 19 nt, Artificial Sequence
  Description of Artificial Sequence: Synthetic oligonucleotide
  Antisense strand to SEQ ID NO: 1587149
acuuucccaggcuuugugc

SEQ ID NO: 1587151 - RNA, 19 nt, Artificial Sequence
  Description of Artificial Sequence: Synthetic oligonucleotide
  Sense strand starting at position 2187 of SEQ ID NO: 1560254
cccugugucccagagcuga

SEQ ID NO: 1587152 - RNA, 19 nt, Artificial Sequence
  Description of Artificial Sequence: Synthetic oligonucleotide
  Antisense strand to SEQ ID NO: 1587151
ucagcucugggacacaggg

SEQ ID NO: 1587153 - RNA, 19 nt, Artificial Sequence
  Description of Artificial Sequence: Synthetic oligonucleotide
  Sense strand starting at position 2233 of SEQ ID NO: 1560254
uugcuuuccaguugaggaa

SEQ ID NO: 1587154 - RNA, 19 nt, Artificial Sequence
  Description of Artificial Sequence: Synthetic oligonucleotide
  Antisense strand to SEQ ID NO: 1587153
uuccucaacuggaaagcaa

SEQ ID NO: 1587155 - RNA, 19 nt, Artificial Sequence
  Description of Artificial Sequence: Synthetic oligonucleotide
  Sense strand starting at position 2423 of SEQ ID NO: 1560254
ggugucagcacuugagaug

SEQ ID NO: 1587156 - RNA, 19 nt, Artificial Sequence
  Description of Artificial Sequence: Synthetic oligonucleotide
  Antisense strand to SEQ ID NO: 1587155
caucucaagugcugacacc

SEQ ID NO: 1587157 - RNA, 19 nt, Artificial Sequence
  Description of Artificial Sequence: Synthetic oligonucleotide
  Sense strand starting at position 2435 of SEQ ID NO: 1560254
ugagaugguauuggugaua

SEQ ID NO: 1587158 - RNA, 19 nt, Artificial Sequence
  Description of Artificial Sequence: Synthetic oligonucleotide
  Antisense strand to SEQ ID NO: 1587157
uaucaccaauaccaucuca

SEQ ID NO: 1587159 - RNA, 19 nt, Artificial Sequence
  Description of Artificial Sequence: Synthetic oligonucleotide
  Sense strand starting at position 2448 of SEQ ID NO: 1560254
gugauaagauuuggugaua

SEQ ID NO: 1587160 - RNA, 19 nt, Artificial Sequence
  Description of Artificial Sequence: Synthetic oligonucleotide
  Antisense strand to SEQ ID NO: 1587159
uaucaccaaaucuuaucac

SEQ ID NO: 1587161 - RNA, 19 nt, Artificial Sequence
  Description of Artificial Sequence: Synthetic oligonucleotide
  Sense strand starting at position 2453 of SEQ ID NO: 1560254
aagauuuggugauaagauu

SEQ ID NO: 1587162 - RNA, 19 nt, Artificial Sequence
  Description of Artificial Sequence: Synthetic oligonucleotide
  Antisense strand to SEQ ID NO: 1587161
aaucuuaucaccaaaucuu

SEQ ID NO: 1587163 - RNA, 19 nt, Artificial Sequence
  Description of Artificial Sequence: Synthetic oligonucleotide
  Sense strand starting at position 2461 of SEQ ID NO: 1560254
gugauaagauuuggaugag

SEQ ID NO: 1587164 - RNA, 19 nt, Artificial Sequence
  Description of Artificial Sequence: Synthetic oligonucleotide
  Antisense strand to SEQ ID NO: 1587163
cucauccaaaucuuaucac

SEQ ID NO: 1587165 - RNA, 19 nt, Artificial Sequence
  Description of Artificial Sequence: Synthetic oligonucleotide
  Sense strand starting at position 2921 of SEQ ID NO: 1560254
cccagagucggcugaagua

SEQ ID NO: 1587166 - RNA, 19 nt, Artificial Sequence
  Description of Artificial Sequence: Synthetic oligonucleotide
  Antisense strand to SEQ ID NO: 1587165
uacuucagccgacucuggg

SEQ ID NO: 1587167 - RNA, 19 nt, Artificial Sequence
  Description of Artificial Sequence: Synthetic oligonucleotide
  Sense strand starting at position 2969 of SEQ ID NO: 1560254
ccugguucuguggaugaaa

SEQ ID NO: 1587168 - RNA, 19 nt, Artificial Sequence
  Description of Artificial Sequence: Synthetic oligonucleotide
  Antisense strand to SEQ ID NO: 1587167
uuucauccacagaaccagg

SEQ ID NO: 1587169 - RNA, 19 nt, Artificial Sequence
  Description of Artificial Sequence: Synthetic oligonucleotide
  Sense strand starting at position 3062 of SEQ ID NO: 1560254
ucagaaugucauugugacu

SEQ ID NO: 1587170 - RNA, 19 nt, Artificial Sequence
  Description of Artificial Sequence: Synthetic oligonucleotide
  Antisense strand to SEQ ID NO: 1587169
agucacaaugacauucuga

SEQ ID NO: 1587171 - RNA, 19 nt, Artificial Sequence
  Description of Artificial Sequence: Synthetic oligonucleotide
  Sense strand starting at position 3067 of SEQ ID NO: 1560254
augucauugugacuaaggu

SEQ ID NO: 1587172 - RNA, 19 nt, Artificial Sequence
  Description of Artificial Sequence: Synthetic oligonucleotide
  Antisense strand to SEQ ID NO: 1587171
accuuagucacaaugacau

SEQ ID NO: 1587173 - RNA, 19 nt, Artificial Sequence
  Description of Artificial Sequence: Synthetic oligonucleotide
  Sense strand starting at position 3068 of SEQ ID NO: 1560254
ugucauugugacuaagguu

SEQ ID NO: 1587174 - RNA, 19 nt, Artificial Sequence
  Description of Artificial Sequence: Synthetic oligonucleotide
  Antisense strand to SEQ ID NO: 1587173
aaccuuagucacaaugaca

SEQ ID NO: 1587175 - RNA, 19 nt, Artificial Sequence
  Description of Artificial Sequence: Synthetic oligonucleotide
  Sense strand starting at position 3099 of SEQ ID NO: 1560254
agcugagagucuuuaggga

SEQ ID NO: 1587176 - RNA, 19 nt, Artificial Sequence
  Description of Artificial Sequence: Synthetic oligonucleotide
  Antisense strand to SEQ ID NO: 1587175
ucccuaaagacucucagcu

SEQ ID NO: 1587177 - RNA, 19 nt, Artificial Sequence
  Description of Artificial Sequence: Synthetic oligonucleotide
  Sense strand starting at position 3171 of SEQ ID NO: 1560254
cucccugucccagagcaua

SEQ ID NO: 1587178 - RNA, 19 nt, Artificial Sequence
  Description of Artificial Sequence: Synthetic oligonucleotide
  Antisense strand to SEQ ID NO: 1587177
uaugcucugggacagggag

SEQ ID NO: 1587179 - RNA, 19 nt, Artificial Sequence
  Description of Artificial Sequence: Synthetic oligonucleotide
  Sense strand starting at position 3438 of SEQ ID NO: 1560254
ugaugagagggugguguuu

SEQ ID NO: 1587180 - RNA, 19 nt, Artificial Sequence
  Description of Artificial Sequence: Synthetic oligonucleotide
  Antisense strand to SEQ ID NO: 1587179
aaacaccacccucucauca

SEQ ID NO: 1587181 - RNA, 19 nt, Artificial Sequence
  Description of Artificial Sequence: Synthetic oligonucleotide
  Sense strand starting at position 3865 of SEQ ID NO: 1560254
agaaauagguucuaagaga

SEQ ID NO: 1587182 - RNA, 19 nt, Artificial Sequence
  Description of Artificial Sequence: Synthetic oligonucleotide
  Antisense strand to SEQ ID NO: 1587181
ucucuuagaaccuauuucu

SEQ ID NO: 1587183 - RNA, 19 nt, Artificial Sequence
  Description of Artificial Sequence: Synthetic oligonucleotide
  Sense strand starting at position 3895 of SEQ ID NO: 1560254
auaggaauuccagggcauu

SEQ ID NO: 1587184 - RNA, 19 nt, Artificial Sequence
  Description of Artificial Sequence: Synthetic oligonucleotide
  Antisense strand to SEQ ID NO: 1587183
aaugcccuggaauuccuau

SEQ ID NO: 1587185 - RNA, 19 nt, Artificial Sequence
  Description of Artificial Sequence: Synthetic oligonucleotide
  Sense strand starting at position 150 of SEQ ID NO: 1560255
cgugcacugucgagggaaa

SEQ ID NO: 1587186 - RNA, 19 nt, Artificial Sequence
  Description of Artificial Sequence: Synthetic oligonucleotide
  Antisense strand to SEQ ID NO: 1587185
uuucccucgacagugcacg

SEQ ID NO: 1587187 - RNA, 19 nt, Artificial Sequence
  Description of Artificial Sequence: Synthetic oligonucleotide
  Sense strand starting at position 188 of SEQ ID NO: 1560255
cggugaguuuggagacguu

SEQ ID NO: 1587188 - RNA, 19 nt, Artificial Sequence
  Description of Artificial Sequence: Synthetic oligonucleotide
  Antisense strand to SEQ ID NO: 1587187
aacgucuccaaacucaccg

SEQ ID NO: 1587189 - RNA, 19 nt, Artificial Sequence
  Description of Artificial Sequence: Synthetic oligonucleotide
  Sense strand starting at position 921 of SEQ ID NO: 1560255
ggugacuuuaccugagugu

SEQ ID NO: 1587190 - RNA, 19 nt, Artificial Sequence
  Description of Artificial Sequence: Synthetic oligonucleotide
  Antisense strand to SEQ ID NO: 1587189
acacucagguaaagucacc

SEQ ID NO: 1587191 - RNA, 19 nt, Artificial Sequence
  Description of Artificial Sequence: Synthetic oligonucleotide
  Sense strand starting at position 922 of SEQ ID NO: 1560255
gugacuuuaccugaguguu

SEQ ID NO: 1587192 - RNA, 19 nt, Artificial Sequence
  Description of Artificial Sequence: Synthetic oligonucleotide
  Antisense strand to SEQ ID NO: 1587191
aacacucagguaaagucac

SEQ ID NO: 1587193 - RNA, 19 nt, Artificial Sequence
  Description of Artificial Sequence: Synthetic oligonucleotide
  Sense strand starting at position 934 of SEQ ID NO: 1560255
gaguguuggucccaaaguu

SEQ ID NO: 1587194 - RNA, 19 nt, Artificial Sequence
  Description of Artificial Sequence: Synthetic oligonucleotide
  Antisense strand to SEQ ID NO: 1587193
aacuuugggaccaacacuc

SEQ ID NO: 1587195 - RNA, 19 nt, Artificial Sequence
  Description of Artificial Sequence: Synthetic oligonucleotide
  Sense strand starting at position 981 of SEQ ID NO: 1560255
cagggagcucccugaggau

SEQ ID NO: 1587196 - RNA, 19 nt, Artificial Sequence
  Description of Artificial Sequence: Synthetic oligonucleotide
  Antisense strand to SEQ ID NO: 1587195
auccucagggagcucccug

SEQ ID NO: 1587197 - RNA, 19 nt, Artificial Sequence
  Description of Artificial Sequence: Synthetic oligonucleotide
  Sense strand starting at position 1122 of SEQ ID NO: 1560255
ccagaaguuuccugcaaga

SEQ ID NO: 1587198 - RNA, 19 nt, Artificial Sequence
  Description of Artificial Sequence: Synthetic oligonucleotide
  Antisense strand to SEQ ID NO: 1587197
ucuugcaggaaacuucugg

SEQ ID NO: 1587199 - RNA, 19 nt, Artificial Sequence
  Description of Artificial Sequence: Synthetic oligonucleotide
  Sense strand starting at position 1166 of SEQ ID NO: 1560255
caucucugacccugguaga

SEQ ID NO: 1587200 - RNA, 19 nt, Artificial Sequence
  Description of Artificial Sequence: Synthetic oligonucleotide
  Antisense strand to SEQ ID NO: 1587199
ucuaccagggucagagaug

SEQ ID NO: 1587201 - RNA, 19 nt, Artificial Sequence
  Description of Artificial Sequence: Synthetic oligonucleotide
  Sense strand starting at position 1169 of SEQ ID NO: 1560255
cucugacccugguagagaa

SEQ ID NO: 1587202 - RNA, 19 nt, Artificial Sequence
  Description of Artificial Sequence: Synthetic oligonucleotide
  Antisense strand to SEQ ID NO: 1587201
uucucuaccagggucagag

SEQ ID NO: 1587203 - RNA, 19 nt, Artificial Sequence
  Description of Artificial Sequence: Synthetic oligonucleotide
  Sense strand starting at position 1281 of SEQ ID NO: 1560255
cccagaagccugcaaguaa

SEQ ID NO: 1587204 - RNA, 19 nt, Artificial Sequence
  Description of Artificial Sequence: Synthetic oligonucleotide
  Antisense strand to SEQ ID NO: 1587203
uuacuugcaggcuucuggg

SEQ ID NO: 1587205 - RNA, 19 nt, Artificial Sequence
  Description of Artificial Sequence: Synthetic oligonucleotide
  Sense strand starting at position 1317 of SEQ ID NO: 1560255
ucaaccguuucccaagaau

SEQ ID NO: 1587206 - RNA, 19 nt, Artificial Sequence
  Description of Artificial Sequence: Synthetic oligonucleotide
  Antisense strand to SEQ ID NO: 1587205
auucuugggaaacgguuga

SEQ ID NO: 1587207 - RNA, 19 nt, Artificial Sequence
  Description of Artificial Sequence: Synthetic oligonucleotide
  Sense strand starting at position 1438 of SEQ ID NO: 1560255
gcaucugcuccgugucgaa

SEQ ID NO: 1587208 - RNA, 19 nt, Artificial Sequence
  Description of Artificial Sequence: Synthetic oligonucleotide
  Antisense strand to SEQ ID NO: 1587207
uucgacacggagcagaugc

SEQ ID NO: 1587209 - RNA, 19 nt, Artificial Sequence
  Description of Artificial Sequence: Synthetic oligonucleotide
  Sense strand starting at position 1488 of SEQ ID NO: 1560255
cccaguguuucccagagca

SEQ ID NO: 1587210 - RNA, 19 nt, Artificial Sequence
  Description of Artificial Sequence: Synthetic oligonucleotide
  Antisense strand to SEQ ID NO: 1587209
ugcucugggaaacacuggg

SEQ ID NO: 1587211 - RNA, 19 nt, Artificial Sequence
  Description of Artificial Sequence: Synthetic oligonucleotide
  Sense strand starting at position 1490 of SEQ ID NO: 1560255
caguguuucccagagcaug

SEQ ID NO: 1587212 - RNA, 19 nt, Artificial Sequence
  Description of Artificial Sequence: Synthetic oligonucleotide
  Antisense strand to SEQ ID NO: 1587211
caugcucugggaaacacug

SEQ ID NO: 1587213 - RNA, 19 nt, Artificial Sequence
  Description of Artificial Sequence: Synthetic oligonucleotide
  Sense strand starting at position 1607 of SEQ ID NO: 1560255
gggccucacugacuuuaga

SEQ ID NO: 1587214 - RNA, 19 nt, Artificial Sequence
  Description of Artificial Sequence: Synthetic oligonucleotide
  Antisense strand to SEQ ID NO: 1587213
ucuaaagucagugaggccc

SEQ ID NO: 1587215 - RNA, 19 nt, Artificial Sequence
  Description of Artificial Sequence: Synthetic oligonucleotide
  Sense strand starting at position 2100 of SEQ ID NO: 1560255
aggguaaucagcuguuauu

SEQ ID NO: 1587216 - RNA, 19 nt, Artificial Sequence
  Description of Artificial Sequence: Synthetic oligonucleotide
  Antisense strand to SEQ ID NO: 1587215
aauaacagcugauuacccu

SEQ ID NO: 1587217 - RNA, 19 nt, Artificial Sequence
  Description of Artificial Sequence: Synthetic oligonucleotide
  Sense strand starting at position 2111 of SEQ ID NO: 1560255
cuguuauugugagucugag

SEQ ID NO: 1587218 - RNA, 19 nt, Artificial Sequence
  Description of Artificial Sequence: Synthetic oligonucleotide
  Antisense strand to SEQ ID NO: 1587217
cucagacucacaauaacag

SEQ ID NO: 1587219 - RNA, 19 nt, Artificial Sequence
  Description of Artificial Sequence: Synthetic oligonucleotide
  Sense strand starting at position 2125 of SEQ ID NO: 1560255
cugagagucucugucgaaa

SEQ ID NO: 1587220 - RNA, 19 nt, Artificial Sequence
  Description of Artificial Sequence: Synthetic oligonucleotide
  Antisense strand to SEQ ID NO: 1587219
uuucgacagagacucucag

SEQ ID NO: 1587221 - RNA, 19 nt, Artificial Sequence
  Description of Artificial Sequence: Synthetic oligonucleotide
  Sense strand starting at position 2127 of SEQ ID NO: 1560255
gagagucucugucgaaaca

SEQ ID NO: 1587222 - RNA, 19 nt, Artificial Sequence
  Description of Artificial Sequence: Synthetic oligonucleotide
  Antisense strand to SEQ ID NO: 1587221
uguuucgacagagacucuc

SEQ ID NO: 1587223 - RNA, 19 nt, Artificial Sequence
  Description of Artificial Sequence: Synthetic oligonucleotide
  Sense strand starting at position 2570 of SEQ ID NO: 1560255
gcgugucaguuucugagau

SEQ ID NO: 1587224 - RNA, 19 nt, Artificial Sequence
  Description of Artificial Sequence: Synthetic oligonucleotide
  Antisense strand to SEQ ID NO: 1587223
aucucagaaacugacacgc

SEQ ID NO: 1587225 - RNA, 19 nt, Artificial Sequence
  Description of Artificial Sequence: Synthetic oligonucleotide
  Sense strand starting at position 2572 of SEQ ID NO: 1560255
gugucaguuucugagauuc

SEQ ID NO: 1587226 - RNA, 19 nt, Artificial Sequence
  Description of Artificial Sequence: Synthetic oligonucleotide
  Antisense strand to SEQ ID NO: 1587225
gaaucucagaaacugacac

SEQ ID NO: 1587227 - RNA, 19 nt, Artificial Sequence
  Description of Artificial Sequence: Synthetic oligonucleotide
  Sense strand starting at position 2679 of SEQ ID NO: 1560255
gcugcucccggcugagaaa

SEQ ID NO: 1587228 - RNA, 19 nt, Artificial Sequence
  Description of Artificial Sequence: Synthetic oligonucleotide
  Antisense strand to SEQ ID NO: 1587227
uuucucagccgggagcagc

SEQ ID NO: 1587229 - RNA, 19 nt, Artificial Sequence
  Description of Artificial Sequence: Synthetic oligonucleotide
  Sense strand starting at position 2931 of SEQ ID NO: 1560255
ucaggagccauccgugaga

SEQ ID NO: 1587230 - RNA, 19 nt, Artificial Sequence
  Description of Artificial Sequence: Synthetic oligonucleotide
  Antisense strand to SEQ ID NO: 1587229
ucucacggauggcuccuga

SEQ ID NO: 1587231 - RNA, 19 nt, Artificial Sequence
  Description of Artificial Sequence: Synthetic oligonucleotide
  Sense strand starting at position 3240 of SEQ ID NO: 1560255
gcuccuacuucccuguuau

SEQ ID NO: 1587232 - RNA, 19 nt, Artificial Sequence
  Description of Artificial Sequence: Synthetic oligonucleotide
  Antisense strand to SEQ ID NO: 1587231
auaacagggaaguaggagc

SEQ ID NO: 1587233 - RNA, 19 nt, Artificial Sequence
  Description of Artificial Sequence: Synthetic oligonucleotide
  Sense strand starting at position 3258 of SEQ ID NO: 1560255
uuccaucucugacucguua

SEQ ID NO: 1587234 - RNA, 19 nt, Artificial Sequence
  Description of Artificial Sequence: Synthetic oligonucleotide
  Antisense strand to SEQ ID NO: 1587233
uaacgagucagagauggaa

SEQ ID NO: 1587235 - RNA, 19 nt, Artificial Sequence
  Description of Artificial Sequence: Synthetic oligonucleotide
  Sense strand starting at position 3262 of SEQ ID NO: 1560255
aucucugacucguuaauga

SEQ ID NO: 1587236 - RNA, 19 nt, Artificial Sequence
  Description of Artificial Sequence: Synthetic oligonucleotide
  Antisense strand to SEQ ID NO: 1587235
ucauuaacgagucagagau

SEQ ID NO: 1587237 - RNA, 19 nt, Artificial Sequence
  Description of Artificial Sequence: Synthetic oligonucleotide
  Sense strand starting at position 3266 of SEQ ID NO: 1560255
cugacucguuaaugaugau

SEQ ID NO: 1587238 - RNA, 19 nt, Artificial Sequence
  Description of Artificial Sequence: Synthetic oligonucleotide
  Antisense strand to SEQ ID NO: 1587237
aucaucauuaacgagucag

SEQ ID NO: 1587239 - RNA, 19 nt, Artificial Sequence
  Description of Artificial Sequence: Synthetic oligonucleotide
  Sense strand starting at position 3267 of SEQ ID NO: 1560255
ugacucguuaaugaugaua

SEQ ID NO: 1587240 - RNA, 19 nt, Artificial Sequence
  Description of Artificial Sequence: Synthetic oligonucleotide
  Antisense strand to SEQ ID NO: 1587239
uaucaucauuaacgaguca

SEQ ID NO: 1587241 - RNA, 19 nt, Artificial Sequence
  Description of Artificial Sequence: Synthetic oligonucleotide
  Sense strand starting at position 3269 of SEQ ID NO: 1560255
acucguuaaugaugauaau

SEQ ID NO: 1587242 - RNA, 19 nt, Artificial Sequence
  Description of Artificial Sequence: Synthetic oligonucleotide
  Antisense strand to SEQ ID NO: 1587241
auuaucaucauuaacgagu

SEQ ID NO: 1587243 - RNA, 19 nt, Artificial Sequence
  Description of Artificial Sequence: Synthetic oligonucleotide
  Sense strand starting at position 3270 of SEQ ID NO: 1560255
cucguuaaugaugauaaua

SEQ ID NO: 1587244 - RNA, 19 nt, Artificial Sequence
  Description of Artificial Sequence: Synthetic oligonucleotide
  Antisense strand to SEQ ID NO: 1587243
uauuaucaucauuaacgag

SEQ ID NO: 1587245 - RNA, 19 nt, Artificial Sequence
  Description of Artificial Sequence: Synthetic oligonucleotide
  Sense strand starting at position 3278 of SEQ ID NO: 1560255
ugaugauaauagcgauggu

SEQ ID NO: 1587246 - RNA, 19 nt, Artificial Sequence
  Description of Artificial Sequence: Synthetic oligonucleotide
  Antisense strand to SEQ ID NO: 1587245
accaucgcuauuaucauca

SEQ ID NO: 1587247 - RNA, 19 nt, Artificial Sequence
  Description of Artificial Sequence: Synthetic oligonucleotide
  Sense strand starting at position 3281 of SEQ ID NO: 1560255
ugauaauagcgaugguggu

SEQ ID NO: 1587248 - RNA, 19 nt, Artificial Sequence
  Description of Artificial Sequence: Synthetic oligonucleotide
  Antisense strand to SEQ ID NO: 1587247
accaccaucgcuauuauca

SEQ ID NO: 1587249 - RNA, 19 nt, Artificial Sequence
  Description of Artificial Sequence: Synthetic oligonucleotide
  Sense strand starting at position 3282 of SEQ ID NO: 1560255
gauaauagcgaugguggua

SEQ ID NO: 1587250 - RNA, 19 nt, Artificial Sequence
  Description of Artificial Sequence: Synthetic oligonucleotide
  Antisense strand to SEQ ID NO: 1587249
uaccaccaucgcuauuauc

SEQ ID NO: 1587251 - RNA, 19 nt, Artificial Sequence
  Description of Artificial Sequence: Synthetic oligonucleotide
  Sense strand starting at position 3285 of SEQ ID NO: 1560255
aauagcgauggugguaaua

SEQ ID NO: 1587252 - RNA, 19 nt, Artificial Sequence
  Description of Artificial Sequence: Synthetic oligonucleotide
  Antisense strand to SEQ ID NO: 1587251
uauuaccaccaucgcuauu

SEQ ID NO: 1587253 - RNA, 19 nt, Artificial Sequence
  Description of Artificial Sequence: Synthetic oligonucleotide
  Sense strand starting at position 3287 of SEQ ID NO: 1560255
uagcgauggugguaauaau

SEQ ID NO: 1587254 - RNA, 19 nt, Artificial Sequence
  Description of Artificial Sequence: Synthetic oligonucleotide
  Antisense strand to SEQ ID NO: 1587253
auuauuaccaccaucgcua

SEQ ID NO: 1587255 - RNA, 19 nt, Artificial Sequence
  Description of Artificial Sequence: Synthetic oligonucleotide
  Sense strand starting at position 3337 of SEQ ID NO: 1560255
gcuuaucagcgguucugua

SEQ ID NO: 1587256 - RNA, 19 nt, Artificial Sequence
  Description of Artificial Sequence: Synthetic oligonucleotide
  Antisense strand to SEQ ID NO: 1587255
uacagaaccgcugauaagc

SEQ ID NO: 1587257 - RNA, 19 nt, Artificial Sequence
  Description of Artificial Sequence: Synthetic oligonucleotide
  Sense strand starting at position 3353 of SEQ ID NO: 1560255
guauguacccagcauugga

SEQ ID NO: 1587258 - RNA, 19 nt, Artificial Sequence
  Description of Artificial Sequence: Synthetic oligonucleotide
  Antisense strand to SEQ ID NO: 1587257
uccaaugcuggguacauac

SEQ ID NO: 1587259 - RNA, 19 nt, Artificial Sequence
  Description of Artificial Sequence: Synthetic oligonucleotide
  Sense strand starting at position 3376 of SEQ ID NO: 1560255
gcacaagcaguuuaagaau

SEQ ID NO: 1587260 - RNA, 19 nt, Artificial Sequence
  Description of Artificial Sequence: Synthetic oligonucleotide
  Antisense strand to SEQ ID NO: 1587259
auucuuaaacugcuugugc

SEQ ID NO: 1587261 - RNA, 19 nt, Artificial Sequence
  Description of Artificial Sequence: Synthetic oligonucleotide
  Sense strand starting at position 3394 of SEQ ID NO: 1560255
uuauacaacucugggagau

SEQ ID NO: 1587262 - RNA, 19 nt, Artificial Sequence
  Description of Artificial Sequence: Synthetic oligonucleotide
  Antisense strand to SEQ ID NO: 1587261
aucucccagaguuguauaa

SEQ ID NO: 1587263 - RNA, 19 nt, Artificial Sequence
  Description of Artificial Sequence: Synthetic oligonucleotide
  Sense strand starting at position 3910 of SEQ ID NO: 1560255
augagaucuuguuguguug

SEQ ID NO: 1587264 - RNA, 19 nt, Artificial Sequence
  Description of Artificial Sequence: Synthetic oligonucleotide
  Antisense strand to SEQ ID NO: 1587263
caacacaacaagaucucau

SEQ ID NO: 1587265 - RNA, 19 nt, Artificial Sequence
  Description of Artificial Sequence: Synthetic oligonucleotide
  Sense strand starting at position 3 of SEQ ID NO: 1560256
aguccuguccgacagaauu

SEQ ID NO: 1587266 - RNA, 19 nt, Artificial Sequence
  Description of Artificial Sequence: Synthetic oligonucleotide
  Antisense strand to SEQ ID NO: 1587265
aauucugucggacaggacu

SEQ ID NO: 1587267 - RNA, 19 nt, Artificial Sequence
  Description of Artificial Sequence: Synthetic oligonucleotide
  Sense strand starting at position 65 of SEQ ID NO: 1560256
uuaaaucagugguugaagu

SEQ ID NO: 1587268 - RNA, 19 nt, Artificial Sequence
  Description of Artificial Sequence: Synthetic oligonucleotide
  Antisense strand to SEQ ID NO: 1587267
acuucaaccacugauuuaa

SEQ ID NO: 1587269 - RNA, 19 nt, Artificial Sequence
  Description of Artificial Sequence: Synthetic oligonucleotide
  Sense strand starting at position 67 of SEQ ID NO: 1560256
aaaucagugguugaaguga

SEQ ID NO: 1587270 - RNA, 19 nt, Artificial Sequence
  Description of Artificial Sequence: Synthetic oligonucleotide
  Antisense strand to SEQ ID NO: 1587269
ucacuucaaccacugauuu

SEQ ID NO: 1587271 - RNA, 19 nt, Artificial Sequence
  Description of Artificial Sequence: Synthetic oligonucleotide
  Sense strand starting at position 72 of SEQ ID NO: 1560256
agugguugaagugauugaa

SEQ ID NO: 1587272 - RNA, 19 nt, Artificial Sequence
  Description of Artificial Sequence: Synthetic oligonucleotide
  Antisense strand to SEQ ID NO: 1587271
uucaaucacuucaaccacu

SEQ ID NO: 1587273 - RNA, 19 nt, Artificial Sequence
  Description of Artificial Sequence: Synthetic oligonucleotide
  Sense strand starting at position 75 of SEQ ID NO: 1560256
gguugaagugauugaauac

SEQ ID NO: 1587274 - RNA, 19 nt, Artificial Sequence
  Description of Artificial Sequence: Synthetic oligonucleotide
  Antisense strand to SEQ ID NO: 1587273
guauucaaucacuucaacc

SEQ ID NO: 1587275 - RNA, 19 nt, Artificial Sequence
  Description of Artificial Sequence: Synthetic oligonucleotide
  Sense strand starting at position 100 of SEQ ID NO: 1560256
augggaauaucagugaagu

SEQ ID NO: 1587276 - RNA, 19 nt, Artificial Sequence
  Description of Artificial Sequence: Synthetic oligonucleotide
  Antisense strand to SEQ ID NO: 1587275
acuucacugauauucccau

SEQ ID NO: 1587277 - RNA, 19 nt, Artificial Sequence
  Description of Artificial Sequence: Synthetic oligonucleotide
  Sense strand starting at position 101 of SEQ ID NO: 1560256
ugggaauaucagugaagua

SEQ ID NO: 1587278 - RNA, 19 nt, Artificial Sequence
  Description of Artificial Sequence: Synthetic oligonucleotide
  Antisense strand to SEQ ID NO: 1587277
uacuucacugauauuccca

SEQ ID NO: 1587279 - RNA, 19 nt, Artificial Sequence
  Description of Artificial Sequence: Synthetic oligonucleotide
  Sense strand starting at position 221 of SEQ ID NO: 1560256
ggguaagucugguuagaug

SEQ ID NO: 1587280 - RNA, 19 nt, Artificial Sequence
  Description of Artificial Sequence: Synthetic oligonucleotide
  Antisense strand to SEQ ID NO: 1587279
caucuaaccagacuuaccc

SEQ ID NO: 1587281 - RNA, 19 nt, Artificial Sequence
  Description of Artificial Sequence: Synthetic oligonucleotide
  Sense strand starting at position 304 of SEQ ID NO: 1560256
agugaaauugcaggaguau

SEQ ID NO: 1587282 - RNA, 19 nt, Artificial Sequence
  Description of Artificial Sequence: Synthetic oligonucleotide
  Antisense strand to SEQ ID NO: 1587281
auacuccugcaauuucacu

SEQ ID NO: 1587283 - RNA, 19 nt, Artificial Sequence
  Description of Artificial Sequence: Synthetic oligonucleotide
  Sense strand starting at position 305 of SEQ ID NO: 1560256
gugaaauugcaggaguaug

SEQ ID NO: 1587284 - RNA, 19 nt, Artificial Sequence
  Description of Artificial Sequence: Synthetic oligonucleotide
  Antisense strand to SEQ ID NO: 1587283
cauacuccugcaauuucac

SEQ ID NO: 1587285 - RNA, 19 nt, Artificial Sequence
  Description of Artificial Sequence: Synthetic oligonucleotide
  Sense strand starting at position 322 of SEQ ID NO: 1560256
ugcauagugcuagaagaaa

SEQ ID NO: 1587286 - RNA, 19 nt, Artificial Sequence
  Description of Artificial Sequence: Synthetic oligonucleotide
  Antisense strand to SEQ ID NO: 1587285
uuucuucuagcacuaugca

SEQ ID NO: 1587287 - RNA, 19 nt, Artificial Sequence
  Description of Artificial Sequence: Synthetic oligonucleotide
  Sense strand starting at position 663 of SEQ ID NO: 1560256
uggaguuuccagugagcuc

SEQ ID NO: 1587288 - RNA, 19 nt, Artificial Sequence
  Description of Artificial Sequence: Synthetic oligonucleotide
  Antisense strand to SEQ ID NO: 1587287
gagcucacuggaaacucca

SEQ ID NO: 1587289 - RNA, 19 nt, Artificial Sequence
  Description of Artificial Sequence: Synthetic oligonucleotide
  Sense strand starting at position 664 of SEQ ID NO: 1560256
ggaguuuccagugagcuca

SEQ ID NO: 1587290 - RNA, 19 nt, Artificial Sequence
  Description of Artificial Sequence: Synthetic oligonucleotide
  Antisense strand to SEQ ID NO: 1587289
ugagcucacuggaaacucc

SEQ ID NO: 1587291 - RNA, 19 nt, Artificial Sequence
  Description of Artificial Sequence: Synthetic oligonucleotide
  Sense strand starting at position 762 of SEQ ID NO: 1560256
gguuacaaaugggaagaaa

SEQ ID NO: 1587292 - RNA, 19 nt, Artificial Sequence
  Description of Artificial Sequence: Synthetic oligonucleotide
  Antisense strand to SEQ ID NO: 1587291
uuucuucccauuuguaacc

SEQ ID NO: 1587293 - RNA, 19 nt, Artificial Sequence
  Description of Artificial Sequence: Synthetic oligonucleotide
  Sense strand starting at position 796 of SEQ ID NO: 1560256
accaguuuguucccauaaa

SEQ ID NO: 1587294 - RNA, 19 nt, Artificial Sequence
  Description of Artificial Sequence: Synthetic oligonucleotide
  Antisense strand to SEQ ID NO: 1587293
uuuaugggaacaaacuggu

SEQ ID NO: 1587295 - RNA, 19 nt, Artificial Sequence
  Description of Artificial Sequence: Synthetic oligonucleotide
  Sense strand starting at position 815 of SEQ ID NO: 1560256
agguuaguaucccucauag

SEQ ID NO: 1587296 - RNA, 19 nt, Artificial Sequence
  Description of Artificial Sequence: Synthetic oligonucleotide
  Antisense strand to SEQ ID NO: 1587295
cuaugagggauacuaaccu

SEQ ID NO: 1587297 - RNA, 19 nt, Artificial Sequence
  Description of Artificial Sequence: Synthetic oligonucleotide
  Sense strand starting at position 817 of SEQ ID NO: 1560256
guuaguaucccucauagau

SEQ ID NO: 1587298 - RNA, 19 nt, Artificial Sequence
  Description of Artificial Sequence: Synthetic oligonucleotide
  Antisense strand to SEQ ID NO: 1587297
aucuaugagggauacuaac

SEQ ID NO: 1587299 - RNA, 19 nt, Artificial Sequence
  Description of Artificial Sequence: Synthetic oligonucleotide
  Sense strand starting at position 995 of SEQ ID NO: 1560256
ucacaagaucuccgugaca

SEQ ID NO: 1587300 - RNA, 19 nt, Artificial Sequence
  Description of Artificial Sequence: Synthetic oligonucleotide
  Antisense strand to SEQ ID NO: 1587299
ugucacggagaucuuguga

SEQ ID NO: 1587301 - RNA, 19 nt, Artificial Sequence
  Description of Artificial Sequence: Synthetic oligonucleotide
  Sense strand starting at position 997 of SEQ ID NO: 1560256
acaagaucuccgugacacu

SEQ ID NO: 1587302 - RNA, 19 nt, Artificial Sequence
  Description of Artificial Sequence: Synthetic oligonucleotide
  Antisense strand to SEQ ID NO: 1587301
agugucacggagaucuugu

SEQ ID NO: 1587303 - RNA, 19 nt, Artificial Sequence
  Description of Artificial Sequence: Synthetic oligonucleotide
  Sense strand starting at position 998 of SEQ ID NO: 1560256
caagaucuccgugacacua

SEQ ID NO: 1587304 - RNA, 19 nt, Artificial Sequence
  Description of Artificial Sequence: Synthetic oligonucleotide
  Antisense strand to SEQ ID NO: 1587303
uagugucacggagaucuug

SEQ ID NO: 1587305 - RNA, 19 nt, Artificial Sequence
  Description of Artificial Sequence: Synthetic oligonucleotide
  Sense strand starting at position 1147 of SEQ ID NO: 1560256
agacaauugugcuucuaaa

SEQ ID NO: 1587306 - RNA, 19 nt, Artificial Sequence
  Description of Artificial Sequence: Synthetic oligonucleotide
  Antisense strand to SEQ ID NO: 1587305
uuuagaagcacaauugucu

SEQ ID NO: 1587307 - RNA, 19 nt, Artificial Sequence
  Description of Artificial Sequence: Synthetic oligonucleotide
  Sense strand starting at position 1202 of SEQ ID NO: 1560256
ugugguauaaggugaggua

SEQ ID NO: 1587308 - RNA, 19 nt, Artificial Sequence
  Description of Artificial Sequence: Synthetic oligonucleotide
  Antisense strand to SEQ ID NO: 1587307
uaccucaccuuauaccaca

SEQ ID NO: 1587309 - RNA, 19 nt, Artificial Sequence
  Description of Artificial Sequence: Synthetic oligonucleotide
  Sense strand starting at position 1203 of SEQ ID NO: 1560256
gugguauaaggugagguau

SEQ ID NO: 1587310 - RNA, 19 nt, Artificial Sequence
  Description of Artificial Sequence: Synthetic oligonucleotide
  Antisense strand to SEQ ID NO: 1587309
auaccucaccuuauaccac

SEQ ID NO: 1587311 - RNA, 19 nt, Artificial Sequence
  Description of Artificial Sequence: Synthetic oligonucleotide
  Sense strand starting at position 1217 of SEQ ID NO: 1560256
gguauaucacagcaagauu

SEQ ID NO: 1587312 - RNA, 19 nt, Artificial Sequence
  Description of Artificial Sequence: Synthetic oligonucleotide
  Antisense strand to SEQ ID NO: 1587311
aaucuugcugugauauacc

SEQ ID NO: 1587313 - RNA, 19 nt, Artificial Sequence
  Description of Artificial Sequence: Synthetic oligonucleotide
  Sense strand starting at position 1252 of SEQ ID NO: 1560256
uuuggaaaucguuagcauu

SEQ ID NO: 1587314 - RNA, 19 nt, Artificial Sequence
  Description of Artificial Sequence: Synthetic oligonucleotide
  Antisense strand to SEQ ID NO: 1587313
aaugcuaacgauuuccaaa

SEQ ID NO: 1587315 - RNA, 19 nt, Artificial Sequence
  Description of Artificial Sequence: Synthetic oligonucleotide
  Sense strand starting at position 1287 of SEQ ID NO: 1560256
guuucuucugccgaaauag

SEQ ID NO: 1587316 - RNA, 19 nt, Artificial Sequence
  Description of Artificial Sequence: Synthetic oligonucleotide
  Antisense strand to SEQ ID NO: 1587315
cuauuucggcagaagaaac

SEQ ID NO: 1587317 - RNA, 19 nt, Artificial Sequence
  Description of Artificial Sequence: Synthetic oligonucleotide
  Sense strand starting at position 1297 of SEQ ID NO: 1560256
ccgaaauagucaguucccu

SEQ ID NO: 1587318 - RNA, 19 nt, Artificial Sequence
  Description of Artificial Sequence: Synthetic oligonucleotide
  Antisense strand to SEQ ID NO: 1587317
agggaacugacuauuucgg

SEQ ID NO: 1587319 - RNA, 19 nt, Artificial Sequence
  Description of Artificial Sequence: Synthetic oligonucleotide
  Sense strand starting at position 1302 of SEQ ID NO: 1560256
auagucaguucccugcaga

SEQ ID NO: 1587320 - RNA, 19 nt, Artificial Sequence
  Description of Artificial Sequence: Synthetic oligonucleotide
  Antisense strand to SEQ ID NO: 1587319
ucugcagggaacugacuau

SEQ ID NO: 1587321 - RNA, 19 nt, Artificial Sequence
  Description of Artificial Sequence: Synthetic oligonucleotide
  Sense strand starting at position 1305 of SEQ ID NO: 1560256
gucaguucccugcagacaa

SEQ ID NO: 1587322 - RNA, 19 nt, Artificial Sequence
  Description of Artificial Sequence: Synthetic oligonucleotide
  Antisense strand to SEQ ID NO: 1587321
uugucugcagggaacugac

SEQ ID NO: 1587323 - RNA, 19 nt, Artificial Sequence
  Description of Artificial Sequence: Synthetic oligonucleotide
  Sense strand starting at position 1490 of SEQ ID NO: 1560256
gggagacuuucccucaguc

SEQ ID NO: 1587324 - RNA, 19 nt, Artificial Sequence
  Description of Artificial Sequence: Synthetic oligonucleotide
  Antisense strand to SEQ ID NO: 1587323
gacugagggaaagucuccc

SEQ ID NO: 1587325 - RNA, 19 nt, Artificial Sequence
  Description of Artificial Sequence: Synthetic oligonucleotide
  Sense strand starting at position 1828 of SEQ ID NO: 1560256
agcgguguuacagauuugu

SEQ ID NO: 1587326 - RNA, 19 nt, Artificial Sequence
  Description of Artificial Sequence: Synthetic oligonucleotide
  Antisense strand to SEQ ID NO: 1587325
acaaaucuguaacaccgcu

SEQ ID NO: 1587327 - RNA, 19 nt, Artificial Sequence
  Description of Artificial Sequence: Synthetic oligonucleotide
  Sense strand starting at position 1966 of SEQ ID NO: 1560256
uucggaacuacgcaaugau

SEQ ID NO: 1587328 - RNA, 19 nt, Artificial Sequence
  Description of Artificial Sequence: Synthetic oligonucleotide
  Antisense strand to SEQ ID NO: 1587327
aucauugcguaguuccgaa

SEQ ID NO: 1587329 - RNA, 19 nt, Artificial Sequence
  Description of Artificial Sequence: Synthetic oligonucleotide
  Sense strand starting at position 1975 of SEQ ID NO: 1560256
acgcaaugauuuggagaac

SEQ ID NO: 1587330 - RNA, 19 nt, Artificial Sequence
  Description of Artificial Sequence: Synthetic oligonucleotide
  Antisense strand to SEQ ID NO: 1587329
guucuccaaaucauugcgu

SEQ ID NO: 1587331 - RNA, 19 nt, Artificial Sequence
  Description of Artificial Sequence: Synthetic oligonucleotide
  Sense strand starting at position 2201 of SEQ ID NO: 1560256
ucagguuauucggcuuauu

SEQ ID NO: 1587332 - RNA, 19 nt, Artificial Sequence
  Description of Artificial Sequence: Synthetic oligonucleotide
  Antisense strand to SEQ ID NO: 1587331
aauaagccgaauaaccuga

SEQ ID NO: 1587333 - RNA, 19 nt, Artificial Sequence
  Description of Artificial Sequence: Synthetic oligonucleotide
  Sense strand starting at position 2507 of SEQ ID NO: 1560256
guaggucucccggaucaca

SEQ ID NO: 1587334 - RNA, 19 nt, Artificial Sequence
  Description of Artificial Sequence: Synthetic oligonucleotide
  Antisense strand to SEQ ID NO: 1587333
ugugauccgggagaccuac

SEQ ID NO: 1587335 - RNA, 19 nt, Artificial Sequence
  Description of Artificial Sequence: Synthetic oligonucleotide
  Sense strand starting at position 2534 of SEQ ID NO: 1560256
cccauucuccugggagcuu

SEQ ID NO: 1587336 - RNA, 19 nt, Artificial Sequence
  Description of Artificial Sequence: Synthetic oligonucleotide
  Antisense strand to SEQ ID NO: 1587335
aagcucccaggagaauggg

SEQ ID NO: 1587337 - RNA, 19 nt, Artificial Sequence
  Description of Artificial Sequence: Synthetic oligonucleotide
  Sense strand starting at position 2545 of SEQ ID NO: 1560256
gggagcuucccagacaagu

SEQ ID NO: 1587338 - RNA, 19 nt, Artificial Sequence
  Description of Artificial Sequence: Synthetic oligonucleotide
  Antisense strand to SEQ ID NO: 1587337
acuugucugggaagcuccc

SEQ ID NO: 1587339 - RNA, 19 nt, Artificial Sequence
  Description of Artificial Sequence: Synthetic oligonucleotide
  Sense strand starting at position 2562 of SEQ ID NO: 1560256
gugucauauucucccaugu

SEQ ID NO: 1587340 - RNA, 19 nt, Artificial Sequence
  Description of Artificial Sequence: Synthetic oligonucleotide
  Antisense strand to SEQ ID NO: 1587339
acaugggagaauaugacac

SEQ ID NO: 1587341 - RNA, 19 nt, Artificial Sequence
  Description of Artificial Sequence: Synthetic oligonucleotide
  Sense strand starting at position 2624 of SEQ ID NO: 1560256
aguggacuugacugcaaga

SEQ ID NO: 1587342 - RNA, 19 nt, Artificial Sequence
  Description of Artificial Sequence: Synthetic oligonucleotide
  Antisense strand to SEQ ID NO: 1587341
ucuugcagucaaguccacu

SEQ ID NO: 1587343 - RNA, 19 nt, Artificial Sequence
  Description of Artificial Sequence: Synthetic oligonucleotide
  Sense strand starting at position 2629 of SEQ ID NO: 1560256
acuugacugcaagagcuua

SEQ ID NO: 1587344 - RNA, 19 nt, Artificial Sequence
  Description of Artificial Sequence: Synthetic oligonucleotide
  Antisense strand to SEQ ID NO: 1587343
uaagcucuugcagucaagu

SEQ ID NO: 1587345 - RNA, 19 nt, Artificial Sequence
  Description of Artificial Sequence: Synthetic oligonucleotide
  Sense strand starting at position 152 of SEQ ID NO: 1560257
guggguucuggaggaaaga

SEQ ID NO: 1587346 - RNA, 19 nt, Artificial Sequence
  Description of Artificial Sequence: Synthetic oligonucleotide
  Antisense strand to SEQ ID NO: 1587345
ucuuuccuccagaacccac

SEQ ID NO: 1587347 - RNA, 19 nt, Artificial Sequence
  Description of Artificial Sequence: Synthetic oligonucleotide
  Sense strand starting at position 523 of SEQ ID NO: 1560257
ccuucccaucugugaaaug

SEQ ID NO: 1587348 - RNA, 19 nt, Artificial Sequence
  Description of Artificial Sequence: Synthetic oligonucleotide
  Antisense strand to SEQ ID NO: 1587347
cauuucacagaugggaagg

SEQ ID NO: 1587349 - RNA, 19 nt, Artificial Sequence
  Description of Artificial Sequence: Synthetic oligonucleotide
  Sense strand starting at position 709 of SEQ ID NO: 1560257
gggugcugggaaugaaaga

SEQ ID NO: 1587350 - RNA, 19 nt, Artificial Sequence
  Description of Artificial Sequence: Synthetic oligonucleotide
  Antisense strand to SEQ ID NO: 1587349
ucuuucauucccagcaccc

SEQ ID NO: 1587351 - RNA, 19 nt, Artificial Sequence
  Description of Artificial Sequence: Synthetic oligonucleotide
  Sense strand starting at position 1377 of SEQ ID NO: 1560257
ugcugugacuccuaagcca

SEQ ID NO: 1587352 - RNA, 19 nt, Artificial Sequence
  Description of Artificial Sequence: Synthetic oligonucleotide
  Antisense strand to SEQ ID NO: 1587351
uggcuuaggagucacagca

SEQ ID NO: 1587353 - RNA, 19 nt, Artificial Sequence
  Description of Artificial Sequence: Synthetic oligonucleotide
  Sense strand starting at position 1390 of SEQ ID NO: 1560257
aagccauggcucugaguca

SEQ ID NO: 1587354 - RNA, 19 nt, Artificial Sequence
  Description of Artificial Sequence: Synthetic oligonucleotide
  Antisense strand to SEQ ID NO: 1587353
ugacucagagccauggcuu

SEQ ID NO: 1587355 - RNA, 19 nt, Artificial Sequence
  Description of Artificial Sequence: Synthetic oligonucleotide
  Sense strand starting at position 1443 of SEQ ID NO: 1560257
ccuccagagugguggcaua

SEQ ID NO: 1587356 - RNA, 19 nt, Artificial Sequence
  Description of Artificial Sequence: Synthetic oligonucleotide
  Antisense strand to SEQ ID NO: 1587355
uaugccaccacucuggagg

SEQ ID NO: 1587357 - RNA, 19 nt, Artificial Sequence
  Description of Artificial Sequence: Synthetic oligonucleotide
  Sense strand starting at position 2098 of SEQ ID NO: 1560257
uggagaaucucagcuguca

SEQ ID NO: 1587358 - RNA, 19 nt, Artificial Sequence
  Description of Artificial Sequence: Synthetic oligonucleotide
  Antisense strand to SEQ ID NO: 1587357
ugacagcugagauucucca

SEQ ID NO: 1587359 - RNA, 19 nt, Artificial Sequence
  Description of Artificial Sequence: Synthetic oligonucleotide
  Sense strand starting at position 2153 of SEQ ID NO: 1560257
agccacaggugugaugaau

SEQ ID NO: 1587360 - RNA, 19 nt, Artificial Sequence
  Description of Artificial Sequence: Synthetic oligonucleotide
  Antisense strand to SEQ ID NO: 1587359
auucaucacaccuguggcu

SEQ ID NO: 1587361 - RNA, 19 nt, Artificial Sequence
  Description of Artificial Sequence: Synthetic oligonucleotide
  Sense strand starting at position 2204 of SEQ ID NO: 1560257
gccaauugaggcugaguga

SEQ ID NO: 1587362 - RNA, 19 nt, Artificial Sequence
  Description of Artificial Sequence: Synthetic oligonucleotide
  Antisense strand to SEQ ID NO: 1587361
ucacucagccucaauuggc

SEQ ID NO: 1587363 - RNA, 19 nt, Artificial Sequence
  Description of Artificial Sequence: Synthetic oligonucleotide
  Sense strand starting at position 2348 of SEQ ID NO: 1560257
cagcuucuugggugacuca

SEQ ID NO: 1587364 - RNA, 19 nt, Artificial Sequence
  Description of Artificial Sequence: Synthetic oligonucleotide
  Antisense strand to SEQ ID NO: 1587363
ugagucacccaagaagcug

SEQ ID NO: 1587365 - RNA, 19 nt, Artificial Sequence
  Description of Artificial Sequence: Synthetic oligonucleotide
  Sense strand starting at position 2359 of SEQ ID NO: 1560257
gugacucagagauggauuc

SEQ ID NO: 1587366 - RNA, 19 nt, Artificial Sequence
  Description of Artificial Sequence: Synthetic oligonucleotide
  Antisense strand to SEQ ID NO: 1587365
gaauccaucucugagucac

SEQ ID NO: 1587367 - RNA, 19 nt, Artificial Sequence
  Description of Artificial Sequence: Synthetic oligonucleotide
  Sense strand starting at position 2375 of SEQ ID NO: 1560257
uuccgacucggacaguuaa

SEQ ID NO: 1587368 - RNA, 19 nt, Artificial Sequence
  Description of Artificial Sequence: Synthetic oligonucleotide
  Antisense strand to SEQ ID NO: 1587367
uuaacuguccgagucggaa

SEQ ID NO: 1587369 - RNA, 19 nt, Artificial Sequence
  Description of Artificial Sequence: Synthetic oligonucleotide
  Sense strand starting at position 2406 of SEQ ID NO: 1560257
ggcucucugcuuuauacca

SEQ ID NO: 1587370 - RNA, 19 nt, Artificial Sequence
  Description of Artificial Sequence: Synthetic oligonucleotide
  Antisense strand to SEQ ID NO: 1587369
ugguauaaagcagagagcc

SEQ ID NO: 1587371 - RNA, 19 nt, Artificial Sequence
  Description of Artificial Sequence: Synthetic oligonucleotide
  Sense strand starting at position 2713 of SEQ ID NO: 1560257
agaggaaucugagcucuuc

SEQ ID NO: 1587372 - RNA, 19 nt, Artificial Sequence
  Description of Artificial Sequence: Synthetic oligonucleotide
  Antisense strand to SEQ ID NO: 1587371
gaagagcucagauuccucu

SEQ ID NO: 1587373 - RNA, 19 nt, Artificial Sequence
  Description of Artificial Sequence: Synthetic oligonucleotide
  Sense strand starting at position 2743 of SEQ ID NO: 1560257
gacgguucuccagagugga

SEQ ID NO: 1587374 - RNA, 19 nt, Artificial Sequence
  Description of Artificial Sequence: Synthetic oligonucleotide
  Antisense strand to SEQ ID NO: 1587373
uccacucuggagaaccguc

SEQ ID NO: 1587375 - RNA, 19 nt, Artificial Sequence
  Description of Artificial Sequence: Synthetic oligonucleotide
  Sense strand starting at position 2875 of SEQ ID NO: 1560257
cugggcaguucugauaauu

SEQ ID NO: 1587376 - RNA, 19 nt, Artificial Sequence
  Description of Artificial Sequence: Synthetic oligonucleotide
  Antisense strand to SEQ ID NO: 1587375
aauuaucagaacugcccag

SEQ ID NO: 1587377 - RNA, 19 nt, Artificial Sequence
  Description of Artificial Sequence: Synthetic oligonucleotide
  Sense strand starting at position 2981 of SEQ ID NO: 1560257
ugggucaccaguuguguga

SEQ ID NO: 1587378 - RNA, 19 nt, Artificial Sequence
  Description of Artificial Sequence: Synthetic oligonucleotide
  Antisense strand to SEQ ID NO: 1587377
ucacacaacuggugaccca

SEQ ID NO: 1587379 - RNA, 19 nt, Artificial Sequence
  Description of Artificial Sequence: Synthetic oligonucleotide
  Sense strand starting at position 3182 of SEQ ID NO: 1560257
agggaacuuuaguauaaau

SEQ ID NO: 1587380 - RNA, 19 nt, Artificial Sequence
  Description of Artificial Sequence: Synthetic oligonucleotide
  Antisense strand to SEQ ID NO: 1587379
auuuauacuaaaguucccu

SEQ ID NO: 1587381 - RNA, 19 nt, Artificial Sequence
  Description of Artificial Sequence: Synthetic oligonucleotide
  Sense strand starting at position 3426 of SEQ ID NO: 1560257
gaggguaacacugauguuu

SEQ ID NO: 1587382 - RNA, 19 nt, Artificial Sequence
  Description of Artificial Sequence: Synthetic oligonucleotide
  Antisense strand to SEQ ID NO: 1587381
aaacaucaguguuacccuc

SEQ ID NO: 1587383 - RNA, 19 nt, Artificial Sequence
  Description of Artificial Sequence: Synthetic oligonucleotide
  Sense strand starting at position 3435 of SEQ ID NO: 1560257
acugauguuucagaggaag

SEQ ID NO: 1587384 - RNA, 19 nt, Artificial Sequence
  Description of Artificial Sequence: Synthetic oligonucleotide
  Antisense strand to SEQ ID NO: 1587383
cuuccucugaaacaucagu

SEQ ID NO: 1587385 - RNA, 19 nt, Artificial Sequence
  Description of Artificial Sequence: Synthetic oligonucleotide
  Sense strand starting at position 3449 of SEQ ID NO: 1560257
ggaagaggucauuguacuu

SEQ ID NO: 1587386 - RNA, 19 nt, Artificial Sequence
  Description of Artificial Sequence: Synthetic oligonucleotide
  Antisense strand to SEQ ID NO: 1587385
aaguacaaugaccucuucc

SEQ ID NO: 1587387 - RNA, 19 nt, Artificial Sequence
  Description of Artificial Sequence: Synthetic oligonucleotide
  Sense strand starting at position 3455 of SEQ ID NO: 1560257
ggucauuguacuuggcagu

SEQ ID NO: 1587388 - RNA, 19 nt, Artificial Sequence
  Description of Artificial Sequence: Synthetic oligonucleotide
  Antisense strand to SEQ ID NO: 1587387
acugccaaguacaaugacc

SEQ ID NO: 1587389 - RNA, 19 nt, Artificial Sequence
  Description of Artificial Sequence: Synthetic oligonucleotide
  Sense strand starting at position 3585 of SEQ ID NO: 1560257
caugguuagucuuguuaau

SEQ ID NO: 1587390 - RNA, 19 nt, Artificial Sequence
  Description of Artificial Sequence: Synthetic oligonucleotide
  Antisense strand to SEQ ID NO: 1587389
auuaacaagacuaaccaug

SEQ ID NO: 1587391 - RNA, 19 nt, Artificial Sequence
  Description of Artificial Sequence: Synthetic oligonucleotide
  Sense strand starting at position 3587 of SEQ ID NO: 1560257
ugguuagucuuguuaauac

SEQ ID NO: 1587392 - RNA, 19 nt, Artificial Sequence
  Description of Artificial Sequence: Synthetic oligonucleotide
  Antisense strand to SEQ ID NO: 1587391
guauuaacaagacuaacca

SEQ ID NO: 1587393 - RNA, 19 nt, Artificial Sequence
  Description of Artificial Sequence: Synthetic oligonucleotide
  Sense strand starting at position 3596 of SEQ ID NO: 1560257
uuguuaauacguugaucug

SEQ ID NO: 1587394 - RNA, 19 nt, Artificial Sequence
  Description of Artificial Sequence: Synthetic oligonucleotide
  Antisense strand to SEQ ID NO: 1587393
cagaucaacguauuaacaa

SEQ ID NO: 1587395 - RNA, 19 nt, Artificial Sequence
  Description of Artificial Sequence: Synthetic oligonucleotide
  Sense strand starting at position 3597 of SEQ ID NO: 1560257
uguuaauacguugaucugu

SEQ ID NO: 1587396 - RNA, 19 nt, Artificial Sequence
  Description of Artificial Sequence: Synthetic oligonucleotide
  Antisense strand to SEQ ID NO: 1587395
acagaucaacguauuaaca

SEQ ID NO: 1587397 - RNA, 19 nt, Artificial Sequence
  Description of Artificial Sequence: Synthetic oligonucleotide
  Sense strand starting at position 3599 of SEQ ID NO: 1560257
uuaauacguugaucuguga

SEQ ID NO: 1587398 - RNA, 19 nt, Artificial Sequence
  Description of Artificial Sequence: Synthetic oligonucleotide
  Antisense strand to SEQ ID NO: 1587397
ucacagaucaacguauuaa

SEQ ID NO: 1587399 - RNA, 19 nt, Artificial Sequence
  Description of Artificial Sequence: Synthetic oligonucleotide
  Sense strand starting at position 3602 of SEQ ID NO: 1560257
auacguugaucugugaggu

SEQ ID NO: 1587400 - RNA, 19 nt, Artificial Sequence
  Description of Artificial Sequence: Synthetic oligonucleotide
  Antisense strand to SEQ ID NO: 1587399
accucacagaucaacguau

SEQ ID NO: 1587401 - RNA, 19 nt, Artificial Sequence
  Description of Artificial Sequence: Synthetic oligonucleotide
  Sense strand starting at position 3603 of SEQ ID NO: 1560257
uacguugaucugugagguc

SEQ ID NO: 1587402 - RNA, 19 nt, Artificial Sequence
  Description of Artificial Sequence: Synthetic oligonucleotide
  Antisense strand to SEQ ID NO: 1587401
gaccucacagaucaacgua

SEQ ID NO: 1587403 - RNA, 19 nt, Artificial Sequence
  Description of Artificial Sequence: Synthetic oligonucleotide
  Sense strand starting at position 3605 of SEQ ID NO: 1560257
cguugaucugugaggucag

SEQ ID NO: 1587404 - RNA, 19 nt, Artificial Sequence
  Description of Artificial Sequence: Synthetic oligonucleotide
  Antisense strand to SEQ ID NO: 1587403
cugaccucacagaucaacg

SEQ ID NO: 1587405 - RNA, 19 nt, Artificial Sequence
  Description of Artificial Sequence: Synthetic oligonucleotide
  Sense strand starting at position 3669 of SEQ ID NO: 1560257
gcccgauauccauggcuuc

SEQ ID NO: 1587406 - RNA, 19 nt, Artificial Sequence
  Description of Artificial Sequence: Synthetic oligonucleotide
  Antisense strand to SEQ ID NO: 1587405
gaagccauggauaucgggc

SEQ ID NO: 1587407 - RNA, 19 nt, Artificial Sequence
  Description of Artificial Sequence: Synthetic oligonucleotide
  Sense strand starting at position 3948 of SEQ ID NO: 1560257
aaucaaaguccuuggcgga

SEQ ID NO: 1587408 - RNA, 19 nt, Artificial Sequence
  Description of Artificial Sequence: Synthetic oligonucleotide
  Antisense strand to SEQ ID NO: 1587407
uccgccaaggacuuugauu

SEQ ID NO: 1587409 - RNA, 19 nt, Artificial Sequence
  Description of Artificial Sequence: Synthetic oligonucleotide
  Sense strand starting at position 3949 of SEQ ID NO: 1560257
aucaaaguccuuggcggau

SEQ ID NO: 1587410 - RNA, 19 nt, Artificial Sequence
  Description of Artificial Sequence: Synthetic oligonucleotide
  Antisense strand to SEQ ID NO: 1587409
auccgccaaggacuuugau

SEQ ID NO: 1587411 - RNA, 19 nt, Artificial Sequence
  Description of Artificial Sequence: Synthetic oligonucleotide
  Sense strand starting at position 17 of SEQ ID NO: 1560258
cguaauacuccaugaccag

SEQ ID NO: 1587412 - RNA, 19 nt, Artificial Sequence
  Description of Artificial Sequence: Synthetic oligonucleotide
  Antisense strand to SEQ ID NO: 1587411
cuggucauggaguauuacg

SEQ ID NO: 1587413 - RNA, 19 nt, Artificial Sequence
  Description of Artificial Sequence: Synthetic oligonucleotide
  Sense strand starting at position 171 of SEQ ID NO: 1560258
uagagaucugccgggccaa

SEQ ID NO: 1587414 - RNA, 19 nt, Artificial Sequence
  Description of Artificial Sequence: Synthetic oligonucleotide
  Antisense strand to SEQ ID NO: 1587413
uuggcccggcagaucucua

SEQ ID NO: 1587415 - RNA, 19 nt, Artificial Sequence
  Description of Artificial Sequence: Synthetic oligonucleotide
  Sense strand starting at position 172 of SEQ ID NO: 1560258
agagaucugccgggccaaa

SEQ ID NO: 1587416 - RNA, 19 nt, Artificial Sequence
  Description of Artificial Sequence: Synthetic oligonucleotide
  Antisense strand to SEQ ID NO: 1587415
uuuggcccggcagaucucu

SEQ ID NO: 1587417 - RNA, 19 nt, Artificial Sequence
  Description of Artificial Sequence: Synthetic oligonucleotide
  Sense strand starting at position 246 of SEQ ID NO: 1560258
aaacuuuccugggauguca

SEQ ID NO: 1587418 - RNA, 19 nt, Artificial Sequence
  Description of Artificial Sequence: Synthetic oligonucleotide
  Antisense strand to SEQ ID NO: 1587417
ugacaucccaggaaaguuu

SEQ ID NO: 1587419 - RNA, 19 nt, Artificial Sequence
  Description of Artificial Sequence: Synthetic oligonucleotide
  Sense strand starting at position 255 of SEQ ID NO: 1560258
ugggaugucacugggcaga

SEQ ID NO: 1587420 - RNA, 19 nt, Artificial Sequence
  Description of Artificial Sequence: Synthetic oligonucleotide
  Antisense strand to SEQ ID NO: 1587419
ucugcccagugacauccca

SEQ ID NO: 1587421 - RNA, 19 nt, Artificial Sequence
  Description of Artificial Sequence: Synthetic oligonucleotide
  Sense strand starting at position 257 of SEQ ID NO: 1560258
ggaugucacugggcagauu

SEQ ID NO: 1587422 - RNA, 19 nt, Artificial Sequence
  Description of Artificial Sequence: Synthetic oligonucleotide
  Antisense strand to SEQ ID NO: 1587421
aaucugcccagugacaucc

SEQ ID NO: 1587423 - RNA, 19 nt, Artificial Sequence
  Description of Artificial Sequence: Synthetic oligonucleotide
  Sense strand starting at position 284 of SEQ ID NO: 1560258
cugagauguucugggaaag

SEQ ID NO: 1587424 - RNA, 19 nt, Artificial Sequence
  Description of Artificial Sequence: Synthetic oligonucleotide
  Antisense strand to SEQ ID NO: 1587423
cuuucccagaacaucucag

SEQ ID NO: 1587425 - RNA, 19 nt, Artificial Sequence
  Description of Artificial Sequence: Synthetic oligonucleotide
  Sense strand starting at position 329 of SEQ ID NO: 1560258
gagaauaggucccagacac

SEQ ID NO: 1587426 - RNA, 19 nt, Artificial Sequence
  Description of Artificial Sequence: Synthetic oligonucleotide
  Antisense strand to SEQ ID NO: 1587425
gugucugggaccuauucuc

SEQ ID NO: 1587427 - RNA, 19 nt, Artificial Sequence
  Description of Artificial Sequence: Synthetic oligonucleotide
  Sense strand starting at position 368 of SEQ ID NO: 1560258
ccguuagaauuccugaaga

SEQ ID NO: 1587428 - RNA, 19 nt, Artificial Sequence
  Description of Artificial Sequence: Synthetic oligonucleotide
  Antisense strand to SEQ ID NO: 1587427
ucuucaggaauucuaacgg

SEQ ID NO: 1587429 - RNA, 19 nt, Artificial Sequence
  Description of Artificial Sequence: Synthetic oligonucleotide
  Sense strand starting at position 422 of SEQ ID NO: 1560258
gagacaucuuuauaagagu

SEQ ID NO: 1587430 - RNA, 19 nt, Artificial Sequence
  Description of Artificial Sequence: Synthetic oligonucleotide
  Antisense strand to SEQ ID NO: 1587429
acucuuauaaagaugucuc

SEQ ID NO: 1587431 - RNA, 19 nt, Artificial Sequence
  Description of Artificial Sequence: Synthetic oligonucleotide
  Sense strand starting at position 537 of SEQ ID NO: 1560258
cagacuuucccacagacgu

SEQ ID NO: 1587432 - RNA, 19 nt, Artificial Sequence
  Description of Artificial Sequence: Synthetic oligonucleotide
  Antisense strand to SEQ ID NO: 1587431
acgucugugggaaagucug

SEQ ID NO: 1587433 - RNA, 19 nt, Artificial Sequence
  Description of Artificial Sequence: Synthetic oligonucleotide
  Sense strand starting at position 915 of SEQ ID NO: 1560258
gcuaccugaggucgagaua

SEQ ID NO: 1587434 - RNA, 19 nt, Artificial Sequence
  Description of Artificial Sequence: Synthetic oligonucleotide
  Antisense strand to SEQ ID NO: 1587433
uaucucgaccucagguagc

SEQ ID NO: 1587435 - RNA, 19 nt, Artificial Sequence
  Description of Artificial Sequence: Synthetic oligonucleotide
  Sense strand starting at position 1074 of SEQ ID NO: 1560258
gguucuaaggcucggucau

SEQ ID NO: 1587436 - RNA, 19 nt, Artificial Sequence
  Description of Artificial Sequence: Synthetic oligonucleotide
  Antisense strand to SEQ ID NO: 1587435
augaccgagccuuagaacc

SEQ ID NO: 1587437 - RNA, 19 nt, Artificial Sequence
  Description of Artificial Sequence: Synthetic oligonucleotide
  Sense strand starting at position 1075 of SEQ ID NO: 1560258
guucuaaggcucggucauu

SEQ ID NO: 1587438 - RNA, 19 nt, Artificial Sequence
  Description of Artificial Sequence: Synthetic oligonucleotide
  Antisense strand to SEQ ID NO: 1587437
aaugaccgagccuuagaac

SEQ ID NO: 1587439 - RNA, 19 nt, Artificial Sequence
  Description of Artificial Sequence: Synthetic oligonucleotide
  Sense strand starting at position 1459 of SEQ ID NO: 1560258
aggugagaugccugagaag

SEQ ID NO: 1587440 - RNA, 19 nt, Artificial Sequence
  Description of Artificial Sequence: Synthetic oligonucleotide
  Antisense strand to SEQ ID NO: 1587439
cuucucaggcaucucaccu

SEQ ID NO: 1587441 - RNA, 19 nt, Artificial Sequence
  Description of Artificial Sequence: Synthetic oligonucleotide
  Sense strand starting at position 1672 of SEQ ID NO: 1560258
uguagaauguccuggguaa

SEQ ID NO: 1587442 - RNA, 19 nt, Artificial Sequence
  Description of Artificial Sequence: Synthetic oligonucleotide
  Antisense strand to SEQ ID NO: 1587441
uuacccaggacauucuaca

SEQ ID NO: 1587443 - RNA, 19 nt, Artificial Sequence
  Description of Artificial Sequence: Synthetic oligonucleotide
  Sense strand starting at position 1673 of SEQ ID NO: 1560258
guagaauguccuggguaac

SEQ ID NO: 1587444 - RNA, 19 nt, Artificial Sequence
  Description of Artificial Sequence: Synthetic oligonucleotide
  Antisense strand to SEQ ID NO: 1587443
guuacccaggacauucuac

SEQ ID NO: 1587445 - RNA, 19 nt, Artificial Sequence
  Description of Artificial Sequence: Synthetic oligonucleotide
  Sense strand starting at position 1705 of SEQ ID NO: 1560258
gguuguauccaguaccucu

SEQ ID NO: 1587446 - RNA, 19 nt, Artificial Sequence
  Description of Artificial Sequence: Synthetic oligonucleotide
  Antisense strand to SEQ ID NO: 1587445
agagguacuggauacaacc

SEQ ID NO: 1587447 - RNA, 19 nt, Artificial Sequence
  Description of Artificial Sequence: Synthetic oligonucleotide
  Sense strand starting at position 1734 of SEQ ID NO: 1560258
gcaggugguucuugaacca

SEQ ID NO: 1587448 - RNA, 19 nt, Artificial Sequence
  Description of Artificial Sequence: Synthetic oligonucleotide
  Antisense strand to SEQ ID NO: 1587447
ugguucaagaaccaccugc

SEQ ID NO: 1587449 - RNA, 19 nt, Artificial Sequence
  Description of Artificial Sequence: Synthetic oligonucleotide
  Sense strand starting at position 1807 of SEQ ID NO: 1560258
aagguagcauggucacaua

SEQ ID NO: 1587450 - RNA, 19 nt, Artificial Sequence
  Description of Artificial Sequence: Synthetic oligonucleotide
  Antisense strand to SEQ ID NO: 1587449
uaugugaccaugcuaccuu

SEQ ID NO: 1587451 - RNA, 19 nt, Artificial Sequence
  Description of Artificial Sequence: Synthetic oligonucleotide
  Sense strand starting at position 1871 of SEQ ID NO: 1560258
ggaggagugcuuuaguccu

SEQ ID NO: 1587452 - RNA, 19 nt, Artificial Sequence
  Description of Artificial Sequence: Synthetic oligonucleotide
  Antisense strand to SEQ ID NO: 1587451
aggacuaaagcacuccucc

SEQ ID NO: 1587453 - RNA, 19 nt, Artificial Sequence
  Description of Artificial Sequence: Synthetic oligonucleotide
  Sense strand starting at position 1925 of SEQ ID NO: 1560258
aagucaagguccuaugacu

SEQ ID NO: 1587454 - RNA, 19 nt, Artificial Sequence
  Description of Artificial Sequence: Synthetic oligonucleotide
  Antisense strand to SEQ ID NO: 1587453
agucauaggaccuugacuu

SEQ ID NO: 1587455 - RNA, 19 nt, Artificial Sequence
  Description of Artificial Sequence: Synthetic oligonucleotide
  Sense strand starting at position 1933 of SEQ ID NO: 1560258
guccuaugacuaggaaugu

SEQ ID NO: 1587456 - RNA, 19 nt, Artificial Sequence
  Description of Artificial Sequence: Synthetic oligonucleotide
  Antisense strand to SEQ ID NO: 1587455
acauuccuagucauaggac

SEQ ID NO: 1587457 - RNA, 19 nt, Artificial Sequence
  Description of Artificial Sequence: Synthetic oligonucleotide
  Sense strand starting at position 1934 of SEQ ID NO: 1560258
uccuaugacuaggaauguu

SEQ ID NO: 1587458 - RNA, 19 nt, Artificial Sequence
  Description of Artificial Sequence: Synthetic oligonucleotide
  Antisense strand to SEQ ID NO: 1587457
aacauuccuagucauagga

SEQ ID NO: 1587459 - RNA, 19 nt, Artificial Sequence
  Description of Artificial Sequence: Synthetic oligonucleotide
  Sense strand starting at position 2106 of SEQ ID NO: 1560258
guggguucuggaggaaaga

SEQ ID NO: 1587460 - RNA, 19 nt, Artificial Sequence
  Description of Artificial Sequence: Synthetic oligonucleotide
  Antisense strand to SEQ ID NO: 1587459
ucuuuccuccagaacccac

SEQ ID NO: 1587461 - RNA, 19 nt, Artificial Sequence
  Description of Artificial Sequence: Synthetic oligonucleotide
  Sense strand starting at position 2477 of SEQ ID NO: 1560258
ccuucccaucugugaaaug

SEQ ID NO: 1587462 - RNA, 19 nt, Artificial Sequence
  Description of Artificial Sequence: Synthetic oligonucleotide
  Antisense strand to SEQ ID NO: 1587461
cauuucacagaugggaagg

SEQ ID NO: 1587463 - RNA, 19 nt, Artificial Sequence
  Description of Artificial Sequence: Synthetic oligonucleotide
  Sense strand starting at position 2663 of SEQ ID NO: 1560258
gggugcugggaaugaaaga

SEQ ID NO: 1587464 - RNA, 19 nt, Artificial Sequence
  Description of Artificial Sequence: Synthetic oligonucleotide
  Antisense strand to SEQ ID NO: 1587463
ucuuucauucccagcaccc

SEQ ID NO: 1587465 - RNA, 19 nt, Artificial Sequence
  Description of Artificial Sequence: Synthetic oligonucleotide
  Sense strand starting at position 3331 of SEQ ID NO: 1560258
ugcugugacuccuaagcca

SEQ ID NO: 1587466 - RNA, 19 nt, Artificial Sequence
  Description of Artificial Sequence: Synthetic oligonucleotide
  Antisense strand to SEQ ID NO: 1587465
uggcuuaggagucacagca

SEQ ID NO: 1587467 - RNA, 19 nt, Artificial Sequence
  Description of Artificial Sequence: Synthetic oligonucleotide
  Sense strand starting at position 3344 of SEQ ID NO: 1560258
aagccauggcucugaguca

SEQ ID NO: 1587468 - RNA, 19 nt, Artificial Sequence
  Description of Artificial Sequence: Synthetic oligonucleotide
  Antisense strand to SEQ ID NO: 1587467
ugacucagagccauggcuu

SEQ ID NO: 1587469 - RNA, 19 nt, Artificial Sequence
  Description of Artificial Sequence: Synthetic oligonucleotide
  Sense strand starting at position 3397 of SEQ ID NO: 1560258
ccuccagagugguggcaua

SEQ ID NO: 1587470 - RNA, 19 nt, Artificial Sequence
  Description of Artificial Sequence: Synthetic oligonucleotide
  Antisense strand to SEQ ID NO: 1587469
uaugccaccacucuggagg

SEQ ID NO: 1587471 - RNA, 19 nt, Artificial Sequence
  Description of Artificial Sequence: Synthetic oligonucleotide
  Sense strand starting at position 53 of SEQ ID NO: 1560259
aguggacgaucuugccaua

SEQ ID NO: 1587472 - RNA, 19 nt, Artificial Sequence
  Description of Artificial Sequence: Synthetic oligonucleotide
  Antisense strand to SEQ ID NO: 1587471
uauggcaagaucguccacu

SEQ ID NO: 1587473 - RNA, 19 nt, Artificial Sequence
  Description of Artificial Sequence: Synthetic oligonucleotide
  Sense strand starting at position 56 of SEQ ID NO: 1560259
ggacgaucuugccauaggu

SEQ ID NO: 1587474 - RNA, 19 nt, Artificial Sequence
  Description of Artificial Sequence: Synthetic oligonucleotide
  Antisense strand to SEQ ID NO: 1587473
accuauggcaagaucgucc

SEQ ID NO: 1587475 - RNA, 19 nt, Artificial Sequence
  Description of Artificial Sequence: Synthetic oligonucleotide
  Sense strand starting at position 69 of SEQ ID NO: 1560259
auaggucuccgccguggaa

SEQ ID NO: 1587476 - RNA, 19 nt, Artificial Sequence
  Description of Artificial Sequence: Synthetic oligonucleotide
  Antisense strand to SEQ ID NO: 1587475
uuccacggcggagaccuau

SEQ ID NO: 1587477 - RNA, 19 nt, Artificial Sequence
  Description of Artificial Sequence: Synthetic oligonucleotide
  Sense strand starting at position 80 of SEQ ID NO: 1560259
ccguggaauccgcguagaa

SEQ ID NO: 1587478 - RNA, 19 nt, Artificial Sequence
  Description of Artificial Sequence: Synthetic oligonucleotide
  Antisense strand to SEQ ID NO: 1587477
uucuacgcggauuccacgg

SEQ ID NO: 1587479 - RNA, 19 nt, Artificial Sequence
  Description of Artificial Sequence: Synthetic oligonucleotide
  Sense strand starting at position 100 of SEQ ID NO: 1560259
ggcgucugcccauagaaca

SEQ ID NO: 1587480 - RNA, 19 nt, Artificial Sequence
  Description of Artificial Sequence: Synthetic oligonucleotide
  Antisense strand to SEQ ID NO: 1587479
uguucuaugggcagacgcc

SEQ ID NO: 1587481 - RNA, 19 nt, Artificial Sequence
  Description of Artificial Sequence: Synthetic oligonucleotide
  Sense strand starting at position 351 of SEQ ID NO: 1560259
cccucugccuggucuaaua

SEQ ID NO: 1587482 - RNA, 19 nt, Artificial Sequence
  Description of Artificial Sequence: Synthetic oligonucleotide
  Antisense strand to SEQ ID NO: 1587481
uauuagaccaggcagaggg

SEQ ID NO: 1587483 - RNA, 19 nt, Artificial Sequence
  Description of Artificial Sequence: Synthetic oligonucleotide
  Sense strand starting at position 361 of SEQ ID NO: 1560259
ggucuaauacuccgccaca

SEQ ID NO: 1587484 - RNA, 19 nt, Artificial Sequence
  Description of Artificial Sequence: Synthetic oligonucleotide
  Antisense strand to SEQ ID NO: 1587483
uguggcggaguauuagacc

SEQ ID NO: 1587485 - RNA, 19 nt, Artificial Sequence
  Description of Artificial Sequence: Synthetic oligonucleotide
  Sense strand starting at position 578 of SEQ ID NO: 1560259
aggauguugucggguuuga

SEQ ID NO: 1587486 - RNA, 19 nt, Artificial Sequence
  Description of Artificial Sequence: Synthetic oligonucleotide
  Antisense strand to SEQ ID NO: 1587485
ucaaacccgacaacauccu

SEQ ID NO: 1587487 - RNA, 19 nt, Artificial Sequence
  Description of Artificial Sequence: Synthetic oligonucleotide
  Sense strand starting at position 616 of SEQ ID NO: 1560259
agagaagggugggauaaau

SEQ ID NO: 1587488 - RNA, 19 nt, Artificial Sequence
  Description of Artificial Sequence: Synthetic oligonucleotide
  Antisense strand to SEQ ID NO: 1587487
auuuaucccacccuucucu

SEQ ID NO: 1587489 - RNA, 19 nt, Artificial Sequence
  Description of Artificial Sequence: Synthetic oligonucleotide
  Sense strand starting at position 900 of SEQ ID NO: 1560259
cgagucuauggccaugaca

SEQ ID NO: 1587490 - RNA, 19 nt, Artificial Sequence
  Description of Artificial Sequence: Synthetic oligonucleotide
  Antisense strand to SEQ ID NO: 1587489
ugucauggccauagacucg

SEQ ID NO: 1587491 - RNA, 19 nt, Artificial Sequence
  Description of Artificial Sequence: Synthetic oligonucleotide
  Sense strand starting at position 902 of SEQ ID NO: 1560259
agucuauggccaugacaau

SEQ ID NO: 1587492 - RNA, 19 nt, Artificial Sequence
  Description of Artificial Sequence: Synthetic oligonucleotide
  Antisense strand to SEQ ID NO: 1587491
auugucauggccauagacu

SEQ ID NO: 1587493 - RNA, 19 nt, Artificial Sequence
  Description of Artificial Sequence: Synthetic oligonucleotide
  Sense strand starting at position 917 of SEQ ID NO: 1560259
caaucuccgccagguagaa

SEQ ID NO: 1587494 - RNA, 19 nt, Artificial Sequence
  Description of Artificial Sequence: Synthetic oligonucleotide
  Antisense strand to SEQ ID NO: 1587493
uucuaccuggcggagauug

SEQ ID NO: 1587495 - RNA, 19 nt, Artificial Sequence
  Description of Artificial Sequence: Synthetic oligonucleotide
  Sense strand starting at position 938 of SEQ ID NO: 1560259
gcgccaucucggccggaau

SEQ ID NO: 1587496 - RNA, 19 nt, Artificial Sequence
  Description of Artificial Sequence: Synthetic oligonucleotide
  Antisense strand to SEQ ID NO: 1587495
auuccggccgagauggcgc

SEQ ID NO: 1587497 - RNA, 19 nt, Artificial Sequence
  Description of Artificial Sequence: Synthetic oligonucleotide
  Sense strand starting at position 1001 of SEQ ID NO: 1560259
cguaauacuccaugaccag

SEQ ID NO: 1587498 - RNA, 19 nt, Artificial Sequence
  Description of Artificial Sequence: Synthetic oligonucleotide
  Antisense strand to SEQ ID NO: 1587497
cuggucauggaguauuacg

SEQ ID NO: 1587499 - RNA, 19 nt, Artificial Sequence
  Description of Artificial Sequence: Synthetic oligonucleotide
  Sense strand starting at position 1155 of SEQ ID NO: 1560259
uagagaucugccgggccaa

SEQ ID NO: 1587500 - RNA, 19 nt, Artificial Sequence
  Description of Artificial Sequence: Synthetic oligonucleotide
  Antisense strand to SEQ ID NO: 1587499
uuggcccggcagaucucua

SEQ ID NO: 1587501 - RNA, 19 nt, Artificial Sequence
  Description of Artificial Sequence: Synthetic oligonucleotide
  Sense strand starting at position 1156 of SEQ ID NO: 1560259
agagaucugccgggccaaa

SEQ ID NO: 1587502 - RNA, 19 nt, Artificial Sequence
  Description of Artificial Sequence: Synthetic oligonucleotide
  Antisense strand to SEQ ID NO: 1587501
uuuggcccggcagaucucu

SEQ ID NO: 1587503 - RNA, 19 nt, Artificial Sequence
  Description of Artificial Sequence: Synthetic oligonucleotide
  Sense strand starting at position 1230 of SEQ ID NO: 1560259
aaacuuuccugggauguca

SEQ ID NO: 1587504 - RNA, 19 nt, Artificial Sequence
  Description of Artificial Sequence: Synthetic oligonucleotide
  Antisense strand to SEQ ID NO: 1587503
ugacaucccaggaaaguuu

SEQ ID NO: 1587505 - RNA, 19 nt, Artificial Sequence
  Description of Artificial Sequence: Synthetic oligonucleotide
  Sense strand starting at position 1239 of SEQ ID NO: 1560259
ugggaugucacugggcaga

SEQ ID NO: 1587506 - RNA, 19 nt, Artificial Sequence
  Description of Artificial Sequence: Synthetic oligonucleotide
  Antisense strand to SEQ ID NO: 1587505
ucugcccagugacauccca

SEQ ID NO: 1587507 - RNA, 19 nt, Artificial Sequence
  Description of Artificial Sequence: Synthetic oligonucleotide
  Sense strand starting at position 1241 of SEQ ID NO: 1560259
ggaugucacugggcagauu

SEQ ID NO: 1587508 - RNA, 19 nt, Artificial Sequence
  Description of Artificial Sequence: Synthetic oligonucleotide
  Antisense strand to SEQ ID NO: 1587507
aaucugcccagugacaucc

SEQ ID NO: 1587509 - RNA, 19 nt, Artificial Sequence
  Description of Artificial Sequence: Synthetic oligonucleotide
  Sense strand starting at position 1268 of SEQ ID NO: 1560259
cugagauguucugggaaag

SEQ ID NO: 1587510 - RNA, 19 nt, Artificial Sequence
  Description of Artificial Sequence: Synthetic oligonucleotide
  Antisense strand to SEQ ID NO: 1587509
cuuucccagaacaucucag

SEQ ID NO: 1587511 - RNA, 19 nt, Artificial Sequence
  Description of Artificial Sequence: Synthetic oligonucleotide
  Sense strand starting at position 1313 of SEQ ID NO: 1560259
gagaauaggucccagacac

SEQ ID NO: 1587512 - RNA, 19 nt, Artificial Sequence
  Description of Artificial Sequence: Synthetic oligonucleotide
  Antisense strand to SEQ ID NO: 1587511
gugucugggaccuauucuc

SEQ ID NO: 1587513 - RNA, 19 nt, Artificial Sequence
  Description of Artificial Sequence: Synthetic oligonucleotide
  Sense strand starting at position 1352 of SEQ ID NO: 1560259
ccguuagaauuccugaaga

SEQ ID NO: 1587514 - RNA, 19 nt, Artificial Sequence
  Description of Artificial Sequence: Synthetic oligonucleotide
  Antisense strand to SEQ ID NO: 1587513
ucuucaggaauucuaacgg

SEQ ID NO: 1587515 - RNA, 19 nt, Artificial Sequence
  Description of Artificial Sequence: Synthetic oligonucleotide
  Sense strand starting at position 1406 of SEQ ID NO: 1560259
gagacaucuuuauaagagu

SEQ ID NO: 1587516 - RNA, 19 nt, Artificial Sequence
  Description of Artificial Sequence: Synthetic oligonucleotide
  Antisense strand to SEQ ID NO: 1587515
acucuuauaaagaugucuc

SEQ ID NO: 1587517 - RNA, 19 nt, Artificial Sequence
  Description of Artificial Sequence: Synthetic oligonucleotide
  Sense strand starting at position 1521 of SEQ ID NO: 1560259
cagacuuucccacagacgu

SEQ ID NO: 1587518 - RNA, 19 nt, Artificial Sequence
  Description of Artificial Sequence: Synthetic oligonucleotide
  Antisense strand to SEQ ID NO: 1587517
acgucugugggaaagucug

SEQ ID NO: 1587519 - RNA, 19 nt, Artificial Sequence
  Description of Artificial Sequence: Synthetic oligonucleotide
  Sense strand starting at position 1899 of SEQ ID NO: 1560259
gcuaccugaggucgagaua

SEQ ID NO: 1587520 - RNA, 19 nt, Artificial Sequence
  Description of Artificial Sequence: Synthetic oligonucleotide
  Antisense strand to SEQ ID NO: 1587519
uaucucgaccucagguagc

SEQ ID NO: 1587521 - RNA, 19 nt, Artificial Sequence
  Description of Artificial Sequence: Synthetic oligonucleotide
  Sense strand starting at position 2058 of SEQ ID NO: 1560259
gguucuaaggcucggucau

SEQ ID NO: 1587522 - RNA, 19 nt, Artificial Sequence
  Description of Artificial Sequence: Synthetic oligonucleotide
  Antisense strand to SEQ ID NO: 1587521
augaccgagccuuagaacc

SEQ ID NO: 1587523 - RNA, 19 nt, Artificial Sequence
  Description of Artificial Sequence: Synthetic oligonucleotide
  Sense strand starting at position 2059 of SEQ ID NO: 1560259
guucuaaggcucggucauu

SEQ ID NO: 1587524 - RNA, 19 nt, Artificial Sequence
  Description of Artificial Sequence: Synthetic oligonucleotide
  Antisense strand to SEQ ID NO: 1587523
aaugaccgagccuuagaac

SEQ ID NO: 1587525 - RNA, 19 nt, Artificial Sequence
  Description of Artificial Sequence: Synthetic oligonucleotide
  Sense strand starting at position 2443 of SEQ ID NO: 1560259
aggugagaugccugagaag

SEQ ID NO: 1587526 - RNA, 19 nt, Artificial Sequence
  Description of Artificial Sequence: Synthetic oligonucleotide
  Antisense strand to SEQ ID NO: 1587525
cuucucaggcaucucaccu

SEQ ID NO: 1587527 - RNA, 19 nt, Artificial Sequence
  Description of Artificial Sequence: Synthetic oligonucleotide
  Sense strand starting at position 2656 of SEQ ID NO: 1560259
uguagaauguccuggguaa

SEQ ID NO: 1587528 - RNA, 19 nt, Artificial Sequence
  Description of Artificial Sequence: Synthetic oligonucleotide
  Antisense strand to SEQ ID NO: 1587527
uuacccaggacauucuaca

SEQ ID NO: 1587529 - RNA, 19 nt, Artificial Sequence
  Description of Artificial Sequence: Synthetic oligonucleotide
  Sense strand starting at position 2657 of SEQ ID NO: 1560259
guagaauguccuggguaac

SEQ ID NO: 1587530 - RNA, 19 nt, Artificial Sequence
  Description of Artificial Sequence: Synthetic oligonucleotide
  Antisense strand to SEQ ID NO: 1587529
guuacccaggacauucuac

SEQ ID NO: 1587531 - RNA, 19 nt, Artificial Sequence
  Description of Artificial Sequence: Synthetic oligonucleotide
  Sense strand starting at position 2689 of SEQ ID NO: 1560259
gguuguauccaguaccucu

SEQ ID NO: 1587532 - RNA, 19 nt, Artificial Sequence
  Description of Artificial Sequence: Synthetic oligonucleotide
  Antisense strand to SEQ ID NO: 1587531
agagguacuggauacaacc

SEQ ID NO: 1587533 - RNA, 19 nt, Artificial Sequence
  Description of Artificial Sequence: Synthetic oligonucleotide
  Sense strand starting at position 2718 of SEQ ID NO: 1560259
gcaggugguucuugaacca

SEQ ID NO: 1587534 - RNA, 19 nt, Artificial Sequence
  Description of Artificial Sequence: Synthetic oligonucleotide
  Antisense strand to SEQ ID NO: 1587533
ugguucaagaaccaccugc

SEQ ID NO: 1587535 - RNA, 19 nt, Artificial Sequence
  Description of Artificial Sequence: Synthetic oligonucleotide
  Sense strand starting at position 2791 of SEQ ID NO: 1560259
aagguagcauggucacaua

SEQ ID NO: 1587536 - RNA, 19 nt, Artificial Sequence
  Description of Artificial Sequence: Synthetic oligonucleotide
  Antisense strand to SEQ ID NO: 1587535
uaugugaccaugcuaccuu

SEQ ID NO: 1587537 - RNA, 19 nt, Artificial Sequence
  Description of Artificial Sequence: Synthetic oligonucleotide
  Sense strand starting at position 2855 of SEQ ID NO: 1560259
ggaggagugcuuuaguccu

SEQ ID NO: 1587538 - RNA, 19 nt, Artificial Sequence
  Description of Artificial Sequence: Synthetic oligonucleotide
  Antisense strand to SEQ ID NO: 1587537
aggacuaaagcacuccucc

SEQ ID NO: 1587539 - RNA, 19 nt, Artificial Sequence
  Description of Artificial Sequence: Synthetic oligonucleotide
  Sense strand starting at position 2909 of SEQ ID NO: 1560259
aagucaagguccuaugacu

SEQ ID NO: 1587540 - RNA, 19 nt, Artificial Sequence
  Description of Artificial Sequence: Synthetic oligonucleotide
  Antisense strand to SEQ ID NO: 1587539
agucauaggaccuugacuu

SEQ ID NO: 1587541 - RNA, 19 nt, Artificial Sequence
  Description of Artificial Sequence: Synthetic oligonucleotide
  Sense strand starting at position 2917 of SEQ ID NO: 1560259
guccuaugacuaggaaugu

SEQ ID NO: 1587542 - RNA, 19 nt, Artificial Sequence
  Description of Artificial Sequence: Synthetic oligonucleotide
  Antisense strand to SEQ ID NO: 1587541
acauuccuagucauaggac

SEQ ID NO: 1587543 - RNA, 19 nt, Artificial Sequence
  Description of Artificial Sequence: Synthetic oligonucleotide
  Sense strand starting at position 2918 of SEQ ID NO: 1560259
uccuaugacuaggaauguu

SEQ ID NO: 1587544 - RNA, 19 nt, Artificial Sequence
  Description of Artificial Sequence: Synthetic oligonucleotide
  Antisense strand to SEQ ID NO: 1587543
aacauuccuagucauagga

SEQ ID NO: 1587545 - RNA, 19 nt, Artificial Sequence
  Description of Artificial Sequence: Synthetic oligonucleotide
  Sense strand starting at position 3090 of SEQ ID NO: 1560259
guggguucuggaggaaaga

SEQ ID NO: 1587546 - RNA, 19 nt, Artificial Sequence
  Description of Artificial Sequence: Synthetic oligonucleotide
  Antisense strand to SEQ ID NO: 1587545
ucuuuccuccagaacccac

SEQ ID NO: 1587547 - RNA, 19 nt, Artificial Sequence
  Description of Artificial Sequence: Synthetic oligonucleotide
  Sense strand starting at position 3461 of SEQ ID NO: 1560259
ccuucccaucugugaaaug

SEQ ID NO: 1587548 - RNA, 19 nt, Artificial Sequence
  Description of Artificial Sequence: Synthetic oligonucleotide
  Antisense strand to SEQ ID NO: 1587547
cauuucacagaugggaagg

SEQ ID NO: 1587549 - RNA, 19 nt, Artificial Sequence
  Description of Artificial Sequence: Synthetic oligonucleotide
  Sense strand starting at position 3647 of SEQ ID NO: 1560259
gggugcugggaaugaaaga

SEQ ID NO: 1587550 - RNA, 19 nt, Artificial Sequence
  Description of Artificial Sequence: Synthetic oligonucleotide
  Antisense strand to SEQ ID NO: 1587549
ucuuucauucccagcaccc

SEQ ID NO: 1587551 - RNA, 19 nt, Artificial Sequence
  Description of Artificial Sequence: Synthetic oligonucleotide
  Sense strand starting at position 591 of SEQ ID NO: 1560260
gcccgacauucuguauucu

SEQ ID NO: 1587552 - RNA, 19 nt, Artificial Sequence
  Description of Artificial Sequence: Synthetic oligonucleotide
  Antisense strand to SEQ ID NO: 1587551
agaauacagaaugucgggc

SEQ ID NO: 1587553 - RNA, 19 nt, Artificial Sequence
  Description of Artificial Sequence: Synthetic oligonucleotide
  Sense strand starting at position 592 of SEQ ID NO: 1560260
cccgacauucuguauucuu

SEQ ID NO: 1587554 - RNA, 19 nt, Artificial Sequence
  Description of Artificial Sequence: Synthetic oligonucleotide
  Antisense strand to SEQ ID NO: 1587553
aagaauacagaaugucggg

SEQ ID NO: 1587555 - RNA, 19 nt, Artificial Sequence
  Description of Artificial Sequence: Synthetic oligonucleotide
  Sense strand starting at position 895 of SEQ ID NO: 1560260
cuugcauuccuuuagucuu

SEQ ID NO: 1587556 - RNA, 19 nt, Artificial Sequence
  Description of Artificial Sequence: Synthetic oligonucleotide
  Antisense strand to SEQ ID NO: 1587555
aagacuaaaggaaugcaag

SEQ ID NO: 1587557 - RNA, 19 nt, Artificial Sequence
  Description of Artificial Sequence: Synthetic oligonucleotide
  Sense strand starting at position 897 of SEQ ID NO: 1560260
ugcauuccuuuagucuuau

SEQ ID NO: 1587558 - RNA, 19 nt, Artificial Sequence
  Description of Artificial Sequence: Synthetic oligonucleotide
  Antisense strand to SEQ ID NO: 1587557
auaagacuaaaggaaugca

SEQ ID NO: 1587559 - RNA, 19 nt, Artificial Sequence
  Description of Artificial Sequence: Synthetic oligonucleotide
  Sense strand starting at position 898 of SEQ ID NO: 1560260
gcauuccuuuagucuuauu

SEQ ID NO: 1587560 - RNA, 19 nt, Artificial Sequence
  Description of Artificial Sequence: Synthetic oligonucleotide
  Antisense strand to SEQ ID NO: 1587559
aauaagacuaaaggaaugc

SEQ ID NO: 1587561 - RNA, 19 nt, Artificial Sequence
  Description of Artificial Sequence: Synthetic oligonucleotide
  Sense strand starting at position 1562 of SEQ ID NO: 1560260
ggcccugaucugggccaaa

SEQ ID NO: 1587562 - RNA, 19 nt, Artificial Sequence
  Description of Artificial Sequence: Synthetic oligonucleotide
  Antisense strand to SEQ ID NO: 1587561
uuuggcccagaucagggcc

SEQ ID NO: 1587563 - RNA, 19 nt, Artificial Sequence
  Description of Artificial Sequence: Synthetic oligonucleotide
  Sense strand starting at position 1637 of SEQ ID NO: 1560260
uguguaaacaugugaaguc

SEQ ID NO: 1587564 - RNA, 19 nt, Artificial Sequence
  Description of Artificial Sequence: Synthetic oligonucleotide
  Antisense strand to SEQ ID NO: 1587563
gacuucacauguuuacaca

SEQ ID NO: 1587565 - RNA, 19 nt, Artificial Sequence
  Description of Artificial Sequence: Synthetic oligonucleotide
  Sense strand starting at position 1892 of SEQ ID NO: 1560260
gaccguguucgugcagcua

SEQ ID NO: 1587566 - RNA, 19 nt, Artificial Sequence
  Description of Artificial Sequence: Synthetic oligonucleotide
  Antisense strand to SEQ ID NO: 1587565
uagcugcacgaacacgguc

SEQ ID NO: 1587567 - RNA, 19 nt, Artificial Sequence
  Description of Artificial Sequence: Synthetic oligonucleotide
  Sense strand starting at position 2158 of SEQ ID NO: 1560260
caccaauagcgcuucgagu

SEQ ID NO: 1587568 - RNA, 19 nt, Artificial Sequence
  Description of Artificial Sequence: Synthetic oligonucleotide
  Antisense strand to SEQ ID NO: 1587567
acucgaagcgcuauuggug

SEQ ID NO: 1587569 - RNA, 19 nt, Artificial Sequence
  Description of Artificial Sequence: Synthetic oligonucleotide
  Sense strand starting at position 2159 of SEQ ID NO: 1560260
accaauagcgcuucgaguu

SEQ ID NO: 1587570 - RNA, 19 nt, Artificial Sequence
  Description of Artificial Sequence: Synthetic oligonucleotide
  Antisense strand to SEQ ID NO: 1587569
aacucgaagcgcuauuggu

SEQ ID NO: 1587571 - RNA, 19 nt, Artificial Sequence
  Description of Artificial Sequence: Synthetic oligonucleotide
  Sense strand starting at position 2446 of SEQ ID NO: 1560260
cuguuaugucucuuccggu

SEQ ID NO: 1587572 - RNA, 19 nt, Artificial Sequence
  Description of Artificial Sequence: Synthetic oligonucleotide
  Antisense strand to SEQ ID NO: 1587571
accggaagagacauaacag

SEQ ID NO: 1587573 - RNA, 19 nt, Artificial Sequence
  Description of Artificial Sequence: Synthetic oligonucleotide
  Sense strand starting at position 2503 of SEQ ID NO: 1560260
ucucccagcgcugugauua

SEQ ID NO: 1587574 - RNA, 19 nt, Artificial Sequence
  Description of Artificial Sequence: Synthetic oligonucleotide
  Antisense strand to SEQ ID NO: 1587573
uaaucacagcgcugggaga

SEQ ID NO: 1587575 - RNA, 19 nt, Artificial Sequence
  Description of Artificial Sequence: Synthetic oligonucleotide
  Sense strand starting at position 2513 of SEQ ID NO: 1560260
cugugauuaccggguugcu

SEQ ID NO: 1587576 - RNA, 19 nt, Artificial Sequence
  Description of Artificial Sequence: Synthetic oligonucleotide
  Antisense strand to SEQ ID NO: 1587575
agcaacccgguaaucacag

SEQ ID NO: 1587577 - RNA, 19 nt, Artificial Sequence
  Description of Artificial Sequence: Synthetic oligonucleotide
  Sense strand starting at position 2537 of SEQ ID NO: 1560260
ggcccuccuuccucagauu

SEQ ID NO: 1587578 - RNA, 19 nt, Artificial Sequence
  Description of Artificial Sequence: Synthetic oligonucleotide
  Antisense strand to SEQ ID NO: 1587577
aaucugaggaaggagggcc

SEQ ID NO: 1587579 - RNA, 19 nt, Artificial Sequence
  Description of Artificial Sequence: Synthetic oligonucleotide
  Sense strand starting at position 2584 of SEQ ID NO: 1560260
cuuugugucgguugugauu

SEQ ID NO: 1587580 - RNA, 19 nt, Artificial Sequence
  Description of Artificial Sequence: Synthetic oligonucleotide
  Antisense strand to SEQ ID NO: 1587579
aaucacaaccgacacaaag

SEQ ID NO: 1587581 - RNA, 19 nt, Artificial Sequence
  Description of Artificial Sequence: Synthetic oligonucleotide
  Sense strand starting at position 2794 of SEQ ID NO: 1560260
ggcuccucuguguaaucgu

SEQ ID NO: 1587582 - RNA, 19 nt, Artificial Sequence
  Description of Artificial Sequence: Synthetic oligonucleotide
  Antisense strand to SEQ ID NO: 1587581
acgauuacacagaggagcc

SEQ ID NO: 1587583 - RNA, 19 nt, Artificial Sequence
  Description of Artificial Sequence: Synthetic oligonucleotide
  Sense strand starting at position 2802 of SEQ ID NO: 1560260
uguguaaucgucgccuucu

SEQ ID NO: 1587584 - RNA, 19 nt, Artificial Sequence
  Description of Artificial Sequence: Synthetic oligonucleotide
  Antisense strand to SEQ ID NO: 1587583
agaaggcgacgauuacaca

SEQ ID NO: 1587585 - RNA, 19 nt, Artificial Sequence
  Description of Artificial Sequence: Synthetic oligonucleotide
  Sense strand starting at position 2812 of SEQ ID NO: 1560260
ucgccuucucuggguauuu

SEQ ID NO: 1587586 - RNA, 19 nt, Artificial Sequence
  Description of Artificial Sequence: Synthetic oligonucleotide
  Antisense strand to SEQ ID NO: 1587585
aaauacccagagaaggcga

SEQ ID NO: 1587587 - RNA, 19 nt, Artificial Sequence
  Description of Artificial Sequence: Synthetic oligonucleotide
  Sense strand starting at position 3032 of SEQ ID NO: 1560260
ccaucaauuuguuugucuu

SEQ ID NO: 1587588 - RNA, 19 nt, Artificial Sequence
  Description of Artificial Sequence: Synthetic oligonucleotide
  Antisense strand to SEQ ID NO: 1587587
aagacaaacaaauugaugg

SEQ ID NO: 1587589 - RNA, 19 nt, Artificial Sequence
  Description of Artificial Sequence: Synthetic oligonucleotide
  Sense strand starting at position 3186 of SEQ ID NO: 1560260
ccaguuguucugcaucuga

SEQ ID NO: 1587590 - RNA, 19 nt, Artificial Sequence
  Description of Artificial Sequence: Synthetic oligonucleotide
  Antisense strand to SEQ ID NO: 1587589
ucagaugcagaacaacugg

SEQ ID NO: 1587591 - RNA, 19 nt, Artificial Sequence
  Description of Artificial Sequence: Synthetic oligonucleotide
  Sense strand starting at position 3212 of SEQ ID NO: 1560260
gugugcugucuucucugau

SEQ ID NO: 1587592 - RNA, 19 nt, Artificial Sequence
  Description of Artificial Sequence: Synthetic oligonucleotide
  Antisense strand to SEQ ID NO: 1587591
aucagagaagacagcacac

SEQ ID NO: 1587593 - RNA, 19 nt, Artificial Sequence
  Description of Artificial Sequence: Synthetic oligonucleotide
  Sense strand starting at position 3213 of SEQ ID NO: 1560260
ugugcugucuucucugauu

SEQ ID NO: 1587594 - RNA, 19 nt, Artificial Sequence
  Description of Artificial Sequence: Synthetic oligonucleotide
  Antisense strand to SEQ ID NO: 1587593
aaucagagaagacagcaca

SEQ ID NO: 1587595 - RNA, 19 nt, Artificial Sequence
  Description of Artificial Sequence: Synthetic oligonucleotide
  Sense strand starting at position 3224 of SEQ ID NO: 1560260
cucugauuggccuaaucuc

SEQ ID NO: 1587596 - RNA, 19 nt, Artificial Sequence
  Description of Artificial Sequence: Synthetic oligonucleotide
  Antisense strand to SEQ ID NO: 1587595
gagauuaggccaaucagag

SEQ ID NO: 1587597 - RNA, 19 nt, Artificial Sequence
  Description of Artificial Sequence: Synthetic oligonucleotide
  Sense strand starting at position 3316 of SEQ ID NO: 1560260
accuuucuuggccacagau

SEQ ID NO: 1587598 - RNA, 19 nt, Artificial Sequence
  Description of Artificial Sequence: Synthetic oligonucleotide
  Antisense strand to SEQ ID NO: 1587597
aucuguggccaagaaaggu

SEQ ID NO: 1587599 - RNA, 19 nt, Artificial Sequence
  Description of Artificial Sequence: Synthetic oligonucleotide
  Sense strand starting at position 3326 of SEQ ID NO: 1560260
gccacagauuucuggguua

SEQ ID NO: 1587600 - RNA, 19 nt, Artificial Sequence
  Description of Artificial Sequence: Synthetic oligonucleotide
  Antisense strand to SEQ ID NO: 1587599
uaacccagaaaucuguggc

SEQ ID NO: 1587601 - RNA, 19 nt, Artificial Sequence
  Description of Artificial Sequence: Synthetic oligonucleotide
  Sense strand starting at position 3504 of SEQ ID NO: 1560260
agcuaaagagguugaacuu

SEQ ID NO: 1587602 - RNA, 19 nt, Artificial Sequence
  Description of Artificial Sequence: Synthetic oligonucleotide
  Antisense strand to SEQ ID NO: 1587601
aaguucaaccucuuuagcu

SEQ ID NO: 1587603 - RNA, 19 nt, Artificial Sequence
  Description of Artificial Sequence: Synthetic oligonucleotide
  Sense strand starting at position 3513 of SEQ ID NO: 1560260
gguugaacuugauccuuua

SEQ ID NO: 1587604 - RNA, 19 nt, Artificial Sequence
  Description of Artificial Sequence: Synthetic oligonucleotide
  Antisense strand to SEQ ID NO: 1587603
uaaaggaucaaguucaacc

SEQ ID NO: 1587605 - RNA, 19 nt, Artificial Sequence
  Description of Artificial Sequence: Synthetic oligonucleotide
  Sense strand starting at position 3516 of SEQ ID NO: 1560260
ugaacuugauccuuuaggu

SEQ ID NO: 1587606 - RNA, 19 nt, Artificial Sequence
  Description of Artificial Sequence: Synthetic oligonucleotide
  Antisense strand to SEQ ID NO: 1587605
accuaaaggaucaaguuca

SEQ ID NO: 1587607 - RNA, 19 nt, Artificial Sequence
  Description of Artificial Sequence: Synthetic oligonucleotide
  Sense strand starting at position 3571 of SEQ ID NO: 1560260
gagggauagugguagagga

SEQ ID NO: 1587608 - RNA, 19 nt, Artificial Sequence
  Description of Artificial Sequence: Synthetic oligonucleotide
  Antisense strand to SEQ ID NO: 1587607
uccucuaccacuaucccuc

SEQ ID NO: 1587609 - RNA, 19 nt, Artificial Sequence
  Description of Artificial Sequence: Synthetic oligonucleotide
  Sense strand starting at position 3591 of SEQ ID NO: 1560260
caggguaaccaacgauuau

SEQ ID NO: 1587610 - RNA, 19 nt, Artificial Sequence
  Description of Artificial Sequence: Synthetic oligonucleotide
  Antisense strand to SEQ ID NO: 1587609
auaaucguugguuacccug

SEQ ID NO: 1587611 - RNA, 19 nt, Artificial Sequence
  Description of Artificial Sequence: Synthetic oligonucleotide
  Sense strand starting at position 3614 of SEQ ID NO: 1560260
agcuuagcauuugccuaau

SEQ ID NO: 1587612 - RNA, 19 nt, Artificial Sequence
  Description of Artificial Sequence: Synthetic oligonucleotide
  Antisense strand to SEQ ID NO: 1587611
auuaggcaaaugcuaagcu

SEQ ID NO: 1587613 - RNA, 19 nt, Artificial Sequence
  Description of Artificial Sequence: Synthetic oligonucleotide
  Sense strand starting at position 3662 of SEQ ID NO: 1560260
caaugacccuaugagaugu

SEQ ID NO: 1587614 - RNA, 19 nt, Artificial Sequence
  Description of Artificial Sequence: Synthetic oligonucleotide
  Antisense strand to SEQ ID NO: 1587613
acaucucauagggucauug

SEQ ID NO: 1587615 - RNA, 19 nt, Artificial Sequence
  Description of Artificial Sequence: Synthetic oligonucleotide
  Sense strand starting at position 3704 of SEQ ID NO: 1560260
gguaguaggcucugaguuc

SEQ ID NO: 1587616 - RNA, 19 nt, Artificial Sequence
  Description of Artificial Sequence: Synthetic oligonucleotide
  Antisense strand to SEQ ID NO: 1587615
gaacucagagccuacuacc

SEQ ID NO: 1587617 - RNA, 19 nt, Artificial Sequence
  Description of Artificial Sequence: Synthetic oligonucleotide
  Sense strand starting at position 3860 of SEQ ID NO: 1560260
aggcaauucucauucuaag

SEQ ID NO: 1587618 - RNA, 19 nt, Artificial Sequence
  Description of Artificial Sequence: Synthetic oligonucleotide
  Antisense strand to SEQ ID NO: 1587617
cuuagaaugagaauugccu

SEQ ID NO: 1587619 - RNA, 19 nt, Artificial Sequence
  Description of Artificial Sequence: Synthetic oligonucleotide
  Sense strand starting at position 3869 of SEQ ID NO: 1560260
ucauucuaaggugguuaau

SEQ ID NO: 1587620 - RNA, 19 nt, Artificial Sequence
  Description of Artificial Sequence: Synthetic oligonucleotide
  Antisense strand to SEQ ID NO: 1587619
auuaaccaccuuagaauga

SEQ ID NO: 1587621 - RNA, 19 nt, Artificial Sequence
  Description of Artificial Sequence: Synthetic oligonucleotide
  Sense strand starting at position 3871 of SEQ ID NO: 1560260
auucuaaggugguuaauau

SEQ ID NO: 1587622 - RNA, 19 nt, Artificial Sequence
  Description of Artificial Sequence: Synthetic oligonucleotide
  Antisense strand to SEQ ID NO: 1587621
auauuaaccaccuuagaau

SEQ ID NO: 1587623 - RNA, 19 nt, Artificial Sequence
  Description of Artificial Sequence: Synthetic oligonucleotide
  Sense strand starting at position 3878 of SEQ ID NO: 1560260
ggugguuaauauguaucuu

SEQ ID NO: 1587624 - RNA, 19 nt, Artificial Sequence
  Description of Artificial Sequence: Synthetic oligonucleotide
  Antisense strand to SEQ ID NO: 1587623
aagauacauauuaaccacc

SEQ ID NO: 1587625 - RNA, 19 nt, Artificial Sequence
  Description of Artificial Sequence: Synthetic oligonucleotide
  Sense strand starting at position 3879 of SEQ ID NO: 1560260
gugguuaauauguaucuuu

SEQ ID NO: 1587626 - RNA, 19 nt, Artificial Sequence
  Description of Artificial Sequence: Synthetic oligonucleotide
  Antisense strand to SEQ ID NO: 1587625
aaagauacauauuaaccac

SEQ ID NO: 1587627 - RNA, 19 nt, Artificial Sequence
  Description of Artificial Sequence: Synthetic oligonucleotide
  Sense strand starting at position 3910 of SEQ ID NO: 1560260
guguucucccaggaugugu

SEQ ID NO: 1587628 - RNA, 19 nt, Artificial Sequence
  Description of Artificial Sequence: Synthetic oligonucleotide
  Antisense strand to SEQ ID NO: 1587627
acacauccugggagaacac

SEQ ID NO: 1587629 - RNA, 19 nt, Artificial Sequence
  Description of Artificial Sequence: Synthetic oligonucleotide
  Sense strand starting at position 3918 of SEQ ID NO: 1560260
ccaggauguguguaguguu

SEQ ID NO: 1587630 - RNA, 19 nt, Artificial Sequence
  Description of Artificial Sequence: Synthetic oligonucleotide
  Antisense strand to SEQ ID NO: 1587629
aacacuacacacauccugg

SEQ ID NO: 1587631 - RNA, 19 nt, Artificial Sequence
  Description of Artificial Sequence: Synthetic oligonucleotide
  Sense strand starting at position 135 of SEQ ID NO: 1560261
ugaugagauccagguacug

SEQ ID NO: 1587632 - RNA, 19 nt, Artificial Sequence
  Description of Artificial Sequence: Synthetic oligonucleotide
  Antisense strand to SEQ ID NO: 1587631
caguaccuggaucucauca

SEQ ID NO: 1587633 - RNA, 19 nt, Artificial Sequence
  Description of Artificial Sequence: Synthetic oligonucleotide
  Sense strand starting at position 204 of SEQ ID NO: 1560261
cagugaacugguugaaauc

SEQ ID NO: 1587634 - RNA, 19 nt, Artificial Sequence
  Description of Artificial Sequence: Synthetic oligonucleotide
  Antisense strand to SEQ ID NO: 1587633
gauuucaaccaguucacug

SEQ ID NO: 1587635 - RNA, 19 nt, Artificial Sequence
  Description of Artificial Sequence: Synthetic oligonucleotide
  Sense strand starting at position 213 of SEQ ID NO: 1560261
gguugaaaucguggcaggu

SEQ ID NO: 1587636 - RNA, 19 nt, Artificial Sequence
  Description of Artificial Sequence: Synthetic oligonucleotide
  Antisense strand to SEQ ID NO: 1587635
accugccacgauuucaacc

SEQ ID NO: 1587637 - RNA, 19 nt, Artificial Sequence
  Description of Artificial Sequence: Synthetic oligonucleotide
  Sense strand starting at position 246 of SEQ ID NO: 1560261
uguagauccgcuugucaau

SEQ ID NO: 1587638 - RNA, 19 nt, Artificial Sequence
  Description of Artificial Sequence: Synthetic oligonucleotide
  Antisense strand to SEQ ID NO: 1587637
auugacaagcggaucuaca

SEQ ID NO: 1587639 - RNA, 19 nt, Artificial Sequence
  Description of Artificial Sequence: Synthetic oligonucleotide
  Sense strand starting at position 258 of SEQ ID NO: 1560261
ugucaauuggcuuguugag

SEQ ID NO: 1587640 - RNA, 19 nt, Artificial Sequence
  Description of Artificial Sequence: Synthetic oligonucleotide
  Antisense strand to SEQ ID NO: 1587639
cucaacaagccaauugaca

SEQ ID NO: 1587641 - RNA, 19 nt, Artificial Sequence
  Description of Artificial Sequence: Synthetic oligonucleotide
  Sense strand starting at position 267 of SEQ ID NO: 1560261
gcuuguugaggucaaugga

SEQ ID NO: 1587642 - RNA, 19 nt, Artificial Sequence
  Description of Artificial Sequence: Synthetic oligonucleotide
  Antisense strand to SEQ ID NO: 1587641
uccauugaccucaacaagc

SEQ ID NO: 1587643 - RNA, 19 nt, Artificial Sequence
  Description of Artificial Sequence: Synthetic oligonucleotide
  Sense strand starting at position 270 of SEQ ID NO: 1560261
uguugaggucaauggacuu

SEQ ID NO: 1587644 - RNA, 19 nt, Artificial Sequence
  Description of Artificial Sequence: Synthetic oligonucleotide
  Antisense strand to SEQ ID NO: 1587643
aaguccauugaccucaaca

SEQ ID NO: 1587645 - RNA, 19 nt, Artificial Sequence
  Description of Artificial Sequence: Synthetic oligonucleotide
  Sense strand starting at position 302 of SEQ ID NO: 1560261
aaaggaguuaaugguguau

SEQ ID NO: 1587646 - RNA, 19 nt, Artificial Sequence
  Description of Artificial Sequence: Synthetic oligonucleotide
  Antisense strand to SEQ ID NO: 1587645
auacaccauuaacuccuuu

SEQ ID NO: 1587647 - RNA, 19 nt, Artificial Sequence
  Description of Artificial Sequence: Synthetic oligonucleotide
  Sense strand starting at position 306 of SEQ ID NO: 1560261
gaguuaaugguguaugcca

SEQ ID NO: 1587648 - RNA, 19 nt, Artificial Sequence
  Description of Artificial Sequence: Synthetic oligonucleotide
  Antisense strand to SEQ ID NO: 1587647
uggcauacaccauuaacuc

SEQ ID NO: 1587649 - RNA, 19 nt, Artificial Sequence
  Description of Artificial Sequence: Synthetic oligonucleotide
  Sense strand starting at position 520 of SEQ ID NO: 1560261
aaaguugggucaccucuaa

SEQ ID NO: 1587650 - RNA, 19 nt, Artificial Sequence
  Description of Artificial Sequence: Synthetic oligonucleotide
  Antisense strand to SEQ ID NO: 1587649
uuagaggugacccaacuuu

SEQ ID NO: 1587651 - RNA, 19 nt, Artificial Sequence
  Description of Artificial Sequence: Synthetic oligonucleotide
  Sense strand starting at position 763 of SEQ ID NO: 1560261
aguucugggacccgucaaa

SEQ ID NO: 1587652 - RNA, 19 nt, Artificial Sequence
  Description of Artificial Sequence: Synthetic oligonucleotide
  Antisense strand to SEQ ID NO: 1587651
uuugacgggucccagaacu

SEQ ID NO: 1587653 - RNA, 19 nt, Artificial Sequence
  Description of Artificial Sequence: Synthetic oligonucleotide
  Sense strand starting at position 837 of SEQ ID NO: 1560261
cccaucauuucugggauca

SEQ ID NO: 1587654 - RNA, 19 nt, Artificial Sequence
  Description of Artificial Sequence: Synthetic oligonucleotide
  Antisense strand to SEQ ID NO: 1587653
ugaucccagaaaugauggg

SEQ ID NO: 1587655 - RNA, 19 nt, Artificial Sequence
  Description of Artificial Sequence: Synthetic oligonucleotide
  Sense strand starting at position 877 of SEQ ID NO: 1560261
accacaucgcuuuagagau

SEQ ID NO: 1587656 - RNA, 19 nt, Artificial Sequence
  Description of Artificial Sequence: Synthetic oligonucleotide
  Antisense strand to SEQ ID NO: 1587655
aucucuaaagcgauguggu

SEQ ID NO: 1587657 - RNA, 19 nt, Artificial Sequence
  Description of Artificial Sequence: Synthetic oligonucleotide
  Sense strand starting at position 930 of SEQ ID NO: 1560261
gccucucauucccuugaga

SEQ ID NO: 1587658 - RNA, 19 nt, Artificial Sequence
  Description of Artificial Sequence: Synthetic oligonucleotide
  Antisense strand to SEQ ID NO: 1587657
ucucaagggaaugagaggc

SEQ ID NO: 1587659 - RNA, 19 nt, Artificial Sequence
  Description of Artificial Sequence: Synthetic oligonucleotide
  Sense strand starting at position 932 of SEQ ID NO: 1560261
cucucauucccuugagagc

SEQ ID NO: 1587660 - RNA, 19 nt, Artificial Sequence
  Description of Artificial Sequence: Synthetic oligonucleotide
  Antisense strand to SEQ ID NO: 1587659
gcucucaagggaaugagag

SEQ ID NO: 1587661 - RNA, 19 nt, Artificial Sequence
  Description of Artificial Sequence: Synthetic oligonucleotide
  Sense strand starting at position 933 of SEQ ID NO: 1560261
ucucauucccuugagagcu

SEQ ID NO: 1587662 - RNA, 19 nt, Artificial Sequence
  Description of Artificial Sequence: Synthetic oligonucleotide
  Antisense strand to SEQ ID NO: 1587661
agcucucaagggaaugaga

SEQ ID NO: 1587663 - RNA, 19 nt, Artificial Sequence
  Description of Artificial Sequence: Synthetic oligonucleotide
  Sense strand starting at position 1080 of SEQ ID NO: 1560261
ccucauuccugggcucaau

SEQ ID NO: 1587664 - RNA, 19 nt, Artificial Sequence
  Description of Artificial Sequence: Synthetic oligonucleotide
  Antisense strand to SEQ ID NO: 1587663
auugagcccaggaaugagg

SEQ ID NO: 1587665 - RNA, 19 nt, Artificial Sequence
  Description of Artificial Sequence: Synthetic oligonucleotide
  Sense strand starting at position 1265 of SEQ ID NO: 1560261
ccagaacuccuacgcauaa

SEQ ID NO: 1587666 - RNA, 19 nt, Artificial Sequence
  Description of Artificial Sequence: Synthetic oligonucleotide
  Antisense strand to SEQ ID NO: 1587665
uuaugcguaggaguucugg

SEQ ID NO: 1587667 - RNA, 19 nt, Artificial Sequence
  Description of Artificial Sequence: Synthetic oligonucleotide
  Sense strand starting at position 1337 of SEQ ID NO: 1560261
gcgggccucucaucacauu

SEQ ID NO: 1587668 - RNA, 19 nt, Artificial Sequence
  Description of Artificial Sequence: Synthetic oligonucleotide
  Antisense strand to SEQ ID NO: 1587667
aaugugaugagaggcccgc

SEQ ID NO: 1587669 - RNA, 19 nt, Artificial Sequence
  Description of Artificial Sequence: Synthetic oligonucleotide
  Sense strand starting at position 1449 of SEQ ID NO: 1560261
uccuaucaguucucuggaa

SEQ ID NO: 1587670 - RNA, 19 nt, Artificial Sequence
  Description of Artificial Sequence: Synthetic oligonucleotide
  Antisense strand to SEQ ID NO: 1587669
uuccagagaacugauagga

SEQ ID NO: 1587671 - RNA, 19 nt, Artificial Sequence
  Description of Artificial Sequence: Synthetic oligonucleotide
  Sense strand starting at position 1843 of SEQ ID NO: 1560261
ccgggaguagcuuguagaa

SEQ ID NO: 1587672 - RNA, 19 nt, Artificial Sequence
  Description of Artificial Sequence: Synthetic oligonucleotide
  Antisense strand to SEQ ID NO: 1587671
uucuacaagcuacucccgg

SEQ ID NO: 1587673 - RNA, 19 nt, Artificial Sequence
  Description of Artificial Sequence: Synthetic oligonucleotide
  Sense strand starting at position 1845 of SEQ ID NO: 1560261
gggaguagcuuguagaaac

SEQ ID NO: 1587674 - RNA, 19 nt, Artificial Sequence
  Description of Artificial Sequence: Synthetic oligonucleotide
  Antisense strand to SEQ ID NO: 1587673
guuucuacaagcuacuccc

SEQ ID NO: 1587675 - RNA, 19 nt, Artificial Sequence
  Description of Artificial Sequence: Synthetic oligonucleotide
  Sense strand starting at position 1884 of SEQ ID NO: 1560261
gacuuaaucuccgcgcagu

SEQ ID NO: 1587676 - RNA, 19 nt, Artificial Sequence
  Description of Artificial Sequence: Synthetic oligonucleotide
  Antisense strand to SEQ ID NO: 1587675
acugcgcggagauuaaguc

SEQ ID NO: 1587677 - RNA, 19 nt, Artificial Sequence
  Description of Artificial Sequence: Synthetic oligonucleotide
  Sense strand starting at position 2056 of SEQ ID NO: 1560261
cgggcaacgccucuucgau

SEQ ID NO: 1587678 - RNA, 19 nt, Artificial Sequence
  Description of Artificial Sequence: Synthetic oligonucleotide
  Antisense strand to SEQ ID NO: 1587677
aucgaagaggcguugcccg

SEQ ID NO: 1587679 - RNA, 19 nt, Artificial Sequence
  Description of Artificial Sequence: Synthetic oligonucleotide
  Sense strand starting at position 2267 of SEQ ID NO: 1560261
gggaacguuugccuagcaa

SEQ ID NO: 1587680 - RNA, 19 nt, Artificial Sequence
  Description of Artificial Sequence: Synthetic oligonucleotide
  Antisense strand to SEQ ID NO: 1587679
uugcuaggcaaacguuccc

SEQ ID NO: 1587681 - RNA, 19 nt, Artificial Sequence
  Description of Artificial Sequence: Synthetic oligonucleotide
  Sense strand starting at position 2387 of SEQ ID NO: 1560261
uccuuagacgcccaauaua

SEQ ID NO: 1587682 - RNA, 19 nt, Artificial Sequence
  Description of Artificial Sequence: Synthetic oligonucleotide
  Antisense strand to SEQ ID NO: 1587681
uauauugggcgucuaagga

SEQ ID NO: 1587683 - RNA, 19 nt, Artificial Sequence
  Description of Artificial Sequence: Synthetic oligonucleotide
  Sense strand starting at position 2422 of SEQ ID NO: 1560261
aguguuucccacugacaua

SEQ ID NO: 1587684 - RNA, 19 nt, Artificial Sequence
  Description of Artificial Sequence: Synthetic oligonucleotide
  Antisense strand to SEQ ID NO: 1587683
uaugucagugggaaacacu

SEQ ID NO: 1587685 - RNA, 19 nt, Artificial Sequence
  Description of Artificial Sequence: Synthetic oligonucleotide
  Sense strand starting at position 2528 of SEQ ID NO: 1560261
gaggacuuccucugaccca

SEQ ID NO: 1587686 - RNA, 19 nt, Artificial Sequence
  Description of Artificial Sequence: Synthetic oligonucleotide
  Antisense strand to SEQ ID NO: 1587685
ugggucagaggaaguccuc

SEQ ID NO: 1587687 - RNA, 19 nt, Artificial Sequence
  Description of Artificial Sequence: Synthetic oligonucleotide
  Sense strand starting at position 2801 of SEQ ID NO: 1560261
agaucuuucuagucucaug

SEQ ID NO: 1587688 - RNA, 19 nt, Artificial Sequence
  Description of Artificial Sequence: Synthetic oligonucleotide
  Antisense strand to SEQ ID NO: 1587687
caugagacuagaaagaucu

SEQ ID NO: 1587689 - RNA, 19 nt, Artificial Sequence
  Description of Artificial Sequence: Synthetic oligonucleotide
  Sense strand starting at position 2822 of SEQ ID NO: 1560261
gucaauggccucuacgauu

SEQ ID NO: 1587690 - RNA, 19 nt, Artificial Sequence
  Description of Artificial Sequence: Synthetic oligonucleotide
  Antisense strand to SEQ ID NO: 1587689
aaucguagaggccauugac

SEQ ID NO: 1587691 - RNA, 19 nt, Artificial Sequence
  Description of Artificial Sequence: Synthetic oligonucleotide
  Sense strand starting at position 2914 of SEQ ID NO: 1560261
augccuggaauccgagaau

SEQ ID NO: 1587692 - RNA, 19 nt, Artificial Sequence
  Description of Artificial Sequence: Synthetic oligonucleotide
  Antisense strand to SEQ ID NO: 1587691
auucucggauuccaggcau

SEQ ID NO: 1587693 - RNA, 19 nt, Artificial Sequence
  Description of Artificial Sequence: Synthetic oligonucleotide
  Sense strand starting at position 2982 of SEQ ID NO: 1560261
ucaagacugcuaugaauuc

SEQ ID NO: 1587694 - RNA, 19 nt, Artificial Sequence
  Description of Artificial Sequence: Synthetic oligonucleotide
  Antisense strand to SEQ ID NO: 1587693
gaauucauagcagucuuga

SEQ ID NO: 1587695 - RNA, 19 nt, Artificial Sequence
  Description of Artificial Sequence: Synthetic oligonucleotide
  Sense strand starting at position 3084 of SEQ ID NO: 1560261
caaugaaauugacgucuua

SEQ ID NO: 1587696 - RNA, 19 nt, Artificial Sequence
  Description of Artificial Sequence: Synthetic oligonucleotide
  Antisense strand to SEQ ID NO: 1587695
uaagacgucaauuucauug

SEQ ID NO: 1587697 - RNA, 19 nt, Artificial Sequence
  Description of Artificial Sequence: Synthetic oligonucleotide
  Sense strand starting at position 3091 of SEQ ID NO: 1560261
auugacgucuuacaccaaa

SEQ ID NO: 1587698 - RNA, 19 nt, Artificial Sequence
  Description of Artificial Sequence: Synthetic oligonucleotide
  Antisense strand to SEQ ID NO: 1587697
uuugguguaagacgucaau

SEQ ID NO: 1587699 - RNA, 19 nt, Artificial Sequence
  Description of Artificial Sequence: Synthetic oligonucleotide
  Sense strand starting at position 3180 of SEQ ID NO: 1560261
cugggugucuuccuagaug

SEQ ID NO: 1587700 - RNA, 19 nt, Artificial Sequence
  Description of Artificial Sequence: Synthetic oligonucleotide
  Antisense strand to SEQ ID NO: 1587699
caucuaggaagacacccag

SEQ ID NO: 1587701 - RNA, 19 nt, Artificial Sequence
  Description of Artificial Sequence: Synthetic oligonucleotide
  Sense strand starting at position 3183 of SEQ ID NO: 1560261
ggugucuuccuagaugugu

SEQ ID NO: 1587702 - RNA, 19 nt, Artificial Sequence
  Description of Artificial Sequence: Synthetic oligonucleotide
  Antisense strand to SEQ ID NO: 1587701
acacaucuaggaagacacc

SEQ ID NO: 1587703 - RNA, 19 nt, Artificial Sequence
  Description of Artificial Sequence: Synthetic oligonucleotide
  Sense strand starting at position 3189 of SEQ ID NO: 1560261
uuccuagauguguaccauu

SEQ ID NO: 1587704 - RNA, 19 nt, Artificial Sequence
  Description of Artificial Sequence: Synthetic oligonucleotide
  Antisense strand to SEQ ID NO: 1587703
aaugguacacaucuaggaa

SEQ ID NO: 1587705 - RNA, 19 nt, Artificial Sequence
  Description of Artificial Sequence: Synthetic oligonucleotide
  Sense strand starting at position 3282 of SEQ ID NO: 1560261
ccuuguucucccugaucca

SEQ ID NO: 1587706 - RNA, 19 nt, Artificial Sequence
  Description of Artificial Sequence: Synthetic oligonucleotide
  Antisense strand to SEQ ID NO: 1587705
uggaucagggagaacaagg

SEQ ID NO: 1587707 - RNA, 19 nt, Artificial Sequence
  Description of Artificial Sequence: Synthetic oligonucleotide
  Sense strand starting at position 3347 of SEQ ID NO: 1560261
gucucuuggucucccagau

SEQ ID NO: 1587708 - RNA, 19 nt, Artificial Sequence
  Description of Artificial Sequence: Synthetic oligonucleotide
  Antisense strand to SEQ ID NO: 1587707
aucugggagaccaagagac

SEQ ID NO: 1587709 - RNA, 19 nt, Artificial Sequence
  Description of Artificial Sequence: Synthetic oligonucleotide
  Sense strand starting at position 3357 of SEQ ID NO: 1560261
cucccagauuucugucuca

SEQ ID NO: 1587710 - RNA, 19 nt, Artificial Sequence
  Description of Artificial Sequence: Synthetic oligonucleotide
  Antisense strand to SEQ ID NO: 1587709
ugagacagaaaucugggag

SEQ ID NO: 1587711 - RNA, 19 nt, Artificial Sequence
  Description of Artificial Sequence: Synthetic oligonucleotide
  Sense strand starting at position 119 of SEQ ID NO: 1560262
guggcucuaagauguauua

SEQ ID NO: 1587712 - RNA, 19 nt, Artificial Sequence
  Description of Artificial Sequence: Synthetic oligonucleotide
  Antisense strand to SEQ ID NO: 1587711
uaauacaucuuagagccac

SEQ ID NO: 1587713 - RNA, 19 nt, Artificial Sequence
  Description of Artificial Sequence: Synthetic oligonucleotide
  Sense strand starting at position 173 of SEQ ID NO: 1560262
gcucuaagauggcaaauua

SEQ ID NO: 1587714 - RNA, 19 nt, Artificial Sequence
  Description of Artificial Sequence: Synthetic oligonucleotide
  Antisense strand to SEQ ID NO: 1587713
uaauuugccaucuuagagc

SEQ ID NO: 1587715 - RNA, 19 nt, Artificial Sequence
  Description of Artificial Sequence: Synthetic oligonucleotide
  Sense strand starting at position 620 of SEQ ID NO: 1560262
ucagaaugccuggguccua

SEQ ID NO: 1587716 - RNA, 19 nt, Artificial Sequence
  Description of Artificial Sequence: Synthetic oligonucleotide
  Antisense strand to SEQ ID NO: 1587715
uaggacccaggcauucuga

SEQ ID NO: 1587717 - RNA, 19 nt, Artificial Sequence
  Description of Artificial Sequence: Synthetic oligonucleotide
  Sense strand starting at position 759 of SEQ ID NO: 1560262
gcagaauaauucugagacc

SEQ ID NO: 1587718 - RNA, 19 nt, Artificial Sequence
  Description of Artificial Sequence: Synthetic oligonucleotide
  Antisense strand to SEQ ID NO: 1587717
ggucucagaauuauucugc

SEQ ID NO: 1587719 - RNA, 19 nt, Artificial Sequence
  Description of Artificial Sequence: Synthetic oligonucleotide
  Sense strand starting at position 762 of SEQ ID NO: 1560262
gaauaauucugagaccugu

SEQ ID NO: 1587720 - RNA, 19 nt, Artificial Sequence
  Description of Artificial Sequence: Synthetic oligonucleotide
  Antisense strand to SEQ ID NO: 1587719
acaggucucagaauuauuc

SEQ ID NO: 1587721 - RNA, 19 nt, Artificial Sequence
  Description of Artificial Sequence: Synthetic oligonucleotide
  Sense strand starting at position 781 of SEQ ID NO: 1560262
uugccuggguccuaggaga

SEQ ID NO: 1587722 - RNA, 19 nt, Artificial Sequence
  Description of Artificial Sequence: Synthetic oligonucleotide
  Antisense strand to SEQ ID NO: 1587721
ucuccuaggacccaggcaa

SEQ ID NO: 1587723 - RNA, 19 nt, Artificial Sequence
  Description of Artificial Sequence: Synthetic oligonucleotide
  Sense strand starting at position 837 of SEQ ID NO: 1560262
acccgaguucuguacacca

SEQ ID NO: 1587724 - RNA, 19 nt, Artificial Sequence
  Description of Artificial Sequence: Synthetic oligonucleotide
  Antisense strand to SEQ ID NO: 1587723
ugguguacagaacucgggu

SEQ ID NO: 1587725 - RNA, 19 nt, Artificial Sequence
  Description of Artificial Sequence: Synthetic oligonucleotide
  Sense strand starting at position 1089 of SEQ ID NO: 1560262
cccucaaggacucgggaau

SEQ ID NO: 1587726 - RNA, 19 nt, Artificial Sequence
  Description of Artificial Sequence: Synthetic oligonucleotide
  Antisense strand to SEQ ID NO: 1587725
auucccgaguccuugaggg

SEQ ID NO: 1587727 - RNA, 19 nt, Artificial Sequence
  Description of Artificial Sequence: Synthetic oligonucleotide
  Sense strand starting at position 1153 of SEQ ID NO: 1560262
gccagaacuucgcucggga

SEQ ID NO: 1587728 - RNA, 19 nt, Artificial Sequence
  Description of Artificial Sequence: Synthetic oligonucleotide
  Antisense strand to SEQ ID NO: 1587727
ucccgagcgaaguucuggc

SEQ ID NO: 1587729 - RNA, 19 nt, Artificial Sequence
  Description of Artificial Sequence: Synthetic oligonucleotide
  Sense strand starting at position 1155 of SEQ ID NO: 1560262
cagaacuucgcucgggaca

SEQ ID NO: 1587730 - RNA, 19 nt, Artificial Sequence
  Description of Artificial Sequence: Synthetic oligonucleotide
  Antisense strand to SEQ ID NO: 1587729
ugucccgagcgaaguucug

SEQ ID NO: 1587731 - RNA, 19 nt, Artificial Sequence
  Description of Artificial Sequence: Synthetic oligonucleotide
  Sense strand starting at position 1242 of SEQ ID NO: 1560262
acuguaucggccugggagu

SEQ ID NO: 1587732 - RNA, 19 nt, Artificial Sequence
  Description of Artificial Sequence: Synthetic oligonucleotide
  Antisense strand to SEQ ID NO: 1587731
acucccaggccgauacagu

SEQ ID NO: 1587733 - RNA, 19 nt, Artificial Sequence
  Description of Artificial Sequence: Synthetic oligonucleotide
  Sense strand starting at position 1401 of SEQ ID NO: 1560262
ggagguguuuccucugagu

SEQ ID NO: 1587734 - RNA, 19 nt, Artificial Sequence
  Description of Artificial Sequence: Synthetic oligonucleotide
  Antisense strand to SEQ ID NO: 1587733
acucagaggaaacaccucc

SEQ ID NO: 1587735 - RNA, 19 nt, Artificial Sequence
  Description of Artificial Sequence: Synthetic oligonucleotide
  Sense strand starting at position 1403 of SEQ ID NO: 1560262
agguguuuccucugaguau

SEQ ID NO: 1587736 - RNA, 19 nt, Artificial Sequence
  Description of Artificial Sequence: Synthetic oligonucleotide
  Antisense strand to SEQ ID NO: 1587735
auacucagaggaaacaccu

SEQ ID NO: 1587737 - RNA, 19 nt, Artificial Sequence
  Description of Artificial Sequence: Synthetic oligonucleotide
  Sense strand starting at position 1406 of SEQ ID NO: 1560262
uguuuccucugaguauucu

SEQ ID NO: 1587738 - RNA, 19 nt, Artificial Sequence
  Description of Artificial Sequence: Synthetic oligonucleotide
  Antisense strand to SEQ ID NO: 1587737
agaauacucagaggaaaca

SEQ ID NO: 1587739 - RNA, 19 nt, Artificial Sequence
  Description of Artificial Sequence: Synthetic oligonucleotide
  Sense strand starting at position 1410 of SEQ ID NO: 1560262
uccucugaguauucuggga

SEQ ID NO: 1587740 - RNA, 19 nt, Artificial Sequence
  Description of Artificial Sequence: Synthetic oligonucleotide
  Antisense strand to SEQ ID NO: 1587739
ucccagaauacucagagga

SEQ ID NO: 1587741 - RNA, 19 nt, Artificial Sequence
  Description of Artificial Sequence: Synthetic oligonucleotide
  Sense strand starting at position 1947 of SEQ ID NO: 1560262
gcaacugaccaaugagagu

SEQ ID NO: 1587742 - RNA, 19 nt, Artificial Sequence
  Description of Artificial Sequence: Synthetic oligonucleotide
  Antisense strand to SEQ ID NO: 1587741
acucucauuggucaguugc

SEQ ID NO: 1587743 - RNA, 19 nt, Artificial Sequence
  Description of Artificial Sequence: Synthetic oligonucleotide
  Sense strand starting at position 2126 of SEQ ID NO: 1560262
gguccaaauuucuggaaug

SEQ ID NO: 1587744 - RNA, 19 nt, Artificial Sequence
  Description of Artificial Sequence: Synthetic oligonucleotide
  Antisense strand to SEQ ID NO: 1587743
cauuccagaaauuuggacc

SEQ ID NO: 1587745 - RNA, 19 nt, Artificial Sequence
  Description of Artificial Sequence: Synthetic oligonucleotide
  Sense strand starting at position 2147 of SEQ ID NO: 1560262
ggaggccugggcugauuaa

SEQ ID NO: 1587746 - RNA, 19 nt, Artificial Sequence
  Description of Artificial Sequence: Synthetic oligonucleotide
  Antisense strand to SEQ ID NO: 1587745
uuaaucagcccaggccucc

SEQ ID NO: 1587747 - RNA, 19 nt, Artificial Sequence
  Description of Artificial Sequence: Synthetic oligonucleotide
  Sense strand starting at position 2148 of SEQ ID NO: 1560262
gaggccugggcugauuaaa

SEQ ID NO: 1587748 - RNA, 19 nt, Artificial Sequence
  Description of Artificial Sequence: Synthetic oligonucleotide
  Antisense strand to SEQ ID NO: 1587747
uuuaaucagcccaggccuc

SEQ ID NO: 1587749 - RNA, 19 nt, Artificial Sequence
  Description of Artificial Sequence: Synthetic oligonucleotide
  Sense strand starting at position 2180 of SEQ ID NO: 1560262
ggagcuuaaucuuauuucu

SEQ ID NO: 1587750 - RNA, 19 nt, Artificial Sequence
  Description of Artificial Sequence: Synthetic oligonucleotide
  Antisense strand to SEQ ID NO: 1587749
agaaauaagauuaagcucc

SEQ ID NO: 1587751 - RNA, 19 nt, Artificial Sequence
  Description of Artificial Sequence: Synthetic oligonucleotide
  Sense strand starting at position 2269 of SEQ ID NO: 1560262
aagugaagugucuagacuu

SEQ ID NO: 1587752 - RNA, 19 nt, Artificial Sequence
  Description of Artificial Sequence: Synthetic oligonucleotide
  Antisense strand to SEQ ID NO: 1587751
aagucuagacacuucacuu

SEQ ID NO: 1587753 - RNA, 19 nt, Artificial Sequence
  Description of Artificial Sequence: Synthetic oligonucleotide
  Sense strand starting at position 2366 of SEQ ID NO: 1560262
cacugaugugcaggucauu

SEQ ID NO: 1587754 - RNA, 19 nt, Artificial Sequence
  Description of Artificial Sequence: Synthetic oligonucleotide
  Antisense strand to SEQ ID NO: 1587753
aaugaccugcacaucagug

SEQ ID NO: 1587755 - RNA, 19 nt, Artificial Sequence
  Description of Artificial Sequence: Synthetic oligonucleotide
  Sense strand starting at position 2369 of SEQ ID NO: 1560262
ugaugugcaggucauuaaa

SEQ ID NO: 1587756 - RNA, 19 nt, Artificial Sequence
  Description of Artificial Sequence: Synthetic oligonucleotide
  Antisense strand to SEQ ID NO: 1587755
uuuaaugaccugcacauca

SEQ ID NO: 1587757 - RNA, 19 nt, Artificial Sequence
  Description of Artificial Sequence: Synthetic oligonucleotide
  Sense strand starting at position 2395 of SEQ ID NO: 1560262
ggauuugugagcugguuau

SEQ ID NO: 1587758 - RNA, 19 nt, Artificial Sequence
  Description of Artificial Sequence: Synthetic oligonucleotide
  Antisense strand to SEQ ID NO: 1587757
auaaccagcucacaaaucc

SEQ ID NO: 1587759 - RNA, 19 nt, Artificial Sequence
  Description of Artificial Sequence: Synthetic oligonucleotide
  Sense strand starting at position 2399 of SEQ ID NO: 1560262
uugugagcugguuauuguu

SEQ ID NO: 1587760 - RNA, 19 nt, Artificial Sequence
  Description of Artificial Sequence: Synthetic oligonucleotide
  Antisense strand to SEQ ID NO: 1587759
aacaauaaccagcucacaa

SEQ ID NO: 1587761 - RNA, 19 nt, Artificial Sequence
  Description of Artificial Sequence: Synthetic oligonucleotide
  Sense strand starting at position 2456 of SEQ ID NO: 1560262
uguaguuucuaagcgggau

SEQ ID NO: 1587762 - RNA, 19 nt, Artificial Sequence
  Description of Artificial Sequence: Synthetic oligonucleotide
  Antisense strand to SEQ ID NO: 1587761
aucccgcuuagaaacuaca

SEQ ID NO: 1587763 - RNA, 19 nt, Artificial Sequence
  Description of Artificial Sequence: Synthetic oligonucleotide
  Sense strand starting at position 2457 of SEQ ID NO: 1560262
guaguuucuaagcgggaug

SEQ ID NO: 1587764 - RNA, 19 nt, Artificial Sequence
  Description of Artificial Sequence: Synthetic oligonucleotide
  Antisense strand to SEQ ID NO: 1587763
caucccgcuuagaaacuac

SEQ ID NO: 1587765 - RNA, 19 nt, Artificial Sequence
  Description of Artificial Sequence: Synthetic oligonucleotide
  Sense strand starting at position 2458 of SEQ ID NO: 1560262
uaguuucuaagcgggauga

SEQ ID NO: 1587766 - RNA, 19 nt, Artificial Sequence
  Description of Artificial Sequence: Synthetic oligonucleotide
  Antisense strand to SEQ ID NO: 1587765
ucaucccgcuuagaaacua

SEQ ID NO: 1587767 - RNA, 19 nt, Artificial Sequence
  Description of Artificial Sequence: Synthetic oligonucleotide
  Sense strand starting at position 2459 of SEQ ID NO: 1560262
aguuucuaagcgggaugau

SEQ ID NO: 1587768 - RNA, 19 nt, Artificial Sequence
  Description of Artificial Sequence: Synthetic oligonucleotide
  Antisense strand to SEQ ID NO: 1587767
aucaucccgcuuagaaacu

SEQ ID NO: 1587769 - RNA, 19 nt, Artificial Sequence
  Description of Artificial Sequence: Synthetic oligonucleotide
  Sense strand starting at position 2460 of SEQ ID NO: 1560262
guuucuaagcgggaugauu

SEQ ID NO: 1587770 - RNA, 19 nt, Artificial Sequence
  Description of Artificial Sequence: Synthetic oligonucleotide
  Antisense strand to SEQ ID NO: 1587769
aaucaucccgcuuagaaac

SEQ ID NO: 1587771 - RNA, 19 nt, Artificial Sequence
  Description of Artificial Sequence: Synthetic oligonucleotide
  Sense strand starting at position 2523 of SEQ ID NO: 1560262
uuacgacaucggcacauua

SEQ ID NO: 1587772 - RNA, 19 nt, Artificial Sequence
  Description of Artificial Sequence: Synthetic oligonucleotide
  Antisense strand to SEQ ID NO: 1587771
uaaugugccgaugucguaa

SEQ ID NO: 1587773 - RNA, 19 nt, Artificial Sequence
  Description of Artificial Sequence: Synthetic oligonucleotide
  Sense strand starting at position 2525 of SEQ ID NO: 1560262
acgacaucggcacauuacu

SEQ ID NO: 1587774 - RNA, 19 nt, Artificial Sequence
  Description of Artificial Sequence: Synthetic oligonucleotide
  Antisense strand to SEQ ID NO: 1587773
aguaaugugccgaugucgu

SEQ ID NO: 1587775 - RNA, 19 nt, Artificial Sequence
  Description of Artificial Sequence: Synthetic oligonucleotide
  Sense strand starting at position 2569 of SEQ ID NO: 1560262
agguaaauucuguaaucgu

SEQ ID NO: 1587776 - RNA, 19 nt, Artificial Sequence
  Description of Artificial Sequence: Synthetic oligonucleotide
  Antisense strand to SEQ ID NO: 1587775
acgauuacagaauuuaccu

SEQ ID NO: 1587777 - RNA, 19 nt, Artificial Sequence
  Description of Artificial Sequence: Synthetic oligonucleotide
  Sense strand starting at position 2577 of SEQ ID NO: 1560262
ucuguaaucguacaguuaa

SEQ ID NO: 1587778 - RNA, 19 nt, Artificial Sequence
  Description of Artificial Sequence: Synthetic oligonucleotide
  Antisense strand to SEQ ID NO: 1587777
uuaacuguacgauuacaga

SEQ ID NO: 1587779 - RNA, 19 nt, Artificial Sequence
  Description of Artificial Sequence: Synthetic oligonucleotide
  Sense strand starting at position 2812 of SEQ ID NO: 1560262
gcaggagagucuguugaac

SEQ ID NO: 1587780 - RNA, 19 nt, Artificial Sequence
  Description of Artificial Sequence: Synthetic oligonucleotide
  Antisense strand to SEQ ID NO: 1587779
guucaacagacucuccugc

SEQ ID NO: 1587781 - RNA, 19 nt, Artificial Sequence
  Description of Artificial Sequence: Synthetic oligonucleotide
  Sense strand starting at position 3065 of SEQ ID NO: 1560262
gucugcugcucugugaaau

SEQ ID NO: 1587782 - RNA, 19 nt, Artificial Sequence
  Description of Artificial Sequence: Synthetic oligonucleotide
  Antisense strand to SEQ ID NO: 1587781
auuucacagagcagcagac

SEQ ID NO: 1587783 - RNA, 19 nt, Artificial Sequence
  Description of Artificial Sequence: Synthetic oligonucleotide
  Sense strand starting at position 3200 of SEQ ID NO: 1560262
gcagaaucaggcuggcuaa

SEQ ID NO: 1587784 - RNA, 19 nt, Artificial Sequence
  Description of Artificial Sequence: Synthetic oligonucleotide
  Antisense strand to SEQ ID NO: 1587783
uuagccagccugauucugc

SEQ ID NO: 1587785 - RNA, 19 nt, Artificial Sequence
  Description of Artificial Sequence: Synthetic oligonucleotide
  Sense strand starting at position 3264 of SEQ ID NO: 1560262
cuggguuucucucuggaga

SEQ ID NO: 1587786 - RNA, 19 nt, Artificial Sequence
  Description of Artificial Sequence: Synthetic oligonucleotide
  Antisense strand to SEQ ID NO: 1587785
ucuccagagagaaacccag

SEQ ID NO: 1587787 - RNA, 19 nt, Artificial Sequence
  Description of Artificial Sequence: Synthetic oligonucleotide
  Sense strand starting at position 3265 of SEQ ID NO: 1560262
uggguuucucucuggagaa

SEQ ID NO: 1587788 - RNA, 19 nt, Artificial Sequence
  Description of Artificial Sequence: Synthetic oligonucleotide
  Antisense strand to SEQ ID NO: 1587787
uucuccagagagaaaccca

SEQ ID NO: 1587789 - RNA, 19 nt, Artificial Sequence
  Description of Artificial Sequence: Synthetic oligonucleotide
  Sense strand starting at position 3267 of SEQ ID NO: 1560262
gguuucucucuggagaauu

SEQ ID NO: 1587790 - RNA, 19 nt, Artificial Sequence
  Description of Artificial Sequence: Synthetic oligonucleotide
  Antisense strand to SEQ ID NO: 1587789
aauucuccagagagaaacc

SEQ ID NO: 1587791 - RNA, 19 nt, Artificial Sequence
  Description of Artificial Sequence: Synthetic oligonucleotide
  Sense strand starting at position 66 of SEQ ID NO: 1560263
gagcucagauagcuauauu

SEQ ID NO: 1587792 - RNA, 19 nt, Artificial Sequence
  Description of Artificial Sequence: Synthetic oligonucleotide
  Antisense strand to SEQ ID NO: 1587791
aauauagcuaucugagcuc

SEQ ID NO: 1587793 - RNA, 19 nt, Artificial Sequence
  Description of Artificial Sequence: Synthetic oligonucleotide
  Sense strand starting at position 74 of SEQ ID NO: 1560263
auagcuauauuggaagaac

SEQ ID NO: 1587794 - RNA, 19 nt, Artificial Sequence
  Description of Artificial Sequence: Synthetic oligonucleotide
  Antisense strand to SEQ ID NO: 1587793
guucuuccaauauagcuau

SEQ ID NO: 1587795 - RNA, 19 nt, Artificial Sequence
  Description of Artificial Sequence: Synthetic oligonucleotide
  Sense strand starting at position 196 of SEQ ID NO: 1560263
aggccuucuccaggaacuu

SEQ ID NO: 1587796 - RNA, 19 nt, Artificial Sequence
  Description of Artificial Sequence: Synthetic oligonucleotide
  Antisense strand to SEQ ID NO: 1587795
aaguuccuggagaaggccu

SEQ ID NO: 1587797 - RNA, 19 nt, Artificial Sequence
  Description of Artificial Sequence: Synthetic oligonucleotide
  Sense strand starting at position 197 of SEQ ID NO: 1560263
ggccuucuccaggaacuuu

SEQ ID NO: 1587798 - RNA, 19 nt, Artificial Sequence
  Description of Artificial Sequence: Synthetic oligonucleotide
  Antisense strand to SEQ ID NO: 1587797
aaaguuccuggagaaggcc

SEQ ID NO: 1587799 - RNA, 19 nt, Artificial Sequence
  Description of Artificial Sequence: Synthetic oligonucleotide
  Sense strand starting at position 242 of SEQ ID NO: 1560263
cuuugaauacgacggguau

SEQ ID NO: 1587800 - RNA, 19 nt, Artificial Sequence
  Description of Artificial Sequence: Synthetic oligonucleotide
  Antisense strand to SEQ ID NO: 1587799
auacccgucguauucaaag

SEQ ID NO: 1587801 - RNA, 19 nt, Artificial Sequence
  Description of Artificial Sequence: Synthetic oligonucleotide
  Sense strand starting at position 372 of SEQ ID NO: 1560263
ggccgucugccauagauaa

SEQ ID NO: 1587802 - RNA, 19 nt, Artificial Sequence
  Description of Artificial Sequence: Synthetic oligonucleotide
  Antisense strand to SEQ ID NO: 1587801
uuaucuauggcagacggcc

SEQ ID NO: 1587803 - RNA, 19 nt, Artificial Sequence
  Description of Artificial Sequence: Synthetic oligonucleotide
  Sense strand starting at position 374 of SEQ ID NO: 1560263
ccgucugccauagauaaga

SEQ ID NO: 1587804 - RNA, 19 nt, Artificial Sequence
  Description of Artificial Sequence: Synthetic oligonucleotide
  Antisense strand to SEQ ID NO: 1587803
ucuuaucuauggcagacgg

SEQ ID NO: 1587805 - RNA, 19 nt, Artificial Sequence
  Description of Artificial Sequence: Synthetic oligonucleotide
  Sense strand starting at position 444 of SEQ ID NO: 1560263
ccacgaaagcuccacaaca

SEQ ID NO: 1587806 - RNA, 19 nt, Artificial Sequence
  Description of Artificial Sequence: Synthetic oligonucleotide
  Antisense strand to SEQ ID NO: 1587805
uguuguggagcuuucgugg

SEQ ID NO: 1587807 - RNA, 19 nt, Artificial Sequence
  Description of Artificial Sequence: Synthetic oligonucleotide
  Sense strand starting at position 612 of SEQ ID NO: 1560263
ggcugauccuggcaggaua

SEQ ID NO: 1587808 - RNA, 19 nt, Artificial Sequence
  Description of Artificial Sequence: Synthetic oligonucleotide
  Antisense strand to SEQ ID NO: 1587807
uauccugccaggaucagcc

SEQ ID NO: 1587809 - RNA, 19 nt, Artificial Sequence
  Description of Artificial Sequence: Synthetic oligonucleotide
  Sense strand starting at position 614 of SEQ ID NO: 1560263
cugauccuggcaggauaaa

SEQ ID NO: 1587810 - RNA, 19 nt, Artificial Sequence
  Description of Artificial Sequence: Synthetic oligonucleotide
  Antisense strand to SEQ ID NO: 1587809
uuuauccugccaggaucag

SEQ ID NO: 1587811 - RNA, 19 nt, Artificial Sequence
  Description of Artificial Sequence: Synthetic oligonucleotide
  Sense strand starting at position 640 of SEQ ID NO: 1560263
agagccaucucucuuaaag

SEQ ID NO: 1587812 - RNA, 19 nt, Artificial Sequence
  Description of Artificial Sequence: Synthetic oligonucleotide
  Antisense strand to SEQ ID NO: 1587811
cuuuaagagagauggcucu

SEQ ID NO: 1587813 - RNA, 19 nt, Artificial Sequence
  Description of Artificial Sequence: Synthetic oligonucleotide
  Sense strand starting at position 771 of SEQ ID NO: 1560263
ucacuucgauggucaauau

SEQ ID NO: 1587814 - RNA, 19 nt, Artificial Sequence
  Description of Artificial Sequence: Synthetic oligonucleotide
  Antisense strand to SEQ ID NO: 1587813
auauugaccaucgaaguga

SEQ ID NO: 1587815 - RNA, 19 nt, Artificial Sequence
  Description of Artificial Sequence: Synthetic oligonucleotide
  Sense strand starting at position 772 of SEQ ID NO: 1560263
cacuucgauggucaauauu

SEQ ID NO: 1587816 - RNA, 19 nt, Artificial Sequence
  Description of Artificial Sequence: Synthetic oligonucleotide
  Antisense strand to SEQ ID NO: 1587815
aauauugaccaucgaagug

SEQ ID NO: 1587817 - RNA, 19 nt, Artificial Sequence
  Description of Artificial Sequence: Synthetic oligonucleotide
  Sense strand starting at position 1001 of SEQ ID NO: 1560263
gagaaugggucaucaaugu

SEQ ID NO: 1587818 - RNA, 19 nt, Artificial Sequence
  Description of Artificial Sequence: Synthetic oligonucleotide
  Antisense strand to SEQ ID NO: 1587817
acauugaugacccauucuc

SEQ ID NO: 1587819 - RNA, 19 nt, Artificial Sequence
  Description of Artificial Sequence: Synthetic oligonucleotide
  Sense strand starting at position 1005 of SEQ ID NO: 1560263
augggucaucaauguccau

SEQ ID NO: 1587820 - RNA, 19 nt, Artificial Sequence
  Description of Artificial Sequence: Synthetic oligonucleotide
  Antisense strand to SEQ ID NO: 1587819
auggacauugaugacccau

SEQ ID NO: 1587821 - RNA, 19 nt, Artificial Sequence
  Description of Artificial Sequence: Synthetic oligonucleotide
  Sense strand starting at position 1062 of SEQ ID NO: 1560263
agggauuucugccaccgaa

SEQ ID NO: 1587822 - RNA, 19 nt, Artificial Sequence
  Description of Artificial Sequence: Synthetic oligonucleotide
  Antisense strand to SEQ ID NO: 1587821
uucgguggcagaaaucccu

SEQ ID NO: 1587823 - RNA, 19 nt, Artificial Sequence
  Description of Artificial Sequence: Synthetic oligonucleotide
  Sense strand starting at position 1101 of SEQ ID NO: 1560263
gagggucuccauggaaugu

SEQ ID NO: 1587824 - RNA, 19 nt, Artificial Sequence
  Description of Artificial Sequence: Synthetic oligonucleotide
  Antisense strand to SEQ ID NO: 1587823
acauuccauggagacccuc

SEQ ID NO: 1587825 - RNA, 19 nt, Artificial Sequence
  Description of Artificial Sequence: Synthetic oligonucleotide
  Sense strand starting at position 1512 of SEQ ID NO: 1560263
gucggcuuucgguaagugu

SEQ ID NO: 1587826 - RNA, 19 nt, Artificial Sequence
  Description of Artificial Sequence: Synthetic oligonucleotide
  Antisense strand to SEQ ID NO: 1587825
acacuuaccgaaagccgac

SEQ ID NO: 1587827 - RNA, 19 nt, Artificial Sequence
  Description of Artificial Sequence: Synthetic oligonucleotide
  Sense strand starting at position 1513 of SEQ ID NO: 1560263
ucggcuuucgguaaguguu

SEQ ID NO: 1587828 - RNA, 19 nt, Artificial Sequence
  Description of Artificial Sequence: Synthetic oligonucleotide
  Antisense strand to SEQ ID NO: 1587827
aacacuuaccgaaagccga

SEQ ID NO: 1587829 - RNA, 19 nt, Artificial Sequence
  Description of Artificial Sequence: Synthetic oligonucleotide
  Sense strand starting at position 1514 of SEQ ID NO: 1560263
cggcuuucgguaaguguuu

SEQ ID NO: 1587830 - RNA, 19 nt, Artificial Sequence
  Description of Artificial Sequence: Synthetic oligonucleotide
  Antisense strand to SEQ ID NO: 1587829
aaacacuuaccgaaagccg

SEQ ID NO: 1587831 - RNA, 19 nt, Artificial Sequence
  Description of Artificial Sequence: Synthetic oligonucleotide
  Sense strand starting at position 1515 of SEQ ID NO: 1560263
ggcuuucgguaaguguuua

SEQ ID NO: 1587832 - RNA, 19 nt, Artificial Sequence
  Description of Artificial Sequence: Synthetic oligonucleotide
  Antisense strand to SEQ ID NO: 1587831
uaaacacuuaccgaaagcc

SEQ ID NO: 1587833 - RNA, 19 nt, Artificial Sequence
  Description of Artificial Sequence: Synthetic oligonucleotide
  Sense strand starting at position 1523 of SEQ ID NO: 1560263
guaaguguuuacucucaac

SEQ ID NO: 1587834 - RNA, 19 nt, Artificial Sequence
  Description of Artificial Sequence: Synthetic oligonucleotide
  Antisense strand to SEQ ID NO: 1587833
guugagaguaaacacuuac

SEQ ID NO: 1587835 - RNA, 19 nt, Artificial Sequence
  Description of Artificial Sequence: Synthetic oligonucleotide
  Sense strand starting at position 1549 of SEQ ID NO: 1560263
ggcuaauggugcguaggaa

SEQ ID NO: 1587836 - RNA, 19 nt, Artificial Sequence
  Description of Artificial Sequence: Synthetic oligonucleotide
  Antisense strand to SEQ ID NO: 1587835
uuccuacgcaccauuagcc

SEQ ID NO: 1587837 - RNA, 19 nt, Artificial Sequence
  Description of Artificial Sequence: Synthetic oligonucleotide
  Sense strand starting at position 1795 of SEQ ID NO: 1560263
ggucaucacuucccgggaa

SEQ ID NO: 1587838 - RNA, 19 nt, Artificial Sequence
  Description of Artificial Sequence: Synthetic oligonucleotide
  Antisense strand to SEQ ID NO: 1587837
uucccgggaagugaugacc

SEQ ID NO: 1587839 - RNA, 19 nt, Artificial Sequence
  Description of Artificial Sequence: Synthetic oligonucleotide
  Sense strand starting at position 1797 of SEQ ID NO: 1560263
ucaucacuucccgggaauu

SEQ ID NO: 1587840 - RNA, 19 nt, Artificial Sequence
  Description of Artificial Sequence: Synthetic oligonucleotide
  Antisense strand to SEQ ID NO: 1587839
aauucccgggaagugauga

SEQ ID NO: 1587841 - RNA, 19 nt, Artificial Sequence
  Description of Artificial Sequence: Synthetic oligonucleotide
  Sense strand starting at position 1799 of SEQ ID NO: 1560263
aucacuucccgggaauuau

SEQ ID NO: 1587842 - RNA, 19 nt, Artificial Sequence
  Description of Artificial Sequence: Synthetic oligonucleotide
  Antisense strand to SEQ ID NO: 1587841
auaauucccgggaagugau

SEQ ID NO: 1587843 - RNA, 19 nt, Artificial Sequence
  Description of Artificial Sequence: Synthetic oligonucleotide
  Sense strand starting at position 1808 of SEQ ID NO: 1560263
cgggaauuaucccaaccca

SEQ ID NO: 1587844 - RNA, 19 nt, Artificial Sequence
  Description of Artificial Sequence: Synthetic oligonucleotide
  Antisense strand to SEQ ID NO: 1587843
uggguugggauaauucccg

SEQ ID NO: 1587845 - RNA, 19 nt, Artificial Sequence
  Description of Artificial Sequence: Synthetic oligonucleotide
  Sense strand starting at position 2328 of SEQ ID NO: 1560263
cgucguaggccucagcgau

SEQ ID NO: 1587846 - RNA, 19 nt, Artificial Sequence
  Description of Artificial Sequence: Synthetic oligonucleotide
  Antisense strand to SEQ ID NO: 1587845
aucgcugaggccuacgacg

SEQ ID NO: 1587847 - RNA, 19 nt, Artificial Sequence
  Description of Artificial Sequence: Synthetic oligonucleotide
  Sense strand starting at position 2379 of SEQ ID NO: 1560263
uguucuuguccggguggua

SEQ ID NO: 1587848 - RNA, 19 nt, Artificial Sequence
  Description of Artificial Sequence: Synthetic oligonucleotide
  Antisense strand to SEQ ID NO: 1587847
uaccacccggacaagaaca

SEQ ID NO: 1587849 - RNA, 19 nt, Artificial Sequence
  Description of Artificial Sequence: Synthetic oligonucleotide
  Sense strand starting at position 2424 of SEQ ID NO: 1560263
gcuugaucuccucguccga

SEQ ID NO: 1587850 - RNA, 19 nt, Artificial Sequence
  Description of Artificial Sequence: Synthetic oligonucleotide
  Antisense strand to SEQ ID NO: 1587849
ucggacgaggagaucaagc

SEQ ID NO: 1587851 - RNA, 19 nt, Artificial Sequence
  Description of Artificial Sequence: Synthetic oligonucleotide
  Sense strand starting at position 2469 of SEQ ID NO: 1560263
gguaguagucuuuacccau

SEQ ID NO: 1587852 - RNA, 19 nt, Artificial Sequence
  Description of Artificial Sequence: Synthetic oligonucleotide
  Antisense strand to SEQ ID NO: 1587851
auggguaaagacuacuacc

SEQ ID NO: 1587853 - RNA, 19 nt, Artificial Sequence
  Description of Artificial Sequence: Synthetic oligonucleotide
  Sense strand starting at position 3188 of SEQ ID NO: 1560263
uaaggagacuccguuucua

SEQ ID NO: 1587854 - RNA, 19 nt, Artificial Sequence
  Description of Artificial Sequence: Synthetic oligonucleotide
  Antisense strand to SEQ ID NO: 1587853
uagaaacggagucuccuua

SEQ ID NO: 1587855 - RNA, 19 nt, Artificial Sequence
  Description of Artificial Sequence: Synthetic oligonucleotide
  Sense strand starting at position 3193 of SEQ ID NO: 1560263
agacuccguuucuauuuaa

SEQ ID NO: 1587856 - RNA, 19 nt, Artificial Sequence
  Description of Artificial Sequence: Synthetic oligonucleotide
  Antisense strand to SEQ ID NO: 1587855
uuaaauagaaacggagucu

SEQ ID NO: 1587857 - RNA, 19 nt, Artificial Sequence
  Description of Artificial Sequence: Synthetic oligonucleotide
  Sense strand starting at position 3411 of SEQ ID NO: 1560263
gccugagaauagcuugaau

SEQ ID NO: 1587858 - RNA, 19 nt, Artificial Sequence
  Description of Artificial Sequence: Synthetic oligonucleotide
  Antisense strand to SEQ ID NO: 1587857
auucaagcuauucucaggc

SEQ ID NO: 1587859 - RNA, 19 nt, Artificial Sequence
  Description of Artificial Sequence: Synthetic oligonucleotide
  Sense strand starting at position 3706 of SEQ ID NO: 1560263
aucacuugccgcuaaauuu

SEQ ID NO: 1587860 - RNA, 19 nt, Artificial Sequence
  Description of Artificial Sequence: Synthetic oligonucleotide
  Antisense strand to SEQ ID NO: 1587859
aaauuuagcggcaagugau

SEQ ID NO: 1587861 - RNA, 19 nt, Artificial Sequence
  Description of Artificial Sequence: Synthetic oligonucleotide
  Sense strand starting at position 3713 of SEQ ID NO: 1560263
gccgcuaaauuugaaauuu

SEQ ID NO: 1587862 - RNA, 19 nt, Artificial Sequence
  Description of Artificial Sequence: Synthetic oligonucleotide
  Antisense strand to SEQ ID NO: 1587861
aaauuucaaauuuagcggc

SEQ ID NO: 1587863 - RNA, 19 nt, Artificial Sequence
  Description of Artificial Sequence: Synthetic oligonucleotide
  Sense strand starting at position 3836 of SEQ ID NO: 1560263
gugagaaccucauaaauau

SEQ ID NO: 1587864 - RNA, 19 nt, Artificial Sequence
  Description of Artificial Sequence: Synthetic oligonucleotide
  Antisense strand to SEQ ID NO: 1587863
auauuuaugagguucucac

SEQ ID NO: 1587865 - RNA, 19 nt, Artificial Sequence
  Description of Artificial Sequence: Synthetic oligonucleotide
  Sense strand starting at position 3911 of SEQ ID NO: 1560263
gggacauaggugugucaca

SEQ ID NO: 1587866 - RNA, 19 nt, Artificial Sequence
  Description of Artificial Sequence: Synthetic oligonucleotide
  Antisense strand to SEQ ID NO: 1587865
ugugacacaccuauguccc

SEQ ID NO: 1587867 - RNA, 19 nt, Artificial Sequence
  Description of Artificial Sequence: Synthetic oligonucleotide
  Sense strand starting at position 3940 of SEQ ID NO: 1560263
ggccucuguuuccucaauu

SEQ ID NO: 1587868 - RNA, 19 nt, Artificial Sequence
  Description of Artificial Sequence: Synthetic oligonucleotide
  Antisense strand to SEQ ID NO: 1587867
aauugaggaaacagaggcc

SEQ ID NO: 1587869 - RNA, 19 nt, Artificial Sequence
  Description of Artificial Sequence: Synthetic oligonucleotide
  Sense strand starting at position 3972 of SEQ ID NO: 1560263
ucgcguuuggcucugaaag

SEQ ID NO: 1587870 - RNA, 19 nt, Artificial Sequence
  Description of Artificial Sequence: Synthetic oligonucleotide
  Antisense strand to SEQ ID NO: 1587869
cuuucagagccaaacgcga

SEQ ID NO: 1587871 - RNA, 19 nt, Artificial Sequence
  Description of Artificial Sequence: Synthetic oligonucleotide
  Sense strand starting at position 74 of SEQ ID NO: 1560264
ucacuucgauggucaauau

SEQ ID NO: 1587872 - RNA, 19 nt, Artificial Sequence
  Description of Artificial Sequence: Synthetic oligonucleotide
  Antisense strand to SEQ ID NO: 1587871
auauugaccaucgaaguga

SEQ ID NO: 1587873 - RNA, 19 nt, Artificial Sequence
  Description of Artificial Sequence: Synthetic oligonucleotide
  Sense strand starting at position 75 of SEQ ID NO: 1560264
cacuucgauggucaauauu

SEQ ID NO: 1587874 - RNA, 19 nt, Artificial Sequence
  Description of Artificial Sequence: Synthetic oligonucleotide
  Antisense strand to SEQ ID NO: 1587873
aauauugaccaucgaagug

SEQ ID NO: 1587875 - RNA, 19 nt, Artificial Sequence
  Description of Artificial Sequence: Synthetic oligonucleotide
  Sense strand starting at position 304 of SEQ ID NO: 1560264
gagaaugggucaucaaugu

SEQ ID NO: 1587876 - RNA, 19 nt, Artificial Sequence
  Description of Artificial Sequence: Synthetic oligonucleotide
  Antisense strand to SEQ ID NO: 1587875
acauugaugacccauucuc

SEQ ID NO: 1587877 - RNA, 19 nt, Artificial Sequence
  Description of Artificial Sequence: Synthetic oligonucleotide
  Sense strand starting at position 308 of SEQ ID NO: 1560264
augggucaucaauguccau

SEQ ID NO: 1587878 - RNA, 19 nt, Artificial Sequence
  Description of Artificial Sequence: Synthetic oligonucleotide
  Antisense strand to SEQ ID NO: 1587877
auggacauugaugacccau

SEQ ID NO: 1587879 - RNA, 19 nt, Artificial Sequence
  Description of Artificial Sequence: Synthetic oligonucleotide
  Sense strand starting at position 365 of SEQ ID NO: 1560264
agggauuucugccaccgaa

SEQ ID NO: 1587880 - RNA, 19 nt, Artificial Sequence
  Description of Artificial Sequence: Synthetic oligonucleotide
  Antisense strand to SEQ ID NO: 1587879
uucgguggcagaaaucccu

SEQ ID NO: 1587881 - RNA, 19 nt, Artificial Sequence
  Description of Artificial Sequence: Synthetic oligonucleotide
  Sense strand starting at position 404 of SEQ ID NO: 1560264
gagggucuccauggaaugu

SEQ ID NO: 1587882 - RNA, 19 nt, Artificial Sequence
  Description of Artificial Sequence: Synthetic oligonucleotide
  Antisense strand to SEQ ID NO: 1587881
acauuccauggagacccuc

SEQ ID NO: 1587883 - RNA, 19 nt, Artificial Sequence
  Description of Artificial Sequence: Synthetic oligonucleotide
  Sense strand starting at position 815 of SEQ ID NO: 1560264
gucggcuuucgguaagugu

SEQ ID NO: 1587884 - RNA, 19 nt, Artificial Sequence
  Description of Artificial Sequence: Synthetic oligonucleotide
  Antisense strand to SEQ ID NO: 1587883
acacuuaccgaaagccgac

SEQ ID NO: 1587885 - RNA, 19 nt, Artificial Sequence
  Description of Artificial Sequence: Synthetic oligonucleotide
  Sense strand starting at position 816 of SEQ ID NO: 1560264
ucggcuuucgguaaguguu

SEQ ID NO: 1587886 - RNA, 19 nt, Artificial Sequence
  Description of Artificial Sequence: Synthetic oligonucleotide
  Antisense strand to SEQ ID NO: 1587885
aacacuuaccgaaagccga

SEQ ID NO: 1587887 - RNA, 19 nt, Artificial Sequence
  Description of Artificial Sequence: Synthetic oligonucleotide
  Sense strand starting at position 817 of SEQ ID NO: 1560264
cggcuuucgguaaguguuu

SEQ ID NO: 1587888 - RNA, 19 nt, Artificial Sequence
  Description of Artificial Sequence: Synthetic oligonucleotide
  Antisense strand to SEQ ID NO: 1587887
aaacacuuaccgaaagccg

SEQ ID NO: 1587889 - RNA, 19 nt, Artificial Sequence
  Description of Artificial Sequence: Synthetic oligonucleotide
  Sense strand starting at position 818 of SEQ ID NO: 1560264
ggcuuucgguaaguguuua

SEQ ID NO: 1587890 - RNA, 19 nt, Artificial Sequence
  Description of Artificial Sequence: Synthetic oligonucleotide
  Antisense strand to SEQ ID NO: 1587889
uaaacacuuaccgaaagcc

SEQ ID NO: 1587891 - RNA, 19 nt, Artificial Sequence
  Description of Artificial Sequence: Synthetic oligonucleotide
  Sense strand starting at position 826 of SEQ ID NO: 1560264
guaaguguuuacucucaac

SEQ ID NO: 1587892 - RNA, 19 nt, Artificial Sequence
  Description of Artificial Sequence: Synthetic oligonucleotide
  Antisense strand to SEQ ID NO: 1587891
guugagaguaaacacuuac

SEQ ID NO: 1587893 - RNA, 19 nt, Artificial Sequence
  Description of Artificial Sequence: Synthetic oligonucleotide
  Sense strand starting at position 852 of SEQ ID NO: 1560264
ggcuaauggugcguaggaa

SEQ ID NO: 1587894 - RNA, 19 nt, Artificial Sequence
  Description of Artificial Sequence: Synthetic oligonucleotide
  Antisense strand to SEQ ID NO: 1587893
uuccuacgcaccauuagcc

SEQ ID NO: 1587895 - RNA, 19 nt, Artificial Sequence
  Description of Artificial Sequence: Synthetic oligonucleotide
  Sense strand starting at position 1098 of SEQ ID NO: 1560264
ggucaucacuucccgggaa

SEQ ID NO: 1587896 - RNA, 19 nt, Artificial Sequence
  Description of Artificial Sequence: Synthetic oligonucleotide
  Antisense strand to SEQ ID NO: 1587895
uucccgggaagugaugacc

SEQ ID NO: 1587897 - RNA, 19 nt, Artificial Sequence
  Description of Artificial Sequence: Synthetic oligonucleotide
  Sense strand starting at position 1100 of SEQ ID NO: 1560264
ucaucacuucccgggaauu

SEQ ID NO: 1587898 - RNA, 19 nt, Artificial Sequence
  Description of Artificial Sequence: Synthetic oligonucleotide
  Antisense strand to SEQ ID NO: 1587897
aauucccgggaagugauga

SEQ ID NO: 1587899 - RNA, 19 nt, Artificial Sequence
  Description of Artificial Sequence: Synthetic oligonucleotide
  Sense strand starting at position 1102 of SEQ ID NO: 1560264
aucacuucccgggaauuau

SEQ ID NO: 1587900 - RNA, 19 nt, Artificial Sequence
  Description of Artificial Sequence: Synthetic oligonucleotide
  Antisense strand to SEQ ID NO: 1587899
auaauucccgggaagugau

SEQ ID NO: 1587901 - RNA, 19 nt, Artificial Sequence
  Description of Artificial Sequence: Synthetic oligonucleotide
  Sense strand starting at position 1111 of SEQ ID NO: 1560264
cgggaauuaucccaaccca

SEQ ID NO: 1587902 - RNA, 19 nt, Artificial Sequence
  Description of Artificial Sequence: Synthetic oligonucleotide
  Antisense strand to SEQ ID NO: 1587901
uggguugggauaauucccg

SEQ ID NO: 1587903 - RNA, 19 nt, Artificial Sequence
  Description of Artificial Sequence: Synthetic oligonucleotide
  Sense strand starting at position 1631 of SEQ ID NO: 1560264
cgucguaggccucagcgau

SEQ ID NO: 1587904 - RNA, 19 nt, Artificial Sequence
  Description of Artificial Sequence: Synthetic oligonucleotide
  Antisense strand to SEQ ID NO: 1587903
aucgcugaggccuacgacg

SEQ ID NO: 1587905 - RNA, 19 nt, Artificial Sequence
  Description of Artificial Sequence: Synthetic oligonucleotide
  Sense strand starting at position 1682 of SEQ ID NO: 1560264
uguucuuguccggguggua

SEQ ID NO: 1587906 - RNA, 19 nt, Artificial Sequence
  Description of Artificial Sequence: Synthetic oligonucleotide
  Antisense strand to SEQ ID NO: 1587905
uaccacccggacaagaaca

SEQ ID NO: 1587907 - RNA, 19 nt, Artificial Sequence
  Description of Artificial Sequence: Synthetic oligonucleotide
  Sense strand starting at position 1727 of SEQ ID NO: 1560264
gcuugaucuccucguccga

SEQ ID NO: 1587908 - RNA, 19 nt, Artificial Sequence
  Description of Artificial Sequence: Synthetic oligonucleotide
  Antisense strand to SEQ ID NO: 1587907
ucggacgaggagaucaagc

SEQ ID NO: 1587909 - RNA, 19 nt, Artificial Sequence
  Description of Artificial Sequence: Synthetic oligonucleotide
  Sense strand starting at position 1772 of SEQ ID NO: 1560264
gguaguagucuuuacccau

SEQ ID NO: 1587910 - RNA, 19 nt, Artificial Sequence
  Description of Artificial Sequence: Synthetic oligonucleotide
  Antisense strand to SEQ ID NO: 1587909
auggguaaagacuacuacc

SEQ ID NO: 1587911 - RNA, 19 nt, Artificial Sequence
  Description of Artificial Sequence: Synthetic oligonucleotide
  Sense strand starting at position 2491 of SEQ ID NO: 1560264
uaaggagacuccguuucua

SEQ ID NO: 1587912 - RNA, 19 nt, Artificial Sequence
  Description of Artificial Sequence: Synthetic oligonucleotide
  Antisense strand to SEQ ID NO: 1587911
uagaaacggagucuccuua

SEQ ID NO: 1587913 - RNA, 19 nt, Artificial Sequence
  Description of Artificial Sequence: Synthetic oligonucleotide
  Sense strand starting at position 2496 of SEQ ID NO: 1560264
agacuccguuucuauuuaa

SEQ ID NO: 1587914 - RNA, 19 nt, Artificial Sequence
  Description of Artificial Sequence: Synthetic oligonucleotide
  Antisense strand to SEQ ID NO: 1587913
uuaaauagaaacggagucu

SEQ ID NO: 1587915 - RNA, 19 nt, Artificial Sequence
  Description of Artificial Sequence: Synthetic oligonucleotide
  Sense strand starting at position 2714 of SEQ ID NO: 1560264
gccugagaauagcuugaau

SEQ ID NO: 1587916 - RNA, 19 nt, Artificial Sequence
  Description of Artificial Sequence: Synthetic oligonucleotide
  Antisense strand to SEQ ID NO: 1587915
auucaagcuauucucaggc

SEQ ID NO: 1587917 - RNA, 19 nt, Artificial Sequence
  Description of Artificial Sequence: Synthetic oligonucleotide
  Sense strand starting at position 3009 of SEQ ID NO: 1560264
aucacuugccgcuaaauuu

SEQ ID NO: 1587918 - RNA, 19 nt, Artificial Sequence
  Description of Artificial Sequence: Synthetic oligonucleotide
  Antisense strand to SEQ ID NO: 1587917
aaauuuagcggcaagugau

SEQ ID NO: 1587919 - RNA, 19 nt, Artificial Sequence
  Description of Artificial Sequence: Synthetic oligonucleotide
  Sense strand starting at position 3016 of SEQ ID NO: 1560264
gccgcuaaauuugaaauuu

SEQ ID NO: 1587920 - RNA, 19 nt, Artificial Sequence
  Description of Artificial Sequence: Synthetic oligonucleotide
  Antisense strand to SEQ ID NO: 1587919
aaauuucaaauuuagcggc

SEQ ID NO: 1587921 - RNA, 19 nt, Artificial Sequence
  Description of Artificial Sequence: Synthetic oligonucleotide
  Sense strand starting at position 3139 of SEQ ID NO: 1560264
gugagaaccucauaaauau

SEQ ID NO: 1587922 - RNA, 19 nt, Artificial Sequence
  Description of Artificial Sequence: Synthetic oligonucleotide
  Antisense strand to SEQ ID NO: 1587921
auauuuaugagguucucac

SEQ ID NO: 1587923 - RNA, 19 nt, Artificial Sequence
  Description of Artificial Sequence: Synthetic oligonucleotide
  Sense strand starting at position 3214 of SEQ ID NO: 1560264
gggacauaggugugucaca

SEQ ID NO: 1587924 - RNA, 19 nt, Artificial Sequence
  Description of Artificial Sequence: Synthetic oligonucleotide
  Antisense strand to SEQ ID NO: 1587923
ugugacacaccuauguccc

SEQ ID NO: 1587925 - RNA, 19 nt, Artificial Sequence
  Description of Artificial Sequence: Synthetic oligonucleotide
  Sense strand starting at position 3243 of SEQ ID NO: 1560264
ggccucuguuuccucaauu

SEQ ID NO: 1587926 - RNA, 19 nt, Artificial Sequence
  Description of Artificial Sequence: Synthetic oligonucleotide
  Antisense strand to SEQ ID NO: 1587925
aauugaggaaacagaggcc

SEQ ID NO: 1587927 - RNA, 19 nt, Artificial Sequence
  Description of Artificial Sequence: Synthetic oligonucleotide
  Sense strand starting at position 3275 of SEQ ID NO: 1560264
ucgcguuuggcucugaaag

SEQ ID NO: 1587928 - RNA, 19 nt, Artificial Sequence
  Description of Artificial Sequence: Synthetic oligonucleotide
  Antisense strand to SEQ ID NO: 1587927
cuuucagagccaaacgcga

SEQ ID NO: 1587929 - RNA, 19 nt, Artificial Sequence
  Description of Artificial Sequence: Synthetic oligonucleotide
  Sense strand starting at position 3276 of SEQ ID NO: 1560264
cgcguuuggcucugaaagu

SEQ ID NO: 1587930 - RNA, 19 nt, Artificial Sequence
  Description of Artificial Sequence: Synthetic oligonucleotide
  Antisense strand to SEQ ID NO: 1587929
acuuucagagccaaacgcg

SEQ ID NO: 1587931 - RNA, 19 nt, Artificial Sequence
  Description of Artificial Sequence: Synthetic oligonucleotide
  Sense strand starting at position 3406 of SEQ ID NO: 1560264
aggucagagccauguaaca

SEQ ID NO: 1587932 - RNA, 19 nt, Artificial Sequence
  Description of Artificial Sequence: Synthetic oligonucleotide
  Antisense strand to SEQ ID NO: 1587931
uguuacauggcucugaccu

SEQ ID NO: 1587933 - RNA, 19 nt, Artificial Sequence
  Description of Artificial Sequence: Synthetic oligonucleotide
  Sense strand starting at position 3467 of SEQ ID NO: 1560264
gcauuucccggcuggguaa

SEQ ID NO: 1587934 - RNA, 19 nt, Artificial Sequence
  Description of Artificial Sequence: Synthetic oligonucleotide
  Antisense strand to SEQ ID NO: 1587933
uuacccagccgggaaaugc

SEQ ID NO: 1587935 - RNA, 19 nt, Artificial Sequence
  Description of Artificial Sequence: Synthetic oligonucleotide
  Sense strand starting at position 3552 of SEQ ID NO: 1560264
agcaguugugcccacauca

SEQ ID NO: 1587936 - RNA, 19 nt, Artificial Sequence
  Description of Artificial Sequence: Synthetic oligonucleotide
  Antisense strand to SEQ ID NO: 1587935
ugaugugggcacaacugcu

SEQ ID NO: 1587937 - RNA, 19 nt, Artificial Sequence
  Description of Artificial Sequence: Synthetic oligonucleotide
  Sense strand starting at position 3568 of SEQ ID NO: 1560264
ucaugagggcuuugaaguu

SEQ ID NO: 1587938 - RNA, 19 nt, Artificial Sequence
  Description of Artificial Sequence: Synthetic oligonucleotide
  Antisense strand to SEQ ID NO: 1587937
aacuucaaagcccucauga

SEQ ID NO: 1587939 - RNA, 19 nt, Artificial Sequence
  Description of Artificial Sequence: Synthetic oligonucleotide
  Sense strand starting at position 3575 of SEQ ID NO: 1560264
ggcuuugaaguuuauauga

SEQ ID NO: 1587940 - RNA, 19 nt, Artificial Sequence
  Description of Artificial Sequence: Synthetic oligonucleotide
  Antisense strand to SEQ ID NO: 1587939
ucauauaaacuucaaagcc

SEQ ID NO: 1587941 - RNA, 19 nt, Artificial Sequence
  Description of Artificial Sequence: Synthetic oligonucleotide
  Sense strand starting at position 3577 of SEQ ID NO: 1560264
cuuugaaguuuauaugagu

SEQ ID NO: 1587942 - RNA, 19 nt, Artificial Sequence
  Description of Artificial Sequence: Synthetic oligonucleotide
  Antisense strand to SEQ ID NO: 1587941
acucauauaaacuucaaag

SEQ ID NO: 1587943 - RNA, 19 nt, Artificial Sequence
  Description of Artificial Sequence: Synthetic oligonucleotide
  Sense strand starting at position 3580 of SEQ ID NO: 1560264
ugaaguuuauaugagucaa

SEQ ID NO: 1587944 - RNA, 19 nt, Artificial Sequence
  Description of Artificial Sequence: Synthetic oligonucleotide
  Antisense strand to SEQ ID NO: 1587943
uugacucauauaaacuuca

SEQ ID NO: 1587945 - RNA, 19 nt, Artificial Sequence
  Description of Artificial Sequence: Synthetic oligonucleotide
  Sense strand starting at position 3693 of SEQ ID NO: 1560264
ccucauuccuggcagcuaa

SEQ ID NO: 1587946 - RNA, 19 nt, Artificial Sequence
  Description of Artificial Sequence: Synthetic oligonucleotide
  Antisense strand to SEQ ID NO: 1587945
uuagcugccaggaaugagg

SEQ ID NO: 1587947 - RNA, 19 nt, Artificial Sequence
  Description of Artificial Sequence: Synthetic oligonucleotide
  Sense strand starting at position 3913 of SEQ ID NO: 1560264
agcaucauggcggauaguu

SEQ ID NO: 1587948 - RNA, 19 nt, Artificial Sequence
  Description of Artificial Sequence: Synthetic oligonucleotide
  Antisense strand to SEQ ID NO: 1587947
aacuauccgccaugaugcu

SEQ ID NO: 1587949 - RNA, 19 nt, Artificial Sequence
  Description of Artificial Sequence: Synthetic oligonucleotide
  Sense strand starting at position 3921 of SEQ ID NO: 1560264
ggcggauaguuacauaaau

SEQ ID NO: 1587950 - RNA, 19 nt, Artificial Sequence
  Description of Artificial Sequence: Synthetic oligonucleotide
  Antisense strand to SEQ ID NO: 1587949
auuuauguaacuauccgcc

SEQ ID NO: 1587951 - RNA, 19 nt, Artificial Sequence
  Description of Artificial Sequence: Synthetic oligonucleotide
  Sense strand starting at position 13 of SEQ ID NO: 1560265
ccagcaagcucaucugcaa

SEQ ID NO: 1587952 - RNA, 19 nt, Artificial Sequence
  Description of Artificial Sequence: Synthetic oligonucleotide
  Antisense strand to SEQ ID NO: 1587951
uugcagaugagcuugcugg

SEQ ID NO: 1587953 - RNA, 19 nt, Artificial Sequence
  Description of Artificial Sequence: Synthetic oligonucleotide
  Sense strand starting at position 16 of SEQ ID NO: 1560265
gcaagcucaucugcaauca

SEQ ID NO: 1587954 - RNA, 19 nt, Artificial Sequence
  Description of Artificial Sequence: Synthetic oligonucleotide
  Antisense strand to SEQ ID NO: 1587953
ugauugcagaugagcuugc

SEQ ID NO: 1587955 - RNA, 19 nt, Artificial Sequence
  Description of Artificial Sequence: Synthetic oligonucleotide
  Sense strand starting at position 68 of SEQ ID NO: 1560265
gggugccagcaguguuaga

SEQ ID NO: 1587956 - RNA, 19 nt, Artificial Sequence
  Description of Artificial Sequence: Synthetic oligonucleotide
  Antisense strand to SEQ ID NO: 1587955
ucuaacacugcuggcaccc

SEQ ID NO: 1587957 - RNA, 19 nt, Artificial Sequence
  Description of Artificial Sequence: Synthetic oligonucleotide
  Sense strand starting at position 111 of SEQ ID NO: 1560265
aggcauaaauucuuauagu

SEQ ID NO: 1587958 - RNA, 19 nt, Artificial Sequence
  Description of Artificial Sequence: Synthetic oligonucleotide
  Antisense strand to SEQ ID NO: 1587957
acuauaagaauuuaugccu

SEQ ID NO: 1587959 - RNA, 19 nt, Artificial Sequence
  Description of Artificial Sequence: Synthetic oligonucleotide
  Sense strand starting at position 112 of SEQ ID NO: 1560265
ggcauaaauucuuauaguc

SEQ ID NO: 1587960 - RNA, 19 nt, Artificial Sequence
  Description of Artificial Sequence: Synthetic oligonucleotide
  Antisense strand to SEQ ID NO: 1587959
gacuauaagaauuuaugcc

SEQ ID NO: 1587961 - RNA, 19 nt, Artificial Sequence
  Description of Artificial Sequence: Synthetic oligonucleotide
  Sense strand starting at position 130 of SEQ ID NO: 1560265
ccagaauaacgccaagagu

SEQ ID NO: 1587962 - RNA, 19 nt, Artificial Sequence
  Description of Artificial Sequence: Synthetic oligonucleotide
  Antisense strand to SEQ ID NO: 1587961
acucuuggcguuauucugg

SEQ ID NO: 1587963 - RNA, 19 nt, Artificial Sequence
  Description of Artificial Sequence: Synthetic oligonucleotide
  Sense strand starting at position 133 of SEQ ID NO: 1560265
gaauaacgccaagaguaau

SEQ ID NO: 1587964 - RNA, 19 nt, Artificial Sequence
  Description of Artificial Sequence: Synthetic oligonucleotide
  Antisense strand to SEQ ID NO: 1587963
auuacucuuggcguuauuc

SEQ ID NO: 1587965 - RNA, 19 nt, Artificial Sequence
  Description of Artificial Sequence: Synthetic oligonucleotide
  Sense strand starting at position 189 of SEQ ID NO: 1560265
ccgguaaucgcagcacauu

SEQ ID NO: 1587966 - RNA, 19 nt, Artificial Sequence
  Description of Artificial Sequence: Synthetic oligonucleotide
  Antisense strand to SEQ ID NO: 1587965
aaugugcugcgauuaccgg

SEQ ID NO: 1587967 - RNA, 19 nt, Artificial Sequence
  Description of Artificial Sequence: Synthetic oligonucleotide
  Sense strand starting at position 190 of SEQ ID NO: 1560265
cgguaaucgcagcacauua

SEQ ID NO: 1587968 - RNA, 19 nt, Artificial Sequence
  Description of Artificial Sequence: Synthetic oligonucleotide
  Antisense strand to SEQ ID NO: 1587967
uaaugugcugcgauuaccg

SEQ ID NO: 1587969 - RNA, 19 nt, Artificial Sequence
  Description of Artificial Sequence: Synthetic oligonucleotide
  Sense strand starting at position 222 of SEQ ID NO: 1560265
gguggauugcuugaaccag

SEQ ID NO: 1587970 - RNA, 19 nt, Artificial Sequence
  Description of Artificial Sequence: Synthetic oligonucleotide
  Antisense strand to SEQ ID NO: 1587969
cugguucaagcaauccacc

SEQ ID NO: 1587971 - RNA, 19 nt, Artificial Sequence
  Description of Artificial Sequence: Synthetic oligonucleotide
  Sense strand starting at position 228 of SEQ ID NO: 1560265
uugcuugaaccaggacuua

SEQ ID NO: 1587972 - RNA, 19 nt, Artificial Sequence
  Description of Artificial Sequence: Synthetic oligonucleotide
  Antisense strand to SEQ ID NO: 1587971
uaaguccugguucaagcaa

SEQ ID NO: 1587973 - RNA, 19 nt, Artificial Sequence
  Description of Artificial Sequence: Synthetic oligonucleotide
  Sense strand starting at position 905 of SEQ ID NO: 1560265
uagaucacuugagguagaa

SEQ ID NO: 1587974 - RNA, 19 nt, Artificial Sequence
  Description of Artificial Sequence: Synthetic oligonucleotide
  Antisense strand to SEQ ID NO: 1587973
uucuaccucaagugaucua

SEQ ID NO: 1587975 - RNA, 19 nt, Artificial Sequence
  Description of Artificial Sequence: Synthetic oligonucleotide
  Sense strand starting at position 996 of SEQ ID NO: 1560265
gugugauggugcgccuuua

SEQ ID NO: 1587976 - RNA, 19 nt, Artificial Sequence
  Description of Artificial Sequence: Synthetic oligonucleotide
  Antisense strand to SEQ ID NO: 1587975
uaaaggcgcaccaucacac

SEQ ID NO: 1587977 - RNA, 19 nt, Artificial Sequence
  Description of Artificial Sequence: Synthetic oligonucleotide
  Sense strand starting at position 997 of SEQ ID NO: 1560265
ugugauggugcgccuuuaa

SEQ ID NO: 1587978 - RNA, 19 nt, Artificial Sequence
  Description of Artificial Sequence: Synthetic oligonucleotide
  Antisense strand to SEQ ID NO: 1587977
uuaaaggcgcaccaucaca

SEQ ID NO: 1587979 - RNA, 19 nt, Artificial Sequence
  Description of Artificial Sequence: Synthetic oligonucleotide
  Sense strand starting at position 1298 of SEQ ID NO: 1560265
auggaagaguccugagccu

SEQ ID NO: 1587980 - RNA, 19 nt, Artificial Sequence
  Description of Artificial Sequence: Synthetic oligonucleotide
  Antisense strand to SEQ ID NO: 1587979
aggcucaggacucuuccau

SEQ ID NO: 1587981 - RNA, 19 nt, Artificial Sequence
  Description of Artificial Sequence: Synthetic oligonucleotide
  Sense strand starting at position 1328 of SEQ ID NO: 1560265
ggcgguuggucauuguaga

SEQ ID NO: 1587982 - RNA, 19 nt, Artificial Sequence
  Description of Artificial Sequence: Synthetic oligonucleotide
  Antisense strand to SEQ ID NO: 1587981
ucuacaaugaccaaccgcc

SEQ ID NO: 1587983 - RNA, 19 nt, Artificial Sequence
  Description of Artificial Sequence: Synthetic oligonucleotide
  Sense strand starting at position 1329 of SEQ ID NO: 1560265
gcgguuggucauuguagag

SEQ ID NO: 1587984 - RNA, 19 nt, Artificial Sequence
  Description of Artificial Sequence: Synthetic oligonucleotide
  Antisense strand to SEQ ID NO: 1587983
cucuacaaugaccaaccgc

SEQ ID NO: 1587985 - RNA, 19 nt, Artificial Sequence
  Description of Artificial Sequence: Synthetic oligonucleotide
  Sense strand starting at position 1544 of SEQ ID NO: 1560265
ggagcucucguccagauac

SEQ ID NO: 1587986 - RNA, 19 nt, Artificial Sequence
  Description of Artificial Sequence: Synthetic oligonucleotide
  Antisense strand to SEQ ID NO: 1587985
guaucuggacgagagcucc

SEQ ID NO: 1587987 - RNA, 19 nt, Artificial Sequence
  Description of Artificial Sequence: Synthetic oligonucleotide
  Sense strand starting at position 1546 of SEQ ID NO: 1560265
agcucucguccagauacuu

SEQ ID NO: 1587988 - RNA, 19 nt, Artificial Sequence
  Description of Artificial Sequence: Synthetic oligonucleotide
  Antisense strand to SEQ ID NO: 1587987
aaguaucuggacgagagcu

SEQ ID NO: 1587989 - RNA, 19 nt, Artificial Sequence
  Description of Artificial Sequence: Synthetic oligonucleotide
  Sense strand starting at position 1554 of SEQ ID NO: 1560265
uccagauacuuguacugca

SEQ ID NO: 1587990 - RNA, 19 nt, Artificial Sequence
  Description of Artificial Sequence: Synthetic oligonucleotide
  Antisense strand to SEQ ID NO: 1587989
ugcaguacaaguaucugga

SEQ ID NO: 1587991 - RNA, 19 nt, Artificial Sequence
  Description of Artificial Sequence: Synthetic oligonucleotide
  Sense strand starting at position 1845 of SEQ ID NO: 1560265
gcgggaucauagcugcuau

SEQ ID NO: 1587992 - RNA, 19 nt, Artificial Sequence
  Description of Artificial Sequence: Synthetic oligonucleotide
  Antisense strand to SEQ ID NO: 1587991
auagcagcuaugaucccgc

SEQ ID NO: 1587993 - RNA, 19 nt, Artificial Sequence
  Description of Artificial Sequence: Synthetic oligonucleotide
  Sense strand starting at position 1866 of SEQ ID NO: 1560265
ggcugagauccaggaaucu

SEQ ID NO: 1587994 - RNA, 19 nt, Artificial Sequence
  Description of Artificial Sequence: Synthetic oligonucleotide
  Antisense strand to SEQ ID NO: 1587993
agauuccuggaucucagcc

SEQ ID NO: 1587995 - RNA, 19 nt, Artificial Sequence
  Description of Artificial Sequence: Synthetic oligonucleotide
  Sense strand starting at position 1875 of SEQ ID NO: 1560265
ccaggaaucugugucggga

SEQ ID NO: 1587996 - RNA, 19 nt, Artificial Sequence
  Description of Artificial Sequence: Synthetic oligonucleotide
  Antisense strand to SEQ ID NO: 1587995
ucccgacacagauuccugg

SEQ ID NO: 1587997 - RNA, 19 nt, Artificial Sequence
  Description of Artificial Sequence: Synthetic oligonucleotide
  Sense strand starting at position 1950 of SEQ ID NO: 1560265
cccuaaacuugccugggaa

SEQ ID NO: 1587998 - RNA, 19 nt, Artificial Sequence
  Description of Artificial Sequence: Synthetic oligonucleotide
  Antisense strand to SEQ ID NO: 1587997
uucccaggcaaguuuaggg

SEQ ID NO: 1587999 - RNA, 19 nt, Artificial Sequence
  Description of Artificial Sequence: Synthetic oligonucleotide
  Sense strand starting at position 2145 of SEQ ID NO: 1560265
gcucuucugucugacccaa

SEQ ID NO: 1588000 - RNA, 19 nt, Artificial Sequence
  Description of Artificial Sequence: Synthetic oligonucleotide
  Antisense strand to SEQ ID NO: 1587999
uugggucagacagaagagc

SEQ ID NO: 1588001 - RNA, 19 nt, Artificial Sequence
  Description of Artificial Sequence: Synthetic oligonucleotide
  Sense strand starting at position 2358 of SEQ ID NO: 1560265
cuccgccuuccugauuaaa

SEQ ID NO: 1588002 - RNA, 19 nt, Artificial Sequence
  Description of Artificial Sequence: Synthetic oligonucleotide
  Antisense strand to SEQ ID NO: 1588001
uuuaaucaggaaggcggag

SEQ ID NO: 1588003 - RNA, 19 nt, Artificial Sequence
  Description of Artificial Sequence: Synthetic oligonucleotide
  Sense strand starting at position 2578 of SEQ ID NO: 1560265
gcauuuguguuccagugua

SEQ ID NO: 1588004 - RNA, 19 nt, Artificial Sequence
  Description of Artificial Sequence: Synthetic oligonucleotide
  Antisense strand to SEQ ID NO: 1588003
uacacuggaacacaaaugc

SEQ ID NO: 1588005 - RNA, 19 nt, Artificial Sequence
  Description of Artificial Sequence: Synthetic oligonucleotide
  Sense strand starting at position 2977 of SEQ ID NO: 1560265
caaagaggugacuguaugu

SEQ ID NO: 1588006 - RNA, 19 nt, Artificial Sequence
  Description of Artificial Sequence: Synthetic oligonucleotide
  Antisense strand to SEQ ID NO: 1588005
acauacagucaccucuuug

SEQ ID NO: 1588007 - RNA, 19 nt, Artificial Sequence
  Description of Artificial Sequence: Synthetic oligonucleotide
  Sense strand starting at position 3016 of SEQ ID NO: 1560265
acaggauaaugguuucuca

SEQ ID NO: 1588008 - RNA, 19 nt, Artificial Sequence
  Description of Artificial Sequence: Synthetic oligonucleotide
  Antisense strand to SEQ ID NO: 1588007
ugagaaaccauuauccugu

SEQ ID NO: 1588009 - RNA, 19 nt, Artificial Sequence
  Description of Artificial Sequence: Synthetic oligonucleotide
  Sense strand starting at position 3094 of SEQ ID NO: 1560265
aagagaucuucccagguag

SEQ ID NO: 1588010 - RNA, 19 nt, Artificial Sequence
  Description of Artificial Sequence: Synthetic oligonucleotide
  Antisense strand to SEQ ID NO: 1588009
cuaccugggaagaucucuu

SEQ ID NO: 1588011 - RNA, 19 nt, Artificial Sequence
  Description of Artificial Sequence: Synthetic oligonucleotide
  Sense strand starting at position 3096 of SEQ ID NO: 1560265
gagaucuucccagguagcu

SEQ ID NO: 1588012 - RNA, 19 nt, Artificial Sequence
  Description of Artificial Sequence: Synthetic oligonucleotide
  Antisense strand to SEQ ID NO: 1588011
agcuaccugggaagaucuc

SEQ ID NO: 1588013 - RNA, 19 nt, Artificial Sequence
  Description of Artificial Sequence: Synthetic oligonucleotide
  Sense strand starting at position 3251 of SEQ ID NO: 1560265
ggcaaagggcuaugggaau

SEQ ID NO: 1588014 - RNA, 19 nt, Artificial Sequence
  Description of Artificial Sequence: Synthetic oligonucleotide
  Antisense strand to SEQ ID NO: 1588013
auucccauagcccuuugcc

SEQ ID NO: 1588015 - RNA, 19 nt, Artificial Sequence
  Description of Artificial Sequence: Synthetic oligonucleotide
  Sense strand starting at position 3271 of SEQ ID NO: 1560265
ugaguacuggcuugaaacu

SEQ ID NO: 1588016 - RNA, 19 nt, Artificial Sequence
  Description of Artificial Sequence: Synthetic oligonucleotide
  Antisense strand to SEQ ID NO: 1588015
aguuucaagccaguacuca

SEQ ID NO: 1588017 - RNA, 19 nt, Artificial Sequence
  Description of Artificial Sequence: Synthetic oligonucleotide
  Sense strand starting at position 3693 of SEQ ID NO: 1560265
gccaaauugcugggauuaa

SEQ ID NO: 1588018 - RNA, 19 nt, Artificial Sequence
  Description of Artificial Sequence: Synthetic oligonucleotide
  Antisense strand to SEQ ID NO: 1588017
uuaaucccagcaauuuggc

SEQ ID NO: 1588019 - RNA, 19 nt, Artificial Sequence
  Description of Artificial Sequence: Synthetic oligonucleotide
  Sense strand starting at position 3795 of SEQ ID NO: 1560265
cuaaacugccuuuguagaa

SEQ ID NO: 1588020 - RNA, 19 nt, Artificial Sequence
  Description of Artificial Sequence: Synthetic oligonucleotide
  Antisense strand to SEQ ID NO: 1588019
uucuacaaaggcaguuuag

SEQ ID NO: 1588021 - RNA, 19 nt, Artificial Sequence
  Description of Artificial Sequence: Synthetic oligonucleotide
  Sense strand starting at position 3799 of SEQ ID NO: 1560265
acugccuuuguagaaauaa

SEQ ID NO: 1588022 - RNA, 19 nt, Artificial Sequence
  Description of Artificial Sequence: Synthetic oligonucleotide
  Antisense strand to SEQ ID NO: 1588021
uuauuucuacaaaggcagu

SEQ ID NO: 1588023 - RNA, 19 nt, Artificial Sequence
  Description of Artificial Sequence: Synthetic oligonucleotide
  Sense strand starting at position 3862 of SEQ ID NO: 1560265
cuaaacuguagguguagua

SEQ ID NO: 1588024 - RNA, 19 nt, Artificial Sequence
  Description of Artificial Sequence: Synthetic oligonucleotide
  Antisense strand to SEQ ID NO: 1588023
uacuacaccuacaguuuag

SEQ ID NO: 1588025 - RNA, 19 nt, Artificial Sequence
  Description of Artificial Sequence: Synthetic oligonucleotide
  Sense strand starting at position 3871 of SEQ ID NO: 1560265
agguguaguaguuaaauua

SEQ ID NO: 1588026 - RNA, 19 nt, Artificial Sequence
  Description of Artificial Sequence: Synthetic oligonucleotide
  Antisense strand to SEQ ID NO: 1588025
uaauuuaacuacuacaccu

SEQ ID NO: 1588027 - RNA, 19 nt, Artificial Sequence
  Description of Artificial Sequence: Synthetic oligonucleotide
  Sense strand starting at position 3881 of SEQ ID NO: 1560265
guuaaauuaugaccagcca

SEQ ID NO: 1588028 - RNA, 19 nt, Artificial Sequence
  Description of Artificial Sequence: Synthetic oligonucleotide
  Antisense strand to SEQ ID NO: 1588027
uggcuggucauaauuuaac

SEQ ID NO: 1588029 - RNA, 19 nt, Artificial Sequence
  Description of Artificial Sequence: Synthetic oligonucleotide
  Sense strand starting at position 194 of SEQ ID NO: 1560266
ggccuugggugaucacagu

SEQ ID NO: 1588030 - RNA, 19 nt, Artificial Sequence
  Description of Artificial Sequence: Synthetic oligonucleotide
  Antisense strand to SEQ ID NO: 1588029
acugugaucacccaaggcc

SEQ ID NO: 1588031 - RNA, 19 nt, Artificial Sequence
  Description of Artificial Sequence: Synthetic oligonucleotide
  Sense strand starting at position 305 of SEQ ID NO: 1560266
gggacauuaucccuugaca

SEQ ID NO: 1588032 - RNA, 19 nt, Artificial Sequence
  Description of Artificial Sequence: Synthetic oligonucleotide
  Antisense strand to SEQ ID NO: 1588031
ugucaagggauaauguccc

SEQ ID NO: 1588033 - RNA, 19 nt, Artificial Sequence
  Description of Artificial Sequence: Synthetic oligonucleotide
  Sense strand starting at position 357 of SEQ ID NO: 1560266
ggaggaggauguuaucauu

SEQ ID NO: 1588034 - RNA, 19 nt, Artificial Sequence
  Description of Artificial Sequence: Synthetic oligonucleotide
  Antisense strand to SEQ ID NO: 1588033
aaugauaacauccuccucc

SEQ ID NO: 1588035 - RNA, 19 nt, Artificial Sequence
  Description of Artificial Sequence: Synthetic oligonucleotide
  Sense strand starting at position 397 of SEQ ID NO: 1560266
ugaguaguuccuggaaugg

SEQ ID NO: 1588036 - RNA, 19 nt, Artificial Sequence
  Description of Artificial Sequence: Synthetic oligonucleotide
  Antisense strand to SEQ ID NO: 1588035
ccauuccaggaacuacuca

SEQ ID NO: 1588037 - RNA, 19 nt, Artificial Sequence
  Description of Artificial Sequence: Synthetic oligonucleotide
  Sense strand starting at position 859 of SEQ ID NO: 1560266
gguagucaugggcagacua

SEQ ID NO: 1588038 - RNA, 19 nt, Artificial Sequence
  Description of Artificial Sequence: Synthetic oligonucleotide
  Antisense strand to SEQ ID NO: 1588037
uagucugcccaugacuacc

SEQ ID NO: 1588039 - RNA, 19 nt, Artificial Sequence
  Description of Artificial Sequence: Synthetic oligonucleotide
  Sense strand starting at position 924 of SEQ ID NO: 1560266
agcgcuagccaggaaucaa

SEQ ID NO: 1588040 - RNA, 19 nt, Artificial Sequence
  Description of Artificial Sequence: Synthetic oligonucleotide
  Antisense strand to SEQ ID NO: 1588039
uugauuccuggcuagcgcu

SEQ ID NO: 1588041 - RNA, 19 nt, Artificial Sequence
  Description of Artificial Sequence: Synthetic oligonucleotide
  Sense strand starting at position 935 of SEQ ID NO: 1560266
ggaaucaagcuguaagagu

SEQ ID NO: 1588042 - RNA, 19 nt, Artificial Sequence
  Description of Artificial Sequence: Synthetic oligonucleotide
  Antisense strand to SEQ ID NO: 1588041
acucuuacagcuugauucc

SEQ ID NO: 1588043 - RNA, 19 nt, Artificial Sequence
  Description of Artificial Sequence: Synthetic oligonucleotide
  Sense strand starting at position 946 of SEQ ID NO: 1560266
guaagagucagccagagag

SEQ ID NO: 1588044 - RNA, 19 nt, Artificial Sequence
  Description of Artificial Sequence: Synthetic oligonucleotide
  Antisense strand to SEQ ID NO: 1588043
cucucuggcugacucuuac

SEQ ID NO: 1588045 - RNA, 19 nt, Artificial Sequence
  Description of Artificial Sequence: Synthetic oligonucleotide
  Sense strand starting at position 1017 of SEQ ID NO: 1560266
gcuggugucacccaacaga

SEQ ID NO: 1588046 - RNA, 19 nt, Artificial Sequence
  Description of Artificial Sequence: Synthetic oligonucleotide
  Antisense strand to SEQ ID NO: 1588045
ucuguugggugacaccagc

SEQ ID NO: 1588047 - RNA, 19 nt, Artificial Sequence
  Description of Artificial Sequence: Synthetic oligonucleotide
  Sense strand starting at position 1035 of SEQ ID NO: 1560266
agggacugcucaguguuaa

SEQ ID NO: 1588048 - RNA, 19 nt, Artificial Sequence
  Description of Artificial Sequence: Synthetic oligonucleotide
  Antisense strand to SEQ ID NO: 1588047
uuaacacugagcagucccu

SEQ ID NO: 1588049 - RNA, 19 nt, Artificial Sequence
  Description of Artificial Sequence: Synthetic oligonucleotide
  Sense strand starting at position 1036 of SEQ ID NO: 1560266
gggacugcucaguguuaaa

SEQ ID NO: 1588050 - RNA, 19 nt, Artificial Sequence
  Description of Artificial Sequence: Synthetic oligonucleotide
  Antisense strand to SEQ ID NO: 1588049
uuuaacacugagcaguccc

SEQ ID NO: 1588051 - RNA, 19 nt, Artificial Sequence
  Description of Artificial Sequence: Synthetic oligonucleotide
  Sense strand starting at position 1173 of SEQ ID NO: 1560266
gaggcuugcccaggacaga

SEQ ID NO: 1588052 - RNA, 19 nt, Artificial Sequence
  Description of Artificial Sequence: Synthetic oligonucleotide
  Antisense strand to SEQ ID NO: 1588051
ucuguccugggcaagccuc

SEQ ID NO: 1588053 - RNA, 19 nt, Artificial Sequence
  Description of Artificial Sequence: Synthetic oligonucleotide
  Sense strand starting at position 1282 of SEQ ID NO: 1560266
cgguuucaccucugaugga

SEQ ID NO: 1588054 - RNA, 19 nt, Artificial Sequence
  Description of Artificial Sequence: Synthetic oligonucleotide
  Antisense strand to SEQ ID NO: 1588053
uccaucagaggugaaaccg

SEQ ID NO: 1588055 - RNA, 19 nt, Artificial Sequence
  Description of Artificial Sequence: Synthetic oligonucleotide
  Sense strand starting at position 2100 of SEQ ID NO: 1560266
cgggccuaugguugaguaa

SEQ ID NO: 1588056 - RNA, 19 nt, Artificial Sequence
  Description of Artificial Sequence: Synthetic oligonucleotide
  Antisense strand to SEQ ID NO: 1588055
uuacucaaccauaggcccg

SEQ ID NO: 1588057 - RNA, 19 nt, Artificial Sequence
  Description of Artificial Sequence: Synthetic oligonucleotide
  Sense strand starting at position 2101 of SEQ ID NO: 1560266
gggccuaugguugaguaaa

SEQ ID NO: 1588058 - RNA, 19 nt, Artificial Sequence
  Description of Artificial Sequence: Synthetic oligonucleotide
  Antisense strand to SEQ ID NO: 1588057
uuuacucaaccauaggccc

SEQ ID NO: 1588059 - RNA, 19 nt, Artificial Sequence
  Description of Artificial Sequence: Synthetic oligonucleotide
  Sense strand starting at position 2133 of SEQ ID NO: 1560266
gaccgucuugcugacuuau

SEQ ID NO: 1588060 - RNA, 19 nt, Artificial Sequence
  Description of Artificial Sequence: Synthetic oligonucleotide
  Antisense strand to SEQ ID NO: 1588059
auaagucagcaagacgguc

SEQ ID NO: 1588061 - RNA, 19 nt, Artificial Sequence
  Description of Artificial Sequence: Synthetic oligonucleotide
  Sense strand starting at position 2139 of SEQ ID NO: 1560266
cuugcugacuuauuggaca

SEQ ID NO: 1588062 - RNA, 19 nt, Artificial Sequence
  Description of Artificial Sequence: Synthetic oligonucleotide
  Antisense strand to SEQ ID NO: 1588061
uguccaauaagucagcaag

SEQ ID NO: 1588063 - RNA, 19 nt, Artificial Sequence
  Description of Artificial Sequence: Synthetic oligonucleotide
  Sense strand starting at position 2200 of SEQ ID NO: 1560266
gcaaguugucaagagagga

SEQ ID NO: 1588064 - RNA, 19 nt, Artificial Sequence
  Description of Artificial Sequence: Synthetic oligonucleotide
  Antisense strand to SEQ ID NO: 1588063
uccucucuugacaacuugc

SEQ ID NO: 1588065 - RNA, 19 nt, Artificial Sequence
  Description of Artificial Sequence: Synthetic oligonucleotide
  Sense strand starting at position 2336 of SEQ ID NO: 1560266
cuaccucguucccuaagaa

SEQ ID NO: 1588066 - RNA, 19 nt, Artificial Sequence
  Description of Artificial Sequence: Synthetic oligonucleotide
  Antisense strand to SEQ ID NO: 1588065
uucuuagggaacgagguag

SEQ ID NO: 1588067 - RNA, 19 nt, Artificial Sequence
  Description of Artificial Sequence: Synthetic oligonucleotide
  Sense strand starting at position 2348 of SEQ ID NO: 1560266
cuaagaauuucccauuggu

SEQ ID NO: 1588068 - RNA, 19 nt, Artificial Sequence
  Description of Artificial Sequence: Synthetic oligonucleotide
  Antisense strand to SEQ ID NO: 1588067
accaaugggaaauucuuag

SEQ ID NO: 1588069 - RNA, 19 nt, Artificial Sequence
  Description of Artificial Sequence: Synthetic oligonucleotide
  Sense strand starting at position 2426 of SEQ ID NO: 1560266
uccgaaucuugacuaucau

SEQ ID NO: 1588070 - RNA, 19 nt, Artificial Sequence
  Description of Artificial Sequence: Synthetic oligonucleotide
  Antisense strand to SEQ ID NO: 1588069
augauagucaagauucgga

SEQ ID NO: 1588071 - RNA, 19 nt, Artificial Sequence
  Description of Artificial Sequence: Synthetic oligonucleotide
  Sense strand starting at position 2427 of SEQ ID NO: 1560266
ccgaaucuugacuaucauu

SEQ ID NO: 1588072 - RNA, 19 nt, Artificial Sequence
  Description of Artificial Sequence: Synthetic oligonucleotide
  Antisense strand to SEQ ID NO: 1588071
aaugauagucaagauucgg

SEQ ID NO: 1588073 - RNA, 19 nt, Artificial Sequence
  Description of Artificial Sequence: Synthetic oligonucleotide
  Sense strand starting at position 2433 of SEQ ID NO: 1560266
cuugacuaucauugagaac

SEQ ID NO: 1588074 - RNA, 19 nt, Artificial Sequence
  Description of Artificial Sequence: Synthetic oligonucleotide
  Antisense strand to SEQ ID NO: 1588073
guucucaaugauagucaag

SEQ ID NO: 1588075 - RNA, 19 nt, Artificial Sequence
  Description of Artificial Sequence: Synthetic oligonucleotide
  Sense strand starting at position 2445 of SEQ ID NO: 1560266
ugagaaccauaucugucaa

SEQ ID NO: 1588076 - RNA, 19 nt, Artificial Sequence
  Description of Artificial Sequence: Synthetic oligonucleotide
  Antisense strand to SEQ ID NO: 1588075
uugacagauaugguucuca

SEQ ID NO: 1588077 - RNA, 19 nt, Artificial Sequence
  Description of Artificial Sequence: Synthetic oligonucleotide
  Sense strand starting at position 2474 of SEQ ID NO: 1560266
ucccguucuuccuugugau

SEQ ID NO: 1588078 - RNA, 19 nt, Artificial Sequence
  Description of Artificial Sequence: Synthetic oligonucleotide
  Antisense strand to SEQ ID NO: 1588077
aucacaaggaagaacggga

SEQ ID NO: 1588079 - RNA, 19 nt, Artificial Sequence
  Description of Artificial Sequence: Synthetic oligonucleotide
  Sense strand starting at position 2475 of SEQ ID NO: 1560266
cccguucuuccuugugauu

SEQ ID NO: 1588080 - RNA, 19 nt, Artificial Sequence
  Description of Artificial Sequence: Synthetic oligonucleotide
  Antisense strand to SEQ ID NO: 1588079
aaucacaaggaagaacggg

SEQ ID NO: 1588081 - RNA, 19 nt, Artificial Sequence
  Description of Artificial Sequence: Synthetic oligonucleotide
  Sense strand starting at position 2481 of SEQ ID NO: 1560266
cuuccuugugauuguugga

SEQ ID NO: 1588082 - RNA, 19 nt, Artificial Sequence
  Description of Artificial Sequence: Synthetic oligonucleotide
  Antisense strand to SEQ ID NO: 1588081
uccaacaaucacaaggaag

SEQ ID NO: 1588083 - RNA, 19 nt, Artificial Sequence
  Description of Artificial Sequence: Synthetic oligonucleotide
  Sense strand starting at position 2510 of SEQ ID NO: 1560266
agccuucugaaguauagga

SEQ ID NO: 1588084 - RNA, 19 nt, Artificial Sequence
  Description of Artificial Sequence: Synthetic oligonucleotide
  Antisense strand to SEQ ID NO: 1588083
uccuauacuucagaaggcu

SEQ ID NO: 1588085 - RNA, 19 nt, Artificial Sequence
  Description of Artificial Sequence: Synthetic oligonucleotide
  Sense strand starting at position 2515 of SEQ ID NO: 1560266
ucugaaguauaggauagau

SEQ ID NO: 1588086 - RNA, 19 nt, Artificial Sequence
  Description of Artificial Sequence: Synthetic oligonucleotide
  Antisense strand to SEQ ID NO: 1588085
aucuauccuauacuucaga

SEQ ID NO: 1588087 - RNA, 19 nt, Artificial Sequence
  Description of Artificial Sequence: Synthetic oligonucleotide
  Sense strand starting at position 2524 of SEQ ID NO: 1560266
uaggauagaucccaccgua

SEQ ID NO: 1588088 - RNA, 19 nt, Artificial Sequence
  Description of Artificial Sequence: Synthetic oligonucleotide
  Antisense strand to SEQ ID NO: 1588087
uacggugggaucuauccua

SEQ ID NO: 1588089 - RNA, 19 nt, Artificial Sequence
  Description of Artificial Sequence: Synthetic oligonucleotide
  Sense strand starting at position 2671 of SEQ ID NO: 1560266
gucccaaugcgcucugcaa

SEQ ID NO: 1588090 - RNA, 19 nt, Artificial Sequence
  Description of Artificial Sequence: Synthetic oligonucleotide
  Antisense strand to SEQ ID NO: 1588089
uugcagagcgcauugggac

SEQ ID NO: 1588091 - RNA, 19 nt, Artificial Sequence
  Description of Artificial Sequence: Synthetic oligonucleotide
  Sense strand starting at position 2673 of SEQ ID NO: 1560266
cccaaugcgcucugcaaau

SEQ ID NO: 1588092 - RNA, 19 nt, Artificial Sequence
  Description of Artificial Sequence: Synthetic oligonucleotide
  Antisense strand to SEQ ID NO: 1588091
auuugcagagcgcauuggg

SEQ ID NO: 1588093 - RNA, 19 nt, Artificial Sequence
  Description of Artificial Sequence: Synthetic oligonucleotide
  Sense strand starting at position 2679 of SEQ ID NO: 1560266
gcgcucugcaaaugguaga

SEQ ID NO: 1588094 - RNA, 19 nt, Artificial Sequence
  Description of Artificial Sequence: Synthetic oligonucleotide
  Antisense strand to SEQ ID NO: 1588093
ucuaccauuugcagagcgc

SEQ ID NO: 1588095 - RNA, 19 nt, Artificial Sequence
  Description of Artificial Sequence: Synthetic oligonucleotide
  Sense strand starting at position 2703 of SEQ ID NO: 1560266
agucauugcuuccuaggga

SEQ ID NO: 1588096 - RNA, 19 nt, Artificial Sequence
  Description of Artificial Sequence: Synthetic oligonucleotide
  Antisense strand to SEQ ID NO: 1588095
ucccuaggaagcaaugacu

SEQ ID NO: 1588097 - RNA, 19 nt, Artificial Sequence
  Description of Artificial Sequence: Synthetic oligonucleotide
  Sense strand starting at position 2706 of SEQ ID NO: 1560266
cauugcuuccuagggauag

SEQ ID NO: 1588098 - RNA, 19 nt, Artificial Sequence
  Description of Artificial Sequence: Synthetic oligonucleotide
  Antisense strand to SEQ ID NO: 1588097
cuaucccuaggaagcaaug

SEQ ID NO: 1588099 - RNA, 19 nt, Artificial Sequence
  Description of Artificial Sequence: Synthetic oligonucleotide
  Sense strand starting at position 2795 of SEQ ID NO: 1560266
ccgcuaacacuccaauguu

SEQ ID NO: 1588100 - RNA, 19 nt, Artificial Sequence
  Description of Artificial Sequence: Synthetic oligonucleotide
  Antisense strand to SEQ ID NO: 1588099
aacauuggaguguuagcgg

SEQ ID NO: 1588101 - RNA, 19 nt, Artificial Sequence
  Description of Artificial Sequence: Synthetic oligonucleotide
  Sense strand starting at position 2833 of SEQ ID NO: 1560266
uuagcagaucaugaaucuu

SEQ ID NO: 1588102 - RNA, 19 nt, Artificial Sequence
  Description of Artificial Sequence: Synthetic oligonucleotide
  Antisense strand to SEQ ID NO: 1588101
aagauucaugaucugcuaa

SEQ ID NO: 1588103 - RNA, 19 nt, Artificial Sequence
  Description of Artificial Sequence: Synthetic oligonucleotide
  Sense strand starting at position 3165 of SEQ ID NO: 1560266
cuuagaaacuggguccuua

SEQ ID NO: 1588104 - RNA, 19 nt, Artificial Sequence
  Description of Artificial Sequence: Synthetic oligonucleotide
  Antisense strand to SEQ ID NO: 1588103
uaaggacccaguuucuaag

SEQ ID NO: 1588105 - RNA, 19 nt, Artificial Sequence
  Description of Artificial Sequence: Synthetic oligonucleotide
  Sense strand starting at position 3211 of SEQ ID NO: 1560266
gugcacucauagcucaauu

SEQ ID NO: 1588106 - RNA, 19 nt, Artificial Sequence
  Description of Artificial Sequence: Synthetic oligonucleotide
  Antisense strand to SEQ ID NO: 1588105
aauugagcuaugagugcac

SEQ ID NO: 1588107 - RNA, 19 nt, Artificial Sequence
  Description of Artificial Sequence: Synthetic oligonucleotide
  Sense strand starting at position 3655 of SEQ ID NO: 1560266
agguaagugcucugaccug

SEQ ID NO: 1588108 - RNA, 19 nt, Artificial Sequence
  Description of Artificial Sequence: Synthetic oligonucleotide
  Antisense strand to SEQ ID NO: 1588107
caggucagagcacuuaccu

SEQ ID NO: 1588109 - RNA, 19 nt, Artificial Sequence
  Description of Artificial Sequence: Synthetic oligonucleotide
  Sense strand starting at position 93 of SEQ ID NO: 1560267
ggugaaaccucacguauac

SEQ ID NO: 1588110 - RNA, 19 nt, Artificial Sequence
  Description of Artificial Sequence: Synthetic oligonucleotide
  Antisense strand to SEQ ID NO: 1588109
guauacgugagguuucacc

SEQ ID NO: 1588111 - RNA, 19 nt, Artificial Sequence
  Description of Artificial Sequence: Synthetic oligonucleotide
  Sense strand starting at position 221 of SEQ ID NO: 1560267
uuauaauugugccagggca

SEQ ID NO: 1588112 - RNA, 19 nt, Artificial Sequence
  Description of Artificial Sequence: Synthetic oligonucleotide
  Antisense strand to SEQ ID NO: 1588111
ugcccuggcacaauuauaa

SEQ ID NO: 1588113 - RNA, 19 nt, Artificial Sequence
  Description of Artificial Sequence: Synthetic oligonucleotide
  Sense strand starting at position 395 of SEQ ID NO: 1560267
ccaccuuagucuguugagu

SEQ ID NO: 1588114 - RNA, 19 nt, Artificial Sequence
  Description of Artificial Sequence: Synthetic oligonucleotide
  Antisense strand to SEQ ID NO: 1588113
acucaacagacuaaggugg

SEQ ID NO: 1588115 - RNA, 19 nt, Artificial Sequence
  Description of Artificial Sequence: Synthetic oligonucleotide
  Sense strand starting at position 397 of SEQ ID NO: 1560267
accuuagucuguugaguag

SEQ ID NO: 1588116 - RNA, 19 nt, Artificial Sequence
  Description of Artificial Sequence: Synthetic oligonucleotide
  Antisense strand to SEQ ID NO: 1588115
cuacucaacagacuaaggu

SEQ ID NO: 1588117 - RNA, 19 nt, Artificial Sequence
  Description of Artificial Sequence: Synthetic oligonucleotide
  Sense strand starting at position 434 of SEQ ID NO: 1560267
ggcacuacuccaggcuaau

SEQ ID NO: 1588118 - RNA, 19 nt, Artificial Sequence
  Description of Artificial Sequence: Synthetic oligonucleotide
  Antisense strand to SEQ ID NO: 1588117
auuagccuggaguagugcc

SEQ ID NO: 1588119 - RNA, 19 nt, Artificial Sequence
  Description of Artificial Sequence: Synthetic oligonucleotide
  Sense strand starting at position 516 of SEQ ID NO: 1560267
ucaagagauucguccgcca

SEQ ID NO: 1588120 - RNA, 19 nt, Artificial Sequence
  Description of Artificial Sequence: Synthetic oligonucleotide
  Antisense strand to SEQ ID NO: 1588119
uggcggacgaaucucuuga

SEQ ID NO: 1588121 - RNA, 19 nt, Artificial Sequence
  Description of Artificial Sequence: Synthetic oligonucleotide
  Sense strand starting at position 518 of SEQ ID NO: 1560267
aagagauucguccgccacu

SEQ ID NO: 1588122 - RNA, 19 nt, Artificial Sequence
  Description of Artificial Sequence: Synthetic oligonucleotide
  Antisense strand to SEQ ID NO: 1588121
aguggcggacgaaucucuu

SEQ ID NO: 1588123 - RNA, 19 nt, Artificial Sequence
  Description of Artificial Sequence: Synthetic oligonucleotide
  Sense strand starting at position 860 of SEQ ID NO: 1560267
gauccuugugcacggaagu

SEQ ID NO: 1588124 - RNA, 19 nt, Artificial Sequence
  Description of Artificial Sequence: Synthetic oligonucleotide
  Antisense strand to SEQ ID NO: 1588123
acuuccgugcacaaggauc

SEQ ID NO: 1588125 - RNA, 19 nt, Artificial Sequence
  Description of Artificial Sequence: Synthetic oligonucleotide
  Sense strand starting at position 976 of SEQ ID NO: 1560267
gccaguucucauuagcaag

SEQ ID NO: 1588126 - RNA, 19 nt, Artificial Sequence
  Description of Artificial Sequence: Synthetic oligonucleotide
  Antisense strand to SEQ ID NO: 1588125
cuugcuaaugagaacuggc

SEQ ID NO: 1588127 - RNA, 19 nt, Artificial Sequence
  Description of Artificial Sequence: Synthetic oligonucleotide
  Sense strand starting at position 979 of SEQ ID NO: 1560267
aguucucauuagcaagacu

SEQ ID NO: 1588128 - RNA, 19 nt, Artificial Sequence
  Description of Artificial Sequence: Synthetic oligonucleotide
  Antisense strand to SEQ ID NO: 1588127
agucuugcuaaugagaacu

SEQ ID NO: 1588129 - RNA, 19 nt, Artificial Sequence
  Description of Artificial Sequence: Synthetic oligonucleotide
  Sense strand starting at position 1020 of SEQ ID NO: 1560267
ggcacagauuuacaggaaa

SEQ ID NO: 1588130 - RNA, 19 nt, Artificial Sequence
  Description of Artificial Sequence: Synthetic oligonucleotide
  Antisense strand to SEQ ID NO: 1588129
uuuccuguaaaucugugcc

SEQ ID NO: 1588131 - RNA, 19 nt, Artificial Sequence
  Description of Artificial Sequence: Synthetic oligonucleotide
  Sense strand starting at position 1077 of SEQ ID NO: 1560267
gcugcaaugcacgguuaaa

SEQ ID NO: 1588132 - RNA, 19 nt, Artificial Sequence
  Description of Artificial Sequence: Synthetic oligonucleotide
  Antisense strand to SEQ ID NO: 1588131
uuuaaccgugcauugcagc

SEQ ID NO: 1588133 - RNA, 19 nt, Artificial Sequence
  Description of Artificial Sequence: Synthetic oligonucleotide
  Sense strand starting at position 1088 of SEQ ID NO: 1560267
cgguuaaaguuccugccaa

SEQ ID NO: 1588134 - RNA, 19 nt, Artificial Sequence
  Description of Artificial Sequence: Synthetic oligonucleotide
  Antisense strand to SEQ ID NO: 1588133
uuggcaggaacuuuaaccg

SEQ ID NO: 1588135 - RNA, 19 nt, Artificial Sequence
  Description of Artificial Sequence: Synthetic oligonucleotide
  Sense strand starting at position 1089 of SEQ ID NO: 1560267
gguuaaaguuccugccaaa

SEQ ID NO: 1588136 - RNA, 19 nt, Artificial Sequence
  Description of Artificial Sequence: Synthetic oligonucleotide
  Antisense strand to SEQ ID NO: 1588135
uuuggcaggaacuuuaacc

SEQ ID NO: 1588137 - RNA, 19 nt, Artificial Sequence
  Description of Artificial Sequence: Synthetic oligonucleotide
  Sense strand starting at position 1112 of SEQ ID NO: 1560267
ggacuuucccaaggagcaa

SEQ ID NO: 1588138 - RNA, 19 nt, Artificial Sequence
  Description of Artificial Sequence: Synthetic oligonucleotide
  Antisense strand to SEQ ID NO: 1588137
uugcuccuugggaaagucc

SEQ ID NO: 1588139 - RNA, 19 nt, Artificial Sequence
  Description of Artificial Sequence: Synthetic oligonucleotide
  Sense strand starting at position 1967 of SEQ ID NO: 1560267
ggcgauacccugugcagaa

SEQ ID NO: 1588140 - RNA, 19 nt, Artificial Sequence
  Description of Artificial Sequence: Synthetic oligonucleotide
  Antisense strand to SEQ ID NO: 1588139
uucugcacaggguaucgcc

SEQ ID NO: 1588141 - RNA, 19 nt, Artificial Sequence
  Description of Artificial Sequence: Synthetic oligonucleotide
  Sense strand starting at position 2176 of SEQ ID NO: 1560267
gugagagcccuugaguaaa

SEQ ID NO: 1588142 - RNA, 19 nt, Artificial Sequence
  Description of Artificial Sequence: Synthetic oligonucleotide
  Antisense strand to SEQ ID NO: 1588141
uuuacucaagggcucucac

SEQ ID NO: 1588143 - RNA, 19 nt, Artificial Sequence
  Description of Artificial Sequence: Synthetic oligonucleotide
  Sense strand starting at position 2178 of SEQ ID NO: 1560267
gagagcccuugaguaaagu

SEQ ID NO: 1588144 - RNA, 19 nt, Artificial Sequence
  Description of Artificial Sequence: Synthetic oligonucleotide
  Antisense strand to SEQ ID NO: 1588143
acuuuacucaagggcucuc

SEQ ID NO: 1588145 - RNA, 19 nt, Artificial Sequence
  Description of Artificial Sequence: Synthetic oligonucleotide
  Sense strand starting at position 2187 of SEQ ID NO: 1560267
ugaguaaaguccucaguuc

SEQ ID NO: 1588146 - RNA, 19 nt, Artificial Sequence
  Description of Artificial Sequence: Synthetic oligonucleotide
  Antisense strand to SEQ ID NO: 1588145
gaacugaggacuuuacuca

SEQ ID NO: 1588147 - RNA, 19 nt, Artificial Sequence
  Description of Artificial Sequence: Synthetic oligonucleotide
  Sense strand starting at position 2217 of SEQ ID NO: 1560267
ccaucuauuugcuggcuau

SEQ ID NO: 1588148 - RNA, 19 nt, Artificial Sequence
  Description of Artificial Sequence: Synthetic oligonucleotide
  Antisense strand to SEQ ID NO: 1588147
auagccagcaaauagaugg

SEQ ID NO: 1588149 - RNA, 19 nt, Artificial Sequence
  Description of Artificial Sequence: Synthetic oligonucleotide
  Sense strand starting at position 2335 of SEQ ID NO: 1560267
uguagcuaguaccaagaau

SEQ ID NO: 1588150 - RNA, 19 nt, Artificial Sequence
  Description of Artificial Sequence: Synthetic oligonucleotide
  Antisense strand to SEQ ID NO: 1588149
auucuugguacuagcuaca

SEQ ID NO: 1588151 - RNA, 19 nt, Artificial Sequence
  Description of Artificial Sequence: Synthetic oligonucleotide
  Sense strand starting at position 2346 of SEQ ID NO: 1560267
ccaagaaucucacagugua

SEQ ID NO: 1588152 - RNA, 19 nt, Artificial Sequence
  Description of Artificial Sequence: Synthetic oligonucleotide
  Antisense strand to SEQ ID NO: 1588151
uacacugugagauucuugg

SEQ ID NO: 1588153 - RNA, 19 nt, Artificial Sequence
  Description of Artificial Sequence: Synthetic oligonucleotide
  Sense strand starting at position 2588 of SEQ ID NO: 1560267
uagcuagucguuguggcau

SEQ ID NO: 1588154 - RNA, 19 nt, Artificial Sequence
  Description of Artificial Sequence: Synthetic oligonucleotide
  Antisense strand to SEQ ID NO: 1588153
augccacaacgacuagcua

SEQ ID NO: 1588155 - RNA, 19 nt, Artificial Sequence
  Description of Artificial Sequence: Synthetic oligonucleotide
  Sense strand starting at position 3008 of SEQ ID NO: 1560267
ccaugauugggccacugga

SEQ ID NO: 1588156 - RNA, 19 nt, Artificial Sequence
  Description of Artificial Sequence: Synthetic oligonucleotide
  Antisense strand to SEQ ID NO: 1588155
uccaguggcccaaucaugg

SEQ ID NO: 1588157 - RNA, 19 nt, Artificial Sequence
  Description of Artificial Sequence: Synthetic oligonucleotide
  Sense strand starting at position 3154 of SEQ ID NO: 1560267
cuaguaggcugggauuaca

SEQ ID NO: 1588158 - RNA, 19 nt, Artificial Sequence
  Description of Artificial Sequence: Synthetic oligonucleotide
  Antisense strand to SEQ ID NO: 1588157
uguaaucccagccuacuag

SEQ ID NO: 1588159 - RNA, 19 nt, Artificial Sequence
  Description of Artificial Sequence: Synthetic oligonucleotide
  Sense strand starting at position 3201 of SEQ ID NO: 1560267
uuguaucuucggugguaga

SEQ ID NO: 1588160 - RNA, 19 nt, Artificial Sequence
  Description of Artificial Sequence: Synthetic oligonucleotide
  Antisense strand to SEQ ID NO: 1588159
ucuaccaccgaagauacaa

SEQ ID NO: 1588161 - RNA, 19 nt, Artificial Sequence
  Description of Artificial Sequence: Synthetic oligonucleotide
  Sense strand starting at position 3369 of SEQ ID NO: 1560267
gggaaagauugugucuuua

SEQ ID NO: 1588162 - RNA, 19 nt, Artificial Sequence
  Description of Artificial Sequence: Synthetic oligonucleotide
  Antisense strand to SEQ ID NO: 1588161
uaaagacacaaucuuuccc

SEQ ID NO: 1588163 - RNA, 19 nt, Artificial Sequence
  Description of Artificial Sequence: Synthetic oligonucleotide
  Sense strand starting at position 3371 of SEQ ID NO: 1560267
gaaagauugugucuuuaac

SEQ ID NO: 1588164 - RNA, 19 nt, Artificial Sequence
  Description of Artificial Sequence: Synthetic oligonucleotide
  Antisense strand to SEQ ID NO: 1588163
guuaaagacacaaucuuuc

SEQ ID NO: 1588165 - RNA, 19 nt, Artificial Sequence
  Description of Artificial Sequence: Synthetic oligonucleotide
  Sense strand starting at position 3608 of SEQ ID NO: 1560267
gacaaauggguuugcaaca

SEQ ID NO: 1588166 - RNA, 19 nt, Artificial Sequence
  Description of Artificial Sequence: Synthetic oligonucleotide
  Antisense strand to SEQ ID NO: 1588165
uguugcaaacccauuuguc

SEQ ID NO: 1588167 - RNA, 19 nt, Artificial Sequence
  Description of Artificial Sequence: Synthetic oligonucleotide
  Sense strand starting at position 3609 of SEQ ID NO: 1560267
acaaauggguuugcaacaa

SEQ ID NO: 1588168 - RNA, 19 nt, Artificial Sequence
  Description of Artificial Sequence: Synthetic oligonucleotide
  Antisense strand to SEQ ID NO: 1588167
uuguugcaaacccauuugu

SEQ ID NO: 1588169 - RNA, 19 nt, Artificial Sequence
  Description of Artificial Sequence: Synthetic oligonucleotide
  Sense strand starting at position 3613 of SEQ ID NO: 1560267
auggguuugcaacaaacuu

SEQ ID NO: 1588170 - RNA, 19 nt, Artificial Sequence
  Description of Artificial Sequence: Synthetic oligonucleotide
  Antisense strand to SEQ ID NO: 1588169
aaguuuguugcaaacccau

SEQ ID NO: 1588171 - RNA, 19 nt, Artificial Sequence
  Description of Artificial Sequence: Synthetic oligonucleotide
  Sense strand starting at position 3628 of SEQ ID NO: 1560267
acuuaaggauagcuauaca

SEQ ID NO: 1588172 - RNA, 19 nt, Artificial Sequence
  Description of Artificial Sequence: Synthetic oligonucleotide
  Antisense strand to SEQ ID NO: 1588171
uguauagcuauccuuaagu

SEQ ID NO: 1588173 - RNA, 19 nt, Artificial Sequence
  Description of Artificial Sequence: Synthetic oligonucleotide
  Sense strand starting at position 3709 of SEQ ID NO: 1560267
acuguauuaucugguaaag

SEQ ID NO: 1588174 - RNA, 19 nt, Artificial Sequence
  Description of Artificial Sequence: Synthetic oligonucleotide
  Antisense strand to SEQ ID NO: 1588173
cuuuaccagauaauacagu

SEQ ID NO: 1588175 - RNA, 19 nt, Artificial Sequence
  Description of Artificial Sequence: Synthetic oligonucleotide
  Sense strand starting at position 3711 of SEQ ID NO: 1560267
uguauuaucugguaaaggg

SEQ ID NO: 1588176 - RNA, 19 nt, Artificial Sequence
  Description of Artificial Sequence: Synthetic oligonucleotide
  Antisense strand to SEQ ID NO: 1588175
cccuuuaccagauaauaca

SEQ ID NO: 1588177 - RNA, 19 nt, Artificial Sequence
  Description of Artificial Sequence: Synthetic oligonucleotide
  Sense strand starting at position 3726 of SEQ ID NO: 1560267
aggguuaauauccggaaua

SEQ ID NO: 1588178 - RNA, 19 nt, Artificial Sequence
  Description of Artificial Sequence: Synthetic oligonucleotide
  Antisense strand to SEQ ID NO: 1588177
uauuccggauauuaacccu

SEQ ID NO: 1588179 - RNA, 19 nt, Artificial Sequence
  Description of Artificial Sequence: Synthetic oligonucleotide
  Sense strand starting at position 453 of SEQ ID NO: 1560268
gcaauaauguuugcagccu

SEQ ID NO: 1588180 - RNA, 19 nt, Artificial Sequence
  Description of Artificial Sequence: Synthetic oligonucleotide
  Antisense strand to SEQ ID NO: 1588179
aggcugcaaacauuauugc

SEQ ID NO: 1588181 - RNA, 19 nt, Artificial Sequence
  Description of Artificial Sequence: Synthetic oligonucleotide
  Sense strand starting at position 477 of SEQ ID NO: 1560268
acgccaaaggucuaagaca

SEQ ID NO: 1588182 - RNA, 19 nt, Artificial Sequence
  Description of Artificial Sequence: Synthetic oligonucleotide
  Antisense strand to SEQ ID NO: 1588181
ugucuuagaccuuuggcgu

SEQ ID NO: 1588183 - RNA, 19 nt, Artificial Sequence
  Description of Artificial Sequence: Synthetic oligonucleotide
  Sense strand starting at position 514 of SEQ ID NO: 1560268
agacaaagauaaugauaga

SEQ ID NO: 1588184 - RNA, 19 nt, Artificial Sequence
  Description of Artificial Sequence: Synthetic oligonucleotide
  Antisense strand to SEQ ID NO: 1588183
ucuaucauuaucuuugucu

SEQ ID NO: 1588185 - RNA, 19 nt, Artificial Sequence
  Description of Artificial Sequence: Synthetic oligonucleotide
  Sense strand starting at position 769 of SEQ ID NO: 1560268
cucucaucuccuugagguu

SEQ ID NO: 1588186 - RNA, 19 nt, Artificial Sequence
  Description of Artificial Sequence: Synthetic oligonucleotide
  Antisense strand to SEQ ID NO: 1588185
aaccucaaggagaugagag

SEQ ID NO: 1588187 - RNA, 19 nt, Artificial Sequence
  Description of Artificial Sequence: Synthetic oligonucleotide
  Sense strand starting at position 770 of SEQ ID NO: 1560268
ucucaucuccuugagguuu

SEQ ID NO: 1588188 - RNA, 19 nt, Artificial Sequence
  Description of Artificial Sequence: Synthetic oligonucleotide
  Antisense strand to SEQ ID NO: 1588187
aaaccucaaggagaugaga

SEQ ID NO: 1588189 - RNA, 19 nt, Artificial Sequence
  Description of Artificial Sequence: Synthetic oligonucleotide
  Sense strand starting at position 891 of SEQ ID NO: 1560268
gcacuugucacugacaggu

SEQ ID NO: 1588190 - RNA, 19 nt, Artificial Sequence
  Description of Artificial Sequence: Synthetic oligonucleotide
  Antisense strand to SEQ ID NO: 1588189
accugucagugacaagugc

SEQ ID NO: 1588191 - RNA, 19 nt, Artificial Sequence
  Description of Artificial Sequence: Synthetic oligonucleotide
  Sense strand starting at position 893 of SEQ ID NO: 1560268
acuugucacugacagguaa

SEQ ID NO: 1588192 - RNA, 19 nt, Artificial Sequence
  Description of Artificial Sequence: Synthetic oligonucleotide
  Antisense strand to SEQ ID NO: 1588191
uuaccugucagugacaagu

SEQ ID NO: 1588193 - RNA, 19 nt, Artificial Sequence
  Description of Artificial Sequence: Synthetic oligonucleotide
  Sense strand starting at position 905 of SEQ ID NO: 1560268
cagguaaucuacucgauca

SEQ ID NO: 1588194 - RNA, 19 nt, Artificial Sequence
  Description of Artificial Sequence: Synthetic oligonucleotide
  Antisense strand to SEQ ID NO: 1588193
ugaucgaguagauuaccug

SEQ ID NO: 1588195 - RNA, 19 nt, Artificial Sequence
  Description of Artificial Sequence: Synthetic oligonucleotide
  Sense strand starting at position 906 of SEQ ID NO: 1560268
agguaaucuacucgaucag

SEQ ID NO: 1588196 - RNA, 19 nt, Artificial Sequence
  Description of Artificial Sequence: Synthetic oligonucleotide
  Antisense strand to SEQ ID NO: 1588195
cugaucgaguagauuaccu

SEQ ID NO: 1588197 - RNA, 19 nt, Artificial Sequence
  Description of Artificial Sequence: Synthetic oligonucleotide
  Sense strand starting at position 1118 of SEQ ID NO: 1560268
cccagagagucugauauac

SEQ ID NO: 1588198 - RNA, 19 nt, Artificial Sequence
  Description of Artificial Sequence: Synthetic oligonucleotide
  Antisense strand to SEQ ID NO: 1588197
guauaucagacucucuggg

SEQ ID NO: 1588199 - RNA, 19 nt, Artificial Sequence
  Description of Artificial Sequence: Synthetic oligonucleotide
  Sense strand starting at position 1145 of SEQ ID NO: 1560268
ggcugugacucucacaauc

SEQ ID NO: 1588200 - RNA, 19 nt, Artificial Sequence
  Description of Artificial Sequence: Synthetic oligonucleotide
  Antisense strand to SEQ ID NO: 1588199
gauugugagagucacagcc

SEQ ID NO: 1588201 - RNA, 19 nt, Artificial Sequence
  Description of Artificial Sequence: Synthetic oligonucleotide
  Sense strand starting at position 2562 of SEQ ID NO: 1560268
ucugacuccuggcuggaaa

SEQ ID NO: 1588202 - RNA, 19 nt, Artificial Sequence
  Description of Artificial Sequence: Synthetic oligonucleotide
  Antisense strand to SEQ ID NO: 1588201
uuuccagccaggagucaga

SEQ ID NO: 1588203 - RNA, 19 nt, Artificial Sequence
  Description of Artificial Sequence: Synthetic oligonucleotide
  Sense strand starting at position 2609 of SEQ ID NO: 1560268
ucauaccuguaaguauaau

SEQ ID NO: 1588204 - RNA, 19 nt, Artificial Sequence
  Description of Artificial Sequence: Synthetic oligonucleotide
  Antisense strand to SEQ ID NO: 1588203
auuauacuuacagguauga

SEQ ID NO: 1588205 - RNA, 19 nt, Artificial Sequence
  Description of Artificial Sequence: Synthetic oligonucleotide
  Sense strand starting at position 2919 of SEQ ID NO: 1560268
ucuaauugcuaagauguca

SEQ ID NO: 1588206 - RNA, 19 nt, Artificial Sequence
  Description of Artificial Sequence: Synthetic oligonucleotide
  Antisense strand to SEQ ID NO: 1588205
ugacaucuuagcaauuaga

SEQ ID NO: 1588207 - RNA, 19 nt, Artificial Sequence
  Description of Artificial Sequence: Synthetic oligonucleotide
  Sense strand starting at position 2924 of SEQ ID NO: 1560268
uugcuaagaugucauugag

SEQ ID NO: 1588208 - RNA, 19 nt, Artificial Sequence
  Description of Artificial Sequence: Synthetic oligonucleotide
  Antisense strand to SEQ ID NO: 1588207
cucaaugacaucuuagcaa

SEQ ID NO: 1588209 - RNA, 19 nt, Artificial Sequence
  Description of Artificial Sequence: Synthetic oligonucleotide
  Sense strand starting at position 2927 of SEQ ID NO: 1560268
cuaagaugucauugagccu

SEQ ID NO: 1588210 - RNA, 19 nt, Artificial Sequence
  Description of Artificial Sequence: Synthetic oligonucleotide
  Antisense strand to SEQ ID NO: 1588209
aggcucaaugacaucuuag

SEQ ID NO: 1588211 - RNA, 19 nt, Artificial Sequence
  Description of Artificial Sequence: Synthetic oligonucleotide
  Sense strand starting at position 3026 of SEQ ID NO: 1560268
gggugcuugcucaguguga

SEQ ID NO: 1588212 - RNA, 19 nt, Artificial Sequence
  Description of Artificial Sequence: Synthetic oligonucleotide
  Antisense strand to SEQ ID NO: 1588211
ucacacugagcaagcaccc

SEQ ID NO: 1588213 - RNA, 19 nt, Artificial Sequence
  Description of Artificial Sequence: Synthetic oligonucleotide
  Sense strand starting at position 3028 of SEQ ID NO: 1560268
gugcuugcucagugugacu

SEQ ID NO: 1588214 - RNA, 19 nt, Artificial Sequence
  Description of Artificial Sequence: Synthetic oligonucleotide
  Antisense strand to SEQ ID NO: 1588213
agucacacugagcaagcac

SEQ ID NO: 1588215 - RNA, 19 nt, Artificial Sequence
  Description of Artificial Sequence: Synthetic oligonucleotide
  Sense strand starting at position 3121 of SEQ ID NO: 1560268
acuggagugcucggagaug

SEQ ID NO: 1588216 - RNA, 19 nt, Artificial Sequence
  Description of Artificial Sequence: Synthetic oligonucleotide
  Antisense strand to SEQ ID NO: 1588215
caucuccgagcacuccagu

SEQ ID NO: 1588217 - RNA, 19 nt, Artificial Sequence
  Description of Artificial Sequence: Synthetic oligonucleotide
  Sense strand starting at position 3122 of SEQ ID NO: 1560268
cuggagugcucggagaugu

SEQ ID NO: 1588218 - RNA, 19 nt, Artificial Sequence
  Description of Artificial Sequence: Synthetic oligonucleotide
  Antisense strand to SEQ ID NO: 1588217
acaucuccgagcacuccag

SEQ ID NO: 1588219 - RNA, 19 nt, Artificial Sequence
  Description of Artificial Sequence: Synthetic oligonucleotide
  Sense strand starting at position 3170 of SEQ ID NO: 1560268
gagccaguuugggagucua

SEQ ID NO: 1588220 - RNA, 19 nt, Artificial Sequence
  Description of Artificial Sequence: Synthetic oligonucleotide
  Antisense strand to SEQ ID NO: 1588219
uagacucccaaacuggcuc

SEQ ID NO: 1588221 - RNA, 19 nt, Artificial Sequence
  Description of Artificial Sequence: Synthetic oligonucleotide
  Sense strand starting at position 3226 of SEQ ID NO: 1560268
ggaugucuugguuaaucua

SEQ ID NO: 1588222 - RNA, 19 nt, Artificial Sequence
  Description of Artificial Sequence: Synthetic oligonucleotide
  Antisense strand to SEQ ID NO: 1588221
uagauuaaccaagacaucc

SEQ ID NO: 1588223 - RNA, 19 nt, Artificial Sequence
  Description of Artificial Sequence: Synthetic oligonucleotide
  Sense strand starting at position 3234 of SEQ ID NO: 1560268
ugguuaaucuauggucuca

SEQ ID NO: 1588224 - RNA, 19 nt, Artificial Sequence
  Description of Artificial Sequence: Synthetic oligonucleotide
  Antisense strand to SEQ ID NO: 1588223
ugagaccauagauuaacca

SEQ ID NO: 1588225 - RNA, 19 nt, Artificial Sequence
  Description of Artificial Sequence: Synthetic oligonucleotide
  Sense strand starting at position 3236 of SEQ ID NO: 1560268
guuaaucuauggucucaaa

SEQ ID NO: 1588226 - RNA, 19 nt, Artificial Sequence
  Description of Artificial Sequence: Synthetic oligonucleotide
  Antisense strand to SEQ ID NO: 1588225
uuugagaccauagauuaac

SEQ ID NO: 1588227 - RNA, 19 nt, Artificial Sequence
  Description of Artificial Sequence: Synthetic oligonucleotide
  Sense strand starting at position 3298 of SEQ ID NO: 1560268
uagagaauucuccagccga

SEQ ID NO: 1588228 - RNA, 19 nt, Artificial Sequence
  Description of Artificial Sequence: Synthetic oligonucleotide
  Antisense strand to SEQ ID NO: 1588227
ucggcuggagaauucucua

SEQ ID NO: 1588229 - RNA, 19 nt, Artificial Sequence
  Description of Artificial Sequence: Synthetic oligonucleotide
  Sense strand starting at position 3421 of SEQ ID NO: 1560268
gggagaauuugagguugaa

SEQ ID NO: 1588230 - RNA, 19 nt, Artificial Sequence
  Description of Artificial Sequence: Synthetic oligonucleotide
  Antisense strand to SEQ ID NO: 1588229
uucaaccucaaauucuccc

SEQ ID NO: 1588231 - RNA, 19 nt, Artificial Sequence
  Description of Artificial Sequence: Synthetic oligonucleotide
  Sense strand starting at position 3892 of SEQ ID NO: 1560268
ugccuugcugcccaaugaa

SEQ ID NO: 1588232 - RNA, 19 nt, Artificial Sequence
  Description of Artificial Sequence: Synthetic oligonucleotide
  Antisense strand to SEQ ID NO: 1588231
uucauugggcagcaaggca

SEQ ID NO: 1588233 - RNA, 19 nt, Artificial Sequence
  Description of Artificial Sequence: Synthetic oligonucleotide
  Sense strand starting at position 3973 of SEQ ID NO: 1560268
gccagucagacgcaggaua

SEQ ID NO: 1588234 - RNA, 19 nt, Artificial Sequence
  Description of Artificial Sequence: Synthetic oligonucleotide
  Antisense strand to SEQ ID NO: 1588233
uauccugcgucugacuggc

SEQ ID NO: 1588235 - RNA, 19 nt, Artificial Sequence
  Description of Artificial Sequence: Synthetic oligonucleotide
  Sense strand starting at position 9 of SEQ ID NO: 1560269
agaaguuagucacuuuaag

SEQ ID NO: 1588236 - RNA, 19 nt, Artificial Sequence
  Description of Artificial Sequence: Synthetic oligonucleotide
  Antisense strand to SEQ ID NO: 1588235
cuuaaagugacuaacuucu

SEQ ID NO: 1588237 - RNA, 19 nt, Artificial Sequence
  Description of Artificial Sequence: Synthetic oligonucleotide
  Sense strand starting at position 31 of SEQ ID NO: 1560269
uuagauggaugcucaguua

SEQ ID NO: 1588238 - RNA, 19 nt, Artificial Sequence
  Description of Artificial Sequence: Synthetic oligonucleotide
  Antisense strand to SEQ ID NO: 1588237
uaacugagcauccaucuaa

SEQ ID NO: 1588239 - RNA, 19 nt, Artificial Sequence
  Description of Artificial Sequence: Synthetic oligonucleotide
  Sense strand starting at position 34 of SEQ ID NO: 1560269
gauggaugcucaguuacau

SEQ ID NO: 1588240 - RNA, 19 nt, Artificial Sequence
  Description of Artificial Sequence: Synthetic oligonucleotide
  Antisense strand to SEQ ID NO: 1588239
auguaacugagcauccauc

SEQ ID NO: 1588241 - RNA, 19 nt, Artificial Sequence
  Description of Artificial Sequence: Synthetic oligonucleotide
  Sense strand starting at position 60 of SEQ ID NO: 1560269
gagagcuuagaggguauau

SEQ ID NO: 1588242 - RNA, 19 nt, Artificial Sequence
  Description of Artificial Sequence: Synthetic oligonucleotide
  Antisense strand to SEQ ID NO: 1588241
auauacccucuaagcucuc

SEQ ID NO: 1588243 - RNA, 19 nt, Artificial Sequence
  Description of Artificial Sequence: Synthetic oligonucleotide
  Sense strand starting at position 191 of SEQ ID NO: 1560269
ucguuauuggaccaugaga

SEQ ID NO: 1588244 - RNA, 19 nt, Artificial Sequence
  Description of Artificial Sequence: Synthetic oligonucleotide
  Antisense strand to SEQ ID NO: 1588243
ucucaugguccaauaacga

SEQ ID NO: 1588245 - RNA, 19 nt, Artificial Sequence
  Description of Artificial Sequence: Synthetic oligonucleotide
  Sense strand starting at position 316 of SEQ ID NO: 1560269
ggacaauguuacucuucca

SEQ ID NO: 1588246 - RNA, 19 nt, Artificial Sequence
  Description of Artificial Sequence: Synthetic oligonucleotide
  Antisense strand to SEQ ID NO: 1588245
uggaagaguaacauugucc

SEQ ID NO: 1588247 - RNA, 19 nt, Artificial Sequence
  Description of Artificial Sequence: Synthetic oligonucleotide
  Sense strand starting at position 387 of SEQ ID NO: 1560269
gauaucauauuggaaagua

SEQ ID NO: 1588248 - RNA, 19 nt, Artificial Sequence
  Description of Artificial Sequence: Synthetic oligonucleotide
  Antisense strand to SEQ ID NO: 1588247
uacuuuccaauaugauauc

SEQ ID NO: 1588249 - RNA, 19 nt, Artificial Sequence
  Description of Artificial Sequence: Synthetic oligonucleotide
  Sense strand starting at position 397 of SEQ ID NO: 1560269
uggaaaguauugguuuagu

SEQ ID NO: 1588250 - RNA, 19 nt, Artificial Sequence
  Description of Artificial Sequence: Synthetic oligonucleotide
  Antisense strand to SEQ ID NO: 1588249
acuaaaccaauacuuucca

SEQ ID NO: 1588251 - RNA, 19 nt, Artificial Sequence
  Description of Artificial Sequence: Synthetic oligonucleotide
  Sense strand starting at position 407 of SEQ ID NO: 1560269
ugguuuaguugcuugugau

SEQ ID NO: 1588252 - RNA, 19 nt, Artificial Sequence
  Description of Artificial Sequence: Synthetic oligonucleotide
  Antisense strand to SEQ ID NO: 1588251
aucacaagcaacuaaacca

SEQ ID NO: 1588253 - RNA, 19 nt, Artificial Sequence
  Description of Artificial Sequence: Synthetic oligonucleotide
  Sense strand starting at position 408 of SEQ ID NO: 1560269
gguuuaguugcuugugauu

SEQ ID NO: 1588254 - RNA, 19 nt, Artificial Sequence
  Description of Artificial Sequence: Synthetic oligonucleotide
  Antisense strand to SEQ ID NO: 1588253
aaucacaagcaacuaaacc

SEQ ID NO: 1588255 - RNA, 19 nt, Artificial Sequence
  Description of Artificial Sequence: Synthetic oligonucleotide
  Sense strand starting at position 415 of SEQ ID NO: 1560269
uugcuugugauuggucuua

SEQ ID NO: 1588256 - RNA, 19 nt, Artificial Sequence
  Description of Artificial Sequence: Synthetic oligonucleotide
  Antisense strand to SEQ ID NO: 1588255
uaagaccaaucacaagcaa

SEQ ID NO: 1588257 - RNA, 19 nt, Artificial Sequence
  Description of Artificial Sequence: Synthetic oligonucleotide
  Sense strand starting at position 417 of SEQ ID NO: 1560269
gcuugugauuggucuuauc

SEQ ID NO: 1588258 - RNA, 19 nt, Artificial Sequence
  Description of Artificial Sequence: Synthetic oligonucleotide
  Antisense strand to SEQ ID NO: 1588257
gauaagaccaaucacaagc

SEQ ID NO: 1588259 - RNA, 19 nt, Artificial Sequence
  Description of Artificial Sequence: Synthetic oligonucleotide
  Sense strand starting at position 425 of SEQ ID NO: 1560269
uuggucuuaucccucauua

SEQ ID NO: 1588260 - RNA, 19 nt, Artificial Sequence
  Description of Artificial Sequence: Synthetic oligonucleotide
  Antisense strand to SEQ ID NO: 1588259
uaaugagggauaagaccaa

SEQ ID NO: 1588261 - RNA, 19 nt, Artificial Sequence
  Description of Artificial Sequence: Synthetic oligonucleotide
  Sense strand starting at position 427 of SEQ ID NO: 1560269
ggucuuaucccucauuaga

SEQ ID NO: 1588262 - RNA, 19 nt, Artificial Sequence
  Description of Artificial Sequence: Synthetic oligonucleotide
  Antisense strand to SEQ ID NO: 1588261
ucuaaugagggauaagacc

SEQ ID NO: 1588263 - RNA, 19 nt, Artificial Sequence
  Description of Artificial Sequence: Synthetic oligonucleotide
  Sense strand starting at position 468 of SEQ ID NO: 1560269
ugagucuaucuuggucacu

SEQ ID NO: 1588264 - RNA, 19 nt, Artificial Sequence
  Description of Artificial Sequence: Synthetic oligonucleotide
  Antisense strand to SEQ ID NO: 1588263
agugaccaagauagacuca

SEQ ID NO: 1588265 - RNA, 19 nt, Artificial Sequence
  Description of Artificial Sequence: Synthetic oligonucleotide
  Sense strand starting at position 474 of SEQ ID NO: 1560269
uaucuuggucacuguugua

SEQ ID NO: 1588266 - RNA, 19 nt, Artificial Sequence
  Description of Artificial Sequence: Synthetic oligonucleotide
  Antisense strand to SEQ ID NO: 1588265
uacaacagugaccaagaua

SEQ ID NO: 1588267 - RNA, 19 nt, Artificial Sequence
  Description of Artificial Sequence: Synthetic oligonucleotide
  Sense strand starting at position 522 of SEQ ID NO: 1560269
gcaguagggccucaauaaa

SEQ ID NO: 1588268 - RNA, 19 nt, Artificial Sequence
  Description of Artificial Sequence: Synthetic oligonucleotide
  Antisense strand to SEQ ID NO: 1588267
uuuauugaggcccuacugc

SEQ ID NO: 1588269 - RNA, 19 nt, Artificial Sequence
  Description of Artificial Sequence: Synthetic oligonucleotide
  Sense strand starting at position 852 of SEQ ID NO: 1560269
aaacgacaaccgugacaau

SEQ ID NO: 1588270 - RNA, 19 nt, Artificial Sequence
  Description of Artificial Sequence: Synthetic oligonucleotide
  Antisense strand to SEQ ID NO: 1588269
auugucacgguugucguuu

SEQ ID NO: 1588271 - RNA, 19 nt, Artificial Sequence
  Description of Artificial Sequence: Synthetic oligonucleotide
  Sense strand starting at position 853 of SEQ ID NO: 1560269
aacgacaaccgugacaaua

SEQ ID NO: 1588272 - RNA, 19 nt, Artificial Sequence
  Description of Artificial Sequence: Synthetic oligonucleotide
  Antisense strand to SEQ ID NO: 1588271
uauugucacgguugucguu

SEQ ID NO: 1588273 - RNA, 19 nt, Artificial Sequence
  Description of Artificial Sequence: Synthetic oligonucleotide
  Sense strand starting at position 949 of SEQ ID NO: 1560269
aucacuacccugugaggua

SEQ ID NO: 1588274 - RNA, 19 nt, Artificial Sequence
  Description of Artificial Sequence: Synthetic oligonucleotide
  Antisense strand to SEQ ID NO: 1588273
uaccucacaggguagugau

SEQ ID NO: 1588275 - RNA, 19 nt, Artificial Sequence
  Description of Artificial Sequence: Synthetic oligonucleotide
  Sense strand starting at position 958 of SEQ ID NO: 1560269
cugugagguaguuacuaag

SEQ ID NO: 1588276 - RNA, 19 nt, Artificial Sequence
  Description of Artificial Sequence: Synthetic oligonucleotide
  Antisense strand to SEQ ID NO: 1588275
cuuaguaacuaccucacag

SEQ ID NO: 1588277 - RNA, 19 nt, Artificial Sequence
  Description of Artificial Sequence: Synthetic oligonucleotide
  Sense strand starting at position 1100 of SEQ ID NO: 1560269
ccaccaacgcuuuguugaa

SEQ ID NO: 1588278 - RNA, 19 nt, Artificial Sequence
  Description of Artificial Sequence: Synthetic oligonucleotide
  Antisense strand to SEQ ID NO: 1588277
uucaacaaagcguuggugg

SEQ ID NO: 1588279 - RNA, 19 nt, Artificial Sequence
  Description of Artificial Sequence: Synthetic oligonucleotide
  Sense strand starting at position 1101 of SEQ ID NO: 1560269
caccaacgcuuuguugaau

SEQ ID NO: 1588280 - RNA, 19 nt, Artificial Sequence
  Description of Artificial Sequence: Synthetic oligonucleotide
  Antisense strand to SEQ ID NO: 1588279
auucaacaaagcguuggug

SEQ ID NO: 1588281 - RNA, 19 nt, Artificial Sequence
  Description of Artificial Sequence: Synthetic oligonucleotide
  Sense strand starting at position 1107 of SEQ ID NO: 1560269
cgcuuuguugaaugacuua

SEQ ID NO: 1588282 - RNA, 19 nt, Artificial Sequence
  Description of Artificial Sequence: Synthetic oligonucleotide
  Antisense strand to SEQ ID NO: 1588281
uaagucauucaacaaagcg

SEQ ID NO: 1588283 - RNA, 19 nt, Artificial Sequence
  Description of Artificial Sequence: Synthetic oligonucleotide
  Sense strand starting at position 1114 of SEQ ID NO: 1560269
uugaaugacuuaggauaaa

SEQ ID NO: 1588284 - RNA, 19 nt, Artificial Sequence
  Description of Artificial Sequence: Synthetic oligonucleotide
  Antisense strand to SEQ ID NO: 1588283
uuuauccuaagucauucaa

SEQ ID NO: 1588285 - RNA, 19 nt, Artificial Sequence
  Description of Artificial Sequence: Synthetic oligonucleotide
  Sense strand starting at position 1470 of SEQ ID NO: 1560269
gaaagagaucgccgggacu

SEQ ID NO: 1588286 - RNA, 19 nt, Artificial Sequence
  Description of Artificial Sequence: Synthetic oligonucleotide
  Antisense strand to SEQ ID NO: 1588285
agucccggcgaucucuuuc

SEQ ID NO: 1588287 - RNA, 19 nt, Artificial Sequence
  Description of Artificial Sequence: Synthetic oligonucleotide
  Sense strand starting at position 1860 of SEQ ID NO: 1560269
acaguauuccuagugcguu

SEQ ID NO: 1588288 - RNA, 19 nt, Artificial Sequence
  Description of Artificial Sequence: Synthetic oligonucleotide
  Antisense strand to SEQ ID NO: 1588287
aacgcacuaggaauacugu

SEQ ID NO: 1588289 - RNA, 19 nt, Artificial Sequence
  Description of Artificial Sequence: Synthetic oligonucleotide
  Sense strand starting at position 1953 of SEQ ID NO: 1560269
agaagugagacugguuugu

SEQ ID NO: 1588290 - RNA, 19 nt, Artificial Sequence
  Description of Artificial Sequence: Synthetic oligonucleotide
  Antisense strand to SEQ ID NO: 1588289
acaaaccagucucacuucu

SEQ ID NO: 1588291 - RNA, 19 nt, Artificial Sequence
  Description of Artificial Sequence: Synthetic oligonucleotide
  Sense strand starting at position 2006 of SEQ ID NO: 1560269
cggagcaugcgcaguguuu

SEQ ID NO: 1588292 - RNA, 19 nt, Artificial Sequence
  Description of Artificial Sequence: Synthetic oligonucleotide
  Antisense strand to SEQ ID NO: 1588291
aaacacugcgcaugcuccg

SEQ ID NO: 1588293 - RNA, 19 nt, Artificial Sequence
  Description of Artificial Sequence: Synthetic oligonucleotide
  Sense strand starting at position 2041 of SEQ ID NO: 1560269
uccagagguguuggccaau

SEQ ID NO: 1588294 - RNA, 19 nt, Artificial Sequence
  Description of Artificial Sequence: Synthetic oligonucleotide
  Antisense strand to SEQ ID NO: 1588293
auuggccaacaccucugga

SEQ ID NO: 1588295 - RNA, 19 nt, Artificial Sequence
  Description of Artificial Sequence: Synthetic oligonucleotide
  Sense strand starting at position 2077 of SEQ ID NO: 1560269
accuuaaguaggugaggaa

SEQ ID NO: 1588296 - RNA, 19 nt, Artificial Sequence
  Description of Artificial Sequence: Synthetic oligonucleotide
  Antisense strand to SEQ ID NO: 1588295
uuccucaccuacuuaaggu

SEQ ID NO: 1588297 - RNA, 19 nt, Artificial Sequence
  Description of Artificial Sequence: Synthetic oligonucleotide
  Sense strand starting at position 2196 of SEQ ID NO: 1560269
cucccaguguuguuauaga

SEQ ID NO: 1588298 - RNA, 19 nt, Artificial Sequence
  Description of Artificial Sequence: Synthetic oligonucleotide
  Antisense strand to SEQ ID NO: 1588297
ucuauaacaacacugggag

SEQ ID NO: 1588299 - RNA, 19 nt, Artificial Sequence
  Description of Artificial Sequence: Synthetic oligonucleotide
  Sense strand starting at position 2245 of SEQ ID NO: 1560269
uaccuauuagauggugaaa

SEQ ID NO: 1588300 - RNA, 19 nt, Artificial Sequence
  Description of Artificial Sequence: Synthetic oligonucleotide
  Antisense strand to SEQ ID NO: 1588299
uuucaccaucuaauaggua

SEQ ID NO: 1588301 - RNA, 19 nt, Artificial Sequence
  Description of Artificial Sequence: Synthetic oligonucleotide
  Sense strand starting at position 2346 of SEQ ID NO: 1560269
gguggugacaucugaagaa

SEQ ID NO: 1588302 - RNA, 19 nt, Artificial Sequence
  Description of Artificial Sequence: Synthetic oligonucleotide
  Antisense strand to SEQ ID NO: 1588301
uucuucagaugucaccacc

SEQ ID NO: 1588303 - RNA, 19 nt, Artificial Sequence
  Description of Artificial Sequence: Synthetic oligonucleotide
  Sense strand starting at position 2796 of SEQ ID NO: 1560269
aucgauugagcccaagauu

SEQ ID NO: 1588304 - RNA, 19 nt, Artificial Sequence
  Description of Artificial Sequence: Synthetic oligonucleotide
  Antisense strand to SEQ ID NO: 1588303
aaucuugggcucaaucgau

SEQ ID NO: 1588305 - RNA, 19 nt, Artificial Sequence
  Description of Artificial Sequence: Synthetic oligonucleotide
  Sense strand starting at position 2957 of SEQ ID NO: 1560269
acagguuacagugaguuga

SEQ ID NO: 1588306 - RNA, 19 nt, Artificial Sequence
  Description of Artificial Sequence: Synthetic oligonucleotide
  Antisense strand to SEQ ID NO: 1588305
ucaacucacuguaaccugu

SEQ ID NO: 1588307 - RNA, 19 nt, Artificial Sequence
  Description of Artificial Sequence: Synthetic oligonucleotide
  Sense strand starting at position 3080 of SEQ ID NO: 1560269
cuacucagguggcuugaua

SEQ ID NO: 1588308 - RNA, 19 nt, Artificial Sequence
  Description of Artificial Sequence: Synthetic oligonucleotide
  Antisense strand to SEQ ID NO: 1588307
uaucaagccaccugaguag

SEQ ID NO: 1588309 - RNA, 19 nt, Artificial Sequence
  Description of Artificial Sequence: Synthetic oligonucleotide
  Sense strand starting at position 3088 of SEQ ID NO: 1560269
guggcuugauagcuugagu

SEQ ID NO: 1588310 - RNA, 19 nt, Artificial Sequence
  Description of Artificial Sequence: Synthetic oligonucleotide
  Antisense strand to SEQ ID NO: 1588309
acucaagcuaucaagccac

SEQ ID NO: 1588311 - RNA, 19 nt, Artificial Sequence
  Description of Artificial Sequence: Synthetic oligonucleotide
  Sense strand starting at position 3091 of SEQ ID NO: 1560269
gcuugauagcuugagucca

SEQ ID NO: 1588312 - RNA, 19 nt, Artificial Sequence
  Description of Artificial Sequence: Synthetic oligonucleotide
  Antisense strand to SEQ ID NO: 1588311
uggacucaagcuaucaagc

SEQ ID NO: 1588313 - RNA, 19 nt, Artificial Sequence
  Description of Artificial Sequence: Synthetic oligonucleotide
  Sense strand starting at position 3541 of SEQ ID NO: 1560269
aaaugcugugcauagcaaa

SEQ ID NO: 1588314 - RNA, 19 nt, Artificial Sequence
  Description of Artificial Sequence: Synthetic oligonucleotide
  Antisense strand to SEQ ID NO: 1588313
uuugcuaugcacagcauuu

SEQ ID NO: 1588315 - RNA, 19 nt, Artificial Sequence
  Description of Artificial Sequence: Synthetic oligonucleotide
  Sense strand starting at position 95 of SEQ ID NO: 1560270
uucuuaaugugacccguuu

SEQ ID NO: 1588316 - RNA, 19 nt, Artificial Sequence
  Description of Artificial Sequence: Synthetic oligonucleotide
  Antisense strand to SEQ ID NO: 1588315
aaacgggucacauuaagaa

SEQ ID NO: 1588317 - RNA, 19 nt, Artificial Sequence
  Description of Artificial Sequence: Synthetic oligonucleotide
  Sense strand starting at position 106 of SEQ ID NO: 1560270
acccguuuaggaugaaaca

SEQ ID NO: 1588318 - RNA, 19 nt, Artificial Sequence
  Description of Artificial Sequence: Synthetic oligonucleotide
  Antisense strand to SEQ ID NO: 1588317
uguuucauccuaaacgggu

SEQ ID NO: 1588319 - RNA, 19 nt, Artificial Sequence
  Description of Artificial Sequence: Synthetic oligonucleotide
  Sense strand starting at position 275 of SEQ ID NO: 1560270
ugagguuccaaaggaaagu

SEQ ID NO: 1588320 - RNA, 19 nt, Artificial Sequence
  Description of Artificial Sequence: Synthetic oligonucleotide
  Antisense strand to SEQ ID NO: 1588319
acuuuccuuuggaaccuca

SEQ ID NO: 1588321 - RNA, 19 nt, Artificial Sequence
  Description of Artificial Sequence: Synthetic oligonucleotide
  Sense strand starting at position 326 of SEQ ID NO: 1560270
agaaguuagucacuuuaag

SEQ ID NO: 1588322 - RNA, 19 nt, Artificial Sequence
  Description of Artificial Sequence: Synthetic oligonucleotide
  Antisense strand to SEQ ID NO: 1588321
cuuaaagugacuaacuucu

SEQ ID NO: 1588323 - RNA, 19 nt, Artificial Sequence
  Description of Artificial Sequence: Synthetic oligonucleotide
  Sense strand starting at position 348 of SEQ ID NO: 1560270
uuagauggaugcucaguua

SEQ ID NO: 1588324 - RNA, 19 nt, Artificial Sequence
  Description of Artificial Sequence: Synthetic oligonucleotide
  Antisense strand to SEQ ID NO: 1588323
uaacugagcauccaucuaa

SEQ ID NO: 1588325 - RNA, 19 nt, Artificial Sequence
  Description of Artificial Sequence: Synthetic oligonucleotide
  Sense strand starting at position 351 of SEQ ID NO: 1560270
gauggaugcucaguuacau

SEQ ID NO: 1588326 - RNA, 19 nt, Artificial Sequence
  Description of Artificial Sequence: Synthetic oligonucleotide
  Antisense strand to SEQ ID NO: 1588325
auguaacugagcauccauc

SEQ ID NO: 1588327 - RNA, 19 nt, Artificial Sequence
  Description of Artificial Sequence: Synthetic oligonucleotide
  Sense strand starting at position 377 of SEQ ID NO: 1560270
gagagcuuagaggguauau

SEQ ID NO: 1588328 - RNA, 19 nt, Artificial Sequence
  Description of Artificial Sequence: Synthetic oligonucleotide
  Antisense strand to SEQ ID NO: 1588327
auauacccucuaagcucuc

SEQ ID NO: 1588329 - RNA, 19 nt, Artificial Sequence
  Description of Artificial Sequence: Synthetic oligonucleotide
  Sense strand starting at position 508 of SEQ ID NO: 1560270
ucguuauuggaccaugaga

SEQ ID NO: 1588330 - RNA, 19 nt, Artificial Sequence
  Description of Artificial Sequence: Synthetic oligonucleotide
  Antisense strand to SEQ ID NO: 1588329
ucucaugguccaauaacga

SEQ ID NO: 1588331 - RNA, 19 nt, Artificial Sequence
  Description of Artificial Sequence: Synthetic oligonucleotide
  Sense strand starting at position 633 of SEQ ID NO: 1560270
ggacaauguuacucuucca

SEQ ID NO: 1588332 - RNA, 19 nt, Artificial Sequence
  Description of Artificial Sequence: Synthetic oligonucleotide
  Antisense strand to SEQ ID NO: 1588331
uggaagaguaacauugucc

SEQ ID NO: 1588333 - RNA, 19 nt, Artificial Sequence
  Description of Artificial Sequence: Synthetic oligonucleotide
  Sense strand starting at position 704 of SEQ ID NO: 1560270
gauaucauauuggaaagua

SEQ ID NO: 1588334 - RNA, 19 nt, Artificial Sequence
  Description of Artificial Sequence: Synthetic oligonucleotide
  Antisense strand to SEQ ID NO: 1588333
uacuuuccaauaugauauc

SEQ ID NO: 1588335 - RNA, 19 nt, Artificial Sequence
  Description of Artificial Sequence: Synthetic oligonucleotide
  Sense strand starting at position 714 of SEQ ID NO: 1560270
uggaaaguauugguuuagu

SEQ ID NO: 1588336 - RNA, 19 nt, Artificial Sequence
  Description of Artificial Sequence: Synthetic oligonucleotide
  Antisense strand to SEQ ID NO: 1588335
acuaaaccaauacuuucca

SEQ ID NO: 1588337 - RNA, 19 nt, Artificial Sequence
  Description of Artificial Sequence: Synthetic oligonucleotide
  Sense strand starting at position 732 of SEQ ID NO: 1560270
uugcuugugauuggucuua

SEQ ID NO: 1588338 - RNA, 19 nt, Artificial Sequence
  Description of Artificial Sequence: Synthetic oligonucleotide
  Antisense strand to SEQ ID NO: 1588337
uaagaccaaucacaagcaa

SEQ ID NO: 1588339 - RNA, 19 nt, Artificial Sequence
  Description of Artificial Sequence: Synthetic oligonucleotide
  Sense strand starting at position 734 of SEQ ID NO: 1560270
gcuugugauuggucuuauc

SEQ ID NO: 1588340 - RNA, 19 nt, Artificial Sequence
  Description of Artificial Sequence: Synthetic oligonucleotide
  Antisense strand to SEQ ID NO: 1588339
gauaagaccaaucacaagc

SEQ ID NO: 1588341 - RNA, 19 nt, Artificial Sequence
  Description of Artificial Sequence: Synthetic oligonucleotide
  Sense strand starting at position 742 of SEQ ID NO: 1560270
uuggucuuaucccucauua

SEQ ID NO: 1588342 - RNA, 19 nt, Artificial Sequence
  Description of Artificial Sequence: Synthetic oligonucleotide
  Antisense strand to SEQ ID NO: 1588341
uaaugagggauaagaccaa

SEQ ID NO: 1588343 - RNA, 19 nt, Artificial Sequence
  Description of Artificial Sequence: Synthetic oligonucleotide
  Sense strand starting at position 744 of SEQ ID NO: 1560270
ggucuuaucccucauuaga

SEQ ID NO: 1588344 - RNA, 19 nt, Artificial Sequence
  Description of Artificial Sequence: Synthetic oligonucleotide
  Antisense strand to SEQ ID NO: 1588343
ucuaaugagggauaagacc

SEQ ID NO: 1588345 - RNA, 19 nt, Artificial Sequence
  Description of Artificial Sequence: Synthetic oligonucleotide
  Sense strand starting at position 785 of SEQ ID NO: 1560270
ugagucuaucuuggucacu

SEQ ID NO: 1588346 - RNA, 19 nt, Artificial Sequence
  Description of Artificial Sequence: Synthetic oligonucleotide
  Antisense strand to SEQ ID NO: 1588345
agugaccaagauagacuca

SEQ ID NO: 1588347 - RNA, 19 nt, Artificial Sequence
  Description of Artificial Sequence: Synthetic oligonucleotide
  Sense strand starting at position 791 of SEQ ID NO: 1560270
uaucuuggucacuguugua

SEQ ID NO: 1588348 - RNA, 19 nt, Artificial Sequence
  Description of Artificial Sequence: Synthetic oligonucleotide
  Antisense strand to SEQ ID NO: 1588347
uacaacagugaccaagaua

SEQ ID NO: 1588349 - RNA, 19 nt, Artificial Sequence
  Description of Artificial Sequence: Synthetic oligonucleotide
  Sense strand starting at position 839 of SEQ ID NO: 1560270
gcaguagggccucaauaaa

SEQ ID NO: 1588350 - RNA, 19 nt, Artificial Sequence
  Description of Artificial Sequence: Synthetic oligonucleotide
  Antisense strand to SEQ ID NO: 1588349
uuuauugaggcccuacugc

SEQ ID NO: 1588351 - RNA, 19 nt, Artificial Sequence
  Description of Artificial Sequence: Synthetic oligonucleotide
  Sense strand starting at position 1169 of SEQ ID NO: 1560270
aaacgacaaccgugacaau

SEQ ID NO: 1588352 - RNA, 19 nt, Artificial Sequence
  Description of Artificial Sequence: Synthetic oligonucleotide
  Antisense strand to SEQ ID NO: 1588351
auugucacgguugucguuu

SEQ ID NO: 1588353 - RNA, 19 nt, Artificial Sequence
  Description of Artificial Sequence: Synthetic oligonucleotide
  Sense strand starting at position 1170 of SEQ ID NO: 1560270
aacgacaaccgugacaaua

SEQ ID NO: 1588354 - RNA, 19 nt, Artificial Sequence
  Description of Artificial Sequence: Synthetic oligonucleotide
  Antisense strand to SEQ ID NO: 1588353
uauugucacgguugucguu

SEQ ID NO: 1588355 - RNA, 19 nt, Artificial Sequence
  Description of Artificial Sequence: Synthetic oligonucleotide
  Sense strand starting at position 1266 of SEQ ID NO: 1560270
aucacuacccugugaggua

SEQ ID NO: 1588356 - RNA, 19 nt, Artificial Sequence
  Description of Artificial Sequence: Synthetic oligonucleotide
  Antisense strand to SEQ ID NO: 1588355
uaccucacaggguagugau

SEQ ID NO: 1588357 - RNA, 19 nt, Artificial Sequence
  Description of Artificial Sequence: Synthetic oligonucleotide
  Sense strand starting at position 1275 of SEQ ID NO: 1560270
cugugagguaguuacuaag

SEQ ID NO: 1588358 - RNA, 19 nt, Artificial Sequence
  Description of Artificial Sequence: Synthetic oligonucleotide
  Antisense strand to SEQ ID NO: 1588357
cuuaguaacuaccucacag

SEQ ID NO: 1588359 - RNA, 19 nt, Artificial Sequence
  Description of Artificial Sequence: Synthetic oligonucleotide
  Sense strand starting at position 1417 of SEQ ID NO: 1560270
ccaccaacgcuuuguugaa

SEQ ID NO: 1588360 - RNA, 19 nt, Artificial Sequence
  Description of Artificial Sequence: Synthetic oligonucleotide
  Antisense strand to SEQ ID NO: 1588359
uucaacaaagcguuggugg

SEQ ID NO: 1588361 - RNA, 19 nt, Artificial Sequence
  Description of Artificial Sequence: Synthetic oligonucleotide
  Sense strand starting at position 1418 of SEQ ID NO: 1560270
caccaacgcuuuguugaau

SEQ ID NO: 1588362 - RNA, 19 nt, Artificial Sequence
  Description of Artificial Sequence: Synthetic oligonucleotide
  Antisense strand to SEQ ID NO: 1588361
auucaacaaagcguuggug

SEQ ID NO: 1588363 - RNA, 19 nt, Artificial Sequence
  Description of Artificial Sequence: Synthetic oligonucleotide
  Sense strand starting at position 1424 of SEQ ID NO: 1560270
cgcuuuguugaaugacuua

SEQ ID NO: 1588364 - RNA, 19 nt, Artificial Sequence
  Description of Artificial Sequence: Synthetic oligonucleotide
  Antisense strand to SEQ ID NO: 1588363
uaagucauucaacaaagcg

SEQ ID NO: 1588365 - RNA, 19 nt, Artificial Sequence
  Description of Artificial Sequence: Synthetic oligonucleotide
  Sense strand starting at position 1431 of SEQ ID NO: 1560270
uugaaugacuuaggauaaa

SEQ ID NO: 1588366 - RNA, 19 nt, Artificial Sequence
  Description of Artificial Sequence: Synthetic oligonucleotide
  Antisense strand to SEQ ID NO: 1588365
uuuauccuaagucauucaa

SEQ ID NO: 1588367 - RNA, 19 nt, Artificial Sequence
  Description of Artificial Sequence: Synthetic oligonucleotide
  Sense strand starting at position 1787 of SEQ ID NO: 1560270
gaaagagaucgccgggacu

SEQ ID NO: 1588368 - RNA, 19 nt, Artificial Sequence
  Description of Artificial Sequence: Synthetic oligonucleotide
  Antisense strand to SEQ ID NO: 1588367
agucccggcgaucucuuuc

SEQ ID NO: 1588369 - RNA, 19 nt, Artificial Sequence
  Description of Artificial Sequence: Synthetic oligonucleotide
  Sense strand starting at position 2177 of SEQ ID NO: 1560270
acaguauuccuagugcguu

SEQ ID NO: 1588370 - RNA, 19 nt, Artificial Sequence
  Description of Artificial Sequence: Synthetic oligonucleotide
  Antisense strand to SEQ ID NO: 1588369
aacgcacuaggaauacugu

SEQ ID NO: 1588371 - RNA, 19 nt, Artificial Sequence
  Description of Artificial Sequence: Synthetic oligonucleotide
  Sense strand starting at position 2270 of SEQ ID NO: 1560270
agaagugagacugguuugu

SEQ ID NO: 1588372 - RNA, 19 nt, Artificial Sequence
  Description of Artificial Sequence: Synthetic oligonucleotide
  Antisense strand to SEQ ID NO: 1588371
acaaaccagucucacuucu

SEQ ID NO: 1588373 - RNA, 19 nt, Artificial Sequence
  Description of Artificial Sequence: Synthetic oligonucleotide
  Sense strand starting at position 2323 of SEQ ID NO: 1560270
cggagcaugcgcaguguuu

SEQ ID NO: 1588374 - RNA, 19 nt, Artificial Sequence
  Description of Artificial Sequence: Synthetic oligonucleotide
  Antisense strand to SEQ ID NO: 1588373
aaacacugcgcaugcuccg

SEQ ID NO: 1588375 - RNA, 19 nt, Artificial Sequence
  Description of Artificial Sequence: Synthetic oligonucleotide
  Sense strand starting at position 2358 of SEQ ID NO: 1560270
uccagagguguuggccaau

SEQ ID NO: 1588376 - RNA, 19 nt, Artificial Sequence
  Description of Artificial Sequence: Synthetic oligonucleotide
  Antisense strand to SEQ ID NO: 1588375
auuggccaacaccucugga

SEQ ID NO: 1588377 - RNA, 19 nt, Artificial Sequence
  Description of Artificial Sequence: Synthetic oligonucleotide
  Sense strand starting at position 2394 of SEQ ID NO: 1560270
accuuaaguaggugaggaa

SEQ ID NO: 1588378 - RNA, 19 nt, Artificial Sequence
  Description of Artificial Sequence: Synthetic oligonucleotide
  Antisense strand to SEQ ID NO: 1588377
uuccucaccuacuuaaggu

SEQ ID NO: 1588379 - RNA, 19 nt, Artificial Sequence
  Description of Artificial Sequence: Synthetic oligonucleotide
  Sense strand starting at position 2513 of SEQ ID NO: 1560270
cucccaguguuguuauaga

SEQ ID NO: 1588380 - RNA, 19 nt, Artificial Sequence
  Description of Artificial Sequence: Synthetic oligonucleotide
  Antisense strand to SEQ ID NO: 1588379
ucuauaacaacacugggag

SEQ ID NO: 1588381 - RNA, 19 nt, Artificial Sequence
  Description of Artificial Sequence: Synthetic oligonucleotide
  Sense strand starting at position 2562 of SEQ ID NO: 1560270
uaccuauuagauggugaaa

SEQ ID NO: 1588382 - RNA, 19 nt, Artificial Sequence
  Description of Artificial Sequence: Synthetic oligonucleotide
  Antisense strand to SEQ ID NO: 1588381
uuucaccaucuaauaggua

SEQ ID NO: 1588383 - RNA, 19 nt, Artificial Sequence
  Description of Artificial Sequence: Synthetic oligonucleotide
  Sense strand starting at position 2663 of SEQ ID NO: 1560270
gguggugacaucugaagaa

SEQ ID NO: 1588384 - RNA, 19 nt, Artificial Sequence
  Description of Artificial Sequence: Synthetic oligonucleotide
  Antisense strand to SEQ ID NO: 1588383
uucuucagaugucaccacc

SEQ ID NO: 1588385 - RNA, 19 nt, Artificial Sequence
  Description of Artificial Sequence: Synthetic oligonucleotide
  Sense strand starting at position 3113 of SEQ ID NO: 1560270
aucgauugagcccaagauu

SEQ ID NO: 1588386 - RNA, 19 nt, Artificial Sequence
  Description of Artificial Sequence: Synthetic oligonucleotide
  Antisense strand to SEQ ID NO: 1588385
aaucuugggcucaaucgau

SEQ ID NO: 1588387 - RNA, 19 nt, Artificial Sequence
  Description of Artificial Sequence: Synthetic oligonucleotide
  Sense strand starting at position 3274 of SEQ ID NO: 1560270
acagguuacagugaguuga

SEQ ID NO: 1588388 - RNA, 19 nt, Artificial Sequence
  Description of Artificial Sequence: Synthetic oligonucleotide
  Antisense strand to SEQ ID NO: 1588387
ucaacucacuguaaccugu

SEQ ID NO: 1588389 - RNA, 19 nt, Artificial Sequence
  Description of Artificial Sequence: Synthetic oligonucleotide
  Sense strand starting at position 3397 of SEQ ID NO: 1560270
cuacucagguggcuugaua

SEQ ID NO: 1588390 - RNA, 19 nt, Artificial Sequence
  Description of Artificial Sequence: Synthetic oligonucleotide
  Antisense strand to SEQ ID NO: 1588389
uaucaagccaccugaguag

SEQ ID NO: 1588391 - RNA, 19 nt, Artificial Sequence
  Description of Artificial Sequence: Synthetic oligonucleotide
  Sense strand starting at position 3408 of SEQ ID NO: 1560270
gcuugauagcuugagucca

SEQ ID NO: 1588392 - RNA, 19 nt, Artificial Sequence
  Description of Artificial Sequence: Synthetic oligonucleotide
  Antisense strand to SEQ ID NO: 1588391
uggacucaagcuaucaagc

SEQ ID NO: 1588393 - RNA, 19 nt, Artificial Sequence
  Description of Artificial Sequence: Synthetic oligonucleotide
  Sense strand starting at position 3858 of SEQ ID NO: 1560270
aaaugcugugcauagcaaa

SEQ ID NO: 1588394 - RNA, 19 nt, Artificial Sequence
  Description of Artificial Sequence: Synthetic oligonucleotide
  Antisense strand to SEQ ID NO: 1588393
uuugcuaugcacagcauuu

SEQ ID NO: 1588395 - RNA, 19 nt, Artificial Sequence
  Description of Artificial Sequence: Synthetic oligonucleotide
  Sense strand starting at position 331 of SEQ ID NO: 1560271
uccagcuuuggcgacagau

SEQ ID NO: 1588396 - RNA, 19 nt, Artificial Sequence
  Description of Artificial Sequence: Synthetic oligonucleotide
  Antisense strand to SEQ ID NO: 1588395
aucugucgccaaagcugga

SEQ ID NO: 1588397 - RNA, 19 nt, Artificial Sequence
  Description of Artificial Sequence: Synthetic oligonucleotide
  Sense strand starting at position 439 of SEQ ID NO: 1560271
gucaguuacaguuagaacu

SEQ ID NO: 1588398 - RNA, 19 nt, Artificial Sequence
  Description of Artificial Sequence: Synthetic oligonucleotide
  Antisense strand to SEQ ID NO: 1588397
aguucuaacuguaacugac

SEQ ID NO: 1588399 - RNA, 19 nt, Artificial Sequence
  Description of Artificial Sequence: Synthetic oligonucleotide
  Sense strand starting at position 450 of SEQ ID NO: 1560271
uuagaacucuuauggucau

SEQ ID NO: 1588400 - RNA, 19 nt, Artificial Sequence
  Description of Artificial Sequence: Synthetic oligonucleotide
  Antisense strand to SEQ ID NO: 1588399
augaccauaagaguucuaa

SEQ ID NO: 1588401 - RNA, 19 nt, Artificial Sequence
  Description of Artificial Sequence: Synthetic oligonucleotide
  Sense strand starting at position 453 of SEQ ID NO: 1560271
gaacucuuauggucauaug

SEQ ID NO: 1588402 - RNA, 19 nt, Artificial Sequence
  Description of Artificial Sequence: Synthetic oligonucleotide
  Antisense strand to SEQ ID NO: 1588401
cauaugaccauaagaguuc

SEQ ID NO: 1588403 - RNA, 19 nt, Artificial Sequence
  Description of Artificial Sequence: Synthetic oligonucleotide
  Sense strand starting at position 519 of SEQ ID NO: 1560271
cuggaaggguucuggaguu

SEQ ID NO: 1588404 - RNA, 19 nt, Artificial Sequence
  Description of Artificial Sequence: Synthetic oligonucleotide
  Antisense strand to SEQ ID NO: 1588403
aacuccagaacccuuccag

SEQ ID NO: 1588405 - RNA, 19 nt, Artificial Sequence
  Description of Artificial Sequence: Synthetic oligonucleotide
  Sense strand starting at position 526 of SEQ ID NO: 1560271
gguucuggaguuugaacuu

SEQ ID NO: 1588406 - RNA, 19 nt, Artificial Sequence
  Description of Artificial Sequence: Synthetic oligonucleotide
  Antisense strand to SEQ ID NO: 1588405
aaguucaaacuccagaacc

SEQ ID NO: 1588407 - RNA, 19 nt, Artificial Sequence
  Description of Artificial Sequence: Synthetic oligonucleotide
  Sense strand starting at position 537 of SEQ ID NO: 1560271
uugaacuuucgagggagga

SEQ ID NO: 1588408 - RNA, 19 nt, Artificial Sequence
  Description of Artificial Sequence: Synthetic oligonucleotide
  Antisense strand to SEQ ID NO: 1588407
uccucccucgaaaguucaa

SEQ ID NO: 1588409 - RNA, 19 nt, Artificial Sequence
  Description of Artificial Sequence: Synthetic oligonucleotide
  Sense strand starting at position 2526 of SEQ ID NO: 1560271
ccacacacggcuuaguaaa

SEQ ID NO: 1588410 - RNA, 19 nt, Artificial Sequence
  Description of Artificial Sequence: Synthetic oligonucleotide
  Antisense strand to SEQ ID NO: 1588409
uuuacuaagccgugugugg

SEQ ID NO: 1588411 - RNA, 19 nt, Artificial Sequence
  Description of Artificial Sequence: Synthetic oligonucleotide
  Sense strand starting at position 2618 of SEQ ID NO: 1560271
cgacaacaaugcuguuuau

SEQ ID NO: 1588412 - RNA, 19 nt, Artificial Sequence
  Description of Artificial Sequence: Synthetic oligonucleotide
  Antisense strand to SEQ ID NO: 1588411
auaaacagcauuguugucg

SEQ ID NO: 1588413 - RNA, 19 nt, Artificial Sequence
  Description of Artificial Sequence: Synthetic oligonucleotide
  Sense strand starting at position 2627 of SEQ ID NO: 1560271
ugcuguuuauuggguacaa

SEQ ID NO: 1588414 - RNA, 19 nt, Artificial Sequence
  Description of Artificial Sequence: Synthetic oligonucleotide
  Antisense strand to SEQ ID NO: 1588413
uuguacccaauaaacagca

SEQ ID NO: 1588415 - RNA, 19 nt, Artificial Sequence
  Description of Artificial Sequence: Synthetic oligonucleotide
  Sense strand starting at position 2628 of SEQ ID NO: 1560271
gcuguuuauuggguacaaa

SEQ ID NO: 1588416 - RNA, 19 nt, Artificial Sequence
  Description of Artificial Sequence: Synthetic oligonucleotide
  Antisense strand to SEQ ID NO: 1588415
uuuguacccaauaaacagc

SEQ ID NO: 1588417 - RNA, 19 nt, Artificial Sequence
  Description of Artificial Sequence: Synthetic oligonucleotide
  Sense strand starting at position 3171 of SEQ ID NO: 1560271
agagggagucggugaaguu

SEQ ID NO: 1588418 - RNA, 19 nt, Artificial Sequence
  Description of Artificial Sequence: Synthetic oligonucleotide
  Antisense strand to SEQ ID NO: 1588417
aacuucaccgacucccucu

SEQ ID NO: 1588419 - RNA, 19 nt, Artificial Sequence
  Description of Artificial Sequence: Synthetic oligonucleotide
  Sense strand starting at position 3172 of SEQ ID NO: 1560271
gagggagucggugaaguua

SEQ ID NO: 1588420 - RNA, 19 nt, Artificial Sequence
  Description of Artificial Sequence: Synthetic oligonucleotide
  Antisense strand to SEQ ID NO: 1588419
uaacuucaccgacucccuc

SEQ ID NO: 1588421 - RNA, 19 nt, Artificial Sequence
  Description of Artificial Sequence: Synthetic oligonucleotide
  Sense strand starting at position 3174 of SEQ ID NO: 1560271
gggagucggugaaguuaga

SEQ ID NO: 1588422 - RNA, 19 nt, Artificial Sequence
  Description of Artificial Sequence: Synthetic oligonucleotide
  Antisense strand to SEQ ID NO: 1588421
ucuaacuucaccgacuccc

SEQ ID NO: 1588423 - RNA, 19 nt, Artificial Sequence
  Description of Artificial Sequence: Synthetic oligonucleotide
  Sense strand starting at position 3332 of SEQ ID NO: 1560271
gggagagucacuugaccuc

SEQ ID NO: 1588424 - RNA, 19 nt, Artificial Sequence
  Description of Artificial Sequence: Synthetic oligonucleotide
  Antisense strand to SEQ ID NO: 1588423
gaggucaagugacucuccc

SEQ ID NO: 1588425 - RNA, 19 nt, Artificial Sequence
  Description of Artificial Sequence: Synthetic oligonucleotide
  Sense strand starting at position 3429 of SEQ ID NO: 1560271
guacaagugccuuguacug

SEQ ID NO: 1588426 - RNA, 19 nt, Artificial Sequence
  Description of Artificial Sequence: Synthetic oligonucleotide
  Antisense strand to SEQ ID NO: 1588425
caguacaaggcacuuguac

SEQ ID NO: 1588427 - RNA, 19 nt, Artificial Sequence
  Description of Artificial Sequence: Synthetic oligonucleotide
  Sense strand starting at position 3741 of SEQ ID NO: 1560271
auucgaaauucggagauuu

SEQ ID NO: 1588428 - RNA, 19 nt, Artificial Sequence
  Description of Artificial Sequence: Synthetic oligonucleotide
  Antisense strand to SEQ ID NO: 1588427
aaaucuccgaauuucgaau

SEQ ID NO: 1588429 - RNA, 19 nt, Artificial Sequence
  Description of Artificial Sequence: Synthetic oligonucleotide
  Sense strand starting at position 3749 of SEQ ID NO: 1560271
uucggagauuuauaggcau

SEQ ID NO: 1588430 - RNA, 19 nt, Artificial Sequence
  Description of Artificial Sequence: Synthetic oligonucleotide
  Antisense strand to SEQ ID NO: 1588429
augccuauaaaucuccgaa

SEQ ID NO: 1588431 - RNA, 19 nt, Artificial Sequence
  Description of Artificial Sequence: Synthetic oligonucleotide
  Sense strand starting at position 3785 of SEQ ID NO: 1560271
cccuuuaguguugaucaag

SEQ ID NO: 1588432 - RNA, 19 nt, Artificial Sequence
  Description of Artificial Sequence: Synthetic oligonucleotide
  Antisense strand to SEQ ID NO: 1588431
cuugaucaacacuaaaggg

SEQ ID NO: 1588433 - RNA, 19 nt, Artificial Sequence
  Description of Artificial Sequence: Synthetic oligonucleotide
  Sense strand starting at position 3788 of SEQ ID NO: 1560271
uuuaguguugaucaagauc

SEQ ID NO: 1588434 - RNA, 19 nt, Artificial Sequence
  Description of Artificial Sequence: Synthetic oligonucleotide
  Antisense strand to SEQ ID NO: 1588433
gaucuugaucaacacuaaa

SEQ ID NO: 1588435 - RNA, 19 nt, Artificial Sequence
  Description of Artificial Sequence: Synthetic oligonucleotide
  Sense strand starting at position 3791 of SEQ ID NO: 1560271
aguguugaucaagaucuca

SEQ ID NO: 1588436 - RNA, 19 nt, Artificial Sequence
  Description of Artificial Sequence: Synthetic oligonucleotide
  Antisense strand to SEQ ID NO: 1588435
ugagaucuugaucaacacu

SEQ ID NO: 1588437 - RNA, 19 nt, Artificial Sequence
  Description of Artificial Sequence: Synthetic oligonucleotide
  Sense strand starting at position 17 of SEQ ID NO: 1560272
cuugcuagaaggcgauaaa

SEQ ID NO: 1588438 - RNA, 19 nt, Artificial Sequence
  Description of Artificial Sequence: Synthetic oligonucleotide
  Antisense strand to SEQ ID NO: 1588437
uuuaucgccuucuagcaag

SEQ ID NO: 1588439 - RNA, 19 nt, Artificial Sequence
  Description of Artificial Sequence: Synthetic oligonucleotide
  Sense strand starting at position 20 of SEQ ID NO: 1560272
gcuagaaggcgauaaaggu

SEQ ID NO: 1588440 - RNA, 19 nt, Artificial Sequence
  Description of Artificial Sequence: Synthetic oligonucleotide
  Antisense strand to SEQ ID NO: 1588439
accuuuaucgccuucuagc

SEQ ID NO: 1588441 - RNA, 19 nt, Artificial Sequence
  Description of Artificial Sequence: Synthetic oligonucleotide
  Sense strand starting at position 42 of SEQ ID NO: 1560272
ggacgagugcuaggacaca

SEQ ID NO: 1588442 - RNA, 19 nt, Artificial Sequence
  Description of Artificial Sequence: Synthetic oligonucleotide
  Antisense strand to SEQ ID NO: 1588441
uguguccuagcacucgucc

SEQ ID NO: 1588443 - RNA, 19 nt, Artificial Sequence
  Description of Artificial Sequence: Synthetic oligonucleotide
  Sense strand starting at position 149 of SEQ ID NO: 1560272
uguugagucuccguuucuu

SEQ ID NO: 1588444 - RNA, 19 nt, Artificial Sequence
  Description of Artificial Sequence: Synthetic oligonucleotide
  Antisense strand to SEQ ID NO: 1588443
aagaaacggagacucaaca

SEQ ID NO: 1588445 - RNA, 19 nt, Artificial Sequence
  Description of Artificial Sequence: Synthetic oligonucleotide
  Sense strand starting at position 439 of SEQ ID NO: 1560272
gguagaaguccucgccuag

SEQ ID NO: 1588446 - RNA, 19 nt, Artificial Sequence
  Description of Artificial Sequence: Synthetic oligonucleotide
  Antisense strand to SEQ ID NO: 1588445
cuaggcgaggacuucuacc

SEQ ID NO: 1588447 - RNA, 19 nt, Artificial Sequence
  Description of Artificial Sequence: Synthetic oligonucleotide
  Sense strand starting at position 668 of SEQ ID NO: 1560272
cccagcucaugaguagaaa

SEQ ID NO: 1588448 - RNA, 19 nt, Artificial Sequence
  Description of Artificial Sequence: Synthetic oligonucleotide
  Antisense strand to SEQ ID NO: 1588447
uuucuacucaugagcuggg

SEQ ID NO: 1588449 - RNA, 19 nt, Artificial Sequence
  Description of Artificial Sequence: Synthetic oligonucleotide
  Sense strand starting at position 883 of SEQ ID NO: 1560272
guuccauaguguggagaca

SEQ ID NO: 1588450 - RNA, 19 nt, Artificial Sequence
  Description of Artificial Sequence: Synthetic oligonucleotide
  Antisense strand to SEQ ID NO: 1588449
ugucuccacacuauggaac

SEQ ID NO: 1588451 - RNA, 19 nt, Artificial Sequence
  Description of Artificial Sequence: Synthetic oligonucleotide
  Sense strand starting at position 895 of SEQ ID NO: 1560272
ggagacaaaucacacaaau

SEQ ID NO: 1588452 - RNA, 19 nt, Artificial Sequence
  Description of Artificial Sequence: Synthetic oligonucleotide
  Antisense strand to SEQ ID NO: 1588451
auuugugugauuugucucc

SEQ ID NO: 1588453 - RNA, 19 nt, Artificial Sequence
  Description of Artificial Sequence: Synthetic oligonucleotide
  Sense strand starting at position 1204 of SEQ ID NO: 1560272
augcgcaaccaguaucuaa

SEQ ID NO: 1588454 - RNA, 19 nt, Artificial Sequence
  Description of Artificial Sequence: Synthetic oligonucleotide
  Antisense strand to SEQ ID NO: 1588453
uuagauacugguugcgcau

SEQ ID NO: 1588455 - RNA, 19 nt, Artificial Sequence
  Description of Artificial Sequence: Synthetic oligonucleotide
  Sense strand starting at position 1356 of SEQ ID NO: 1560272
gacauauaguuccaaagga

SEQ ID NO: 1588456 - RNA, 19 nt, Artificial Sequence
  Description of Artificial Sequence: Synthetic oligonucleotide
  Antisense strand to SEQ ID NO: 1588455
uccuuuggaacuauauguc

SEQ ID NO: 1588457 - RNA, 19 nt, Artificial Sequence
  Description of Artificial Sequence: Synthetic oligonucleotide
  Sense strand starting at position 1406 of SEQ ID NO: 1560272
aaagauaucuagugcagaa

SEQ ID NO: 1588458 - RNA, 19 nt, Artificial Sequence
  Description of Artificial Sequence: Synthetic oligonucleotide
  Antisense strand to SEQ ID NO: 1588457
uucugcacuagauaucuuu

SEQ ID NO: 1588459 - RNA, 19 nt, Artificial Sequence
  Description of Artificial Sequence: Synthetic oligonucleotide
  Sense strand starting at position 1613 of SEQ ID NO: 1560272
aagggaugaugucucccuu

SEQ ID NO: 1588460 - RNA, 19 nt, Artificial Sequence
  Description of Artificial Sequence: Synthetic oligonucleotide
  Antisense strand to SEQ ID NO: 1588459
aagggagacaucaucccuu

SEQ ID NO: 1588461 - RNA, 19 nt, Artificial Sequence
  Description of Artificial Sequence: Synthetic oligonucleotide
  Sense strand starting at position 1690 of SEQ ID NO: 1560272
cgacaccauucuugucaga

SEQ ID NO: 1588462 - RNA, 19 nt, Artificial Sequence
  Description of Artificial Sequence: Synthetic oligonucleotide
  Antisense strand to SEQ ID NO: 1588461
ucugacaagaauggugucg

SEQ ID NO: 1588463 - RNA, 19 nt, Artificial Sequence
  Description of Artificial Sequence: Synthetic oligonucleotide
  Sense strand starting at position 1692 of SEQ ID NO: 1560272
acaccauucuugucagaga

SEQ ID NO: 1588464 - RNA, 19 nt, Artificial Sequence
  Description of Artificial Sequence: Synthetic oligonucleotide
  Antisense strand to SEQ ID NO: 1588463
ucucugacaagaauggugu

SEQ ID NO: 1588465 - RNA, 19 nt, Artificial Sequence
  Description of Artificial Sequence: Synthetic oligonucleotide
  Sense strand starting at position 2145 of SEQ ID NO: 1560272
cccucacucguccacauau

SEQ ID NO: 1588466 - RNA, 19 nt, Artificial Sequence
  Description of Artificial Sequence: Synthetic oligonucleotide
  Antisense strand to SEQ ID NO: 1588465
auauguggacgagugaggg

SEQ ID NO: 1588467 - RNA, 19 nt, Artificial Sequence
  Description of Artificial Sequence: Synthetic oligonucleotide
  Sense strand starting at position 2372 of SEQ ID NO: 1560272
ccaacaugcuuccagcaga

SEQ ID NO: 1588468 - RNA, 19 nt, Artificial Sequence
  Description of Artificial Sequence: Synthetic oligonucleotide
  Antisense strand to SEQ ID NO: 1588467
ucugcuggaagcauguugg

SEQ ID NO: 1588469 - RNA, 19 nt, Artificial Sequence
  Description of Artificial Sequence: Synthetic oligonucleotide
  Sense strand starting at position 2522 of SEQ ID NO: 1560272
gcagguuagaaacaguagu

SEQ ID NO: 1588470 - RNA, 19 nt, Artificial Sequence
  Description of Artificial Sequence: Synthetic oligonucleotide
  Antisense strand to SEQ ID NO: 1588469
acuacuguuucuaaccugc

SEQ ID NO: 1588471 - RNA, 19 nt, Artificial Sequence
  Description of Artificial Sequence: Synthetic oligonucleotide
  Sense strand starting at position 2582 of SEQ ID NO: 1560272
ccaugugaccuuggcaaau

SEQ ID NO: 1588472 - RNA, 19 nt, Artificial Sequence
  Description of Artificial Sequence: Synthetic oligonucleotide
  Antisense strand to SEQ ID NO: 1588471
auuugccaaggucacaugg

SEQ ID NO: 1588473 - RNA, 19 nt, Artificial Sequence
  Description of Artificial Sequence: Synthetic oligonucleotide
  Sense strand starting at position 2584 of SEQ ID NO: 1560272
augugaccuuggcaaauga

SEQ ID NO: 1588474 - RNA, 19 nt, Artificial Sequence
  Description of Artificial Sequence: Synthetic oligonucleotide
  Antisense strand to SEQ ID NO: 1588473
ucauuugccaaggucacau

SEQ ID NO: 1588475 - RNA, 19 nt, Artificial Sequence
  Description of Artificial Sequence: Synthetic oligonucleotide
  Sense strand starting at position 2645 of SEQ ID NO: 1560272
gaugaugccucacuggagu

SEQ ID NO: 1588476 - RNA, 19 nt, Artificial Sequence
  Description of Artificial Sequence: Synthetic oligonucleotide
  Antisense strand to SEQ ID NO: 1588475
acuccagugaggcaucauc

SEQ ID NO: 1588477 - RNA, 19 nt, Artificial Sequence
  Description of Artificial Sequence: Synthetic oligonucleotide
  Sense strand starting at position 2656 of SEQ ID NO: 1560272
acuggaguguugugaggau

SEQ ID NO: 1588478 - RNA, 19 nt, Artificial Sequence
  Description of Artificial Sequence: Synthetic oligonucleotide
  Antisense strand to SEQ ID NO: 1588477
auccucacaacacuccagu

SEQ ID NO: 1588479 - RNA, 19 nt, Artificial Sequence
  Description of Artificial Sequence: Synthetic oligonucleotide
  Sense strand starting at position 2819 of SEQ ID NO: 1560272
gguaguagucucuacuaaa

SEQ ID NO: 1588480 - RNA, 19 nt, Artificial Sequence
  Description of Artificial Sequence: Synthetic oligonucleotide
  Antisense strand to SEQ ID NO: 1588479
uuuaguagagacuacuacc

SEQ ID NO: 1588481 - RNA, 19 nt, Artificial Sequence
  Description of Artificial Sequence: Synthetic oligonucleotide
  Sense strand starting at position 3084 of SEQ ID NO: 1560272
agaugagagcacugcuuga

SEQ ID NO: 1588482 - RNA, 19 nt, Artificial Sequence
  Description of Artificial Sequence: Synthetic oligonucleotide
  Antisense strand to SEQ ID NO: 1588481
ucaagcagugcucucaucu

SEQ ID NO: 1588483 - RNA, 19 nt, Artificial Sequence
  Description of Artificial Sequence: Synthetic oligonucleotide
  Sense strand starting at position 3425 of SEQ ID NO: 1560272
gcuugagcucaggagaaca

SEQ ID NO: 1588484 - RNA, 19 nt, Artificial Sequence
  Description of Artificial Sequence: Synthetic oligonucleotide
  Antisense strand to SEQ ID NO: 1588483
uguucuccugagcucaagc

SEQ ID NO: 1588485 - RNA, 19 nt, Artificial Sequence
  Description of Artificial Sequence: Synthetic oligonucleotide
  Sense strand starting at position 3804 of SEQ ID NO: 1560272
cggcucuuugaagguaaga

SEQ ID NO: 1588486 - RNA, 19 nt, Artificial Sequence
  Description of Artificial Sequence: Synthetic oligonucleotide
  Antisense strand to SEQ ID NO: 1588485
ucuuaccuucaaagagccg

SEQ ID NO: 1588487 - RNA, 19 nt, Artificial Sequence
  Description of Artificial Sequence: Synthetic oligonucleotide
  Sense strand starting at position 35 of SEQ ID NO: 1560273
agggaacauucguggcuca

SEQ ID NO: 1588488 - RNA, 19 nt, Artificial Sequence
  Description of Artificial Sequence: Synthetic oligonucleotide
  Antisense strand to SEQ ID NO: 1588487
ugagccacgaauguucccu

SEQ ID NO: 1588489 - RNA, 19 nt, Artificial Sequence
  Description of Artificial Sequence: Synthetic oligonucleotide
  Sense strand starting at position 36 of SEQ ID NO: 1560273
gggaacauucguggcucaa

SEQ ID NO: 1588490 - RNA, 19 nt, Artificial Sequence
  Description of Artificial Sequence: Synthetic oligonucleotide
  Antisense strand to SEQ ID NO: 1588489
uugagccacgaauguuccc

SEQ ID NO: 1588491 - RNA, 19 nt, Artificial Sequence
  Description of Artificial Sequence: Synthetic oligonucleotide
  Sense strand starting at position 121 of SEQ ID NO: 1560273
ggauuugacucacauucuu

SEQ ID NO: 1588492 - RNA, 19 nt, Artificial Sequence
  Description of Artificial Sequence: Synthetic oligonucleotide
  Antisense strand to SEQ ID NO: 1588491
aagaaugugagucaaaucc

SEQ ID NO: 1588493 - RNA, 19 nt, Artificial Sequence
  Description of Artificial Sequence: Synthetic oligonucleotide
  Sense strand starting at position 881 of SEQ ID NO: 1560273
ggccgagugccugucacuu

SEQ ID NO: 1588494 - RNA, 19 nt, Artificial Sequence
  Description of Artificial Sequence: Synthetic oligonucleotide
  Antisense strand to SEQ ID NO: 1588493
aagugacaggcacucggcc

SEQ ID NO: 1588495 - RNA, 19 nt, Artificial Sequence
  Description of Artificial Sequence: Synthetic oligonucleotide
  Sense strand starting at position 1206 of SEQ ID NO: 1560273
cagagaugcucccguuuga

SEQ ID NO: 1588496 - RNA, 19 nt, Artificial Sequence
  Description of Artificial Sequence: Synthetic oligonucleotide
  Antisense strand to SEQ ID NO: 1588495
ucaaacgggagcaucucug

SEQ ID NO: 1588497 - RNA, 19 nt, Artificial Sequence
  Description of Artificial Sequence: Synthetic oligonucleotide
  Sense strand starting at position 1213 of SEQ ID NO: 1560273
gcucccguuugauguguau

SEQ ID NO: 1588498 - RNA, 19 nt, Artificial Sequence
  Description of Artificial Sequence: Synthetic oligonucleotide
  Antisense strand to SEQ ID NO: 1588497
auacacaucaaacgggagc

SEQ ID NO: 1588499 - RNA, 19 nt, Artificial Sequence
  Description of Artificial Sequence: Synthetic oligonucleotide
  Sense strand starting at position 1417 of SEQ ID NO: 1560273
gcgcuuugaugagcggaga

SEQ ID NO: 1588500 - RNA, 19 nt, Artificial Sequence
  Description of Artificial Sequence: Synthetic oligonucleotide
  Antisense strand to SEQ ID NO: 1588499
ucuccgcucaucaaagcgc

SEQ ID NO: 1588501 - RNA, 19 nt, Artificial Sequence
  Description of Artificial Sequence: Synthetic oligonucleotide
  Sense strand starting at position 1468 of SEQ ID NO: 1560273
ggacuuagguguucgagcu

SEQ ID NO: 1588502 - RNA, 19 nt, Artificial Sequence
  Description of Artificial Sequence: Synthetic oligonucleotide
  Antisense strand to SEQ ID NO: 1588501
agcucgaacaccuaagucc

SEQ ID NO: 1588503 - RNA, 19 nt, Artificial Sequence
  Description of Artificial Sequence: Synthetic oligonucleotide
  Sense strand starting at position 1469 of SEQ ID NO: 1560273
gacuuagguguucgagcuu

SEQ ID NO: 1588504 - RNA, 19 nt, Artificial Sequence
  Description of Artificial Sequence: Synthetic oligonucleotide
  Antisense strand to SEQ ID NO: 1588503
aagcucgaacaccuaaguc

SEQ ID NO: 1588505 - RNA, 19 nt, Artificial Sequence
  Description of Artificial Sequence: Synthetic oligonucleotide
  Sense strand starting at position 2284 of SEQ ID NO: 1560273
gucccuagcuucuagaugu

SEQ ID NO: 1588506 - RNA, 19 nt, Artificial Sequence
  Description of Artificial Sequence: Synthetic oligonucleotide
  Antisense strand to SEQ ID NO: 1588505
acaucuagaagcuagggac

SEQ ID NO: 1588507 - RNA, 19 nt, Artificial Sequence
  Description of Artificial Sequence: Synthetic oligonucleotide
  Sense strand starting at position 2325 of SEQ ID NO: 1560273
uagggucugucguguauuc

SEQ ID NO: 1588508 - RNA, 19 nt, Artificial Sequence
  Description of Artificial Sequence: Synthetic oligonucleotide
  Antisense strand to SEQ ID NO: 1588507
gaauacacgacagacccua

SEQ ID NO: 1588509 - RNA, 19 nt, Artificial Sequence
  Description of Artificial Sequence: Synthetic oligonucleotide
  Sense strand starting at position 2327 of SEQ ID NO: 1560273
gggucugucguguauucuu

SEQ ID NO: 1588510 - RNA, 19 nt, Artificial Sequence
  Description of Artificial Sequence: Synthetic oligonucleotide
  Antisense strand to SEQ ID NO: 1588509
aagaauacacgacagaccc

SEQ ID NO: 1588511 - RNA, 19 nt, Artificial Sequence
  Description of Artificial Sequence: Synthetic oligonucleotide
  Sense strand starting at position 2332 of SEQ ID NO: 1560273
ugucguguauucuugucua

SEQ ID NO: 1588512 - RNA, 19 nt, Artificial Sequence
  Description of Artificial Sequence: Synthetic oligonucleotide
  Antisense strand to SEQ ID NO: 1588511
uagacaagaauacacgaca

SEQ ID NO: 1588513 - RNA, 19 nt, Artificial Sequence
  Description of Artificial Sequence: Synthetic oligonucleotide
  Sense strand starting at position 2358 of SEQ ID NO: 1560273
uugggugucucuucuaugu

SEQ ID NO: 1588514 - RNA, 19 nt, Artificial Sequence
  Description of Artificial Sequence: Synthetic oligonucleotide
  Antisense strand to SEQ ID NO: 1588513
acauagaagagacacccaa

SEQ ID NO: 1588515 - RNA, 19 nt, Artificial Sequence
  Description of Artificial Sequence: Synthetic oligonucleotide
  Sense strand starting at position 2362 of SEQ ID NO: 1560273
gugucucuucuaugucgga

SEQ ID NO: 1588516 - RNA, 19 nt, Artificial Sequence
  Description of Artificial Sequence: Synthetic oligonucleotide
  Antisense strand to SEQ ID NO: 1588515
uccgacauagaagagacac

SEQ ID NO: 1588517 - RNA, 19 nt, Artificial Sequence
  Description of Artificial Sequence: Synthetic oligonucleotide
  Sense strand starting at position 2403 of SEQ ID NO: 1560273
guuaaucagugccuuuguu

SEQ ID NO: 1588518 - RNA, 19 nt, Artificial Sequence
  Description of Artificial Sequence: Synthetic oligonucleotide
  Antisense strand to SEQ ID NO: 1588517
aacaaaggcacugauuaac

SEQ ID NO: 1588519 - RNA, 19 nt, Artificial Sequence
  Description of Artificial Sequence: Synthetic oligonucleotide
  Sense strand starting at position 2437 of SEQ ID NO: 1560273
ugcuguguuccaggaacuc

SEQ ID NO: 1588520 - RNA, 19 nt, Artificial Sequence
  Description of Artificial Sequence: Synthetic oligonucleotide
  Antisense strand to SEQ ID NO: 1588519
gaguuccuggaacacagca

SEQ ID NO: 1588521 - RNA, 19 nt, Artificial Sequence
  Description of Artificial Sequence: Synthetic oligonucleotide
  Sense strand starting at position 2511 of SEQ ID NO: 1560273
cugacauucuaguggagaa

SEQ ID NO: 1588522 - RNA, 19 nt, Artificial Sequence
  Description of Artificial Sequence: Synthetic oligonucleotide
  Antisense strand to SEQ ID NO: 1588521
uucuccacuagaaugucag

SEQ ID NO: 1588523 - RNA, 19 nt, Artificial Sequence
  Description of Artificial Sequence: Synthetic oligonucleotide
  Sense strand starting at position 2569 of SEQ ID NO: 1560273
gacagugaaaggugcuaua

SEQ ID NO: 1588524 - RNA, 19 nt, Artificial Sequence
  Description of Artificial Sequence: Synthetic oligonucleotide
  Antisense strand to SEQ ID NO: 1588523
uauagcaccuuucacuguc

SEQ ID NO: 1588525 - RNA, 19 nt, Artificial Sequence
  Description of Artificial Sequence: Synthetic oligonucleotide
  Sense strand starting at position 2572 of SEQ ID NO: 1560273
agugaaaggugcuauaaag

SEQ ID NO: 1588526 - RNA, 19 nt, Artificial Sequence
  Description of Artificial Sequence: Synthetic oligonucleotide
  Antisense strand to SEQ ID NO: 1588525
cuuuauagcaccuuucacu

SEQ ID NO: 1588527 - RNA, 19 nt, Artificial Sequence
  Description of Artificial Sequence: Synthetic oligonucleotide
  Sense strand starting at position 2610 of SEQ ID NO: 1560273
cgugguugcucaucacuuu

SEQ ID NO: 1588528 - RNA, 19 nt, Artificial Sequence
  Description of Artificial Sequence: Synthetic oligonucleotide
  Antisense strand to SEQ ID NO: 1588527
aaagugaugagcaaccacg

SEQ ID NO: 1588529 - RNA, 19 nt, Artificial Sequence
  Description of Artificial Sequence: Synthetic oligonucleotide
  Sense strand starting at position 3097 of SEQ ID NO: 1560273
ggugaugcaugucuggagu

SEQ ID NO: 1588530 - RNA, 19 nt, Artificial Sequence
  Description of Artificial Sequence: Synthetic oligonucleotide
  Antisense strand to SEQ ID NO: 1588529
acuccagacaugcaucacc

SEQ ID NO: 1588531 - RNA, 19 nt, Artificial Sequence
  Description of Artificial Sequence: Synthetic oligonucleotide
  Sense strand starting at position 3370 of SEQ ID NO: 1560273
agaaguggcuucucugaag

SEQ ID NO: 1588532 - RNA, 19 nt, Artificial Sequence
  Description of Artificial Sequence: Synthetic oligonucleotide
  Antisense strand to SEQ ID NO: 1588531
cuucagagaagccacuucu

SEQ ID NO: 1588533 - RNA, 19 nt, Artificial Sequence
  Description of Artificial Sequence: Synthetic oligonucleotide
  Sense strand starting at position 3373 of SEQ ID NO: 1560273
aguggcuucucugaagaga

SEQ ID NO: 1588534 - RNA, 19 nt, Artificial Sequence
  Description of Artificial Sequence: Synthetic oligonucleotide
  Antisense strand to SEQ ID NO: 1588533
ucucuucagagaagccacu

SEQ ID NO: 1588535 - RNA, 19 nt, Artificial Sequence
  Description of Artificial Sequence: Synthetic oligonucleotide
  Sense strand starting at position 3399 of SEQ ID NO: 1560273
ugagcuaaggucuagaagu

SEQ ID NO: 1588536 - RNA, 19 nt, Artificial Sequence
  Description of Artificial Sequence: Synthetic oligonucleotide
  Antisense strand to SEQ ID NO: 1588535
acuucuagaccuuagcuca

SEQ ID NO: 1588537 - RNA, 19 nt, Artificial Sequence
  Description of Artificial Sequence: Synthetic oligonucleotide
  Sense strand starting at position 3506 of SEQ ID NO: 1560273
ucaggaagcaauugagugu

SEQ ID NO: 1588538 - RNA, 19 nt, Artificial Sequence
  Description of Artificial Sequence: Synthetic oligonucleotide
  Antisense strand to SEQ ID NO: 1588537
acacucaauugcuuccuga

SEQ ID NO: 1588539 - RNA, 19 nt, Artificial Sequence
  Description of Artificial Sequence: Synthetic oligonucleotide
  Sense strand starting at position 3510 of SEQ ID NO: 1560273
gaagcaauugagugugacu

SEQ ID NO: 1588540 - RNA, 19 nt, Artificial Sequence
  Description of Artificial Sequence: Synthetic oligonucleotide
  Antisense strand to SEQ ID NO: 1588539
agucacacucaauugcuuc

SEQ ID NO: 1588541 - RNA, 19 nt, Artificial Sequence
  Description of Artificial Sequence: Synthetic oligonucleotide
  Sense strand starting at position 3590 of SEQ ID NO: 1560273
ccuuguaggucauuauaaa

SEQ ID NO: 1588542 - RNA, 19 nt, Artificial Sequence
  Description of Artificial Sequence: Synthetic oligonucleotide
  Antisense strand to SEQ ID NO: 1588541
uuuauaaugaccuacaagg

SEQ ID NO: 1588543 - RNA, 19 nt, Artificial Sequence
  Description of Artificial Sequence: Synthetic oligonucleotide
  Sense strand starting at position 3591 of SEQ ID NO: 1560273
cuuguaggucauuauaaag

SEQ ID NO: 1588544 - RNA, 19 nt, Artificial Sequence
  Description of Artificial Sequence: Synthetic oligonucleotide
  Antisense strand to SEQ ID NO: 1588543
cuuuauaaugaccuacaag

SEQ ID NO: 1588545 - RNA, 19 nt, Artificial Sequence
  Description of Artificial Sequence: Synthetic oligonucleotide
  Sense strand starting at position 3620 of SEQ ID NO: 1560273
uuguucuaagugcaaucaa

SEQ ID NO: 1588546 - RNA, 19 nt, Artificial Sequence
  Description of Artificial Sequence: Synthetic oligonucleotide
  Antisense strand to SEQ ID NO: 1588545
uugauugcacuuagaacaa

SEQ ID NO: 1588547 - RNA, 19 nt, Artificial Sequence
  Description of Artificial Sequence: Synthetic oligonucleotide
  Sense strand starting at position 3694 of SEQ ID NO: 1560273
ggcaaauucuguugucucu

SEQ ID NO: 1588548 - RNA, 19 nt, Artificial Sequence
  Description of Artificial Sequence: Synthetic oligonucleotide
  Antisense strand to SEQ ID NO: 1588547
agagacaacagaauuugcc

SEQ ID NO: 1588549 - RNA, 19 nt, Artificial Sequence
  Description of Artificial Sequence: Synthetic oligonucleotide
  Sense strand starting at position 3766 of SEQ ID NO: 1560273
cccaguccuguccaucauu

SEQ ID NO: 1588550 - RNA, 19 nt, Artificial Sequence
  Description of Artificial Sequence: Synthetic oligonucleotide
  Antisense strand to SEQ ID NO: 1588549
aaugauggacaggacuggg

SEQ ID NO: 1588551 - RNA, 19 nt, Artificial Sequence
  Description of Artificial Sequence: Synthetic oligonucleotide
  Sense strand starting at position 3873 of SEQ ID NO: 1560273
gaagcauaucucugugcug

SEQ ID NO: 1588552 - RNA, 19 nt, Artificial Sequence
  Description of Artificial Sequence: Synthetic oligonucleotide
  Antisense strand to SEQ ID NO: 1588551
cagcacagagauaugcuuc

SEQ ID NO: 1588553 - RNA, 19 nt, Artificial Sequence
  Description of Artificial Sequence: Synthetic oligonucleotide
  Sense strand starting at position 3874 of SEQ ID NO: 1560273
aagcauaucucugugcuga

SEQ ID NO: 1588554 - RNA, 19 nt, Artificial Sequence
  Description of Artificial Sequence: Synthetic oligonucleotide
  Antisense strand to SEQ ID NO: 1588553
ucagcacagagauaugcuu

SEQ ID NO: 1588555 - RNA, 19 nt, Artificial Sequence
  Description of Artificial Sequence: Synthetic oligonucleotide
  Sense strand starting at position 31 of SEQ ID NO: 1560274
cucucaguccaguggugaa

SEQ ID NO: 1588556 - RNA, 19 nt, Artificial Sequence
  Description of Artificial Sequence: Synthetic oligonucleotide
  Antisense strand to SEQ ID NO: 1588555
uucaccacuggacugagag

SEQ ID NO: 1588557 - RNA, 19 nt, Artificial Sequence
  Description of Artificial Sequence: Synthetic oligonucleotide
  Sense strand starting at position 219 of SEQ ID NO: 1560274
uaacacagugucugaugua

SEQ ID NO: 1588558 - RNA, 19 nt, Artificial Sequence
  Description of Artificial Sequence: Synthetic oligonucleotide
  Antisense strand to SEQ ID NO: 1588557
uacaucagacacuguguua

SEQ ID NO: 1588559 - RNA, 19 nt, Artificial Sequence
  Description of Artificial Sequence: Synthetic oligonucleotide
  Sense strand starting at position 568 of SEQ ID NO: 1560274
ugcccaugucuauauucua

SEQ ID NO: 1588560 - RNA, 19 nt, Artificial Sequence
  Description of Artificial Sequence: Synthetic oligonucleotide
  Antisense strand to SEQ ID NO: 1588559
uagaauauagacaugggca

SEQ ID NO: 1588561 - RNA, 19 nt, Artificial Sequence
  Description of Artificial Sequence: Synthetic oligonucleotide
  Sense strand starting at position 705 of SEQ ID NO: 1560274
agaccuuuauaggauaaac

SEQ ID NO: 1588562 - RNA, 19 nt, Artificial Sequence
  Description of Artificial Sequence: Synthetic oligonucleotide
  Antisense strand to SEQ ID NO: 1588561
guuuauccuauaaaggucu

SEQ ID NO: 1588563 - RNA, 19 nt, Artificial Sequence
  Description of Artificial Sequence: Synthetic oligonucleotide
  Sense strand starting at position 716 of SEQ ID NO: 1560274
ggauaaacaugucaugaau

SEQ ID NO: 1588564 - RNA, 19 nt, Artificial Sequence
  Description of Artificial Sequence: Synthetic oligonucleotide
  Antisense strand to SEQ ID NO: 1588563
auucaugacauguuuaucc

SEQ ID NO: 1588565 - RNA, 19 nt, Artificial Sequence
  Description of Artificial Sequence: Synthetic oligonucleotide
  Sense strand starting at position 729 of SEQ ID NO: 1560274
augaauguggcagguuaau

SEQ ID NO: 1588566 - RNA, 19 nt, Artificial Sequence
  Description of Artificial Sequence: Synthetic oligonucleotide
  Antisense strand to SEQ ID NO: 1588565
auuaaccugccacauucau

SEQ ID NO: 1588567 - RNA, 19 nt, Artificial Sequence
  Description of Artificial Sequence: Synthetic oligonucleotide
  Sense strand starting at position 802 of SEQ ID NO: 1560274
gcccgauucuaccuggcua

SEQ ID NO: 1588568 - RNA, 19 nt, Artificial Sequence
  Description of Artificial Sequence: Synthetic oligonucleotide
  Antisense strand to SEQ ID NO: 1588567
uagccagguagaaucgggc

SEQ ID NO: 1588569 - RNA, 19 nt, Artificial Sequence
  Description of Artificial Sequence: Synthetic oligonucleotide
  Sense strand starting at position 804 of SEQ ID NO: 1560274
ccgauucuaccuggcuaga

SEQ ID NO: 1588570 - RNA, 19 nt, Artificial Sequence
  Description of Artificial Sequence: Synthetic oligonucleotide
  Antisense strand to SEQ ID NO: 1588569
ucuagccagguagaaucgg

SEQ ID NO: 1588571 - RNA, 19 nt, Artificial Sequence
  Description of Artificial Sequence: Synthetic oligonucleotide
  Sense strand starting at position 806 of SEQ ID NO: 1560274
gauucuaccuggcuagauu

SEQ ID NO: 1588572 - RNA, 19 nt, Artificial Sequence
  Description of Artificial Sequence: Synthetic oligonucleotide
  Antisense strand to SEQ ID NO: 1588571
aaucuagccagguagaauc

SEQ ID NO: 1588573 - RNA, 19 nt, Artificial Sequence
  Description of Artificial Sequence: Synthetic oligonucleotide
  Sense strand starting at position 868 of SEQ ID NO: 1560274
gacagaaucugggagagaa

SEQ ID NO: 1588574 - RNA, 19 nt, Artificial Sequence
  Description of Artificial Sequence: Synthetic oligonucleotide
  Antisense strand to SEQ ID NO: 1588573
uucucucccagauucuguc

SEQ ID NO: 1588575 - RNA, 19 nt, Artificial Sequence
  Description of Artificial Sequence: Synthetic oligonucleotide
  Sense strand starting at position 1211 of SEQ ID NO: 1560274
uuggaagacagcuaugcua

SEQ ID NO: 1588576 - RNA, 19 nt, Artificial Sequence
  Description of Artificial Sequence: Synthetic oligonucleotide
  Antisense strand to SEQ ID NO: 1588575
uagcauagcugucuuccaa

SEQ ID NO: 1588577 - RNA, 19 nt, Artificial Sequence
  Description of Artificial Sequence: Synthetic oligonucleotide
  Sense strand starting at position 1213 of SEQ ID NO: 1560274
ggaagacagcuaugcuaac

SEQ ID NO: 1588578 - RNA, 19 nt, Artificial Sequence
  Description of Artificial Sequence: Synthetic oligonucleotide
  Antisense strand to SEQ ID NO: 1588577
guuagcauagcugucuucc

SEQ ID NO: 1588579 - RNA, 19 nt, Artificial Sequence
  Description of Artificial Sequence: Synthetic oligonucleotide
  Sense strand starting at position 1393 of SEQ ID NO: 1560274
gguggccucugugcauaua

SEQ ID NO: 1588580 - RNA, 19 nt, Artificial Sequence
  Description of Artificial Sequence: Synthetic oligonucleotide
  Antisense strand to SEQ ID NO: 1588579
uauaugcacagaggccacc

SEQ ID NO: 1588581 - RNA, 19 nt, Artificial Sequence
  Description of Artificial Sequence: Synthetic oligonucleotide
  Sense strand starting at position 1475 of SEQ ID NO: 1560274
gugucaaggucugcagcua

SEQ ID NO: 1588582 - RNA, 19 nt, Artificial Sequence
  Description of Artificial Sequence: Synthetic oligonucleotide
  Antisense strand to SEQ ID NO: 1588581
uagcugcagaccuugacac

SEQ ID NO: 1588583 - RNA, 19 nt, Artificial Sequence
  Description of Artificial Sequence: Synthetic oligonucleotide
  Sense strand starting at position 1980 of SEQ ID NO: 1560274
gcaccuuugacccggaagu

SEQ ID NO: 1588584 - RNA, 19 nt, Artificial Sequence
  Description of Artificial Sequence: Synthetic oligonucleotide
  Antisense strand to SEQ ID NO: 1588583
acuuccgggucaaaggugc

SEQ ID NO: 1588585 - RNA, 19 nt, Artificial Sequence
  Description of Artificial Sequence: Synthetic oligonucleotide
  Sense strand starting at position 1981 of SEQ ID NO: 1560274
caccuuugacccggaaguu

SEQ ID NO: 1588586 - RNA, 19 nt, Artificial Sequence
  Description of Artificial Sequence: Synthetic oligonucleotide
  Antisense strand to SEQ ID NO: 1588585
aacuuccgggucaaaggug

SEQ ID NO: 1588587 - RNA, 19 nt, Artificial Sequence
  Description of Artificial Sequence: Synthetic oligonucleotide
  Sense strand starting at position 2116 of SEQ ID NO: 1560274
gacaucuuccgguggguua

SEQ ID NO: 1588588 - RNA, 19 nt, Artificial Sequence
  Description of Artificial Sequence: Synthetic oligonucleotide
  Antisense strand to SEQ ID NO: 1588587
uaacccaccggaagauguc

SEQ ID NO: 1588589 - RNA, 19 nt, Artificial Sequence
  Description of Artificial Sequence: Synthetic oligonucleotide
  Sense strand starting at position 2158 of SEQ ID NO: 1560274
ugguaucacucagucaaac

SEQ ID NO: 1588590 - RNA, 19 nt, Artificial Sequence
  Description of Artificial Sequence: Synthetic oligonucleotide
  Antisense strand to SEQ ID NO: 1588589
guuugacugagugauacca

SEQ ID NO: 1588591 - RNA, 19 nt, Artificial Sequence
  Description of Artificial Sequence: Synthetic oligonucleotide
  Sense strand starting at position 2725 of SEQ ID NO: 1560274
ggacuagaaucguucuuuc

SEQ ID NO: 1588592 - RNA, 19 nt, Artificial Sequence
  Description of Artificial Sequence: Synthetic oligonucleotide
  Antisense strand to SEQ ID NO: 1588591
gaaagaacgauucuagucc

SEQ ID NO: 1588593 - RNA, 19 nt, Artificial Sequence
  Description of Artificial Sequence: Synthetic oligonucleotide
  Sense strand starting at position 2728 of SEQ ID NO: 1560274
cuagaaucguucuuucggu

SEQ ID NO: 1588594 - RNA, 19 nt, Artificial Sequence
  Description of Artificial Sequence: Synthetic oligonucleotide
  Antisense strand to SEQ ID NO: 1588593
accgaaagaacgauucuag

SEQ ID NO: 1588595 - RNA, 19 nt, Artificial Sequence
  Description of Artificial Sequence: Synthetic oligonucleotide
  Sense strand starting at position 2733 of SEQ ID NO: 1560274
aucguucuuucggugaauu

SEQ ID NO: 1588596 - RNA, 19 nt, Artificial Sequence
  Description of Artificial Sequence: Synthetic oligonucleotide
  Antisense strand to SEQ ID NO: 1588595
aauucaccgaaagaacgau

SEQ ID NO: 1588597 - RNA, 19 nt, Artificial Sequence
  Description of Artificial Sequence: Synthetic oligonucleotide
  Sense strand starting at position 2734 of SEQ ID NO: 1560274
ucguucuuucggugaauuu

SEQ ID NO: 1588598 - RNA, 19 nt, Artificial Sequence
  Description of Artificial Sequence: Synthetic oligonucleotide
  Antisense strand to SEQ ID NO: 1588597
aaauucaccgaaagaacga

SEQ ID NO: 1588599 - RNA, 19 nt, Artificial Sequence
  Description of Artificial Sequence: Synthetic oligonucleotide
  Sense strand starting at position 2735 of SEQ ID NO: 1560274
cguucuuucggugaauuuc

SEQ ID NO: 1588600 - RNA, 19 nt, Artificial Sequence
  Description of Artificial Sequence: Synthetic oligonucleotide
  Antisense strand to SEQ ID NO: 1588599
gaaauucaccgaaagaacg

SEQ ID NO: 1588601 - RNA, 19 nt, Artificial Sequence
  Description of Artificial Sequence: Synthetic oligonucleotide
  Sense strand starting at position 2757 of SEQ ID NO: 1560274
uaguauuacucuccgguua

SEQ ID NO: 1588602 - RNA, 19 nt, Artificial Sequence
  Description of Artificial Sequence: Synthetic oligonucleotide
  Antisense strand to SEQ ID NO: 1588601
uaaccggagaguaauacua

SEQ ID NO: 1588603 - RNA, 19 nt, Artificial Sequence
  Description of Artificial Sequence: Synthetic oligonucleotide
  Sense strand starting at position 2762 of SEQ ID NO: 1560274
uuacucuccgguuaggaaa

SEQ ID NO: 1588604 - RNA, 19 nt, Artificial Sequence
  Description of Artificial Sequence: Synthetic oligonucleotide
  Antisense strand to SEQ ID NO: 1588603
uuuccuaaccggagaguaa

SEQ ID NO: 1588605 - RNA, 19 nt, Artificial Sequence
  Description of Artificial Sequence: Synthetic oligonucleotide
  Sense strand starting at position 2827 of SEQ ID NO: 1560274
gugugaggcgaaugugaua

SEQ ID NO: 1588606 - RNA, 19 nt, Artificial Sequence
  Description of Artificial Sequence: Synthetic oligonucleotide
  Antisense strand to SEQ ID NO: 1588605
uaucacauucgccucacac

SEQ ID NO: 1588607 - RNA, 19 nt, Artificial Sequence
  Description of Artificial Sequence: Synthetic oligonucleotide
  Sense strand starting at position 2839 of SEQ ID NO: 1560274
ugugauaaccgcuacacua

SEQ ID NO: 1588608 - RNA, 19 nt, Artificial Sequence
  Description of Artificial Sequence: Synthetic oligonucleotide
  Antisense strand to SEQ ID NO: 1588607
uaguguagcgguuaucaca

SEQ ID NO: 1588609 - RNA, 19 nt, Artificial Sequence
  Description of Artificial Sequence: Synthetic oligonucleotide
  Sense strand starting at position 2871 of SEQ ID NO: 1560274
gcgucaggguucuuuaaau

SEQ ID NO: 1588610 - RNA, 19 nt, Artificial Sequence
  Description of Artificial Sequence: Synthetic oligonucleotide
  Antisense strand to SEQ ID NO: 1588609
auuuaaagaacccugacgc

SEQ ID NO: 1588611 - RNA, 19 nt, Artificial Sequence
  Description of Artificial Sequence: Synthetic oligonucleotide
  Sense strand starting at position 2977 of SEQ ID NO: 1560274
uccugaauaucuguuauug

SEQ ID NO: 1588612 - RNA, 19 nt, Artificial Sequence
  Description of Artificial Sequence: Synthetic oligonucleotide
  Antisense strand to SEQ ID NO: 1588611
caauaacagauauucagga

SEQ ID NO: 1588613 - RNA, 19 nt, Artificial Sequence
  Description of Artificial Sequence: Synthetic oligonucleotide
  Sense strand starting at position 3204 of SEQ ID NO: 1560274
uugauaucacauuaguuuc

SEQ ID NO: 1588614 - RNA, 19 nt, Artificial Sequence
  Description of Artificial Sequence: Synthetic oligonucleotide
  Antisense strand to SEQ ID NO: 1588613
gaaacuaaugugauaucaa

SEQ ID NO: 1588615 - RNA, 19 nt, Artificial Sequence
  Description of Artificial Sequence: Synthetic oligonucleotide
  Sense strand starting at position 3210 of SEQ ID NO: 1560274
ucacauuaguuucugcaga

SEQ ID NO: 1588616 - RNA, 19 nt, Artificial Sequence
  Description of Artificial Sequence: Synthetic oligonucleotide
  Antisense strand to SEQ ID NO: 1588615
ucugcagaaacuaauguga

SEQ ID NO: 1588617 - RNA, 19 nt, Artificial Sequence
  Description of Artificial Sequence: Synthetic oligonucleotide
  Sense strand starting at position 3212 of SEQ ID NO: 1560274
acauuaguuucugcagaua

SEQ ID NO: 1588618 - RNA, 19 nt, Artificial Sequence
  Description of Artificial Sequence: Synthetic oligonucleotide
  Antisense strand to SEQ ID NO: 1588617
uaucugcagaaacuaaugu

SEQ ID NO: 1588619 - RNA, 19 nt, Artificial Sequence
  Description of Artificial Sequence: Synthetic oligonucleotide
  Sense strand starting at position 3215 of SEQ ID NO: 1560274
uuaguuucugcagauauuc

SEQ ID NO: 1588620 - RNA, 19 nt, Artificial Sequence
  Description of Artificial Sequence: Synthetic oligonucleotide
  Antisense strand to SEQ ID NO: 1588619
gaauaucugcagaaacuaa

SEQ ID NO: 1588621 - RNA, 19 nt, Artificial Sequence
  Description of Artificial Sequence: Synthetic oligonucleotide
  Sense strand starting at position 3465 of SEQ ID NO: 1560274
gugccuuauagcugggacu

SEQ ID NO: 1588622 - RNA, 19 nt, Artificial Sequence
  Description of Artificial Sequence: Synthetic oligonucleotide
  Antisense strand to SEQ ID NO: 1588621
agucccagcuauaaggcac

SEQ ID NO: 1588623 - RNA, 19 nt, Artificial Sequence
  Description of Artificial Sequence: Synthetic oligonucleotide
  Sense strand starting at position 3467 of SEQ ID NO: 1560274
gccuuauagcugggacuac

SEQ ID NO: 1588624 - RNA, 19 nt, Artificial Sequence
  Description of Artificial Sequence: Synthetic oligonucleotide
  Antisense strand to SEQ ID NO: 1588623
guagucccagcuauaaggc

SEQ ID NO: 1588625 - RNA, 19 nt, Artificial Sequence
  Description of Artificial Sequence: Synthetic oligonucleotide
  Sense strand starting at position 3573 of SEQ ID NO: 1560274
uccugaccucaacgugauu

SEQ ID NO: 1588626 - RNA, 19 nt, Artificial Sequence
  Description of Artificial Sequence: Synthetic oligonucleotide
  Antisense strand to SEQ ID NO: 1588625
aaucacguugaggucagga

SEQ ID NO: 1588627 - RNA, 19 nt, Artificial Sequence
  Description of Artificial Sequence: Synthetic oligonucleotide
  Sense strand starting at position 3692 of SEQ ID NO: 1560274
guguguauguguuuaccuu

SEQ ID NO: 1588628 - RNA, 19 nt, Artificial Sequence
  Description of Artificial Sequence: Synthetic oligonucleotide
  Antisense strand to SEQ ID NO: 1588627
aagguaaacacauacacac

SEQ ID NO: 1588629 - RNA, 19 nt, Artificial Sequence
  Description of Artificial Sequence: Synthetic oligonucleotide
  Sense strand starting at position 3696 of SEQ ID NO: 1560274
guauguguuuaccuuccga

SEQ ID NO: 1588630 - RNA, 19 nt, Artificial Sequence
  Description of Artificial Sequence: Synthetic oligonucleotide
  Antisense strand to SEQ ID NO: 1588629
ucggaagguaaacacauac

SEQ ID NO: 1588631 - RNA, 19 nt, Artificial Sequence
  Description of Artificial Sequence: Synthetic oligonucleotide
  Sense strand starting at position 3703 of SEQ ID NO: 1560274
uuuaccuuccgauggaguu

SEQ ID NO: 1588632 - RNA, 19 nt, Artificial Sequence
  Description of Artificial Sequence: Synthetic oligonucleotide
  Antisense strand to SEQ ID NO: 1588631
aacuccaucggaagguaaa

SEQ ID NO: 1588633 - RNA, 19 nt, Artificial Sequence
  Description of Artificial Sequence: Synthetic oligonucleotide
  Sense strand starting at position 3704 of SEQ ID NO: 1560274
uuaccuuccgauggaguuu

SEQ ID NO: 1588634 - RNA, 19 nt, Artificial Sequence
  Description of Artificial Sequence: Synthetic oligonucleotide
  Antisense strand to SEQ ID NO: 1588633
aaacuccaucggaagguaa

SEQ ID NO: 1588635 - RNA, 19 nt, Artificial Sequence
  Description of Artificial Sequence: Synthetic oligonucleotide
  Sense strand starting at position 42 of SEQ ID NO: 1560275
ccagcacuccagcgucaaa

SEQ ID NO: 1588636 - RNA, 19 nt, Artificial Sequence
  Description of Artificial Sequence: Synthetic oligonucleotide
  Antisense strand to SEQ ID NO: 1588635
uuugacgcuggagugcugg

SEQ ID NO: 1588637 - RNA, 19 nt, Artificial Sequence
  Description of Artificial Sequence: Synthetic oligonucleotide
  Sense strand starting at position 55 of SEQ ID NO: 1560275
gucaaacccuguucccauu

SEQ ID NO: 1588638 - RNA, 19 nt, Artificial Sequence
  Description of Artificial Sequence: Synthetic oligonucleotide
  Antisense strand to SEQ ID NO: 1588637
aaugggaacaggguuugac

SEQ ID NO: 1588639 - RNA, 19 nt, Artificial Sequence
  Description of Artificial Sequence: Synthetic oligonucleotide
  Sense strand starting at position 108 of SEQ ID NO: 1560275
cgaucugugcucugucuca

SEQ ID NO: 1588640 - RNA, 19 nt, Artificial Sequence
  Description of Artificial Sequence: Synthetic oligonucleotide
  Antisense strand to SEQ ID NO: 1588639
ugagacagagcacagaucg

SEQ ID NO: 1588641 - RNA, 19 nt, Artificial Sequence
  Description of Artificial Sequence: Synthetic oligonucleotide
  Sense strand starting at position 119 of SEQ ID NO: 1560275
cugucucaauggguuuaua

SEQ ID NO: 1588642 - RNA, 19 nt, Artificial Sequence
  Description of Artificial Sequence: Synthetic oligonucleotide
  Antisense strand to SEQ ID NO: 1588641
uauaaacccauugagacag

SEQ ID NO: 1588643 - RNA, 19 nt, Artificial Sequence
  Description of Artificial Sequence: Synthetic oligonucleotide
  Sense strand starting at position 122 of SEQ ID NO: 1560275
ucucaauggguuuauaagu

SEQ ID NO: 1588644 - RNA, 19 nt, Artificial Sequence
  Description of Artificial Sequence: Synthetic oligonucleotide
  Antisense strand to SEQ ID NO: 1588643
acuuauaaacccauugaga

SEQ ID NO: 1588645 - RNA, 19 nt, Artificial Sequence
  Description of Artificial Sequence: Synthetic oligonucleotide
  Sense strand starting at position 131 of SEQ ID NO: 1560275
guuuauaaguuccguuaau

SEQ ID NO: 1588646 - RNA, 19 nt, Artificial Sequence
  Description of Artificial Sequence: Synthetic oligonucleotide
  Antisense strand to SEQ ID NO: 1588645
auuaacggaacuuauaaac

SEQ ID NO: 1588647 - RNA, 19 nt, Artificial Sequence
  Description of Artificial Sequence: Synthetic oligonucleotide
  Sense strand starting at position 140 of SEQ ID NO: 1560275
uuccguuaauuuggaugaa

SEQ ID NO: 1588648 - RNA, 19 nt, Artificial Sequence
  Description of Artificial Sequence: Synthetic oligonucleotide
  Antisense strand to SEQ ID NO: 1588647
uucauccaaauuaacggaa

SEQ ID NO: 1588649 - RNA, 19 nt, Artificial Sequence
  Description of Artificial Sequence: Synthetic oligonucleotide
  Sense strand starting at position 141 of SEQ ID NO: 1560275
uccguuaauuuggaugaau

SEQ ID NO: 1588650 - RNA, 19 nt, Artificial Sequence
  Description of Artificial Sequence: Synthetic oligonucleotide
  Antisense strand to SEQ ID NO: 1588649
auucauccaaauuaacgga

SEQ ID NO: 1588651 - RNA, 19 nt, Artificial Sequence
  Description of Artificial Sequence: Synthetic oligonucleotide
  Sense strand starting at position 245 of SEQ ID NO: 1560275
gcguguuggccucaccagu

SEQ ID NO: 1588652 - RNA, 19 nt, Artificial Sequence
  Description of Artificial Sequence: Synthetic oligonucleotide
  Antisense strand to SEQ ID NO: 1588651
acuggugaggccaacacgc

SEQ ID NO: 1588653 - RNA, 19 nt, Artificial Sequence
  Description of Artificial Sequence: Synthetic oligonucleotide
  Sense strand starting at position 1359 of SEQ ID NO: 1560275
cacggcuuccuggacgaaa

SEQ ID NO: 1588654 - RNA, 19 nt, Artificial Sequence
  Description of Artificial Sequence: Synthetic oligonucleotide
  Antisense strand to SEQ ID NO: 1588653
uuucguccaggaagccgug

SEQ ID NO: 1588655 - RNA, 19 nt, Artificial Sequence
  Description of Artificial Sequence: Synthetic oligonucleotide
  Sense strand starting at position 1485 of SEQ ID NO: 1560275
ccgacagaucccugggagu

SEQ ID NO: 1588656 - RNA, 19 nt, Artificial Sequence
  Description of Artificial Sequence: Synthetic oligonucleotide
  Antisense strand to SEQ ID NO: 1588655
acucccagggaucugucgg

SEQ ID NO: 1588657 - RNA, 19 nt, Artificial Sequence
  Description of Artificial Sequence: Synthetic oligonucleotide
  Sense strand starting at position 1617 of SEQ ID NO: 1560275
gggccauugauguaucagu

SEQ ID NO: 1588658 - RNA, 19 nt, Artificial Sequence
  Description of Artificial Sequence: Synthetic oligonucleotide
  Antisense strand to SEQ ID NO: 1588657
acugauacaucaauggccc

SEQ ID NO: 1588659 - RNA, 19 nt, Artificial Sequence
  Description of Artificial Sequence: Synthetic oligonucleotide
  Sense strand starting at position 1731 of SEQ ID NO: 1560275
gaggaacccuuaccgaaau

SEQ ID NO: 1588660 - RNA, 19 nt, Artificial Sequence
  Description of Artificial Sequence: Synthetic oligonucleotide
  Antisense strand to SEQ ID NO: 1588659
auuucgguaaggguuccuc

SEQ ID NO: 1588661 - RNA, 19 nt, Artificial Sequence
  Description of Artificial Sequence: Synthetic oligonucleotide
  Sense strand starting at position 1732 of SEQ ID NO: 1560275
aggaacccuuaccgaaauu

SEQ ID NO: 1588662 - RNA, 19 nt, Artificial Sequence
  Description of Artificial Sequence: Synthetic oligonucleotide
  Antisense strand to SEQ ID NO: 1588661
aauuucgguaaggguuccu

SEQ ID NO: 1588663 - RNA, 19 nt, Artificial Sequence
  Description of Artificial Sequence: Synthetic oligonucleotide
  Sense strand starting at position 2188 of SEQ ID NO: 1560275
gggcuucugcuguagagga

SEQ ID NO: 1588664 - RNA, 19 nt, Artificial Sequence
  Description of Artificial Sequence: Synthetic oligonucleotide
  Antisense strand to SEQ ID NO: 1588663
uccucuacagcagaagccc

SEQ ID NO: 1588665 - RNA, 19 nt, Artificial Sequence
  Description of Artificial Sequence: Synthetic oligonucleotide
  Sense strand starting at position 2404 of SEQ ID NO: 1560275
ggacgugguccauaguugu

SEQ ID NO: 1588666 - RNA, 19 nt, Artificial Sequence
  Description of Artificial Sequence: Synthetic oligonucleotide
  Antisense strand to SEQ ID NO: 1588665
acaacuauggaccacgucc

SEQ ID NO: 1588667 - RNA, 19 nt, Artificial Sequence
  Description of Artificial Sequence: Synthetic oligonucleotide
  Sense strand starting at position 2427 of SEQ ID NO: 1560275
gcgggagauucaggaggua

SEQ ID NO: 1588668 - RNA, 19 nt, Artificial Sequence
  Description of Artificial Sequence: Synthetic oligonucleotide
  Antisense strand to SEQ ID NO: 1588667
uaccuccugaaucucccgc

SEQ ID NO: 1588669 - RNA, 19 nt, Artificial Sequence
  Description of Artificial Sequence: Synthetic oligonucleotide
  Sense strand starting at position 2430 of SEQ ID NO: 1560275
ggagauucaggagguaucu

SEQ ID NO: 1588670 - RNA, 19 nt, Artificial Sequence
  Description of Artificial Sequence: Synthetic oligonucleotide
  Antisense strand to SEQ ID NO: 1588669
agauaccuccugaaucucc

SEQ ID NO: 1588671 - RNA, 19 nt, Artificial Sequence
  Description of Artificial Sequence: Synthetic oligonucleotide
  Sense strand starting at position 2439 of SEQ ID NO: 1560275
ggagguaucuuggaggcaa

SEQ ID NO: 1588672 - RNA, 19 nt, Artificial Sequence
  Description of Artificial Sequence: Synthetic oligonucleotide
  Antisense strand to SEQ ID NO: 1588671
uugccuccaagauaccucc

SEQ ID NO: 1588673 - RNA, 19 nt, Artificial Sequence
  Description of Artificial Sequence: Synthetic oligonucleotide
  Sense strand starting at position 2441 of SEQ ID NO: 1560275
agguaucuuggaggcaaga

SEQ ID NO: 1588674 - RNA, 19 nt, Artificial Sequence
  Description of Artificial Sequence: Synthetic oligonucleotide
  Antisense strand to SEQ ID NO: 1588673
ucuugccuccaagauaccu

SEQ ID NO: 1588675 - RNA, 19 nt, Artificial Sequence
  Description of Artificial Sequence: Synthetic oligonucleotide
  Sense strand starting at position 2784 of SEQ ID NO: 1560275
cucguuucuccgucuuuga

SEQ ID NO: 1588676 - RNA, 19 nt, Artificial Sequence
  Description of Artificial Sequence: Synthetic oligonucleotide
  Antisense strand to SEQ ID NO: 1588675
ucaaagacggagaaacgag

SEQ ID NO: 1588677 - RNA, 19 nt, Artificial Sequence
  Description of Artificial Sequence: Synthetic oligonucleotide
  Sense strand starting at position 2785 of SEQ ID NO: 1560275
ucguuucuccgucuuugaa

SEQ ID NO: 1588678 - RNA, 19 nt, Artificial Sequence
  Description of Artificial Sequence: Synthetic oligonucleotide
  Antisense strand to SEQ ID NO: 1588677
uucaaagacggagaaacga

SEQ ID NO: 1588679 - RNA, 19 nt, Artificial Sequence
  Description of Artificial Sequence: Synthetic oligonucleotide
  Sense strand starting at position 2787 of SEQ ID NO: 1560275
guuucuccgucuuugaaac

SEQ ID NO: 1588680 - RNA, 19 nt, Artificial Sequence
  Description of Artificial Sequence: Synthetic oligonucleotide
  Antisense strand to SEQ ID NO: 1588679
guuucaaagacggagaaac

SEQ ID NO: 1588681 - RNA, 19 nt, Artificial Sequence
  Description of Artificial Sequence: Synthetic oligonucleotide
  Sense strand starting at position 2793 of SEQ ID NO: 1560275
ccgucuuugaaacggucau

SEQ ID NO: 1588682 - RNA, 19 nt, Artificial Sequence
  Description of Artificial Sequence: Synthetic oligonucleotide
  Antisense strand to SEQ ID NO: 1588681
augaccguuucaaagacgg

SEQ ID NO: 1588683 - RNA, 19 nt, Artificial Sequence
  Description of Artificial Sequence: Synthetic oligonucleotide
  Sense strand starting at position 2797 of SEQ ID NO: 1560275
cuuugaaacggucaugaua

SEQ ID NO: 1588684 - RNA, 19 nt, Artificial Sequence
  Description of Artificial Sequence: Synthetic oligonucleotide
  Antisense strand to SEQ ID NO: 1588683
uaucaugaccguuucaaag

SEQ ID NO: 1588685 - RNA, 19 nt, Artificial Sequence
  Description of Artificial Sequence: Synthetic oligonucleotide
  Sense strand starting at position 2799 of SEQ ID NO: 1560275
uugaaacggucaugauaac

SEQ ID NO: 1588686 - RNA, 19 nt, Artificial Sequence
  Description of Artificial Sequence: Synthetic oligonucleotide
  Antisense strand to SEQ ID NO: 1588685
guuaucaugaccguuucaa

SEQ ID NO: 1588687 - RNA, 19 nt, Artificial Sequence
  Description of Artificial Sequence: Synthetic oligonucleotide
  Sense strand starting at position 3242 of SEQ ID NO: 1560275
ggaaguagaacgugagaug

SEQ ID NO: 1588688 - RNA, 19 nt, Artificial Sequence
  Description of Artificial Sequence: Synthetic oligonucleotide
  Antisense strand to SEQ ID NO: 1588687
caucucacguucuacuucc

SEQ ID NO: 1588689 - RNA, 19 nt, Artificial Sequence
  Description of Artificial Sequence: Synthetic oligonucleotide
  Sense strand starting at position 3245 of SEQ ID NO: 1560275
aguagaacgugagaugaga

SEQ ID NO: 1588690 - RNA, 19 nt, Artificial Sequence
  Description of Artificial Sequence: Synthetic oligonucleotide
  Antisense strand to SEQ ID NO: 1588689
ucucaucucacguucuacu

SEQ ID NO: 1588691 - RNA, 19 nt, Artificial Sequence
  Description of Artificial Sequence: Synthetic oligonucleotide
  Sense strand starting at position 3284 of SEQ ID NO: 1560275
uggcauugugugggacaga

SEQ ID NO: 1588692 - RNA, 19 nt, Artificial Sequence
  Description of Artificial Sequence: Synthetic oligonucleotide
  Antisense strand to SEQ ID NO: 1588691
ucugucccacacaaugcca

SEQ ID NO: 1588693 - RNA, 19 nt, Artificial Sequence
  Description of Artificial Sequence: Synthetic oligonucleotide
  Sense strand starting at position 3285 of SEQ ID NO: 1560275
ggcauugugugggacagau

SEQ ID NO: 1588694 - RNA, 19 nt, Artificial Sequence
  Description of Artificial Sequence: Synthetic oligonucleotide
  Antisense strand to SEQ ID NO: 1588693
aucugucccacacaaugcc

SEQ ID NO: 1588695 - RNA, 19 nt, Artificial Sequence
  Description of Artificial Sequence: Synthetic oligonucleotide
  Sense strand starting at position 3533 of SEQ ID NO: 1560275
gugcauauggcugguguca

SEQ ID NO: 1588696 - RNA, 19 nt, Artificial Sequence
  Description of Artificial Sequence: Synthetic oligonucleotide
  Antisense strand to SEQ ID NO: 1588695
ugacaccagccauaugcac

SEQ ID NO: 1588697 - RNA, 19 nt, Artificial Sequence
  Description of Artificial Sequence: Synthetic oligonucleotide
  Sense strand starting at position 3535 of SEQ ID NO: 1560275
gcauauggcuggugucaag

SEQ ID NO: 1588698 - RNA, 19 nt, Artificial Sequence
  Description of Artificial Sequence: Synthetic oligonucleotide
  Antisense strand to SEQ ID NO: 1588697
cuugacaccagccauaugc

SEQ ID NO: 1588699 - RNA, 19 nt, Artificial Sequence
  Description of Artificial Sequence: Synthetic oligonucleotide
  Sense strand starting at position 3658 of SEQ ID NO: 1560275
acuggcaaguccuugcaga

SEQ ID NO: 1588700 - RNA, 19 nt, Artificial Sequence
  Description of Artificial Sequence: Synthetic oligonucleotide
  Antisense strand to SEQ ID NO: 1588699
ucugcaaggacuugccagu

SEQ ID NO: 1588701 - RNA, 19 nt, Artificial Sequence
  Description of Artificial Sequence: Synthetic oligonucleotide
  Sense strand starting at position 3772 of SEQ ID NO: 1560275
ggugcauucccagggugau

SEQ ID NO: 1588702 - RNA, 19 nt, Artificial Sequence
  Description of Artificial Sequence: Synthetic oligonucleotide
  Antisense strand to SEQ ID NO: 1588701
aucacccugggaaugcacc

SEQ ID NO: 1588703 - RNA, 19 nt, Artificial Sequence
  Description of Artificial Sequence: Synthetic oligonucleotide
  Sense strand starting at position 3773 of SEQ ID NO: 1560275
gugcauucccagggugaug

SEQ ID NO: 1588704 - RNA, 19 nt, Artificial Sequence
  Description of Artificial Sequence: Synthetic oligonucleotide
  Antisense strand to SEQ ID NO: 1588703
caucacccugggaaugcac

SEQ ID NO: 1588705 - RNA, 19 nt, Artificial Sequence
  Description of Artificial Sequence: Synthetic oligonucleotide
  Sense strand starting at position 3903 of SEQ ID NO: 1560275
gguucuuuguggagaacgu

SEQ ID NO: 1588706 - RNA, 19 nt, Artificial Sequence
  Description of Artificial Sequence: Synthetic oligonucleotide
  Antisense strand to SEQ ID NO: 1588705
acguucuccacaaagaacc

SEQ ID NO: 1588707 - RNA, 19 nt, Artificial Sequence
  Description of Artificial Sequence: Synthetic oligonucleotide
  Sense strand starting at position 3904 of SEQ ID NO: 1560275
guucuuuguggagaacgua

SEQ ID NO: 1588708 - RNA, 19 nt, Artificial Sequence
  Description of Artificial Sequence: Synthetic oligonucleotide
  Antisense strand to SEQ ID NO: 1588707
uacguucuccacaaagaac

SEQ ID NO: 1588709 - RNA, 19 nt, Artificial Sequence
  Description of Artificial Sequence: Synthetic oligonucleotide
  Sense strand starting at position 3912 of SEQ ID NO: 1560275
uggagaacguaggguuauu

SEQ ID NO: 1588710 - RNA, 19 nt, Artificial Sequence
  Description of Artificial Sequence: Synthetic oligonucleotide
  Antisense strand to SEQ ID NO: 1588709
aauaacccuacguucucca

SEQ ID NO: 1588711 - RNA, 19 nt, Artificial Sequence
  Description of Artificial Sequence: Synthetic oligonucleotide
  Sense strand starting at position 168 of SEQ ID NO: 1560276
ggcagaucauaucagguca

SEQ ID NO: 1588712 - RNA, 19 nt, Artificial Sequence
  Description of Artificial Sequence: Synthetic oligonucleotide
  Antisense strand to SEQ ID NO: 1588711
ugaccugauaugaucugcc

SEQ ID NO: 1588713 - RNA, 19 nt, Artificial Sequence
  Description of Artificial Sequence: Synthetic oligonucleotide
  Sense strand starting at position 173 of SEQ ID NO: 1560276
aucauaucaggucaugagu

SEQ ID NO: 1588714 - RNA, 19 nt, Artificial Sequence
  Description of Artificial Sequence: Synthetic oligonucleotide
  Antisense strand to SEQ ID NO: 1588713
acucaugaccugauaugau

SEQ ID NO: 1588715 - RNA, 19 nt, Artificial Sequence
  Description of Artificial Sequence: Synthetic oligonucleotide
  Sense strand starting at position 175 of SEQ ID NO: 1560276
cauaucaggucaugaguuu

SEQ ID NO: 1588716 - RNA, 19 nt, Artificial Sequence
  Description of Artificial Sequence: Synthetic oligonucleotide
  Antisense strand to SEQ ID NO: 1588715
aaacucaugaccugauaug

SEQ ID NO: 1588717 - RNA, 19 nt, Artificial Sequence
  Description of Artificial Sequence: Synthetic oligonucleotide
  Sense strand starting at position 602 of SEQ ID NO: 1560276
uuucuuuguguagaaauag

SEQ ID NO: 1588718 - RNA, 19 nt, Artificial Sequence
  Description of Artificial Sequence: Synthetic oligonucleotide
  Antisense strand to SEQ ID NO: 1588717
cuauuucuacacaaagaaa

SEQ ID NO: 1588719 - RNA, 19 nt, Artificial Sequence
  Description of Artificial Sequence: Synthetic oligonucleotide
  Sense strand starting at position 698 of SEQ ID NO: 1560276
uuaggaauauagcaaggaa

SEQ ID NO: 1588720 - RNA, 19 nt, Artificial Sequence
  Description of Artificial Sequence: Synthetic oligonucleotide
  Antisense strand to SEQ ID NO: 1588719
uuccuugcuauauuccuaa

SEQ ID NO: 1588721 - RNA, 19 nt, Artificial Sequence
  Description of Artificial Sequence: Synthetic oligonucleotide
  Sense strand starting at position 1032 of SEQ ID NO: 1560276
ccgcaugccucgcucuaaa

SEQ ID NO: 1588722 - RNA, 19 nt, Artificial Sequence
  Description of Artificial Sequence: Synthetic oligonucleotide
  Antisense strand to SEQ ID NO: 1588721
uuuagagcgaggcaugcgg

SEQ ID NO: 1588723 - RNA, 19 nt, Artificial Sequence
  Description of Artificial Sequence: Synthetic oligonucleotide
  Sense strand starting at position 1100 of SEQ ID NO: 1560276
ucuaguaagugcucaugaa

SEQ ID NO: 1588724 - RNA, 19 nt, Artificial Sequence
  Description of Artificial Sequence: Synthetic oligonucleotide
  Antisense strand to SEQ ID NO: 1588723
uucaugagcacuuacuaga

SEQ ID NO: 1588725 - RNA, 19 nt, Artificial Sequence
  Description of Artificial Sequence: Synthetic oligonucleotide
  Sense strand starting at position 1101 of SEQ ID NO: 1560276
cuaguaagugcucaugaac

SEQ ID NO: 1588726 - RNA, 19 nt, Artificial Sequence
  Description of Artificial Sequence: Synthetic oligonucleotide
  Antisense strand to SEQ ID NO: 1588725
guucaugagcacuuacuag

SEQ ID NO: 1588727 - RNA, 19 nt, Artificial Sequence
  Description of Artificial Sequence: Synthetic oligonucleotide
  Sense strand starting at position 1104 of SEQ ID NO: 1560276
guaagugcucaugaacaug

SEQ ID NO: 1588728 - RNA, 19 nt, Artificial Sequence
  Description of Artificial Sequence: Synthetic oligonucleotide
  Antisense strand to SEQ ID NO: 1588727
cauguucaugagcacuuac

SEQ ID NO: 1588729 - RNA, 19 nt, Artificial Sequence
  Description of Artificial Sequence: Synthetic oligonucleotide
  Sense strand starting at position 1118 of SEQ ID NO: 1560276
acaugagauuuccagcuug

SEQ ID NO: 1588730 - RNA, 19 nt, Artificial Sequence
  Description of Artificial Sequence: Synthetic oligonucleotide
  Antisense strand to SEQ ID NO: 1588729
caagcuggaaaucucaugu

SEQ ID NO: 1588731 - RNA, 19 nt, Artificial Sequence
  Description of Artificial Sequence: Synthetic oligonucleotide
  Sense strand starting at position 1135 of SEQ ID NO: 1560276
uggcuaagccuauauucua

SEQ ID NO: 1588732 - RNA, 19 nt, Artificial Sequence
  Description of Artificial Sequence: Synthetic oligonucleotide
  Antisense strand to SEQ ID NO: 1588731
uagaauauaggcuuagcca

SEQ ID NO: 1588733 - RNA, 19 nt, Artificial Sequence
  Description of Artificial Sequence: Synthetic oligonucleotide
  Sense strand starting at position 1916 of SEQ ID NO: 1560276
ggcuuaccuuuacgaagau

SEQ ID NO: 1588734 - RNA, 19 nt, Artificial Sequence
  Description of Artificial Sequence: Synthetic oligonucleotide
  Antisense strand to SEQ ID NO: 1588733
aucuucguaaagguaagcc

SEQ ID NO: 1588735 - RNA, 19 nt, Artificial Sequence
  Description of Artificial Sequence: Synthetic oligonucleotide
  Sense strand starting at position 2145 of SEQ ID NO: 1560276
cuaauauugauugagcgga

SEQ ID NO: 1588736 - RNA, 19 nt, Artificial Sequence
  Description of Artificial Sequence: Synthetic oligonucleotide
  Antisense strand to SEQ ID NO: 1588735
uccgcucaaucaauauuag

SEQ ID NO: 1588737 - RNA, 19 nt, Artificial Sequence
  Description of Artificial Sequence: Synthetic oligonucleotide
  Sense strand starting at position 2147 of SEQ ID NO: 1560276
aauauugauugagcggaga

SEQ ID NO: 1588738 - RNA, 19 nt, Artificial Sequence
  Description of Artificial Sequence: Synthetic oligonucleotide
  Antisense strand to SEQ ID NO: 1588737
ucuccgcucaaucaauauu

SEQ ID NO: 1588739 - RNA, 19 nt, Artificial Sequence
  Description of Artificial Sequence: Synthetic oligonucleotide
  Sense strand starting at position 2200 of SEQ ID NO: 1560276
cacuaacacuccugggagu

SEQ ID NO: 1588740 - RNA, 19 nt, Artificial Sequence
  Description of Artificial Sequence: Synthetic oligonucleotide
  Antisense strand to SEQ ID NO: 1588739
acucccaggaguguuagug

SEQ ID NO: 1588741 - RNA, 19 nt, Artificial Sequence
  Description of Artificial Sequence: Synthetic oligonucleotide
  Sense strand starting at position 2201 of SEQ ID NO: 1560276
acuaacacuccugggaguu

SEQ ID NO: 1588742 - RNA, 19 nt, Artificial Sequence
  Description of Artificial Sequence: Synthetic oligonucleotide
  Antisense strand to SEQ ID NO: 1588741
aacucccaggaguguuagu

SEQ ID NO: 1588743 - RNA, 19 nt, Artificial Sequence
  Description of Artificial Sequence: Synthetic oligonucleotide
  Sense strand starting at position 2207 of SEQ ID NO: 1560276
acuccugggaguuguuaaa

SEQ ID NO: 1588744 - RNA, 19 nt, Artificial Sequence
  Description of Artificial Sequence: Synthetic oligonucleotide
  Antisense strand to SEQ ID NO: 1588743
uuuaacaacucccaggagu

SEQ ID NO: 1588745 - RNA, 19 nt, Artificial Sequence
  Description of Artificial Sequence: Synthetic oligonucleotide
  Sense strand starting at position 2245 of SEQ ID NO: 1560276
uccagacuuccugagcaga

SEQ ID NO: 1588746 - RNA, 19 nt, Artificial Sequence
  Description of Artificial Sequence: Synthetic oligonucleotide
  Antisense strand to SEQ ID NO: 1588745
ucugcucaggaagucugga

SEQ ID NO: 1588747 - RNA, 19 nt, Artificial Sequence
  Description of Artificial Sequence: Synthetic oligonucleotide
  Sense strand starting at position 2247 of SEQ ID NO: 1560276
cagacuuccugagcagaag

SEQ ID NO: 1588748 - RNA, 19 nt, Artificial Sequence
  Description of Artificial Sequence: Synthetic oligonucleotide
  Antisense strand to SEQ ID NO: 1588747
cuucugcucaggaagucug

SEQ ID NO: 1588749 - RNA, 19 nt, Artificial Sequence
  Description of Artificial Sequence: Synthetic oligonucleotide
  Sense strand starting at position 2466 of SEQ ID NO: 1560276
gacggaguuuccgccaugu

SEQ ID NO: 1588750 - RNA, 19 nt, Artificial Sequence
  Description of Artificial Sequence: Synthetic oligonucleotide
  Antisense strand to SEQ ID NO: 1588749
acauggcggaaacuccguc

SEQ ID NO: 1588751 - RNA, 19 nt, Artificial Sequence
  Description of Artificial Sequence: Synthetic oligonucleotide
  Sense strand starting at position 2598 of SEQ ID NO: 1560276
ccgggaaugugauugugaa

SEQ ID NO: 1588752 - RNA, 19 nt, Artificial Sequence
  Description of Artificial Sequence: Synthetic oligonucleotide
  Antisense strand to SEQ ID NO: 1588751
uucacaaucacauucccgg

SEQ ID NO: 1588753 - RNA, 19 nt, Artificial Sequence
  Description of Artificial Sequence: Synthetic oligonucleotide
  Sense strand starting at position 2599 of SEQ ID NO: 1560276
cgggaaugugauugugaau

SEQ ID NO: 1588754 - RNA, 19 nt, Artificial Sequence
  Description of Artificial Sequence: Synthetic oligonucleotide
  Antisense strand to SEQ ID NO: 1588753
auucacaaucacauucccg

SEQ ID NO: 1588755 - RNA, 19 nt, Artificial Sequence
  Description of Artificial Sequence: Synthetic oligonucleotide
  Sense strand starting at position 2602 of SEQ ID NO: 1560276
gaaugugauugugaauaau

SEQ ID NO: 1588756 - RNA, 19 nt, Artificial Sequence
  Description of Artificial Sequence: Synthetic oligonucleotide
  Antisense strand to SEQ ID NO: 1588755
auuauucacaaucacauuc

SEQ ID NO: 1588757 - RNA, 19 nt, Artificial Sequence
  Description of Artificial Sequence: Synthetic oligonucleotide
  Sense strand starting at position 2617 of SEQ ID NO: 1560276
uaaugaaguccagguuuaa

SEQ ID NO: 1588758 - RNA, 19 nt, Artificial Sequence
  Description of Artificial Sequence: Synthetic oligonucleotide
  Antisense strand to SEQ ID NO: 1588757
uuaaaccuggacuucauua

SEQ ID NO: 1588759 - RNA, 19 nt, Artificial Sequence
  Description of Artificial Sequence: Synthetic oligonucleotide
  Sense strand starting at position 2666 of SEQ ID NO: 1560276
auucuuuaguggcuaauau

SEQ ID NO: 1588760 - RNA, 19 nt, Artificial Sequence
  Description of Artificial Sequence: Synthetic oligonucleotide
  Antisense strand to SEQ ID NO: 1588759
auauuagccacuaaagaau

SEQ ID NO: 1588761 - RNA, 19 nt, Artificial Sequence
  Description of Artificial Sequence: Synthetic oligonucleotide
  Sense strand starting at position 2667 of SEQ ID NO: 1560276
uucuuuaguggcuaauaua

SEQ ID NO: 1588762 - RNA, 19 nt, Artificial Sequence
  Description of Artificial Sequence: Synthetic oligonucleotide
  Antisense strand to SEQ ID NO: 1588761
uauauuagccacuaaagaa

SEQ ID NO: 1588763 - RNA, 19 nt, Artificial Sequence
  Description of Artificial Sequence: Synthetic oligonucleotide
  Sense strand starting at position 2677 of SEQ ID NO: 1560276
gcuaauauaugcuuggcau

SEQ ID NO: 1588764 - RNA, 19 nt, Artificial Sequence
  Description of Artificial Sequence: Synthetic oligonucleotide
  Antisense strand to SEQ ID NO: 1588763
augccaagcauauauuagc

SEQ ID NO: 1588765 - RNA, 19 nt, Artificial Sequence
  Description of Artificial Sequence: Synthetic oligonucleotide
  Sense strand starting at position 2678 of SEQ ID NO: 1560276
cuaauauaugcuuggcauu

SEQ ID NO: 1588766 - RNA, 19 nt, Artificial Sequence
  Description of Artificial Sequence: Synthetic oligonucleotide
  Antisense strand to SEQ ID NO: 1588765
aaugccaagcauauauuag

SEQ ID NO: 1588767 - RNA, 19 nt, Artificial Sequence
  Description of Artificial Sequence: Synthetic oligonucleotide
  Sense strand starting at position 2680 of SEQ ID NO: 1560276
aauauaugcuuggcauugu

SEQ ID NO: 1588768 - RNA, 19 nt, Artificial Sequence
  Description of Artificial Sequence: Synthetic oligonucleotide
  Antisense strand to SEQ ID NO: 1588767
acaaugccaagcauauauu

SEQ ID NO: 1588769 - RNA, 19 nt, Artificial Sequence
  Description of Artificial Sequence: Synthetic oligonucleotide
  Sense strand starting at position 2689 of SEQ ID NO: 1560276
uuggcauuguucugcauau

SEQ ID NO: 1588770 - RNA, 19 nt, Artificial Sequence
  Description of Artificial Sequence: Synthetic oligonucleotide
  Antisense strand to SEQ ID NO: 1588769
auaugcagaacaaugccaa

SEQ ID NO: 1588771 - RNA, 19 nt, Artificial Sequence
  Description of Artificial Sequence: Synthetic oligonucleotide
  Sense strand starting at position 2690 of SEQ ID NO: 1560276
uggcauuguucugcauauc

SEQ ID NO: 1588772 - RNA, 19 nt, Artificial Sequence
  Description of Artificial Sequence: Synthetic oligonucleotide
  Antisense strand to SEQ ID NO: 1588771
gauaugcagaacaaugcca

SEQ ID NO: 1588773 - RNA, 19 nt, Artificial Sequence
  Description of Artificial Sequence: Synthetic oligonucleotide
  Sense strand starting at position 2701 of SEQ ID NO: 1560276
ugcauauccugauuuaguu

SEQ ID NO: 1588774 - RNA, 19 nt, Artificial Sequence
  Description of Artificial Sequence: Synthetic oligonucleotide
  Antisense strand to SEQ ID NO: 1588773
aacuaaaucaggauaugca

SEQ ID NO: 1588775 - RNA, 19 nt, Artificial Sequence
  Description of Artificial Sequence: Synthetic oligonucleotide
  Sense strand starting at position 3363 of SEQ ID NO: 1560276
gugguuagccuuugcauaa

SEQ ID NO: 1588776 - RNA, 19 nt, Artificial Sequence
  Description of Artificial Sequence: Synthetic oligonucleotide
  Antisense strand to SEQ ID NO: 1588775
uuaugcaaaggcuaaccac

SEQ ID NO: 1588777 - RNA, 19 nt, Artificial Sequence
  Description of Artificial Sequence: Synthetic oligonucleotide
  Sense strand starting at position 3364 of SEQ ID NO: 1560276
ugguuagccuuugcauaaa

SEQ ID NO: 1588778 - RNA, 19 nt, Artificial Sequence
  Description of Artificial Sequence: Synthetic oligonucleotide
  Antisense strand to SEQ ID NO: 1588777
uuuaugcaaaggcuaacca

SEQ ID NO: 1588779 - RNA, 19 nt, Artificial Sequence
  Description of Artificial Sequence: Synthetic oligonucleotide
  Sense strand starting at position 3367 of SEQ ID NO: 1560276
uuagccuuugcauaaauga

SEQ ID NO: 1588780 - RNA, 19 nt, Artificial Sequence
  Description of Artificial Sequence: Synthetic oligonucleotide
  Antisense strand to SEQ ID NO: 1588779
ucauuuaugcaaaggcuaa

SEQ ID NO: 1588781 - RNA, 19 nt, Artificial Sequence
  Description of Artificial Sequence: Synthetic oligonucleotide
  Sense strand starting at position 3374 of SEQ ID NO: 1560276
uugcauaaaugagcuugua

SEQ ID NO: 1588782 - RNA, 19 nt, Artificial Sequence
  Description of Artificial Sequence: Synthetic oligonucleotide
  Antisense strand to SEQ ID NO: 1588781
uacaagcucauuuaugcaa

SEQ ID NO: 1588783 - RNA, 19 nt, Artificial Sequence
  Description of Artificial Sequence: Synthetic oligonucleotide
  Sense strand starting at position 3377 of SEQ ID NO: 1560276
cauaaaugagcuuguagcu

SEQ ID NO: 1588784 - RNA, 19 nt, Artificial Sequence
  Description of Artificial Sequence: Synthetic oligonucleotide
  Antisense strand to SEQ ID NO: 1588783
agcuacaagcucauuuaug

SEQ ID NO: 1588785 - RNA, 19 nt, Artificial Sequence
  Description of Artificial Sequence: Synthetic oligonucleotide
  Sense strand starting at position 3697 of SEQ ID NO: 1560276
cucaaagucuuaggcacaa

SEQ ID NO: 1588786 - RNA, 19 nt, Artificial Sequence
  Description of Artificial Sequence: Synthetic oligonucleotide
  Antisense strand to SEQ ID NO: 1588785
uugugccuaagacuuugag

SEQ ID NO: 1588787 - RNA, 19 nt, Artificial Sequence
  Description of Artificial Sequence: Synthetic oligonucleotide
  Sense strand starting at position 3798 of SEQ ID NO: 1560276
agcugauuccacuacugau

SEQ ID NO: 1588788 - RNA, 19 nt, Artificial Sequence
  Description of Artificial Sequence: Synthetic oligonucleotide
  Antisense strand to SEQ ID NO: 1588787
aucaguaguggaaucagcu

SEQ ID NO: 1588789 - RNA, 19 nt, Artificial Sequence
  Description of Artificial Sequence: Synthetic oligonucleotide
  Sense strand starting at position 230 of SEQ ID NO: 1560277
gcgguaguaggucuucagu

SEQ ID NO: 1588790 - RNA, 19 nt, Artificial Sequence
  Description of Artificial Sequence: Synthetic oligonucleotide
  Antisense strand to SEQ ID NO: 1588789
acugaagaccuacuaccgc

SEQ ID NO: 1588791 - RNA, 19 nt, Artificial Sequence
  Description of Artificial Sequence: Synthetic oligonucleotide
  Sense strand starting at position 232 of SEQ ID NO: 1560277
gguaguaggucuucaguac

SEQ ID NO: 1588792 - RNA, 19 nt, Artificial Sequence
  Description of Artificial Sequence: Synthetic oligonucleotide
  Antisense strand to SEQ ID NO: 1588791
guacugaagaccuacuacc

SEQ ID NO: 1588793 - RNA, 19 nt, Artificial Sequence
  Description of Artificial Sequence: Synthetic oligonucleotide
  Sense strand starting at position 283 of SEQ ID NO: 1560277
cauaguaaauguguugaca

SEQ ID NO: 1588794 - RNA, 19 nt, Artificial Sequence
  Description of Artificial Sequence: Synthetic oligonucleotide
  Antisense strand to SEQ ID NO: 1588793
ugucaacacauuuacuaug

SEQ ID NO: 1588795 - RNA, 19 nt, Artificial Sequence
  Description of Artificial Sequence: Synthetic oligonucleotide
  Sense strand starting at position 292 of SEQ ID NO: 1560277
uguguugacaaccggauuu

SEQ ID NO: 1588796 - RNA, 19 nt, Artificial Sequence
  Description of Artificial Sequence: Synthetic oligonucleotide
  Antisense strand to SEQ ID NO: 1588795
aaauccgguugucaacaca

SEQ ID NO: 1588797 - RNA, 19 nt, Artificial Sequence
  Description of Artificial Sequence: Synthetic oligonucleotide
  Sense strand starting at position 547 of SEQ ID NO: 1560277
ggguuccaguccuccagaa

SEQ ID NO: 1588798 - RNA, 19 nt, Artificial Sequence
  Description of Artificial Sequence: Synthetic oligonucleotide
  Antisense strand to SEQ ID NO: 1588797
uucuggaggacuggaaccc

SEQ ID NO: 1588799 - RNA, 19 nt, Artificial Sequence
  Description of Artificial Sequence: Synthetic oligonucleotide
  Sense strand starting at position 549 of SEQ ID NO: 1560277
guuccaguccuccagaaca

SEQ ID NO: 1588800 - RNA, 19 nt, Artificial Sequence
  Description of Artificial Sequence: Synthetic oligonucleotide
  Antisense strand to SEQ ID NO: 1588799
uguucuggaggacuggaac

SEQ ID NO: 1588801 - RNA, 19 nt, Artificial Sequence
  Description of Artificial Sequence: Synthetic oligonucleotide
  Sense strand starting at position 614 of SEQ ID NO: 1560277
ucuuaaaugugacuaguag

SEQ ID NO: 1588802 - RNA, 19 nt, Artificial Sequence
  Description of Artificial Sequence: Synthetic oligonucleotide
  Antisense strand to SEQ ID NO: 1588801
cuacuagucacauuuaaga

SEQ ID NO: 1588803 - RNA, 19 nt, Artificial Sequence
  Description of Artificial Sequence: Synthetic oligonucleotide
  Sense strand starting at position 623 of SEQ ID NO: 1560277
ugacuaguagccugacaug

SEQ ID NO: 1588804 - RNA, 19 nt, Artificial Sequence
  Description of Artificial Sequence: Synthetic oligonucleotide
  Antisense strand to SEQ ID NO: 1588803
caugucaggcuacuaguca

SEQ ID NO: 1588805 - RNA, 19 nt, Artificial Sequence
  Description of Artificial Sequence: Synthetic oligonucleotide
  Sense strand starting at position 645 of SEQ ID NO: 1560277
guuuccacaguuuauuaau

SEQ ID NO: 1588806 - RNA, 19 nt, Artificial Sequence
  Description of Artificial Sequence: Synthetic oligonucleotide
  Antisense strand to SEQ ID NO: 1588805
auuaauaaacuguggaaac

SEQ ID NO: 1588807 - RNA, 19 nt, Artificial Sequence
  Description of Artificial Sequence: Synthetic oligonucleotide
  Sense strand starting at position 668 of SEQ ID NO: 1560277
aaggguaacuugcucuaca

SEQ ID NO: 1588808 - RNA, 19 nt, Artificial Sequence
  Description of Artificial Sequence: Synthetic oligonucleotide
  Antisense strand to SEQ ID NO: 1588807
uguagagcaaguuacccuu

SEQ ID NO: 1588809 - RNA, 19 nt, Artificial Sequence
  Description of Artificial Sequence: Synthetic oligonucleotide
  Sense strand starting at position 671 of SEQ ID NO: 1560277
gguaacuugcucuacagaa

SEQ ID NO: 1588810 - RNA, 19 nt, Artificial Sequence
  Description of Artificial Sequence: Synthetic oligonucleotide
  Antisense strand to SEQ ID NO: 1588809
uucuguagagcaaguuacc

SEQ ID NO: 1588811 - RNA, 19 nt, Artificial Sequence
  Description of Artificial Sequence: Synthetic oligonucleotide
  Sense strand starting at position 879 of SEQ ID NO: 1560277
uagaguccucccuaagugu

SEQ ID NO: 1588812 - RNA, 19 nt, Artificial Sequence
  Description of Artificial Sequence: Synthetic oligonucleotide
  Antisense strand to SEQ ID NO: 1588811
acacuuagggaggacucua

SEQ ID NO: 1588813 - RNA, 19 nt, Artificial Sequence
  Description of Artificial Sequence: Synthetic oligonucleotide
  Sense strand starting at position 890 of SEQ ID NO: 1560277
cuaagugugagaggacuuu

SEQ ID NO: 1588814 - RNA, 19 nt, Artificial Sequence
  Description of Artificial Sequence: Synthetic oligonucleotide
  Antisense strand to SEQ ID NO: 1588813
aaaguccucucacacuuag

SEQ ID NO: 1588815 - RNA, 19 nt, Artificial Sequence
  Description of Artificial Sequence: Synthetic oligonucleotide
  Sense strand starting at position 987 of SEQ ID NO: 1560277
gcaacagucccaugaacua

SEQ ID NO: 1588816 - RNA, 19 nt, Artificial Sequence
  Description of Artificial Sequence: Synthetic oligonucleotide
  Antisense strand to SEQ ID NO: 1588815
uaguucaugggacuguugc

SEQ ID NO: 1588817 - RNA, 19 nt, Artificial Sequence
  Description of Artificial Sequence: Synthetic oligonucleotide
  Sense strand starting at position 1067 of SEQ ID NO: 1560277
agaagcgauucuuuauuaa

SEQ ID NO: 1588818 - RNA, 19 nt, Artificial Sequence
  Description of Artificial Sequence: Synthetic oligonucleotide
  Antisense strand to SEQ ID NO: 1588817
uuaauaaagaaucgcuucu

SEQ ID NO: 1588819 - RNA, 19 nt, Artificial Sequence
  Description of Artificial Sequence: Synthetic oligonucleotide
  Sense strand starting at position 2063 of SEQ ID NO: 1560277
ggagcuguucgucaacacu

SEQ ID NO: 1588820 - RNA, 19 nt, Artificial Sequence
  Description of Artificial Sequence: Synthetic oligonucleotide
  Antisense strand to SEQ ID NO: 1588819
aguguugacgaacagcucc

SEQ ID NO: 1588821 - RNA, 19 nt, Artificial Sequence
  Description of Artificial Sequence: Synthetic oligonucleotide
  Sense strand starting at position 2242 of SEQ ID NO: 1560277
uuguguuugcgcacgcagu

SEQ ID NO: 1588822 - RNA, 19 nt, Artificial Sequence
  Description of Artificial Sequence: Synthetic oligonucleotide
  Antisense strand to SEQ ID NO: 1588821
acugcgugcgcaaacacaa

SEQ ID NO: 1588823 - RNA, 19 nt, Artificial Sequence
  Description of Artificial Sequence: Synthetic oligonucleotide
  Sense strand starting at position 2285 of SEQ ID NO: 1560277
agagauacggcucgggaua

SEQ ID NO: 1588824 - RNA, 19 nt, Artificial Sequence
  Description of Artificial Sequence: Synthetic oligonucleotide
  Antisense strand to SEQ ID NO: 1588823
uaucccgagccguaucucu

SEQ ID NO: 1588825 - RNA, 19 nt, Artificial Sequence
  Description of Artificial Sequence: Synthetic oligonucleotide
  Sense strand starting at position 2585 of SEQ ID NO: 1560277
ccgauugucacugaccagu

SEQ ID NO: 1588826 - RNA, 19 nt, Artificial Sequence
  Description of Artificial Sequence: Synthetic oligonucleotide
  Antisense strand to SEQ ID NO: 1588825
acuggucagugacaaucgg

SEQ ID NO: 1588827 - RNA, 19 nt, Artificial Sequence
  Description of Artificial Sequence: Synthetic oligonucleotide
  Sense strand starting at position 2694 of SEQ ID NO: 1560277
cuguguucucagucgggua

SEQ ID NO: 1588828 - RNA, 19 nt, Artificial Sequence
  Description of Artificial Sequence: Synthetic oligonucleotide
  Antisense strand to SEQ ID NO: 1588827
uacccgacugagaacacag

SEQ ID NO: 1588829 - RNA, 19 nt, Artificial Sequence
  Description of Artificial Sequence: Synthetic oligonucleotide
  Sense strand starting at position 2768 of SEQ ID NO: 1560277
ugugcuuuauuucuagaua

SEQ ID NO: 1588830 - RNA, 19 nt, Artificial Sequence
  Description of Artificial Sequence: Synthetic oligonucleotide
  Antisense strand to SEQ ID NO: 1588829
uaucuagaaauaaagcaca

SEQ ID NO: 1588831 - RNA, 19 nt, Artificial Sequence
  Description of Artificial Sequence: Synthetic oligonucleotide
  Sense strand starting at position 3265 of SEQ ID NO: 1560277
cccaucaaacguuguauuu

SEQ ID NO: 1588832 - RNA, 19 nt, Artificial Sequence
  Description of Artificial Sequence: Synthetic oligonucleotide
  Antisense strand to SEQ ID NO: 1588831
aaauacaacguuugauggg

SEQ ID NO: 1588833 - RNA, 19 nt, Artificial Sequence
  Description of Artificial Sequence: Synthetic oligonucleotide
  Sense strand starting at position 3276 of SEQ ID NO: 1560277
uuguauuugucaguacaua

SEQ ID NO: 1588834 - RNA, 19 nt, Artificial Sequence
  Description of Artificial Sequence: Synthetic oligonucleotide
  Antisense strand to SEQ ID NO: 1588833
uauguacugacaaauacaa

SEQ ID NO: 1588835 - RNA, 19 nt, Artificial Sequence
  Description of Artificial Sequence: Synthetic oligonucleotide
  Sense strand starting at position 3336 of SEQ ID NO: 1560277
gggaccuccacccgugaaa

SEQ ID NO: 1588836 - RNA, 19 nt, Artificial Sequence
  Description of Artificial Sequence: Synthetic oligonucleotide
  Antisense strand to SEQ ID NO: 1588835
uuucacggguggagguccc

SEQ ID NO: 1588837 - RNA, 19 nt, Artificial Sequence
  Description of Artificial Sequence: Synthetic oligonucleotide
  Sense strand starting at position 3441 of SEQ ID NO: 1560277
ugugugucgguuguuagua

SEQ ID NO: 1588838 - RNA, 19 nt, Artificial Sequence
  Description of Artificial Sequence: Synthetic oligonucleotide
  Antisense strand to SEQ ID NO: 1588837
uacuaacaaccgacacaca

SEQ ID NO: 1588839 - RNA, 19 nt, Artificial Sequence
  Description of Artificial Sequence: Synthetic oligonucleotide
  Sense strand starting at position 3463 of SEQ ID NO: 1560277
agcacacguucuguggaaa

SEQ ID NO: 1588840 - RNA, 19 nt, Artificial Sequence
  Description of Artificial Sequence: Synthetic oligonucleotide
  Antisense strand to SEQ ID NO: 1588839
uuuccacagaacgugugcu

SEQ ID NO: 1588841 - RNA, 19 nt, Artificial Sequence
  Description of Artificial Sequence: Synthetic oligonucleotide
  Sense strand starting at position 3466 of SEQ ID NO: 1560277
acacguucuguggaaagau

SEQ ID NO: 1588842 - RNA, 19 nt, Artificial Sequence
  Description of Artificial Sequence: Synthetic oligonucleotide
  Antisense strand to SEQ ID NO: 1588841
aucuuuccacagaacgugu

SEQ ID NO: 1588843 - RNA, 19 nt, Artificial Sequence
  Description of Artificial Sequence: Synthetic oligonucleotide
  Sense strand starting at position 3497 of SEQ ID NO: 1560277
gcuggauggcuuugauaga

SEQ ID NO: 1588844 - RNA, 19 nt, Artificial Sequence
  Description of Artificial Sequence: Synthetic oligonucleotide
  Antisense strand to SEQ ID NO: 1588843
ucuaucaaagccauccagc

SEQ ID NO: 1588845 - RNA, 19 nt, Artificial Sequence
  Description of Artificial Sequence: Synthetic oligonucleotide
  Sense strand starting at position 3539 of SEQ ID NO: 1560277
gauggcauuugucuuguuu

SEQ ID NO: 1588846 - RNA, 19 nt, Artificial Sequence
  Description of Artificial Sequence: Synthetic oligonucleotide
  Antisense strand to SEQ ID NO: 1588845
aaacaagacaaaugccauc

SEQ ID NO: 1588847 - RNA, 19 nt, Artificial Sequence
  Description of Artificial Sequence: Synthetic oligonucleotide
  Sense strand starting at position 3600 of SEQ ID NO: 1560277
caaggacuguauguuuauu

SEQ ID NO: 1588848 - RNA, 19 nt, Artificial Sequence
  Description of Artificial Sequence: Synthetic oligonucleotide
  Antisense strand to SEQ ID NO: 1588847
aauaaacauacaguccuug

SEQ ID NO: 1588849 - RNA, 19 nt, Artificial Sequence
  Description of Artificial Sequence: Synthetic oligonucleotide
  Sense strand starting at position 3623 of SEQ ID NO: 1560277
acguuaagaugccuuuaug

SEQ ID NO: 1588850 - RNA, 19 nt, Artificial Sequence
  Description of Artificial Sequence: Synthetic oligonucleotide
  Antisense strand to SEQ ID NO: 1588849
cauaaaggcaucuuaacgu

SEQ ID NO: 1588851 - RNA, 19 nt, Artificial Sequence
  Description of Artificial Sequence: Synthetic oligonucleotide
  Sense strand starting at position 3752 of SEQ ID NO: 1560277
aaaugugaccauugugaaa

SEQ ID NO: 1588852 - RNA, 19 nt, Artificial Sequence
  Description of Artificial Sequence: Synthetic oligonucleotide
  Antisense strand to SEQ ID NO: 1588851
uuucacaauggucacauuu

SEQ ID NO: 1588853 - RNA, 19 nt, Artificial Sequence
  Description of Artificial Sequence: Synthetic oligonucleotide
  Sense strand starting at position 3764 of SEQ ID NO: 1560277
ugugaaauaucaucgcuua

SEQ ID NO: 1588854 - RNA, 19 nt, Artificial Sequence
  Description of Artificial Sequence: Synthetic oligonucleotide
  Antisense strand to SEQ ID NO: 1588853
uaagcgaugauauuucaca

SEQ ID NO: 1588855 - RNA, 19 nt, Artificial Sequence
  Description of Artificial Sequence: Synthetic oligonucleotide
  Sense strand starting at position 3765 of SEQ ID NO: 1560277
gugaaauaucaucgcuuag

SEQ ID NO: 1588856 - RNA, 19 nt, Artificial Sequence
  Description of Artificial Sequence: Synthetic oligonucleotide
  Antisense strand to SEQ ID NO: 1588855
cuaagcgaugauauuucac

SEQ ID NO: 1588857 - RNA, 19 nt, Artificial Sequence
  Description of Artificial Sequence: Synthetic oligonucleotide
  Sense strand starting at position 3767 of SEQ ID NO: 1560277
gaaauaucaucgcuuaguu

SEQ ID NO: 1588858 - RNA, 19 nt, Artificial Sequence
  Description of Artificial Sequence: Synthetic oligonucleotide
  Antisense strand to SEQ ID NO: 1588857
aacuaagcgaugauauuuc

SEQ ID NO: 1588859 - RNA, 19 nt, Artificial Sequence
  Description of Artificial Sequence: Synthetic oligonucleotide
  Sense strand starting at position 3835 of SEQ ID NO: 1560277
agacauuccuaagcaagau

SEQ ID NO: 1588860 - RNA, 19 nt, Artificial Sequence
  Description of Artificial Sequence: Synthetic oligonucleotide
  Antisense strand to SEQ ID NO: 1588859
aucuugcuuaggaaugucu

SEQ ID NO: 1588861 - RNA, 19 nt, Artificial Sequence
  Description of Artificial Sequence: Synthetic oligonucleotide
  Sense strand starting at position 3879 of SEQ ID NO: 1560277
ggaccuacugcugagagua

SEQ ID NO: 1588862 - RNA, 19 nt, Artificial Sequence
  Description of Artificial Sequence: Synthetic oligonucleotide
  Antisense strand to SEQ ID NO: 1588861
uacucucagcaguaggucc

SEQ ID NO: 1588863 - RNA, 19 nt, Artificial Sequence
  Description of Artificial Sequence: Synthetic oligonucleotide
  Sense strand starting at position 3915 of SEQ ID NO: 1560277
gccaauuaagaaugagucu

SEQ ID NO: 1588864 - RNA, 19 nt, Artificial Sequence
  Description of Artificial Sequence: Synthetic oligonucleotide
  Antisense strand to SEQ ID NO: 1588863
agacucauucuuaauuggc

SEQ ID NO: 1588865 - RNA, 19 nt, Artificial Sequence
  Description of Artificial Sequence: Synthetic oligonucleotide
  Sense strand starting at position 3922 of SEQ ID NO: 1560277
aagaaugagucuuugguuc

SEQ ID NO: 1588866 - RNA, 19 nt, Artificial Sequence
  Description of Artificial Sequence: Synthetic oligonucleotide
  Antisense strand to SEQ ID NO: 1588865
gaaccaaagacucauucuu

SEQ ID NO: 1588867 - RNA, 19 nt, Artificial Sequence
  Description of Artificial Sequence: Synthetic oligonucleotide
  Sense strand starting at position 3926 of SEQ ID NO: 1560277
augagucuuugguucugau

SEQ ID NO: 1588868 - RNA, 19 nt, Artificial Sequence
  Description of Artificial Sequence: Synthetic oligonucleotide
  Antisense strand to SEQ ID NO: 1588867
aucagaaccaaagacucau

SEQ ID NO: 1588869 - RNA, 19 nt, Artificial Sequence
  Description of Artificial Sequence: Synthetic oligonucleotide
  Sense strand starting at position 479 of SEQ ID NO: 1560278
uccagaacaucuugggaca

SEQ ID NO: 1588870 - RNA, 19 nt, Artificial Sequence
  Description of Artificial Sequence: Synthetic oligonucleotide
  Antisense strand to SEQ ID NO: 1588869
ugucccaagauguucugga

SEQ ID NO: 1588871 - RNA, 19 nt, Artificial Sequence
  Description of Artificial Sequence: Synthetic oligonucleotide
  Sense strand starting at position 597 of SEQ ID NO: 1560278
gcgguaguaggucuucagu

SEQ ID NO: 1588872 - RNA, 19 nt, Artificial Sequence
  Description of Artificial Sequence: Synthetic oligonucleotide
  Antisense strand to SEQ ID NO: 1588871
acugaagaccuacuaccgc

SEQ ID NO: 1588873 - RNA, 19 nt, Artificial Sequence
  Description of Artificial Sequence: Synthetic oligonucleotide
  Sense strand starting at position 599 of SEQ ID NO: 1560278
gguaguaggucuucaguac

SEQ ID NO: 1588874 - RNA, 19 nt, Artificial Sequence
  Description of Artificial Sequence: Synthetic oligonucleotide
  Antisense strand to SEQ ID NO: 1588873
guacugaagaccuacuacc

SEQ ID NO: 1588875 - RNA, 19 nt, Artificial Sequence
  Description of Artificial Sequence: Synthetic oligonucleotide
  Sense strand starting at position 650 of SEQ ID NO: 1560278
cauaguaaauguguugaca

SEQ ID NO: 1588876 - RNA, 19 nt, Artificial Sequence
  Description of Artificial Sequence: Synthetic oligonucleotide
  Antisense strand to SEQ ID NO: 1588875
ugucaacacauuuacuaug

SEQ ID NO: 1588877 - RNA, 19 nt, Artificial Sequence
  Description of Artificial Sequence: Synthetic oligonucleotide
  Sense strand starting at position 659 of SEQ ID NO: 1560278
uguguugacaaccggauuu

SEQ ID NO: 1588878 - RNA, 19 nt, Artificial Sequence
  Description of Artificial Sequence: Synthetic oligonucleotide
  Antisense strand to SEQ ID NO: 1588877
aaauccgguugucaacaca

SEQ ID NO: 1588879 - RNA, 19 nt, Artificial Sequence
  Description of Artificial Sequence: Synthetic oligonucleotide
  Sense strand starting at position 914 of SEQ ID NO: 1560278
ggguuccaguccuccagaa

SEQ ID NO: 1588880 - RNA, 19 nt, Artificial Sequence
  Description of Artificial Sequence: Synthetic oligonucleotide
  Antisense strand to SEQ ID NO: 1588879
uucuggaggacuggaaccc

SEQ ID NO: 1588881 - RNA, 19 nt, Artificial Sequence
  Description of Artificial Sequence: Synthetic oligonucleotide
  Sense strand starting at position 916 of SEQ ID NO: 1560278
guuccaguccuccagaaca

SEQ ID NO: 1588882 - RNA, 19 nt, Artificial Sequence
  Description of Artificial Sequence: Synthetic oligonucleotide
  Antisense strand to SEQ ID NO: 1588881
uguucuggaggacuggaac

SEQ ID NO: 1588883 - RNA, 19 nt, Artificial Sequence
  Description of Artificial Sequence: Synthetic oligonucleotide
  Sense strand starting at position 981 of SEQ ID NO: 1560278
ucuuaaaugugacuaguag

SEQ ID NO: 1588884 - RNA, 19 nt, Artificial Sequence
  Description of Artificial Sequence: Synthetic oligonucleotide
  Antisense strand to SEQ ID NO: 1588883
cuacuagucacauuuaaga

SEQ ID NO: 1588885 - RNA, 19 nt, Artificial Sequence
  Description of Artificial Sequence: Synthetic oligonucleotide
  Sense strand starting at position 990 of SEQ ID NO: 1560278
ugacuaguagccugacaug

SEQ ID NO: 1588886 - RNA, 19 nt, Artificial Sequence
  Description of Artificial Sequence: Synthetic oligonucleotide
  Antisense strand to SEQ ID NO: 1588885
caugucaggcuacuaguca

SEQ ID NO: 1588887 - RNA, 19 nt, Artificial Sequence
  Description of Artificial Sequence: Synthetic oligonucleotide
  Sense strand starting at position 1012 of SEQ ID NO: 1560278
guuuccacaguuuauuaau

SEQ ID NO: 1588888 - RNA, 19 nt, Artificial Sequence
  Description of Artificial Sequence: Synthetic oligonucleotide
  Antisense strand to SEQ ID NO: 1588887
auuaauaaacuguggaaac

SEQ ID NO: 1588889 - RNA, 19 nt, Artificial Sequence
  Description of Artificial Sequence: Synthetic oligonucleotide
  Sense strand starting at position 1035 of SEQ ID NO: 1560278
aaggguaacuugcucuaca

SEQ ID NO: 1588890 - RNA, 19 nt, Artificial Sequence
  Description of Artificial Sequence: Synthetic oligonucleotide
  Antisense strand to SEQ ID NO: 1588889
uguagagcaaguuacccuu

SEQ ID NO: 1588891 - RNA, 19 nt, Artificial Sequence
  Description of Artificial Sequence: Synthetic oligonucleotide
  Sense strand starting at position 1038 of SEQ ID NO: 1560278
gguaacuugcucuacagaa

SEQ ID NO: 1588892 - RNA, 19 nt, Artificial Sequence
  Description of Artificial Sequence: Synthetic oligonucleotide
  Antisense strand to SEQ ID NO: 1588891
uucuguagagcaaguuacc

SEQ ID NO: 1588893 - RNA, 19 nt, Artificial Sequence
  Description of Artificial Sequence: Synthetic oligonucleotide
  Sense strand starting at position 1246 of SEQ ID NO: 1560278
uagaguccucccuaagugu

SEQ ID NO: 1588894 - RNA, 19 nt, Artificial Sequence
  Description of Artificial Sequence: Synthetic oligonucleotide
  Antisense strand to SEQ ID NO: 1588893
acacuuagggaggacucua

SEQ ID NO: 1588895 - RNA, 19 nt, Artificial Sequence
  Description of Artificial Sequence: Synthetic oligonucleotide
  Sense strand starting at position 1257 of SEQ ID NO: 1560278
cuaagugugagaggacuuu

SEQ ID NO: 1588896 - RNA, 19 nt, Artificial Sequence
  Description of Artificial Sequence: Synthetic oligonucleotide
  Antisense strand to SEQ ID NO: 1588895
aaaguccucucacacuuag

SEQ ID NO: 1588897 - RNA, 19 nt, Artificial Sequence
  Description of Artificial Sequence: Synthetic oligonucleotide
  Sense strand starting at position 1354 of SEQ ID NO: 1560278
gcaacagucccaugaacua

SEQ ID NO: 1588898 - RNA, 19 nt, Artificial Sequence
  Description of Artificial Sequence: Synthetic oligonucleotide
  Antisense strand to SEQ ID NO: 1588897
uaguucaugggacuguugc

SEQ ID NO: 1588899 - RNA, 19 nt, Artificial Sequence
  Description of Artificial Sequence: Synthetic oligonucleotide
  Sense strand starting at position 1434 of SEQ ID NO: 1560278
agaagcgauucuuuauuaa

SEQ ID NO: 1588900 - RNA, 19 nt, Artificial Sequence
  Description of Artificial Sequence: Synthetic oligonucleotide
  Antisense strand to SEQ ID NO: 1588899
uuaauaaagaaucgcuucu

SEQ ID NO: 1588901 - RNA, 19 nt, Artificial Sequence
  Description of Artificial Sequence: Synthetic oligonucleotide
  Sense strand starting at position 2429 of SEQ ID NO: 1560278
gggagcuguucgucaacac

SEQ ID NO: 1588902 - RNA, 19 nt, Artificial Sequence
  Description of Artificial Sequence: Synthetic oligonucleotide
  Antisense strand to SEQ ID NO: 1588901
guguugacgaacagcuccc

SEQ ID NO: 1588903 - RNA, 19 nt, Artificial Sequence
  Description of Artificial Sequence: Synthetic oligonucleotide
  Sense strand starting at position 2430 of SEQ ID NO: 1560278
ggagcuguucgucaacacu

SEQ ID NO: 1588904 - RNA, 19 nt, Artificial Sequence
  Description of Artificial Sequence: Synthetic oligonucleotide
  Antisense strand to SEQ ID NO: 1588903
aguguugacgaacagcucc

SEQ ID NO: 1588905 - RNA, 19 nt, Artificial Sequence
  Description of Artificial Sequence: Synthetic oligonucleotide
  Sense strand starting at position 2609 of SEQ ID NO: 1560278
uuguguuugcgcacgcagu

SEQ ID NO: 1588906 - RNA, 19 nt, Artificial Sequence
  Description of Artificial Sequence: Synthetic oligonucleotide
  Antisense strand to SEQ ID NO: 1588905
acugcgugcgcaaacacaa

SEQ ID NO: 1588907 - RNA, 19 nt, Artificial Sequence
  Description of Artificial Sequence: Synthetic oligonucleotide
  Sense strand starting at position 2652 of SEQ ID NO: 1560278
agagauacggcucgggaua

SEQ ID NO: 1588908 - RNA, 19 nt, Artificial Sequence
  Description of Artificial Sequence: Synthetic oligonucleotide
  Antisense strand to SEQ ID NO: 1588907
uaucccgagccguaucucu

SEQ ID NO: 1588909 - RNA, 19 nt, Artificial Sequence
  Description of Artificial Sequence: Synthetic oligonucleotide
  Sense strand starting at position 2950 of SEQ ID NO: 1560278
gcccgauugucacugacca

SEQ ID NO: 1588910 - RNA, 19 nt, Artificial Sequence
  Description of Artificial Sequence: Synthetic oligonucleotide
  Antisense strand to SEQ ID NO: 1588909
uggucagugacaaucgggc

SEQ ID NO: 1588911 - RNA, 19 nt, Artificial Sequence
  Description of Artificial Sequence: Synthetic oligonucleotide
  Sense strand starting at position 2952 of SEQ ID NO: 1560278
ccgauugucacugaccagu

SEQ ID NO: 1588912 - RNA, 19 nt, Artificial Sequence
  Description of Artificial Sequence: Synthetic oligonucleotide
  Antisense strand to SEQ ID NO: 1588911
acuggucagugacaaucgg

SEQ ID NO: 1588913 - RNA, 19 nt, Artificial Sequence
  Description of Artificial Sequence: Synthetic oligonucleotide
  Sense strand starting at position 3061 of SEQ ID NO: 1560278
cuguguucucagucgggua

SEQ ID NO: 1588914 - RNA, 19 nt, Artificial Sequence
  Description of Artificial Sequence: Synthetic oligonucleotide
  Antisense strand to SEQ ID NO: 1588913
uacccgacugagaacacag

SEQ ID NO: 1588915 - RNA, 19 nt, Artificial Sequence
  Description of Artificial Sequence: Synthetic oligonucleotide
  Sense strand starting at position 3063 of SEQ ID NO: 1560278
guguucucagucggguaua

SEQ ID NO: 1588916 - RNA, 19 nt, Artificial Sequence
  Description of Artificial Sequence: Synthetic oligonucleotide
  Antisense strand to SEQ ID NO: 1588915
uauacccgacugagaacac

SEQ ID NO: 1588917 - RNA, 19 nt, Artificial Sequence
  Description of Artificial Sequence: Synthetic oligonucleotide
  Sense strand starting at position 3126 of SEQ ID NO: 1560278
gguacugacugugcuuuau

SEQ ID NO: 1588918 - RNA, 19 nt, Artificial Sequence
  Description of Artificial Sequence: Synthetic oligonucleotide
  Antisense strand to SEQ ID NO: 1588917
auaaagcacagucaguacc

SEQ ID NO: 1588919 - RNA, 19 nt, Artificial Sequence
  Description of Artificial Sequence: Synthetic oligonucleotide
  Sense strand starting at position 3135 of SEQ ID NO: 1560278
ugugcuuuauuucuagaua

SEQ ID NO: 1588920 - RNA, 19 nt, Artificial Sequence
  Description of Artificial Sequence: Synthetic oligonucleotide
  Antisense strand to SEQ ID NO: 1588919
uaucuagaaauaaagcaca

SEQ ID NO: 1588921 - RNA, 19 nt, Artificial Sequence
  Description of Artificial Sequence: Synthetic oligonucleotide
  Sense strand starting at position 3136 of SEQ ID NO: 1560278
gugcuuuauuucuagauac

SEQ ID NO: 1588922 - RNA, 19 nt, Artificial Sequence
  Description of Artificial Sequence: Synthetic oligonucleotide
  Antisense strand to SEQ ID NO: 1588921
guaucuagaaauaaagcac

SEQ ID NO: 1588923 - RNA, 19 nt, Artificial Sequence
  Description of Artificial Sequence: Synthetic oligonucleotide
  Sense strand starting at position 3632 of SEQ ID NO: 1560278
cccaucaaacguuguauuu

SEQ ID NO: 1588924 - RNA, 19 nt, Artificial Sequence
  Description of Artificial Sequence: Synthetic oligonucleotide
  Antisense strand to SEQ ID NO: 1588923
aaauacaacguuugauggg

SEQ ID NO: 1588925 - RNA, 19 nt, Artificial Sequence
  Description of Artificial Sequence: Synthetic oligonucleotide
  Sense strand starting at position 3634 of SEQ ID NO: 1560278
caucaaacguuguauuugu

SEQ ID NO: 1588926 - RNA, 19 nt, Artificial Sequence
  Description of Artificial Sequence: Synthetic oligonucleotide
  Antisense strand to SEQ ID NO: 1588925
acaaauacaacguuugaug

SEQ ID NO: 1588927 - RNA, 19 nt, Artificial Sequence
  Description of Artificial Sequence: Synthetic oligonucleotide
  Sense strand starting at position 3643 of SEQ ID NO: 1560278
uuguauuugucaguacaua

SEQ ID NO: 1588928 - RNA, 19 nt, Artificial Sequence
  Description of Artificial Sequence: Synthetic oligonucleotide
  Antisense strand to SEQ ID NO: 1588927
uauguacugacaaauacaa

SEQ ID NO: 1588929 - RNA, 19 nt, Artificial Sequence
  Description of Artificial Sequence: Synthetic oligonucleotide
  Sense strand starting at position 3703 of SEQ ID NO: 1560278
gggaccuccacccgugaaa

SEQ ID NO: 1588930 - RNA, 19 nt, Artificial Sequence
  Description of Artificial Sequence: Synthetic oligonucleotide
  Antisense strand to SEQ ID NO: 1588929
uuucacggguggagguccc

SEQ ID NO: 1588931 - RNA, 19 nt, Artificial Sequence
  Description of Artificial Sequence: Synthetic oligonucleotide
  Sense strand starting at position 3724 of SEQ ID NO: 1560278
gcggcucauuggucugacu

SEQ ID NO: 1588932 - RNA, 19 nt, Artificial Sequence
  Description of Artificial Sequence: Synthetic oligonucleotide
  Antisense strand to SEQ ID NO: 1588931
agucagaccaaugagccgc

SEQ ID NO: 1588933 - RNA, 19 nt, Artificial Sequence
  Description of Artificial Sequence: Synthetic oligonucleotide
  Sense strand starting at position 3808 of SEQ ID NO: 1560278
ugugugucgguuguuagua

SEQ ID NO: 1588934 - RNA, 19 nt, Artificial Sequence
  Description of Artificial Sequence: Synthetic oligonucleotide
  Antisense strand to SEQ ID NO: 1588933
uacuaacaaccgacacaca

SEQ ID NO: 1588935 - RNA, 19 nt, Artificial Sequence
  Description of Artificial Sequence: Synthetic oligonucleotide
  Sense strand starting at position 3830 of SEQ ID NO: 1560278
agcacacguucuguggaaa

SEQ ID NO: 1588936 - RNA, 19 nt, Artificial Sequence
  Description of Artificial Sequence: Synthetic oligonucleotide
  Antisense strand to SEQ ID NO: 1588935
uuuccacagaacgugugcu

SEQ ID NO: 1588937 - RNA, 19 nt, Artificial Sequence
  Description of Artificial Sequence: Synthetic oligonucleotide
  Sense strand starting at position 3831 of SEQ ID NO: 1560278
gcacacguucuguggaaag

SEQ ID NO: 1588938 - RNA, 19 nt, Artificial Sequence
  Description of Artificial Sequence: Synthetic oligonucleotide
  Antisense strand to SEQ ID NO: 1588937
cuuuccacagaacgugugc

SEQ ID NO: 1588939 - RNA, 19 nt, Artificial Sequence
  Description of Artificial Sequence: Synthetic oligonucleotide
  Sense strand starting at position 3833 of SEQ ID NO: 1560278
acacguucuguggaaagau

SEQ ID NO: 1588940 - RNA, 19 nt, Artificial Sequence
  Description of Artificial Sequence: Synthetic oligonucleotide
  Antisense strand to SEQ ID NO: 1588939
aucuuuccacagaacgugu

SEQ ID NO: 1588941 - RNA, 19 nt, Artificial Sequence
  Description of Artificial Sequence: Synthetic oligonucleotide
  Sense strand starting at position 3864 of SEQ ID NO: 1560278
gcuggauggcuuugauaga

SEQ ID NO: 1588942 - RNA, 19 nt, Artificial Sequence
  Description of Artificial Sequence: Synthetic oligonucleotide
  Antisense strand to SEQ ID NO: 1588941
ucuaucaaagccauccagc

SEQ ID NO: 1588943 - RNA, 19 nt, Artificial Sequence
  Description of Artificial Sequence: Synthetic oligonucleotide
  Sense strand starting at position 3865 of SEQ ID NO: 1560278
cuggauggcuuugauagaa

SEQ ID NO: 1588944 - RNA, 19 nt, Artificial Sequence
  Description of Artificial Sequence: Synthetic oligonucleotide
  Antisense strand to SEQ ID NO: 1588943
uucuaucaaagccauccag

SEQ ID NO: 1588945 - RNA, 19 nt, Artificial Sequence
  Description of Artificial Sequence: Synthetic oligonucleotide
  Sense strand starting at position 3906 of SEQ ID NO: 1560278
gauggcauuugucuuguuu

SEQ ID NO: 1588946 - RNA, 19 nt, Artificial Sequence
  Description of Artificial Sequence: Synthetic oligonucleotide
  Antisense strand to SEQ ID NO: 1588945
aaacaagacaaaugccauc

SEQ ID NO: 1588947 - RNA, 19 nt, Artificial Sequence
  Description of Artificial Sequence: Synthetic oligonucleotide
  Sense strand starting at position 3967 of SEQ ID NO: 1560278
caaggacuguauguuuauu

SEQ ID NO: 1588948 - RNA, 19 nt, Artificial Sequence
  Description of Artificial Sequence: Synthetic oligonucleotide
  Antisense strand to SEQ ID NO: 1588947
aauaaacauacaguccuug

SEQ ID NO: 1588949 - RNA, 19 nt, Artificial Sequence
  Description of Artificial Sequence: Synthetic oligonucleotide
  Sense strand starting at position 403 of SEQ ID NO: 1560279
ccggcuuggucuccaggua

SEQ ID NO: 1588950 - RNA, 19 nt, Artificial Sequence
  Description of Artificial Sequence: Synthetic oligonucleotide
  Antisense strand to SEQ ID NO: 1588949
uaccuggagaccaagccgg

SEQ ID NO: 1588951 - RNA, 19 nt, Artificial Sequence
  Description of Artificial Sequence: Synthetic oligonucleotide
  Sense strand starting at position 445 of SEQ ID NO: 1560279
ggcagcgaucaccgaagaa

SEQ ID NO: 1588952 - RNA, 19 nt, Artificial Sequence
  Description of Artificial Sequence: Synthetic oligonucleotide
  Antisense strand to SEQ ID NO: 1588951
uucuucggugaucgcugcc

SEQ ID NO: 1588953 - RNA, 19 nt, Artificial Sequence
  Description of Artificial Sequence: Synthetic oligonucleotide
  Sense strand starting at position 473 of SEQ ID NO: 1560279
agccgacuccugcgaggaa

SEQ ID NO: 1588954 - RNA, 19 nt, Artificial Sequence
  Description of Artificial Sequence: Synthetic oligonucleotide
  Antisense strand to SEQ ID NO: 1588953
uuccucgcaggagucggcu

SEQ ID NO: 1588955 - RNA, 19 nt, Artificial Sequence
  Description of Artificial Sequence: Synthetic oligonucleotide
  Sense strand starting at position 572 of SEQ ID NO: 1560279
gcucuugugucccugagca

SEQ ID NO: 1588956 - RNA, 19 nt, Artificial Sequence
  Description of Artificial Sequence: Synthetic oligonucleotide
  Antisense strand to SEQ ID NO: 1588955
ugcucagggacacaagagc

SEQ ID NO: 1588957 - RNA, 19 nt, Artificial Sequence
  Description of Artificial Sequence: Synthetic oligonucleotide
  Sense strand starting at position 655 of SEQ ID NO: 1560279
aauguaucccgaggagaau

SEQ ID NO: 1588958 - RNA, 19 nt, Artificial Sequence
  Description of Artificial Sequence: Synthetic oligonucleotide
  Antisense strand to SEQ ID NO: 1588957
auucuccucgggauacauu

SEQ ID NO: 1588959 - RNA, 19 nt, Artificial Sequence
  Description of Artificial Sequence: Synthetic oligonucleotide
  Sense strand starting at position 699 of SEQ ID NO: 1560279
cucacugcucguugcugaa

SEQ ID NO: 1588960 - RNA, 19 nt, Artificial Sequence
  Description of Artificial Sequence: Synthetic oligonucleotide
  Antisense strand to SEQ ID NO: 1588959
uucagcaacgagcagugag

SEQ ID NO: 1588961 - RNA, 19 nt, Artificial Sequence
  Description of Artificial Sequence: Synthetic oligonucleotide
  Sense strand starting at position 721 of SEQ ID NO: 1560279
ccaggagcuuucuaacaau

SEQ ID NO: 1588962 - RNA, 19 nt, Artificial Sequence
  Description of Artificial Sequence: Synthetic oligonucleotide
  Antisense strand to SEQ ID NO: 1588961
auuguuagaaagcuccugg

SEQ ID NO: 1588963 - RNA, 19 nt, Artificial Sequence
  Description of Artificial Sequence: Synthetic oligonucleotide
  Sense strand starting at position 724 of SEQ ID NO: 1560279
ggagcuuucuaacaauuac

SEQ ID NO: 1588964 - RNA, 19 nt, Artificial Sequence
  Description of Artificial Sequence: Synthetic oligonucleotide
  Antisense strand to SEQ ID NO: 1588963
guaauuguuagaaagcucc

SEQ ID NO: 1588965 - RNA, 19 nt, Artificial Sequence
  Description of Artificial Sequence: Synthetic oligonucleotide
  Sense strand starting at position 798 of SEQ ID NO: 1560279
gccgcacuugccuggauua

SEQ ID NO: 1588966 - RNA, 19 nt, Artificial Sequence
  Description of Artificial Sequence: Synthetic oligonucleotide
  Antisense strand to SEQ ID NO: 1588965
uaauccaggcaagugcggc

SEQ ID NO: 1588967 - RNA, 19 nt, Artificial Sequence
  Description of Artificial Sequence: Synthetic oligonucleotide
  Sense strand starting at position 888 of SEQ ID NO: 1560279
gcccucuucugagucugua

SEQ ID NO: 1588968 - RNA, 19 nt, Artificial Sequence
  Description of Artificial Sequence: Synthetic oligonucleotide
  Antisense strand to SEQ ID NO: 1588967
uacagacucagaagagggc

SEQ ID NO: 1588969 - RNA, 19 nt, Artificial Sequence
  Description of Artificial Sequence: Synthetic oligonucleotide
  Sense strand starting at position 1049 of SEQ ID NO: 1560279
cccuuuggcuuccaggaau

SEQ ID NO: 1588970 - RNA, 19 nt, Artificial Sequence
  Description of Artificial Sequence: Synthetic oligonucleotide
  Antisense strand to SEQ ID NO: 1588969
auuccuggaagccaaaggg

SEQ ID NO: 1588971 - RNA, 19 nt, Artificial Sequence
  Description of Artificial Sequence: Synthetic oligonucleotide
  Sense strand starting at position 1057 of SEQ ID NO: 1560279
cuuccaggaauuggugaaa

SEQ ID NO: 1588972 - RNA, 19 nt, Artificial Sequence
  Description of Artificial Sequence: Synthetic oligonucleotide
  Antisense strand to SEQ ID NO: 1588971
uuucaccaauuccuggaag

SEQ ID NO: 1588973 - RNA, 19 nt, Artificial Sequence
  Description of Artificial Sequence: Synthetic oligonucleotide
  Sense strand starting at position 1091 of SEQ ID NO: 1560279
gagguaucugccgacagaa

SEQ ID NO: 1588974 - RNA, 19 nt, Artificial Sequence
  Description of Artificial Sequence: Synthetic oligonucleotide
  Antisense strand to SEQ ID NO: 1588973
uucugucggcagauaccuc

SEQ ID NO: 1588975 - RNA, 19 nt, Artificial Sequence
  Description of Artificial Sequence: Synthetic oligonucleotide
  Sense strand starting at position 1125 of SEQ ID NO: 1560279
cuccgaacauagucaauaa

SEQ ID NO: 1588976 - RNA, 19 nt, Artificial Sequence
  Description of Artificial Sequence: Synthetic oligonucleotide
  Antisense strand to SEQ ID NO: 1588975
uuauugacuauguucggag

SEQ ID NO: 1588977 - RNA, 19 nt, Artificial Sequence
  Description of Artificial Sequence: Synthetic oligonucleotide
  Sense strand starting at position 1201 of SEQ ID NO: 1560279
ggagcucacuacuuaagaa

SEQ ID NO: 1588978 - RNA, 19 nt, Artificial Sequence
  Description of Artificial Sequence: Synthetic oligonucleotide
  Antisense strand to SEQ ID NO: 1588977
uucuuaaguagugagcucc

SEQ ID NO: 1588979 - RNA, 19 nt, Artificial Sequence
  Description of Artificial Sequence: Synthetic oligonucleotide
  Sense strand starting at position 1293 of SEQ ID NO: 1560279
caaaguguugcgcgaaacu

SEQ ID NO: 1588980 - RNA, 19 nt, Artificial Sequence
  Description of Artificial Sequence: Synthetic oligonucleotide
  Antisense strand to SEQ ID NO: 1588979
aguuucgcgcaacacuuug

SEQ ID NO: 1588981 - RNA, 19 nt, Artificial Sequence
  Description of Artificial Sequence: Synthetic oligonucleotide
  Sense strand starting at position 1304 of SEQ ID NO: 1560279
gcgaaacuauuaucagguu

SEQ ID NO: 1588982 - RNA, 19 nt, Artificial Sequence
  Description of Artificial Sequence: Synthetic oligonucleotide
  Antisense strand to SEQ ID NO: 1588981
aaccugauaauaguuucgc

SEQ ID NO: 1588983 - RNA, 19 nt, Artificial Sequence
  Description of Artificial Sequence: Synthetic oligonucleotide
  Sense strand starting at position 1600 of SEQ ID NO: 1560279
guguccuucgcgcauguga

SEQ ID NO: 1588984 - RNA, 19 nt, Artificial Sequence
  Description of Artificial Sequence: Synthetic oligonucleotide
  Antisense strand to SEQ ID NO: 1588983
ucacaugcgcgaaggacac

SEQ ID NO: 1588985 - RNA, 19 nt, Artificial Sequence
  Description of Artificial Sequence: Synthetic oligonucleotide
  Sense strand starting at position 1602 of SEQ ID NO: 1560279
guccuucgcgcaugugaca

SEQ ID NO: 1588986 - RNA, 19 nt, Artificial Sequence
  Description of Artificial Sequence: Synthetic oligonucleotide
  Antisense strand to SEQ ID NO: 1588985
ugucacaugcgcgaaggac

SEQ ID NO: 1588987 - RNA, 19 nt, Artificial Sequence
  Description of Artificial Sequence: Synthetic oligonucleotide
  Sense strand starting at position 1751 of SEQ ID NO: 1560279
gcgcuaugggugccggaaa

SEQ ID NO: 1588988 - RNA, 19 nt, Artificial Sequence
  Description of Artificial Sequence: Synthetic oligonucleotide
  Antisense strand to SEQ ID NO: 1588987
uuuccggcacccauagcgc

SEQ ID NO: 1588989 - RNA, 19 nt, Artificial Sequence
  Description of Artificial Sequence: Synthetic oligonucleotide
  Sense strand starting at position 1820 of SEQ ID NO: 1560279
cgccacuccucguuccaaa

SEQ ID NO: 1588990 - RNA, 19 nt, Artificial Sequence
  Description of Artificial Sequence: Synthetic oligonucleotide
  Antisense strand to SEQ ID NO: 1588989
uuuggaacgaggaguggcg

SEQ ID NO: 1588991 - RNA, 19 nt, Artificial Sequence
  Description of Artificial Sequence: Synthetic oligonucleotide
  Sense strand starting at position 1954 of SEQ ID NO: 1560279
acgcgugucuucccugauu

SEQ ID NO: 1588992 - RNA, 19 nt, Artificial Sequence
  Description of Artificial Sequence: Synthetic oligonucleotide
  Antisense strand to SEQ ID NO: 1588991
aaucagggaagacacgcgu

SEQ ID NO: 1588993 - RNA, 19 nt, Artificial Sequence
  Description of Artificial Sequence: Synthetic oligonucleotide
  Sense strand starting at position 1956 of SEQ ID NO: 1560279
gcgugucuucccugauugu

SEQ ID NO: 1588994 - RNA, 19 nt, Artificial Sequence
  Description of Artificial Sequence: Synthetic oligonucleotide
  Antisense strand to SEQ ID NO: 1588993
acaaucagggaagacacgc

SEQ ID NO: 1588995 - RNA, 19 nt, Artificial Sequence
  Description of Artificial Sequence: Synthetic oligonucleotide
  Sense strand starting at position 1990 of SEQ ID NO: 1560279
augcucaugucguuccaau

SEQ ID NO: 1588996 - RNA, 19 nt, Artificial Sequence
  Description of Artificial Sequence: Synthetic oligonucleotide
  Antisense strand to SEQ ID NO: 1588995
auuggaacgacaugagcau

SEQ ID NO: 1588997 - RNA, 19 nt, Artificial Sequence
  Description of Artificial Sequence: Synthetic oligonucleotide
  Sense strand starting at position 2061 of SEQ ID NO: 1560279
agccucagguccuauauaa

SEQ ID NO: 1588998 - RNA, 19 nt, Artificial Sequence
  Description of Artificial Sequence: Synthetic oligonucleotide
  Antisense strand to SEQ ID NO: 1588997
uuauauaggaccugaggcu

SEQ ID NO: 1588999 - RNA, 19 nt, Artificial Sequence
  Description of Artificial Sequence: Synthetic oligonucleotide
  Sense strand starting at position 2171 of SEQ ID NO: 1560279
guuguucuguugaaacggu

SEQ ID NO: 1589000 - RNA, 19 nt, Artificial Sequence
  Description of Artificial Sequence: Synthetic oligonucleotide
  Antisense strand to SEQ ID NO: 1588999
accguuucaacagaacaac

SEQ ID NO: 1589001 - RNA, 19 nt, Artificial Sequence
  Description of Artificial Sequence: Synthetic oligonucleotide
  Sense strand starting at position 2308 of SEQ ID NO: 1560279
accaauaggccuggauaau

SEQ ID NO: 1589002 - RNA, 19 nt, Artificial Sequence
  Description of Artificial Sequence: Synthetic oligonucleotide
  Antisense strand to SEQ ID NO: 1589001
auuauccaggccuauuggu

SEQ ID NO: 1589003 - RNA, 19 nt, Artificial Sequence
  Description of Artificial Sequence: Synthetic oligonucleotide
  Sense strand starting at position 3009 of SEQ ID NO: 1560279
cgagaucggccguuucacu

SEQ ID NO: 1589004 - RNA, 19 nt, Artificial Sequence
  Description of Artificial Sequence: Synthetic oligonucleotide
  Antisense strand to SEQ ID NO: 1589003
agugaaacggccgaucucg

SEQ ID NO: 1589005 - RNA, 19 nt, Artificial Sequence
  Description of Artificial Sequence: Synthetic oligonucleotide
  Sense strand starting at position 3127 of SEQ ID NO: 1560279
ugagcaucuguaugccaga

SEQ ID NO: 1589006 - RNA, 19 nt, Artificial Sequence
  Description of Artificial Sequence: Synthetic oligonucleotide
  Antisense strand to SEQ ID NO: 1589005
ucuggcauacagaugcuca

SEQ ID NO: 1589007 - RNA, 19 nt, Artificial Sequence
  Description of Artificial Sequence: Synthetic oligonucleotide
  Sense strand starting at position 3128 of SEQ ID NO: 1560279
gagcaucuguaugccagau

SEQ ID NO: 1589008 - RNA, 19 nt, Artificial Sequence
  Description of Artificial Sequence: Synthetic oligonucleotide
  Antisense strand to SEQ ID NO: 1589007
aucuggcauacagaugcuc

SEQ ID NO: 1589009 - RNA, 19 nt, Artificial Sequence
  Description of Artificial Sequence: Synthetic oligonucleotide
  Sense strand starting at position 3239 of SEQ ID NO: 1560279
acauaauacuccucggaau

SEQ ID NO: 1589010 - RNA, 19 nt, Artificial Sequence
  Description of Artificial Sequence: Synthetic oligonucleotide
  Antisense strand to SEQ ID NO: 1589009
auuccgaggaguauuaugu

SEQ ID NO: 1589011 - RNA, 19 nt, Artificial Sequence
  Description of Artificial Sequence: Synthetic oligonucleotide
  Sense strand starting at position 3258 of SEQ ID NO: 1560279
uuuggagauugguuccaag

SEQ ID NO: 1589012 - RNA, 19 nt, Artificial Sequence
  Description of Artificial Sequence: Synthetic oligonucleotide
  Antisense strand to SEQ ID NO: 1589011
cuuggaaccaaucuccaaa

SEQ ID NO: 1589013 - RNA, 19 nt, Artificial Sequence
  Description of Artificial Sequence: Synthetic oligonucleotide
  Sense strand starting at position 3447 of SEQ ID NO: 1560279
ccacuuauaaguggaugga

SEQ ID NO: 1589014 - RNA, 19 nt, Artificial Sequence
  Description of Artificial Sequence: Synthetic oligonucleotide
  Antisense strand to SEQ ID NO: 1589013
uccauccacuuauaagugg

SEQ ID NO: 1589015 - RNA, 19 nt, Artificial Sequence
  Description of Artificial Sequence: Synthetic oligonucleotide
  Sense strand starting at position 3481 of SEQ ID NO: 1560279
cguuguucgcgggucaacu

SEQ ID NO: 1589016 - RNA, 19 nt, Artificial Sequence
  Description of Artificial Sequence: Synthetic oligonucleotide
  Antisense strand to SEQ ID NO: 1589015
aguugacccgcgaacaacg

SEQ ID NO: 1589017 - RNA, 19 nt, Artificial Sequence
  Description of Artificial Sequence: Synthetic oligonucleotide
  Sense strand starting at position 3489 of SEQ ID NO: 1560279
gcgggucaacuguacauaa

SEQ ID NO: 1589018 - RNA, 19 nt, Artificial Sequence
  Description of Artificial Sequence: Synthetic oligonucleotide
  Antisense strand to SEQ ID NO: 1589017
uuauguacaguugacccgc

SEQ ID NO: 1589019 - RNA, 19 nt, Artificial Sequence
  Description of Artificial Sequence: Synthetic oligonucleotide
  Sense strand starting at position 3491 of SEQ ID NO: 1560279
gggucaacuguacauaagu

SEQ ID NO: 1589020 - RNA, 19 nt, Artificial Sequence
  Description of Artificial Sequence: Synthetic oligonucleotide
  Antisense strand to SEQ ID NO: 1589019
acuuauguacaguugaccc

SEQ ID NO: 1589021 - RNA, 19 nt, Artificial Sequence
  Description of Artificial Sequence: Synthetic oligonucleotide
  Sense strand starting at position 3509 of SEQ ID NO: 1560279
uaaauuaaaccguaaguga

SEQ ID NO: 1589022 - RNA, 19 nt, Artificial Sequence
  Description of Artificial Sequence: Synthetic oligonucleotide
  Antisense strand to SEQ ID NO: 1589021
ucacuuacgguuuaauuua

SEQ ID NO: 1589023 - RNA, 19 nt, Artificial Sequence
  Description of Artificial Sequence: Synthetic oligonucleotide
  Sense strand starting at position 3516 of SEQ ID NO: 1560279
aaccguaagugaguaggua

SEQ ID NO: 1589024 - RNA, 19 nt, Artificial Sequence
  Description of Artificial Sequence: Synthetic oligonucleotide
  Antisense strand to SEQ ID NO: 1589023
uaccuacucacuuacgguu

SEQ ID NO: 1589025 - RNA, 19 nt, Artificial Sequence
  Description of Artificial Sequence: Synthetic oligonucleotide
  Sense strand starting at position 3517 of SEQ ID NO: 1560279
accguaagugaguagguaa

SEQ ID NO: 1589026 - RNA, 19 nt, Artificial Sequence
  Description of Artificial Sequence: Synthetic oligonucleotide
  Antisense strand to SEQ ID NO: 1589025
uuaccuacucacuuacggu

SEQ ID NO: 1589027 - RNA, 19 nt, Artificial Sequence
  Description of Artificial Sequence: Synthetic oligonucleotide
  Sense strand starting at position 3520 of SEQ ID NO: 1560279
guaagugaguagguaauaa

SEQ ID NO: 1589028 - RNA, 19 nt, Artificial Sequence
  Description of Artificial Sequence: Synthetic oligonucleotide
  Antisense strand to SEQ ID NO: 1589027
uuauuaccuacucacuuac

SEQ ID NO: 1589029 - RNA, 19 nt, Artificial Sequence
  Description of Artificial Sequence: Synthetic oligonucleotide
  Sense strand starting at position 427 of SEQ ID NO: 1560280
uaguguaucagaugaugag

SEQ ID NO: 1589030 - RNA, 19 nt, Artificial Sequence
  Description of Artificial Sequence: Synthetic oligonucleotide
  Antisense strand to SEQ ID NO: 1589029
cucaucaucugauacacua

SEQ ID NO: 1589031 - RNA, 19 nt, Artificial Sequence
  Description of Artificial Sequence: Synthetic oligonucleotide
  Sense strand starting at position 428 of SEQ ID NO: 1560280
aguguaucagaugaugagu

SEQ ID NO: 1589032 - RNA, 19 nt, Artificial Sequence
  Description of Artificial Sequence: Synthetic oligonucleotide
  Antisense strand to SEQ ID NO: 1589031
acucaucaucugauacacu

SEQ ID NO: 1589033 - RNA, 19 nt, Artificial Sequence
  Description of Artificial Sequence: Synthetic oligonucleotide
  Sense strand starting at position 504 of SEQ ID NO: 1560280
caguucuaagugcaauagu

SEQ ID NO: 1589034 - RNA, 19 nt, Artificial Sequence
  Description of Artificial Sequence: Synthetic oligonucleotide
  Antisense strand to SEQ ID NO: 1589033
acuauugcacuuagaacug

SEQ ID NO: 1589035 - RNA, 19 nt, Artificial Sequence
  Description of Artificial Sequence: Synthetic oligonucleotide
  Sense strand starting at position 560 of SEQ ID NO: 1560280
aggcuugaggcacauuaga

SEQ ID NO: 1589036 - RNA, 19 nt, Artificial Sequence
  Description of Artificial Sequence: Synthetic oligonucleotide
  Antisense strand to SEQ ID NO: 1589035
ucuaaugugccucaagccu

SEQ ID NO: 1589037 - RNA, 19 nt, Artificial Sequence
  Description of Artificial Sequence: Synthetic oligonucleotide
  Sense strand starting at position 570 of SEQ ID NO: 1560280
cacauuagagagugaguaa

SEQ ID NO: 1589038 - RNA, 19 nt, Artificial Sequence
  Description of Artificial Sequence: Synthetic oligonucleotide
  Antisense strand to SEQ ID NO: 1589037
uuacucacucucuaaugug

SEQ ID NO: 1589039 - RNA, 19 nt, Artificial Sequence
  Description of Artificial Sequence: Synthetic oligonucleotide
  Sense strand starting at position 587 of SEQ ID NO: 1560280
aaugcugacguuugagaga

SEQ ID NO: 1589040 - RNA, 19 nt, Artificial Sequence
  Description of Artificial Sequence: Synthetic oligonucleotide
  Antisense strand to SEQ ID NO: 1589039
ucucucaaacgucagcauu

SEQ ID NO: 1589041 - RNA, 19 nt, Artificial Sequence
  Description of Artificial Sequence: Synthetic oligonucleotide
  Sense strand starting at position 592 of SEQ ID NO: 1560280
ugacguuugagagacauug

SEQ ID NO: 1589042 - RNA, 19 nt, Artificial Sequence
  Description of Artificial Sequence: Synthetic oligonucleotide
  Antisense strand to SEQ ID NO: 1589041
caaugucucucaaacguca

SEQ ID NO: 1589043 - RNA, 19 nt, Artificial Sequence
  Description of Artificial Sequence: Synthetic oligonucleotide
  Sense strand starting at position 594 of SEQ ID NO: 1560280
acguuugagagacauugca

SEQ ID NO: 1589044 - RNA, 19 nt, Artificial Sequence
  Description of Artificial Sequence: Synthetic oligonucleotide
  Antisense strand to SEQ ID NO: 1589043
ugcaaugucucucaaacgu

SEQ ID NO: 1589045 - RNA, 19 nt, Artificial Sequence
  Description of Artificial Sequence: Synthetic oligonucleotide
  Sense strand starting at position 638 of SEQ ID NO: 1560280
ggacgcugccuguccuauu

SEQ ID NO: 1589046 - RNA, 19 nt, Artificial Sequence
  Description of Artificial Sequence: Synthetic oligonucleotide
  Antisense strand to SEQ ID NO: 1589045
aauaggacaggcagcgucc

SEQ ID NO: 1589047 - RNA, 19 nt, Artificial Sequence
  Description of Artificial Sequence: Synthetic oligonucleotide
  Sense strand starting at position 740 of SEQ ID NO: 1560280
cguuaucuagggcacgaua

SEQ ID NO: 1589048 - RNA, 19 nt, Artificial Sequence
  Description of Artificial Sequence: Synthetic oligonucleotide
  Antisense strand to SEQ ID NO: 1589047
uaucgugcccuagauaacg

SEQ ID NO: 1589049 - RNA, 19 nt, Artificial Sequence
  Description of Artificial Sequence: Synthetic oligonucleotide
  Sense strand starting at position 1156 of SEQ ID NO: 1560280
agguacagcguugagaaua

SEQ ID NO: 1589050 - RNA, 19 nt, Artificial Sequence
  Description of Artificial Sequence: Synthetic oligonucleotide
  Antisense strand to SEQ ID NO: 1589049
uauucucaacgcuguaccu

SEQ ID NO: 1589051 - RNA, 19 nt, Artificial Sequence
  Description of Artificial Sequence: Synthetic oligonucleotide
  Sense strand starting at position 1166 of SEQ ID NO: 1560280
uugagaauagguuggugga

SEQ ID NO: 1589052 - RNA, 19 nt, Artificial Sequence
  Description of Artificial Sequence: Synthetic oligonucleotide
  Antisense strand to SEQ ID NO: 1589051
uccaccaaccuauucucaa

SEQ ID NO: 1589053 - RNA, 19 nt, Artificial Sequence
  Description of Artificial Sequence: Synthetic oligonucleotide
  Sense strand starting at position 1167 of SEQ ID NO: 1560280
ugagaauagguugguggaa

SEQ ID NO: 1589054 - RNA, 19 nt, Artificial Sequence
  Description of Artificial Sequence: Synthetic oligonucleotide
  Antisense strand to SEQ ID NO: 1589053
uuccaccaaccuauucuca

SEQ ID NO: 1589055 - RNA, 19 nt, Artificial Sequence
  Description of Artificial Sequence: Synthetic oligonucleotide
  Sense strand starting at position 1261 of SEQ ID NO: 1560280
auggucagauuccuuaaau

SEQ ID NO: 1589056 - RNA, 19 nt, Artificial Sequence
  Description of Artificial Sequence: Synthetic oligonucleotide
  Antisense strand to SEQ ID NO: 1589055
auuuaaggaaucugaccau

SEQ ID NO: 1589057 - RNA, 19 nt, Artificial Sequence
  Description of Artificial Sequence: Synthetic oligonucleotide
  Sense strand starting at position 1262 of SEQ ID NO: 1560280
uggucagauuccuuaaaua

SEQ ID NO: 1589058 - RNA, 19 nt, Artificial Sequence
  Description of Artificial Sequence: Synthetic oligonucleotide
  Antisense strand to SEQ ID NO: 1589057
uauuuaaggaaucugacca

SEQ ID NO: 1589059 - RNA, 19 nt, Artificial Sequence
  Description of Artificial Sequence: Synthetic oligonucleotide
  Sense strand starting at position 1287 of SEQ ID NO: 1560280
uguuaaagccaucagaaug

SEQ ID NO: 1589060 - RNA, 19 nt, Artificial Sequence
  Description of Artificial Sequence: Synthetic oligonucleotide
  Antisense strand to SEQ ID NO: 1589059
cauucugauggcuuuaaca

SEQ ID NO: 1589061 - RNA, 19 nt, Artificial Sequence
  Description of Artificial Sequence: Synthetic oligonucleotide
  Sense strand starting at position 1377 of SEQ ID NO: 1560280
accuccugagcuggagaaa

SEQ ID NO: 1589062 - RNA, 19 nt, Artificial Sequence
  Description of Artificial Sequence: Synthetic oligonucleotide
  Antisense strand to SEQ ID NO: 1589061
uuucuccagcucaggaggu

SEQ ID NO: 1589063 - RNA, 19 nt, Artificial Sequence
  Description of Artificial Sequence: Synthetic oligonucleotide
  Sense strand starting at position 1397 of SEQ ID NO: 1560280
cagugcgaggaauaguuua

SEQ ID NO: 1589064 - RNA, 19 nt, Artificial Sequence
  Description of Artificial Sequence: Synthetic oligonucleotide
  Antisense strand to SEQ ID NO: 1589063
uaaacuauuccucgcacug

SEQ ID NO: 1589065 - RNA, 19 nt, Artificial Sequence
  Description of Artificial Sequence: Synthetic oligonucleotide
  Sense strand starting at position 1446 of SEQ ID NO: 1560280
acacauugagucugagaug

SEQ ID NO: 1589066 - RNA, 19 nt, Artificial Sequence
  Description of Artificial Sequence: Synthetic oligonucleotide
  Antisense strand to SEQ ID NO: 1589065
caucucagacucaaugugu

SEQ ID NO: 1589067 - RNA, 19 nt, Artificial Sequence
  Description of Artificial Sequence: Synthetic oligonucleotide
  Sense strand starting at position 1568 of SEQ ID NO: 1560280
ccuugauuccaaggauauu

SEQ ID NO: 1589068 - RNA, 19 nt, Artificial Sequence
  Description of Artificial Sequence: Synthetic oligonucleotide
  Antisense strand to SEQ ID NO: 1589067
aauauccuuggaaucaagg

SEQ ID NO: 1589069 - RNA, 19 nt, Artificial Sequence
  Description of Artificial Sequence: Synthetic oligonucleotide
  Sense strand starting at position 1921 of SEQ ID NO: 1560280
gggaacuuacugugugaau

SEQ ID NO: 1589070 - RNA, 19 nt, Artificial Sequence
  Description of Artificial Sequence: Synthetic oligonucleotide
  Antisense strand to SEQ ID NO: 1589069
auucacacaguaaguuccc

SEQ ID NO: 1589071 - RNA, 19 nt, Artificial Sequence
  Description of Artificial Sequence: Synthetic oligonucleotide
  Sense strand starting at position 1923 of SEQ ID NO: 1560280
gaacuuacugugugaauag

SEQ ID NO: 1589072 - RNA, 19 nt, Artificial Sequence
  Description of Artificial Sequence: Synthetic oligonucleotide
  Antisense strand to SEQ ID NO: 1589071
cuauucacacaguaaguuc

SEQ ID NO: 1589073 - RNA, 19 nt, Artificial Sequence
  Description of Artificial Sequence: Synthetic oligonucleotide
  Sense strand starting at position 2094 of SEQ ID NO: 1560280
guaauuguaucacuccuua

SEQ ID NO: 1589074 - RNA, 19 nt, Artificial Sequence
  Description of Artificial Sequence: Synthetic oligonucleotide
  Antisense strand to SEQ ID NO: 1589073
uaaggagugauacaauuac

SEQ ID NO: 1589075 - RNA, 19 nt, Artificial Sequence
  Description of Artificial Sequence: Synthetic oligonucleotide
  Sense strand starting at position 2179 of SEQ ID NO: 1560280
uuuacaccaguguauaaau

SEQ ID NO: 1589076 - RNA, 19 nt, Artificial Sequence
  Description of Artificial Sequence: Synthetic oligonucleotide
  Antisense strand to SEQ ID NO: 1589075
auuuauacacugguguaaa

SEQ ID NO: 1589077 - RNA, 19 nt, Artificial Sequence
  Description of Artificial Sequence: Synthetic oligonucleotide
  Sense strand starting at position 2338 of SEQ ID NO: 1560280
gggagacaagcuugcaaua

SEQ ID NO: 1589078 - RNA, 19 nt, Artificial Sequence
  Description of Artificial Sequence: Synthetic oligonucleotide
  Antisense strand to SEQ ID NO: 1589077
uauugcaagcuugucuccc

SEQ ID NO: 1589079 - RNA, 19 nt, Artificial Sequence
  Description of Artificial Sequence: Synthetic oligonucleotide
  Sense strand starting at position 2349 of SEQ ID NO: 1560280
uugcaauaguugccaauuu

SEQ ID NO: 1589080 - RNA, 19 nt, Artificial Sequence
  Description of Artificial Sequence: Synthetic oligonucleotide
  Antisense strand to SEQ ID NO: 1589079
aaauuggcaacuauugcaa

SEQ ID NO: 1589081 - RNA, 19 nt, Artificial Sequence
  Description of Artificial Sequence: Synthetic oligonucleotide
  Sense strand starting at position 2484 of SEQ ID NO: 1560280
aguggccucuccuuauaaa

SEQ ID NO: 1589082 - RNA, 19 nt, Artificial Sequence
  Description of Artificial Sequence: Synthetic oligonucleotide
  Antisense strand to SEQ ID NO: 1589081
uuuauaaggagaggccacu

SEQ ID NO: 1589083 - RNA, 19 nt, Artificial Sequence
  Description of Artificial Sequence: Synthetic oligonucleotide
  Sense strand starting at position 2485 of SEQ ID NO: 1560280
guggccucuccuuauaaau

SEQ ID NO: 1589084 - RNA, 19 nt, Artificial Sequence
  Description of Artificial Sequence: Synthetic oligonucleotide
  Antisense strand to SEQ ID NO: 1589083
auuuauaaggagaggccac

SEQ ID NO: 1589085 - RNA, 19 nt, Artificial Sequence
  Description of Artificial Sequence: Synthetic oligonucleotide
  Sense strand starting at position 2706 of SEQ ID NO: 1560280
cugcaaguuaugcaaguga

SEQ ID NO: 1589086 - RNA, 19 nt, Artificial Sequence
  Description of Artificial Sequence: Synthetic oligonucleotide
  Antisense strand to SEQ ID NO: 1589085
ucacuugcauaacuugcag

SEQ ID NO: 1589087 - RNA, 19 nt, Artificial Sequence
  Description of Artificial Sequence: Synthetic oligonucleotide
  Sense strand starting at position 2762 of SEQ ID NO: 1560280
accagucauugaucaguca

SEQ ID NO: 1589088 - RNA, 19 nt, Artificial Sequence
  Description of Artificial Sequence: Synthetic oligonucleotide
  Antisense strand to SEQ ID NO: 1589087
ugacugaucaaugacuggu

SEQ ID NO: 1589089 - RNA, 19 nt, Artificial Sequence
  Description of Artificial Sequence: Synthetic oligonucleotide
  Sense strand starting at position 2763 of SEQ ID NO: 1560280
ccagucauugaucagucau

SEQ ID NO: 1589090 - RNA, 19 nt, Artificial Sequence
  Description of Artificial Sequence: Synthetic oligonucleotide
  Antisense strand to SEQ ID NO: 1589089
augacugaucaaugacugg

SEQ ID NO: 1589091 - RNA, 19 nt, Artificial Sequence
  Description of Artificial Sequence: Synthetic oligonucleotide
  Sense strand starting at position 2769 of SEQ ID NO: 1560280
auugaucagucauugauca

SEQ ID NO: 1589092 - RNA, 19 nt, Artificial Sequence
  Description of Artificial Sequence: Synthetic oligonucleotide
  Antisense strand to SEQ ID NO: 1589091
ugaucaaugacugaucaau

SEQ ID NO: 1589093 - RNA, 19 nt, Artificial Sequence
  Description of Artificial Sequence: Synthetic oligonucleotide
  Sense strand starting at position 2774 of SEQ ID NO: 1560280
ucagucauugaucagucuu

SEQ ID NO: 1589094 - RNA, 19 nt, Artificial Sequence
  Description of Artificial Sequence: Synthetic oligonucleotide
  Antisense strand to SEQ ID NO: 1589093
aagacugaucaaugacuga

SEQ ID NO: 1589095 - RNA, 19 nt, Artificial Sequence
  Description of Artificial Sequence: Synthetic oligonucleotide
  Sense strand starting at position 2776 of SEQ ID NO: 1560280
agucauugaucagucuuga

SEQ ID NO: 1589096 - RNA, 19 nt, Artificial Sequence
  Description of Artificial Sequence: Synthetic oligonucleotide
  Antisense strand to SEQ ID NO: 1589095
ucaagacugaucaaugacu

SEQ ID NO: 1589097 - RNA, 19 nt, Artificial Sequence
  Description of Artificial Sequence: Synthetic oligonucleotide
  Sense strand starting at position 2826 of SEQ ID NO: 1560280
agcuguaaucuacaauagu

SEQ ID NO: 1589098 - RNA, 19 nt, Artificial Sequence
  Description of Artificial Sequence: Synthetic oligonucleotide
  Antisense strand to SEQ ID NO: 1589097
acuauuguagauuacagcu

SEQ ID NO: 1589099 - RNA, 19 nt, Artificial Sequence
  Description of Artificial Sequence: Synthetic oligonucleotide
  Sense strand starting at position 2834 of SEQ ID NO: 1560280
ucuacaauagugcaggaua

SEQ ID NO: 1589100 - RNA, 19 nt, Artificial Sequence
  Description of Artificial Sequence: Synthetic oligonucleotide
  Antisense strand to SEQ ID NO: 1589099
uauccugcacuauuguaga

SEQ ID NO: 1589101 - RNA, 19 nt, Artificial Sequence
  Description of Artificial Sequence: Synthetic oligonucleotide
  Sense strand starting at position 2836 of SEQ ID NO: 1560280
uacaauagugcaggauaaa

SEQ ID NO: 1589102 - RNA, 19 nt, Artificial Sequence
  Description of Artificial Sequence: Synthetic oligonucleotide
  Antisense strand to SEQ ID NO: 1589101
uuuauccugcacuauugua

SEQ ID NO: 1589103 - RNA, 19 nt, Artificial Sequence
  Description of Artificial Sequence: Synthetic oligonucleotide
  Sense strand starting at position 2870 of SEQ ID NO: 1560280
acaugucuauauuugugua

SEQ ID NO: 1589104 - RNA, 19 nt, Artificial Sequence
  Description of Artificial Sequence: Synthetic oligonucleotide
  Antisense strand to SEQ ID NO: 1589103
uacacaaauauagacaugu

SEQ ID NO: 1589105 - RNA, 19 nt, Artificial Sequence
  Description of Artificial Sequence: Synthetic oligonucleotide
  Sense strand starting at position 2899 of SEQ ID NO: 1560280
uguuauuaagagcacauaa

SEQ ID NO: 1589106 - RNA, 19 nt, Artificial Sequence
  Description of Artificial Sequence: Synthetic oligonucleotide
  Antisense strand to SEQ ID NO: 1589105
uuaugugcucuuaauaaca

SEQ ID NO: 1589107 - RNA, 19 nt, Artificial Sequence
  Description of Artificial Sequence: Synthetic oligonucleotide
  Sense strand starting at position 3618 of SEQ ID NO: 1560280
uuuauugagguacaguuaa

SEQ ID NO: 1589108 - RNA, 19 nt, Artificial Sequence
  Description of Artificial Sequence: Synthetic oligonucleotide
  Antisense strand to SEQ ID NO: 1589107
uuaacuguaccucaauaaa

SEQ ID NO: 1589109 - RNA, 19 nt, Artificial Sequence
  Description of Artificial Sequence: Synthetic oligonucleotide
  Sense strand starting at position 10 of SEQ ID NO: 1560281
gucgauaugagccaucaca

SEQ ID NO: 1589110 - RNA, 19 nt, Artificial Sequence
  Description of Artificial Sequence: Synthetic oligonucleotide
  Antisense strand to SEQ ID NO: 1589109
ugugauggcucauaucgac

SEQ ID NO: 1589111 - RNA, 19 nt, Artificial Sequence
  Description of Artificial Sequence: Synthetic oligonucleotide
  Sense strand starting at position 170 of SEQ ID NO: 1560281
ucuguagucuucccugaac

SEQ ID NO: 1589112 - RNA, 19 nt, Artificial Sequence
  Description of Artificial Sequence: Synthetic oligonucleotide
  Antisense strand to SEQ ID NO: 1589111
guucagggaagacuacaga

SEQ ID NO: 1589113 - RNA, 19 nt, Artificial Sequence
  Description of Artificial Sequence: Synthetic oligonucleotide
  Sense strand starting at position 172 of SEQ ID NO: 1560281
uguagucuucccugaacau

SEQ ID NO: 1589114 - RNA, 19 nt, Artificial Sequence
  Description of Artificial Sequence: Synthetic oligonucleotide
  Antisense strand to SEQ ID NO: 1589113
auguucagggaagacuaca

SEQ ID NO: 1589115 - RNA, 19 nt, Artificial Sequence
  Description of Artificial Sequence: Synthetic oligonucleotide
  Sense strand starting at position 173 of SEQ ID NO: 1560281
guagucuucccugaacauc

SEQ ID NO: 1589116 - RNA, 19 nt, Artificial Sequence
  Description of Artificial Sequence: Synthetic oligonucleotide
  Antisense strand to SEQ ID NO: 1589115
gauguucagggaagacuac

SEQ ID NO: 1589117 - RNA, 19 nt, Artificial Sequence
  Description of Artificial Sequence: Synthetic oligonucleotide
  Sense strand starting at position 235 of SEQ ID NO: 1560281
cuauccuucucaguagauu

SEQ ID NO: 1589118 - RNA, 19 nt, Artificial Sequence
  Description of Artificial Sequence: Synthetic oligonucleotide
  Antisense strand to SEQ ID NO: 1589117
aaucuacugagaaggauag

SEQ ID NO: 1589119 - RNA, 19 nt, Artificial Sequence
  Description of Artificial Sequence: Synthetic oligonucleotide
  Sense strand starting at position 405 of SEQ ID NO: 1560281
guccuaucucuacagcauu

SEQ ID NO: 1589120 - RNA, 19 nt, Artificial Sequence
  Description of Artificial Sequence: Synthetic oligonucleotide
  Antisense strand to SEQ ID NO: 1589119
aaugcuguagagauaggac

SEQ ID NO: 1589121 - RNA, 19 nt, Artificial Sequence
  Description of Artificial Sequence: Synthetic oligonucleotide
  Sense strand starting at position 524 of SEQ ID NO: 1560281
guagucucccuguaccaua

SEQ ID NO: 1589122 - RNA, 19 nt, Artificial Sequence
  Description of Artificial Sequence: Synthetic oligonucleotide
  Antisense strand to SEQ ID NO: 1589121
uaugguacagggagacuac

SEQ ID NO: 1589123 - RNA, 19 nt, Artificial Sequence
  Description of Artificial Sequence: Synthetic oligonucleotide
  Sense strand starting at position 634 of SEQ ID NO: 1560281
ggaggugucucuucccaca

SEQ ID NO: 1589124 - RNA, 19 nt, Artificial Sequence
  Description of Artificial Sequence: Synthetic oligonucleotide
  Antisense strand to SEQ ID NO: 1589123
ugugggaagagacaccucc

SEQ ID NO: 1589125 - RNA, 19 nt, Artificial Sequence
  Description of Artificial Sequence: Synthetic oligonucleotide
  Sense strand starting at position 639 of SEQ ID NO: 1560281
ugucucuucccacaguuua

SEQ ID NO: 1589126 - RNA, 19 nt, Artificial Sequence
  Description of Artificial Sequence: Synthetic oligonucleotide
  Antisense strand to SEQ ID NO: 1589125
uaaacugugggaagagaca

SEQ ID NO: 1589127 - RNA, 19 nt, Artificial Sequence
  Description of Artificial Sequence: Synthetic oligonucleotide
  Sense strand starting at position 649 of SEQ ID NO: 1560281
cacaguuuagagugaucau

SEQ ID NO: 1589128 - RNA, 19 nt, Artificial Sequence
  Description of Artificial Sequence: Synthetic oligonucleotide
  Antisense strand to SEQ ID NO: 1589127
augaucacucuaaacugug

SEQ ID NO: 1589129 - RNA, 19 nt, Artificial Sequence
  Description of Artificial Sequence: Synthetic oligonucleotide
  Sense strand starting at position 652 of SEQ ID NO: 1560281
aguuuagagugaucauccu

SEQ ID NO: 1589130 - RNA, 19 nt, Artificial Sequence
  Description of Artificial Sequence: Synthetic oligonucleotide
  Antisense strand to SEQ ID NO: 1589129
aggaugaucacucuaaacu

SEQ ID NO: 1589131 - RNA, 19 nt, Artificial Sequence
  Description of Artificial Sequence: Synthetic oligonucleotide
  Sense strand starting at position 755 of SEQ ID NO: 1560281
cucuuuauaccagggucau

SEQ ID NO: 1589132 - RNA, 19 nt, Artificial Sequence
  Description of Artificial Sequence: Synthetic oligonucleotide
  Antisense strand to SEQ ID NO: 1589131
augacccugguauaaagag

SEQ ID NO: 1589133 - RNA, 19 nt, Artificial Sequence
  Description of Artificial Sequence: Synthetic oligonucleotide
  Sense strand starting at position 756 of SEQ ID NO: 1560281
ucuuuauaccagggucauu

SEQ ID NO: 1589134 - RNA, 19 nt, Artificial Sequence
  Description of Artificial Sequence: Synthetic oligonucleotide
  Antisense strand to SEQ ID NO: 1589133
aaugacccugguauaaaga

SEQ ID NO: 1589135 - RNA, 19 nt, Artificial Sequence
  Description of Artificial Sequence: Synthetic oligonucleotide
  Sense strand starting at position 766 of SEQ ID NO: 1560281
agggucauuccacaacugu

SEQ ID NO: 1589136 - RNA, 19 nt, Artificial Sequence
  Description of Artificial Sequence: Synthetic oligonucleotide
  Antisense strand to SEQ ID NO: 1589135
acaguuguggaaugacccu

SEQ ID NO: 1589137 - RNA, 19 nt, Artificial Sequence
  Description of Artificial Sequence: Synthetic oligonucleotide
  Sense strand starting at position 831 of SEQ ID NO: 1560281
aggguucucuccucccaga

SEQ ID NO: 1589138 - RNA, 19 nt, Artificial Sequence
  Description of Artificial Sequence: Synthetic oligonucleotide
  Antisense strand to SEQ ID NO: 1589137
ucugggaggagagaacccu

SEQ ID NO: 1589139 - RNA, 19 nt, Artificial Sequence
  Description of Artificial Sequence: Synthetic oligonucleotide
  Sense strand starting at position 842 of SEQ ID NO: 1560281
cucccagaguugucagcua

SEQ ID NO: 1589140 - RNA, 19 nt, Artificial Sequence
  Description of Artificial Sequence: Synthetic oligonucleotide
  Antisense strand to SEQ ID NO: 1589139
uagcugacaacucugggag

SEQ ID NO: 1589141 - RNA, 19 nt, Artificial Sequence
  Description of Artificial Sequence: Synthetic oligonucleotide
  Sense strand starting at position 847 of SEQ ID NO: 1560281
agaguugucagcuacagca

SEQ ID NO: 1589142 - RNA, 19 nt, Artificial Sequence
  Description of Artificial Sequence: Synthetic oligonucleotide
  Antisense strand to SEQ ID NO: 1589141
ugcuguagcugacaacucu

SEQ ID NO: 1589143 - RNA, 19 nt, Artificial Sequence
  Description of Artificial Sequence: Synthetic oligonucleotide
  Sense strand starting at position 849 of SEQ ID NO: 1560281
aguugucagcuacagcaaa

SEQ ID NO: 1589144 - RNA, 19 nt, Artificial Sequence
  Description of Artificial Sequence: Synthetic oligonucleotide
  Antisense strand to SEQ ID NO: 1589143
uuugcuguagcugacaacu

SEQ ID NO: 1589145 - RNA, 19 nt, Artificial Sequence
  Description of Artificial Sequence: Synthetic oligonucleotide
  Sense strand starting at position 1888 of SEQ ID NO: 1560281
ccgauuacccaguaaugca

SEQ ID NO: 1589146 - RNA, 19 nt, Artificial Sequence
  Description of Artificial Sequence: Synthetic oligonucleotide
  Antisense strand to SEQ ID NO: 1589145
ugcauuacuggguaaucgg

SEQ ID NO: 1589147 - RNA, 19 nt, Artificial Sequence
  Description of Artificial Sequence: Synthetic oligonucleotide
  Sense strand starting at position 2015 of SEQ ID NO: 1560281
gcgagauggccgcuuaccu

SEQ ID NO: 1589148 - RNA, 19 nt, Artificial Sequence
  Description of Artificial Sequence: Synthetic oligonucleotide
  Antisense strand to SEQ ID NO: 1589147
agguaagcggccaucucgc

SEQ ID NO: 1589149 - RNA, 19 nt, Artificial Sequence
  Description of Artificial Sequence: Synthetic oligonucleotide
  Sense strand starting at position 2124 of SEQ ID NO: 1560281
cugugaccgagugagaauu

SEQ ID NO: 1589150 - RNA, 19 nt, Artificial Sequence
  Description of Artificial Sequence: Synthetic oligonucleotide
  Antisense strand to SEQ ID NO: 1589149
aauucucacucggucacag

SEQ ID NO: 1589151 - RNA, 19 nt, Artificial Sequence
  Description of Artificial Sequence: Synthetic oligonucleotide
  Sense strand starting at position 2126 of SEQ ID NO: 1560281
gugaccgagugagaauuua

SEQ ID NO: 1589152 - RNA, 19 nt, Artificial Sequence
  Description of Artificial Sequence: Synthetic oligonucleotide
  Antisense strand to SEQ ID NO: 1589151
uaaauucucacucggucac

SEQ ID NO: 1589153 - RNA, 19 nt, Artificial Sequence
  Description of Artificial Sequence: Synthetic oligonucleotide
  Sense strand starting at position 2392 of SEQ ID NO: 1560281
gacagagaugucugucuug

SEQ ID NO: 1589154 - RNA, 19 nt, Artificial Sequence
  Description of Artificial Sequence: Synthetic oligonucleotide
  Antisense strand to SEQ ID NO: 1589153
caagacagacaucucuguc

SEQ ID NO: 1589155 - RNA, 19 nt, Artificial Sequence
  Description of Artificial Sequence: Synthetic oligonucleotide
  Sense strand starting at position 2629 of SEQ ID NO: 1560281
uucucuugugugcucuuua

SEQ ID NO: 1589156 - RNA, 19 nt, Artificial Sequence
  Description of Artificial Sequence: Synthetic oligonucleotide
  Antisense strand to SEQ ID NO: 1589155
uaaagagcacacaagagaa

SEQ ID NO: 1589157 - RNA, 19 nt, Artificial Sequence
  Description of Artificial Sequence: Synthetic oligonucleotide
  Sense strand starting at position 2634 of SEQ ID NO: 1560281
uugugugcucuuuaaacca

SEQ ID NO: 1589158 - RNA, 19 nt, Artificial Sequence
  Description of Artificial Sequence: Synthetic oligonucleotide
  Antisense strand to SEQ ID NO: 1589157
ugguuuaaagagcacacaa

SEQ ID NO: 1589159 - RNA, 19 nt, Artificial Sequence
  Description of Artificial Sequence: Synthetic oligonucleotide
  Sense strand starting at position 2735 of SEQ ID NO: 1560281
ccuuaaaugcaagaguuga

SEQ ID NO: 1589160 - RNA, 19 nt, Artificial Sequence
  Description of Artificial Sequence: Synthetic oligonucleotide
  Antisense strand to SEQ ID NO: 1589159
ucaacucuugcauuuaagg

SEQ ID NO: 1589161 - RNA, 19 nt, Artificial Sequence
  Description of Artificial Sequence: Synthetic oligonucleotide
  Sense strand starting at position 2757 of SEQ ID NO: 1560281
gugggaccuucgagagaug

SEQ ID NO: 1589162 - RNA, 19 nt, Artificial Sequence
  Description of Artificial Sequence: Synthetic oligonucleotide
  Antisense strand to SEQ ID NO: 1589161
caucucucgaaggucccac

SEQ ID NO: 1589163 - RNA, 19 nt, Artificial Sequence
  Description of Artificial Sequence: Synthetic oligonucleotide
  Sense strand starting at position 2792 of SEQ ID NO: 1560281
cucugccuuccugaauaga

SEQ ID NO: 1589164 - RNA, 19 nt, Artificial Sequence
  Description of Artificial Sequence: Synthetic oligonucleotide
  Antisense strand to SEQ ID NO: 1589163
ucuauucaggaaggcagag

SEQ ID NO: 1589165 - RNA, 19 nt, Artificial Sequence
  Description of Artificial Sequence: Synthetic oligonucleotide
  Sense strand starting at position 2795 of SEQ ID NO: 1560281
ugccuuccugaauagagua

SEQ ID NO: 1589166 - RNA, 19 nt, Artificial Sequence
  Description of Artificial Sequence: Synthetic oligonucleotide
  Antisense strand to SEQ ID NO: 1589165
uacucuauucaggaaggca

SEQ ID NO: 1589167 - RNA, 19 nt, Artificial Sequence
  Description of Artificial Sequence: Synthetic oligonucleotide
  Sense strand starting at position 2800 of SEQ ID NO: 1560281
uccugaauagaguaaugcu

SEQ ID NO: 1589168 - RNA, 19 nt, Artificial Sequence
  Description of Artificial Sequence: Synthetic oligonucleotide
  Antisense strand to SEQ ID NO: 1589167
agcauuacucuauucagga

SEQ ID NO: 1589169 - RNA, 19 nt, Artificial Sequence
  Description of Artificial Sequence: Synthetic oligonucleotide
  Sense strand starting at position 2825 of SEQ ID NO: 1560281
acaagaguggguugcugau

SEQ ID NO: 1589170 - RNA, 19 nt, Artificial Sequence
  Description of Artificial Sequence: Synthetic oligonucleotide
  Antisense strand to SEQ ID NO: 1589169
aucagcaacccacucuugu

SEQ ID NO: 1589171 - RNA, 19 nt, Artificial Sequence
  Description of Artificial Sequence: Synthetic oligonucleotide
  Sense strand starting at position 2827 of SEQ ID NO: 1560281
aagaguggguugcugauua

SEQ ID NO: 1589172 - RNA, 19 nt, Artificial Sequence
  Description of Artificial Sequence: Synthetic oligonucleotide
  Antisense strand to SEQ ID NO: 1589171
uaaucagcaacccacucuu

SEQ ID NO: 1589173 - RNA, 19 nt, Artificial Sequence
  Description of Artificial Sequence: Synthetic oligonucleotide
  Sense strand starting at position 2882 of SEQ ID NO: 1560281
cccuucugccaauggauga

SEQ ID NO: 1589174 - RNA, 19 nt, Artificial Sequence
  Description of Artificial Sequence: Synthetic oligonucleotide
  Antisense strand to SEQ ID NO: 1589173
ucauccauuggcagaaggg

SEQ ID NO: 1589175 - RNA, 19 nt, Artificial Sequence
  Description of Artificial Sequence: Synthetic oligonucleotide
  Sense strand starting at position 3058 of SEQ ID NO: 1560281
uggcucaaucacgaaauca

SEQ ID NO: 1589176 - RNA, 19 nt, Artificial Sequence
  Description of Artificial Sequence: Synthetic oligonucleotide
  Antisense strand to SEQ ID NO: 1589175
ugauuucgugauugagcca

SEQ ID NO: 1589177 - RNA, 19 nt, Artificial Sequence
  Description of Artificial Sequence: Synthetic oligonucleotide
  Sense strand starting at position 3371 of SEQ ID NO: 1560281
ggguuuaggaaaugugaua

SEQ ID NO: 1589178 - RNA, 19 nt, Artificial Sequence
  Description of Artificial Sequence: Synthetic oligonucleotide
  Antisense strand to SEQ ID NO: 1589177
uaucacauuuccuaaaccc

SEQ ID NO: 1589179 - RNA, 19 nt, Artificial Sequence
  Description of Artificial Sequence: Synthetic oligonucleotide
  Sense strand starting at position 3792 of SEQ ID NO: 1560281
ccaggaauuguuuggcuua

SEQ ID NO: 1589180 - RNA, 19 nt, Artificial Sequence
  Description of Artificial Sequence: Synthetic oligonucleotide
  Antisense strand to SEQ ID NO: 1589179
uaagccaaacaauuccugg

SEQ ID NO: 1589181 - RNA, 19 nt, Artificial Sequence
  Description of Artificial Sequence: Synthetic oligonucleotide
  Sense strand starting at position 3794 of SEQ ID NO: 1560281
aggaauuguuuggcuuauu

SEQ ID NO: 1589182 - RNA, 19 nt, Artificial Sequence
  Description of Artificial Sequence: Synthetic oligonucleotide
  Antisense strand to SEQ ID NO: 1589181
aauaagccaaacaauuccu

SEQ ID NO: 1589183 - RNA, 19 nt, Artificial Sequence
  Description of Artificial Sequence: Synthetic oligonucleotide
  Sense strand starting at position 3886 of SEQ ID NO: 1560281
aauggugaaccuugugaag

SEQ ID NO: 1589184 - RNA, 19 nt, Artificial Sequence
  Description of Artificial Sequence: Synthetic oligonucleotide
  Antisense strand to SEQ ID NO: 1589183
cuucacaagguucaccauu

SEQ ID NO: 1589185 - RNA, 19 nt, Artificial Sequence
  Description of Artificial Sequence: Synthetic oligonucleotide
  Sense strand starting at position 3910 of SEQ ID NO: 1560281
augggagaguucuccauua

SEQ ID NO: 1589186 - RNA, 19 nt, Artificial Sequence
  Description of Artificial Sequence: Synthetic oligonucleotide
  Antisense strand to SEQ ID NO: 1589185
uaauggagaacucucccau

SEQ ID NO: 1589187 - RNA, 19 nt, Artificial Sequence
  Description of Artificial Sequence: Synthetic oligonucleotide
  Sense strand starting at position 3980 of SEQ ID NO: 1560281
auucuaugccaggaucuuu

SEQ ID NO: 1589188 - RNA, 19 nt, Artificial Sequence
  Description of Artificial Sequence: Synthetic oligonucleotide
  Antisense strand to SEQ ID NO: 1589187
aaagauccuggcauagaau

SEQ ID NO: 1589189 - RNA, 19 nt, Artificial Sequence
  Description of Artificial Sequence: Synthetic oligonucleotide
  Sense strand starting at position 47 of SEQ ID NO: 1560282
gugccuggcccagaaagua

SEQ ID NO: 1589190 - RNA, 19 nt, Artificial Sequence
  Description of Artificial Sequence: Synthetic oligonucleotide
  Antisense strand to SEQ ID NO: 1589189
uacuuucugggccaggcac

SEQ ID NO: 1589191 - RNA, 19 nt, Artificial Sequence
  Description of Artificial Sequence: Synthetic oligonucleotide
  Sense strand starting at position 88 of SEQ ID NO: 1560282
ccuagaauuccauaggccu

SEQ ID NO: 1589192 - RNA, 19 nt, Artificial Sequence
  Description of Artificial Sequence: Synthetic oligonucleotide
  Antisense strand to SEQ ID NO: 1589191
aggccuauggaauucuagg

SEQ ID NO: 1589193 - RNA, 19 nt, Artificial Sequence
  Description of Artificial Sequence: Synthetic oligonucleotide
  Sense strand starting at position 371 of SEQ ID NO: 1560282
gagugagcuucugguuuac

SEQ ID NO: 1589194 - RNA, 19 nt, Artificial Sequence
  Description of Artificial Sequence: Synthetic oligonucleotide
  Antisense strand to SEQ ID NO: 1589193
guaaaccagaagcucacuc

SEQ ID NO: 1589195 - RNA, 19 nt, Artificial Sequence
  Description of Artificial Sequence: Synthetic oligonucleotide
  Sense strand starting at position 391 of SEQ ID NO: 1560282
cccagauugucauagcccu

SEQ ID NO: 1589196 - RNA, 19 nt, Artificial Sequence
  Description of Artificial Sequence: Synthetic oligonucleotide
  Antisense strand to SEQ ID NO: 1589195
agggcuaugacaaucuggg

SEQ ID NO: 1589197 - RNA, 19 nt, Artificial Sequence
  Description of Artificial Sequence: Synthetic oligonucleotide
  Sense strand starting at position 468 of SEQ ID NO: 1560282
aauaaaggcuuucggaaua

SEQ ID NO: 1589198 - RNA, 19 nt, Artificial Sequence
  Description of Artificial Sequence: Synthetic oligonucleotide
  Antisense strand to SEQ ID NO: 1589197
uauuccgaaagccuuuauu

SEQ ID NO: 1589199 - RNA, 19 nt, Artificial Sequence
  Description of Artificial Sequence: Synthetic oligonucleotide
  Sense strand starting at position 572 of SEQ ID NO: 1560282
uagggaagcugagguuuaa

SEQ ID NO: 1589200 - RNA, 19 nt, Artificial Sequence
  Description of Artificial Sequence: Synthetic oligonucleotide
  Antisense strand to SEQ ID NO: 1589199
uuaaaccucagcuucccua

SEQ ID NO: 1589201 - RNA, 19 nt, Artificial Sequence
  Description of Artificial Sequence: Synthetic oligonucleotide
  Sense strand starting at position 576 of SEQ ID NO: 1560282
gaagcugagguuuaagcau

SEQ ID NO: 1589202 - RNA, 19 nt, Artificial Sequence
  Description of Artificial Sequence: Synthetic oligonucleotide
  Antisense strand to SEQ ID NO: 1589201
augcuuaaaccucagcuuc

SEQ ID NO: 1589203 - RNA, 19 nt, Artificial Sequence
  Description of Artificial Sequence: Synthetic oligonucleotide
  Sense strand starting at position 584 of SEQ ID NO: 1560282
gguuuaagcaucuacagag

SEQ ID NO: 1589204 - RNA, 19 nt, Artificial Sequence
  Description of Artificial Sequence: Synthetic oligonucleotide
  Antisense strand to SEQ ID NO: 1589203
cucuguagaugcuuaaacc

SEQ ID NO: 1589205 - RNA, 19 nt, Artificial Sequence
  Description of Artificial Sequence: Synthetic oligonucleotide
  Sense strand starting at position 1287 of SEQ ID NO: 1560282
ggagauguucucuagugca

SEQ ID NO: 1589206 - RNA, 19 nt, Artificial Sequence
  Description of Artificial Sequence: Synthetic oligonucleotide
  Antisense strand to SEQ ID NO: 1589205
ugcacuagagaacaucucc

SEQ ID NO: 1589207 - RNA, 19 nt, Artificial Sequence
  Description of Artificial Sequence: Synthetic oligonucleotide
  Sense strand starting at position 1507 of SEQ ID NO: 1560282
ggaggagaaucucgcuuga

SEQ ID NO: 1589208 - RNA, 19 nt, Artificial Sequence
  Description of Artificial Sequence: Synthetic oligonucleotide
  Antisense strand to SEQ ID NO: 1589207
ucaagcgagauucuccucc

SEQ ID NO: 1589209 - RNA, 19 nt, Artificial Sequence
  Description of Artificial Sequence: Synthetic oligonucleotide
  Sense strand starting at position 1630 of SEQ ID NO: 1560282
aaggaaugagugugacuca

SEQ ID NO: 1589210 - RNA, 19 nt, Artificial Sequence
  Description of Artificial Sequence: Synthetic oligonucleotide
  Antisense strand to SEQ ID NO: 1589209
ugagucacacucauuccuu

SEQ ID NO: 1589211 - RNA, 19 nt, Artificial Sequence
  Description of Artificial Sequence: Synthetic oligonucleotide
  Sense strand starting at position 1631 of SEQ ID NO: 1560282
aggaaugagugugacucaa

SEQ ID NO: 1589212 - RNA, 19 nt, Artificial Sequence
  Description of Artificial Sequence: Synthetic oligonucleotide
  Antisense strand to SEQ ID NO: 1589211
uugagucacacucauuccu

SEQ ID NO: 1589213 - RNA, 19 nt, Artificial Sequence
  Description of Artificial Sequence: Synthetic oligonucleotide
  Sense strand starting at position 1633 of SEQ ID NO: 1560282
gaaugagugugacucaaau

SEQ ID NO: 1589214 - RNA, 19 nt, Artificial Sequence
  Description of Artificial Sequence: Synthetic oligonucleotide
  Antisense strand to SEQ ID NO: 1589213
auuugagucacacucauuc

SEQ ID NO: 1589215 - RNA, 19 nt, Artificial Sequence
  Description of Artificial Sequence: Synthetic oligonucleotide
  Sense strand starting at position 1643 of SEQ ID NO: 1560282
gacucaaauucgcaugucu

SEQ ID NO: 1589216 - RNA, 19 nt, Artificial Sequence
  Description of Artificial Sequence: Synthetic oligonucleotide
  Antisense strand to SEQ ID NO: 1589215
agacaugcgaauuugaguc

SEQ ID NO: 1589217 - RNA, 19 nt, Artificial Sequence
  Description of Artificial Sequence: Synthetic oligonucleotide
  Sense strand starting at position 1645 of SEQ ID NO: 1560282
cucaaauucgcaugucugu

SEQ ID NO: 1589218 - RNA, 19 nt, Artificial Sequence
  Description of Artificial Sequence: Synthetic oligonucleotide
  Antisense strand to SEQ ID NO: 1589217
acagacaugcgaauuugag

SEQ ID NO: 1589219 - RNA, 19 nt, Artificial Sequence
  Description of Artificial Sequence: Synthetic oligonucleotide
  Sense strand starting at position 1652 of SEQ ID NO: 1560282
ucgcaugucuguguagcua

SEQ ID NO: 1589220 - RNA, 19 nt, Artificial Sequence
  Description of Artificial Sequence: Synthetic oligonucleotide
  Antisense strand to SEQ ID NO: 1589219
uagcuacacagacaugcga

SEQ ID NO: 1589221 - RNA, 19 nt, Artificial Sequence
  Description of Artificial Sequence: Synthetic oligonucleotide
  Sense strand starting at position 1665 of SEQ ID NO: 1560282
uagcuaugucuguguagcu

SEQ ID NO: 1589222 - RNA, 19 nt, Artificial Sequence
  Description of Artificial Sequence: Synthetic oligonucleotide
  Antisense strand to SEQ ID NO: 1589221
agcuacacagacauagcua

SEQ ID NO: 1589223 - RNA, 19 nt, Artificial Sequence
  Description of Artificial Sequence: Synthetic oligonucleotide
  Sense strand starting at position 1675 of SEQ ID NO: 1560282
uguguagcucuauggauac

SEQ ID NO: 1589224 - RNA, 19 nt, Artificial Sequence
  Description of Artificial Sequence: Synthetic oligonucleotide
  Antisense strand to SEQ ID NO: 1589223
guauccauagagcuacaca

SEQ ID NO: 1589225 - RNA, 19 nt, Artificial Sequence
  Description of Artificial Sequence: Synthetic oligonucleotide
  Sense strand starting at position 1779 of SEQ ID NO: 1560282
guuccuccaucuguacaau

SEQ ID NO: 1589226 - RNA, 19 nt, Artificial Sequence
  Description of Artificial Sequence: Synthetic oligonucleotide
  Antisense strand to SEQ ID NO: 1589225
auuguacagauggaggaac

SEQ ID NO: 1589227 - RNA, 19 nt, Artificial Sequence
  Description of Artificial Sequence: Synthetic oligonucleotide
  Sense strand starting at position 1864 of SEQ ID NO: 1560282
aggccaguccucgugucau

SEQ ID NO: 1589228 - RNA, 19 nt, Artificial Sequence
  Description of Artificial Sequence: Synthetic oligonucleotide
  Antisense strand to SEQ ID NO: 1589227
augacacgaggacuggccu

SEQ ID NO: 1589229 - RNA, 19 nt, Artificial Sequence
  Description of Artificial Sequence: Synthetic oligonucleotide
  Sense strand starting at position 1876 of SEQ ID NO: 1560282
gugucauguccgucugccu

SEQ ID NO: 1589230 - RNA, 19 nt, Artificial Sequence
  Description of Artificial Sequence: Synthetic oligonucleotide
  Antisense strand to SEQ ID NO: 1589229
aggcagacggacaugacac

SEQ ID NO: 1589231 - RNA, 19 nt, Artificial Sequence
  Description of Artificial Sequence: Synthetic oligonucleotide
  Sense strand starting at position 2156 of SEQ ID NO: 1560282
ggccgcuagggagaugaau

SEQ ID NO: 1589232 - RNA, 19 nt, Artificial Sequence
  Description of Artificial Sequence: Synthetic oligonucleotide
  Antisense strand to SEQ ID NO: 1589231
auucaucucccuagcggcc

SEQ ID NO: 1589233 - RNA, 19 nt, Artificial Sequence
  Description of Artificial Sequence: Synthetic oligonucleotide
  Sense strand starting at position 2158 of SEQ ID NO: 1560282
ccgcuagggagaugaauua

SEQ ID NO: 1589234 - RNA, 19 nt, Artificial Sequence
  Description of Artificial Sequence: Synthetic oligonucleotide
  Antisense strand to SEQ ID NO: 1589233
uaauucaucucccuagcgg

SEQ ID NO: 1589235 - RNA, 19 nt, Artificial Sequence
  Description of Artificial Sequence: Synthetic oligonucleotide
  Sense strand starting at position 2168 of SEQ ID NO: 1560282
gaugaauuaggguguggag

SEQ ID NO: 1589236 - RNA, 19 nt, Artificial Sequence
  Description of Artificial Sequence: Synthetic oligonucleotide
  Antisense strand to SEQ ID NO: 1589235
cuccacacccuaauucauc

SEQ ID NO: 1589237 - RNA, 19 nt, Artificial Sequence
  Description of Artificial Sequence: Synthetic oligonucleotide
  Sense strand starting at position 3198 of SEQ ID NO: 1560282
cagagaaagugacagagau

SEQ ID NO: 1589238 - RNA, 19 nt, Artificial Sequence
  Description of Artificial Sequence: Synthetic oligonucleotide
  Antisense strand to SEQ ID NO: 1589237
aucucugucacuuucucug

SEQ ID NO: 1589239 - RNA, 19 nt, Artificial Sequence
  Description of Artificial Sequence: Synthetic oligonucleotide
  Sense strand starting at position 356 of SEQ ID NO: 1560283
aacugugaccaguggaaau

SEQ ID NO: 1589240 - RNA, 19 nt, Artificial Sequence
  Description of Artificial Sequence: Synthetic oligonucleotide
  Antisense strand to SEQ ID NO: 1589239
auuuccacuggucacaguu

SEQ ID NO: 1589241 - RNA, 19 nt, Artificial Sequence
  Description of Artificial Sequence: Synthetic oligonucleotide
  Sense strand starting at position 366 of SEQ ID NO: 1560283
aguggaaauucuccaaucu

SEQ ID NO: 1589242 - RNA, 19 nt, Artificial Sequence
  Description of Artificial Sequence: Synthetic oligonucleotide
  Antisense strand to SEQ ID NO: 1589241
agauuggagaauuuccacu

SEQ ID NO: 1589243 - RNA, 19 nt, Artificial Sequence
  Description of Artificial Sequence: Synthetic oligonucleotide
  Sense strand starting at position 433 of SEQ ID NO: 1560283
ggaaaucaauuagugaguu

SEQ ID NO: 1589244 - RNA, 19 nt, Artificial Sequence
  Description of Artificial Sequence: Synthetic oligonucleotide
  Antisense strand to SEQ ID NO: 1589243
aacucacuaauugauuucc

SEQ ID NO: 1589245 - RNA, 19 nt, Artificial Sequence
  Description of Artificial Sequence: Synthetic oligonucleotide
  Sense strand starting at position 437 of SEQ ID NO: 1560283
aucaauuagugaguugaau

SEQ ID NO: 1589246 - RNA, 19 nt, Artificial Sequence
  Description of Artificial Sequence: Synthetic oligonucleotide
  Antisense strand to SEQ ID NO: 1589245
auucaacucacuaauugau

SEQ ID NO: 1589247 - RNA, 19 nt, Artificial Sequence
  Description of Artificial Sequence: Synthetic oligonucleotide
  Sense strand starting at position 504 of SEQ ID NO: 1560283
cugagagguuaagcauguu

SEQ ID NO: 1589248 - RNA, 19 nt, Artificial Sequence
  Description of Artificial Sequence: Synthetic oligonucleotide
  Antisense strand to SEQ ID NO: 1589247
aacaugcuuaaccucucag

SEQ ID NO: 1589249 - RNA, 19 nt, Artificial Sequence
  Description of Artificial Sequence: Synthetic oligonucleotide
  Sense strand starting at position 507 of SEQ ID NO: 1560283
agagguuaagcauguuguu

SEQ ID NO: 1589250 - RNA, 19 nt, Artificial Sequence
  Description of Artificial Sequence: Synthetic oligonucleotide
  Antisense strand to SEQ ID NO: 1589249
aacaacaugcuuaaccucu

SEQ ID NO: 1589251 - RNA, 19 nt, Artificial Sequence
  Description of Artificial Sequence: Synthetic oligonucleotide
  Sense strand starting at position 637 of SEQ ID NO: 1560283
aaaugauagggcuggccau

SEQ ID NO: 1589252 - RNA, 19 nt, Artificial Sequence
  Description of Artificial Sequence: Synthetic oligonucleotide
  Antisense strand to SEQ ID NO: 1589251
auggccagcccuaucauuu

SEQ ID NO: 1589253 - RNA, 19 nt, Artificial Sequence
  Description of Artificial Sequence: Synthetic oligonucleotide
  Sense strand starting at position 705 of SEQ ID NO: 1560283
aucgcuugaccucagguau

SEQ ID NO: 1589254 - RNA, 19 nt, Artificial Sequence
  Description of Artificial Sequence: Synthetic oligonucleotide
  Antisense strand to SEQ ID NO: 1589253
auaccugaggucaagcgau

SEQ ID NO: 1589255 - RNA, 19 nt, Artificial Sequence
  Description of Artificial Sequence: Synthetic oligonucleotide
  Sense strand starting at position 716 of SEQ ID NO: 1560283
ucagguauuugagguuaca

SEQ ID NO: 1589256 - RNA, 19 nt, Artificial Sequence
  Description of Artificial Sequence: Synthetic oligonucleotide
  Antisense strand to SEQ ID NO: 1589255
uguaaccucaaauaccuga

SEQ ID NO: 1589257 - RNA, 19 nt, Artificial Sequence
  Description of Artificial Sequence: Synthetic oligonucleotide
  Sense strand starting at position 731 of SEQ ID NO: 1560283
uacagugauuuaugauuag

SEQ ID NO: 1589258 - RNA, 19 nt, Artificial Sequence
  Description of Artificial Sequence: Synthetic oligonucleotide
  Antisense strand to SEQ ID NO: 1589257
cuaaucauaaaucacugua

SEQ ID NO: 1589259 - RNA, 19 nt, Artificial Sequence
  Description of Artificial Sequence: Synthetic oligonucleotide
  Sense strand starting at position 990 of SEQ ID NO: 1560283
ccuguagucccagacagaa

SEQ ID NO: 1589260 - RNA, 19 nt, Artificial Sequence
  Description of Artificial Sequence: Synthetic oligonucleotide
  Antisense strand to SEQ ID NO: 1589259
uucugucugggacuacagg

SEQ ID NO: 1589261 - RNA, 19 nt, Artificial Sequence
  Description of Artificial Sequence: Synthetic oligonucleotide
  Sense strand starting at position 1166 of SEQ ID NO: 1560283
ugucuauugccaggagcua

SEQ ID NO: 1589262 - RNA, 19 nt, Artificial Sequence
  Description of Artificial Sequence: Synthetic oligonucleotide
  Antisense strand to SEQ ID NO: 1589261
uagcuccuggcaauagaca

SEQ ID NO: 1589263 - RNA, 19 nt, Artificial Sequence
  Description of Artificial Sequence: Synthetic oligonucleotide
  Sense strand starting at position 1216 of SEQ ID NO: 1560283
gguaccugcagugaacauu

SEQ ID NO: 1589264 - RNA, 19 nt, Artificial Sequence
  Description of Artificial Sequence: Synthetic oligonucleotide
  Antisense strand to SEQ ID NO: 1589263
aauguucacugcagguacc

SEQ ID NO: 1589265 - RNA, 19 nt, Artificial Sequence
  Description of Artificial Sequence: Synthetic oligonucleotide
  Sense strand starting at position 1277 of SEQ ID NO: 1560283
cucgaaaucuuguugaagc

SEQ ID NO: 1589266 - RNA, 19 nt, Artificial Sequence
  Description of Artificial Sequence: Synthetic oligonucleotide
  Antisense strand to SEQ ID NO: 1589265
gcuucaacaagauuucgag

SEQ ID NO: 1589267 - RNA, 19 nt, Artificial Sequence
  Description of Artificial Sequence: Synthetic oligonucleotide
  Sense strand starting at position 1299 of SEQ ID NO: 1560283
cuaccaucucucugugaag

SEQ ID NO: 1589268 - RNA, 19 nt, Artificial Sequence
  Description of Artificial Sequence: Synthetic oligonucleotide
  Antisense strand to SEQ ID NO: 1589267
cuucacagagagaugguag

SEQ ID NO: 1589269 - RNA, 19 nt, Artificial Sequence
  Description of Artificial Sequence: Synthetic oligonucleotide
  Sense strand starting at position 1301 of SEQ ID NO: 1560283
accaucucucugugaagca

SEQ ID NO: 1589270 - RNA, 19 nt, Artificial Sequence
  Description of Artificial Sequence: Synthetic oligonucleotide
  Antisense strand to SEQ ID NO: 1589269
ugcuucacagagagauggu

SEQ ID NO: 1589271 - RNA, 19 nt, Artificial Sequence
  Description of Artificial Sequence: Synthetic oligonucleotide
  Sense strand starting at position 1432 of SEQ ID NO: 1560283
ccaggaucugcaggucaga

SEQ ID NO: 1589272 - RNA, 19 nt, Artificial Sequence
  Description of Artificial Sequence: Synthetic oligonucleotide
  Antisense strand to SEQ ID NO: 1589271
ucugaccugcagauccugg

SEQ ID NO: 1589273 - RNA, 19 nt, Artificial Sequence
  Description of Artificial Sequence: Synthetic oligonucleotide
  Sense strand starting at position 1627 of SEQ ID NO: 1560283
uacugagucccggguaguu

SEQ ID NO: 1589274 - RNA, 19 nt, Artificial Sequence
  Description of Artificial Sequence: Synthetic oligonucleotide
  Antisense strand to SEQ ID NO: 1589273
aacuacccgggacucagua

SEQ ID NO: 1589275 - RNA, 19 nt, Artificial Sequence
  Description of Artificial Sequence: Synthetic oligonucleotide
  Sense strand starting at position 1799 of SEQ ID NO: 1560283
cguccuacaucugcuauaa

SEQ ID NO: 1589276 - RNA, 19 nt, Artificial Sequence
  Description of Artificial Sequence: Synthetic oligonucleotide
  Antisense strand to SEQ ID NO: 1589275
uuauagcagauguaggacg

SEQ ID NO: 1589277 - RNA, 19 nt, Artificial Sequence
  Description of Artificial Sequence: Synthetic oligonucleotide
  Sense strand starting at position 1945 of SEQ ID NO: 1560283
cggaguaacgugcccguua

SEQ ID NO: 1589278 - RNA, 19 nt, Artificial Sequence
  Description of Artificial Sequence: Synthetic oligonucleotide
  Antisense strand to SEQ ID NO: 1589277
uaacgggcacguuacuccg

SEQ ID NO: 1589279 - RNA, 19 nt, Artificial Sequence
  Description of Artificial Sequence: Synthetic oligonucleotide
  Sense strand starting at position 2068 of SEQ ID NO: 1560283
ucgauuuccgguugccuua

SEQ ID NO: 1589280 - RNA, 19 nt, Artificial Sequence
  Description of Artificial Sequence: Synthetic oligonucleotide
  Antisense strand to SEQ ID NO: 1589279
uaaggcaaccggaaaucga

SEQ ID NO: 1589281 - RNA, 19 nt, Artificial Sequence
  Description of Artificial Sequence: Synthetic oligonucleotide
  Sense strand starting at position 2286 of SEQ ID NO: 1560283
aacagcucccgcuaaaguu

SEQ ID NO: 1589282 - RNA, 19 nt, Artificial Sequence
  Description of Artificial Sequence: Synthetic oligonucleotide
  Antisense strand to SEQ ID NO: 1589281
aacuuuagcgggagcuguu

SEQ ID NO: 1589283 - RNA, 19 nt, Artificial Sequence
  Description of Artificial Sequence: Synthetic oligonucleotide
  Sense strand starting at position 2374 of SEQ ID NO: 1560283
cagagcuuguaaucaugca

SEQ ID NO: 1589284 - RNA, 19 nt, Artificial Sequence
  Description of Artificial Sequence: Synthetic oligonucleotide
  Antisense strand to SEQ ID NO: 1589283
ugcaugauuacaagcucug

SEQ ID NO: 1589285 - RNA, 19 nt, Artificial Sequence
  Description of Artificial Sequence: Synthetic oligonucleotide
  Sense strand starting at position 2381 of SEQ ID NO: 1560283
uguaaucaugcauguauau

SEQ ID NO: 1589286 - RNA, 19 nt, Artificial Sequence
  Description of Artificial Sequence: Synthetic oligonucleotide
  Antisense strand to SEQ ID NO: 1589285
auauacaugcaugauuaca

SEQ ID NO: 1589287 - RNA, 19 nt, Artificial Sequence
  Description of Artificial Sequence: Synthetic oligonucleotide
  Sense strand starting at position 2436 of SEQ ID NO: 1560283
cugugaguuuacucaggua

SEQ ID NO: 1589288 - RNA, 19 nt, Artificial Sequence
  Description of Artificial Sequence: Synthetic oligonucleotide
  Antisense strand to SEQ ID NO: 1589287
uaccugaguaaacucacag

SEQ ID NO: 1589289 - RNA, 19 nt, Artificial Sequence
  Description of Artificial Sequence: Synthetic oligonucleotide
  Sense strand starting at position 2478 of SEQ ID NO: 1560283
acauuaagcgcugacugua

SEQ ID NO: 1589290 - RNA, 19 nt, Artificial Sequence
  Description of Artificial Sequence: Synthetic oligonucleotide
  Antisense strand to SEQ ID NO: 1589289
uacagucagcgcuuaaugu

SEQ ID NO: 1589291 - RNA, 19 nt, Artificial Sequence
  Description of Artificial Sequence: Synthetic oligonucleotide
  Sense strand starting at position 2483 of SEQ ID NO: 1560283
aagcgcugacuguauaaua

SEQ ID NO: 1589292 - RNA, 19 nt, Artificial Sequence
  Description of Artificial Sequence: Synthetic oligonucleotide
  Antisense strand to SEQ ID NO: 1589291
uauuauacagucagcgcuu

SEQ ID NO: 1589293 - RNA, 19 nt, Artificial Sequence
  Description of Artificial Sequence: Synthetic oligonucleotide
  Sense strand starting at position 2519 of SEQ ID NO: 1560283
gucguacuauuuccuacua

SEQ ID NO: 1589294 - RNA, 19 nt, Artificial Sequence
  Description of Artificial Sequence: Synthetic oligonucleotide
  Antisense strand to SEQ ID NO: 1589293
uaguaggaaauaguacgac

SEQ ID NO: 1589295 - RNA, 19 nt, Artificial Sequence
  Description of Artificial Sequence: Synthetic oligonucleotide
  Sense strand starting at position 2520 of SEQ ID NO: 1560283
ucguacuauuuccuacuau

SEQ ID NO: 1589296 - RNA, 19 nt, Artificial Sequence
  Description of Artificial Sequence: Synthetic oligonucleotide
  Antisense strand to SEQ ID NO: 1589295
auaguaggaaauaguacga

SEQ ID NO: 1589297 - RNA, 19 nt, Artificial Sequence
  Description of Artificial Sequence: Synthetic oligonucleotide
  Sense strand starting at position 2521 of SEQ ID NO: 1560283
cguacuauuuccuacuaua

SEQ ID NO: 1589298 - RNA, 19 nt, Artificial Sequence
  Description of Artificial Sequence: Synthetic oligonucleotide
  Antisense strand to SEQ ID NO: 1589297
uauaguaggaaauaguacg

SEQ ID NO: 1589299 - RNA, 19 nt, Artificial Sequence
  Description of Artificial Sequence: Synthetic oligonucleotide
  Sense strand starting at position 2800 of SEQ ID NO: 1560283
uguaauccuagcgggaaga

SEQ ID NO: 1589300 - RNA, 19 nt, Artificial Sequence
  Description of Artificial Sequence: Synthetic oligonucleotide
  Antisense strand to SEQ ID NO: 1589299
ucuucccgcuaggauuaca

SEQ ID NO: 1589301 - RNA, 19 nt, Artificial Sequence
  Description of Artificial Sequence: Synthetic oligonucleotide
  Sense strand starting at position 2965 of SEQ ID NO: 1560283
aaccgaaauucccuuggga

SEQ ID NO: 1589302 - RNA, 19 nt, Artificial Sequence
  Description of Artificial Sequence: Synthetic oligonucleotide
  Antisense strand to SEQ ID NO: 1589301
ucccaagggaauuucgguu

SEQ ID NO: 1589303 - RNA, 19 nt, Artificial Sequence
  Description of Artificial Sequence: Synthetic oligonucleotide
  Sense strand starting at position 2967 of SEQ ID NO: 1560283
ccgaaauucccuugggaaa

SEQ ID NO: 1589304 - RNA, 19 nt, Artificial Sequence
  Description of Artificial Sequence: Synthetic oligonucleotide
  Antisense strand to SEQ ID NO: 1589303
uuucccaagggaauuucgg

SEQ ID NO: 1589305 - RNA, 19 nt, Artificial Sequence
  Description of Artificial Sequence: Synthetic oligonucleotide
  Sense strand starting at position 3383 of SEQ ID NO: 1560283
aacagaugucucugggcca

SEQ ID NO: 1589306 - RNA, 19 nt, Artificial Sequence
  Description of Artificial Sequence: Synthetic oligonucleotide
  Antisense strand to SEQ ID NO: 1589305
uggcccagagacaucuguu

SEQ ID NO: 1589307 - RNA, 19 nt, Artificial Sequence
  Description of Artificial Sequence: Synthetic oligonucleotide
  Sense strand starting at position 3413 of SEQ ID NO: 1560283
ggaaguaucuuuccuuaau

SEQ ID NO: 1589308 - RNA, 19 nt, Artificial Sequence
  Description of Artificial Sequence: Synthetic oligonucleotide
  Antisense strand to SEQ ID NO: 1589307
auuaaggaaagauacuucc

SEQ ID NO: 1589309 - RNA, 19 nt, Artificial Sequence
  Description of Artificial Sequence: Synthetic oligonucleotide
  Sense strand starting at position 3505 of SEQ ID NO: 1560283
ucaacaguagacuguuuau

SEQ ID NO: 1589310 - RNA, 19 nt, Artificial Sequence
  Description of Artificial Sequence: Synthetic oligonucleotide
  Antisense strand to SEQ ID NO: 1589309
auaaacagucuacuguuga

SEQ ID NO: 1589311 - RNA, 19 nt, Artificial Sequence
  Description of Artificial Sequence: Synthetic oligonucleotide
  Sense strand starting at position 3599 of SEQ ID NO: 1560283
uuaguaugauccuuuguuc

SEQ ID NO: 1589312 - RNA, 19 nt, Artificial Sequence
  Description of Artificial Sequence: Synthetic oligonucleotide
  Antisense strand to SEQ ID NO: 1589311
gaacaaaggaucauacuaa

SEQ ID NO: 1589313 - RNA, 19 nt, Artificial Sequence
  Description of Artificial Sequence: Synthetic oligonucleotide
  Sense strand starting at position 3602 of SEQ ID NO: 1560283
guaugauccuuuguuccuu

SEQ ID NO: 1589314 - RNA, 19 nt, Artificial Sequence
  Description of Artificial Sequence: Synthetic oligonucleotide
  Antisense strand to SEQ ID NO: 1589313
aaggaacaaaggaucauac

SEQ ID NO: 1589315 - RNA, 19 nt, Artificial Sequence
  Description of Artificial Sequence: Synthetic oligonucleotide
  Sense strand starting at position 3614 of SEQ ID NO: 1560283
guuccuuugguguaagaaa

SEQ ID NO: 1589316 - RNA, 19 nt, Artificial Sequence
  Description of Artificial Sequence: Synthetic oligonucleotide
  Antisense strand to SEQ ID NO: 1589315
uuucuuacaccaaaggaac

SEQ ID NO: 1589317 - RNA, 19 nt, Artificial Sequence
  Description of Artificial Sequence: Synthetic oligonucleotide
  Sense strand starting at position 3622 of SEQ ID NO: 1560283
gguguaagaaaguauagcu

SEQ ID NO: 1589318 - RNA, 19 nt, Artificial Sequence
  Description of Artificial Sequence: Synthetic oligonucleotide
  Antisense strand to SEQ ID NO: 1589317
agcuauacuuucuuacacc

SEQ ID NO: 1589319 - RNA, 19 nt, Artificial Sequence
  Description of Artificial Sequence: Synthetic oligonucleotide
  Sense strand starting at position 175 of SEQ ID NO: 1560284
auuagugauuucugccuaa

SEQ ID NO: 1589320 - RNA, 19 nt, Artificial Sequence
  Description of Artificial Sequence: Synthetic oligonucleotide
  Antisense strand to SEQ ID NO: 1589319
uuaggcagaaaucacuaau

SEQ ID NO: 1589321 - RNA, 19 nt, Artificial Sequence
  Description of Artificial Sequence: Synthetic oligonucleotide
  Sense strand starting at position 423 of SEQ ID NO: 1560284
ccuuuaaggucaguaguua

SEQ ID NO: 1589322 - RNA, 19 nt, Artificial Sequence
  Description of Artificial Sequence: Synthetic oligonucleotide
  Antisense strand to SEQ ID NO: 1589321
uaacuacugaccuuaaagg

SEQ ID NO: 1589323 - RNA, 19 nt, Artificial Sequence
  Description of Artificial Sequence: Synthetic oligonucleotide
  Sense strand starting at position 563 of SEQ ID NO: 1560284
auccuagugcuuuggaagu

SEQ ID NO: 1589324 - RNA, 19 nt, Artificial Sequence
  Description of Artificial Sequence: Synthetic oligonucleotide
  Antisense strand to SEQ ID NO: 1589323
acuuccaaagcacuaggau

SEQ ID NO: 1589325 - RNA, 19 nt, Artificial Sequence
  Description of Artificial Sequence: Synthetic oligonucleotide
  Sense strand starting at position 904 of SEQ ID NO: 1560284
gcuacacuguuucugaaag

SEQ ID NO: 1589326 - RNA, 19 nt, Artificial Sequence
  Description of Artificial Sequence: Synthetic oligonucleotide
  Antisense strand to SEQ ID NO: 1589325
cuuucagaaacaguguagc

SEQ ID NO: 1589327 - RNA, 19 nt, Artificial Sequence
  Description of Artificial Sequence: Synthetic oligonucleotide
  Sense strand starting at position 905 of SEQ ID NO: 1560284
cuacacuguuucugaaaga

SEQ ID NO: 1589328 - RNA, 19 nt, Artificial Sequence
  Description of Artificial Sequence: Synthetic oligonucleotide
  Antisense strand to SEQ ID NO: 1589327
ucuuucagaaacaguguag

SEQ ID NO: 1589329 - RNA, 19 nt, Artificial Sequence
  Description of Artificial Sequence: Synthetic oligonucleotide
  Sense strand starting at position 975 of SEQ ID NO: 1560284
agagcuuucuuccuccaga

SEQ ID NO: 1589330 - RNA, 19 nt, Artificial Sequence
  Description of Artificial Sequence: Synthetic oligonucleotide
  Antisense strand to SEQ ID NO: 1589329
ucuggaggaagaaagcucu

SEQ ID NO: 1589331 - RNA, 19 nt, Artificial Sequence
  Description of Artificial Sequence: Synthetic oligonucleotide
  Sense strand starting at position 1022 of SEQ ID NO: 1560284
aaugaaaggucuucuuuga

SEQ ID NO: 1589332 - RNA, 19 nt, Artificial Sequence
  Description of Artificial Sequence: Synthetic oligonucleotide
  Antisense strand to SEQ ID NO: 1589331
ucaaagaagaccuuucauu

SEQ ID NO: 1589333 - RNA, 19 nt, Artificial Sequence
  Description of Artificial Sequence: Synthetic oligonucleotide
  Sense strand starting at position 1309 of SEQ ID NO: 1560284
agcgaaauucccgacacca

SEQ ID NO: 1589334 - RNA, 19 nt, Artificial Sequence
  Description of Artificial Sequence: Synthetic oligonucleotide
  Antisense strand to SEQ ID NO: 1589333
uggugucgggaauuucgcu

SEQ ID NO: 1589335 - RNA, 19 nt, Artificial Sequence
  Description of Artificial Sequence: Synthetic oligonucleotide
  Sense strand starting at position 1311 of SEQ ID NO: 1560284
cgaaauucccgacaccauu

SEQ ID NO: 1589336 - RNA, 19 nt, Artificial Sequence
  Description of Artificial Sequence: Synthetic oligonucleotide
  Antisense strand to SEQ ID NO: 1589335
aauggugucgggaauuucg

SEQ ID NO: 1589337 - RNA, 19 nt, Artificial Sequence
  Description of Artificial Sequence: Synthetic oligonucleotide
  Sense strand starting at position 1339 of SEQ ID NO: 1560284
uuaguaacuuaucaguauc

SEQ ID NO: 1589338 - RNA, 19 nt, Artificial Sequence
  Description of Artificial Sequence: Synthetic oligonucleotide
  Antisense strand to SEQ ID NO: 1589337
gauacugauaaguuacuaa

SEQ ID NO: 1589339 - RNA, 19 nt, Artificial Sequence
  Description of Artificial Sequence: Synthetic oligonucleotide
  Sense strand starting at position 1342 of SEQ ID NO: 1560284
guaacuuaucaguaucuga

SEQ ID NO: 1589340 - RNA, 19 nt, Artificial Sequence
  Description of Artificial Sequence: Synthetic oligonucleotide
  Antisense strand to SEQ ID NO: 1589339
ucagauacugauaaguuac

SEQ ID NO: 1589341 - RNA, 19 nt, Artificial Sequence
  Description of Artificial Sequence: Synthetic oligonucleotide
  Sense strand starting at position 1359 of SEQ ID NO: 1560284
gaaaucaccuguuucguuu

SEQ ID NO: 1589342 - RNA, 19 nt, Artificial Sequence
  Description of Artificial Sequence: Synthetic oligonucleotide
  Antisense strand to SEQ ID NO: 1589341
aaacgaaacaggugauuuc

SEQ ID NO: 1589343 - RNA, 19 nt, Artificial Sequence
  Description of Artificial Sequence: Synthetic oligonucleotide
  Sense strand starting at position 1363 of SEQ ID NO: 1560284
ucaccuguuucguuuauuu

SEQ ID NO: 1589344 - RNA, 19 nt, Artificial Sequence
  Description of Artificial Sequence: Synthetic oligonucleotide
  Antisense strand to SEQ ID NO: 1589343
aaauaaacgaaacagguga

SEQ ID NO: 1589345 - RNA, 19 nt, Artificial Sequence
  Description of Artificial Sequence: Synthetic oligonucleotide
  Sense strand starting at position 1367 of SEQ ID NO: 1560284
cuguuucguuuauuucuaa

SEQ ID NO: 1589346 - RNA, 19 nt, Artificial Sequence
  Description of Artificial Sequence: Synthetic oligonucleotide
  Antisense strand to SEQ ID NO: 1589345
uuagaaauaaacgaaacag

SEQ ID NO: 1589347 - RNA, 19 nt, Artificial Sequence
  Description of Artificial Sequence: Synthetic oligonucleotide
  Sense strand starting at position 1460 of SEQ ID NO: 1560284
aaggacagugccugguaua

SEQ ID NO: 1589348 - RNA, 19 nt, Artificial Sequence
  Description of Artificial Sequence: Synthetic oligonucleotide
  Antisense strand to SEQ ID NO: 1589347
uauaccaggcacuguccuu

SEQ ID NO: 1589349 - RNA, 19 nt, Artificial Sequence
  Description of Artificial Sequence: Synthetic oligonucleotide
  Sense strand starting at position 1463 of SEQ ID NO: 1560284
gacagugccugguauauga

SEQ ID NO: 1589350 - RNA, 19 nt, Artificial Sequence
  Description of Artificial Sequence: Synthetic oligonucleotide
  Antisense strand to SEQ ID NO: 1589349
ucauauaccaggcacuguc

SEQ ID NO: 1589351 - RNA, 19 nt, Artificial Sequence
  Description of Artificial Sequence: Synthetic oligonucleotide
  Sense strand starting at position 1467 of SEQ ID NO: 1560284
gugccugguauaugacaga

SEQ ID NO: 1589352 - RNA, 19 nt, Artificial Sequence
  Description of Artificial Sequence: Synthetic oligonucleotide
  Antisense strand to SEQ ID NO: 1589351
ucugucauauaccaggcac

SEQ ID NO: 1589353 - RNA, 19 nt, Artificial Sequence
  Description of Artificial Sequence: Synthetic oligonucleotide
  Sense strand starting at position 1556 of SEQ ID NO: 1560284
agguaugguguacguacaa

SEQ ID NO: 1589354 - RNA, 19 nt, Artificial Sequence
  Description of Artificial Sequence: Synthetic oligonucleotide
  Antisense strand to SEQ ID NO: 1589353
uuguacguacaccauaccu

SEQ ID NO: 1589355 - RNA, 19 nt, Artificial Sequence
  Description of Artificial Sequence: Synthetic oligonucleotide
  Sense strand starting at position 1593 of SEQ ID NO: 1560284
ccaggauucugggucucuu

SEQ ID NO: 1589356 - RNA, 19 nt, Artificial Sequence
  Description of Artificial Sequence: Synthetic oligonucleotide
  Antisense strand to SEQ ID NO: 1589355
aagagacccagaauccugg

SEQ ID NO: 1589357 - RNA, 19 nt, Artificial Sequence
  Description of Artificial Sequence: Synthetic oligonucleotide
  Sense strand starting at position 1946 of SEQ ID NO: 1560284
gccauauuggcccagagag

SEQ ID NO: 1589358 - RNA, 19 nt, Artificial Sequence
  Description of Artificial Sequence: Synthetic oligonucleotide
  Antisense strand to SEQ ID NO: 1589357
cucucugggccaauauggc

SEQ ID NO: 1589359 - RNA, 19 nt, Artificial Sequence
  Description of Artificial Sequence: Synthetic oligonucleotide
  Sense strand starting at position 1991 of SEQ ID NO: 1560284
guagcaaaucaagaaagcu

SEQ ID NO: 1589360 - RNA, 19 nt, Artificial Sequence
  Description of Artificial Sequence: Synthetic oligonucleotide
  Antisense strand to SEQ ID NO: 1589359
agcuuucuugauuugcuac

SEQ ID NO: 1589361 - RNA, 19 nt, Artificial Sequence
  Description of Artificial Sequence: Synthetic oligonucleotide
  Sense strand starting at position 2000 of SEQ ID NO: 1560284
caagaaagcugguguaaua

SEQ ID NO: 1589362 - RNA, 19 nt, Artificial Sequence
  Description of Artificial Sequence: Synthetic oligonucleotide
  Antisense strand to SEQ ID NO: 1589361
uauuacaccagcuuucuug

SEQ ID NO: 1589363 - RNA, 19 nt, Artificial Sequence
  Description of Artificial Sequence: Synthetic oligonucleotide
  Sense strand starting at position 2155 of SEQ ID NO: 1560284
ggacuugggagucauaguc

SEQ ID NO: 1589364 - RNA, 19 nt, Artificial Sequence
  Description of Artificial Sequence: Synthetic oligonucleotide
  Antisense strand to SEQ ID NO: 1589363
gacuaugacucccaagucc

SEQ ID NO: 1589365 - RNA, 19 nt, Artificial Sequence
  Description of Artificial Sequence: Synthetic oligonucleotide
  Sense strand starting at position 2165 of SEQ ID NO: 1560284
gucauagucuaugaaucca

SEQ ID NO: 1589366 - RNA, 19 nt, Artificial Sequence
  Description of Artificial Sequence: Synthetic oligonucleotide
  Antisense strand to SEQ ID NO: 1589365
uggauucauagacuaugac

SEQ ID NO: 1589367 - RNA, 19 nt, Artificial Sequence
  Description of Artificial Sequence: Synthetic oligonucleotide
  Sense strand starting at position 2919 of SEQ ID NO: 1560284
guugcagcgagccgauaua

SEQ ID NO: 1589368 - RNA, 19 nt, Artificial Sequence
  Description of Artificial Sequence: Synthetic oligonucleotide
  Antisense strand to SEQ ID NO: 1589367
uauaucggcucgcugcaac

SEQ ID NO: 1589369 - RNA, 19 nt, Artificial Sequence
  Description of Artificial Sequence: Synthetic oligonucleotide
  Sense strand starting at position 3004 of SEQ ID NO: 1560284
gccucagugagguguccuu

SEQ ID NO: 1589370 - RNA, 19 nt, Artificial Sequence
  Description of Artificial Sequence: Synthetic oligonucleotide
  Antisense strand to SEQ ID NO: 1589369
aaggacaccucacugaggc

SEQ ID NO: 1589371 - RNA, 19 nt, Artificial Sequence
  Description of Artificial Sequence: Synthetic oligonucleotide
  Sense strand starting at position 3011 of SEQ ID NO: 1560284
ugagguguccuuugaguaa

SEQ ID NO: 1589372 - RNA, 19 nt, Artificial Sequence
  Description of Artificial Sequence: Synthetic oligonucleotide
  Antisense strand to SEQ ID NO: 1589371
uuacucaaaggacaccuca

SEQ ID NO: 1589373 - RNA, 19 nt, Artificial Sequence
  Description of Artificial Sequence: Synthetic oligonucleotide
  Sense strand starting at position 3046 of SEQ ID NO: 1560284
gugagccaucuggauaucu

SEQ ID NO: 1589374 - RNA, 19 nt, Artificial Sequence
  Description of Artificial Sequence: Synthetic oligonucleotide
  Antisense strand to SEQ ID NO: 1589373
agauauccagauggcucac

SEQ ID NO: 1589375 - RNA, 19 nt, Artificial Sequence
  Description of Artificial Sequence: Synthetic oligonucleotide
  Sense strand starting at position 3099 of SEQ ID NO: 1560284
gacucuguguggucggagu

SEQ ID NO: 1589376 - RNA, 19 nt, Artificial Sequence
  Description of Artificial Sequence: Synthetic oligonucleotide
  Antisense strand to SEQ ID NO: 1589375
acuccgaccacacagaguc

SEQ ID NO: 1589377 - RNA, 19 nt, Artificial Sequence
  Description of Artificial Sequence: Synthetic oligonucleotide
  Sense strand starting at position 3115 of SEQ ID NO: 1560284
aguggagucuuuggaggaa

SEQ ID NO: 1589378 - RNA, 19 nt, Artificial Sequence
  Description of Artificial Sequence: Synthetic oligonucleotide
  Antisense strand to SEQ ID NO: 1589377
uuccuccaaagacuccacu

SEQ ID NO: 1589379 - RNA, 19 nt, Artificial Sequence
  Description of Artificial Sequence: Synthetic oligonucleotide
  Sense strand starting at position 3145 of SEQ ID NO: 1560284
cgaggugagauugaguaau

SEQ ID NO: 1589380 - RNA, 19 nt, Artificial Sequence
  Description of Artificial Sequence: Synthetic oligonucleotide
  Antisense strand to SEQ ID NO: 1589379
auuacucaaucucaccucg

SEQ ID NO: 1589381 - RNA, 19 nt, Artificial Sequence
  Description of Artificial Sequence: Synthetic oligonucleotide
  Sense strand starting at position 3195 of SEQ ID NO: 1560284
gauuuaggcuguuaauaac

SEQ ID NO: 1589382 - RNA, 19 nt, Artificial Sequence
  Description of Artificial Sequence: Synthetic oligonucleotide
  Antisense strand to SEQ ID NO: 1589381
guuauuaacagccuaaauc

SEQ ID NO: 1589383 - RNA, 19 nt, Artificial Sequence
  Description of Artificial Sequence: Synthetic oligonucleotide
  Sense strand starting at position 3198 of SEQ ID NO: 1560284
uuaggcuguuaauaacuaa

SEQ ID NO: 1589384 - RNA, 19 nt, Artificial Sequence
  Description of Artificial Sequence: Synthetic oligonucleotide
  Antisense strand to SEQ ID NO: 1589383
uuaguuauuaacagccuaa

SEQ ID NO: 1589385 - RNA, 19 nt, Artificial Sequence
  Description of Artificial Sequence: Synthetic oligonucleotide
  Sense strand starting at position 3205 of SEQ ID NO: 1560284
guuaauaacuaagguggau

SEQ ID NO: 1589386 - RNA, 19 nt, Artificial Sequence
  Description of Artificial Sequence: Synthetic oligonucleotide
  Antisense strand to SEQ ID NO: 1589385
auccaccuuaguuauuaac

SEQ ID NO: 1589387 - RNA, 19 nt, Artificial Sequence
  Description of Artificial Sequence: Synthetic oligonucleotide
  Sense strand starting at position 3238 of SEQ ID NO: 1560284
ggcuauuggcaauaacagu

SEQ ID NO: 1589388 - RNA, 19 nt, Artificial Sequence
  Description of Artificial Sequence: Synthetic oligonucleotide
  Antisense strand to SEQ ID NO: 1589387
acuguuauugccaauagcc

SEQ ID NO: 1589389 - RNA, 19 nt, Artificial Sequence
  Description of Artificial Sequence: Synthetic oligonucleotide
  Sense strand starting at position 3413 of SEQ ID NO: 1560284
gaacucuugugauugggca

SEQ ID NO: 1589390 - RNA, 19 nt, Artificial Sequence
  Description of Artificial Sequence: Synthetic oligonucleotide
  Antisense strand to SEQ ID NO: 1589389
ugcccaaucacaagaguuc

SEQ ID NO: 1589391 - RNA, 19 nt, Artificial Sequence
  Description of Artificial Sequence: Synthetic oligonucleotide
  Sense strand starting at position 3414 of SEQ ID NO: 1560284
aacucuugugauugggcaa

SEQ ID NO: 1589392 - RNA, 19 nt, Artificial Sequence
  Description of Artificial Sequence: Synthetic oligonucleotide
  Antisense strand to SEQ ID NO: 1589391
uugcccaaucacaagaguu

SEQ ID NO: 1589393 - RNA, 19 nt, Artificial Sequence
  Description of Artificial Sequence: Synthetic oligonucleotide
  Sense strand starting at position 3415 of SEQ ID NO: 1560284
acucuugugauugggcaau

SEQ ID NO: 1589394 - RNA, 19 nt, Artificial Sequence
  Description of Artificial Sequence: Synthetic oligonucleotide
  Antisense strand to SEQ ID NO: 1589393
auugcccaaucacaagagu

SEQ ID NO: 1589395 - RNA, 19 nt, Artificial Sequence
  Description of Artificial Sequence: Synthetic oligonucleotide
  Sense strand starting at position 3417 of SEQ ID NO: 1560284
ucuugugauugggcaaucu

SEQ ID NO: 1589396 - RNA, 19 nt, Artificial Sequence
  Description of Artificial Sequence: Synthetic oligonucleotide
  Antisense strand to SEQ ID NO: 1589395
agauugcccaaucacaaga

SEQ ID NO: 1589397 - RNA, 19 nt, Artificial Sequence
  Description of Artificial Sequence: Synthetic oligonucleotide
  Sense strand starting at position 3612 of SEQ ID NO: 1560284
ggcuguggccuucagaguu

SEQ ID NO: 1589398 - RNA, 19 nt, Artificial Sequence
  Description of Artificial Sequence: Synthetic oligonucleotide
  Antisense strand to SEQ ID NO: 1589397
aacucugaaggccacagcc

SEQ ID NO: 1589399 - RNA, 19 nt, Artificial Sequence
  Description of Artificial Sequence: Synthetic oligonucleotide
  Sense strand starting at position 482 of SEQ ID NO: 1560285
auuagugauuucugccuaa

SEQ ID NO: 1589400 - RNA, 19 nt, Artificial Sequence
  Description of Artificial Sequence: Synthetic oligonucleotide
  Antisense strand to SEQ ID NO: 1589399
uuaggcagaaaucacuaau

SEQ ID NO: 1589401 - RNA, 19 nt, Artificial Sequence
  Description of Artificial Sequence: Synthetic oligonucleotide
  Sense strand starting at position 730 of SEQ ID NO: 1560285
ccuuuaaggucaguaguua

SEQ ID NO: 1589402 - RNA, 19 nt, Artificial Sequence
  Description of Artificial Sequence: Synthetic oligonucleotide
  Antisense strand to SEQ ID NO: 1589401
uaacuacugaccuuaaagg

SEQ ID NO: 1589403 - RNA, 19 nt, Artificial Sequence
  Description of Artificial Sequence: Synthetic oligonucleotide
  Sense strand starting at position 870 of SEQ ID NO: 1560285
auccuagugcuuuggaagu

SEQ ID NO: 1589404 - RNA, 19 nt, Artificial Sequence
  Description of Artificial Sequence: Synthetic oligonucleotide
  Antisense strand to SEQ ID NO: 1589403
acuuccaaagcacuaggau

SEQ ID NO: 1589405 - RNA, 19 nt, Artificial Sequence
  Description of Artificial Sequence: Synthetic oligonucleotide
  Sense strand starting at position 1211 of SEQ ID NO: 1560285
gcuacacuguuucugaaag

SEQ ID NO: 1589406 - RNA, 19 nt, Artificial Sequence
  Description of Artificial Sequence: Synthetic oligonucleotide
  Antisense strand to SEQ ID NO: 1589405
cuuucagaaacaguguagc

SEQ ID NO: 1589407 - RNA, 19 nt, Artificial Sequence
  Description of Artificial Sequence: Synthetic oligonucleotide
  Sense strand starting at position 1212 of SEQ ID NO: 1560285
cuacacuguuucugaaaga

SEQ ID NO: 1589408 - RNA, 19 nt, Artificial Sequence
  Description of Artificial Sequence: Synthetic oligonucleotide
  Antisense strand to SEQ ID NO: 1589407
ucuuucagaaacaguguag

SEQ ID NO: 1589409 - RNA, 19 nt, Artificial Sequence
  Description of Artificial Sequence: Synthetic oligonucleotide
  Sense strand starting at position 1282 of SEQ ID NO: 1560285
agagcuuucuuccuccaga

SEQ ID NO: 1589410 - RNA, 19 nt, Artificial Sequence
  Description of Artificial Sequence: Synthetic oligonucleotide
  Antisense strand to SEQ ID NO: 1589409
ucuggaggaagaaagcucu

SEQ ID NO: 1589411 - RNA, 19 nt, Artificial Sequence
  Description of Artificial Sequence: Synthetic oligonucleotide
  Sense strand starting at position 1329 of SEQ ID NO: 1560285
aaugaaaggucuucuuuga

SEQ ID NO: 1589412 - RNA, 19 nt, Artificial Sequence
  Description of Artificial Sequence: Synthetic oligonucleotide
  Antisense strand to SEQ ID NO: 1589411
ucaaagaagaccuuucauu

SEQ ID NO: 1589413 - RNA, 19 nt, Artificial Sequence
  Description of Artificial Sequence: Synthetic oligonucleotide
  Sense strand starting at position 1616 of SEQ ID NO: 1560285
agcgaaauucccgacacca

SEQ ID NO: 1589414 - RNA, 19 nt, Artificial Sequence
  Description of Artificial Sequence: Synthetic oligonucleotide
  Antisense strand to SEQ ID NO: 1589413
uggugucgggaauuucgcu

SEQ ID NO: 1589415 - RNA, 19 nt, Artificial Sequence
  Description of Artificial Sequence: Synthetic oligonucleotide
  Sense strand starting at position 1618 of SEQ ID NO: 1560285
cgaaauucccgacaccauu

SEQ ID NO: 1589416 - RNA, 19 nt, Artificial Sequence
  Description of Artificial Sequence: Synthetic oligonucleotide
  Antisense strand to SEQ ID NO: 1589415
aauggugucgggaauuucg

SEQ ID NO: 1589417 - RNA, 19 nt, Artificial Sequence
  Description of Artificial Sequence: Synthetic oligonucleotide
  Sense strand starting at position 1646 of SEQ ID NO: 1560285
uuaguaacuuaucaguauc

SEQ ID NO: 1589418 - RNA, 19 nt, Artificial Sequence
  Description of Artificial Sequence: Synthetic oligonucleotide
  Antisense strand to SEQ ID NO: 1589417
gauacugauaaguuacuaa

SEQ ID NO: 1589419 - RNA, 19 nt, Artificial Sequence
  Description of Artificial Sequence: Synthetic oligonucleotide
  Sense strand starting at position 1649 of SEQ ID NO: 1560285
guaacuuaucaguaucuga

SEQ ID NO: 1589420 - RNA, 19 nt, Artificial Sequence
  Description of Artificial Sequence: Synthetic oligonucleotide
  Antisense strand to SEQ ID NO: 1589419
ucagauacugauaaguuac

SEQ ID NO: 1589421 - RNA, 19 nt, Artificial Sequence
  Description of Artificial Sequence: Synthetic oligonucleotide
  Sense strand starting at position 1666 of SEQ ID NO: 1560285
gaaaucaccuguuucguuu

SEQ ID NO: 1589422 - RNA, 19 nt, Artificial Sequence
  Description of Artificial Sequence: Synthetic oligonucleotide
  Antisense strand to SEQ ID NO: 1589421
aaacgaaacaggugauuuc

SEQ ID NO: 1589423 - RNA, 19 nt, Artificial Sequence
  Description of Artificial Sequence: Synthetic oligonucleotide
  Sense strand starting at position 1670 of SEQ ID NO: 1560285
ucaccuguuucguuuauuu

SEQ ID NO: 1589424 - RNA, 19 nt, Artificial Sequence
  Description of Artificial Sequence: Synthetic oligonucleotide
  Antisense strand to SEQ ID NO: 1589423
aaauaaacgaaacagguga

SEQ ID NO: 1589425 - RNA, 19 nt, Artificial Sequence
  Description of Artificial Sequence: Synthetic oligonucleotide
  Sense strand starting at position 1674 of SEQ ID NO: 1560285
cuguuucguuuauuucuaa

SEQ ID NO: 1589426 - RNA, 19 nt, Artificial Sequence
  Description of Artificial Sequence: Synthetic oligonucleotide
  Antisense strand to SEQ ID NO: 1589425
uuagaaauaaacgaaacag

SEQ ID NO: 1589427 - RNA, 19 nt, Artificial Sequence
  Description of Artificial Sequence: Synthetic oligonucleotide
  Sense strand starting at position 1767 of SEQ ID NO: 1560285
aaggacagugccugguaua

SEQ ID NO: 1589428 - RNA, 19 nt, Artificial Sequence
  Description of Artificial Sequence: Synthetic oligonucleotide
  Antisense strand to SEQ ID NO: 1589427
uauaccaggcacuguccuu

SEQ ID NO: 1589429 - RNA, 19 nt, Artificial Sequence
  Description of Artificial Sequence: Synthetic oligonucleotide
  Sense strand starting at position 1770 of SEQ ID NO: 1560285
gacagugccugguauauga

SEQ ID NO: 1589430 - RNA, 19 nt, Artificial Sequence
  Description of Artificial Sequence: Synthetic oligonucleotide
  Antisense strand to SEQ ID NO: 1589429
ucauauaccaggcacuguc

SEQ ID NO: 1589431 - RNA, 19 nt, Artificial Sequence
  Description of Artificial Sequence: Synthetic oligonucleotide
  Sense strand starting at position 1774 of SEQ ID NO: 1560285
gugccugguauaugacaga

SEQ ID NO: 1589432 - RNA, 19 nt, Artificial Sequence
  Description of Artificial Sequence: Synthetic oligonucleotide
  Antisense strand to SEQ ID NO: 1589431
ucugucauauaccaggcac

SEQ ID NO: 1589433 - RNA, 19 nt, Artificial Sequence
  Description of Artificial Sequence: Synthetic oligonucleotide
  Sense strand starting at position 1863 of SEQ ID NO: 1560285
agguaugguguacguacaa

SEQ ID NO: 1589434 - RNA, 19 nt, Artificial Sequence
  Description of Artificial Sequence: Synthetic oligonucleotide
  Antisense strand to SEQ ID NO: 1589433
uuguacguacaccauaccu

SEQ ID NO: 1589435 - RNA, 19 nt, Artificial Sequence
  Description of Artificial Sequence: Synthetic oligonucleotide
  Sense strand starting at position 1900 of SEQ ID NO: 1560285
ccaggauucugggucucuu

SEQ ID NO: 1589436 - RNA, 19 nt, Artificial Sequence
  Description of Artificial Sequence: Synthetic oligonucleotide
  Antisense strand to SEQ ID NO: 1589435
aagagacccagaauccugg

SEQ ID NO: 1589437 - RNA, 19 nt, Artificial Sequence
  Description of Artificial Sequence: Synthetic oligonucleotide
  Sense strand starting at position 2253 of SEQ ID NO: 1560285
gccauauuggcccagagag

SEQ ID NO: 1589438 - RNA, 19 nt, Artificial Sequence
  Description of Artificial Sequence: Synthetic oligonucleotide
  Antisense strand to SEQ ID NO: 1589437
cucucugggccaauauggc

SEQ ID NO: 1589439 - RNA, 19 nt, Artificial Sequence
  Description of Artificial Sequence: Synthetic oligonucleotide
  Sense strand starting at position 2298 of SEQ ID NO: 1560285
guagcaaaucaagaaagcu

SEQ ID NO: 1589440 - RNA, 19 nt, Artificial Sequence
  Description of Artificial Sequence: Synthetic oligonucleotide
  Antisense strand to SEQ ID NO: 1589439
agcuuucuugauuugcuac

SEQ ID NO: 1589441 - RNA, 19 nt, Artificial Sequence
  Description of Artificial Sequence: Synthetic oligonucleotide
  Sense strand starting at position 2307 of SEQ ID NO: 1560285
caagaaagcugguguaaua

SEQ ID NO: 1589442 - RNA, 19 nt, Artificial Sequence
  Description of Artificial Sequence: Synthetic oligonucleotide
  Antisense strand to SEQ ID NO: 1589441
uauuacaccagcuuucuug

SEQ ID NO: 1589443 - RNA, 19 nt, Artificial Sequence
  Description of Artificial Sequence: Synthetic oligonucleotide
  Sense strand starting at position 2462 of SEQ ID NO: 1560285
ggacuugggagucauaguc

SEQ ID NO: 1589444 - RNA, 19 nt, Artificial Sequence
  Description of Artificial Sequence: Synthetic oligonucleotide
  Antisense strand to SEQ ID NO: 1589443
gacuaugacucccaagucc

SEQ ID NO: 1589445 - RNA, 19 nt, Artificial Sequence
  Description of Artificial Sequence: Synthetic oligonucleotide
  Sense strand starting at position 2472 of SEQ ID NO: 1560285
gucauagucuaugaaucca

SEQ ID NO: 1589446 - RNA, 19 nt, Artificial Sequence
  Description of Artificial Sequence: Synthetic oligonucleotide
  Antisense strand to SEQ ID NO: 1589445
uggauucauagacuaugac

SEQ ID NO: 1589447 - RNA, 19 nt, Artificial Sequence
  Description of Artificial Sequence: Synthetic oligonucleotide
  Sense strand starting at position 3226 of SEQ ID NO: 1560285
guugcagcgagccgauaua

SEQ ID NO: 1589448 - RNA, 19 nt, Artificial Sequence
  Description of Artificial Sequence: Synthetic oligonucleotide
  Antisense strand to SEQ ID NO: 1589447
uauaucggcucgcugcaac

SEQ ID NO: 1589449 - RNA, 19 nt, Artificial Sequence
  Description of Artificial Sequence: Synthetic oligonucleotide
  Sense strand starting at position 3311 of SEQ ID NO: 1560285
gccucagugagguguccuu

SEQ ID NO: 1589450 - RNA, 19 nt, Artificial Sequence
  Description of Artificial Sequence: Synthetic oligonucleotide
  Antisense strand to SEQ ID NO: 1589449
aaggacaccucacugaggc

SEQ ID NO: 1589451 - RNA, 19 nt, Artificial Sequence
  Description of Artificial Sequence: Synthetic oligonucleotide
  Sense strand starting at position 3318 of SEQ ID NO: 1560285
ugagguguccuuugaguaa

SEQ ID NO: 1589452 - RNA, 19 nt, Artificial Sequence
  Description of Artificial Sequence: Synthetic oligonucleotide
  Antisense strand to SEQ ID NO: 1589451
uuacucaaaggacaccuca

SEQ ID NO: 1589453 - RNA, 19 nt, Artificial Sequence
  Description of Artificial Sequence: Synthetic oligonucleotide
  Sense strand starting at position 3353 of SEQ ID NO: 1560285
gugagccaucuggauaucu

SEQ ID NO: 1589454 - RNA, 19 nt, Artificial Sequence
  Description of Artificial Sequence: Synthetic oligonucleotide
  Antisense strand to SEQ ID NO: 1589453
agauauccagauggcucac

SEQ ID NO: 1589455 - RNA, 19 nt, Artificial Sequence
  Description of Artificial Sequence: Synthetic oligonucleotide
  Sense strand starting at position 3406 of SEQ ID NO: 1560285
gacucuguguggucggagu

SEQ ID NO: 1589456 - RNA, 19 nt, Artificial Sequence
  Description of Artificial Sequence: Synthetic oligonucleotide
  Antisense strand to SEQ ID NO: 1589455
acuccgaccacacagaguc

SEQ ID NO: 1589457 - RNA, 19 nt, Artificial Sequence
  Description of Artificial Sequence: Synthetic oligonucleotide
  Sense strand starting at position 3422 of SEQ ID NO: 1560285
aguggagucuuuggaggaa

SEQ ID NO: 1589458 - RNA, 19 nt, Artificial Sequence
  Description of Artificial Sequence: Synthetic oligonucleotide
  Antisense strand to SEQ ID NO: 1589457
uuccuccaaagacuccacu

SEQ ID NO: 1589459 - RNA, 19 nt, Artificial Sequence
  Description of Artificial Sequence: Synthetic oligonucleotide
  Sense strand starting at position 3452 of SEQ ID NO: 1560285
cgaggugagauugaguaau

SEQ ID NO: 1589460 - RNA, 19 nt, Artificial Sequence
  Description of Artificial Sequence: Synthetic oligonucleotide
  Antisense strand to SEQ ID NO: 1589459
auuacucaaucucaccucg

SEQ ID NO: 1589461 - RNA, 19 nt, Artificial Sequence
  Description of Artificial Sequence: Synthetic oligonucleotide
  Sense strand starting at position 3502 of SEQ ID NO: 1560285
gauuuaggcuguuaauaac

SEQ ID NO: 1589462 - RNA, 19 nt, Artificial Sequence
  Description of Artificial Sequence: Synthetic oligonucleotide
  Antisense strand to SEQ ID NO: 1589461
guuauuaacagccuaaauc

SEQ ID NO: 1589463 - RNA, 19 nt, Artificial Sequence
  Description of Artificial Sequence: Synthetic oligonucleotide
  Sense strand starting at position 3505 of SEQ ID NO: 1560285
uuaggcuguuaauaacuaa

SEQ ID NO: 1589464 - RNA, 19 nt, Artificial Sequence
  Description of Artificial Sequence: Synthetic oligonucleotide
  Antisense strand to SEQ ID NO: 1589463
uuaguuauuaacagccuaa

SEQ ID NO: 1589465 - RNA, 19 nt, Artificial Sequence
  Description of Artificial Sequence: Synthetic oligonucleotide
  Sense strand starting at position 3512 of SEQ ID NO: 1560285
guuaauaacuaagguggau

SEQ ID NO: 1589466 - RNA, 19 nt, Artificial Sequence
  Description of Artificial Sequence: Synthetic oligonucleotide
  Antisense strand to SEQ ID NO: 1589465
auccaccuuaguuauuaac

SEQ ID NO: 1589467 - RNA, 19 nt, Artificial Sequence
  Description of Artificial Sequence: Synthetic oligonucleotide
  Sense strand starting at position 3545 of SEQ ID NO: 1560285
ggcuauuggcaauaacagu

SEQ ID NO: 1589468 - RNA, 19 nt, Artificial Sequence
  Description of Artificial Sequence: Synthetic oligonucleotide
  Antisense strand to SEQ ID NO: 1589467
acuguuauugccaauagcc

SEQ ID NO: 1589469 - RNA, 19 nt, Artificial Sequence
  Description of Artificial Sequence: Synthetic oligonucleotide
  Sense strand starting at position 3720 of SEQ ID NO: 1560285
gaacucuugugauugggca

SEQ ID NO: 1589470 - RNA, 19 nt, Artificial Sequence
  Description of Artificial Sequence: Synthetic oligonucleotide
  Antisense strand to SEQ ID NO: 1589469
ugcccaaucacaagaguuc

SEQ ID NO: 1589471 - RNA, 19 nt, Artificial Sequence
  Description of Artificial Sequence: Synthetic oligonucleotide
  Sense strand starting at position 3721 of SEQ ID NO: 1560285
aacucuugugauugggcaa

SEQ ID NO: 1589472 - RNA, 19 nt, Artificial Sequence
  Description of Artificial Sequence: Synthetic oligonucleotide
  Antisense strand to SEQ ID NO: 1589471
uugcccaaucacaagaguu

SEQ ID NO: 1589473 - RNA, 19 nt, Artificial Sequence
  Description of Artificial Sequence: Synthetic oligonucleotide
  Sense strand starting at position 3722 of SEQ ID NO: 1560285
acucuugugauugggcaau

SEQ ID NO: 1589474 - RNA, 19 nt, Artificial Sequence
  Description of Artificial Sequence: Synthetic oligonucleotide
  Antisense strand to SEQ ID NO: 1589473
auugcccaaucacaagagu

SEQ ID NO: 1589475 - RNA, 19 nt, Artificial Sequence
  Description of Artificial Sequence: Synthetic oligonucleotide
  Sense strand starting at position 3724 of SEQ ID NO: 1560285
ucuugugauugggcaaucu

SEQ ID NO: 1589476 - RNA, 19 nt, Artificial Sequence
  Description of Artificial Sequence: Synthetic oligonucleotide
  Antisense strand to SEQ ID NO: 1589475
agauugcccaaucacaaga

SEQ ID NO: 1589477 - RNA, 19 nt, Artificial Sequence
  Description of Artificial Sequence: Synthetic oligonucleotide
  Sense strand starting at position 3919 of SEQ ID NO: 1560285
ggcuguggccuucagaguu

SEQ ID NO: 1589478 - RNA, 19 nt, Artificial Sequence
  Description of Artificial Sequence: Synthetic oligonucleotide
  Antisense strand to SEQ ID NO: 1589477
aacucugaaggccacagcc

SEQ ID NO: 1589479 - RNA, 19 nt, Artificial Sequence
  Description of Artificial Sequence: Synthetic oligonucleotide
  Sense strand starting at position 5 of SEQ ID NO: 1560286
cagggaacuccugguacca

SEQ ID NO: 1589480 - RNA, 19 nt, Artificial Sequence
  Description of Artificial Sequence: Synthetic oligonucleotide
  Antisense strand to SEQ ID NO: 1589479
ugguaccaggaguucccug

SEQ ID NO: 1589481 - RNA, 19 nt, Artificial Sequence
  Description of Artificial Sequence: Synthetic oligonucleotide
  Sense strand starting at position 210 of SEQ ID NO: 1560286
gccagagucccucaccaau

SEQ ID NO: 1589482 - RNA, 19 nt, Artificial Sequence
  Description of Artificial Sequence: Synthetic oligonucleotide
  Antisense strand to SEQ ID NO: 1589481
auuggugagggacucuggc

SEQ ID NO: 1589483 - RNA, 19 nt, Artificial Sequence
  Description of Artificial Sequence: Synthetic oligonucleotide
  Sense strand starting at position 294 of SEQ ID NO: 1560286
gccagaaacugacauggaa

SEQ ID NO: 1589484 - RNA, 19 nt, Artificial Sequence
  Description of Artificial Sequence: Synthetic oligonucleotide
  Antisense strand to SEQ ID NO: 1589483
uuccaugucaguuucuggc

SEQ ID NO: 1589485 - RNA, 19 nt, Artificial Sequence
  Description of Artificial Sequence: Synthetic oligonucleotide
  Sense strand starting at position 675 of SEQ ID NO: 1560286
ugacuugauggugaugcaa

SEQ ID NO: 1589486 - RNA, 19 nt, Artificial Sequence
  Description of Artificial Sequence: Synthetic oligonucleotide
  Antisense strand to SEQ ID NO: 1589485
uugcaucaccaucaaguca

SEQ ID NO: 1589487 - RNA, 19 nt, Artificial Sequence
  Description of Artificial Sequence: Synthetic oligonucleotide
  Sense strand starting at position 711 of SEQ ID NO: 1560286
ccggguaucagugaagcgu

SEQ ID NO: 1589488 - RNA, 19 nt, Artificial Sequence
  Description of Artificial Sequence: Synthetic oligonucleotide
  Antisense strand to SEQ ID NO: 1589487
acgcuucacugauacccgg

SEQ ID NO: 1589489 - RNA, 19 nt, Artificial Sequence
  Description of Artificial Sequence: Synthetic oligonucleotide
  Sense strand starting at position 839 of SEQ ID NO: 1560286
uggccuucuuguccaugau

SEQ ID NO: 1589490 - RNA, 19 nt, Artificial Sequence
  Description of Artificial Sequence: Synthetic oligonucleotide
  Antisense strand to SEQ ID NO: 1589489
aucauggacaagaaggcca

SEQ ID NO: 1589491 - RNA, 19 nt, Artificial Sequence
  Description of Artificial Sequence: Synthetic oligonucleotide
  Sense strand starting at position 906 of SEQ ID NO: 1560286
cucagaccagcucgugauu

SEQ ID NO: 1589492 - RNA, 19 nt, Artificial Sequence
  Description of Artificial Sequence: Synthetic oligonucleotide
  Antisense strand to SEQ ID NO: 1589491
aaucacgagcuggucugag

SEQ ID NO: 1589493 - RNA, 19 nt, Artificial Sequence
  Description of Artificial Sequence: Synthetic oligonucleotide
  Sense strand starting at position 1074 of SEQ ID NO: 1560286
accguuaauaggugucauu

SEQ ID NO: 1589494 - RNA, 19 nt, Artificial Sequence
  Description of Artificial Sequence: Synthetic oligonucleotide
  Antisense strand to SEQ ID NO: 1589493
aaugacaccuauuaacggu

SEQ ID NO: 1589495 - RNA, 19 nt, Artificial Sequence
  Description of Artificial Sequence: Synthetic oligonucleotide
  Sense strand starting at position 1202 of SEQ ID NO: 1560286
agggaugaauccucuccua

SEQ ID NO: 1589496 - RNA, 19 nt, Artificial Sequence
  Description of Artificial Sequence: Synthetic oligonucleotide
  Antisense strand to SEQ ID NO: 1589495
uaggagaggauucaucccu

SEQ ID NO: 1589497 - RNA, 19 nt, Artificial Sequence
  Description of Artificial Sequence: Synthetic oligonucleotide
  Sense strand starting at position 1392 of SEQ ID NO: 1560286
auaagagucuuuguacauc

SEQ ID NO: 1589498 - RNA, 19 nt, Artificial Sequence
  Description of Artificial Sequence: Synthetic oligonucleotide
  Antisense strand to SEQ ID NO: 1589497
gauguacaaagacucuuau

SEQ ID NO: 1589499 - RNA, 19 nt, Artificial Sequence
  Description of Artificial Sequence: Synthetic oligonucleotide
  Sense strand starting at position 1434 of SEQ ID NO: 1560286
gccuaaggucgacgauuaa

SEQ ID NO: 1589500 - RNA, 19 nt, Artificial Sequence
  Description of Artificial Sequence: Synthetic oligonucleotide
  Antisense strand to SEQ ID NO: 1589499
uuaaucgucgaccuuaggc

SEQ ID NO: 1589501 - RNA, 19 nt, Artificial Sequence
  Description of Artificial Sequence: Synthetic oligonucleotide
  Sense strand starting at position 1723 of SEQ ID NO: 1560286
ggagaaagggcucggugaa

SEQ ID NO: 1589502 - RNA, 19 nt, Artificial Sequence
  Description of Artificial Sequence: Synthetic oligonucleotide
  Antisense strand to SEQ ID NO: 1589501
uucaccgagcccuuucucc

SEQ ID NO: 1589503 - RNA, 19 nt, Artificial Sequence
  Description of Artificial Sequence: Synthetic oligonucleotide
  Sense strand starting at position 1933 of SEQ ID NO: 1560286
uggauucucccagguagaa

SEQ ID NO: 1589504 - RNA, 19 nt, Artificial Sequence
  Description of Artificial Sequence: Synthetic oligonucleotide
  Antisense strand to SEQ ID NO: 1589503
uucuaccugggagaaucca

SEQ ID NO: 1589505 - RNA, 19 nt, Artificial Sequence
  Description of Artificial Sequence: Synthetic oligonucleotide
  Sense strand starting at position 2259 of SEQ ID NO: 1560286
acgauauuagcuuacaagu

SEQ ID NO: 1589506 - RNA, 19 nt, Artificial Sequence
  Description of Artificial Sequence: Synthetic oligonucleotide
  Antisense strand to SEQ ID NO: 1589505
acuuguaagcuaauaucgu

SEQ ID NO: 1589507 - RNA, 19 nt, Artificial Sequence
  Description of Artificial Sequence: Synthetic oligonucleotide
  Sense strand starting at position 2268 of SEQ ID NO: 1560286
gcuuacaaguuguccagua

SEQ ID NO: 1589508 - RNA, 19 nt, Artificial Sequence
  Description of Artificial Sequence: Synthetic oligonucleotide
  Antisense strand to SEQ ID NO: 1589507
uacuggacaacuuguaagc

SEQ ID NO: 1589509 - RNA, 19 nt, Artificial Sequence
  Description of Artificial Sequence: Synthetic oligonucleotide
  Sense strand starting at position 2270 of SEQ ID NO: 1560286
uuacaaguuguccaguacu

SEQ ID NO: 1589510 - RNA, 19 nt, Artificial Sequence
  Description of Artificial Sequence: Synthetic oligonucleotide
  Antisense strand to SEQ ID NO: 1589509
aguacuggacaacuuguaa

SEQ ID NO: 1589511 - RNA, 19 nt, Artificial Sequence
  Description of Artificial Sequence: Synthetic oligonucleotide
  Sense strand starting at position 2311 of SEQ ID NO: 1560286
gugaauagagucuguggau

SEQ ID NO: 1589512 - RNA, 19 nt, Artificial Sequence
  Description of Artificial Sequence: Synthetic oligonucleotide
  Antisense strand to SEQ ID NO: 1589511
auccacagacucuauucac

SEQ ID NO: 1589513 - RNA, 19 nt, Artificial Sequence
  Description of Artificial Sequence: Synthetic oligonucleotide
  Sense strand starting at position 2355 of SEQ ID NO: 1560286
ggacauuguuacguaagac

SEQ ID NO: 1589514 - RNA, 19 nt, Artificial Sequence
  Description of Artificial Sequence: Synthetic oligonucleotide
  Antisense strand to SEQ ID NO: 1589513
gucuuacguaacaaugucc

SEQ ID NO: 1589515 - RNA, 19 nt, Artificial Sequence
  Description of Artificial Sequence: Synthetic oligonucleotide
  Sense strand starting at position 2356 of SEQ ID NO: 1560286
gacauuguuacguaagacg

SEQ ID NO: 1589516 - RNA, 19 nt, Artificial Sequence
  Description of Artificial Sequence: Synthetic oligonucleotide
  Antisense strand to SEQ ID NO: 1589515
cgucuuacguaacaauguc

SEQ ID NO: 1589517 - RNA, 19 nt, Artificial Sequence
  Description of Artificial Sequence: Synthetic oligonucleotide
  Sense strand starting at position 2485 of SEQ ID NO: 1560286
cggaaucacugaucccaca

SEQ ID NO: 1589518 - RNA, 19 nt, Artificial Sequence
  Description of Artificial Sequence: Synthetic oligonucleotide
  Antisense strand to SEQ ID NO: 1589517
ugugggaucagugauuccg

SEQ ID NO: 1589519 - RNA, 19 nt, Artificial Sequence
  Description of Artificial Sequence: Synthetic oligonucleotide
  Sense strand starting at position 2613 of SEQ ID NO: 1560286
cuaggauuucucugugccu

SEQ ID NO: 1589520 - RNA, 19 nt, Artificial Sequence
  Description of Artificial Sequence: Synthetic oligonucleotide
  Antisense strand to SEQ ID NO: 1589519
aggcacagagaaauccuag

SEQ ID NO: 1589521 - RNA, 19 nt, Artificial Sequence
  Description of Artificial Sequence: Synthetic oligonucleotide
  Sense strand starting at position 2615 of SEQ ID NO: 1560286
aggauuucucugugccuca

SEQ ID NO: 1589522 - RNA, 19 nt, Artificial Sequence
  Description of Artificial Sequence: Synthetic oligonucleotide
  Antisense strand to SEQ ID NO: 1589521
ugaggcacagagaaauccu

SEQ ID NO: 1589523 - RNA, 19 nt, Artificial Sequence
  Description of Artificial Sequence: Synthetic oligonucleotide
  Sense strand starting at position 2616 of SEQ ID NO: 1560286
ggauuucucugugccucaa

SEQ ID NO: 1589524 - RNA, 19 nt, Artificial Sequence
  Description of Artificial Sequence: Synthetic oligonucleotide
  Antisense strand to SEQ ID NO: 1589523
uugaggcacagagaaaucc

SEQ ID NO: 1589525 - RNA, 19 nt, Artificial Sequence
  Description of Artificial Sequence: Synthetic oligonucleotide
  Sense strand starting at position 2760 of SEQ ID NO: 1560286
auuagcuaagauugcuauu

SEQ ID NO: 1589526 - RNA, 19 nt, Artificial Sequence
  Description of Artificial Sequence: Synthetic oligonucleotide
  Antisense strand to SEQ ID NO: 1589525
aauagcaaucuuagcuaau

SEQ ID NO: 1589527 - RNA, 19 nt, Artificial Sequence
  Description of Artificial Sequence: Synthetic oligonucleotide
  Sense strand starting at position 2890 of SEQ ID NO: 1560286
caggaagacuguuuagcau

SEQ ID NO: 1589528 - RNA, 19 nt, Artificial Sequence
  Description of Artificial Sequence: Synthetic oligonucleotide
  Antisense strand to SEQ ID NO: 1589527
augcuaaacagucuuccug

SEQ ID NO: 1589529 - RNA, 19 nt, Artificial Sequence
  Description of Artificial Sequence: Synthetic oligonucleotide
  Sense strand starting at position 2901 of SEQ ID NO: 1560286
uuuagcauuuguguccuaa

SEQ ID NO: 1589530 - RNA, 19 nt, Artificial Sequence
  Description of Artificial Sequence: Synthetic oligonucleotide
  Antisense strand to SEQ ID NO: 1589529
uuaggacacaaaugcuaaa

SEQ ID NO: 1589531 - RNA, 19 nt, Artificial Sequence
  Description of Artificial Sequence: Synthetic oligonucleotide
  Sense strand starting at position 2913 of SEQ ID NO: 1560286
guccuaaucugacccuaag

SEQ ID NO: 1589532 - RNA, 19 nt, Artificial Sequence
  Description of Artificial Sequence: Synthetic oligonucleotide
  Antisense strand to SEQ ID NO: 1589531
cuuagggucagauuaggac

SEQ ID NO: 1589533 - RNA, 19 nt, Artificial Sequence
  Description of Artificial Sequence: Synthetic oligonucleotide
  Sense strand starting at position 2976 of SEQ ID NO: 1560286
guguaacucuaucccuuau

SEQ ID NO: 1589534 - RNA, 19 nt, Artificial Sequence
  Description of Artificial Sequence: Synthetic oligonucleotide
  Antisense strand to SEQ ID NO: 1589533
auaagggauagaguuacac

SEQ ID NO: 1589535 - RNA, 19 nt, Artificial Sequence
  Description of Artificial Sequence: Synthetic oligonucleotide
  Sense strand starting at position 3008 of SEQ ID NO: 1560286
cgcuguuuagcacauagua

SEQ ID NO: 1589536 - RNA, 19 nt, Artificial Sequence
  Description of Artificial Sequence: Synthetic oligonucleotide
  Antisense strand to SEQ ID NO: 1589535
uacuaugugcuaaacagcg

SEQ ID NO: 1589537 - RNA, 19 nt, Artificial Sequence
  Description of Artificial Sequence: Synthetic oligonucleotide
  Sense strand starting at position 3053 of SEQ ID NO: 1560286
auguucucacagugcaaau

SEQ ID NO: 1589538 - RNA, 19 nt, Artificial Sequence
  Description of Artificial Sequence: Synthetic oligonucleotide
  Antisense strand to SEQ ID NO: 1589537
auuugcacugugagaacau

SEQ ID NO: 1589539 - RNA, 19 nt, Artificial Sequence
  Description of Artificial Sequence: Synthetic oligonucleotide
  Sense strand starting at position 3082 of SEQ ID NO: 1560286
cgguacaucuuuccuuaaa

SEQ ID NO: 1589540 - RNA, 19 nt, Artificial Sequence
  Description of Artificial Sequence: Synthetic oligonucleotide
  Antisense strand to SEQ ID NO: 1589539
uuuaaggaaagauguaccg

SEQ ID NO: 1589541 - RNA, 19 nt, Artificial Sequence
  Description of Artificial Sequence: Synthetic oligonucleotide
  Sense strand starting at position 3241 of SEQ ID NO: 1560286
cgggcacuuugcuuuacaa

SEQ ID NO: 1589542 - RNA, 19 nt, Artificial Sequence
  Description of Artificial Sequence: Synthetic oligonucleotide
  Antisense strand to SEQ ID NO: 1589541
uuguaaagcaaagugcccg

SEQ ID NO: 1589543 - RNA, 19 nt, Artificial Sequence
  Description of Artificial Sequence: Synthetic oligonucleotide
  Sense strand starting at position 3243 of SEQ ID NO: 1560286
ggcacuuugcuuuacaaag

SEQ ID NO: 1589544 - RNA, 19 nt, Artificial Sequence
  Description of Artificial Sequence: Synthetic oligonucleotide
  Antisense strand to SEQ ID NO: 1589543
cuuuguaaagcaaagugcc

SEQ ID NO: 1589545 - RNA, 19 nt, Artificial Sequence
  Description of Artificial Sequence: Synthetic oligonucleotide
  Sense strand starting at position 3278 of SEQ ID NO: 1560286
gguuucauuuaacggauga

SEQ ID NO: 1589546 - RNA, 19 nt, Artificial Sequence
  Description of Artificial Sequence: Synthetic oligonucleotide
  Antisense strand to SEQ ID NO: 1589545
ucauccguuaaaugaaacc

SEQ ID NO: 1589547 - RNA, 19 nt, Artificial Sequence
  Description of Artificial Sequence: Synthetic oligonucleotide
  Sense strand starting at position 3430 of SEQ ID NO: 1560286
accugugacgcguuuaguu

SEQ ID NO: 1589548 - RNA, 19 nt, Artificial Sequence
  Description of Artificial Sequence: Synthetic oligonucleotide
  Antisense strand to SEQ ID NO: 1589547
aacuaaacgcgucacaggu

SEQ ID NO: 1589549 - RNA, 19 nt, Artificial Sequence
  Description of Artificial Sequence: Synthetic oligonucleotide
  Sense strand starting at position 3506 of SEQ ID NO: 1560286
ucaguuucgcauuauuaau

SEQ ID NO: 1589550 - RNA, 19 nt, Artificial Sequence
  Description of Artificial Sequence: Synthetic oligonucleotide
  Antisense strand to SEQ ID NO: 1589549
auuaauaaugcgaaacuga

SEQ ID NO: 1589551 - RNA, 19 nt, Artificial Sequence
  Description of Artificial Sequence: Synthetic oligonucleotide
  Sense strand starting at position 3565 of SEQ ID NO: 1560286
cuacguguugcguuuccua

SEQ ID NO: 1589552 - RNA, 19 nt, Artificial Sequence
  Description of Artificial Sequence: Synthetic oligonucleotide
  Antisense strand to SEQ ID NO: 1589551
uaggaaacgcaacacguag

SEQ ID NO: 1589553 - RNA, 19 nt, Artificial Sequence
  Description of Artificial Sequence: Synthetic oligonucleotide
  Sense strand starting at position 3567 of SEQ ID NO: 1560286
acguguugcguuuccuauu

SEQ ID NO: 1589554 - RNA, 19 nt, Artificial Sequence
  Description of Artificial Sequence: Synthetic oligonucleotide
  Antisense strand to SEQ ID NO: 1589553
aauaggaaacgcaacacgu

SEQ ID NO: 1589555 - RNA, 19 nt, Artificial Sequence
  Description of Artificial Sequence: Synthetic oligonucleotide
  Sense strand starting at position 3617 of SEQ ID NO: 1560286
gugggagcauuucagagau

SEQ ID NO: 1589556 - RNA, 19 nt, Artificial Sequence
  Description of Artificial Sequence: Synthetic oligonucleotide
  Antisense strand to SEQ ID NO: 1589555
aucucugaaaugcucccac

SEQ ID NO: 1589557 - RNA, 19 nt, Artificial Sequence
  Description of Artificial Sequence: Synthetic oligonucleotide
  Sense strand starting at position 3619 of SEQ ID NO: 1560286
gggagcauuucagagaugu

SEQ ID NO: 1589558 - RNA, 19 nt, Artificial Sequence
  Description of Artificial Sequence: Synthetic oligonucleotide
  Antisense strand to SEQ ID NO: 1589557
acaucucugaaaugcuccc

SEQ ID NO: 1589559 - RNA, 19 nt, Artificial Sequence
  Description of Artificial Sequence: Synthetic oligonucleotide
  Sense strand starting at position 100 of SEQ ID NO: 1560287
agcgguuugagcugggcaa

SEQ ID NO: 1589560 - RNA, 19 nt, Artificial Sequence
  Description of Artificial Sequence: Synthetic oligonucleotide
  Antisense strand to SEQ ID NO: 1589559
uugcccagcucaaaccgcu

SEQ ID NO: 1589561 - RNA, 19 nt, Artificial Sequence
  Description of Artificial Sequence: Synthetic oligonucleotide
  Sense strand starting at position 274 of SEQ ID NO: 1560287
gccggguccucguguguuu

SEQ ID NO: 1589562 - RNA, 19 nt, Artificial Sequence
  Description of Artificial Sequence: Synthetic oligonucleotide
  Antisense strand to SEQ ID NO: 1589561
aaacacacgaggacccggc

SEQ ID NO: 1589563 - RNA, 19 nt, Artificial Sequence
  Description of Artificial Sequence: Synthetic oligonucleotide
  Sense strand starting at position 285 of SEQ ID NO: 1560287
guguguuuggcguuugcua

SEQ ID NO: 1589564 - RNA, 19 nt, Artificial Sequence
  Description of Artificial Sequence: Synthetic oligonucleotide
  Antisense strand to SEQ ID NO: 1589563
uagcaaacgccaaacacac

SEQ ID NO: 1589565 - RNA, 19 nt, Artificial Sequence
  Description of Artificial Sequence: Synthetic oligonucleotide
  Sense strand starting at position 287 of SEQ ID NO: 1560287
guguuuggcguuugcuaga

SEQ ID NO: 1589566 - RNA, 19 nt, Artificial Sequence
  Description of Artificial Sequence: Synthetic oligonucleotide
  Antisense strand to SEQ ID NO: 1589565
ucuagcaaacgccaaacac

SEQ ID NO: 1589567 - RNA, 19 nt, Artificial Sequence
  Description of Artificial Sequence: Synthetic oligonucleotide
  Sense strand starting at position 290 of SEQ ID NO: 1560287
uuuggcguuugcuagaaca

SEQ ID NO: 1589568 - RNA, 19 nt, Artificial Sequence
  Description of Artificial Sequence: Synthetic oligonucleotide
  Antisense strand to SEQ ID NO: 1589567
uguucuagcaaacgccaaa

SEQ ID NO: 1589569 - RNA, 19 nt, Artificial Sequence
  Description of Artificial Sequence: Synthetic oligonucleotide
  Sense strand starting at position 292 of SEQ ID NO: 1560287
uggcguuugcuagaacaaa

SEQ ID NO: 1589570 - RNA, 19 nt, Artificial Sequence
  Description of Artificial Sequence: Synthetic oligonucleotide
  Antisense strand to SEQ ID NO: 1589569
uuuguucuagcaaacgcca

SEQ ID NO: 1589571 - RNA, 19 nt, Artificial Sequence
  Description of Artificial Sequence: Synthetic oligonucleotide
  Sense strand starting at position 931 of SEQ ID NO: 1560287
ugggaugguucagaggguu

SEQ ID NO: 1589572 - RNA, 19 nt, Artificial Sequence
  Description of Artificial Sequence: Synthetic oligonucleotide
  Antisense strand to SEQ ID NO: 1589571
aacccucugaaccauccca

SEQ ID NO: 1589573 - RNA, 19 nt, Artificial Sequence
  Description of Artificial Sequence: Synthetic oligonucleotide
  Sense strand starting at position 2773 of SEQ ID NO: 1560287
ggaguaagucccuacaccu

SEQ ID NO: 1589574 - RNA, 19 nt, Artificial Sequence
  Description of Artificial Sequence: Synthetic oligonucleotide
  Antisense strand to SEQ ID NO: 1589573
agguguagggacuuacucc

SEQ ID NO: 1589575 - RNA, 19 nt, Artificial Sequence
  Description of Artificial Sequence: Synthetic oligonucleotide
  Sense strand starting at position 2896 of SEQ ID NO: 1560287
ucagucuccacgcacgaau

SEQ ID NO: 1589576 - RNA, 19 nt, Artificial Sequence
  Description of Artificial Sequence: Synthetic oligonucleotide
  Antisense strand to SEQ ID NO: 1589575
auucgugcguggagacuga

SEQ ID NO: 1589577 - RNA, 19 nt, Artificial Sequence
  Description of Artificial Sequence: Synthetic oligonucleotide
  Sense strand starting at position 2970 of SEQ ID NO: 1560287
gucugaucuguucagggaa

SEQ ID NO: 1589578 - RNA, 19 nt, Artificial Sequence
  Description of Artificial Sequence: Synthetic oligonucleotide
  Antisense strand to SEQ ID NO: 1589577
uucccugaacagaucagac

SEQ ID NO: 1589579 - RNA, 19 nt, Artificial Sequence
  Description of Artificial Sequence: Synthetic oligonucleotide
  Sense strand starting at position 2991 of SEQ ID NO: 1560287
ccgagugauuucuccuccu

SEQ ID NO: 1589580 - RNA, 19 nt, Artificial Sequence
  Description of Artificial Sequence: Synthetic oligonucleotide
  Antisense strand to SEQ ID NO: 1589579
aggaggagaaaucacucgg

SEQ ID NO: 1589581 - RNA, 19 nt, Artificial Sequence
  Description of Artificial Sequence: Synthetic oligonucleotide
  Sense strand starting at position 2994 of SEQ ID NO: 1560287
agugauuucuccuccuggu

SEQ ID NO: 1589582 - RNA, 19 nt, Artificial Sequence
  Description of Artificial Sequence: Synthetic oligonucleotide
  Antisense strand to SEQ ID NO: 1589581
accaggaggagaaaucacu

SEQ ID NO: 1589583 - RNA, 19 nt, Artificial Sequence
  Description of Artificial Sequence: Synthetic oligonucleotide
  Sense strand starting at position 3076 of SEQ ID NO: 1560287
gacagugucuggccauguu

SEQ ID NO: 1589584 - RNA, 19 nt, Artificial Sequence
  Description of Artificial Sequence: Synthetic oligonucleotide
  Antisense strand to SEQ ID NO: 1589583
aacauggccagacacuguc

SEQ ID NO: 1589585 - RNA, 19 nt, Artificial Sequence
  Description of Artificial Sequence: Synthetic oligonucleotide
  Sense strand starting at position 3251 of SEQ ID NO: 1560287
aggguaggcugucaucaaa

SEQ ID NO: 1589586 - RNA, 19 nt, Artificial Sequence
  Description of Artificial Sequence: Synthetic oligonucleotide
  Antisense strand to SEQ ID NO: 1589585
uuugaugacagccuacccu

SEQ ID NO: 1589587 - RNA, 19 nt, Artificial Sequence
  Description of Artificial Sequence: Synthetic oligonucleotide
  Sense strand starting at position 3275 of SEQ ID NO: 1560287
gcuggacuuugcuggcgau

SEQ ID NO: 1589588 - RNA, 19 nt, Artificial Sequence
  Description of Artificial Sequence: Synthetic oligonucleotide
  Antisense strand to SEQ ID NO: 1589587
aucgccagcaaaguccagc

SEQ ID NO: 1589589 - RNA, 19 nt, Artificial Sequence
  Description of Artificial Sequence: Synthetic oligonucleotide
  Sense strand starting at position 3292 of SEQ ID NO: 1560287
augcccagaucguguugua

SEQ ID NO: 1589590 - RNA, 19 nt, Artificial Sequence
  Description of Artificial Sequence: Synthetic oligonucleotide
  Antisense strand to SEQ ID NO: 1589589
uacaacacgaucugggcau

SEQ ID NO: 1589591 - RNA, 19 nt, Artificial Sequence
  Description of Artificial Sequence: Synthetic oligonucleotide
  Sense strand starting at position 3295 of SEQ ID NO: 1560287
cccagaucguguuguacgu

SEQ ID NO: 1589592 - RNA, 19 nt, Artificial Sequence
  Description of Artificial Sequence: Synthetic oligonucleotide
  Antisense strand to SEQ ID NO: 1589591
acguacaacacgaucuggg

SEQ ID NO: 1589593 - RNA, 19 nt, Artificial Sequence
  Description of Artificial Sequence: Synthetic oligonucleotide
  Sense strand starting at position 3301 of SEQ ID NO: 1560287
ucguguuguacgucucuga

SEQ ID NO: 1589594 - RNA, 19 nt, Artificial Sequence
  Description of Artificial Sequence: Synthetic oligonucleotide
  Antisense strand to SEQ ID NO: 1589593
ucagagacguacaacacga

SEQ ID NO: 1589595 - RNA, 19 nt, Artificial Sequence
  Description of Artificial Sequence: Synthetic oligonucleotide
  Sense strand starting at position 3302 of SEQ ID NO: 1560287
cguguuguacgucucugaa

SEQ ID NO: 1589596 - RNA, 19 nt, Artificial Sequence
  Description of Artificial Sequence: Synthetic oligonucleotide
  Antisense strand to SEQ ID NO: 1589595
uucagagacguacaacacg

SEQ ID NO: 1589597 - RNA, 19 nt, Artificial Sequence
  Description of Artificial Sequence: Synthetic oligonucleotide
  Sense strand starting at position 3304 of SEQ ID NO: 1560287
uguuguacgucucugaauu

SEQ ID NO: 1589598 - RNA, 19 nt, Artificial Sequence
  Description of Artificial Sequence: Synthetic oligonucleotide
  Antisense strand to SEQ ID NO: 1589597
aauucagagacguacaaca

SEQ ID NO: 1589599 - RNA, 19 nt, Artificial Sequence
  Description of Artificial Sequence: Synthetic oligonucleotide
  Sense strand starting at position 3305 of SEQ ID NO: 1560287
guuguacgucucugaauua

SEQ ID NO: 1589600 - RNA, 19 nt, Artificial Sequence
  Description of Artificial Sequence: Synthetic oligonucleotide
  Antisense strand to SEQ ID NO: 1589599
uaauucagagacguacaac

SEQ ID NO: 1589601 - RNA, 19 nt, Artificial Sequence
  Description of Artificial Sequence: Synthetic oligonucleotide
  Sense strand starting at position 3312 of SEQ ID NO: 1560287
gucucugaauuagugucau

SEQ ID NO: 1589602 - RNA, 19 nt, Artificial Sequence
  Description of Artificial Sequence: Synthetic oligonucleotide
  Antisense strand to SEQ ID NO: 1589601
augacacuaauucagagac

SEQ ID NO: 1589603 - RNA, 19 nt, Artificial Sequence
  Description of Artificial Sequence: Synthetic oligonucleotide
  Sense strand starting at position 3394 of SEQ ID NO: 1560287
gucccugugugaggcauua

SEQ ID NO: 1589604 - RNA, 19 nt, Artificial Sequence
  Description of Artificial Sequence: Synthetic oligonucleotide
  Antisense strand to SEQ ID NO: 1589603
uaaugccucacacagggac

SEQ ID NO: 1589605 - RNA, 19 nt, Artificial Sequence
  Description of Artificial Sequence: Synthetic oligonucleotide
  Sense strand starting at position 3656 of SEQ ID NO: 1560287
cuugcucuuccagaaaggu

SEQ ID NO: 1589606 - RNA, 19 nt, Artificial Sequence
  Description of Artificial Sequence: Synthetic oligonucleotide
  Antisense strand to SEQ ID NO: 1589605
accuuucuggaagagcaag

SEQ ID NO: 1589607 - RNA, 19 nt, Artificial Sequence
  Description of Artificial Sequence: Synthetic oligonucleotide
  Sense strand starting at position 3664 of SEQ ID NO: 1560287
uccagaaaggucuguccca

SEQ ID NO: 1589608 - RNA, 19 nt, Artificial Sequence
  Description of Artificial Sequence: Synthetic oligonucleotide
  Antisense strand to SEQ ID NO: 1589607
ugggacagaccuuucugga

SEQ ID NO: 1589609 - RNA, 19 nt, Artificial Sequence
  Description of Artificial Sequence: Synthetic oligonucleotide
  Sense strand starting at position 3707 of SEQ ID NO: 1560287
ggacaagguucucaguucu

SEQ ID NO: 1589610 - RNA, 19 nt, Artificial Sequence
  Description of Artificial Sequence: Synthetic oligonucleotide
  Antisense strand to SEQ ID NO: 1589609
agaacugagaaccuugucc

SEQ ID NO: 1589611 - RNA, 19 nt, Artificial Sequence
  Description of Artificial Sequence: Synthetic oligonucleotide
  Sense strand starting at position 1263 of SEQ ID NO: 1560288
gcgggaguccgcugacaga

SEQ ID NO: 1589612 - RNA, 19 nt, Artificial Sequence
  Description of Artificial Sequence: Synthetic oligonucleotide
  Antisense strand to SEQ ID NO: 1589611
ucugucagcggacucccgc

SEQ ID NO: 1589613 - RNA, 19 nt, Artificial Sequence
  Description of Artificial Sequence: Synthetic oligonucleotide
  Sense strand starting at position 1266 of SEQ ID NO: 1560288
ggaguccgcugacagauaa

SEQ ID NO: 1589614 - RNA, 19 nt, Artificial Sequence
  Description of Artificial Sequence: Synthetic oligonucleotide
  Antisense strand to SEQ ID NO: 1589613
uuaucugucagcggacucc

SEQ ID NO: 1589615 - RNA, 19 nt, Artificial Sequence
  Description of Artificial Sequence: Synthetic oligonucleotide
  Sense strand starting at position 2496 of SEQ ID NO: 1560288
gcguuucuugcauguugga

SEQ ID NO: 1589616 - RNA, 19 nt, Artificial Sequence
  Description of Artificial Sequence: Synthetic oligonucleotide
  Antisense strand to SEQ ID NO: 1589615
uccaacaugcaagaaacgc

SEQ ID NO: 1589617 - RNA, 19 nt, Artificial Sequence
  Description of Artificial Sequence: Synthetic oligonucleotide
  Sense strand starting at position 2501 of SEQ ID NO: 1560288
ucuugcauguuggaaucaa

SEQ ID NO: 1589618 - RNA, 19 nt, Artificial Sequence
  Description of Artificial Sequence: Synthetic oligonucleotide
  Antisense strand to SEQ ID NO: 1589617
uugauuccaacaugcaaga

SEQ ID NO: 1589619 - RNA, 19 nt, Artificial Sequence
  Description of Artificial Sequence: Synthetic oligonucleotide
  Sense strand starting at position 2539 of SEQ ID NO: 1560288
gcacgcaaaugaugugauu

SEQ ID NO: 1589620 - RNA, 19 nt, Artificial Sequence
  Description of Artificial Sequence: Synthetic oligonucleotide
  Antisense strand to SEQ ID NO: 1589619
aaucacaucauuugcgugc

SEQ ID NO: 1589621 - RNA, 19 nt, Artificial Sequence
  Description of Artificial Sequence: Synthetic oligonucleotide
  Sense strand starting at position 2542 of SEQ ID NO: 1560288
cgcaaaugaugugauuuac

SEQ ID NO: 1589622 - RNA, 19 nt, Artificial Sequence
  Description of Artificial Sequence: Synthetic oligonucleotide
  Antisense strand to SEQ ID NO: 1589621
guaaaucacaucauuugcg

SEQ ID NO: 1589623 - RNA, 19 nt, Artificial Sequence
  Description of Artificial Sequence: Synthetic oligonucleotide
  Sense strand starting at position 2686 of SEQ ID NO: 1560288
gagaaauggcuacgcaguu

SEQ ID NO: 1589624 - RNA, 19 nt, Artificial Sequence
  Description of Artificial Sequence: Synthetic oligonucleotide
  Antisense strand to SEQ ID NO: 1589623
aacugcguagccauuucuc

SEQ ID NO: 1589625 - RNA, 19 nt, Artificial Sequence
  Description of Artificial Sequence: Synthetic oligonucleotide
  Sense strand starting at position 2687 of SEQ ID NO: 1560288
agaaauggcuacgcaguua

SEQ ID NO: 1589626 - RNA, 19 nt, Artificial Sequence
  Description of Artificial Sequence: Synthetic oligonucleotide
  Antisense strand to SEQ ID NO: 1589625
uaacugcguagccauuucu

SEQ ID NO: 1589627 - RNA, 19 nt, Artificial Sequence
  Description of Artificial Sequence: Synthetic oligonucleotide
  Sense strand starting at position 2695 of SEQ ID NO: 1560288
cuacgcaguuaguugagaa

SEQ ID NO: 1589628 - RNA, 19 nt, Artificial Sequence
  Description of Artificial Sequence: Synthetic oligonucleotide
  Antisense strand to SEQ ID NO: 1589627
uucucaacuaacugcguag

SEQ ID NO: 1589629 - RNA, 19 nt, Artificial Sequence
  Description of Artificial Sequence: Synthetic oligonucleotide
  Sense strand starting at position 2696 of SEQ ID NO: 1560288
uacgcaguuaguugagaaa

SEQ ID NO: 1589630 - RNA, 19 nt, Artificial Sequence
  Description of Artificial Sequence: Synthetic oligonucleotide
  Antisense strand to SEQ ID NO: 1589629
uuucucaacuaacugcgua

SEQ ID NO: 1589631 - RNA, 19 nt, Artificial Sequence
  Description of Artificial Sequence: Synthetic oligonucleotide
  Sense strand starting at position 2699 of SEQ ID NO: 1560288
gcaguuaguugagaaaugu

SEQ ID NO: 1589632 - RNA, 19 nt, Artificial Sequence
  Description of Artificial Sequence: Synthetic oligonucleotide
  Antisense strand to SEQ ID NO: 1589631
acauuucucaacuaacugc

SEQ ID NO: 1589633 - RNA, 19 nt, Artificial Sequence
  Description of Artificial Sequence: Synthetic oligonucleotide
  Sense strand starting at position 2703 of SEQ ID NO: 1560288
uuaguugagaaauguaugu

SEQ ID NO: 1589634 - RNA, 19 nt, Artificial Sequence
  Description of Artificial Sequence: Synthetic oligonucleotide
  Antisense strand to SEQ ID NO: 1589633
acauacauuucucaacuaa

SEQ ID NO: 1589635 - RNA, 19 nt, Artificial Sequence
  Description of Artificial Sequence: Synthetic oligonucleotide
  Sense strand starting at position 2717 of SEQ ID NO: 1560288
uauguaaauucgcacguca

SEQ ID NO: 1589636 - RNA, 19 nt, Artificial Sequence
  Description of Artificial Sequence: Synthetic oligonucleotide
  Antisense strand to SEQ ID NO: 1589635
ugacgugcgaauuuacaua

SEQ ID NO: 1589637 - RNA, 19 nt, Artificial Sequence
  Description of Artificial Sequence: Synthetic oligonucleotide
  Sense strand starting at position 2719 of SEQ ID NO: 1560288
uguaaauucgcacgucagu

SEQ ID NO: 1589638 - RNA, 19 nt, Artificial Sequence
  Description of Artificial Sequence: Synthetic oligonucleotide
  Antisense strand to SEQ ID NO: 1589637
acugacgugcgaauuuaca

SEQ ID NO: 1589639 - RNA, 19 nt, Artificial Sequence
  Description of Artificial Sequence: Synthetic oligonucleotide
  Sense strand starting at position 2720 of SEQ ID NO: 1560288
guaaauucgcacgucagua

SEQ ID NO: 1589640 - RNA, 19 nt, Artificial Sequence
  Description of Artificial Sequence: Synthetic oligonucleotide
  Antisense strand to SEQ ID NO: 1589639
uacugacgugcgaauuuac

SEQ ID NO: 1589641 - RNA, 19 nt, Artificial Sequence
  Description of Artificial Sequence: Synthetic oligonucleotide
  Sense strand starting at position 2722 of SEQ ID NO: 1560288
aaauucgcacgucaguaau

SEQ ID NO: 1589642 - RNA, 19 nt, Artificial Sequence
  Description of Artificial Sequence: Synthetic oligonucleotide
  Antisense strand to SEQ ID NO: 1589641
auuacugacgugcgaauuu

SEQ ID NO: 1589643 - RNA, 19 nt, Artificial Sequence
  Description of Artificial Sequence: Synthetic oligonucleotide
  Sense strand starting at position 2724 of SEQ ID NO: 1560288
auucgcacgucaguaauuu

SEQ ID NO: 1589644 - RNA, 19 nt, Artificial Sequence
  Description of Artificial Sequence: Synthetic oligonucleotide
  Antisense strand to SEQ ID NO: 1589643
aaauuacugacgugcgaau

SEQ ID NO: 1589645 - RNA, 19 nt, Artificial Sequence
  Description of Artificial Sequence: Synthetic oligonucleotide
  Sense strand starting at position 2725 of SEQ ID NO: 1560288
uucgcacgucaguaauuua

SEQ ID NO: 1589646 - RNA, 19 nt, Artificial Sequence
  Description of Artificial Sequence: Synthetic oligonucleotide
  Antisense strand to SEQ ID NO: 1589645
uaaauuacugacgugcgaa

SEQ ID NO: 1589647 - RNA, 19 nt, Artificial Sequence
  Description of Artificial Sequence: Synthetic oligonucleotide
  Sense strand starting at position 2728 of SEQ ID NO: 1560288
gcacgucaguaauuuacau

SEQ ID NO: 1589648 - RNA, 19 nt, Artificial Sequence
  Description of Artificial Sequence: Synthetic oligonucleotide
  Antisense strand to SEQ ID NO: 1589647
auguaaauuacugacgugc

SEQ ID NO: 1589649 - RNA, 19 nt, Artificial Sequence
  Description of Artificial Sequence: Synthetic oligonucleotide
  Sense strand starting at position 2732 of SEQ ID NO: 1560288
gucaguaauuuacauaagu

SEQ ID NO: 1589650 - RNA, 19 nt, Artificial Sequence
  Description of Artificial Sequence: Synthetic oligonucleotide
  Antisense strand to SEQ ID NO: 1589649
acuuauguaaauuacugac

SEQ ID NO: 1589651 - RNA, 19 nt, Artificial Sequence
  Description of Artificial Sequence: Synthetic oligonucleotide
  Sense strand starting at position 2775 of SEQ ID NO: 1560288
gugcggguugcccuugaga

SEQ ID NO: 1589652 - RNA, 19 nt, Artificial Sequence
  Description of Artificial Sequence: Synthetic oligonucleotide
  Antisense strand to SEQ ID NO: 1589651
ucucaagggcaacccgcac

SEQ ID NO: 1589653 - RNA, 19 nt, Artificial Sequence
  Description of Artificial Sequence: Synthetic oligonucleotide
  Sense strand starting at position 2777 of SEQ ID NO: 1560288
gcggguugcccuugagaaa

SEQ ID NO: 1589654 - RNA, 19 nt, Artificial Sequence
  Description of Artificial Sequence: Synthetic oligonucleotide
  Antisense strand to SEQ ID NO: 1589653
uuucucaagggcaacccgc

SEQ ID NO: 1589655 - RNA, 19 nt, Artificial Sequence
  Description of Artificial Sequence: Synthetic oligonucleotide
  Sense strand starting at position 2808 of SEQ ID NO: 1560288
cuagaagggaugugcaaau

SEQ ID NO: 1589656 - RNA, 19 nt, Artificial Sequence
  Description of Artificial Sequence: Synthetic oligonucleotide
  Antisense strand to SEQ ID NO: 1589655
auuugcacaucccuucuag

SEQ ID NO: 1589657 - RNA, 19 nt, Artificial Sequence
  Description of Artificial Sequence: Synthetic oligonucleotide
  Sense strand starting at position 2860 of SEQ ID NO: 1560288
ucgggacgauugugggaau

SEQ ID NO: 1589658 - RNA, 19 nt, Artificial Sequence
  Description of Artificial Sequence: Synthetic oligonucleotide
  Antisense strand to SEQ ID NO: 1589657
auucccacaaucgucccga

SEQ ID NO: 1589659 - RNA, 19 nt, Artificial Sequence
  Description of Artificial Sequence: Synthetic oligonucleotide
  Sense strand starting at position 2863 of SEQ ID NO: 1560288
ggacgauugugggaaucag

SEQ ID NO: 1589660 - RNA, 19 nt, Artificial Sequence
  Description of Artificial Sequence: Synthetic oligonucleotide
  Antisense strand to SEQ ID NO: 1589659
cugauucccacaaucgucc

SEQ ID NO: 1589661 - RNA, 19 nt, Artificial Sequence
  Description of Artificial Sequence: Synthetic oligonucleotide
  Sense strand starting at position 3004 of SEQ ID NO: 1560288
ggaacacuuuaggagacua

SEQ ID NO: 1589662 - RNA, 19 nt, Artificial Sequence
  Description of Artificial Sequence: Synthetic oligonucleotide
  Antisense strand to SEQ ID NO: 1589661
uagucuccuaaaguguucc

SEQ ID NO: 1589663 - RNA, 19 nt, Artificial Sequence
  Description of Artificial Sequence: Synthetic oligonucleotide
  Sense strand starting at position 3012 of SEQ ID NO: 1560288
uuaggagacuaaggagaua

SEQ ID NO: 1589664 - RNA, 19 nt, Artificial Sequence
  Description of Artificial Sequence: Synthetic oligonucleotide
  Antisense strand to SEQ ID NO: 1589663
uaucuccuuagucuccuaa

SEQ ID NO: 1589665 - RNA, 19 nt, Artificial Sequence
  Description of Artificial Sequence: Synthetic oligonucleotide
  Sense strand starting at position 3057 of SEQ ID NO: 1560288
ccaccauugcucuggagag

SEQ ID NO: 1589666 - RNA, 19 nt, Artificial Sequence
  Description of Artificial Sequence: Synthetic oligonucleotide
  Antisense strand to SEQ ID NO: 1589665
cucuccagagcaauggugg

SEQ ID NO: 1589667 - RNA, 19 nt, Artificial Sequence
  Description of Artificial Sequence: Synthetic oligonucleotide
  Sense strand starting at position 3195 of SEQ ID NO: 1560288
gcgguucgcgugagcacaa

SEQ ID NO: 1589668 - RNA, 19 nt, Artificial Sequence
  Description of Artificial Sequence: Synthetic oligonucleotide
  Antisense strand to SEQ ID NO: 1589667
uugugcucacgcgaaccgc

SEQ ID NO: 1589669 - RNA, 19 nt, Artificial Sequence
  Description of Artificial Sequence: Synthetic oligonucleotide
  Sense strand starting at position 3220 of SEQ ID NO: 1560288
gcauacugguauccacaca

SEQ ID NO: 1589670 - RNA, 19 nt, Artificial Sequence
  Description of Artificial Sequence: Synthetic oligonucleotide
  Antisense strand to SEQ ID NO: 1589669
uguguggauaccaguaugc

SEQ ID NO: 1589671 - RNA, 19 nt, Artificial Sequence
  Description of Artificial Sequence: Synthetic oligonucleotide
  Sense strand starting at position 3231 of SEQ ID NO: 1560288
uccacacaugcgugaggau

SEQ ID NO: 1589672 - RNA, 19 nt, Artificial Sequence
  Description of Artificial Sequence: Synthetic oligonucleotide
  Antisense strand to SEQ ID NO: 1589671
auccucacgcaugugugga

SEQ ID NO: 1589673 - RNA, 19 nt, Artificial Sequence
  Description of Artificial Sequence: Synthetic oligonucleotide
  Sense strand starting at position 3232 of SEQ ID NO: 1560288
ccacacaugcgugaggauu

SEQ ID NO: 1589674 - RNA, 19 nt, Artificial Sequence
  Description of Artificial Sequence: Synthetic oligonucleotide
  Antisense strand to SEQ ID NO: 1589673
aauccucacgcaugugugg

SEQ ID NO: 1589675 - RNA, 19 nt, Artificial Sequence
  Description of Artificial Sequence: Synthetic oligonucleotide
  Sense strand starting at position 3238 of SEQ ID NO: 1560288
augcgugaggauugcacaa

SEQ ID NO: 1589676 - RNA, 19 nt, Artificial Sequence
  Description of Artificial Sequence: Synthetic oligonucleotide
  Antisense strand to SEQ ID NO: 1589675
uugugcaauccucacgcau

SEQ ID NO: 1589677 - RNA, 19 nt, Artificial Sequence
  Description of Artificial Sequence: Synthetic oligonucleotide
  Sense strand starting at position 3302 of SEQ ID NO: 1560288
ggguguuucuaguuuaguu

SEQ ID NO: 1589678 - RNA, 19 nt, Artificial Sequence
  Description of Artificial Sequence: Synthetic oligonucleotide
  Antisense strand to SEQ ID NO: 1589677
aacuaaacuagaaacaccc

SEQ ID NO: 1589679 - RNA, 19 nt, Artificial Sequence
  Description of Artificial Sequence: Synthetic oligonucleotide
  Sense strand starting at position 3614 of SEQ ID NO: 1560288
gccacacauggguguuuaa

SEQ ID NO: 1589680 - RNA, 19 nt, Artificial Sequence
  Description of Artificial Sequence: Synthetic oligonucleotide
  Antisense strand to SEQ ID NO: 1589679
uuaaacacccauguguggc

SEQ ID NO: 1589681 - RNA, 19 nt, Artificial Sequence
  Description of Artificial Sequence: Synthetic oligonucleotide
  Sense strand starting at position 3938 of SEQ ID NO: 1560288
cagggacaucagcguguuu

SEQ ID NO: 1589682 - RNA, 19 nt, Artificial Sequence
  Description of Artificial Sequence: Synthetic oligonucleotide
  Antisense strand to SEQ ID NO: 1589681
aaacacgcugaugucccug

SEQ ID NO: 1589683 - RNA, 19 nt, Artificial Sequence
  Description of Artificial Sequence: Synthetic oligonucleotide
  Sense strand starting at position 3940 of SEQ ID NO: 1560288
gggacaucagcguguuuac

SEQ ID NO: 1589684 - RNA, 19 nt, Artificial Sequence
  Description of Artificial Sequence: Synthetic oligonucleotide
  Antisense strand to SEQ ID NO: 1589683
guaaacacgcugauguccc

SEQ ID NO: 1589685 - RNA, 19 nt, Artificial Sequence
  Description of Artificial Sequence: Synthetic oligonucleotide
  Sense strand starting at position 3943 of SEQ ID NO: 1560288
acaucagcguguuuacaca

SEQ ID NO: 1589686 - RNA, 19 nt, Artificial Sequence
  Description of Artificial Sequence: Synthetic oligonucleotide
  Antisense strand to SEQ ID NO: 1589685
uguguaaacacgcugaugu

SEQ ID NO: 1589687 - RNA, 19 nt, Artificial Sequence
  Description of Artificial Sequence: Synthetic oligonucleotide
  Sense strand starting at position 3952 of SEQ ID NO: 1560288
uguuuacacacgugagcuu

SEQ ID NO: 1589688 - RNA, 19 nt, Artificial Sequence
  Description of Artificial Sequence: Synthetic oligonucleotide
  Antisense strand to SEQ ID NO: 1589687
aagcucacguguguaaaca

SEQ ID NO: 1589689 - RNA, 19 nt, Artificial Sequence
  Description of Artificial Sequence: Synthetic oligonucleotide
  Sense strand starting at position 977 of SEQ ID NO: 1560289
gcgggaguccgcugacaga

SEQ ID NO: 1589690 - RNA, 19 nt, Artificial Sequence
  Description of Artificial Sequence: Synthetic oligonucleotide
  Antisense strand to SEQ ID NO: 1589689
ucugucagcggacucccgc

SEQ ID NO: 1589691 - RNA, 19 nt, Artificial Sequence
  Description of Artificial Sequence: Synthetic oligonucleotide
  Sense strand starting at position 980 of SEQ ID NO: 1560289
ggaguccgcugacagauaa

SEQ ID NO: 1589692 - RNA, 19 nt, Artificial Sequence
  Description of Artificial Sequence: Synthetic oligonucleotide
  Antisense strand to SEQ ID NO: 1589691
uuaucugucagcggacucc

SEQ ID NO: 1589693 - RNA, 19 nt, Artificial Sequence
  Description of Artificial Sequence: Synthetic oligonucleotide
  Sense strand starting at position 2210 of SEQ ID NO: 1560289
gcguuucuugcauguugga

SEQ ID NO: 1589694 - RNA, 19 nt, Artificial Sequence
  Description of Artificial Sequence: Synthetic oligonucleotide
  Antisense strand to SEQ ID NO: 1589693
uccaacaugcaagaaacgc

SEQ ID NO: 1589695 - RNA, 19 nt, Artificial Sequence
  Description of Artificial Sequence: Synthetic oligonucleotide
  Sense strand starting at position 2215 of SEQ ID NO: 1560289
ucuugcauguuggaaucaa

SEQ ID NO: 1589696 - RNA, 19 nt, Artificial Sequence
  Description of Artificial Sequence: Synthetic oligonucleotide
  Antisense strand to SEQ ID NO: 1589695
uugauuccaacaugcaaga

SEQ ID NO: 1589697 - RNA, 19 nt, Artificial Sequence
  Description of Artificial Sequence: Synthetic oligonucleotide
  Sense strand starting at position 2256 of SEQ ID NO: 1560289
cgcaaaugaugugauuuac

SEQ ID NO: 1589698 - RNA, 19 nt, Artificial Sequence
  Description of Artificial Sequence: Synthetic oligonucleotide
  Antisense strand to SEQ ID NO: 1589697
guaaaucacaucauuugcg

SEQ ID NO: 1589699 - RNA, 19 nt, Artificial Sequence
  Description of Artificial Sequence: Synthetic oligonucleotide
  Sense strand starting at position 2400 of SEQ ID NO: 1560289
gagaaauggcuacgcaguu

SEQ ID NO: 1589700 - RNA, 19 nt, Artificial Sequence
  Description of Artificial Sequence: Synthetic oligonucleotide
  Antisense strand to SEQ ID NO: 1589699
aacugcguagccauuucuc

SEQ ID NO: 1589701 - RNA, 19 nt, Artificial Sequence
  Description of Artificial Sequence: Synthetic oligonucleotide
  Sense strand starting at position 2401 of SEQ ID NO: 1560289
agaaauggcuacgcaguua

SEQ ID NO: 1589702 - RNA, 19 nt, Artificial Sequence
  Description of Artificial Sequence: Synthetic oligonucleotide
  Antisense strand to SEQ ID NO: 1589701
uaacugcguagccauuucu

SEQ ID NO: 1589703 - RNA, 19 nt, Artificial Sequence
  Description of Artificial Sequence: Synthetic oligonucleotide
  Sense strand starting at position 2409 of SEQ ID NO: 1560289
cuacgcaguuaguugagaa

SEQ ID NO: 1589704 - RNA, 19 nt, Artificial Sequence
  Description of Artificial Sequence: Synthetic oligonucleotide
  Antisense strand to SEQ ID NO: 1589703
uucucaacuaacugcguag

SEQ ID NO: 1589705 - RNA, 19 nt, Artificial Sequence
  Description of Artificial Sequence: Synthetic oligonucleotide
  Sense strand starting at position 2410 of SEQ ID NO: 1560289
uacgcaguuaguugagaaa

SEQ ID NO: 1589706 - RNA, 19 nt, Artificial Sequence
  Description of Artificial Sequence: Synthetic oligonucleotide
  Antisense strand to SEQ ID NO: 1589705
uuucucaacuaacugcgua

SEQ ID NO: 1589707 - RNA, 19 nt, Artificial Sequence
  Description of Artificial Sequence: Synthetic oligonucleotide
  Sense strand starting at position 2413 of SEQ ID NO: 1560289
gcaguuaguugagaaaugu

SEQ ID NO: 1589708 - RNA, 19 nt, Artificial Sequence
  Description of Artificial Sequence: Synthetic oligonucleotide
  Antisense strand to SEQ ID NO: 1589707
acauuucucaacuaacugc

SEQ ID NO: 1589709 - RNA, 19 nt, Artificial Sequence
  Description of Artificial Sequence: Synthetic oligonucleotide
  Sense strand starting at position 2417 of SEQ ID NO: 1560289
uuaguugagaaauguaugu

SEQ ID NO: 1589710 - RNA, 19 nt, Artificial Sequence
  Description of Artificial Sequence: Synthetic oligonucleotide
  Antisense strand to SEQ ID NO: 1589709
acauacauuucucaacuaa

SEQ ID NO: 1589711 - RNA, 19 nt, Artificial Sequence
  Description of Artificial Sequence: Synthetic oligonucleotide
  Sense strand starting at position 2433 of SEQ ID NO: 1560289
uguaaauucgcacgucagu

SEQ ID NO: 1589712 - RNA, 19 nt, Artificial Sequence
  Description of Artificial Sequence: Synthetic oligonucleotide
  Antisense strand to SEQ ID NO: 1589711
acugacgugcgaauuuaca

SEQ ID NO: 1589713 - RNA, 19 nt, Artificial Sequence
  Description of Artificial Sequence: Synthetic oligonucleotide
  Sense strand starting at position 2434 of SEQ ID NO: 1560289
guaaauucgcacgucagua

SEQ ID NO: 1589714 - RNA, 19 nt, Artificial Sequence
  Description of Artificial Sequence: Synthetic oligonucleotide
  Antisense strand to SEQ ID NO: 1589713
uacugacgugcgaauuuac

SEQ ID NO: 1589715 - RNA, 19 nt, Artificial Sequence
  Description of Artificial Sequence: Synthetic oligonucleotide
  Sense strand starting at position 2436 of SEQ ID NO: 1560289
aaauucgcacgucaguaau

SEQ ID NO: 1589716 - RNA, 19 nt, Artificial Sequence
  Description of Artificial Sequence: Synthetic oligonucleotide
  Antisense strand to SEQ ID NO: 1589715
auuacugacgugcgaauuu

SEQ ID NO: 1589717 - RNA, 19 nt, Artificial Sequence
  Description of Artificial Sequence: Synthetic oligonucleotide
  Sense strand starting at position 2438 of SEQ ID NO: 1560289
auucgcacgucaguaauuu

SEQ ID NO: 1589718 - RNA, 19 nt, Artificial Sequence
  Description of Artificial Sequence: Synthetic oligonucleotide
  Antisense strand to SEQ ID NO: 1589717
aaauuacugacgugcgaau

SEQ ID NO: 1589719 - RNA, 19 nt, Artificial Sequence
  Description of Artificial Sequence: Synthetic oligonucleotide
  Sense strand starting at position 2439 of SEQ ID NO: 1560289
uucgcacgucaguaauuua

SEQ ID NO: 1589720 - RNA, 19 nt, Artificial Sequence
  Description of Artificial Sequence: Synthetic oligonucleotide
  Antisense strand to SEQ ID NO: 1589719
uaaauuacugacgugcgaa

SEQ ID NO: 1589721 - RNA, 19 nt, Artificial Sequence
  Description of Artificial Sequence: Synthetic oligonucleotide
  Sense strand starting at position 2442 of SEQ ID NO: 1560289
gcacgucaguaauuuacau

SEQ ID NO: 1589722 - RNA, 19 nt, Artificial Sequence
  Description of Artificial Sequence: Synthetic oligonucleotide
  Antisense strand to SEQ ID NO: 1589721
auguaaauuacugacgugc

SEQ ID NO: 1589723 - RNA, 19 nt, Artificial Sequence
  Description of Artificial Sequence: Synthetic oligonucleotide
  Sense strand starting at position 2446 of SEQ ID NO: 1560289
gucaguaauuuacauaagu

SEQ ID NO: 1589724 - RNA, 19 nt, Artificial Sequence
  Description of Artificial Sequence: Synthetic oligonucleotide
  Antisense strand to SEQ ID NO: 1589723
acuuauguaaauuacugac

SEQ ID NO: 1589725 - RNA, 19 nt, Artificial Sequence
  Description of Artificial Sequence: Synthetic oligonucleotide
  Sense strand starting at position 2489 of SEQ ID NO: 1560289
gugcggguugcccuugaga

SEQ ID NO: 1589726 - RNA, 19 nt, Artificial Sequence
  Description of Artificial Sequence: Synthetic oligonucleotide
  Antisense strand to SEQ ID NO: 1589725
ucucaagggcaacccgcac

SEQ ID NO: 1589727 - RNA, 19 nt, Artificial Sequence
  Description of Artificial Sequence: Synthetic oligonucleotide
  Sense strand starting at position 2491 of SEQ ID NO: 1560289
gcggguugcccuugagaaa

SEQ ID NO: 1589728 - RNA, 19 nt, Artificial Sequence
  Description of Artificial Sequence: Synthetic oligonucleotide
  Antisense strand to SEQ ID NO: 1589727
uuucucaagggcaacccgc

SEQ ID NO: 1589729 - RNA, 19 nt, Artificial Sequence
  Description of Artificial Sequence: Synthetic oligonucleotide
  Sense strand starting at position 2522 of SEQ ID NO: 1560289
cuagaagggaugugcaaau

SEQ ID NO: 1589730 - RNA, 19 nt, Artificial Sequence
  Description of Artificial Sequence: Synthetic oligonucleotide
  Antisense strand to SEQ ID NO: 1589729
auuugcacaucccuucuag

SEQ ID NO: 1589731 - RNA, 19 nt, Artificial Sequence
  Description of Artificial Sequence: Synthetic oligonucleotide
  Sense strand starting at position 2574 of SEQ ID NO: 1560289
ucgggacgauugugggaau

SEQ ID NO: 1589732 - RNA, 19 nt, Artificial Sequence
  Description of Artificial Sequence: Synthetic oligonucleotide
  Antisense strand to SEQ ID NO: 1589731
auucccacaaucgucccga

SEQ ID NO: 1589733 - RNA, 19 nt, Artificial Sequence
  Description of Artificial Sequence: Synthetic oligonucleotide
  Sense strand starting at position 2577 of SEQ ID NO: 1560289
ggacgauugugggaaucag

SEQ ID NO: 1589734 - RNA, 19 nt, Artificial Sequence
  Description of Artificial Sequence: Synthetic oligonucleotide
  Antisense strand to SEQ ID NO: 1589733
cugauucccacaaucgucc

SEQ ID NO: 1589735 - RNA, 19 nt, Artificial Sequence
  Description of Artificial Sequence: Synthetic oligonucleotide
  Sense strand starting at position 2718 of SEQ ID NO: 1560289
ggaacacuuuaggagacua

SEQ ID NO: 1589736 - RNA, 19 nt, Artificial Sequence
  Description of Artificial Sequence: Synthetic oligonucleotide
  Antisense strand to SEQ ID NO: 1589735
uagucuccuaaaguguucc

SEQ ID NO: 1589737 - RNA, 19 nt, Artificial Sequence
  Description of Artificial Sequence: Synthetic oligonucleotide
  Sense strand starting at position 2726 of SEQ ID NO: 1560289
uuaggagacuaaggagaua

SEQ ID NO: 1589738 - RNA, 19 nt, Artificial Sequence
  Description of Artificial Sequence: Synthetic oligonucleotide
  Antisense strand to SEQ ID NO: 1589737
uaucuccuuagucuccuaa

SEQ ID NO: 1589739 - RNA, 19 nt, Artificial Sequence
  Description of Artificial Sequence: Synthetic oligonucleotide
  Sense strand starting at position 2771 of SEQ ID NO: 1560289
ccaccauugcucuggagag

SEQ ID NO: 1589740 - RNA, 19 nt, Artificial Sequence
  Description of Artificial Sequence: Synthetic oligonucleotide
  Antisense strand to SEQ ID NO: 1589739
cucuccagagcaauggugg

SEQ ID NO: 1589741 - RNA, 19 nt, Artificial Sequence
  Description of Artificial Sequence: Synthetic oligonucleotide
  Sense strand starting at position 2909 of SEQ ID NO: 1560289
gcgguucgcgugagcacaa

SEQ ID NO: 1589742 - RNA, 19 nt, Artificial Sequence
  Description of Artificial Sequence: Synthetic oligonucleotide
  Antisense strand to SEQ ID NO: 1589741
uugugcucacgcgaaccgc

SEQ ID NO: 1589743 - RNA, 19 nt, Artificial Sequence
  Description of Artificial Sequence: Synthetic oligonucleotide
  Sense strand starting at position 2934 of SEQ ID NO: 1560289
gcauacugguauccacaca

SEQ ID NO: 1589744 - RNA, 19 nt, Artificial Sequence
  Description of Artificial Sequence: Synthetic oligonucleotide
  Antisense strand to SEQ ID NO: 1589743
uguguggauaccaguaugc

SEQ ID NO: 1589745 - RNA, 19 nt, Artificial Sequence
  Description of Artificial Sequence: Synthetic oligonucleotide
  Sense strand starting at position 2945 of SEQ ID NO: 1560289
uccacacaugcgugaggau

SEQ ID NO: 1589746 - RNA, 19 nt, Artificial Sequence
  Description of Artificial Sequence: Synthetic oligonucleotide
  Antisense strand to SEQ ID NO: 1589745
auccucacgcaugugugga

SEQ ID NO: 1589747 - RNA, 19 nt, Artificial Sequence
  Description of Artificial Sequence: Synthetic oligonucleotide
  Sense strand starting at position 2946 of SEQ ID NO: 1560289
ccacacaugcgugaggauu

SEQ ID NO: 1589748 - RNA, 19 nt, Artificial Sequence
  Description of Artificial Sequence: Synthetic oligonucleotide
  Antisense strand to SEQ ID NO: 1589747
aauccucacgcaugugugg

SEQ ID NO: 1589749 - RNA, 19 nt, Artificial Sequence
  Description of Artificial Sequence: Synthetic oligonucleotide
  Sense strand starting at position 2952 of SEQ ID NO: 1560289
augcgugaggauugcacaa

SEQ ID NO: 1589750 - RNA, 19 nt, Artificial Sequence
  Description of Artificial Sequence: Synthetic oligonucleotide
  Antisense strand to SEQ ID NO: 1589749
uugugcaauccucacgcau

SEQ ID NO: 1589751 - RNA, 19 nt, Artificial Sequence
  Description of Artificial Sequence: Synthetic oligonucleotide
  Sense strand starting at position 3016 of SEQ ID NO: 1560289
ggguguuucuaguuuaguu

SEQ ID NO: 1589752 - RNA, 19 nt, Artificial Sequence
  Description of Artificial Sequence: Synthetic oligonucleotide
  Antisense strand to SEQ ID NO: 1589751
aacuaaacuagaaacaccc

SEQ ID NO: 1589753 - RNA, 19 nt, Artificial Sequence
  Description of Artificial Sequence: Synthetic oligonucleotide
  Sense strand starting at position 3328 of SEQ ID NO: 1560289
gccacacauggguguuuaa

SEQ ID NO: 1589754 - RNA, 19 nt, Artificial Sequence
  Description of Artificial Sequence: Synthetic oligonucleotide
  Antisense strand to SEQ ID NO: 1589753
uuaaacacccauguguggc

SEQ ID NO: 1589755 - RNA, 19 nt, Artificial Sequence
  Description of Artificial Sequence: Synthetic oligonucleotide
  Sense strand starting at position 3652 of SEQ ID NO: 1560289
cagggacaucagcguguuu

SEQ ID NO: 1589756 - RNA, 19 nt, Artificial Sequence
  Description of Artificial Sequence: Synthetic oligonucleotide
  Antisense strand to SEQ ID NO: 1589755
aaacacgcugaugucccug

SEQ ID NO: 1589757 - RNA, 19 nt, Artificial Sequence
  Description of Artificial Sequence: Synthetic oligonucleotide
  Sense strand starting at position 3654 of SEQ ID NO: 1560289
gggacaucagcguguuuac

SEQ ID NO: 1589758 - RNA, 19 nt, Artificial Sequence
  Description of Artificial Sequence: Synthetic oligonucleotide
  Antisense strand to SEQ ID NO: 1589757
guaaacacgcugauguccc

SEQ ID NO: 1589759 - RNA, 19 nt, Artificial Sequence
  Description of Artificial Sequence: Synthetic oligonucleotide
  Sense strand starting at position 3657 of SEQ ID NO: 1560289
acaucagcguguuuacaca

SEQ ID NO: 1589760 - RNA, 19 nt, Artificial Sequence
  Description of Artificial Sequence: Synthetic oligonucleotide
  Antisense strand to SEQ ID NO: 1589759
uguguaaacacgcugaugu

SEQ ID NO: 1589761 - RNA, 19 nt, Artificial Sequence
  Description of Artificial Sequence: Synthetic oligonucleotide
  Sense strand starting at position 3666 of SEQ ID NO: 1560289
uguuuacacacgugagcuu

SEQ ID NO: 1589762 - RNA, 19 nt, Artificial Sequence
  Description of Artificial Sequence: Synthetic oligonucleotide
  Antisense strand to SEQ ID NO: 1589761
aagcucacguguguaaaca

SEQ ID NO: 1589763 - RNA, 19 nt, Artificial Sequence
  Description of Artificial Sequence: Synthetic oligonucleotide
  Sense strand starting at position 3743 of SEQ ID NO: 1560289
gcaccugagucaucaugcu

SEQ ID NO: 1589764 - RNA, 19 nt, Artificial Sequence
  Description of Artificial Sequence: Synthetic oligonucleotide
  Antisense strand to SEQ ID NO: 1589763
agcaugaugacucaggugc

SEQ ID NO: 1589765 - RNA, 19 nt, Artificial Sequence
  Description of Artificial Sequence: Synthetic oligonucleotide
  Sense strand starting at position 3749 of SEQ ID NO: 1560289
gagucaucaugcuugguau

SEQ ID NO: 1589766 - RNA, 19 nt, Artificial Sequence
  Description of Artificial Sequence: Synthetic oligonucleotide
  Antisense strand to SEQ ID NO: 1589765
auaccaagcaugaugacuc

SEQ ID NO: 1589767 - RNA, 19 nt, Artificial Sequence
  Description of Artificial Sequence: Synthetic oligonucleotide
  Sense strand starting at position 3750 of SEQ ID NO: 1560289
agucaucaugcuugguaua

SEQ ID NO: 1589768 - RNA, 19 nt, Artificial Sequence
  Description of Artificial Sequence: Synthetic oligonucleotide
  Antisense strand to SEQ ID NO: 1589767
uauaccaagcaugaugacu

SEQ ID NO: 1589769 - RNA, 19 nt, Artificial Sequence
  Description of Artificial Sequence: Synthetic oligonucleotide
  Sense strand starting at position 2 of SEQ ID NO: 1560290
ugugaaagguccuggugua

SEQ ID NO: 1589770 - RNA, 19 nt, Artificial Sequence
  Description of Artificial Sequence: Synthetic oligonucleotide
  Antisense strand to SEQ ID NO: 1589769
uacaccaggaccuuucaca

SEQ ID NO: 1589771 - RNA, 19 nt, Artificial Sequence
  Description of Artificial Sequence: Synthetic oligonucleotide
  Sense strand starting at position 3 of SEQ ID NO: 1560290
gugaaagguccugguguac

SEQ ID NO: 1589772 - RNA, 19 nt, Artificial Sequence
  Description of Artificial Sequence: Synthetic oligonucleotide
  Antisense strand to SEQ ID NO: 1589771
guacaccaggaccuuucac

SEQ ID NO: 1589773 - RNA, 19 nt, Artificial Sequence
  Description of Artificial Sequence: Synthetic oligonucleotide
  Sense strand starting at position 28 of SEQ ID NO: 1560290
ccaugaaacaucuggguag

SEQ ID NO: 1589774 - RNA, 19 nt, Artificial Sequence
  Description of Artificial Sequence: Synthetic oligonucleotide
  Antisense strand to SEQ ID NO: 1589773
cuacccagauguuucaugg

SEQ ID NO: 1589775 - RNA, 19 nt, Artificial Sequence
  Description of Artificial Sequence: Synthetic oligonucleotide
  Sense strand starting at position 123 of SEQ ID NO: 1560290
gagggcuguuggguguuaa

SEQ ID NO: 1589776 - RNA, 19 nt, Artificial Sequence
  Description of Artificial Sequence: Synthetic oligonucleotide
  Antisense strand to SEQ ID NO: 1589775
uuaacacccaacagcccuc

SEQ ID NO: 1589777 - RNA, 19 nt, Artificial Sequence
  Description of Artificial Sequence: Synthetic oligonucleotide
  Sense strand starting at position 205 of SEQ ID NO: 1560290
uuuauaacccuguaaagua

SEQ ID NO: 1589778 - RNA, 19 nt, Artificial Sequence
  Description of Artificial Sequence: Synthetic oligonucleotide
  Antisense strand to SEQ ID NO: 1589777
uacuuuacaggguuauaaa

SEQ ID NO: 1589779 - RNA, 19 nt, Artificial Sequence
  Description of Artificial Sequence: Synthetic oligonucleotide
  Sense strand starting at position 212 of SEQ ID NO: 1560290
cccuguaaaguaggucuau

SEQ ID NO: 1589780 - RNA, 19 nt, Artificial Sequence
  Description of Artificial Sequence: Synthetic oligonucleotide
  Antisense strand to SEQ ID NO: 1589779
auagaccuacuuuacaggg

SEQ ID NO: 1589781 - RNA, 19 nt, Artificial Sequence
  Description of Artificial Sequence: Synthetic oligonucleotide
  Sense strand starting at position 213 of SEQ ID NO: 1560290
ccuguaaaguaggucuauu

SEQ ID NO: 1589782 - RNA, 19 nt, Artificial Sequence
  Description of Artificial Sequence: Synthetic oligonucleotide
  Antisense strand to SEQ ID NO: 1589781
aauagaccuacuuuacagg

SEQ ID NO: 1589783 - RNA, 19 nt, Artificial Sequence
  Description of Artificial Sequence: Synthetic oligonucleotide
  Sense strand starting at position 712 of SEQ ID NO: 1560290
uugcaauccuauuauaggu

SEQ ID NO: 1589784 - RNA, 19 nt, Artificial Sequence
  Description of Artificial Sequence: Synthetic oligonucleotide
  Antisense strand to SEQ ID NO: 1589783
accuauaauaggauugcaa

SEQ ID NO: 1589785 - RNA, 19 nt, Artificial Sequence
  Description of Artificial Sequence: Synthetic oligonucleotide
  Sense strand starting at position 728 of SEQ ID NO: 1560290
ggucuaaagaucugaguua

SEQ ID NO: 1589786 - RNA, 19 nt, Artificial Sequence
  Description of Artificial Sequence: Synthetic oligonucleotide
  Antisense strand to SEQ ID NO: 1589785
uaacucagaucuuuagacc

SEQ ID NO: 1589787 - RNA, 19 nt, Artificial Sequence
  Description of Artificial Sequence: Synthetic oligonucleotide
  Sense strand starting at position 729 of SEQ ID NO: 1560290
gucuaaagaucugaguuag

SEQ ID NO: 1589788 - RNA, 19 nt, Artificial Sequence
  Description of Artificial Sequence: Synthetic oligonucleotide
  Antisense strand to SEQ ID NO: 1589787
cuaacucagaucuuuagac

SEQ ID NO: 1589789 - RNA, 19 nt, Artificial Sequence
  Description of Artificial Sequence: Synthetic oligonucleotide
  Sense strand starting at position 748 of SEQ ID NO: 1560290
ggagguuagccaugaccaa

SEQ ID NO: 1589790 - RNA, 19 nt, Artificial Sequence
  Description of Artificial Sequence: Synthetic oligonucleotide
  Antisense strand to SEQ ID NO: 1589789
uuggucauggcuaaccucc

SEQ ID NO: 1589791 - RNA, 19 nt, Artificial Sequence
  Description of Artificial Sequence: Synthetic oligonucleotide
  Sense strand starting at position 793 of SEQ ID NO: 1560290
cccagacuguguucucuau

SEQ ID NO: 1589792 - RNA, 19 nt, Artificial Sequence
  Description of Artificial Sequence: Synthetic oligonucleotide
  Antisense strand to SEQ ID NO: 1589791
auagagaacacagucuggg

SEQ ID NO: 1589793 - RNA, 19 nt, Artificial Sequence
  Description of Artificial Sequence: Synthetic oligonucleotide
  Sense strand starting at position 935 of SEQ ID NO: 1560290
cccguugaugcuuaugauu

SEQ ID NO: 1589794 - RNA, 19 nt, Artificial Sequence
  Description of Artificial Sequence: Synthetic oligonucleotide
  Antisense strand to SEQ ID NO: 1589793
aaucauaagcaucaacggg

SEQ ID NO: 1589795 - RNA, 19 nt, Artificial Sequence
  Description of Artificial Sequence: Synthetic oligonucleotide
  Sense strand starting at position 1115 of SEQ ID NO: 1560290
gccgauagggcauguuaca

SEQ ID NO: 1589796 - RNA, 19 nt, Artificial Sequence
  Description of Artificial Sequence: Synthetic oligonucleotide
  Antisense strand to SEQ ID NO: 1589795
uguaacaugcccuaucggc

SEQ ID NO: 1589797 - RNA, 19 nt, Artificial Sequence
  Description of Artificial Sequence: Synthetic oligonucleotide
  Sense strand starting at position 1397 of SEQ ID NO: 1560290
ggagaaugcuaucagcggu

SEQ ID NO: 1589798 - RNA, 19 nt, Artificial Sequence
  Description of Artificial Sequence: Synthetic oligonucleotide
  Antisense strand to SEQ ID NO: 1589797
accgcugauagcauucucc

SEQ ID NO: 1589799 - RNA, 19 nt, Artificial Sequence
  Description of Artificial Sequence: Synthetic oligonucleotide
  Sense strand starting at position 1468 of SEQ ID NO: 1560290
caaguuagcugauauggau

SEQ ID NO: 1589800 - RNA, 19 nt, Artificial Sequence
  Description of Artificial Sequence: Synthetic oligonucleotide
  Antisense strand to SEQ ID NO: 1589799
auccauaucagcuaacuug

SEQ ID NO: 1589801 - RNA, 19 nt, Artificial Sequence
  Description of Artificial Sequence: Synthetic oligonucleotide
  Sense strand starting at position 2131 of SEQ ID NO: 1560290
gucugucucucuucuuaac

SEQ ID NO: 1589802 - RNA, 19 nt, Artificial Sequence
  Description of Artificial Sequence: Synthetic oligonucleotide
  Antisense strand to SEQ ID NO: 1589801
guuaagaagagagacagac

SEQ ID NO: 1589803 - RNA, 19 nt, Artificial Sequence
  Description of Artificial Sequence: Synthetic oligonucleotide
  Sense strand starting at position 2944 of SEQ ID NO: 1560290
gugagaauccaucgcaaau

SEQ ID NO: 1589804 - RNA, 19 nt, Artificial Sequence
  Description of Artificial Sequence: Synthetic oligonucleotide
  Antisense strand to SEQ ID NO: 1589803
auuugcgauggauucucac

SEQ ID NO: 1589805 - RNA, 19 nt, Artificial Sequence
  Description of Artificial Sequence: Synthetic oligonucleotide
  Sense strand starting at position 3004 of SEQ ID NO: 1560290
ugaugaaacuucucagcug

SEQ ID NO: 1589806 - RNA, 19 nt, Artificial Sequence
  Description of Artificial Sequence: Synthetic oligonucleotide
  Antisense strand to SEQ ID NO: 1589805
cagcugagaaguuucauca

SEQ ID NO: 1589807 - RNA, 19 nt, Artificial Sequence
  Description of Artificial Sequence: Synthetic oligonucleotide
  Sense strand starting at position 3007 of SEQ ID NO: 1560290
ugaaacuucucagcugaca

SEQ ID NO: 1589808 - RNA, 19 nt, Artificial Sequence
  Description of Artificial Sequence: Synthetic oligonucleotide
  Antisense strand to SEQ ID NO: 1589807
ugucagcugagaaguuuca

SEQ ID NO: 1589809 - RNA, 19 nt, Artificial Sequence
  Description of Artificial Sequence: Synthetic oligonucleotide
  Sense strand starting at position 3211 of SEQ ID NO: 1560290
gacuccucuccauggagua

SEQ ID NO: 1589810 - RNA, 19 nt, Artificial Sequence
  Description of Artificial Sequence: Synthetic oligonucleotide
  Antisense strand to SEQ ID NO: 1589809
uacuccauggagaggaguc

SEQ ID NO: 1589811 - RNA, 19 nt, Artificial Sequence
  Description of Artificial Sequence: Synthetic oligonucleotide
  Sense strand starting at position 3239 of SEQ ID NO: 1560290
uagggaucugaaugccuca

SEQ ID NO: 1589812 - RNA, 19 nt, Artificial Sequence
  Description of Artificial Sequence: Synthetic oligonucleotide
  Antisense strand to SEQ ID NO: 1589811
ugaggcauucagaucccua

SEQ ID NO: 1589813 - RNA, 19 nt, Artificial Sequence
  Description of Artificial Sequence: Synthetic oligonucleotide
  Sense strand starting at position 3312 of SEQ ID NO: 1560290
ccaggaucacccuggcuaa

SEQ ID NO: 1589814 - RNA, 19 nt, Artificial Sequence
  Description of Artificial Sequence: Synthetic oligonucleotide
  Antisense strand to SEQ ID NO: 1589813
uuagccagggugauccugg

SEQ ID NO: 1589815 - RNA, 19 nt, Artificial Sequence
  Description of Artificial Sequence: Synthetic oligonucleotide
  Sense strand starting at position 3423 of SEQ ID NO: 1560290
gacugucuuugcccugaga

SEQ ID NO: 1589816 - RNA, 19 nt, Artificial Sequence
  Description of Artificial Sequence: Synthetic oligonucleotide
  Antisense strand to SEQ ID NO: 1589815
ucucagggcaaagacaguc

SEQ ID NO: 1589817 - RNA, 19 nt, Artificial Sequence
  Description of Artificial Sequence: Synthetic oligonucleotide
  Sense strand starting at position 3425 of SEQ ID NO: 1560290
cugucuuugcccugagaac

SEQ ID NO: 1589818 - RNA, 19 nt, Artificial Sequence
  Description of Artificial Sequence: Synthetic oligonucleotide
  Antisense strand to SEQ ID NO: 1589817
guucucagggcaaagacag

SEQ ID NO: 1589819 - RNA, 19 nt, Artificial Sequence
  Description of Artificial Sequence: Synthetic oligonucleotide
  Sense strand starting at position 3426 of SEQ ID NO: 1560290
ugucuuugcccugagaaca

SEQ ID NO: 1589820 - RNA, 19 nt, Artificial Sequence
  Description of Artificial Sequence: Synthetic oligonucleotide
  Antisense strand to SEQ ID NO: 1589819
uguucucagggcaaagaca

SEQ ID NO: 1589821 - RNA, 19 nt, Artificial Sequence
  Description of Artificial Sequence: Synthetic oligonucleotide
  Sense strand starting at position 3451 of SEQ ID NO: 1560290
ccgugagggcuuugcacaa

SEQ ID NO: 1589822 - RNA, 19 nt, Artificial Sequence
  Description of Artificial Sequence: Synthetic oligonucleotide
  Antisense strand to SEQ ID NO: 1589821
uugugcaaagcccucacgg

SEQ ID NO: 1589823 - RNA, 19 nt, Artificial Sequence
  Description of Artificial Sequence: Synthetic oligonucleotide
  Sense strand starting at position 3493 of SEQ ID NO: 1560290
aguaaacauuuguagaaac

SEQ ID NO: 1589824 - RNA, 19 nt, Artificial Sequence
  Description of Artificial Sequence: Synthetic oligonucleotide
  Antisense strand to SEQ ID NO: 1589823
guuucuacaaauguuuacu

SEQ ID NO: 1589825 - RNA, 19 nt, Artificial Sequence
  Description of Artificial Sequence: Synthetic oligonucleotide
  Sense strand starting at position 3529 of SEQ ID NO: 1560290
gagccauuccuaugugcag

SEQ ID NO: 1589826 - RNA, 19 nt, Artificial Sequence
  Description of Artificial Sequence: Synthetic oligonucleotide
  Antisense strand to SEQ ID NO: 1589825
cugcacauaggaauggcuc

SEQ ID NO: 1589827 - RNA, 19 nt, Artificial Sequence
  Description of Artificial Sequence: Synthetic oligonucleotide
  Sense strand starting at position 3552 of SEQ ID NO: 1560290
cgcucugagcucuuugcau

SEQ ID NO: 1589828 - RNA, 19 nt, Artificial Sequence
  Description of Artificial Sequence: Synthetic oligonucleotide
  Antisense strand to SEQ ID NO: 1589827
augcaaagagcucagagcg

SEQ ID NO: 1589829 - RNA, 19 nt, Artificial Sequence
  Description of Artificial Sequence: Synthetic oligonucleotide
  Sense strand starting at position 3556 of SEQ ID NO: 1560290
cugagcucuuugcaugcau

SEQ ID NO: 1589830 - RNA, 19 nt, Artificial Sequence
  Description of Artificial Sequence: Synthetic oligonucleotide
  Antisense strand to SEQ ID NO: 1589829
augcaugcaaagagcucag

SEQ ID NO: 1589831 - RNA, 19 nt, Artificial Sequence
  Description of Artificial Sequence: Synthetic oligonucleotide
  Sense strand starting at position 3558 of SEQ ID NO: 1560290
gagcucuuugcaugcaugu

SEQ ID NO: 1589832 - RNA, 19 nt, Artificial Sequence
  Description of Artificial Sequence: Synthetic oligonucleotide
  Antisense strand to SEQ ID NO: 1589831
acaugcaugcaaagagcuc

SEQ ID NO: 1589833 - RNA, 19 nt, Artificial Sequence
  Description of Artificial Sequence: Synthetic oligonucleotide
  Sense strand starting at position 3572 of SEQ ID NO: 1560290
cauguauuagcucaucgaa

SEQ ID NO: 1589834 - RNA, 19 nt, Artificial Sequence
  Description of Artificial Sequence: Synthetic oligonucleotide
  Antisense strand to SEQ ID NO: 1589833
uucgaugagcuaauacaug

SEQ ID NO: 1589835 - RNA, 19 nt, Artificial Sequence
  Description of Artificial Sequence: Synthetic oligonucleotide
  Sense strand starting at position 99 of SEQ ID NO: 1560291
gugcacaugccacaugaua

SEQ ID NO: 1589836 - RNA, 19 nt, Artificial Sequence
  Description of Artificial Sequence: Synthetic oligonucleotide
  Antisense strand to SEQ ID NO: 1589835
uaucauguggcaugugcac

SEQ ID NO: 1589837 - RNA, 19 nt, Artificial Sequence
  Description of Artificial Sequence: Synthetic oligonucleotide
  Sense strand starting at position 134 of SEQ ID NO: 1560291
cuagcaauuguacaagaug

SEQ ID NO: 1589838 - RNA, 19 nt, Artificial Sequence
  Description of Artificial Sequence: Synthetic oligonucleotide
  Antisense strand to SEQ ID NO: 1589837
caucuuguacaauugcuag

SEQ ID NO: 1589839 - RNA, 19 nt, Artificial Sequence
  Description of Artificial Sequence: Synthetic oligonucleotide
  Sense strand starting at position 204 of SEQ ID NO: 1560291
cuaaauguccgucaauaua

SEQ ID NO: 1589840 - RNA, 19 nt, Artificial Sequence
  Description of Artificial Sequence: Synthetic oligonucleotide
  Antisense strand to SEQ ID NO: 1589839
uauauugacggacauuuag

SEQ ID NO: 1589841 - RNA, 19 nt, Artificial Sequence
  Description of Artificial Sequence: Synthetic oligonucleotide
  Sense strand starting at position 214 of SEQ ID NO: 1560291
gucaauauaucccugguua

SEQ ID NO: 1589842 - RNA, 19 nt, Artificial Sequence
  Description of Artificial Sequence: Synthetic oligonucleotide
  Antisense strand to SEQ ID NO: 1589841
uaaccagggauauauugac

SEQ ID NO: 1589843 - RNA, 19 nt, Artificial Sequence
  Description of Artificial Sequence: Synthetic oligonucleotide
  Sense strand starting at position 218 of SEQ ID NO: 1560291
auauaucccugguuaagua

SEQ ID NO: 1589844 - RNA, 19 nt, Artificial Sequence
  Description of Artificial Sequence: Synthetic oligonucleotide
  Antisense strand to SEQ ID NO: 1589843
uacuuaaccagggauauau

SEQ ID NO: 1589845 - RNA, 19 nt, Artificial Sequence
  Description of Artificial Sequence: Synthetic oligonucleotide
  Sense strand starting at position 222 of SEQ ID NO: 1560291
aucccugguuaaguaaauu

SEQ ID NO: 1589846 - RNA, 19 nt, Artificial Sequence
  Description of Artificial Sequence: Synthetic oligonucleotide
  Antisense strand to SEQ ID NO: 1589845
aauuuacuuaaccagggau

SEQ ID NO: 1589847 - RNA, 19 nt, Artificial Sequence
  Description of Artificial Sequence: Synthetic oligonucleotide
  Sense strand starting at position 290 of SEQ ID NO: 1560291
gaaauacagugguuuggaa

SEQ ID NO: 1589848 - RNA, 19 nt, Artificial Sequence
  Description of Artificial Sequence: Synthetic oligonucleotide
  Antisense strand to SEQ ID NO: 1589847
uuccaaaccacuguauuuc

SEQ ID NO: 1589849 - RNA, 19 nt, Artificial Sequence
  Description of Artificial Sequence: Synthetic oligonucleotide
  Sense strand starting at position 297 of SEQ ID NO: 1560291
agugguuuggaagggucaa

SEQ ID NO: 1589850 - RNA, 19 nt, Artificial Sequence
  Description of Artificial Sequence: Synthetic oligonucleotide
  Antisense strand to SEQ ID NO: 1589849
uugacccuuccaaaccacu

SEQ ID NO: 1589851 - RNA, 19 nt, Artificial Sequence
  Description of Artificial Sequence: Synthetic oligonucleotide
  Sense strand starting at position 309 of SEQ ID NO: 1560291
gggucaacauauguucuua

SEQ ID NO: 1589852 - RNA, 19 nt, Artificial Sequence
  Description of Artificial Sequence: Synthetic oligonucleotide
  Antisense strand to SEQ ID NO: 1589851
uaagaacauauguugaccc

SEQ ID NO: 1589853 - RNA, 19 nt, Artificial Sequence
  Description of Artificial Sequence: Synthetic oligonucleotide
  Sense strand starting at position 311 of SEQ ID NO: 1560291
gucaacauauguucuuaau

SEQ ID NO: 1589854 - RNA, 19 nt, Artificial Sequence
  Description of Artificial Sequence: Synthetic oligonucleotide
  Antisense strand to SEQ ID NO: 1589853
auuaagaacauauguugac

SEQ ID NO: 1589855 - RNA, 19 nt, Artificial Sequence
  Description of Artificial Sequence: Synthetic oligonucleotide
  Sense strand starting at position 328 of SEQ ID NO: 1560291
augagaaagcaauguauaa

SEQ ID NO: 1589856 - RNA, 19 nt, Artificial Sequence
  Description of Artificial Sequence: Synthetic oligonucleotide
  Antisense strand to SEQ ID NO: 1589855
uuauacauugcuuucucau

SEQ ID NO: 1589857 - RNA, 19 nt, Artificial Sequence
  Description of Artificial Sequence: Synthetic oligonucleotide
  Sense strand starting at position 355 of SEQ ID NO: 1560291
auauaauaugccgacuucu

SEQ ID NO: 1589858 - RNA, 19 nt, Artificial Sequence
  Description of Artificial Sequence: Synthetic oligonucleotide
  Antisense strand to SEQ ID NO: 1589857
agaagucggcauauuauau

SEQ ID NO: 1589859 - RNA, 19 nt, Artificial Sequence
  Description of Artificial Sequence: Synthetic oligonucleotide
  Sense strand starting at position 784 of SEQ ID NO: 1560291
auaacucagcguuaacauc

SEQ ID NO: 1589860 - RNA, 19 nt, Artificial Sequence
  Description of Artificial Sequence: Synthetic oligonucleotide
  Antisense strand to SEQ ID NO: 1589859
gauguuaacgcugaguuau

SEQ ID NO: 1589861 - RNA, 19 nt, Artificial Sequence
  Description of Artificial Sequence: Synthetic oligonucleotide
  Sense strand starting at position 839 of SEQ ID NO: 1560291
ccucaugggcucuaguauu

SEQ ID NO: 1589862 - RNA, 19 nt, Artificial Sequence
  Description of Artificial Sequence: Synthetic oligonucleotide
  Antisense strand to SEQ ID NO: 1589861
aauacuagagcccaugagg

SEQ ID NO: 1589863 - RNA, 19 nt, Artificial Sequence
  Description of Artificial Sequence: Synthetic oligonucleotide
  Sense strand starting at position 966 of SEQ ID NO: 1560291
cucaaagaacguuacaguu

SEQ ID NO: 1589864 - RNA, 19 nt, Artificial Sequence
  Description of Artificial Sequence: Synthetic oligonucleotide
  Antisense strand to SEQ ID NO: 1589863
aacuguaacguucuuugag

SEQ ID NO: 1589865 - RNA, 19 nt, Artificial Sequence
  Description of Artificial Sequence: Synthetic oligonucleotide
  Sense strand starting at position 1084 of SEQ ID NO: 1560291
cgauauacucuugacuucu

SEQ ID NO: 1589866 - RNA, 19 nt, Artificial Sequence
  Description of Artificial Sequence: Synthetic oligonucleotide
  Antisense strand to SEQ ID NO: 1589865
agaagucaagaguauaucg

SEQ ID NO: 1589867 - RNA, 19 nt, Artificial Sequence
  Description of Artificial Sequence: Synthetic oligonucleotide
  Sense strand starting at position 1136 of SEQ ID NO: 1560291
ugcagagguucucuugaag

SEQ ID NO: 1589868 - RNA, 19 nt, Artificial Sequence
  Description of Artificial Sequence: Synthetic oligonucleotide
  Antisense strand to SEQ ID NO: 1589867
cuucaagagaaccucugca

SEQ ID NO: 1589869 - RNA, 19 nt, Artificial Sequence
  Description of Artificial Sequence: Synthetic oligonucleotide
  Sense strand starting at position 1139 of SEQ ID NO: 1560291
agagguucucuugaaguag

SEQ ID NO: 1589870 - RNA, 19 nt, Artificial Sequence
  Description of Artificial Sequence: Synthetic oligonucleotide
  Antisense strand to SEQ ID NO: 1589869
cuacuucaagagaaccucu

SEQ ID NO: 1589871 - RNA, 19 nt, Artificial Sequence
  Description of Artificial Sequence: Synthetic oligonucleotide
  Sense strand starting at position 1151 of SEQ ID NO: 1560291
gaaguagugucaccacaua

SEQ ID NO: 1589872 - RNA, 19 nt, Artificial Sequence
  Description of Artificial Sequence: Synthetic oligonucleotide
  Antisense strand to SEQ ID NO: 1589871
uauguggugacacuacuuc

SEQ ID NO: 1589873 - RNA, 19 nt, Artificial Sequence
  Description of Artificial Sequence: Synthetic oligonucleotide
  Sense strand starting at position 1181 of SEQ ID NO: 1560291
uugauaaacuuaucgcaac

SEQ ID NO: 1589874 - RNA, 19 nt, Artificial Sequence
  Description of Artificial Sequence: Synthetic oligonucleotide
  Antisense strand to SEQ ID NO: 1589873
guugcgauaaguuuaucaa

SEQ ID NO: 1589875 - RNA, 19 nt, Artificial Sequence
  Description of Artificial Sequence: Synthetic oligonucleotide
  Sense strand starting at position 1205 of SEQ ID NO: 1560291
ucuucuaucagaggguuga

SEQ ID NO: 1589876 - RNA, 19 nt, Artificial Sequence
  Description of Artificial Sequence: Synthetic oligonucleotide
  Antisense strand to SEQ ID NO: 1589875
ucaacccucugauagaaga

SEQ ID NO: 1589877 - RNA, 19 nt, Artificial Sequence
  Description of Artificial Sequence: Synthetic oligonucleotide
  Sense strand starting at position 1206 of SEQ ID NO: 1560291
cuucuaucagaggguugau

SEQ ID NO: 1589878 - RNA, 19 nt, Artificial Sequence
  Description of Artificial Sequence: Synthetic oligonucleotide
  Antisense strand to SEQ ID NO: 1589877
aucaacccucugauagaag

SEQ ID NO: 1589879 - RNA, 19 nt, Artificial Sequence
  Description of Artificial Sequence: Synthetic oligonucleotide
  Sense strand starting at position 1209 of SEQ ID NO: 1560291
cuaucagaggguugauaac

SEQ ID NO: 1589880 - RNA, 19 nt, Artificial Sequence
  Description of Artificial Sequence: Synthetic oligonucleotide
  Antisense strand to SEQ ID NO: 1589879
guuaucaacccucugauag

SEQ ID NO: 1589881 - RNA, 19 nt, Artificial Sequence
  Description of Artificial Sequence: Synthetic oligonucleotide
  Sense strand starting at position 1290 of SEQ ID NO: 1560291
gcugauauucggcaucaaa

SEQ ID NO: 1589882 - RNA, 19 nt, Artificial Sequence
  Description of Artificial Sequence: Synthetic oligonucleotide
  Antisense strand to SEQ ID NO: 1589881
uuugaugccgaauaucagc

SEQ ID NO: 1589883 - RNA, 19 nt, Artificial Sequence
  Description of Artificial Sequence: Synthetic oligonucleotide
  Sense strand starting at position 1398 of SEQ ID NO: 1560291
ccagauaguggcggagaaa

SEQ ID NO: 1589884 - RNA, 19 nt, Artificial Sequence
  Description of Artificial Sequence: Synthetic oligonucleotide
  Antisense strand to SEQ ID NO: 1589883
uuucuccgccacuaucugg

SEQ ID NO: 1589885 - RNA, 19 nt, Artificial Sequence
  Description of Artificial Sequence: Synthetic oligonucleotide
  Sense strand starting at position 1410 of SEQ ID NO: 1560291
ggagaaacugcugguaauu

SEQ ID NO: 1589886 - RNA, 19 nt, Artificial Sequence
  Description of Artificial Sequence: Synthetic oligonucleotide
  Antisense strand to SEQ ID NO: 1589885
aauuaccagcaguuucucc

SEQ ID NO: 1589887 - RNA, 19 nt, Artificial Sequence
  Description of Artificial Sequence: Synthetic oligonucleotide
  Sense strand starting at position 2124 of SEQ ID NO: 1560291
gaaacaucccaacgacgaa

SEQ ID NO: 1589888 - RNA, 19 nt, Artificial Sequence
  Description of Artificial Sequence: Synthetic oligonucleotide
  Antisense strand to SEQ ID NO: 1589887
uucgucguugggauguuuc

SEQ ID NO: 1589889 - RNA, 19 nt, Artificial Sequence
  Description of Artificial Sequence: Synthetic oligonucleotide
  Sense strand starting at position 2257 of SEQ ID NO: 1560291
augugccaccucuauuaua

SEQ ID NO: 1589890 - RNA, 19 nt, Artificial Sequence
  Description of Artificial Sequence: Synthetic oligonucleotide
  Antisense strand to SEQ ID NO: 1589889
uauaauagagguggcacau

SEQ ID NO: 1589891 - RNA, 19 nt, Artificial Sequence
  Description of Artificial Sequence: Synthetic oligonucleotide
  Sense strand starting at position 2419 of SEQ ID NO: 1560291
auugacuaccuuggacauu

SEQ ID NO: 1589892 - RNA, 19 nt, Artificial Sequence
  Description of Artificial Sequence: Synthetic oligonucleotide
  Antisense strand to SEQ ID NO: 1589891
aauguccaagguagucaau

SEQ ID NO: 1589893 - RNA, 19 nt, Artificial Sequence
  Description of Artificial Sequence: Synthetic oligonucleotide
  Sense strand starting at position 2445 of SEQ ID NO: 1560291
cgaaucuuauuugugcaau

SEQ ID NO: 1589894 - RNA, 19 nt, Artificial Sequence
  Description of Artificial Sequence: Synthetic oligonucleotide
  Antisense strand to SEQ ID NO: 1589893
auugcacaaauaagauucg

SEQ ID NO: 1589895 - RNA, 19 nt, Artificial Sequence
  Description of Artificial Sequence: Synthetic oligonucleotide
  Sense strand starting at position 2519 of SEQ ID NO: 1560291
aagugaacauccguuuaac

SEQ ID NO: 1589896 - RNA, 19 nt, Artificial Sequence
  Description of Artificial Sequence: Synthetic oligonucleotide
  Antisense strand to SEQ ID NO: 1589895
guuaaacggauguucacuu

SEQ ID NO: 1589897 - RNA, 19 nt, Artificial Sequence
  Description of Artificial Sequence: Synthetic oligonucleotide
  Sense strand starting at position 2522 of SEQ ID NO: 1560291
ugaacauccguuuaacuac

SEQ ID NO: 1589898 - RNA, 19 nt, Artificial Sequence
  Description of Artificial Sequence: Synthetic oligonucleotide
  Antisense strand to SEQ ID NO: 1589897
guaguuaaacggauguuca

SEQ ID NO: 1589899 - RNA, 19 nt, Artificial Sequence
  Description of Artificial Sequence: Synthetic oligonucleotide
  Sense strand starting at position 2546 of SEQ ID NO: 1560291
aguccaagaaguggaauau

SEQ ID NO: 1589900 - RNA, 19 nt, Artificial Sequence
  Description of Artificial Sequence: Synthetic oligonucleotide
  Antisense strand to SEQ ID NO: 1589899
auauuccacuucuuggacu

SEQ ID NO: 1589901 - RNA, 19 nt, Artificial Sequence
  Description of Artificial Sequence: Synthetic oligonucleotide
  Sense strand starting at position 2611 of SEQ ID NO: 1560291
ccuuucuacgcagaaguaa

SEQ ID NO: 1589902 - RNA, 19 nt, Artificial Sequence
  Description of Artificial Sequence: Synthetic oligonucleotide
  Antisense strand to SEQ ID NO: 1589901
uuacuucugcguagaaagg

SEQ ID NO: 1589903 - RNA, 19 nt, Artificial Sequence
  Description of Artificial Sequence: Synthetic oligonucleotide
  Sense strand starting at position 2625 of SEQ ID NO: 1560291
aguaacaacuaugcugaua

SEQ ID NO: 1589904 - RNA, 19 nt, Artificial Sequence
  Description of Artificial Sequence: Synthetic oligonucleotide
  Antisense strand to SEQ ID NO: 1589903
uaucagcauaguuguuacu

SEQ ID NO: 1589905 - RNA, 19 nt, Artificial Sequence
  Description of Artificial Sequence: Synthetic oligonucleotide
  Sense strand starting at position 2732 of SEQ ID NO: 1560291
gaacuuuaucuaugugaga

SEQ ID NO: 1589906 - RNA, 19 nt, Artificial Sequence
  Description of Artificial Sequence: Synthetic oligonucleotide
  Antisense strand to SEQ ID NO: 1589905
ucucacauagauaaaguuc

SEQ ID NO: 1589907 - RNA, 19 nt, Artificial Sequence
  Description of Artificial Sequence: Synthetic oligonucleotide
  Sense strand starting at position 2754 of SEQ ID NO: 1560291
acacucaccugcguaauuu

SEQ ID NO: 1589908 - RNA, 19 nt, Artificial Sequence
  Description of Artificial Sequence: Synthetic oligonucleotide
  Antisense strand to SEQ ID NO: 1589907
aaauuacgcaggugagugu

SEQ ID NO: 1589909 - RNA, 19 nt, Artificial Sequence
  Description of Artificial Sequence: Synthetic oligonucleotide
  Sense strand starting at position 2953 of SEQ ID NO: 1560291
ugaccuucuagguggauga

SEQ ID NO: 1589910 - RNA, 19 nt, Artificial Sequence
  Description of Artificial Sequence: Synthetic oligonucleotide
  Antisense strand to SEQ ID NO: 1589909
ucauccaccuagaagguca

SEQ ID NO: 1589911 - RNA, 19 nt, Artificial Sequence
  Description of Artificial Sequence: Synthetic oligonucleotide
  Sense strand starting at position 3243 of SEQ ID NO: 1560291
accuuccgagcucaaauaa

SEQ ID NO: 1589912 - RNA, 19 nt, Artificial Sequence
  Description of Artificial Sequence: Synthetic oligonucleotide
  Antisense strand to SEQ ID NO: 1589911
uuauuugagcucggaaggu

SEQ ID NO: 1589913 - RNA, 19 nt, Artificial Sequence
  Description of Artificial Sequence: Synthetic oligonucleotide
  Sense strand starting at position 3881 of SEQ ID NO: 1560291
cuuuguucugauuaaugug

SEQ ID NO: 1589914 - RNA, 19 nt, Artificial Sequence
  Description of Artificial Sequence: Synthetic oligonucleotide
  Antisense strand to SEQ ID NO: 1589913
cacauuaaucagaacaaag

SEQ ID NO: 1589915 - RNA, 19 nt, Artificial Sequence
  Description of Artificial Sequence: Synthetic oligonucleotide
  Sense strand starting at position 76 of SEQ ID NO: 1560292
uuuauaccucgugaugcaa

SEQ ID NO: 1589916 - RNA, 19 nt, Artificial Sequence
  Description of Artificial Sequence: Synthetic oligonucleotide
  Antisense strand to SEQ ID NO: 1589915
uugcaucacgagguauaaa

SEQ ID NO: 1589917 - RNA, 19 nt, Artificial Sequence
  Description of Artificial Sequence: Synthetic oligonucleotide
  Sense strand starting at position 125 of SEQ ID NO: 1560292
gcacaauauuuagauugau

SEQ ID NO: 1589918 - RNA, 19 nt, Artificial Sequence
  Description of Artificial Sequence: Synthetic oligonucleotide
  Antisense strand to SEQ ID NO: 1589917
aucaaucuaaauauugugc

SEQ ID NO: 1589919 - RNA, 19 nt, Artificial Sequence
  Description of Artificial Sequence: Synthetic oligonucleotide
  Sense strand starting at position 262 of SEQ ID NO: 1560292
uaguucugaguuuggcaaa

SEQ ID NO: 1589920 - RNA, 19 nt, Artificial Sequence
  Description of Artificial Sequence: Synthetic oligonucleotide
  Antisense strand to SEQ ID NO: 1589919
uuugccaaacucagaacua

SEQ ID NO: 1589921 - RNA, 19 nt, Artificial Sequence
  Description of Artificial Sequence: Synthetic oligonucleotide
  Sense strand starting at position 294 of SEQ ID NO: 1560292
agagauuucucacagcauc

SEQ ID NO: 1589922 - RNA, 19 nt, Artificial Sequence
  Description of Artificial Sequence: Synthetic oligonucleotide
  Antisense strand to SEQ ID NO: 1589921
gaugcugugagaaaucucu

SEQ ID NO: 1589923 - RNA, 19 nt, Artificial Sequence
  Description of Artificial Sequence: Synthetic oligonucleotide
  Sense strand starting at position 966 of SEQ ID NO: 1560292
gguucuguuauuggcauuu

SEQ ID NO: 1589924 - RNA, 19 nt, Artificial Sequence
  Description of Artificial Sequence: Synthetic oligonucleotide
  Antisense strand to SEQ ID NO: 1589923
aaaugccaauaacagaacc

SEQ ID NO: 1589925 - RNA, 19 nt, Artificial Sequence
  Description of Artificial Sequence: Synthetic oligonucleotide
  Sense strand starting at position 1089 of SEQ ID NO: 1560292
ugucuugggaccuguuuga

SEQ ID NO: 1589926 - RNA, 19 nt, Artificial Sequence
  Description of Artificial Sequence: Synthetic oligonucleotide
  Antisense strand to SEQ ID NO: 1589925
ucaaacaggucccaagaca

SEQ ID NO: 1589927 - RNA, 19 nt, Artificial Sequence
  Description of Artificial Sequence: Synthetic oligonucleotide
  Sense strand starting at position 1331 of SEQ ID NO: 1560292
ugccguauucccuuccagu

SEQ ID NO: 1589928 - RNA, 19 nt, Artificial Sequence
  Description of Artificial Sequence: Synthetic oligonucleotide
  Antisense strand to SEQ ID NO: 1589927
acuggaagggaauacggca

SEQ ID NO: 1589929 - RNA, 19 nt, Artificial Sequence
  Description of Artificial Sequence: Synthetic oligonucleotide
  Sense strand starting at position 1332 of SEQ ID NO: 1560292
gccguauucccuuccaguu

SEQ ID NO: 1589930 - RNA, 19 nt, Artificial Sequence
  Description of Artificial Sequence: Synthetic oligonucleotide
  Antisense strand to SEQ ID NO: 1589929
aacuggaagggaauacggc

SEQ ID NO: 1589931 - RNA, 19 nt, Artificial Sequence
  Description of Artificial Sequence: Synthetic oligonucleotide
  Sense strand starting at position 1360 of SEQ ID NO: 1560292
ccuaaugacugaguuaacu

SEQ ID NO: 1589932 - RNA, 19 nt, Artificial Sequence
  Description of Artificial Sequence: Synthetic oligonucleotide
  Antisense strand to SEQ ID NO: 1589931
aguuaacucagucauuagg

SEQ ID NO: 1589933 - RNA, 19 nt, Artificial Sequence
  Description of Artificial Sequence: Synthetic oligonucleotide
  Sense strand starting at position 1425 of SEQ ID NO: 1560292
ggcuauuccuugccaccaa

SEQ ID NO: 1589934 - RNA, 19 nt, Artificial Sequence
  Description of Artificial Sequence: Synthetic oligonucleotide
  Antisense strand to SEQ ID NO: 1589933
uugguggcaaggaauagcc

SEQ ID NO: 1589935 - RNA, 19 nt, Artificial Sequence
  Description of Artificial Sequence: Synthetic oligonucleotide
  Sense strand starting at position 1604 of SEQ ID NO: 1560292
cucgaaaucccguaguaau

SEQ ID NO: 1589936 - RNA, 19 nt, Artificial Sequence
  Description of Artificial Sequence: Synthetic oligonucleotide
  Antisense strand to SEQ ID NO: 1589935
auuacuacgggauuucgag

SEQ ID NO: 1589937 - RNA, 19 nt, Artificial Sequence
  Description of Artificial Sequence: Synthetic oligonucleotide
  Sense strand starting at position 1615 of SEQ ID NO: 1560292
guaguaaucugaccggaau

SEQ ID NO: 1589938 - RNA, 19 nt, Artificial Sequence
  Description of Artificial Sequence: Synthetic oligonucleotide
  Antisense strand to SEQ ID NO: 1589937
auuccggucagauuacuac

SEQ ID NO: 1589939 - RNA, 19 nt, Artificial Sequence
  Description of Artificial Sequence: Synthetic oligonucleotide
  Sense strand starting at position 1616 of SEQ ID NO: 1560292
uaguaaucugaccggaauc

SEQ ID NO: 1589940 - RNA, 19 nt, Artificial Sequence
  Description of Artificial Sequence: Synthetic oligonucleotide
  Antisense strand to SEQ ID NO: 1589939
gauuccggucagauuacua

SEQ ID NO: 1589941 - RNA, 19 nt, Artificial Sequence
  Description of Artificial Sequence: Synthetic oligonucleotide
  Sense strand starting at position 1617 of SEQ ID NO: 1560292
aguaaucugaccggaauca

SEQ ID NO: 1589942 - RNA, 19 nt, Artificial Sequence
  Description of Artificial Sequence: Synthetic oligonucleotide
  Antisense strand to SEQ ID NO: 1589941
ugauuccggucagauuacu

SEQ ID NO: 1589943 - RNA, 19 nt, Artificial Sequence
  Description of Artificial Sequence: Synthetic oligonucleotide
  Sense strand starting at position 1618 of SEQ ID NO: 1560292
guaaucugaccggaaucau

SEQ ID NO: 1589944 - RNA, 19 nt, Artificial Sequence
  Description of Artificial Sequence: Synthetic oligonucleotide
  Antisense strand to SEQ ID NO: 1589943
augauuccggucagauuac

SEQ ID NO: 1589945 - RNA, 19 nt, Artificial Sequence
  Description of Artificial Sequence: Synthetic oligonucleotide
  Sense strand starting at position 1648 of SEQ ID NO: 1560292
ccagauacucgcggaacaa

SEQ ID NO: 1589946 - RNA, 19 nt, Artificial Sequence
  Description of Artificial Sequence: Synthetic oligonucleotide
  Antisense strand to SEQ ID NO: 1589945
uuguuccgcgaguaucugg

SEQ ID NO: 1589947 - RNA, 19 nt, Artificial Sequence
  Description of Artificial Sequence: Synthetic oligonucleotide
  Sense strand starting at position 1673 of SEQ ID NO: 1560292
ccgguuaauuucuaagaaa

SEQ ID NO: 1589948 - RNA, 19 nt, Artificial Sequence
  Description of Artificial Sequence: Synthetic oligonucleotide
  Antisense strand to SEQ ID NO: 1589947
uuucuuagaaauuaaccgg

SEQ ID NO: 1589949 - RNA, 19 nt, Artificial Sequence
  Description of Artificial Sequence: Synthetic oligonucleotide
  Sense strand starting at position 2020 of SEQ ID NO: 1560292
gucucagugagcgcguaaa

SEQ ID NO: 1589950 - RNA, 19 nt, Artificial Sequence
  Description of Artificial Sequence: Synthetic oligonucleotide
  Antisense strand to SEQ ID NO: 1589949
uuuacgcgcucacugagac

SEQ ID NO: 1589951 - RNA, 19 nt, Artificial Sequence
  Description of Artificial Sequence: Synthetic oligonucleotide
  Sense strand starting at position 2167 of SEQ ID NO: 1560292
cugcgcgguaucuuaaauu

SEQ ID NO: 1589952 - RNA, 19 nt, Artificial Sequence
  Description of Artificial Sequence: Synthetic oligonucleotide
  Antisense strand to SEQ ID NO: 1589951
aauuuaagauaccgcgcag

SEQ ID NO: 1589953 - RNA, 19 nt, Artificial Sequence
  Description of Artificial Sequence: Synthetic oligonucleotide
  Sense strand starting at position 2204 of SEQ ID NO: 1560292
auguaaaguuccuuauacg

SEQ ID NO: 1589954 - RNA, 19 nt, Artificial Sequence
  Description of Artificial Sequence: Synthetic oligonucleotide
  Antisense strand to SEQ ID NO: 1589953
cguauaaggaacuuuacau

SEQ ID NO: 1589955 - RNA, 19 nt, Artificial Sequence
  Description of Artificial Sequence: Synthetic oligonucleotide
  Sense strand starting at position 2593 of SEQ ID NO: 1560292
guuugauaauucccagagc

SEQ ID NO: 1589956 - RNA, 19 nt, Artificial Sequence
  Description of Artificial Sequence: Synthetic oligonucleotide
  Antisense strand to SEQ ID NO: 1589955
gcucugggaauuaucaaac

SEQ ID NO: 1589957 - RNA, 19 nt, Artificial Sequence
  Description of Artificial Sequence: Synthetic oligonucleotide
  Sense strand starting at position 2596 of SEQ ID NO: 1560292
ugauaauucccagagcuca

SEQ ID NO: 1589958 - RNA, 19 nt, Artificial Sequence
  Description of Artificial Sequence: Synthetic oligonucleotide
  Antisense strand to SEQ ID NO: 1589957
ugagcucugggaauuauca

SEQ ID NO: 1589959 - RNA, 19 nt, Artificial Sequence
  Description of Artificial Sequence: Synthetic oligonucleotide
  Sense strand starting at position 2601 of SEQ ID NO: 1560292
auucccagagcucauugaa

SEQ ID NO: 1589960 - RNA, 19 nt, Artificial Sequence
  Description of Artificial Sequence: Synthetic oligonucleotide
  Antisense strand to SEQ ID NO: 1589959
uucaaugagcucugggaau

SEQ ID NO: 1589961 - RNA, 19 nt, Artificial Sequence
  Description of Artificial Sequence: Synthetic oligonucleotide
  Sense strand starting at position 2604 of SEQ ID NO: 1560292
cccagagcucauugaaauc

SEQ ID NO: 1589962 - RNA, 19 nt, Artificial Sequence
  Description of Artificial Sequence: Synthetic oligonucleotide
  Antisense strand to SEQ ID NO: 1589961
gauuucaaugagcucuggg

SEQ ID NO: 1589963 - RNA, 19 nt, Artificial Sequence
  Description of Artificial Sequence: Synthetic oligonucleotide
  Sense strand starting at position 2641 of SEQ ID NO: 1560292
gcuuauuacaggcaaagga

SEQ ID NO: 1589964 - RNA, 19 nt, Artificial Sequence
  Description of Artificial Sequence: Synthetic oligonucleotide
  Antisense strand to SEQ ID NO: 1589963
uccuuugccuguaauaagc

SEQ ID NO: 1589965 - RNA, 19 nt, Artificial Sequence
  Description of Artificial Sequence: Synthetic oligonucleotide
  Sense strand starting at position 2715 of SEQ ID NO: 1560292
ugaaguuccuguguuccua

SEQ ID NO: 1589966 - RNA, 19 nt, Artificial Sequence
  Description of Artificial Sequence: Synthetic oligonucleotide
  Antisense strand to SEQ ID NO: 1589965
uaggaacacaggaacuuca

SEQ ID NO: 1589967 - RNA, 19 nt, Artificial Sequence
  Description of Artificial Sequence: Synthetic oligonucleotide
  Sense strand starting at position 2726 of SEQ ID NO: 1560292
uguuccuagggauguguua

SEQ ID NO: 1589968 - RNA, 19 nt, Artificial Sequence
  Description of Artificial Sequence: Synthetic oligonucleotide
  Antisense strand to SEQ ID NO: 1589967
uaacacaucccuaggaaca

SEQ ID NO: 1589969 - RNA, 19 nt, Artificial Sequence
  Description of Artificial Sequence: Synthetic oligonucleotide
  Sense strand starting at position 2845 of SEQ ID NO: 1560292
cuaggcaugcuugauuaaa

SEQ ID NO: 1589970 - RNA, 19 nt, Artificial Sequence
  Description of Artificial Sequence: Synthetic oligonucleotide
  Antisense strand to SEQ ID NO: 1589969
uuuaaucaagcaugccuag

SEQ ID NO: 1589971 - RNA, 19 nt, Artificial Sequence
  Description of Artificial Sequence: Synthetic oligonucleotide
  Sense strand starting at position 2856 of SEQ ID NO: 1560292
ugauuaaaccaucguccau

SEQ ID NO: 1589972 - RNA, 19 nt, Artificial Sequence
  Description of Artificial Sequence: Synthetic oligonucleotide
  Antisense strand to SEQ ID NO: 1589971
auggacgaugguuuaauca

SEQ ID NO: 1589973 - RNA, 19 nt, Artificial Sequence
  Description of Artificial Sequence: Synthetic oligonucleotide
  Sense strand starting at position 2936 of SEQ ID NO: 1560292
uaaugauaugguuagccuu

SEQ ID NO: 1589974 - RNA, 19 nt, Artificial Sequence
  Description of Artificial Sequence: Synthetic oligonucleotide
  Antisense strand to SEQ ID NO: 1589973
aaggcuaaccauaucauua

SEQ ID NO: 1589975 - RNA, 19 nt, Artificial Sequence
  Description of Artificial Sequence: Synthetic oligonucleotide
  Sense strand starting at position 2966 of SEQ ID NO: 1560292
agcucugauccugaugaua

SEQ ID NO: 1589976 - RNA, 19 nt, Artificial Sequence
  Description of Artificial Sequence: Synthetic oligonucleotide
  Antisense strand to SEQ ID NO: 1589975
uaucaucaggaucagagcu

SEQ ID NO: 1589977 - RNA, 19 nt, Artificial Sequence
  Description of Artificial Sequence: Synthetic oligonucleotide
  Sense strand starting at position 2994 of SEQ ID NO: 1560292
gugaaagucuauguuccau

SEQ ID NO: 1589978 - RNA, 19 nt, Artificial Sequence
  Description of Artificial Sequence: Synthetic oligonucleotide
  Antisense strand to SEQ ID NO: 1589977
auggaacauagacuuucac

SEQ ID NO: 1589979 - RNA, 19 nt, Artificial Sequence
  Description of Artificial Sequence: Synthetic oligonucleotide
  Sense strand starting at position 3349 of SEQ ID NO: 1560292
auaugagaguugcuggcaa

SEQ ID NO: 1589980 - RNA, 19 nt, Artificial Sequence
  Description of Artificial Sequence: Synthetic oligonucleotide
  Antisense strand to SEQ ID NO: 1589979
uugccagcaacucucauau

SEQ ID NO: 1589981 - RNA, 19 nt, Artificial Sequence
  Description of Artificial Sequence: Synthetic oligonucleotide
  Sense strand starting at position 3351 of SEQ ID NO: 1560292
augagaguugcuggcaauu

SEQ ID NO: 1589982 - RNA, 19 nt, Artificial Sequence
  Description of Artificial Sequence: Synthetic oligonucleotide
  Antisense strand to SEQ ID NO: 1589981
aauugccagcaacucucau

SEQ ID NO: 1589983 - RNA, 19 nt, Artificial Sequence
  Description of Artificial Sequence: Synthetic oligonucleotide
  Sense strand starting at position 3422 of SEQ ID NO: 1560292
ggagcugauuggguuggaa

SEQ ID NO: 1589984 - RNA, 19 nt, Artificial Sequence
  Description of Artificial Sequence: Synthetic oligonucleotide
  Antisense strand to SEQ ID NO: 1589983
uuccaacccaaucagcucc

SEQ ID NO: 1589985 - RNA, 19 nt, Artificial Sequence
  Description of Artificial Sequence: Synthetic oligonucleotide
  Sense strand starting at position 3424 of SEQ ID NO: 1560292
agcugauuggguuggaaau

SEQ ID NO: 1589986 - RNA, 19 nt, Artificial Sequence
  Description of Artificial Sequence: Synthetic oligonucleotide
  Antisense strand to SEQ ID NO: 1589985
auuuccaacccaaucagcu

SEQ ID NO: 1589987 - RNA, 19 nt, Artificial Sequence
  Description of Artificial Sequence: Synthetic oligonucleotide
  Sense strand starting at position 3425 of SEQ ID NO: 1560292
gcugauuggguuggaaauc

SEQ ID NO: 1589988 - RNA, 19 nt, Artificial Sequence
  Description of Artificial Sequence: Synthetic oligonucleotide
  Antisense strand to SEQ ID NO: 1589987
gauuuccaacccaaucagc

SEQ ID NO: 1589989 - RNA, 19 nt, Artificial Sequence
  Description of Artificial Sequence: Synthetic oligonucleotide
  Sense strand starting at position 3458 of SEQ ID NO: 1560292
guaccuuacuuuguuucua

SEQ ID NO: 1589990 - RNA, 19 nt, Artificial Sequence
  Description of Artificial Sequence: Synthetic oligonucleotide
  Antisense strand to SEQ ID NO: 1589989
uagaaacaaaguaagguac

SEQ ID NO: 1589991 - RNA, 19 nt, Artificial Sequence
  Description of Artificial Sequence: Synthetic oligonucleotide
  Sense strand starting at position 3495 of SEQ ID NO: 1560292
ggaguucuccuacauguga

SEQ ID NO: 1589992 - RNA, 19 nt, Artificial Sequence
  Description of Artificial Sequence: Synthetic oligonucleotide
  Antisense strand to SEQ ID NO: 1589991
ucacauguaggagaacucc

SEQ ID NO: 1589993 - RNA, 19 nt, Artificial Sequence
  Description of Artificial Sequence: Synthetic oligonucleotide
  Sense strand starting at position 3901 of SEQ ID NO: 1560292
cguccuucuauggauggaa

SEQ ID NO: 1589994 - RNA, 19 nt, Artificial Sequence
  Description of Artificial Sequence: Synthetic oligonucleotide
  Antisense strand to SEQ ID NO: 1589993
uuccauccauagaaggacg

SEQ ID NO: 1589995 - RNA, 19 nt, Artificial Sequence
  Description of Artificial Sequence: Synthetic oligonucleotide
  Sense strand starting at position 116 of SEQ ID NO: 1560293
uggacacugugucuuuaaa

SEQ ID NO: 1589996 - RNA, 19 nt, Artificial Sequence
  Description of Artificial Sequence: Synthetic oligonucleotide
  Antisense strand to SEQ ID NO: 1589995
uuuaaagacacagugucca

SEQ ID NO: 1589997 - RNA, 19 nt, Artificial Sequence
  Description of Artificial Sequence: Synthetic oligonucleotide
  Sense strand starting at position 158 of SEQ ID NO: 1560293
auucgauauuuacaaucga

SEQ ID NO: 1589998 - RNA, 19 nt, Artificial Sequence
  Description of Artificial Sequence: Synthetic oligonucleotide
  Antisense strand to SEQ ID NO: 1589997
ucgauuguaaauaucgaau

SEQ ID NO: 1589999 - RNA, 19 nt, Artificial Sequence
  Description of Artificial Sequence: Synthetic oligonucleotide
  Sense strand starting at position 168 of SEQ ID NO: 1560293
uacaaucgauguuauuuga

SEQ ID NO: 1590000 - RNA, 19 nt, Artificial Sequence
  Description of Artificial Sequence: Synthetic oligonucleotide
  Antisense strand to SEQ ID NO: 1589999
ucaaauaacaucgauugua

SEQ ID NO: 1590001 - RNA, 19 nt, Artificial Sequence
  Description of Artificial Sequence: Synthetic oligonucleotide
  Sense strand starting at position 202 of SEQ ID NO: 1560293
uuugauaucuaucaucgaa

SEQ ID NO: 1590002 - RNA, 19 nt, Artificial Sequence
  Description of Artificial Sequence: Synthetic oligonucleotide
  Antisense strand to SEQ ID NO: 1590001
uucgaugauagauaucaaa

SEQ ID NO: 1590003 - RNA, 19 nt, Artificial Sequence
  Description of Artificial Sequence: Synthetic oligonucleotide
  Sense strand starting at position 204 of SEQ ID NO: 1560293
ugauaucuaucaucgaacu

SEQ ID NO: 1590004 - RNA, 19 nt, Artificial Sequence
  Description of Artificial Sequence: Synthetic oligonucleotide
  Antisense strand to SEQ ID NO: 1590003
aguucgaugauagauauca

SEQ ID NO: 1590005 - RNA, 19 nt, Artificial Sequence
  Description of Artificial Sequence: Synthetic oligonucleotide
  Sense strand starting at position 215 of SEQ ID NO: 1560293
aucgaacuuugauuagaua

SEQ ID NO: 1590006 - RNA, 19 nt, Artificial Sequence
  Description of Artificial Sequence: Synthetic oligonucleotide
  Antisense strand to SEQ ID NO: 1590005
uaucuaaucaaaguucgau

SEQ ID NO: 1590007 - RNA, 19 nt, Artificial Sequence
  Description of Artificial Sequence: Synthetic oligonucleotide
  Sense strand starting at position 248 of SEQ ID NO: 1560293
uuuaguugcuauuuaucga

SEQ ID NO: 1590008 - RNA, 19 nt, Artificial Sequence
  Description of Artificial Sequence: Synthetic oligonucleotide
  Antisense strand to SEQ ID NO: 1590007
ucgauaaauagcaacuaaa

SEQ ID NO: 1590009 - RNA, 19 nt, Artificial Sequence
  Description of Artificial Sequence: Synthetic oligonucleotide
  Sense strand starting at position 777 of SEQ ID NO: 1560293
gggucucaauccugaaggu

SEQ ID NO: 1590010 - RNA, 19 nt, Artificial Sequence
  Description of Artificial Sequence: Synthetic oligonucleotide
  Antisense strand to SEQ ID NO: 1590009
accuucaggauugagaccc

SEQ ID NO: 1590011 - RNA, 19 nt, Artificial Sequence
  Description of Artificial Sequence: Synthetic oligonucleotide
  Sense strand starting at position 980 of SEQ ID NO: 1560293
cugucacugucuuuauguu

SEQ ID NO: 1590012 - RNA, 19 nt, Artificial Sequence
  Description of Artificial Sequence: Synthetic oligonucleotide
  Antisense strand to SEQ ID NO: 1590011
aacauaaagacagugacag

SEQ ID NO: 1590013 - RNA, 19 nt, Artificial Sequence
  Description of Artificial Sequence: Synthetic oligonucleotide
  Sense strand starting at position 981 of SEQ ID NO: 1560293
ugucacugucuuuauguuu

SEQ ID NO: 1590014 - RNA, 19 nt, Artificial Sequence
  Description of Artificial Sequence: Synthetic oligonucleotide
  Antisense strand to SEQ ID NO: 1590013
aaacauaaagacagugaca

SEQ ID NO: 1590015 - RNA, 19 nt, Artificial Sequence
  Description of Artificial Sequence: Synthetic oligonucleotide
  Sense strand starting at position 988 of SEQ ID NO: 1560293
gucuuuauguuuccguuga

SEQ ID NO: 1590016 - RNA, 19 nt, Artificial Sequence
  Description of Artificial Sequence: Synthetic oligonucleotide
  Antisense strand to SEQ ID NO: 1590015
ucaacggaaacauaaagac

SEQ ID NO: 1590017 - RNA, 19 nt, Artificial Sequence
  Description of Artificial Sequence: Synthetic oligonucleotide
  Sense strand starting at position 989 of SEQ ID NO: 1560293
ucuuuauguuuccguugau

SEQ ID NO: 1590018 - RNA, 19 nt, Artificial Sequence
  Description of Artificial Sequence: Synthetic oligonucleotide
  Antisense strand to SEQ ID NO: 1590017
aucaacggaaacauaaaga

SEQ ID NO: 1590019 - RNA, 19 nt, Artificial Sequence
  Description of Artificial Sequence: Synthetic oligonucleotide
  Sense strand starting at position 990 of SEQ ID NO: 1560293
cuuuauguuuccguugaug

SEQ ID NO: 1590020 - RNA, 19 nt, Artificial Sequence
  Description of Artificial Sequence: Synthetic oligonucleotide
  Antisense strand to SEQ ID NO: 1590019
caucaacggaaacauaaag

SEQ ID NO: 1590021 - RNA, 19 nt, Artificial Sequence
  Description of Artificial Sequence: Synthetic oligonucleotide
  Sense strand starting at position 992 of SEQ ID NO: 1560293
uuauguuuccguugaugac

SEQ ID NO: 1590022 - RNA, 19 nt, Artificial Sequence
  Description of Artificial Sequence: Synthetic oligonucleotide
  Antisense strand to SEQ ID NO: 1590021
gucaucaacggaaacauaa

SEQ ID NO: 1590023 - RNA, 19 nt, Artificial Sequence
  Description of Artificial Sequence: Synthetic oligonucleotide
  Sense strand starting at position 1236 of SEQ ID NO: 1560293
gugacacauuugucugcaa

SEQ ID NO: 1590024 - RNA, 19 nt, Artificial Sequence
  Description of Artificial Sequence: Synthetic oligonucleotide
  Antisense strand to SEQ ID NO: 1590023
uugcagacaaaugugucac

SEQ ID NO: 1590025 - RNA, 19 nt, Artificial Sequence
  Description of Artificial Sequence: Synthetic oligonucleotide
  Sense strand starting at position 1427 of SEQ ID NO: 1560293
ggagaucccucguaggaag

SEQ ID NO: 1590026 - RNA, 19 nt, Artificial Sequence
  Description of Artificial Sequence: Synthetic oligonucleotide
  Antisense strand to SEQ ID NO: 1590025
cuuccuacgagggaucucc

SEQ ID NO: 1590027 - RNA, 19 nt, Artificial Sequence
  Description of Artificial Sequence: Synthetic oligonucleotide
  Sense strand starting at position 1918 of SEQ ID NO: 1560293
caaagucuccaguaggcau

SEQ ID NO: 1590028 - RNA, 19 nt, Artificial Sequence
  Description of Artificial Sequence: Synthetic oligonucleotide
  Antisense strand to SEQ ID NO: 1590027
augccuacuggagacuuug

SEQ ID NO: 1590029 - RNA, 19 nt, Artificial Sequence
  Description of Artificial Sequence: Synthetic oligonucleotide
  Sense strand starting at position 2138 of SEQ ID NO: 1560293
ggcugauuucagggcuggu

SEQ ID NO: 1590030 - RNA, 19 nt, Artificial Sequence
  Description of Artificial Sequence: Synthetic oligonucleotide
  Antisense strand to SEQ ID NO: 1590029
accagcccugaaaucagcc

SEQ ID NO: 1590031 - RNA, 19 nt, Artificial Sequence
  Description of Artificial Sequence: Synthetic oligonucleotide
  Sense strand starting at position 2678 of SEQ ID NO: 1560293
cucacuuauugagugcuua

SEQ ID NO: 1590032 - RNA, 19 nt, Artificial Sequence
  Description of Artificial Sequence: Synthetic oligonucleotide
  Antisense strand to SEQ ID NO: 1590031
uaagcacucaauaagugag

SEQ ID NO: 1590033 - RNA, 19 nt, Artificial Sequence
  Description of Artificial Sequence: Synthetic oligonucleotide
  Sense strand starting at position 2688 of SEQ ID NO: 1560293
gagugcuuauuguauauga

SEQ ID NO: 1590034 - RNA, 19 nt, Artificial Sequence
  Description of Artificial Sequence: Synthetic oligonucleotide
  Antisense strand to SEQ ID NO: 1590033
ucauauacaauaagcacuc

SEQ ID NO: 1590035 - RNA, 19 nt, Artificial Sequence
  Description of Artificial Sequence: Synthetic oligonucleotide
  Sense strand starting at position 2690 of SEQ ID NO: 1560293
gugcuuauuguauaugaag

SEQ ID NO: 1590036 - RNA, 19 nt, Artificial Sequence
  Description of Artificial Sequence: Synthetic oligonucleotide
  Antisense strand to SEQ ID NO: 1590035
cuucauauacaauaagcac

SEQ ID NO: 1590037 - RNA, 19 nt, Artificial Sequence
  Description of Artificial Sequence: Synthetic oligonucleotide
  Sense strand starting at position 2717 of SEQ ID NO: 1560293
ggaggauauuacuuccauu

SEQ ID NO: 1590038 - RNA, 19 nt, Artificial Sequence
  Description of Artificial Sequence: Synthetic oligonucleotide
  Antisense strand to SEQ ID NO: 1590037
aauggaaguaauauccucc

SEQ ID NO: 1590039 - RNA, 19 nt, Artificial Sequence
  Description of Artificial Sequence: Synthetic oligonucleotide
  Sense strand starting at position 2939 of SEQ ID NO: 1560293
ugcuuaaacuguuccuugu

SEQ ID NO: 1590040 - RNA, 19 nt, Artificial Sequence
  Description of Artificial Sequence: Synthetic oligonucleotide
  Antisense strand to SEQ ID NO: 1590039
acaaggaacaguuuaagca

SEQ ID NO: 1590041 - RNA, 19 nt, Artificial Sequence
  Description of Artificial Sequence: Synthetic oligonucleotide
  Sense strand starting at position 2956 of SEQ ID NO: 1560293
gucuucuuucccgauccca

SEQ ID NO: 1590042 - RNA, 19 nt, Artificial Sequence
  Description of Artificial Sequence: Synthetic oligonucleotide
  Antisense strand to SEQ ID NO: 1590041
ugggaucgggaaagaagac

SEQ ID NO: 1590043 - RNA, 19 nt, Artificial Sequence
  Description of Artificial Sequence: Synthetic oligonucleotide
  Sense strand starting at position 3036 of SEQ ID NO: 1560293
uuggcuuuccgguauaauu

SEQ ID NO: 1590044 - RNA, 19 nt, Artificial Sequence
  Description of Artificial Sequence: Synthetic oligonucleotide
  Antisense strand to SEQ ID NO: 1590043
aauuauaccggaaagccaa

SEQ ID NO: 1590045 - RNA, 19 nt, Artificial Sequence
  Description of Artificial Sequence: Synthetic oligonucleotide
  Sense strand starting at position 3112 of SEQ ID NO: 1560293
cgaagugauucaugaugac

SEQ ID NO: 1590046 - RNA, 19 nt, Artificial Sequence
  Description of Artificial Sequence: Synthetic oligonucleotide
  Antisense strand to SEQ ID NO: 1590045
gucaucaugaaucacuucg

SEQ ID NO: 1590047 - RNA, 19 nt, Artificial Sequence
  Description of Artificial Sequence: Synthetic oligonucleotide
  Sense strand starting at position 3171 of SEQ ID NO: 1560293
cuuagauauuguggucuuc

SEQ ID NO: 1590048 - RNA, 19 nt, Artificial Sequence
  Description of Artificial Sequence: Synthetic oligonucleotide
  Antisense strand to SEQ ID NO: 1590047
gaagaccacaauaucuaag

SEQ ID NO: 1590049 - RNA, 19 nt, Artificial Sequence
  Description of Artificial Sequence: Synthetic oligonucleotide
  Sense strand starting at position 3173 of SEQ ID NO: 1560293
uagauauuguggucuucca

SEQ ID NO: 1590050 - RNA, 19 nt, Artificial Sequence
  Description of Artificial Sequence: Synthetic oligonucleotide
  Antisense strand to SEQ ID NO: 1590049
uggaagaccacaauaucua

SEQ ID NO: 1590051 - RNA, 19 nt, Artificial Sequence
  Description of Artificial Sequence: Synthetic oligonucleotide
  Sense strand starting at position 3225 of SEQ ID NO: 1560293
guauuuaguuucugccuuu

SEQ ID NO: 1590052 - RNA, 19 nt, Artificial Sequence
  Description of Artificial Sequence: Synthetic oligonucleotide
  Antisense strand to SEQ ID NO: 1590051
aaaggcagaaacuaaauac

SEQ ID NO: 1590053 - RNA, 19 nt, Artificial Sequence
  Description of Artificial Sequence: Synthetic oligonucleotide
  Sense strand starting at position 3234 of SEQ ID NO: 1560293
uucugccuuuagggagaua

SEQ ID NO: 1590054 - RNA, 19 nt, Artificial Sequence
  Description of Artificial Sequence: Synthetic oligonucleotide
  Antisense strand to SEQ ID NO: 1590053
uaucucccuaaaggcagaa

SEQ ID NO: 1590055 - RNA, 19 nt, Artificial Sequence
  Description of Artificial Sequence: Synthetic oligonucleotide
  Sense strand starting at position 3235 of SEQ ID NO: 1560293
ucugccuuuagggagauau

SEQ ID NO: 1590056 - RNA, 19 nt, Artificial Sequence
  Description of Artificial Sequence: Synthetic oligonucleotide
  Antisense strand to SEQ ID NO: 1590055
auaucucccuaaaggcaga

SEQ ID NO: 1590057 - RNA, 19 nt, Artificial Sequence
  Description of Artificial Sequence: Synthetic oligonucleotide
  Sense strand starting at position 3318 of SEQ ID NO: 1560293
ucuccuaagaagggugaua

SEQ ID NO: 1590058 - RNA, 19 nt, Artificial Sequence
  Description of Artificial Sequence: Synthetic oligonucleotide
  Antisense strand to SEQ ID NO: 1590057
uaucacccuucuuaggaga

SEQ ID NO: 1590059 - RNA, 19 nt, Artificial Sequence
  Description of Artificial Sequence: Synthetic oligonucleotide
  Sense strand starting at position 3323 of SEQ ID NO: 1560293
uaagaagggugauaaugaa

SEQ ID NO: 1590060 - RNA, 19 nt, Artificial Sequence
  Description of Artificial Sequence: Synthetic oligonucleotide
  Antisense strand to SEQ ID NO: 1590059
uucauuaucacccuucuua

SEQ ID NO: 1590061 - RNA, 19 nt, Artificial Sequence
  Description of Artificial Sequence: Synthetic oligonucleotide
  Sense strand starting at position 3914 of SEQ ID NO: 1560293
ggcauaguucugugugccu

SEQ ID NO: 1590062 - RNA, 19 nt, Artificial Sequence
  Description of Artificial Sequence: Synthetic oligonucleotide
  Antisense strand to SEQ ID NO: 1590061
aggcacacagaacuaugcc

SEQ ID NO: 1590063 - RNA, 19 nt, Artificial Sequence
  Description of Artificial Sequence: Synthetic oligonucleotide
  Sense strand starting at position 3917 of SEQ ID NO: 1560293
auaguucugugugccugua

SEQ ID NO: 1590064 - RNA, 19 nt, Artificial Sequence
  Description of Artificial Sequence: Synthetic oligonucleotide
  Antisense strand to SEQ ID NO: 1590063
uacaggcacacagaacuau

SEQ ID NO: 1590065 - RNA, 19 nt, Artificial Sequence
  Description of Artificial Sequence: Synthetic oligonucleotide
  Sense strand starting at position 75 of SEQ ID NO: 1560294
cgaacucuuuggcucaagu

SEQ ID NO: 1590066 - RNA, 19 nt, Artificial Sequence
  Description of Artificial Sequence: Synthetic oligonucleotide
  Antisense strand to SEQ ID NO: 1590065
acuugagccaaagaguucg

SEQ ID NO: 1590067 - RNA, 19 nt, Artificial Sequence
  Description of Artificial Sequence: Synthetic oligonucleotide
  Sense strand starting at position 724 of SEQ ID NO: 1560294
uucucaggauuguaccuaa

SEQ ID NO: 1590068 - RNA, 19 nt, Artificial Sequence
  Description of Artificial Sequence: Synthetic oligonucleotide
  Antisense strand to SEQ ID NO: 1590067
uuagguacaauccugagaa

SEQ ID NO: 1590069 - RNA, 19 nt, Artificial Sequence
  Description of Artificial Sequence: Synthetic oligonucleotide
  Sense strand starting at position 865 of SEQ ID NO: 1560294
gcucuauccagguagugaa

SEQ ID NO: 1590070 - RNA, 19 nt, Artificial Sequence
  Description of Artificial Sequence: Synthetic oligonucleotide
  Antisense strand to SEQ ID NO: 1590069
uucacuaccuggauagagc

SEQ ID NO: 1590071 - RNA, 19 nt, Artificial Sequence
  Description of Artificial Sequence: Synthetic oligonucleotide
  Sense strand starting at position 878 of SEQ ID NO: 1560294
agugaauuauguccaguau

SEQ ID NO: 1590072 - RNA, 19 nt, Artificial Sequence
  Description of Artificial Sequence: Synthetic oligonucleotide
  Antisense strand to SEQ ID NO: 1590071
auacuggacauaauucacu

SEQ ID NO: 1590073 - RNA, 19 nt, Artificial Sequence
  Description of Artificial Sequence: Synthetic oligonucleotide
  Sense strand starting at position 879 of SEQ ID NO: 1560294
gugaauuauguccaguaua

SEQ ID NO: 1590074 - RNA, 19 nt, Artificial Sequence
  Description of Artificial Sequence: Synthetic oligonucleotide
  Antisense strand to SEQ ID NO: 1590073
uauacuggacauaauucac

SEQ ID NO: 1590075 - RNA, 19 nt, Artificial Sequence
  Description of Artificial Sequence: Synthetic oligonucleotide
  Sense strand starting at position 890 of SEQ ID NO: 1560294
ccaguauaaucucuaguaa

SEQ ID NO: 1590076 - RNA, 19 nt, Artificial Sequence
  Description of Artificial Sequence: Synthetic oligonucleotide
  Antisense strand to SEQ ID NO: 1590075
uuacuagagauuauacugg

SEQ ID NO: 1590077 - RNA, 19 nt, Artificial Sequence
  Description of Artificial Sequence: Synthetic oligonucleotide
  Sense strand starting at position 1030 of SEQ ID NO: 1560294
ccugaaugucucugcuacu

SEQ ID NO: 1590078 - RNA, 19 nt, Artificial Sequence
  Description of Artificial Sequence: Synthetic oligonucleotide
  Antisense strand to SEQ ID NO: 1590077
aguagcagagacauucagg

SEQ ID NO: 1590079 - RNA, 19 nt, Artificial Sequence
  Description of Artificial Sequence: Synthetic oligonucleotide
  Sense strand starting at position 1202 of SEQ ID NO: 1560294
ucagguuugucucccuuau

SEQ ID NO: 1590080 - RNA, 19 nt, Artificial Sequence
  Description of Artificial Sequence: Synthetic oligonucleotide
  Antisense strand to SEQ ID NO: 1590079
auaagggagacaaaccuga

SEQ ID NO: 1590081 - RNA, 19 nt, Artificial Sequence
  Description of Artificial Sequence: Synthetic oligonucleotide
  Sense strand starting at position 1206 of SEQ ID NO: 1560294
guuugucucccuuauggaa

SEQ ID NO: 1590082 - RNA, 19 nt, Artificial Sequence
  Description of Artificial Sequence: Synthetic oligonucleotide
  Antisense strand to SEQ ID NO: 1590081
uuccauaagggagacaaac

SEQ ID NO: 1590083 - RNA, 19 nt, Artificial Sequence
  Description of Artificial Sequence: Synthetic oligonucleotide
  Sense strand starting at position 1245 of SEQ ID NO: 1560294
gcaugaucugccgcugucu

SEQ ID NO: 1590084 - RNA, 19 nt, Artificial Sequence
  Description of Artificial Sequence: Synthetic oligonucleotide
  Antisense strand to SEQ ID NO: 1590083
agacagcggcagaucaugc

SEQ ID NO: 1590085 - RNA, 19 nt, Artificial Sequence
  Description of Artificial Sequence: Synthetic oligonucleotide
  Sense strand starting at position 1309 of SEQ ID NO: 1560294
ucaguaaacguguggagaa

SEQ ID NO: 1590086 - RNA, 19 nt, Artificial Sequence
  Description of Artificial Sequence: Synthetic oligonucleotide
  Antisense strand to SEQ ID NO: 1590085
uucuccacacguuuacuga

SEQ ID NO: 1590087 - RNA, 19 nt, Artificial Sequence
  Description of Artificial Sequence: Synthetic oligonucleotide
  Sense strand starting at position 1312 of SEQ ID NO: 1560294
guaaacguguggagaauga

SEQ ID NO: 1590088 - RNA, 19 nt, Artificial Sequence
  Description of Artificial Sequence: Synthetic oligonucleotide
  Antisense strand to SEQ ID NO: 1590087
ucauucuccacacguuuac

SEQ ID NO: 1590089 - RNA, 19 nt, Artificial Sequence
  Description of Artificial Sequence: Synthetic oligonucleotide
  Sense strand starting at position 1316 of SEQ ID NO: 1560294
acguguggagaaugaauga

SEQ ID NO: 1590090 - RNA, 19 nt, Artificial Sequence
  Description of Artificial Sequence: Synthetic oligonucleotide
  Antisense strand to SEQ ID NO: 1590089
ucauucauucuccacacgu

SEQ ID NO: 1590091 - RNA, 19 nt, Artificial Sequence
  Description of Artificial Sequence: Synthetic oligonucleotide
  Sense strand starting at position 1327 of SEQ ID NO: 1560294
augaaugacuuauagagca

SEQ ID NO: 1590092 - RNA, 19 nt, Artificial Sequence
  Description of Artificial Sequence: Synthetic oligonucleotide
  Antisense strand to SEQ ID NO: 1590091
ugcucuauaagucauucau

SEQ ID NO: 1590093 - RNA, 19 nt, Artificial Sequence
  Description of Artificial Sequence: Synthetic oligonucleotide
  Sense strand starting at position 1401 of SEQ ID NO: 1560294
aaggcaauuuacgaagaga

SEQ ID NO: 1590094 - RNA, 19 nt, Artificial Sequence
  Description of Artificial Sequence: Synthetic oligonucleotide
  Antisense strand to SEQ ID NO: 1590093
ucucuucguaaauugccuu

SEQ ID NO: 1590095 - RNA, 19 nt, Artificial Sequence
  Description of Artificial Sequence: Synthetic oligonucleotide
  Sense strand starting at position 1737 of SEQ ID NO: 1560294
cgggcucagaccugucgau

SEQ ID NO: 1590096 - RNA, 19 nt, Artificial Sequence
  Description of Artificial Sequence: Synthetic oligonucleotide
  Antisense strand to SEQ ID NO: 1590095
aucgacaggucugagcccg

SEQ ID NO: 1590097 - RNA, 19 nt, Artificial Sequence
  Description of Artificial Sequence: Synthetic oligonucleotide
  Sense strand starting at position 2246 of SEQ ID NO: 1560294
cacggagcucugcgggaau

SEQ ID NO: 1590098 - RNA, 19 nt, Artificial Sequence
  Description of Artificial Sequence: Synthetic oligonucleotide
  Antisense strand to SEQ ID NO: 1590097
auucccgcagagcuccgug

SEQ ID NO: 1590099 - RNA, 19 nt, Artificial Sequence
  Description of Artificial Sequence: Synthetic oligonucleotide
  Sense strand starting at position 2531 of SEQ ID NO: 1560294
uuuguacugccaugaauua

SEQ ID NO: 1590100 - RNA, 19 nt, Artificial Sequence
  Description of Artificial Sequence: Synthetic oligonucleotide
  Antisense strand to SEQ ID NO: 1590099
uaauucauggcaguacaaa

SEQ ID NO: 1590101 - RNA, 19 nt, Artificial Sequence
  Description of Artificial Sequence: Synthetic oligonucleotide
  Sense strand starting at position 2532 of SEQ ID NO: 1560294
uuguacugccaugaauuau

SEQ ID NO: 1590102 - RNA, 19 nt, Artificial Sequence
  Description of Artificial Sequence: Synthetic oligonucleotide
  Antisense strand to SEQ ID NO: 1590101
auaauucauggcaguacaa

SEQ ID NO: 1590103 - RNA, 19 nt, Artificial Sequence
  Description of Artificial Sequence: Synthetic oligonucleotide
  Sense strand starting at position 2590 of SEQ ID NO: 1560294
ugcaguuaugugccaugca

SEQ ID NO: 1590104 - RNA, 19 nt, Artificial Sequence
  Description of Artificial Sequence: Synthetic oligonucleotide
  Antisense strand to SEQ ID NO: 1590103
ugcauggcacauaacugca

SEQ ID NO: 1590105 - RNA, 19 nt, Artificial Sequence
  Description of Artificial Sequence: Synthetic oligonucleotide
  Sense strand starting at position 2593 of SEQ ID NO: 1560294
aguuaugugccaugcaugu

SEQ ID NO: 1590106 - RNA, 19 nt, Artificial Sequence
  Description of Artificial Sequence: Synthetic oligonucleotide
  Antisense strand to SEQ ID NO: 1590105
acaugcauggcacauaacu

SEQ ID NO: 1590107 - RNA, 19 nt, Artificial Sequence
  Description of Artificial Sequence: Synthetic oligonucleotide
  Sense strand starting at position 2603 of SEQ ID NO: 1560294
caugcauguggagguauau

SEQ ID NO: 1590108 - RNA, 19 nt, Artificial Sequence
  Description of Artificial Sequence: Synthetic oligonucleotide
  Antisense strand to SEQ ID NO: 1590107
auauaccuccacaugcaug

SEQ ID NO: 1590109 - RNA, 19 nt, Artificial Sequence
  Description of Artificial Sequence: Synthetic oligonucleotide
  Sense strand starting at position 2612 of SEQ ID NO: 1560294
ggagguauauguccugggu

SEQ ID NO: 1590110 - RNA, 19 nt, Artificial Sequence
  Description of Artificial Sequence: Synthetic oligonucleotide
  Antisense strand to SEQ ID NO: 1590109
acccaggacauauaccucc

SEQ ID NO: 1590111 - RNA, 19 nt, Artificial Sequence
  Description of Artificial Sequence: Synthetic oligonucleotide
  Sense strand starting at position 2615 of SEQ ID NO: 1560294
gguauauguccuggguaca

SEQ ID NO: 1590112 - RNA, 19 nt, Artificial Sequence
  Description of Artificial Sequence: Synthetic oligonucleotide
  Antisense strand to SEQ ID NO: 1590111
uguacccaggacauauacc

SEQ ID NO: 1590113 - RNA, 19 nt, Artificial Sequence
  Description of Artificial Sequence: Synthetic oligonucleotide
  Sense strand starting at position 2616 of SEQ ID NO: 1560294
guauauguccuggguacau

SEQ ID NO: 1590114 - RNA, 19 nt, Artificial Sequence
  Description of Artificial Sequence: Synthetic oligonucleotide
  Antisense strand to SEQ ID NO: 1590113
auguacccaggacauauac

SEQ ID NO: 1590115 - RNA, 19 nt, Artificial Sequence
  Description of Artificial Sequence: Synthetic oligonucleotide
  Sense strand starting at position 2628 of SEQ ID NO: 1560294
gguacauccacguguguac

SEQ ID NO: 1590116 - RNA, 19 nt, Artificial Sequence
  Description of Artificial Sequence: Synthetic oligonucleotide
  Antisense strand to SEQ ID NO: 1590115
guacacacguggauguacc

SEQ ID NO: 1590117 - RNA, 19 nt, Artificial Sequence
  Description of Artificial Sequence: Synthetic oligonucleotide
  Sense strand starting at position 2717 of SEQ ID NO: 1560294
auguaugugacaggugaac

SEQ ID NO: 1590118 - RNA, 19 nt, Artificial Sequence
  Description of Artificial Sequence: Synthetic oligonucleotide
  Antisense strand to SEQ ID NO: 1590117
guucaccugucacauacau

SEQ ID NO: 1590119 - RNA, 19 nt, Artificial Sequence
  Description of Artificial Sequence: Synthetic oligonucleotide
  Sense strand starting at position 2719 of SEQ ID NO: 1560294
guaugugacaggugaacag

SEQ ID NO: 1590120 - RNA, 19 nt, Artificial Sequence
  Description of Artificial Sequence: Synthetic oligonucleotide
  Antisense strand to SEQ ID NO: 1590119
cuguucaccugucacauac

SEQ ID NO: 1590121 - RNA, 19 nt, Artificial Sequence
  Description of Artificial Sequence: Synthetic oligonucleotide
  Sense strand starting at position 2809 of SEQ ID NO: 1560294
agcagagguuuagacacua

SEQ ID NO: 1590122 - RNA, 19 nt, Artificial Sequence
  Description of Artificial Sequence: Synthetic oligonucleotide
  Antisense strand to SEQ ID NO: 1590121
uagugucuaaaccucugcu

SEQ ID NO: 1590123 - RNA, 19 nt, Artificial Sequence
  Description of Artificial Sequence: Synthetic oligonucleotide
  Sense strand starting at position 2870 of SEQ ID NO: 1560294
cccaguuacgauuaagauc

SEQ ID NO: 1590124 - RNA, 19 nt, Artificial Sequence
  Description of Artificial Sequence: Synthetic oligonucleotide
  Antisense strand to SEQ ID NO: 1590123
gaucuuaaucguaacuggg

SEQ ID NO: 1590125 - RNA, 19 nt, Artificial Sequence
  Description of Artificial Sequence: Synthetic oligonucleotide
  Sense strand starting at position 2873 of SEQ ID NO: 1560294
aguuacgauuaagaucauu

SEQ ID NO: 1590126 - RNA, 19 nt, Artificial Sequence
  Description of Artificial Sequence: Synthetic oligonucleotide
  Antisense strand to SEQ ID NO: 1590125
aaugaucuuaaucguaacu

SEQ ID NO: 1590127 - RNA, 19 nt, Artificial Sequence
  Description of Artificial Sequence: Synthetic oligonucleotide
  Sense strand starting at position 3185 of SEQ ID NO: 1560294
cgucguggacccugacauu

SEQ ID NO: 1590128 - RNA, 19 nt, Artificial Sequence
  Description of Artificial Sequence: Synthetic oligonucleotide
  Antisense strand to SEQ ID NO: 1590127
aaugucaggguccacgacg

SEQ ID NO: 1590129 - RNA, 19 nt, Artificial Sequence
  Description of Artificial Sequence: Synthetic oligonucleotide
  Sense strand starting at position 3312 of SEQ ID NO: 1560294
accagugaccuuuaaggca

SEQ ID NO: 1590130 - RNA, 19 nt, Artificial Sequence
  Description of Artificial Sequence: Synthetic oligonucleotide
  Antisense strand to SEQ ID NO: 1590129
ugccuuaaaggucacuggu

SEQ ID NO: 1590131 - RNA, 19 nt, Artificial Sequence
  Description of Artificial Sequence: Synthetic oligonucleotide
  Sense strand starting at position 3368 of SEQ ID NO: 1560294
aguucuugaccuugacuca

SEQ ID NO: 1590132 - RNA, 19 nt, Artificial Sequence
  Description of Artificial Sequence: Synthetic oligonucleotide
  Antisense strand to SEQ ID NO: 1590131
ugagucaaggucaagaacu

SEQ ID NO: 1590133 - RNA, 19 nt, Artificial Sequence
  Description of Artificial Sequence: Synthetic oligonucleotide
  Sense strand starting at position 3481 of SEQ ID NO: 1560294
cacugaagauggugaagau

SEQ ID NO: 1590134 - RNA, 19 nt, Artificial Sequence
  Description of Artificial Sequence: Synthetic oligonucleotide
  Antisense strand to SEQ ID NO: 1590133
aucuucaccaucuucagug

SEQ ID NO: 1590135 - RNA, 19 nt, Artificial Sequence
  Description of Artificial Sequence: Synthetic oligonucleotide
  Sense strand starting at position 3632 of SEQ ID NO: 1560294
ugaugaugucuccacccuu

SEQ ID NO: 1590136 - RNA, 19 nt, Artificial Sequence
  Description of Artificial Sequence: Synthetic oligonucleotide
  Antisense strand to SEQ ID NO: 1590135
aaggguggagacaucauca

SEQ ID NO: 1590137 - RNA, 19 nt, Artificial Sequence
  Description of Artificial Sequence: Synthetic oligonucleotide
  Sense strand starting at position 3655 of SEQ ID NO: 1560294
aggaaauccucauauugaa

SEQ ID NO: 1590138 - RNA, 19 nt, Artificial Sequence
  Description of Artificial Sequence: Synthetic oligonucleotide
  Antisense strand to SEQ ID NO: 1590137
uucaauaugaggauuuccu

SEQ ID NO: 1590139 - RNA, 19 nt, Artificial Sequence
  Description of Artificial Sequence: Synthetic oligonucleotide
  Sense strand starting at position 3697 of SEQ ID NO: 1560294
uggccuaccaugggaguua

SEQ ID NO: 1590140 - RNA, 19 nt, Artificial Sequence
  Description of Artificial Sequence: Synthetic oligonucleotide
  Antisense strand to SEQ ID NO: 1590139
uaacucccaugguaggcca

SEQ ID NO: 1590141 - RNA, 19 nt, Artificial Sequence
  Description of Artificial Sequence: Synthetic oligonucleotide
  Sense strand starting at position 3698 of SEQ ID NO: 1560294
ggccuaccaugggaguuau

SEQ ID NO: 1590142 - RNA, 19 nt, Artificial Sequence
  Description of Artificial Sequence: Synthetic oligonucleotide
  Antisense strand to SEQ ID NO: 1590141
auaacucccaugguaggcc

SEQ ID NO: 1590143 - RNA, 19 nt, Artificial Sequence
  Description of Artificial Sequence: Synthetic oligonucleotide
  Sense strand starting at position 3708 of SEQ ID NO: 1560294
gggaguuaucucuggugau

SEQ ID NO: 1590144 - RNA, 19 nt, Artificial Sequence
  Description of Artificial Sequence: Synthetic oligonucleotide
  Antisense strand to SEQ ID NO: 1590143
aucaccagagauaacuccc

SEQ ID NO: 1590145 - RNA, 19 nt, Artificial Sequence
  Description of Artificial Sequence: Synthetic oligonucleotide
  Sense strand starting at position 257 of SEQ ID NO: 1560295
gaaucucaguaaguuuguu

SEQ ID NO: 1590146 - RNA, 19 nt, Artificial Sequence
  Description of Artificial Sequence: Synthetic oligonucleotide
  Antisense strand to SEQ ID NO: 1590145
aacaaacuuacugagauuc

SEQ ID NO: 1590147 - RNA, 19 nt, Artificial Sequence
  Description of Artificial Sequence: Synthetic oligonucleotide
  Sense strand starting at position 602 of SEQ ID NO: 1560295
uaaguuuguugauugacaa

SEQ ID NO: 1590148 - RNA, 19 nt, Artificial Sequence
  Description of Artificial Sequence: Synthetic oligonucleotide
  Antisense strand to SEQ ID NO: 1590147
uugucaaucaacaaacuua

SEQ ID NO: 1590149 - RNA, 19 nt, Artificial Sequence
  Description of Artificial Sequence: Synthetic oligonucleotide
  Sense strand starting at position 603 of SEQ ID NO: 1560295
aaguuuguugauugacaac

SEQ ID NO: 1590150 - RNA, 19 nt, Artificial Sequence
  Description of Artificial Sequence: Synthetic oligonucleotide
  Antisense strand to SEQ ID NO: 1590149
guugucaaucaacaaacuu

SEQ ID NO: 1590151 - RNA, 19 nt, Artificial Sequence
  Description of Artificial Sequence: Synthetic oligonucleotide
  Sense strand starting at position 606 of SEQ ID NO: 1560295
uuuguugauugacaacaga

SEQ ID NO: 1590152 - RNA, 19 nt, Artificial Sequence
  Description of Artificial Sequence: Synthetic oligonucleotide
  Antisense strand to SEQ ID NO: 1590151
ucuguugucaaucaacaaa

SEQ ID NO: 1590153 - RNA, 19 nt, Artificial Sequence
  Description of Artificial Sequence: Synthetic oligonucleotide
  Sense strand starting at position 628 of SEQ ID NO: 1560295
gggccucccuucucaguaa

SEQ ID NO: 1590154 - RNA, 19 nt, Artificial Sequence
  Description of Artificial Sequence: Synthetic oligonucleotide
  Antisense strand to SEQ ID NO: 1590153
uuacugagaagggaggccc

SEQ ID NO: 1590155 - RNA, 19 nt, Artificial Sequence
  Description of Artificial Sequence: Synthetic oligonucleotide
  Sense strand starting at position 631 of SEQ ID NO: 1560295
ccucccuucucaguaaguu

SEQ ID NO: 1590156 - RNA, 19 nt, Artificial Sequence
  Description of Artificial Sequence: Synthetic oligonucleotide
  Antisense strand to SEQ ID NO: 1590155
aacuuacugagaagggagg

SEQ ID NO: 1590157 - RNA, 19 nt, Artificial Sequence
  Description of Artificial Sequence: Synthetic oligonucleotide
  Sense strand starting at position 632 of SEQ ID NO: 1560295
cucccuucucaguaaguuu

SEQ ID NO: 1590158 - RNA, 19 nt, Artificial Sequence
  Description of Artificial Sequence: Synthetic oligonucleotide
  Antisense strand to SEQ ID NO: 1590157
aaacuuacugagaagggag

SEQ ID NO: 1590159 - RNA, 19 nt, Artificial Sequence
  Description of Artificial Sequence: Synthetic oligonucleotide
  Sense strand starting at position 639 of SEQ ID NO: 1560295
cucaguaaguuuguugauu

SEQ ID NO: 1590160 - RNA, 19 nt, Artificial Sequence
  Description of Artificial Sequence: Synthetic oligonucleotide
  Antisense strand to SEQ ID NO: 1590159
aaucaacaaacuuacugag

SEQ ID NO: 1590161 - RNA, 19 nt, Artificial Sequence
  Description of Artificial Sequence: Synthetic oligonucleotide
  Sense strand starting at position 640 of SEQ ID NO: 1560295
ucaguaaguuuguugauug

SEQ ID NO: 1590162 - RNA, 19 nt, Artificial Sequence
  Description of Artificial Sequence: Synthetic oligonucleotide
  Antisense strand to SEQ ID NO: 1590161
caaucaacaaacuuacuga

SEQ ID NO: 1590163 - RNA, 19 nt, Artificial Sequence
  Description of Artificial Sequence: Synthetic oligonucleotide
  Sense strand starting at position 641 of SEQ ID NO: 1560295
caguaaguuuguugauuga

SEQ ID NO: 1590164 - RNA, 19 nt, Artificial Sequence
  Description of Artificial Sequence: Synthetic oligonucleotide
  Antisense strand to SEQ ID NO: 1590163
ucaaucaacaaacuuacug

SEQ ID NO: 1590165 - RNA, 19 nt, Artificial Sequence
  Description of Artificial Sequence: Synthetic oligonucleotide
  Sense strand starting at position 648 of SEQ ID NO: 1560295
uuuguugauugacagcaga

SEQ ID NO: 1590166 - RNA, 19 nt, Artificial Sequence
  Description of Artificial Sequence: Synthetic oligonucleotide
  Antisense strand to SEQ ID NO: 1590165
ucugcugucaaucaacaaa

SEQ ID NO: 1590167 - RNA, 19 nt, Artificial Sequence
  Description of Artificial Sequence: Synthetic oligonucleotide
  Sense strand starting at position 677 of SEQ ID NO: 1560295
ccugcaggaucucauuuaa

SEQ ID NO: 1590168 - RNA, 19 nt, Artificial Sequence
  Description of Artificial Sequence: Synthetic oligonucleotide
  Antisense strand to SEQ ID NO: 1590167
uuaaaugagauccugcagg

SEQ ID NO: 1590169 - RNA, 19 nt, Artificial Sequence
  Description of Artificial Sequence: Synthetic oligonucleotide
  Sense strand starting at position 2189 of SEQ ID NO: 1560295
ucagauaaucaaugugggu

SEQ ID NO: 1590170 - RNA, 19 nt, Artificial Sequence
  Description of Artificial Sequence: Synthetic oligonucleotide
  Antisense strand to SEQ ID NO: 1590169
acccacauugauuaucuga

SEQ ID NO: 1590171 - RNA, 19 nt, Artificial Sequence
  Description of Artificial Sequence: Synthetic oligonucleotide
  Sense strand starting at position 2191 of SEQ ID NO: 1560295
agauaaucaauguggguuu

SEQ ID NO: 1590172 - RNA, 19 nt, Artificial Sequence
  Description of Artificial Sequence: Synthetic oligonucleotide
  Antisense strand to SEQ ID NO: 1590171
aaacccacauugauuaucu

SEQ ID NO: 1590173 - RNA, 19 nt, Artificial Sequence
  Description of Artificial Sequence: Synthetic oligonucleotide
  Sense strand starting at position 2431 of SEQ ID NO: 1560295
acaucugaccucgggugau

SEQ ID NO: 1590174 - RNA, 19 nt, Artificial Sequence
  Description of Artificial Sequence: Synthetic oligonucleotide
  Antisense strand to SEQ ID NO: 1590173
aucacccgaggucagaugu

SEQ ID NO: 1590175 - RNA, 19 nt, Artificial Sequence
  Description of Artificial Sequence: Synthetic oligonucleotide
  Sense strand starting at position 2607 of SEQ ID NO: 1560295
ggauauacuuacccgaaau

SEQ ID NO: 1590176 - RNA, 19 nt, Artificial Sequence
  Description of Artificial Sequence: Synthetic oligonucleotide
  Antisense strand to SEQ ID NO: 1590175
auuucggguaaguauaucc

SEQ ID NO: 1590177 - RNA, 19 nt, Artificial Sequence
  Description of Artificial Sequence: Synthetic oligonucleotide
  Sense strand starting at position 2629 of SEQ ID NO: 1560295
gauuuaaccgagcguugcu

SEQ ID NO: 1590178 - RNA, 19 nt, Artificial Sequence
  Description of Artificial Sequence: Synthetic oligonucleotide
  Antisense strand to SEQ ID NO: 1590177
agcaacgcucgguuaaauc

SEQ ID NO: 1590179 - RNA, 19 nt, Artificial Sequence
  Description of Artificial Sequence: Synthetic oligonucleotide
  Sense strand starting at position 2805 of SEQ ID NO: 1560295
gugucaccugccucaguuu

SEQ ID NO: 1590180 - RNA, 19 nt, Artificial Sequence
  Description of Artificial Sequence: Synthetic oligonucleotide
  Antisense strand to SEQ ID NO: 1590179
aaacugaggcaggugacac

SEQ ID NO: 1590181 - RNA, 19 nt, Artificial Sequence
  Description of Artificial Sequence: Synthetic oligonucleotide
  Sense strand starting at position 2823 of SEQ ID NO: 1560295
uacccagggcccugugaua

SEQ ID NO: 1590182 - RNA, 19 nt, Artificial Sequence
  Description of Artificial Sequence: Synthetic oligonucleotide
  Antisense strand to SEQ ID NO: 1590181
uaucacagggcccugggua

SEQ ID NO: 1590183 - RNA, 19 nt, Artificial Sequence
  Description of Artificial Sequence: Synthetic oligonucleotide
  Sense strand starting at position 3021 of SEQ ID NO: 1560295
gggcacucacugcgcaaua

SEQ ID NO: 1590184 - RNA, 19 nt, Artificial Sequence
  Description of Artificial Sequence: Synthetic oligonucleotide
  Antisense strand to SEQ ID NO: 1590183
uauugcgcagugagugccc

SEQ ID NO: 1590185 - RNA, 19 nt, Artificial Sequence
  Description of Artificial Sequence: Synthetic oligonucleotide
  Sense strand starting at position 3060 of SEQ ID NO: 1560295
caggguuccuguuugggaa

SEQ ID NO: 1590186 - RNA, 19 nt, Artificial Sequence
  Description of Artificial Sequence: Synthetic oligonucleotide
  Antisense strand to SEQ ID NO: 1590185
uucccaaacaggaacccug

SEQ ID NO: 1590187 - RNA, 19 nt, Artificial Sequence
  Description of Artificial Sequence: Synthetic oligonucleotide
  Sense strand starting at position 3447 of SEQ ID NO: 1560295
gggcuuccgccuggaggaa

SEQ ID NO: 1590188 - RNA, 19 nt, Artificial Sequence
  Description of Artificial Sequence: Synthetic oligonucleotide
  Antisense strand to SEQ ID NO: 1590187
uuccuccaggcggaagccc

SEQ ID NO: 1590189 - RNA, 19 nt, Artificial Sequence
  Description of Artificial Sequence: Synthetic oligonucleotide
  Sense strand starting at position 3647 of SEQ ID NO: 1560295
cgggccugucuccaggaau

SEQ ID NO: 1590190 - RNA, 19 nt, Artificial Sequence
  Description of Artificial Sequence: Synthetic oligonucleotide
  Antisense strand to SEQ ID NO: 1590189
auuccuggagacaggcccg

SEQ ID NO: 1590191 - RNA, 19 nt, Artificial Sequence
  Description of Artificial Sequence: Synthetic oligonucleotide
  Sense strand starting at position 3708 of SEQ ID NO: 1560295
ggcuggaguccugacguga

SEQ ID NO: 1590192 - RNA, 19 nt, Artificial Sequence
  Description of Artificial Sequence: Synthetic oligonucleotide
  Antisense strand to SEQ ID NO: 1590191
ucacgucaggacuccagcc

SEQ ID NO: 1590193 - RNA, 19 nt, Artificial Sequence
  Description of Artificial Sequence: Synthetic oligonucleotide
  Sense strand starting at position 103 of SEQ ID NO: 1560296
ugaaacucugucugcucaa

SEQ ID NO: 1590194 - RNA, 19 nt, Artificial Sequence
  Description of Artificial Sequence: Synthetic oligonucleotide
  Antisense strand to SEQ ID NO: 1590193
uugagcagacagaguuuca

SEQ ID NO: 1590195 - RNA, 19 nt, Artificial Sequence
  Description of Artificial Sequence: Synthetic oligonucleotide
  Sense strand starting at position 161 of SEQ ID NO: 1560296
auuugagacguucguguau

SEQ ID NO: 1590196 - RNA, 19 nt, Artificial Sequence
  Description of Artificial Sequence: Synthetic oligonucleotide
  Antisense strand to SEQ ID NO: 1590195
auacacgaacgucucaaau

SEQ ID NO: 1590197 - RNA, 19 nt, Artificial Sequence
  Description of Artificial Sequence: Synthetic oligonucleotide
  Sense strand starting at position 188 of SEQ ID NO: 1560296
cuuugugggccucgaaguu

SEQ ID NO: 1590198 - RNA, 19 nt, Artificial Sequence
  Description of Artificial Sequence: Synthetic oligonucleotide
  Antisense strand to SEQ ID NO: 1590197
aacuucgaggcccacaaag

SEQ ID NO: 1590199 - RNA, 19 nt, Artificial Sequence
  Description of Artificial Sequence: Synthetic oligonucleotide
  Sense strand starting at position 204 of SEQ ID NO: 1560296
guugcagaauuugauaaua

SEQ ID NO: 1590200 - RNA, 19 nt, Artificial Sequence
  Description of Artificial Sequence: Synthetic oligonucleotide
  Antisense strand to SEQ ID NO: 1590199
uauuaucaaauucugcaac

SEQ ID NO: 1590201 - RNA, 19 nt, Artificial Sequence
  Description of Artificial Sequence: Synthetic oligonucleotide
  Sense strand starting at position 206 of SEQ ID NO: 1560296
ugcagaauuugauaauaga

SEQ ID NO: 1590202 - RNA, 19 nt, Artificial Sequence
  Description of Artificial Sequence: Synthetic oligonucleotide
  Antisense strand to SEQ ID NO: 1590201
ucuauuaucaaauucugca

SEQ ID NO: 1590203 - RNA, 19 nt, Artificial Sequence
  Description of Artificial Sequence: Synthetic oligonucleotide
  Sense strand starting at position 276 of SEQ ID NO: 1560296
ccuggagccuugugauuau

SEQ ID NO: 1590204 - RNA, 19 nt, Artificial Sequence
  Description of Artificial Sequence: Synthetic oligonucleotide
  Antisense strand to SEQ ID NO: 1590203
auaaucacaaggcuccagg

SEQ ID NO: 1590205 - RNA, 19 nt, Artificial Sequence
  Description of Artificial Sequence: Synthetic oligonucleotide
  Sense strand starting at position 280 of SEQ ID NO: 1560296
gagccuugugauuauagga

SEQ ID NO: 1590206 - RNA, 19 nt, Artificial Sequence
  Description of Artificial Sequence: Synthetic oligonucleotide
  Antisense strand to SEQ ID NO: 1590205
uccuauaaucacaaggcuc

SEQ ID NO: 1590207 - RNA, 19 nt, Artificial Sequence
  Description of Artificial Sequence: Synthetic oligonucleotide
  Sense strand starting at position 285 of SEQ ID NO: 1560296
uugugauuauaggagcagu

SEQ ID NO: 1590208 - RNA, 19 nt, Artificial Sequence
  Description of Artificial Sequence: Synthetic oligonucleotide
  Antisense strand to SEQ ID NO: 1590207
acugcuccuauaaucacaa

SEQ ID NO: 1590209 - RNA, 19 nt, Artificial Sequence
  Description of Artificial Sequence: Synthetic oligonucleotide
  Sense strand starting at position 301 of SEQ ID NO: 1560296
aguacaaucgagugguuaa

SEQ ID NO: 1590210 - RNA, 19 nt, Artificial Sequence
  Description of Artificial Sequence: Synthetic oligonucleotide
  Antisense strand to SEQ ID NO: 1590209
uuaaccacucgauuguacu

SEQ ID NO: 1590211 - RNA, 19 nt, Artificial Sequence
  Description of Artificial Sequence: Synthetic oligonucleotide
  Sense strand starting at position 302 of SEQ ID NO: 1560296
guacaaucgagugguuaag

SEQ ID NO: 1590212 - RNA, 19 nt, Artificial Sequence
  Description of Artificial Sequence: Synthetic oligonucleotide
  Antisense strand to SEQ ID NO: 1590211
cuuaaccacucgauuguac

SEQ ID NO: 1590213 - RNA, 19 nt, Artificial Sequence
  Description of Artificial Sequence: Synthetic oligonucleotide
  Sense strand starting at position 366 of SEQ ID NO: 1560296
gccacuuuagugcaugaga

SEQ ID NO: 1590214 - RNA, 19 nt, Artificial Sequence
  Description of Artificial Sequence: Synthetic oligonucleotide
  Antisense strand to SEQ ID NO: 1590213
ucucaugcacuaaaguggc

SEQ ID NO: 1590215 - RNA, 19 nt, Artificial Sequence
  Description of Artificial Sequence: Synthetic oligonucleotide
  Sense strand starting at position 368 of SEQ ID NO: 1560296
cacuuuagugcaugagacu

SEQ ID NO: 1590216 - RNA, 19 nt, Artificial Sequence
  Description of Artificial Sequence: Synthetic oligonucleotide
  Antisense strand to SEQ ID NO: 1590215
agucucaugcacuaaagug

SEQ ID NO: 1590217 - RNA, 19 nt, Artificial Sequence
  Description of Artificial Sequence: Synthetic oligonucleotide
  Sense strand starting at position 375 of SEQ ID NO: 1560296
gugcaugagacuggucaca

SEQ ID NO: 1590218 - RNA, 19 nt, Artificial Sequence
  Description of Artificial Sequence: Synthetic oligonucleotide
  Antisense strand to SEQ ID NO: 1590217
ugugaccagucucaugcac

SEQ ID NO: 1590219 - RNA, 19 nt, Artificial Sequence
  Description of Artificial Sequence: Synthetic oligonucleotide
  Sense strand starting at position 377 of SEQ ID NO: 1560296
gcaugagacuggucacauc

SEQ ID NO: 1590220 - RNA, 19 nt, Artificial Sequence
  Description of Artificial Sequence: Synthetic oligonucleotide
  Antisense strand to SEQ ID NO: 1590219
gaugugaccagucucaugc

SEQ ID NO: 1590221 - RNA, 19 nt, Artificial Sequence
  Description of Artificial Sequence: Synthetic oligonucleotide
  Sense strand starting at position 520 of SEQ ID NO: 1560296
aauaaauacugguggcuau

SEQ ID NO: 1590222 - RNA, 19 nt, Artificial Sequence
  Description of Artificial Sequence: Synthetic oligonucleotide
  Antisense strand to SEQ ID NO: 1590221
auagccaccaguauuuauu

SEQ ID NO: 1590223 - RNA, 19 nt, Artificial Sequence
  Description of Artificial Sequence: Synthetic oligonucleotide
  Sense strand starting at position 533 of SEQ ID NO: 1560296
ggcuauguacaacaucauu

SEQ ID NO: 1590224 - RNA, 19 nt, Artificial Sequence
  Description of Artificial Sequence: Synthetic oligonucleotide
  Antisense strand to SEQ ID NO: 1590223
aaugauguuguacauagcc

SEQ ID NO: 1590225 - RNA, 19 nt, Artificial Sequence
  Description of Artificial Sequence: Synthetic oligonucleotide
  Sense strand starting at position 666 of SEQ ID NO: 1560296
cagagucaagcuuguucga

SEQ ID NO: 1590226 - RNA, 19 nt, Artificial Sequence
  Description of Artificial Sequence: Synthetic oligonucleotide
  Antisense strand to SEQ ID NO: 1590225
ucgaacaagcuugacucug

SEQ ID NO: 1590227 - RNA, 19 nt, Artificial Sequence
  Description of Artificial Sequence: Synthetic oligonucleotide
  Sense strand starting at position 693 of SEQ ID NO: 1560296
gagcaucucccagggcauu

SEQ ID NO: 1590228 - RNA, 19 nt, Artificial Sequence
  Description of Artificial Sequence: Synthetic oligonucleotide
  Antisense strand to SEQ ID NO: 1590227
aaugcccugggagaugcuc

SEQ ID NO: 1590229 - RNA, 19 nt, Artificial Sequence
  Description of Artificial Sequence: Synthetic oligonucleotide
  Sense strand starting at position 751 of SEQ ID NO: 1560296
cucaccugugcgugugaga

SEQ ID NO: 1590230 - RNA, 19 nt, Artificial Sequence
  Description of Artificial Sequence: Synthetic oligonucleotide
  Antisense strand to SEQ ID NO: 1590229
ucucacacgcacaggugag

SEQ ID NO: 1590231 - RNA, 19 nt, Artificial Sequence
  Description of Artificial Sequence: Synthetic oligonucleotide
  Sense strand starting at position 793 of SEQ ID NO: 1560296
acccgagccaucuggcaau

SEQ ID NO: 1590232 - RNA, 19 nt, Artificial Sequence
  Description of Artificial Sequence: Synthetic oligonucleotide
  Antisense strand to SEQ ID NO: 1590231
auugccagauggcucgggu

SEQ ID NO: 1590233 - RNA, 19 nt, Artificial Sequence
  Description of Artificial Sequence: Synthetic oligonucleotide
  Sense strand starting at position 796 of SEQ ID NO: 1560296
cgagccaucuggcaauguu

SEQ ID NO: 1590234 - RNA, 19 nt, Artificial Sequence
  Description of Artificial Sequence: Synthetic oligonucleotide
  Antisense strand to SEQ ID NO: 1590233
aacauugccagauggcucg

SEQ ID NO: 1590235 - RNA, 19 nt, Artificial Sequence
  Description of Artificial Sequence: Synthetic oligonucleotide
  Sense strand starting at position 805 of SEQ ID NO: 1560296
uggcaauguuuggagauac

SEQ ID NO: 1590236 - RNA, 19 nt, Artificial Sequence
  Description of Artificial Sequence: Synthetic oligonucleotide
  Antisense strand to SEQ ID NO: 1590235
guaucuccaaacauugcca

SEQ ID NO: 1590237 - RNA, 19 nt, Artificial Sequence
  Description of Artificial Sequence: Synthetic oligonucleotide
  Sense strand starting at position 1090 of SEQ ID NO: 1560296
gcagaaguugugcagaagu

SEQ ID NO: 1590238 - RNA, 19 nt, Artificial Sequence
  Description of Artificial Sequence: Synthetic oligonucleotide
  Antisense strand to SEQ ID NO: 1590237
acuucugcacaacuucugc

SEQ ID NO: 1590239 - RNA, 19 nt, Artificial Sequence
  Description of Artificial Sequence: Synthetic oligonucleotide
  Sense strand starting at position 1285 of SEQ ID NO: 1560296
caaacagcuuuguuagaga

SEQ ID NO: 1590240 - RNA, 19 nt, Artificial Sequence
  Description of Artificial Sequence: Synthetic oligonucleotide
  Antisense strand to SEQ ID NO: 1590239
ucucuaacaaagcuguuug

SEQ ID NO: 1590241 - RNA, 19 nt, Artificial Sequence
  Description of Artificial Sequence: Synthetic oligonucleotide
  Sense strand starting at position 1345 of SEQ ID NO: 1560296
ccaggacucccguguaucu

SEQ ID NO: 1590242 - RNA, 19 nt, Artificial Sequence
  Description of Artificial Sequence: Synthetic oligonucleotide
  Antisense strand to SEQ ID NO: 1590241
agauacacgggaguccugg

SEQ ID NO: 1590243 - RNA, 19 nt, Artificial Sequence
  Description of Artificial Sequence: Synthetic oligonucleotide
  Sense strand starting at position 1355 of SEQ ID NO: 1560296
cguguaucuacugaagggu

SEQ ID NO: 1590244 - RNA, 19 nt, Artificial Sequence
  Description of Artificial Sequence: Synthetic oligonucleotide
  Antisense strand to SEQ ID NO: 1590243
acccuucaguagauacacg

SEQ ID NO: 1590245 - RNA, 19 nt, Artificial Sequence
  Description of Artificial Sequence: Synthetic oligonucleotide
  Sense strand starting at position 1472 of SEQ ID NO: 1560296
ugaccucugcgcgcucaaa

SEQ ID NO: 1590246 - RNA, 19 nt, Artificial Sequence
  Description of Artificial Sequence: Synthetic oligonucleotide
  Antisense strand to SEQ ID NO: 1590245
uuugagcgcgcagagguca

SEQ ID NO: 1590247 - RNA, 19 nt, Artificial Sequence
  Description of Artificial Sequence: Synthetic oligonucleotide
  Sense strand starting at position 2551 of SEQ ID NO: 1560296
aaaugucauugagcgccua

SEQ ID NO: 1590248 - RNA, 19 nt, Artificial Sequence
  Description of Artificial Sequence: Synthetic oligonucleotide
  Antisense strand to SEQ ID NO: 1590247
uaggcgcucaaugacauuu

SEQ ID NO: 1590249 - RNA, 19 nt, Artificial Sequence
  Description of Artificial Sequence: Synthetic oligonucleotide
  Sense strand starting at position 2570 of SEQ ID NO: 1560296
cugugugucaaucacugua

SEQ ID NO: 1590250 - RNA, 19 nt, Artificial Sequence
  Description of Artificial Sequence: Synthetic oligonucleotide
  Antisense strand to SEQ ID NO: 1590249
uacagugauugacacacag

SEQ ID NO: 1590251 - RNA, 19 nt, Artificial Sequence
  Description of Artificial Sequence: Synthetic oligonucleotide
  Sense strand starting at position 2613 of SEQ ID NO: 1560296
ccuggucuuauugggcuaa

SEQ ID NO: 1590252 - RNA, 19 nt, Artificial Sequence
  Description of Artificial Sequence: Synthetic oligonucleotide
  Antisense strand to SEQ ID NO: 1590251
uuagcccaauaagaccagg

SEQ ID NO: 1590253 - RNA, 19 nt, Artificial Sequence
  Description of Artificial Sequence: Synthetic oligonucleotide
  Sense strand starting at position 2615 of SEQ ID NO: 1560296
uggucuuauugggcuaaca

SEQ ID NO: 1590254 - RNA, 19 nt, Artificial Sequence
  Description of Artificial Sequence: Synthetic oligonucleotide
  Antisense strand to SEQ ID NO: 1590253
uguuagcccaauaagacca

SEQ ID NO: 1590255 - RNA, 19 nt, Artificial Sequence
  Description of Artificial Sequence: Synthetic oligonucleotide
  Sense strand starting at position 2617 of SEQ ID NO: 1560296
gucuuauugggcuaacauu

SEQ ID NO: 1590256 - RNA, 19 nt, Artificial Sequence
  Description of Artificial Sequence: Synthetic oligonucleotide
  Antisense strand to SEQ ID NO: 1590255
aauguuagcccaauaagac

SEQ ID NO: 1590257 - RNA, 19 nt, Artificial Sequence
  Description of Artificial Sequence: Synthetic oligonucleotide
  Sense strand starting at position 2649 of SEQ ID NO: 1560296
ggccuagaaugcccuagua

SEQ ID NO: 1590258 - RNA, 19 nt, Artificial Sequence
  Description of Artificial Sequence: Synthetic oligonucleotide
  Antisense strand to SEQ ID NO: 1590257
uacuagggcauucuaggcc

SEQ ID NO: 1590259 - RNA, 19 nt, Artificial Sequence
  Description of Artificial Sequence: Synthetic oligonucleotide
  Sense strand starting at position 2651 of SEQ ID NO: 1560296
ccuagaaugcccuaguaga

SEQ ID NO: 1590260 - RNA, 19 nt, Artificial Sequence
  Description of Artificial Sequence: Synthetic oligonucleotide
  Antisense strand to SEQ ID NO: 1590259
ucuacuagggcauucuagg

SEQ ID NO: 1590261 - RNA, 19 nt, Artificial Sequence
  Description of Artificial Sequence: Synthetic oligonucleotide
  Sense strand starting at position 3073 of SEQ ID NO: 1560296
ccguguuggccaugaugau

SEQ ID NO: 1590262 - RNA, 19 nt, Artificial Sequence
  Description of Artificial Sequence: Synthetic oligonucleotide
  Antisense strand to SEQ ID NO: 1590261
aucaucauggccaacacgg

SEQ ID NO: 1590263 - RNA, 19 nt, Artificial Sequence
  Description of Artificial Sequence: Synthetic oligonucleotide
  Sense strand starting at position 3079 of SEQ ID NO: 1560296
uggccaugaugaucuguau

SEQ ID NO: 1590264 - RNA, 19 nt, Artificial Sequence
  Description of Artificial Sequence: Synthetic oligonucleotide
  Antisense strand to SEQ ID NO: 1590263
auacagaucaucauggcca

SEQ ID NO: 1590265 - RNA, 19 nt, Artificial Sequence
  Description of Artificial Sequence: Synthetic oligonucleotide
  Sense strand starting at position 3082 of SEQ ID NO: 1560296
ccaugaugaucuguaucuc

SEQ ID NO: 1590266 - RNA, 19 nt, Artificial Sequence
  Description of Artificial Sequence: Synthetic oligonucleotide
  Antisense strand to SEQ ID NO: 1590265
gagauacagaucaucaugg

SEQ ID NO: 1590267 - RNA, 19 nt, Artificial Sequence
  Description of Artificial Sequence: Synthetic oligonucleotide
  Sense strand starting at position 3310 of SEQ ID NO: 1560296
cagauuccugaguagcuua

SEQ ID NO: 1590268 - RNA, 19 nt, Artificial Sequence
  Description of Artificial Sequence: Synthetic oligonucleotide
  Antisense strand to SEQ ID NO: 1590267
uaagcuacucaggaaucug

SEQ ID NO: 1590269 - RNA, 19 nt, Artificial Sequence
  Description of Artificial Sequence: Synthetic oligonucleotide
  Sense strand starting at position 3898 of SEQ ID NO: 1560296
gugcaaucaucccacaggu

SEQ ID NO: 1590270 - RNA, 19 nt, Artificial Sequence
  Description of Artificial Sequence: Synthetic oligonucleotide
  Antisense strand to SEQ ID NO: 1590269
accugugggaugauugcac

SEQ ID NO: 1590271 - RNA, 19 nt, Artificial Sequence
  Description of Artificial Sequence: Synthetic oligonucleotide
  Sense strand starting at position 3900 of SEQ ID NO: 1560296
gcaaucaucccacagguuu

SEQ ID NO: 1590272 - RNA, 19 nt, Artificial Sequence
  Description of Artificial Sequence: Synthetic oligonucleotide
  Antisense strand to SEQ ID NO: 1590271
aaaccugugggaugauugc

SEQ ID NO: 1590273 - RNA, 19 nt, Artificial Sequence
  Description of Artificial Sequence: Synthetic oligonucleotide
  Sense strand starting at position 175 of SEQ ID NO: 1560297
gcgggaguucugagguccu

SEQ ID NO: 1590274 - RNA, 19 nt, Artificial Sequence
  Description of Artificial Sequence: Synthetic oligonucleotide
  Antisense strand to SEQ ID NO: 1590273
aggaccucagaacucccgc

SEQ ID NO: 1590275 - RNA, 19 nt, Artificial Sequence
  Description of Artificial Sequence: Synthetic oligonucleotide
  Sense strand starting at position 1917 of SEQ ID NO: 1560297
ugcgcuucccgacagagau

SEQ ID NO: 1590276 - RNA, 19 nt, Artificial Sequence
  Description of Artificial Sequence: Synthetic oligonucleotide
  Antisense strand to SEQ ID NO: 1590275
aucucugucgggaagcgca

SEQ ID NO: 1590277 - RNA, 19 nt, Artificial Sequence
  Description of Artificial Sequence: Synthetic oligonucleotide
  Sense strand starting at position 1978 of SEQ ID NO: 1560297
uccggucccguguguucaa

SEQ ID NO: 1590278 - RNA, 19 nt, Artificial Sequence
  Description of Artificial Sequence: Synthetic oligonucleotide
  Antisense strand to SEQ ID NO: 1590277
uugaacacacgggaccgga

SEQ ID NO: 1590279 - RNA, 19 nt, Artificial Sequence
  Description of Artificial Sequence: Synthetic oligonucleotide
  Sense strand starting at position 2373 of SEQ ID NO: 1560297
ggagguauuaguggccuga

SEQ ID NO: 1590280 - RNA, 19 nt, Artificial Sequence
  Description of Artificial Sequence: Synthetic oligonucleotide
  Antisense strand to SEQ ID NO: 1590279
ucaggccacuaauaccucc

SEQ ID NO: 1590281 - RNA, 19 nt, Artificial Sequence
  Description of Artificial Sequence: Synthetic oligonucleotide
  Sense strand starting at position 2375 of SEQ ID NO: 1560297
agguauuaguggccugaau

SEQ ID NO: 1590282 - RNA, 19 nt, Artificial Sequence
  Description of Artificial Sequence: Synthetic oligonucleotide
  Antisense strand to SEQ ID NO: 1590281
auucaggccacuaauaccu

SEQ ID NO: 1590283 - RNA, 19 nt, Artificial Sequence
  Description of Artificial Sequence: Synthetic oligonucleotide
  Sense strand starting at position 2377 of SEQ ID NO: 1560297
guauuaguggccugaauau

SEQ ID NO: 1590284 - RNA, 19 nt, Artificial Sequence
  Description of Artificial Sequence: Synthetic oligonucleotide
  Antisense strand to SEQ ID NO: 1590283
auauucaggccacuaauac

SEQ ID NO: 1590285 - RNA, 19 nt, Artificial Sequence
  Description of Artificial Sequence: Synthetic oligonucleotide
  Sense strand starting at position 2409 of SEQ ID NO: 1560297
gguguuguccacugaggga

SEQ ID NO: 1590286 - RNA, 19 nt, Artificial Sequence
  Description of Artificial Sequence: Synthetic oligonucleotide
  Antisense strand to SEQ ID NO: 1590285
ucccucaguggacaacacc

SEQ ID NO: 1590287 - RNA, 19 nt, Artificial Sequence
  Description of Artificial Sequence: Synthetic oligonucleotide
  Sense strand starting at position 2539 of SEQ ID NO: 1560297
gcccuagucuucugcagaa

SEQ ID NO: 1590288 - RNA, 19 nt, Artificial Sequence
  Description of Artificial Sequence: Synthetic oligonucleotide
  Antisense strand to SEQ ID NO: 1590287
uucugcagaagacuagggc

SEQ ID NO: 1590289 - RNA, 19 nt, Artificial Sequence
  Description of Artificial Sequence: Synthetic oligonucleotide
  Sense strand starting at position 2588 of SEQ ID NO: 1560297
gcuggauccuucuaggguu

SEQ ID NO: 1590290 - RNA, 19 nt, Artificial Sequence
  Description of Artificial Sequence: Synthetic oligonucleotide
  Antisense strand to SEQ ID NO: 1590289
aacccuagaaggauccagc

SEQ ID NO: 1590291 - RNA, 19 nt, Artificial Sequence
  Description of Artificial Sequence: Synthetic oligonucleotide
  Sense strand starting at position 2679 of SEQ ID NO: 1560297
ggcucaguguucuggacaa

SEQ ID NO: 1590292 - RNA, 19 nt, Artificial Sequence
  Description of Artificial Sequence: Synthetic oligonucleotide
  Antisense strand to SEQ ID NO: 1590291
uuguccagaacacugagcc

SEQ ID NO: 1590293 - RNA, 19 nt, Artificial Sequence
  Description of Artificial Sequence: Synthetic oligonucleotide
  Sense strand starting at position 2681 of SEQ ID NO: 1560297
cucaguguucuggacaauc

SEQ ID NO: 1590294 - RNA, 19 nt, Artificial Sequence
  Description of Artificial Sequence: Synthetic oligonucleotide
  Antisense strand to SEQ ID NO: 1590293
gauuguccagaacacugag

SEQ ID NO: 1590295 - RNA, 19 nt, Artificial Sequence
  Description of Artificial Sequence: Synthetic oligonucleotide
  Sense strand starting at position 2695 of SEQ ID NO: 1560297
caaucaucgcuggagccau

SEQ ID NO: 1590296 - RNA, 19 nt, Artificial Sequence
  Description of Artificial Sequence: Synthetic oligonucleotide
  Antisense strand to SEQ ID NO: 1590295
auggcuccagcgaugauug

SEQ ID NO: 1590297 - RNA, 19 nt, Artificial Sequence
  Description of Artificial Sequence: Synthetic oligonucleotide
  Sense strand starting at position 2765 of SEQ ID NO: 1560297
guggaucugccacauaaau

SEQ ID NO: 1590298 - RNA, 19 nt, Artificial Sequence
  Description of Artificial Sequence: Synthetic oligonucleotide
  Antisense strand to SEQ ID NO: 1590297
auuuauguggcagauccac

SEQ ID NO: 1590299 - RNA, 19 nt, Artificial Sequence
  Description of Artificial Sequence: Synthetic oligonucleotide
  Sense strand starting at position 2776 of SEQ ID NO: 1560297
acauaaauguccuggcuuu

SEQ ID NO: 1590300 - RNA, 19 nt, Artificial Sequence
  Description of Artificial Sequence: Synthetic oligonucleotide
  Antisense strand to SEQ ID NO: 1590299
aaagccaggacauuuaugu

SEQ ID NO: 1590301 - RNA, 19 nt, Artificial Sequence
  Description of Artificial Sequence: Synthetic oligonucleotide
  Sense strand starting at position 2790 of SEQ ID NO: 1560297
gcuuucuaggcucgugauu

SEQ ID NO: 1590302 - RNA, 19 nt, Artificial Sequence
  Description of Artificial Sequence: Synthetic oligonucleotide
  Antisense strand to SEQ ID NO: 1590301
aaucacgagccuagaaagc

SEQ ID NO: 1590303 - RNA, 19 nt, Artificial Sequence
  Description of Artificial Sequence: Synthetic oligonucleotide
  Sense strand starting at position 2802 of SEQ ID NO: 1560297
cgugauugguccuccugac

SEQ ID NO: 1590304 - RNA, 19 nt, Artificial Sequence
  Description of Artificial Sequence: Synthetic oligonucleotide
  Antisense strand to SEQ ID NO: 1590303
gucaggaggaccaaucacg

SEQ ID NO: 1590305 - RNA, 19 nt, Artificial Sequence
  Description of Artificial Sequence: Synthetic oligonucleotide
  Sense strand starting at position 3186 of SEQ ID NO: 1560297
gcccuagagaucgagccaa

SEQ ID NO: 1590306 - RNA, 19 nt, Artificial Sequence
  Description of Artificial Sequence: Synthetic oligonucleotide
  Antisense strand to SEQ ID NO: 1590305
uuggcucgaucucuagggc

SEQ ID NO: 1590307 - RNA, 19 nt, Artificial Sequence
  Description of Artificial Sequence: Synthetic oligonucleotide
  Sense strand starting at position 3387 of SEQ ID NO: 1560297
cccgguuuccgucaucgga

SEQ ID NO: 1590308 - RNA, 19 nt, Artificial Sequence
  Description of Artificial Sequence: Synthetic oligonucleotide
  Antisense strand to SEQ ID NO: 1590307
uccgaugacggaaaccggg

SEQ ID NO: 1590309 - RNA, 19 nt, Artificial Sequence
  Description of Artificial Sequence: Synthetic oligonucleotide
  Sense strand starting at position 3389 of SEQ ID NO: 1560297
cgguuuccgucaucggaaa

SEQ ID NO: 1590310 - RNA, 19 nt, Artificial Sequence
  Description of Artificial Sequence: Synthetic oligonucleotide
  Antisense strand to SEQ ID NO: 1590309
uuuccgaugacggaaaccg

SEQ ID NO: 1590311 - RNA, 19 nt, Artificial Sequence
  Description of Artificial Sequence: Synthetic oligonucleotide
  Sense strand starting at position 3391 of SEQ ID NO: 1560297
guuuccgucaucggaaacu

SEQ ID NO: 1590312 - RNA, 19 nt, Artificial Sequence
  Description of Artificial Sequence: Synthetic oligonucleotide
  Antisense strand to SEQ ID NO: 1590311
aguuuccgaugacggaaac

SEQ ID NO: 1590313 - RNA, 19 nt, Artificial Sequence
  Description of Artificial Sequence: Synthetic oligonucleotide
  Sense strand starting at position 3847 of SEQ ID NO: 1560297
gcauccuccuccgggaaau

SEQ ID NO: 1590314 - RNA, 19 nt, Artificial Sequence
  Description of Artificial Sequence: Synthetic oligonucleotide
  Antisense strand to SEQ ID NO: 1590313
auuucccggaggaggaugc

SEQ ID NO: 1590315 - RNA, 19 nt, Artificial Sequence
  Description of Artificial Sequence: Synthetic oligonucleotide
  Sense strand starting at position 3963 of SEQ ID NO: 1560297
guuccucuggccugagaau

SEQ ID NO: 1590316 - RNA, 19 nt, Artificial Sequence
  Description of Artificial Sequence: Synthetic oligonucleotide
  Antisense strand to SEQ ID NO: 1590315
auucucaggccagaggaac

SEQ ID NO: 1590317 - RNA, 19 nt, Artificial Sequence
  Description of Artificial Sequence: Synthetic oligonucleotide
  Sense strand starting at position 3964 of SEQ ID NO: 1560297
uuccucuggccugagaauu

SEQ ID NO: 1590318 - RNA, 19 nt, Artificial Sequence
  Description of Artificial Sequence: Synthetic oligonucleotide
  Antisense strand to SEQ ID NO: 1590317
aauucucaggccagaggaa

SEQ ID NO: 1590319 - RNA, 19 nt, Artificial Sequence
  Description of Artificial Sequence: Synthetic oligonucleotide
  Sense strand starting at position 64 of SEQ ID NO: 1560298
gcuccugguuccuaaagca

SEQ ID NO: 1590320 - RNA, 19 nt, Artificial Sequence
  Description of Artificial Sequence: Synthetic oligonucleotide
  Antisense strand to SEQ ID NO: 1590319
ugcuuuaggaaccaggagc

SEQ ID NO: 1590321 - RNA, 19 nt, Artificial Sequence
  Description of Artificial Sequence: Synthetic oligonucleotide
  Sense strand starting at position 106 of SEQ ID NO: 1560298
ccaaguccaucguaguuau

SEQ ID NO: 1590322 - RNA, 19 nt, Artificial Sequence
  Description of Artificial Sequence: Synthetic oligonucleotide
  Antisense strand to SEQ ID NO: 1590321
auaacuacgauggacuugg

SEQ ID NO: 1590323 - RNA, 19 nt, Artificial Sequence
  Description of Artificial Sequence: Synthetic oligonucleotide
  Sense strand starting at position 109 of SEQ ID NO: 1560298
aguccaucguaguuauaug

SEQ ID NO: 1590324 - RNA, 19 nt, Artificial Sequence
  Description of Artificial Sequence: Synthetic oligonucleotide
  Antisense strand to SEQ ID NO: 1590323
cauauaacuacgauggacu

SEQ ID NO: 1590325 - RNA, 19 nt, Artificial Sequence
  Description of Artificial Sequence: Synthetic oligonucleotide
  Sense strand starting at position 110 of SEQ ID NO: 1560298
guccaucguaguuauauga

SEQ ID NO: 1590326 - RNA, 19 nt, Artificial Sequence
  Description of Artificial Sequence: Synthetic oligonucleotide
  Antisense strand to SEQ ID NO: 1590325
ucauauaacuacgauggac

SEQ ID NO: 1590327 - RNA, 19 nt, Artificial Sequence
  Description of Artificial Sequence: Synthetic oligonucleotide
  Sense strand starting at position 117 of SEQ ID NO: 1560298
guaguuauaugacucacga

SEQ ID NO: 1590328 - RNA, 19 nt, Artificial Sequence
  Description of Artificial Sequence: Synthetic oligonucleotide
  Antisense strand to SEQ ID NO: 1590327
ucgugagucauauaacuac

SEQ ID NO: 1590329 - RNA, 19 nt, Artificial Sequence
  Description of Artificial Sequence: Synthetic oligonucleotide
  Sense strand starting at position 143 of SEQ ID NO: 1560298
cccagcuguuucuaggaaa

SEQ ID NO: 1590330 - RNA, 19 nt, Artificial Sequence
  Description of Artificial Sequence: Synthetic oligonucleotide
  Antisense strand to SEQ ID NO: 1590329
uuuccuagaaacagcuggg

SEQ ID NO: 1590331 - RNA, 19 nt, Artificial Sequence
  Description of Artificial Sequence: Synthetic oligonucleotide
  Sense strand starting at position 214 of SEQ ID NO: 1560298
ccagaauucuaccaggaag

SEQ ID NO: 1590332 - RNA, 19 nt, Artificial Sequence
  Description of Artificial Sequence: Synthetic oligonucleotide
  Antisense strand to SEQ ID NO: 1590331
cuuccugguagaauucugg

SEQ ID NO: 1590333 - RNA, 19 nt, Artificial Sequence
  Description of Artificial Sequence: Synthetic oligonucleotide
  Sense strand starting at position 485 of SEQ ID NO: 1560298
ggaagaaauucucggcuua

SEQ ID NO: 1590334 - RNA, 19 nt, Artificial Sequence
  Description of Artificial Sequence: Synthetic oligonucleotide
  Antisense strand to SEQ ID NO: 1590333
uaagccgagaauuucuucc

SEQ ID NO: 1590335 - RNA, 19 nt, Artificial Sequence
  Description of Artificial Sequence: Synthetic oligonucleotide
  Sense strand starting at position 486 of SEQ ID NO: 1560298
gaagaaauucucggcuuag

SEQ ID NO: 1590336 - RNA, 19 nt, Artificial Sequence
  Description of Artificial Sequence: Synthetic oligonucleotide
  Antisense strand to SEQ ID NO: 1590335
cuaagccgagaauuucuuc

SEQ ID NO: 1590337 - RNA, 19 nt, Artificial Sequence
  Description of Artificial Sequence: Synthetic oligonucleotide
  Sense strand starting at position 487 of SEQ ID NO: 1560298
aagaaauucucggcuuagc

SEQ ID NO: 1590338 - RNA, 19 nt, Artificial Sequence
  Description of Artificial Sequence: Synthetic oligonucleotide
  Antisense strand to SEQ ID NO: 1590337
gcuaagccgagaauuucuu

SEQ ID NO: 1590339 - RNA, 19 nt, Artificial Sequence
  Description of Artificial Sequence: Synthetic oligonucleotide
  Sense strand starting at position 746 of SEQ ID NO: 1560298
ggaccugaccacuggucau

SEQ ID NO: 1590340 - RNA, 19 nt, Artificial Sequence
  Description of Artificial Sequence: Synthetic oligonucleotide
  Antisense strand to SEQ ID NO: 1590339
augaccaguggucaggucc

SEQ ID NO: 1590341 - RNA, 19 nt, Artificial Sequence
  Description of Artificial Sequence: Synthetic oligonucleotide
  Sense strand starting at position 752 of SEQ ID NO: 1560298
gaccacuggucaucugcaa

SEQ ID NO: 1590342 - RNA, 19 nt, Artificial Sequence
  Description of Artificial Sequence: Synthetic oligonucleotide
  Antisense strand to SEQ ID NO: 1590341
uugcagaugaccagugguc

SEQ ID NO: 1590343 - RNA, 19 nt, Artificial Sequence
  Description of Artificial Sequence: Synthetic oligonucleotide
  Sense strand starting at position 926 of SEQ ID NO: 1560298
accgaaacgccucaaacuu

SEQ ID NO: 1590344 - RNA, 19 nt, Artificial Sequence
  Description of Artificial Sequence: Synthetic oligonucleotide
  Antisense strand to SEQ ID NO: 1590343
aaguuugaggcguuucggu

SEQ ID NO: 1590345 - RNA, 19 nt, Artificial Sequence
  Description of Artificial Sequence: Synthetic oligonucleotide
  Sense strand starting at position 1037 of SEQ ID NO: 1560298
cuacaugugcccugaggau

SEQ ID NO: 1590346 - RNA, 19 nt, Artificial Sequence
  Description of Artificial Sequence: Synthetic oligonucleotide
  Antisense strand to SEQ ID NO: 1590345
auccucagggcacauguag

SEQ ID NO: 1590347 - RNA, 19 nt, Artificial Sequence
  Description of Artificial Sequence: Synthetic oligonucleotide
  Sense strand starting at position 1093 of SEQ ID NO: 1560298
gaaccucucuccggagaga

SEQ ID NO: 1590348 - RNA, 19 nt, Artificial Sequence
  Description of Artificial Sequence: Synthetic oligonucleotide
  Antisense strand to SEQ ID NO: 1590347
ucucuccggagagagguuc

SEQ ID NO: 1590349 - RNA, 19 nt, Artificial Sequence
  Description of Artificial Sequence: Synthetic oligonucleotide
  Sense strand starting at position 1153 of SEQ ID NO: 1560298
gcugucaguuucugcccaa

SEQ ID NO: 1590350 - RNA, 19 nt, Artificial Sequence
  Description of Artificial Sequence: Synthetic oligonucleotide
  Antisense strand to SEQ ID NO: 1590349
uugggcagaaacugacagc

SEQ ID NO: 1590351 - RNA, 19 nt, Artificial Sequence
  Description of Artificial Sequence: Synthetic oligonucleotide
  Sense strand starting at position 1154 of SEQ ID NO: 1560298
cugucaguuucugcccaaa

SEQ ID NO: 1590352 - RNA, 19 nt, Artificial Sequence
  Description of Artificial Sequence: Synthetic oligonucleotide
  Antisense strand to SEQ ID NO: 1590351
uuugggcagaaacugacag

SEQ ID NO: 1590353 - RNA, 19 nt, Artificial Sequence
  Description of Artificial Sequence: Synthetic oligonucleotide
  Sense strand starting at position 1156 of SEQ ID NO: 1560298
gucaguuucugcccaaacu

SEQ ID NO: 1590354 - RNA, 19 nt, Artificial Sequence
  Description of Artificial Sequence: Synthetic oligonucleotide
  Antisense strand to SEQ ID NO: 1590353
aguuugggcagaaacugac

SEQ ID NO: 1590355 - RNA, 19 nt, Artificial Sequence
  Description of Artificial Sequence: Synthetic oligonucleotide
  Sense strand starting at position 1585 of SEQ ID NO: 1560298
gccuguauugccuccuagu

SEQ ID NO: 1590356 - RNA, 19 nt, Artificial Sequence
  Description of Artificial Sequence: Synthetic oligonucleotide
  Antisense strand to SEQ ID NO: 1590355
acuaggaggcaauacaggc

SEQ ID NO: 1590357 - RNA, 19 nt, Artificial Sequence
  Description of Artificial Sequence: Synthetic oligonucleotide
  Sense strand starting at position 1835 of SEQ ID NO: 1560298
cggugagcuucacguggaa

SEQ ID NO: 1590358 - RNA, 19 nt, Artificial Sequence
  Description of Artificial Sequence: Synthetic oligonucleotide
  Antisense strand to SEQ ID NO: 1590357
uuccacgugaagcucaccg

SEQ ID NO: 1590359 - RNA, 19 nt, Artificial Sequence
  Description of Artificial Sequence: Synthetic oligonucleotide
  Sense strand starting at position 2221 of SEQ ID NO: 1560298
uggccacuuccgugaacga

SEQ ID NO: 1590360 - RNA, 19 nt, Artificial Sequence
  Description of Artificial Sequence: Synthetic oligonucleotide
  Antisense strand to SEQ ID NO: 1590359
ucguucacggaaguggcca

SEQ ID NO: 1590361 - RNA, 19 nt, Artificial Sequence
  Description of Artificial Sequence: Synthetic oligonucleotide
  Sense strand starting at position 2222 of SEQ ID NO: 1560298
ggccacuuccgugaacgaa

SEQ ID NO: 1590362 - RNA, 19 nt, Artificial Sequence
  Description of Artificial Sequence: Synthetic oligonucleotide
  Antisense strand to SEQ ID NO: 1590361
uucguucacggaaguggcc

SEQ ID NO: 1590363 - RNA, 19 nt, Artificial Sequence
  Description of Artificial Sequence: Synthetic oligonucleotide
  Sense strand starting at position 2272 of SEQ ID NO: 1560298
ccgccuccauaguauuaua

SEQ ID NO: 1590364 - RNA, 19 nt, Artificial Sequence
  Description of Artificial Sequence: Synthetic oligonucleotide
  Antisense strand to SEQ ID NO: 1590363
uauaauacuauggaggcgg

SEQ ID NO: 1590365 - RNA, 19 nt, Artificial Sequence
  Description of Artificial Sequence: Synthetic oligonucleotide
  Sense strand starting at position 2341 of SEQ ID NO: 1560298
cgcugacgugaugcauuau

SEQ ID NO: 1590366 - RNA, 19 nt, Artificial Sequence
  Description of Artificial Sequence: Synthetic oligonucleotide
  Antisense strand to SEQ ID NO: 1590365
auaaugcaucacgucagcg

SEQ ID NO: 1590367 - RNA, 19 nt, Artificial Sequence
  Description of Artificial Sequence: Synthetic oligonucleotide
  Sense strand starting at position 2342 of SEQ ID NO: 1560298
gcugacgugaugcauuauu

SEQ ID NO: 1590368 - RNA, 19 nt, Artificial Sequence
  Description of Artificial Sequence: Synthetic oligonucleotide
  Antisense strand to SEQ ID NO: 1590367
aauaaugcaucacgucagc

SEQ ID NO: 1590369 - RNA, 19 nt, Artificial Sequence
  Description of Artificial Sequence: Synthetic oligonucleotide
  Sense strand starting at position 2347 of SEQ ID NO: 1560298
cgugaugcauuauuuauga

SEQ ID NO: 1590370 - RNA, 19 nt, Artificial Sequence
  Description of Artificial Sequence: Synthetic oligonucleotide
  Antisense strand to SEQ ID NO: 1590369
ucauaaauaaugcaucacg

SEQ ID NO: 1590371 - RNA, 19 nt, Artificial Sequence
  Description of Artificial Sequence: Synthetic oligonucleotide
  Sense strand starting at position 2351 of SEQ ID NO: 1560298
augcauuauuuaugagauc

SEQ ID NO: 1590372 - RNA, 19 nt, Artificial Sequence
  Description of Artificial Sequence: Synthetic oligonucleotide
  Antisense strand to SEQ ID NO: 1590371
gaucucauaaauaaugcau

SEQ ID NO: 1590373 - RNA, 19 nt, Artificial Sequence
  Description of Artificial Sequence: Synthetic oligonucleotide
  Sense strand starting at position 2352 of SEQ ID NO: 1560298
ugcauuauuuaugagaucu

SEQ ID NO: 1590374 - RNA, 19 nt, Artificial Sequence
  Description of Artificial Sequence: Synthetic oligonucleotide
  Antisense strand to SEQ ID NO: 1590373
agaucucauaaauaaugca

SEQ ID NO: 1590375 - RNA, 19 nt, Artificial Sequence
  Description of Artificial Sequence: Synthetic oligonucleotide
  Sense strand starting at position 2360 of SEQ ID NO: 1560298
uuaugagaucucuacaguc

SEQ ID NO: 1590376 - RNA, 19 nt, Artificial Sequence
  Description of Artificial Sequence: Synthetic oligonucleotide
  Antisense strand to SEQ ID NO: 1590375
gacuguagagaucucauaa

SEQ ID NO: 1590377 - RNA, 19 nt, Artificial Sequence
  Description of Artificial Sequence: Synthetic oligonucleotide
  Sense strand starting at position 2362 of SEQ ID NO: 1560298
augagaucucuacagucuu

SEQ ID NO: 1590378 - RNA, 19 nt, Artificial Sequence
  Description of Artificial Sequence: Synthetic oligonucleotide
  Antisense strand to SEQ ID NO: 1590377
aagacuguagagaucucau

SEQ ID NO: 1590379 - RNA, 19 nt, Artificial Sequence
  Description of Artificial Sequence: Synthetic oligonucleotide
  Sense strand starting at position 2383 of SEQ ID NO: 1560298
gucuuuggcuucuguggaa

SEQ ID NO: 1590380 - RNA, 19 nt, Artificial Sequence
  Description of Artificial Sequence: Synthetic oligonucleotide
  Antisense strand to SEQ ID NO: 1590379
uuccacagaagccaaagac

SEQ ID NO: 1590381 - RNA, 19 nt, Artificial Sequence
  Description of Artificial Sequence: Synthetic oligonucleotide
  Sense strand starting at position 2809 of SEQ ID NO: 1560298
uugucugggucugcugaaa

SEQ ID NO: 1590382 - RNA, 19 nt, Artificial Sequence
  Description of Artificial Sequence: Synthetic oligonucleotide
  Antisense strand to SEQ ID NO: 1590381
uuucagcagacccagacaa

SEQ ID NO: 1590383 - RNA, 19 nt, Artificial Sequence
  Description of Artificial Sequence: Synthetic oligonucleotide
  Sense strand starting at position 2821 of SEQ ID NO: 1560298
gcugaaaugcuaggauuac

SEQ ID NO: 1590384 - RNA, 19 nt, Artificial Sequence
  Description of Artificial Sequence: Synthetic oligonucleotide
  Antisense strand to SEQ ID NO: 1590383
guaauccuagcauuucagc

SEQ ID NO: 1590385 - RNA, 19 nt, Artificial Sequence
  Description of Artificial Sequence: Synthetic oligonucleotide
  Sense strand starting at position 2901 of SEQ ID NO: 1560298
gacggagucuugcucauca

SEQ ID NO: 1590386 - RNA, 19 nt, Artificial Sequence
  Description of Artificial Sequence: Synthetic oligonucleotide
  Antisense strand to SEQ ID NO: 1590385
ugaugagcaagacuccguc

SEQ ID NO: 1590387 - RNA, 19 nt, Artificial Sequence
  Description of Artificial Sequence: Synthetic oligonucleotide
  Sense strand starting at position 3570 of SEQ ID NO: 1560298
cuaucuaauuuccgagauu

SEQ ID NO: 1590388 - RNA, 19 nt, Artificial Sequence
  Description of Artificial Sequence: Synthetic oligonucleotide
  Antisense strand to SEQ ID NO: 1590387
aaucucggaaauuagauag

SEQ ID NO: 1590389 - RNA, 19 nt, Artificial Sequence
  Description of Artificial Sequence: Synthetic oligonucleotide
  Sense strand starting at position 3787 of SEQ ID NO: 1560298
ccauauugaucaggucucu

SEQ ID NO: 1590390 - RNA, 19 nt, Artificial Sequence
  Description of Artificial Sequence: Synthetic oligonucleotide
  Antisense strand to SEQ ID NO: 1590389
agagaccugaucaauaugg

SEQ ID NO: 1590391 - RNA, 19 nt, Artificial Sequence
  Description of Artificial Sequence: Synthetic oligonucleotide
  Sense strand starting at position 3950 of SEQ ID NO: 1560298
uucugagccucuguggauu

SEQ ID NO: 1590392 - RNA, 19 nt, Artificial Sequence
  Description of Artificial Sequence: Synthetic oligonucleotide
  Antisense strand to SEQ ID NO: 1590391
aauccacagaggcucagaa

SEQ ID NO: 1590393 - RNA, 19 nt, Artificial Sequence
  Description of Artificial Sequence: Synthetic oligonucleotide
  Sense strand starting at position 3962 of SEQ ID NO: 1560298
guggauucacuucggaaac

SEQ ID NO: 1590394 - RNA, 19 nt, Artificial Sequence
  Description of Artificial Sequence: Synthetic oligonucleotide
  Antisense strand to SEQ ID NO: 1590393
guuuccgaagugaauccac

SEQ ID NO: 1590395 - RNA, 19 nt, Artificial Sequence
  Description of Artificial Sequence: Synthetic oligonucleotide
  Sense strand starting at position 42 of SEQ ID NO: 1560299
gccaacuugcuccaaugaa

SEQ ID NO: 1590396 - RNA, 19 nt, Artificial Sequence
  Description of Artificial Sequence: Synthetic oligonucleotide
  Antisense strand to SEQ ID NO: 1590395
uucauuggagcaaguuggc

SEQ ID NO: 1590397 - RNA, 19 nt, Artificial Sequence
  Description of Artificial Sequence: Synthetic oligonucleotide
  Sense strand starting at position 637 of SEQ ID NO: 1560299
agcccaugaguuuaauugu

SEQ ID NO: 1590398 - RNA, 19 nt, Artificial Sequence
  Description of Artificial Sequence: Synthetic oligonucleotide
  Antisense strand to SEQ ID NO: 1590397
acaauuaaacucaugggcu

SEQ ID NO: 1590399 - RNA, 19 nt, Artificial Sequence
  Description of Artificial Sequence: Synthetic oligonucleotide
  Sense strand starting at position 643 of SEQ ID NO: 1560299
ugaguuuaauuguuggauc

SEQ ID NO: 1590400 - RNA, 19 nt, Artificial Sequence
  Description of Artificial Sequence: Synthetic oligonucleotide
  Antisense strand to SEQ ID NO: 1590399
gauccaacaauuaaacuca

SEQ ID NO: 1590401 - RNA, 19 nt, Artificial Sequence
  Description of Artificial Sequence: Synthetic oligonucleotide
  Sense strand starting at position 673 of SEQ ID NO: 1560299
ggcuauacucaccacauga

SEQ ID NO: 1590402 - RNA, 19 nt, Artificial Sequence
  Description of Artificial Sequence: Synthetic oligonucleotide
  Antisense strand to SEQ ID NO: 1590401
ucauguggugaguauagcc

SEQ ID NO: 1590403 - RNA, 19 nt, Artificial Sequence
  Description of Artificial Sequence: Synthetic oligonucleotide
  Sense strand starting at position 767 of SEQ ID NO: 1560299
ugcagacucugaucuaucu

SEQ ID NO: 1590404 - RNA, 19 nt, Artificial Sequence
  Description of Artificial Sequence: Synthetic oligonucleotide
  Antisense strand to SEQ ID NO: 1590403
agauagaucagagucugca

SEQ ID NO: 1590405 - RNA, 19 nt, Artificial Sequence
  Description of Artificial Sequence: Synthetic oligonucleotide
  Sense strand starting at position 909 of SEQ ID NO: 1560299
uccaucuuuccggauaauc

SEQ ID NO: 1590406 - RNA, 19 nt, Artificial Sequence
  Description of Artificial Sequence: Synthetic oligonucleotide
  Antisense strand to SEQ ID NO: 1590405
gauuauccggaaagaugga

SEQ ID NO: 1590407 - RNA, 19 nt, Artificial Sequence
  Description of Artificial Sequence: Synthetic oligonucleotide
  Sense strand starting at position 968 of SEQ ID NO: 1560299
ucacacauuccuuaugcga

SEQ ID NO: 1590408 - RNA, 19 nt, Artificial Sequence
  Description of Artificial Sequence: Synthetic oligonucleotide
  Antisense strand to SEQ ID NO: 1590407
ucgcauaaggaauguguga

SEQ ID NO: 1590409 - RNA, 19 nt, Artificial Sequence
  Description of Artificial Sequence: Synthetic oligonucleotide
  Sense strand starting at position 1203 of SEQ ID NO: 1560299
ucaaucaguuugcuuguaa

SEQ ID NO: 1590410 - RNA, 19 nt, Artificial Sequence
  Description of Artificial Sequence: Synthetic oligonucleotide
  Antisense strand to SEQ ID NO: 1590409
uuacaagcaaacugauuga

SEQ ID NO: 1590411 - RNA, 19 nt, Artificial Sequence
  Description of Artificial Sequence: Synthetic oligonucleotide
  Sense strand starting at position 1614 of SEQ ID NO: 1560299
cagccuguccugugacaac

SEQ ID NO: 1590412 - RNA, 19 nt, Artificial Sequence
  Description of Artificial Sequence: Synthetic oligonucleotide
  Antisense strand to SEQ ID NO: 1590411
guugucacaggacaggcug

SEQ ID NO: 1590413 - RNA, 19 nt, Artificial Sequence
  Description of Artificial Sequence: Synthetic oligonucleotide
  Sense strand starting at position 1780 of SEQ ID NO: 1560299
ccgguagucgcgcuuggaa

SEQ ID NO: 1590414 - RNA, 19 nt, Artificial Sequence
  Description of Artificial Sequence: Synthetic oligonucleotide
  Antisense strand to SEQ ID NO: 1590413
uuccaagcgcgacuaccgg

SEQ ID NO: 1590415 - RNA, 19 nt, Artificial Sequence
  Description of Artificial Sequence: Synthetic oligonucleotide
  Sense strand starting at position 1974 of SEQ ID NO: 1560299
uccguucacccgggagaua

SEQ ID NO: 1590416 - RNA, 19 nt, Artificial Sequence
  Description of Artificial Sequence: Synthetic oligonucleotide
  Antisense strand to SEQ ID NO: 1590415
uaucucccgggugaacgga

SEQ ID NO: 1590417 - RNA, 19 nt, Artificial Sequence
  Description of Artificial Sequence: Synthetic oligonucleotide
  Sense strand starting at position 1985 of SEQ ID NO: 1560299
gggagauagugacuuccga

SEQ ID NO: 1590418 - RNA, 19 nt, Artificial Sequence
  Description of Artificial Sequence: Synthetic oligonucleotide
  Antisense strand to SEQ ID NO: 1590417
ucggaagucacuaucuccc

SEQ ID NO: 1590419 - RNA, 19 nt, Artificial Sequence
  Description of Artificial Sequence: Synthetic oligonucleotide
  Sense strand starting at position 2168 of SEQ ID NO: 1560299
ugcguauuugccuguaccu

SEQ ID NO: 1590420 - RNA, 19 nt, Artificial Sequence
  Description of Artificial Sequence: Synthetic oligonucleotide
  Antisense strand to SEQ ID NO: 1590419
agguacaggcaaauacgca

SEQ ID NO: 1590421 - RNA, 19 nt, Artificial Sequence
  Description of Artificial Sequence: Synthetic oligonucleotide
  Sense strand starting at position 2198 of SEQ ID NO: 1560299
caguacuucuggucaguuu

SEQ ID NO: 1590422 - RNA, 19 nt, Artificial Sequence
  Description of Artificial Sequence: Synthetic oligonucleotide
  Antisense strand to SEQ ID NO: 1590421
aaacugaccagaaguacug

SEQ ID NO: 1590423 - RNA, 19 nt, Artificial Sequence
  Description of Artificial Sequence: Synthetic oligonucleotide
  Sense strand starting at position 2422 of SEQ ID NO: 1560299
cccagauuguaguagauga

SEQ ID NO: 1590424 - RNA, 19 nt, Artificial Sequence
  Description of Artificial Sequence: Synthetic oligonucleotide
  Antisense strand to SEQ ID NO: 1590423
ucaucuacuacaaucuggg

SEQ ID NO: 1590425 - RNA, 19 nt, Artificial Sequence
  Description of Artificial Sequence: Synthetic oligonucleotide
  Sense strand starting at position 2426 of SEQ ID NO: 1560299
gauuguaguagaugagguu

SEQ ID NO: 1590426 - RNA, 19 nt, Artificial Sequence
  Description of Artificial Sequence: Synthetic oligonucleotide
  Antisense strand to SEQ ID NO: 1590425
aaccucaucuacuacaauc

SEQ ID NO: 1590427 - RNA, 19 nt, Artificial Sequence
  Description of Artificial Sequence: Synthetic oligonucleotide
  Sense strand starting at position 2461 of SEQ ID NO: 1560299
gccagauuccauggagccu

SEQ ID NO: 1590428 - RNA, 19 nt, Artificial Sequence
  Description of Artificial Sequence: Synthetic oligonucleotide
  Antisense strand to SEQ ID NO: 1590427
aggcuccauggaaucuggc

SEQ ID NO: 1590429 - RNA, 19 nt, Artificial Sequence
  Description of Artificial Sequence: Synthetic oligonucleotide
  Sense strand starting at position 3025 of SEQ ID NO: 1560299
ccucuuaaguagcugugau

SEQ ID NO: 1590430 - RNA, 19 nt, Artificial Sequence
  Description of Artificial Sequence: Synthetic oligonucleotide
  Antisense strand to SEQ ID NO: 1590429
aucacagcuacuuaagagg

SEQ ID NO: 1590431 - RNA, 19 nt, Artificial Sequence
  Description of Artificial Sequence: Synthetic oligonucleotide
  Sense strand starting at position 3250 of SEQ ID NO: 1560299
ucacgugucccugaguuga

SEQ ID NO: 1590432 - RNA, 19 nt, Artificial Sequence
  Description of Artificial Sequence: Synthetic oligonucleotide
  Antisense strand to SEQ ID NO: 1590431
ucaacucagggacacguga

SEQ ID NO: 1590433 - RNA, 19 nt, Artificial Sequence
  Description of Artificial Sequence: Synthetic oligonucleotide
  Sense strand starting at position 3252 of SEQ ID NO: 1560299
acgugucccugaguugaag

SEQ ID NO: 1590434 - RNA, 19 nt, Artificial Sequence
  Description of Artificial Sequence: Synthetic oligonucleotide
  Antisense strand to SEQ ID NO: 1590433
cuucaacucagggacacgu

SEQ ID NO: 1590435 - RNA, 19 nt, Artificial Sequence
  Description of Artificial Sequence: Synthetic oligonucleotide
  Sense strand starting at position 3254 of SEQ ID NO: 1560299
gugucccugaguugaagaa

SEQ ID NO: 1590436 - RNA, 19 nt, Artificial Sequence
  Description of Artificial Sequence: Synthetic oligonucleotide
  Antisense strand to SEQ ID NO: 1590435
uucuucaacucagggacac

SEQ ID NO: 1590437 - RNA, 19 nt, Artificial Sequence
  Description of Artificial Sequence: Synthetic oligonucleotide
  Sense strand starting at position 3284 of SEQ ID NO: 1560299
agaauugacaguugaguuu

SEQ ID NO: 1590438 - RNA, 19 nt, Artificial Sequence
  Description of Artificial Sequence: Synthetic oligonucleotide
  Antisense strand to SEQ ID NO: 1590437
aaacucaacugucaauucu

SEQ ID NO: 1590439 - RNA, 19 nt, Artificial Sequence
  Description of Artificial Sequence: Synthetic oligonucleotide
  Sense strand starting at position 3340 of SEQ ID NO: 1560299
guugcauuagaguguucag

SEQ ID NO: 1590440 - RNA, 19 nt, Artificial Sequence
  Description of Artificial Sequence: Synthetic oligonucleotide
  Antisense strand to SEQ ID NO: 1590439
cugaacacucuaaugcaac

SEQ ID NO: 1590441 - RNA, 19 nt, Artificial Sequence
  Description of Artificial Sequence: Synthetic oligonucleotide
  Sense strand starting at position 3343 of SEQ ID NO: 1560299
gcauuagaguguucaggaa

SEQ ID NO: 1590442 - RNA, 19 nt, Artificial Sequence
  Description of Artificial Sequence: Synthetic oligonucleotide
  Antisense strand to SEQ ID NO: 1590441
uuccugaacacucuaaugc

SEQ ID NO: 1590443 - RNA, 19 nt, Artificial Sequence
  Description of Artificial Sequence: Synthetic oligonucleotide
  Sense strand starting at position 3374 of SEQ ID NO: 1560299
ugaaauguauuucgaauac

SEQ ID NO: 1590444 - RNA, 19 nt, Artificial Sequence
  Description of Artificial Sequence: Synthetic oligonucleotide
  Antisense strand to SEQ ID NO: 1590443
guauucgaaauacauuuca

SEQ ID NO: 1590445 - RNA, 19 nt, Artificial Sequence
  Description of Artificial Sequence: Synthetic oligonucleotide
  Sense strand starting at position 3452 of SEQ ID NO: 1560299
gggcugucuguagagggau

SEQ ID NO: 1590446 - RNA, 19 nt, Artificial Sequence
  Description of Artificial Sequence: Synthetic oligonucleotide
  Antisense strand to SEQ ID NO: 1590445
aucccucuacagacagccc

SEQ ID NO: 1590447 - RNA, 19 nt, Artificial Sequence
  Description of Artificial Sequence: Synthetic oligonucleotide
  Sense strand starting at position 3502 of SEQ ID NO: 1560299
ccugguaaccgucaagugu

SEQ ID NO: 1590448 - RNA, 19 nt, Artificial Sequence
  Description of Artificial Sequence: Synthetic oligonucleotide
  Antisense strand to SEQ ID NO: 1590447
acacuugacgguuaccagg

SEQ ID NO: 1590449 - RNA, 19 nt, Artificial Sequence
  Description of Artificial Sequence: Synthetic oligonucleotide
  Sense strand starting at position 3689 of SEQ ID NO: 1560299
gcaacucugccauaguaua

SEQ ID NO: 1590450 - RNA, 19 nt, Artificial Sequence
  Description of Artificial Sequence: Synthetic oligonucleotide
  Antisense strand to SEQ ID NO: 1590449
uauacuauggcagaguugc

SEQ ID NO: 1590451 - RNA, 19 nt, Artificial Sequence
  Description of Artificial Sequence: Synthetic oligonucleotide
  Sense strand starting at position 3701 of SEQ ID NO: 1560299
uaguauaaucaacgguuau

SEQ ID NO: 1590452 - RNA, 19 nt, Artificial Sequence
  Description of Artificial Sequence: Synthetic oligonucleotide
  Antisense strand to SEQ ID NO: 1590451
auaaccguugauuauacua

SEQ ID NO: 1590453 - RNA, 19 nt, Artificial Sequence
  Description of Artificial Sequence: Synthetic oligonucleotide
  Sense strand starting at position 3705 of SEQ ID NO: 1560299
auaaucaacgguuauccua

SEQ ID NO: 1590454 - RNA, 19 nt, Artificial Sequence
  Description of Artificial Sequence: Synthetic oligonucleotide
  Antisense strand to SEQ ID NO: 1590453
uaggauaaccguugauuau

SEQ ID NO: 1590455 - RNA, 19 nt, Artificial Sequence
  Description of Artificial Sequence: Synthetic oligonucleotide
  Sense strand starting at position 3716 of SEQ ID NO: 1560299
uuauccuacugauggacaa

SEQ ID NO: 1590456 - RNA, 19 nt, Artificial Sequence
  Description of Artificial Sequence: Synthetic oligonucleotide
  Antisense strand to SEQ ID NO: 1590455
uuguccaucaguaggauaa

SEQ ID NO: 1590457 - RNA, 19 nt, Artificial Sequence
  Description of Artificial Sequence: Synthetic oligonucleotide
  Sense strand starting at position 3728 of SEQ ID NO: 1560299
uggacaauuccuggacuuu

SEQ ID NO: 1590458 - RNA, 19 nt, Artificial Sequence
  Description of Artificial Sequence: Synthetic oligonucleotide
  Antisense strand to SEQ ID NO: 1590457
aaaguccaggaauugucca

SEQ ID NO: 1590459 - RNA, 19 nt, Artificial Sequence
  Description of Artificial Sequence: Synthetic oligonucleotide
  Sense strand starting at position 3770 of SEQ ID NO: 1560299
ugcaguaaaugucccugaa

SEQ ID NO: 1590460 - RNA, 19 nt, Artificial Sequence
  Description of Artificial Sequence: Synthetic oligonucleotide
  Antisense strand to SEQ ID NO: 1590459
uucagggacauuuacugca

SEQ ID NO: 1590461 - RNA, 19 nt, Artificial Sequence
  Description of Artificial Sequence: Synthetic oligonucleotide
  Sense strand starting at position 3773 of SEQ ID NO: 1560299
aguaaaugucccugaauca

SEQ ID NO: 1590462 - RNA, 19 nt, Artificial Sequence
  Description of Artificial Sequence: Synthetic oligonucleotide
  Antisense strand to SEQ ID NO: 1590461
ugauucagggacauuuacu

SEQ ID NO: 1590463 - RNA, 19 nt, Artificial Sequence
  Description of Artificial Sequence: Synthetic oligonucleotide
  Sense strand starting at position 3774 of SEQ ID NO: 1560299
guaaaugucccugaaucag

SEQ ID NO: 1590464 - RNA, 19 nt, Artificial Sequence
  Description of Artificial Sequence: Synthetic oligonucleotide
  Antisense strand to SEQ ID NO: 1590463
cugauucagggacauuuac

SEQ ID NO: 1590465 - RNA, 19 nt, Artificial Sequence
  Description of Artificial Sequence: Synthetic oligonucleotide
  Sense strand starting at position 3800 of SEQ ID NO: 1560299
aagacuggaucuuuaguga

SEQ ID NO: 1590466 - RNA, 19 nt, Artificial Sequence
  Description of Artificial Sequence: Synthetic oligonucleotide
  Antisense strand to SEQ ID NO: 1590465
ucacuaaagauccagucuu

SEQ ID NO: 1590467 - RNA, 19 nt, Artificial Sequence
  Description of Artificial Sequence: Synthetic oligonucleotide
  Sense strand starting at position 3805 of SEQ ID NO: 1560299
uggaucuuuagugaagcau

SEQ ID NO: 1590468 - RNA, 19 nt, Artificial Sequence
  Description of Artificial Sequence: Synthetic oligonucleotide
  Antisense strand to SEQ ID NO: 1590467
augcuucacuaaagaucca

SEQ ID NO: 1590469 - RNA, 19 nt, Artificial Sequence
  Description of Artificial Sequence: Synthetic oligonucleotide
  Sense strand starting at position 3834 of SEQ ID NO: 1560299
aaaugacauuugugaguac

SEQ ID NO: 1590470 - RNA, 19 nt, Artificial Sequence
  Description of Artificial Sequence: Synthetic oligonucleotide
  Antisense strand to SEQ ID NO: 1590469
guacucacaaaugucauuu

SEQ ID NO: 1590471 - RNA, 19 nt, Artificial Sequence
  Description of Artificial Sequence: Synthetic oligonucleotide
  Sense strand starting at position 3835 of SEQ ID NO: 1560299
aaugacauuugugaguaca

SEQ ID NO: 1590472 - RNA, 19 nt, Artificial Sequence
  Description of Artificial Sequence: Synthetic oligonucleotide
  Antisense strand to SEQ ID NO: 1590471
uguacucacaaaugucauu

SEQ ID NO: 1590473 - RNA, 19 nt, Artificial Sequence
  Description of Artificial Sequence: Synthetic oligonucleotide
  Sense strand starting at position 3843 of SEQ ID NO: 1560299
uugugaguacagugucuca

SEQ ID NO: 1590474 - RNA, 19 nt, Artificial Sequence
  Description of Artificial Sequence: Synthetic oligonucleotide
  Antisense strand to SEQ ID NO: 1590473
ugagacacuguacucacaa

SEQ ID NO: 1590475 - RNA, 19 nt, Artificial Sequence
  Description of Artificial Sequence: Synthetic oligonucleotide
  Sense strand starting at position 308 of SEQ ID NO: 1560300
auaagaaacugugucaagu

SEQ ID NO: 1590476 - RNA, 19 nt, Artificial Sequence
  Description of Artificial Sequence: Synthetic oligonucleotide
  Antisense strand to SEQ ID NO: 1590475
acuugacacaguuucuuau

SEQ ID NO: 1590477 - RNA, 19 nt, Artificial Sequence
  Description of Artificial Sequence: Synthetic oligonucleotide
  Sense strand starting at position 572 of SEQ ID NO: 1560300
cagauaugauagcugucuu

SEQ ID NO: 1590478 - RNA, 19 nt, Artificial Sequence
  Description of Artificial Sequence: Synthetic oligonucleotide
  Antisense strand to SEQ ID NO: 1590477
aagacagcuaucauaucug

SEQ ID NO: 1590479 - RNA, 19 nt, Artificial Sequence
  Description of Artificial Sequence: Synthetic oligonucleotide
  Sense strand starting at position 649 of SEQ ID NO: 1560300
ggcagauacaacugguagu

SEQ ID NO: 1590480 - RNA, 19 nt, Artificial Sequence
  Description of Artificial Sequence: Synthetic oligonucleotide
  Antisense strand to SEQ ID NO: 1590479
acuaccaguuguaucugcc

SEQ ID NO: 1590481 - RNA, 19 nt, Artificial Sequence
  Description of Artificial Sequence: Synthetic oligonucleotide
  Sense strand starting at position 650 of SEQ ID NO: 1560300
gcagauacaacugguagua

SEQ ID NO: 1590482 - RNA, 19 nt, Artificial Sequence
  Description of Artificial Sequence: Synthetic oligonucleotide
  Antisense strand to SEQ ID NO: 1590481
uacuaccaguuguaucugc

SEQ ID NO: 1590483 - RNA, 19 nt, Artificial Sequence
  Description of Artificial Sequence: Synthetic oligonucleotide
  Sense strand starting at position 666 of SEQ ID NO: 1560300
guauuaaggcccugauagg

SEQ ID NO: 1590484 - RNA, 19 nt, Artificial Sequence
  Description of Artificial Sequence: Synthetic oligonucleotide
  Antisense strand to SEQ ID NO: 1590483
ccuaucagggccuuaauac

SEQ ID NO: 1590485 - RNA, 19 nt, Artificial Sequence
  Description of Artificial Sequence: Synthetic oligonucleotide
  Sense strand starting at position 870 of SEQ ID NO: 1560300
uuccuaucuguuuagugga

SEQ ID NO: 1590486 - RNA, 19 nt, Artificial Sequence
  Description of Artificial Sequence: Synthetic oligonucleotide
  Antisense strand to SEQ ID NO: 1590485
uccacuaaacagauaggaa

SEQ ID NO: 1590487 - RNA, 19 nt, Artificial Sequence
  Description of Artificial Sequence: Synthetic oligonucleotide
  Sense strand starting at position 872 of SEQ ID NO: 1560300
ccuaucuguuuaguggaga

SEQ ID NO: 1590488 - RNA, 19 nt, Artificial Sequence
  Description of Artificial Sequence: Synthetic oligonucleotide
  Antisense strand to SEQ ID NO: 1590487
ucuccacuaaacagauagg

SEQ ID NO: 1590489 - RNA, 19 nt, Artificial Sequence
  Description of Artificial Sequence: Synthetic oligonucleotide
  Sense strand starting at position 903 of SEQ ID NO: 1560300
uauagaagccauugugaau

SEQ ID NO: 1590490 - RNA, 19 nt, Artificial Sequence
  Description of Artificial Sequence: Synthetic oligonucleotide
  Antisense strand to SEQ ID NO: 1590489
auucacaauggcuucuaua

SEQ ID NO: 1590491 - RNA, 19 nt, Artificial Sequence
  Description of Artificial Sequence: Synthetic oligonucleotide
  Sense strand starting at position 909 of SEQ ID NO: 1560300
agccauugugaauaauuac

SEQ ID NO: 1590492 - RNA, 19 nt, Artificial Sequence
  Description of Artificial Sequence: Synthetic oligonucleotide
  Antisense strand to SEQ ID NO: 1590491
guaauuauucacaauggcu

SEQ ID NO: 1590493 - RNA, 19 nt, Artificial Sequence
  Description of Artificial Sequence: Synthetic oligonucleotide
  Sense strand starting at position 942 of SEQ ID NO: 1560300
cuguaaagucacugaagua

SEQ ID NO: 1590494 - RNA, 19 nt, Artificial Sequence
  Description of Artificial Sequence: Synthetic oligonucleotide
  Antisense strand to SEQ ID NO: 1590493
uacuucagugacuuuacag

SEQ ID NO: 1590495 - RNA, 19 nt, Artificial Sequence
  Description of Artificial Sequence: Synthetic oligonucleotide
  Sense strand starting at position 988 of SEQ ID NO: 1560300
ucugcuucucagcagcaaa

SEQ ID NO: 1590496 - RNA, 19 nt, Artificial Sequence
  Description of Artificial Sequence: Synthetic oligonucleotide
  Antisense strand to SEQ ID NO: 1590495
uuugcugcugagaagcaga

SEQ ID NO: 1590497 - RNA, 19 nt, Artificial Sequence
  Description of Artificial Sequence: Synthetic oligonucleotide
  Sense strand starting at position 1169 of SEQ ID NO: 1560300
gagaguaagccuuaccuug

SEQ ID NO: 1590498 - RNA, 19 nt, Artificial Sequence
  Description of Artificial Sequence: Synthetic oligonucleotide
  Antisense strand to SEQ ID NO: 1590497
caagguaaggcuuacucuc

SEQ ID NO: 1590499 - RNA, 19 nt, Artificial Sequence
  Description of Artificial Sequence: Synthetic oligonucleotide
  Sense strand starting at position 1171 of SEQ ID NO: 1560300
gaguaagccuuaccuugga

SEQ ID NO: 1590500 - RNA, 19 nt, Artificial Sequence
  Description of Artificial Sequence: Synthetic oligonucleotide
  Antisense strand to SEQ ID NO: 1590499
uccaagguaaggcuuacuc

SEQ ID NO: 1590501 - RNA, 19 nt, Artificial Sequence
  Description of Artificial Sequence: Synthetic oligonucleotide
  Sense strand starting at position 1194 of SEQ ID NO: 1560300
ugguccaaacauugacaga

SEQ ID NO: 1590502 - RNA, 19 nt, Artificial Sequence
  Description of Artificial Sequence: Synthetic oligonucleotide
  Antisense strand to SEQ ID NO: 1590501
ucugucaauguuuggacca

SEQ ID NO: 1590503 - RNA, 19 nt, Artificial Sequence
  Description of Artificial Sequence: Synthetic oligonucleotide
  Sense strand starting at position 1321 of SEQ ID NO: 1560300
aggcaaccuuccuuagcau

SEQ ID NO: 1590504 - RNA, 19 nt, Artificial Sequence
  Description of Artificial Sequence: Synthetic oligonucleotide
  Antisense strand to SEQ ID NO: 1590503
augcuaaggaagguugccu

SEQ ID NO: 1590505 - RNA, 19 nt, Artificial Sequence
  Description of Artificial Sequence: Synthetic oligonucleotide
  Sense strand starting at position 1322 of SEQ ID NO: 1560300
ggcaaccuuccuuagcauu

SEQ ID NO: 1590506 - RNA, 19 nt, Artificial Sequence
  Description of Artificial Sequence: Synthetic oligonucleotide
  Antisense strand to SEQ ID NO: 1590505
aaugcuaaggaagguugcc

SEQ ID NO: 1590507 - RNA, 19 nt, Artificial Sequence
  Description of Artificial Sequence: Synthetic oligonucleotide
  Sense strand starting at position 1365 of SEQ ID NO: 1560300
acccauuucuuugaguuua

SEQ ID NO: 1590508 - RNA, 19 nt, Artificial Sequence
  Description of Artificial Sequence: Synthetic oligonucleotide
  Antisense strand to SEQ ID NO: 1590507
uaaacucaaagaaaugggu

SEQ ID NO: 1590509 - RNA, 19 nt, Artificial Sequence
  Description of Artificial Sequence: Synthetic oligonucleotide
  Sense strand starting at position 1468 of SEQ ID NO: 1560300
agcuacuucugguucuuga

SEQ ID NO: 1590510 - RNA, 19 nt, Artificial Sequence
  Description of Artificial Sequence: Synthetic oligonucleotide
  Antisense strand to SEQ ID NO: 1590509
ucaagaaccagaaguagcu

SEQ ID NO: 1590511 - RNA, 19 nt, Artificial Sequence
  Description of Artificial Sequence: Synthetic oligonucleotide
  Sense strand starting at position 1487 of SEQ ID NO: 1560300
gcacuugaaaugggaaagu

SEQ ID NO: 1590512 - RNA, 19 nt, Artificial Sequence
  Description of Artificial Sequence: Synthetic oligonucleotide
  Antisense strand to SEQ ID NO: 1590511
acuuucccauuucaagugc

SEQ ID NO: 1590513 - RNA, 19 nt, Artificial Sequence
  Description of Artificial Sequence: Synthetic oligonucleotide
  Sense strand starting at position 1516 of SEQ ID NO: 1560300
cuauguuguaaguguaaga

SEQ ID NO: 1590514 - RNA, 19 nt, Artificial Sequence
  Description of Artificial Sequence: Synthetic oligonucleotide
  Antisense strand to SEQ ID NO: 1590513
ucuuacacuuacaacauag

SEQ ID NO: 1590515 - RNA, 19 nt, Artificial Sequence
  Description of Artificial Sequence: Synthetic oligonucleotide
  Sense strand starting at position 1526 of SEQ ID NO: 1560300
aguguaagauaccuauuga

SEQ ID NO: 1590516 - RNA, 19 nt, Artificial Sequence
  Description of Artificial Sequence: Synthetic oligonucleotide
  Antisense strand to SEQ ID NO: 1590515
ucaauagguaucuuacacu

SEQ ID NO: 1590517 - RNA, 19 nt, Artificial Sequence
  Description of Artificial Sequence: Synthetic oligonucleotide
  Sense strand starting at position 1603 of SEQ ID NO: 1560300
ucauuauguguugaaauga

SEQ ID NO: 1590518 - RNA, 19 nt, Artificial Sequence
  Description of Artificial Sequence: Synthetic oligonucleotide
  Antisense strand to SEQ ID NO: 1590517
ucauuucaacacauaauga

SEQ ID NO: 1590519 - RNA, 19 nt, Artificial Sequence
  Description of Artificial Sequence: Synthetic oligonucleotide
  Sense strand starting at position 1614 of SEQ ID NO: 1560300
ugaaaugauaaucguuuag

SEQ ID NO: 1590520 - RNA, 19 nt, Artificial Sequence
  Description of Artificial Sequence: Synthetic oligonucleotide
  Antisense strand to SEQ ID NO: 1590519
cuaaacgauuaucauuuca

SEQ ID NO: 1590521 - RNA, 19 nt, Artificial Sequence
  Description of Artificial Sequence: Synthetic oligonucleotide
  Sense strand starting at position 1626 of SEQ ID NO: 1560300
cguuuagauauacauggau

SEQ ID NO: 1590522 - RNA, 19 nt, Artificial Sequence
  Description of Artificial Sequence: Synthetic oligonucleotide
  Antisense strand to SEQ ID NO: 1590521
auccauguauaucuaaacg

SEQ ID NO: 1590523 - RNA, 19 nt, Artificial Sequence
  Description of Artificial Sequence: Synthetic oligonucleotide
  Sense strand starting at position 1635 of SEQ ID NO: 1560300
auacauggauuccacagaa

SEQ ID NO: 1590524 - RNA, 19 nt, Artificial Sequence
  Description of Artificial Sequence: Synthetic oligonucleotide
  Antisense strand to SEQ ID NO: 1590523
uucuguggaauccauguau

SEQ ID NO: 1590525 - RNA, 19 nt, Artificial Sequence
  Description of Artificial Sequence: Synthetic oligonucleotide
  Sense strand starting at position 1719 of SEQ ID NO: 1560300
ugauuuauguggcucguau

SEQ ID NO: 1590526 - RNA, 19 nt, Artificial Sequence
  Description of Artificial Sequence: Synthetic oligonucleotide
  Antisense strand to SEQ ID NO: 1590525
auacgagccacauaaauca

SEQ ID NO: 1590527 - RNA, 19 nt, Artificial Sequence
  Description of Artificial Sequence: Synthetic oligonucleotide
  Sense strand starting at position 1721 of SEQ ID NO: 1560300
auuuauguggcucguauua

SEQ ID NO: 1590528 - RNA, 19 nt, Artificial Sequence
  Description of Artificial Sequence: Synthetic oligonucleotide
  Antisense strand to SEQ ID NO: 1590527
uaauacgagccacauaaau

SEQ ID NO: 1590529 - RNA, 19 nt, Artificial Sequence
  Description of Artificial Sequence: Synthetic oligonucleotide
  Sense strand starting at position 1731 of SEQ ID NO: 1560300
cucguauuauauuucuagu

SEQ ID NO: 1590530 - RNA, 19 nt, Artificial Sequence
  Description of Artificial Sequence: Synthetic oligonucleotide
  Antisense strand to SEQ ID NO: 1590529
acuagaaauauaauacgag

SEQ ID NO: 1590531 - RNA, 19 nt, Artificial Sequence
  Description of Artificial Sequence: Synthetic oligonucleotide
  Sense strand starting at position 1837 of SEQ ID NO: 1560300
guaccuuugagagaguucu

SEQ ID NO: 1590532 - RNA, 19 nt, Artificial Sequence
  Description of Artificial Sequence: Synthetic oligonucleotide
  Antisense strand to SEQ ID NO: 1590531
agaacucucucaaagguac

SEQ ID NO: 1590533 - RNA, 19 nt, Artificial Sequence
  Description of Artificial Sequence: Synthetic oligonucleotide
  Sense strand starting at position 2015 of SEQ ID NO: 1560300
ggcagucuggaugagauca

SEQ ID NO: 1590534 - RNA, 19 nt, Artificial Sequence
  Description of Artificial Sequence: Synthetic oligonucleotide
  Antisense strand to SEQ ID NO: 1590533
ugaucucauccagacugcc

SEQ ID NO: 1590535 - RNA, 19 nt, Artificial Sequence
  Description of Artificial Sequence: Synthetic oligonucleotide
  Sense strand starting at position 2026 of SEQ ID NO: 1560300
ugagaucagcugugguuaa

SEQ ID NO: 1590536 - RNA, 19 nt, Artificial Sequence
  Description of Artificial Sequence: Synthetic oligonucleotide
  Antisense strand to SEQ ID NO: 1590535
uuaaccacagcugaucuca

SEQ ID NO: 1590537 - RNA, 19 nt, Artificial Sequence
  Description of Artificial Sequence: Synthetic oligonucleotide
  Sense strand starting at position 2056 of SEQ ID NO: 1560300
uggagauaagcccaugcau

SEQ ID NO: 1590538 - RNA, 19 nt, Artificial Sequence
  Description of Artificial Sequence: Synthetic oligonucleotide
  Antisense strand to SEQ ID NO: 1590537
augcaugggcuuaucucca

SEQ ID NO: 1590539 - RNA, 19 nt, Artificial Sequence
  Description of Artificial Sequence: Synthetic oligonucleotide
  Sense strand starting at position 2140 of SEQ ID NO: 1560300
ggacaagaauaucaaugaa

SEQ ID NO: 1590540 - RNA, 19 nt, Artificial Sequence
  Description of Artificial Sequence: Synthetic oligonucleotide
  Antisense strand to SEQ ID NO: 1590539
uucauugauauucuugucc

SEQ ID NO: 1590541 - RNA, 19 nt, Artificial Sequence
  Description of Artificial Sequence: Synthetic oligonucleotide
  Sense strand starting at position 2164 of SEQ ID NO: 1560300
gagggaacguucccagaaa

SEQ ID NO: 1590542 - RNA, 19 nt, Artificial Sequence
  Description of Artificial Sequence: Synthetic oligonucleotide
  Antisense strand to SEQ ID NO: 1590541
uuucugggaacguucccuc

SEQ ID NO: 1590543 - RNA, 19 nt, Artificial Sequence
  Description of Artificial Sequence: Synthetic oligonucleotide
  Sense strand starting at position 2579 of SEQ ID NO: 1560300
gaucucguauggcuaauaa

SEQ ID NO: 1590544 - RNA, 19 nt, Artificial Sequence
  Description of Artificial Sequence: Synthetic oligonucleotide
  Antisense strand to SEQ ID NO: 1590543
uuauuagccauacgagauc

SEQ ID NO: 1590545 - RNA, 19 nt, Artificial Sequence
  Description of Artificial Sequence: Synthetic oligonucleotide
  Sense strand starting at position 2647 of SEQ ID NO: 1560300
augcaaugcagugaagagu

SEQ ID NO: 1590546 - RNA, 19 nt, Artificial Sequence
  Description of Artificial Sequence: Synthetic oligonucleotide
  Antisense strand to SEQ ID NO: 1590545
acucuucacugcauugcau

SEQ ID NO: 1590547 - RNA, 19 nt, Artificial Sequence
  Description of Artificial Sequence: Synthetic oligonucleotide
  Sense strand starting at position 2707 of SEQ ID NO: 1560300
gcaaauguacaaugucuua

SEQ ID NO: 1590548 - RNA, 19 nt, Artificial Sequence
  Description of Artificial Sequence: Synthetic oligonucleotide
  Antisense strand to SEQ ID NO: 1590547
uaagacauuguacauuugc

SEQ ID NO: 1590549 - RNA, 19 nt, Artificial Sequence
  Description of Artificial Sequence: Synthetic oligonucleotide
  Sense strand starting at position 3297 of SEQ ID NO: 1560300
uaaagucuuggauaggcuu

SEQ ID NO: 1590550 - RNA, 19 nt, Artificial Sequence
  Description of Artificial Sequence: Synthetic oligonucleotide
  Antisense strand to SEQ ID NO: 1590549
aagccuauccaagacuuua

SEQ ID NO: 1590551 - RNA, 19 nt, Artificial Sequence
  Description of Artificial Sequence: Synthetic oligonucleotide
  Sense strand starting at position 3616 of SEQ ID NO: 1560300
ucggcuaauucgucaauuu

SEQ ID NO: 1590552 - RNA, 19 nt, Artificial Sequence
  Description of Artificial Sequence: Synthetic oligonucleotide
  Antisense strand to SEQ ID NO: 1590551
aaauugacgaauuagccga

SEQ ID NO: 1590553 - RNA, 19 nt, Artificial Sequence
  Description of Artificial Sequence: Synthetic oligonucleotide
  Sense strand starting at position 3982 of SEQ ID NO: 1560300
gguggaucaccuuguuuga

SEQ ID NO: 1590554 - RNA, 19 nt, Artificial Sequence
  Description of Artificial Sequence: Synthetic oligonucleotide
  Antisense strand to SEQ ID NO: 1590553
ucaaacaaggugauccacc

SEQ ID NO: 1590555 - RNA, 19 nt, Artificial Sequence
  Description of Artificial Sequence: Synthetic oligonucleotide
  Sense strand starting at position 13 of SEQ ID NO: 1560301
ccugcaucauggcaauuua

SEQ ID NO: 1590556 - RNA, 19 nt, Artificial Sequence
  Description of Artificial Sequence: Synthetic oligonucleotide
  Antisense strand to SEQ ID NO: 1590555
uaaauugccaugaugcagg

SEQ ID NO: 1590557 - RNA, 19 nt, Artificial Sequence
  Description of Artificial Sequence: Synthetic oligonucleotide
  Sense strand starting at position 24 of SEQ ID NO: 1560301
gcaauuuaaguuuggguuu

SEQ ID NO: 1590558 - RNA, 19 nt, Artificial Sequence
  Description of Artificial Sequence: Synthetic oligonucleotide
  Antisense strand to SEQ ID NO: 1590557
aaacccaaacuuaaauugc

SEQ ID NO: 1590559 - RNA, 19 nt, Artificial Sequence
  Description of Artificial Sequence: Synthetic oligonucleotide
  Sense strand starting at position 26 of SEQ ID NO: 1560301
aauuuaaguuuggguuuga

SEQ ID NO: 1590560 - RNA, 19 nt, Artificial Sequence
  Description of Artificial Sequence: Synthetic oligonucleotide
  Antisense strand to SEQ ID NO: 1590559
ucaaacccaaacuuaaauu

SEQ ID NO: 1590561 - RNA, 19 nt, Artificial Sequence
  Description of Artificial Sequence: Synthetic oligonucleotide
  Sense strand starting at position 104 of SEQ ID NO: 1560301
cccguuuccucuucuggaa

SEQ ID NO: 1590562 - RNA, 19 nt, Artificial Sequence
  Description of Artificial Sequence: Synthetic oligonucleotide
  Antisense strand to SEQ ID NO: 1590561
uuccagaagaggaaacggg

SEQ ID NO: 1590563 - RNA, 19 nt, Artificial Sequence
  Description of Artificial Sequence: Synthetic oligonucleotide
  Sense strand starting at position 174 of SEQ ID NO: 1560301
cugaguuaauacuugcaaa

SEQ ID NO: 1590564 - RNA, 19 nt, Artificial Sequence
  Description of Artificial Sequence: Synthetic oligonucleotide
  Antisense strand to SEQ ID NO: 1590563
uuugcaaguauuaacucag

SEQ ID NO: 1590565 - RNA, 19 nt, Artificial Sequence
  Description of Artificial Sequence: Synthetic oligonucleotide
  Sense strand starting at position 233 of SEQ ID NO: 1560301
gaaagccgcucugaaauua

SEQ ID NO: 1590566 - RNA, 19 nt, Artificial Sequence
  Description of Artificial Sequence: Synthetic oligonucleotide
  Antisense strand to SEQ ID NO: 1590565
uaauuucagagcggcuuuc

SEQ ID NO: 1590567 - RNA, 19 nt, Artificial Sequence
  Description of Artificial Sequence: Synthetic oligonucleotide
  Sense strand starting at position 249 of SEQ ID NO: 1560301
uuauuacugcugugaugac

SEQ ID NO: 1590568 - RNA, 19 nt, Artificial Sequence
  Description of Artificial Sequence: Synthetic oligonucleotide
  Antisense strand to SEQ ID NO: 1590567
gucaucacagcaguaauaa

SEQ ID NO: 1590569 - RNA, 19 nt, Artificial Sequence
  Description of Artificial Sequence: Synthetic oligonucleotide
  Sense strand starting at position 304 of SEQ ID NO: 1560301
gcauuuaaagaguguuucu

SEQ ID NO: 1590570 - RNA, 19 nt, Artificial Sequence
  Description of Artificial Sequence: Synthetic oligonucleotide
  Antisense strand to SEQ ID NO: 1590569
agaaacacucuuuaaaugc

SEQ ID NO: 1590571 - RNA, 19 nt, Artificial Sequence
  Description of Artificial Sequence: Synthetic oligonucleotide
  Sense strand starting at position 307 of SEQ ID NO: 1560301
uuuaaagaguguuucucuu

SEQ ID NO: 1590572 - RNA, 19 nt, Artificial Sequence
  Description of Artificial Sequence: Synthetic oligonucleotide
  Antisense strand to SEQ ID NO: 1590571
aagagaaacacucuuuaaa

SEQ ID NO: 1590573 - RNA, 19 nt, Artificial Sequence
  Description of Artificial Sequence: Synthetic oligonucleotide
  Sense strand starting at position 352 of SEQ ID NO: 1560301
ugaggcaaaucuguuagua

SEQ ID NO: 1590574 - RNA, 19 nt, Artificial Sequence
  Description of Artificial Sequence: Synthetic oligonucleotide
  Antisense strand to SEQ ID NO: 1590573
uacuaacagauuugccuca

SEQ ID NO: 1590575 - RNA, 19 nt, Artificial Sequence
  Description of Artificial Sequence: Synthetic oligonucleotide
  Sense strand starting at position 354 of SEQ ID NO: 1560301
aggcaaaucuguuaguaaa

SEQ ID NO: 1590576 - RNA, 19 nt, Artificial Sequence
  Description of Artificial Sequence: Synthetic oligonucleotide
  Antisense strand to SEQ ID NO: 1590575
uuuacuaacagauuugccu

SEQ ID NO: 1590577 - RNA, 19 nt, Artificial Sequence
  Description of Artificial Sequence: Synthetic oligonucleotide
  Sense strand starting at position 356 of SEQ ID NO: 1560301
gcaaaucuguuaguaaaug

SEQ ID NO: 1590578 - RNA, 19 nt, Artificial Sequence
  Description of Artificial Sequence: Synthetic oligonucleotide
  Antisense strand to SEQ ID NO: 1590577
cauuuacuaacagauuugc

SEQ ID NO: 1590579 - RNA, 19 nt, Artificial Sequence
  Description of Artificial Sequence: Synthetic oligonucleotide
  Sense strand starting at position 365 of SEQ ID NO: 1560301
uuaguaaaugguuguuagu

SEQ ID NO: 1590580 - RNA, 19 nt, Artificial Sequence
  Description of Artificial Sequence: Synthetic oligonucleotide
  Antisense strand to SEQ ID NO: 1590579
acuaacaaccauuuacuaa

SEQ ID NO: 1590581 - RNA, 19 nt, Artificial Sequence
  Description of Artificial Sequence: Synthetic oligonucleotide
  Sense strand starting at position 367 of SEQ ID NO: 1560301
aguaaaugguuguuaguaa

SEQ ID NO: 1590582 - RNA, 19 nt, Artificial Sequence
  Description of Artificial Sequence: Synthetic oligonucleotide
  Antisense strand to SEQ ID NO: 1590581
uuacuaacaaccauuuacu

SEQ ID NO: 1590583 - RNA, 19 nt, Artificial Sequence
  Description of Artificial Sequence: Synthetic oligonucleotide
  Sense strand starting at position 368 of SEQ ID NO: 1560301
guaaaugguuguuaguaaa

SEQ ID NO: 1590584 - RNA, 19 nt, Artificial Sequence
  Description of Artificial Sequence: Synthetic oligonucleotide
  Antisense strand to SEQ ID NO: 1590583
uuuacuaacaaccauuuac

SEQ ID NO: 1590585 - RNA, 19 nt, Artificial Sequence
  Description of Artificial Sequence: Synthetic oligonucleotide
  Sense strand starting at position 375 of SEQ ID NO: 1560301
guuguuaguaaaugucaua

SEQ ID NO: 1590586 - RNA, 19 nt, Artificial Sequence
  Description of Artificial Sequence: Synthetic oligonucleotide
  Antisense strand to SEQ ID NO: 1590585
uaugacauuuacuaacaac

SEQ ID NO: 1590587 - RNA, 19 nt, Artificial Sequence
  Description of Artificial Sequence: Synthetic oligonucleotide
  Sense strand starting at position 378 of SEQ ID NO: 1560301
guuaguaaaugucauacga

SEQ ID NO: 1590588 - RNA, 19 nt, Artificial Sequence
  Description of Artificial Sequence: Synthetic oligonucleotide
  Antisense strand to SEQ ID NO: 1590587
ucguaugacauuuacuaac

SEQ ID NO: 1590589 - RNA, 19 nt, Artificial Sequence
  Description of Artificial Sequence: Synthetic oligonucleotide
  Sense strand starting at position 440 of SEQ ID NO: 1560301
auguuaagugucuaggaga

SEQ ID NO: 1590590 - RNA, 19 nt, Artificial Sequence
  Description of Artificial Sequence: Synthetic oligonucleotide
  Antisense strand to SEQ ID NO: 1590589
ucuccuagacacuuaacau

SEQ ID NO: 1590591 - RNA, 19 nt, Artificial Sequence
  Description of Artificial Sequence: Synthetic oligonucleotide
  Sense strand starting at position 443 of SEQ ID NO: 1560301
uuaagugucuaggagagga

SEQ ID NO: 1590592 - RNA, 19 nt, Artificial Sequence
  Description of Artificial Sequence: Synthetic oligonucleotide
  Antisense strand to SEQ ID NO: 1590591
uccucuccuagacacuuaa

SEQ ID NO: 1590593 - RNA, 19 nt, Artificial Sequence
  Description of Artificial Sequence: Synthetic oligonucleotide
  Sense strand starting at position 1003 of SEQ ID NO: 1560301
cacgcauauuuaggagaca

SEQ ID NO: 1590594 - RNA, 19 nt, Artificial Sequence
  Description of Artificial Sequence: Synthetic oligonucleotide
  Antisense strand to SEQ ID NO: 1590593
ugucuccuaaauaugcgug

SEQ ID NO: 1590595 - RNA, 19 nt, Artificial Sequence
  Description of Artificial Sequence: Synthetic oligonucleotide
  Sense strand starting at position 1004 of SEQ ID NO: 1560301
acgcauauuuaggagacaa

SEQ ID NO: 1590596 - RNA, 19 nt, Artificial Sequence
  Description of Artificial Sequence: Synthetic oligonucleotide
  Antisense strand to SEQ ID NO: 1590595
uugucuccuaaauaugcgu

SEQ ID NO: 1590597 - RNA, 19 nt, Artificial Sequence
  Description of Artificial Sequence: Synthetic oligonucleotide
  Sense strand starting at position 1461 of SEQ ID NO: 1560301
ucccuaagcguugggauga

SEQ ID NO: 1590598 - RNA, 19 nt, Artificial Sequence
  Description of Artificial Sequence: Synthetic oligonucleotide
  Antisense strand to SEQ ID NO: 1590597
ucaucccaacgcuuaggga

SEQ ID NO: 1590599 - RNA, 19 nt, Artificial Sequence
  Description of Artificial Sequence: Synthetic oligonucleotide
  Sense strand starting at position 1466 of SEQ ID NO: 1560301
aagcguugggaugacagau

SEQ ID NO: 1590600 - RNA, 19 nt, Artificial Sequence
  Description of Artificial Sequence: Synthetic oligonucleotide
  Antisense strand to SEQ ID NO: 1590599
aucugucaucccaacgcuu

SEQ ID NO: 1590601 - RNA, 19 nt, Artificial Sequence
  Description of Artificial Sequence: Synthetic oligonucleotide
  Sense strand starting at position 1538 of SEQ ID NO: 1560301
cggauucuccaagauucca

SEQ ID NO: 1590602 - RNA, 19 nt, Artificial Sequence
  Description of Artificial Sequence: Synthetic oligonucleotide
  Antisense strand to SEQ ID NO: 1590601
uggaaucuuggagaauccg

SEQ ID NO: 1590603 - RNA, 19 nt, Artificial Sequence
  Description of Artificial Sequence: Synthetic oligonucleotide
  Sense strand starting at position 1742 of SEQ ID NO: 1560301
gucuguaacucaccuaaag

SEQ ID NO: 1590604 - RNA, 19 nt, Artificial Sequence
  Description of Artificial Sequence: Synthetic oligonucleotide
  Antisense strand to SEQ ID NO: 1590603
cuuuaggugaguuacagac

SEQ ID NO: 1590605 - RNA, 19 nt, Artificial Sequence
  Description of Artificial Sequence: Synthetic oligonucleotide
  Sense strand starting at position 2592 of SEQ ID NO: 1560301
ggcgaauucgaccaguuuc

SEQ ID NO: 1590606 - RNA, 19 nt, Artificial Sequence
  Description of Artificial Sequence: Synthetic oligonucleotide
  Antisense strand to SEQ ID NO: 1590605
gaaacuggucgaauucgcc

SEQ ID NO: 1590607 - RNA, 19 nt, Artificial Sequence
  Description of Artificial Sequence: Synthetic oligonucleotide
  Sense strand starting at position 2788 of SEQ ID NO: 1560301
acuucuaguucucuagauu

SEQ ID NO: 1590608 - RNA, 19 nt, Artificial Sequence
  Description of Artificial Sequence: Synthetic oligonucleotide
  Antisense strand to SEQ ID NO: 1590607
aaucuagagaacuagaagu

SEQ ID NO: 1590609 - RNA, 19 nt, Artificial Sequence
  Description of Artificial Sequence: Synthetic oligonucleotide
  Sense strand starting at position 2789 of SEQ ID NO: 1560301
cuucuaguucucuagauuc

SEQ ID NO: 1590610 - RNA, 19 nt, Artificial Sequence
  Description of Artificial Sequence: Synthetic oligonucleotide
  Antisense strand to SEQ ID NO: 1590609
gaaucuagagaacuagaag

SEQ ID NO: 1590611 - RNA, 19 nt, Artificial Sequence
  Description of Artificial Sequence: Synthetic oligonucleotide
  Sense strand starting at position 2791 of SEQ ID NO: 1560301
ucuaguucucuagauucuu

SEQ ID NO: 1590612 - RNA, 19 nt, Artificial Sequence
  Description of Artificial Sequence: Synthetic oligonucleotide
  Antisense strand to SEQ ID NO: 1590611
aagaaucuagagaacuaga

SEQ ID NO: 1590613 - RNA, 19 nt, Artificial Sequence
  Description of Artificial Sequence: Synthetic oligonucleotide
  Sense strand starting at position 2797 of SEQ ID NO: 1560301
ucucuagauucuuugugaa

SEQ ID NO: 1590614 - RNA, 19 nt, Artificial Sequence
  Description of Artificial Sequence: Synthetic oligonucleotide
  Antisense strand to SEQ ID NO: 1590613
uucacaaagaaucuagaga

SEQ ID NO: 1590615 - RNA, 19 nt, Artificial Sequence
  Description of Artificial Sequence: Synthetic oligonucleotide
  Sense strand starting at position 2799 of SEQ ID NO: 1560301
ucuagauucuuugugaacc

SEQ ID NO: 1590616 - RNA, 19 nt, Artificial Sequence
  Description of Artificial Sequence: Synthetic oligonucleotide
  Antisense strand to SEQ ID NO: 1590615
gguucacaaagaaucuaga

SEQ ID NO: 1590617 - RNA, 19 nt, Artificial Sequence
  Description of Artificial Sequence: Synthetic oligonucleotide
  Sense strand starting at position 3021 of SEQ ID NO: 1560301
aggugacucgguugggaga

SEQ ID NO: 1590618 - RNA, 19 nt, Artificial Sequence
  Description of Artificial Sequence: Synthetic oligonucleotide
  Antisense strand to SEQ ID NO: 1590617
ucucccaaccgagucaccu

SEQ ID NO: 1590619 - RNA, 19 nt, Artificial Sequence
  Description of Artificial Sequence: Synthetic oligonucleotide
  Sense strand starting at position 3139 of SEQ ID NO: 1560301
ccugcaacucuucggguaa

SEQ ID NO: 1590620 - RNA, 19 nt, Artificial Sequence
  Description of Artificial Sequence: Synthetic oligonucleotide
  Antisense strand to SEQ ID NO: 1590619
uuacccgaagaguugcagg

SEQ ID NO: 1590621 - RNA, 19 nt, Artificial Sequence
  Description of Artificial Sequence: Synthetic oligonucleotide
  Sense strand starting at position 3284 of SEQ ID NO: 1560301
cugccaucuacccgggaga

SEQ ID NO: 1590622 - RNA, 19 nt, Artificial Sequence
  Description of Artificial Sequence: Synthetic oligonucleotide
  Antisense strand to SEQ ID NO: 1590621
ucucccggguagauggcag

SEQ ID NO: 1590623 - RNA, 19 nt, Artificial Sequence
  Description of Artificial Sequence: Synthetic oligonucleotide
  Sense strand starting at position 3285 of SEQ ID NO: 1560301
ugccaucuacccgggagaa

SEQ ID NO: 1590624 - RNA, 19 nt, Artificial Sequence
  Description of Artificial Sequence: Synthetic oligonucleotide
  Antisense strand to SEQ ID NO: 1590623
uucucccggguagauggca

SEQ ID NO: 1590625 - RNA, 19 nt, Artificial Sequence
  Description of Artificial Sequence: Synthetic oligonucleotide
  Sense strand starting at position 3386 of SEQ ID NO: 1560301
cggucaggagaaugaucau

SEQ ID NO: 1590626 - RNA, 19 nt, Artificial Sequence
  Description of Artificial Sequence: Synthetic oligonucleotide
  Antisense strand to SEQ ID NO: 1590625
augaucauucuccugaccg

SEQ ID NO: 1590627 - RNA, 19 nt, Artificial Sequence
  Description of Artificial Sequence: Synthetic oligonucleotide
  Sense strand starting at position 3587 of SEQ ID NO: 1560301
augccaagcuugucaugau

SEQ ID NO: 1590628 - RNA, 19 nt, Artificial Sequence
  Description of Artificial Sequence: Synthetic oligonucleotide
  Antisense strand to SEQ ID NO: 1590627
aucaugacaagcuuggcau

SEQ ID NO: 1590629 - RNA, 19 nt, Artificial Sequence
  Description of Artificial Sequence: Synthetic oligonucleotide
  Sense strand starting at position 3594 of SEQ ID NO: 1560301
gcuugucaugauuguggau

SEQ ID NO: 1590630 - RNA, 19 nt, Artificial Sequence
  Description of Artificial Sequence: Synthetic oligonucleotide
  Antisense strand to SEQ ID NO: 1590629
auccacaaucaugacaagc

SEQ ID NO: 1590631 - RNA, 19 nt, Artificial Sequence
  Description of Artificial Sequence: Synthetic oligonucleotide
  Sense strand starting at position 3603 of SEQ ID NO: 1560301
gauuguggaucucaugguu

SEQ ID NO: 1590632 - RNA, 19 nt, Artificial Sequence
  Description of Artificial Sequence: Synthetic oligonucleotide
  Antisense strand to SEQ ID NO: 1590631
aaccaugagauccacaauc

SEQ ID NO: 1590633 - RNA, 19 nt, Artificial Sequence
  Description of Artificial Sequence: Synthetic oligonucleotide
  Sense strand starting at position 3606 of SEQ ID NO: 1560301
uguggaucucaugguucuu

SEQ ID NO: 1590634 - RNA, 19 nt, Artificial Sequence
  Description of Artificial Sequence: Synthetic oligonucleotide
  Antisense strand to SEQ ID NO: 1590633
aagaaccaugagauccaca

SEQ ID NO: 1590635 - RNA, 19 nt, Artificial Sequence
  Description of Artificial Sequence: Synthetic oligonucleotide
  Sense strand starting at position 47 of SEQ ID NO: 1560302
gcagaauacucauacccag

SEQ ID NO: 1590636 - RNA, 19 nt, Artificial Sequence
  Description of Artificial Sequence: Synthetic oligonucleotide
  Antisense strand to SEQ ID NO: 1590635
cuggguaugaguauucugc

SEQ ID NO: 1590637 - RNA, 19 nt, Artificial Sequence
  Description of Artificial Sequence: Synthetic oligonucleotide
  Sense strand starting at position 347 of SEQ ID NO: 1560302
ggagugagccgucaggacu

SEQ ID NO: 1590638 - RNA, 19 nt, Artificial Sequence
  Description of Artificial Sequence: Synthetic oligonucleotide
  Antisense strand to SEQ ID NO: 1590637
aguccugacggcucacucc

SEQ ID NO: 1590639 - RNA, 19 nt, Artificial Sequence
  Description of Artificial Sequence: Synthetic oligonucleotide
  Sense strand starting at position 354 of SEQ ID NO: 1560302
gccgucaggacuuagaacu

SEQ ID NO: 1590640 - RNA, 19 nt, Artificial Sequence
  Description of Artificial Sequence: Synthetic oligonucleotide
  Antisense strand to SEQ ID NO: 1590639
aguucuaaguccugacggc

SEQ ID NO: 1590641 - RNA, 19 nt, Artificial Sequence
  Description of Artificial Sequence: Synthetic oligonucleotide
  Sense strand starting at position 361 of SEQ ID NO: 1560302
ggacuuagaacucguaaca

SEQ ID NO: 1590642 - RNA, 19 nt, Artificial Sequence
  Description of Artificial Sequence: Synthetic oligonucleotide
  Antisense strand to SEQ ID NO: 1590641
uguuacgaguucuaagucc

SEQ ID NO: 1590643 - RNA, 19 nt, Artificial Sequence
  Description of Artificial Sequence: Synthetic oligonucleotide
  Sense strand starting at position 446 of SEQ ID NO: 1560302
guaggagugugcagagaca

SEQ ID NO: 1590644 - RNA, 19 nt, Artificial Sequence
  Description of Artificial Sequence: Synthetic oligonucleotide
  Antisense strand to SEQ ID NO: 1590643
ugucucugcacacuccuac

SEQ ID NO: 1590645 - RNA, 19 nt, Artificial Sequence
  Description of Artificial Sequence: Synthetic oligonucleotide
  Sense strand starting at position 569 of SEQ ID NO: 1560302
cuguuacugugagcuuaca

SEQ ID NO: 1590646 - RNA, 19 nt, Artificial Sequence
  Description of Artificial Sequence: Synthetic oligonucleotide
  Antisense strand to SEQ ID NO: 1590645
uguaagcucacaguaacag

SEQ ID NO: 1590647 - RNA, 19 nt, Artificial Sequence
  Description of Artificial Sequence: Synthetic oligonucleotide
  Sense strand starting at position 632 of SEQ ID NO: 1560302
ucauguugaugcucgauaa

SEQ ID NO: 1590648 - RNA, 19 nt, Artificial Sequence
  Description of Artificial Sequence: Synthetic oligonucleotide
  Antisense strand to SEQ ID NO: 1590647
uuaucgagcaucaacauga

SEQ ID NO: 1590649 - RNA, 19 nt, Artificial Sequence
  Description of Artificial Sequence: Synthetic oligonucleotide
  Sense strand starting at position 633 of SEQ ID NO: 1560302
cauguugaugcucgauaaa

SEQ ID NO: 1590650 - RNA, 19 nt, Artificial Sequence
  Description of Artificial Sequence: Synthetic oligonucleotide
  Antisense strand to SEQ ID NO: 1590649
uuuaucgagcaucaacaug

SEQ ID NO: 1590651 - RNA, 19 nt, Artificial Sequence
  Description of Artificial Sequence: Synthetic oligonucleotide
  Sense strand starting at position 636 of SEQ ID NO: 1560302
guugaugcucgauaaaucc

SEQ ID NO: 1590652 - RNA, 19 nt, Artificial Sequence
  Description of Artificial Sequence: Synthetic oligonucleotide
  Antisense strand to SEQ ID NO: 1590651
ggauuuaucgagcaucaac

SEQ ID NO: 1590653 - RNA, 19 nt, Artificial Sequence
  Description of Artificial Sequence: Synthetic oligonucleotide
  Sense strand starting at position 768 of SEQ ID NO: 1560302
ggugacguuacuuguuaca

SEQ ID NO: 1590654 - RNA, 19 nt, Artificial Sequence
  Description of Artificial Sequence: Synthetic oligonucleotide
  Antisense strand to SEQ ID NO: 1590653
uguaacaaguaacgucacc

SEQ ID NO: 1590655 - RNA, 19 nt, Artificial Sequence
  Description of Artificial Sequence: Synthetic oligonucleotide
  Sense strand starting at position 955 of SEQ ID NO: 1560302
ugaguuaauagaggugcuu

SEQ ID NO: 1590656 - RNA, 19 nt, Artificial Sequence
  Description of Artificial Sequence: Synthetic oligonucleotide
  Antisense strand to SEQ ID NO: 1590655
aagcaccucuauuaacuca

SEQ ID NO: 1590657 - RNA, 19 nt, Artificial Sequence
  Description of Artificial Sequence: Synthetic oligonucleotide
  Sense strand starting at position 1231 of SEQ ID NO: 1560302
ccauuugucuagggagaag

SEQ ID NO: 1590658 - RNA, 19 nt, Artificial Sequence
  Description of Artificial Sequence: Synthetic oligonucleotide
  Antisense strand to SEQ ID NO: 1590657
cuucucccuagacaaaugg

SEQ ID NO: 1590659 - RNA, 19 nt, Artificial Sequence
  Description of Artificial Sequence: Synthetic oligonucleotide
  Sense strand starting at position 1409 of SEQ ID NO: 1560302
gggagcauuccagaagcuu

SEQ ID NO: 1590660 - RNA, 19 nt, Artificial Sequence
  Description of Artificial Sequence: Synthetic oligonucleotide
  Antisense strand to SEQ ID NO: 1590659
aagcuucuggaaugcuccc

SEQ ID NO: 1590661 - RNA, 19 nt, Artificial Sequence
  Description of Artificial Sequence: Synthetic oligonucleotide
  Sense strand starting at position 1444 of SEQ ID NO: 1560302
ggcagaguuccaggcccaa

SEQ ID NO: 1590662 - RNA, 19 nt, Artificial Sequence
  Description of Artificial Sequence: Synthetic oligonucleotide
  Antisense strand to SEQ ID NO: 1590661
uugggccuggaacucugcc

SEQ ID NO: 1590663 - RNA, 19 nt, Artificial Sequence
  Description of Artificial Sequence: Synthetic oligonucleotide
  Sense strand starting at position 2106 of SEQ ID NO: 1560302
ggaguauagucucucuaga

SEQ ID NO: 1590664 - RNA, 19 nt, Artificial Sequence
  Description of Artificial Sequence: Synthetic oligonucleotide
  Antisense strand to SEQ ID NO: 1590663
ucuagagagacuauacucc

SEQ ID NO: 1590665 - RNA, 19 nt, Artificial Sequence
  Description of Artificial Sequence: Synthetic oligonucleotide
  Sense strand starting at position 2377 of SEQ ID NO: 1560302
gggagcucuuguuuaugac

SEQ ID NO: 1590666 - RNA, 19 nt, Artificial Sequence
  Description of Artificial Sequence: Synthetic oligonucleotide
  Antisense strand to SEQ ID NO: 1590665
gucauaaacaagagcuccc

SEQ ID NO: 1590667 - RNA, 19 nt, Artificial Sequence
  Description of Artificial Sequence: Synthetic oligonucleotide
  Sense strand starting at position 2378 of SEQ ID NO: 1560302
ggagcucuuguuuaugaca

SEQ ID NO: 1590668 - RNA, 19 nt, Artificial Sequence
  Description of Artificial Sequence: Synthetic oligonucleotide
  Antisense strand to SEQ ID NO: 1590667
ugucauaaacaagagcucc

SEQ ID NO: 1590669 - RNA, 19 nt, Artificial Sequence
  Description of Artificial Sequence: Synthetic oligonucleotide
  Sense strand starting at position 2431 of SEQ ID NO: 1560302
cagaaucuugcgggugcua

SEQ ID NO: 1590670 - RNA, 19 nt, Artificial Sequence
  Description of Artificial Sequence: Synthetic oligonucleotide
  Antisense strand to SEQ ID NO: 1590669
uagcacccgcaagauucug

SEQ ID NO: 1590671 - RNA, 19 nt, Artificial Sequence
  Description of Artificial Sequence: Synthetic oligonucleotide
  Sense strand starting at position 2433 of SEQ ID NO: 1560302
gaaucuugcgggugcuaaa

SEQ ID NO: 1590672 - RNA, 19 nt, Artificial Sequence
  Description of Artificial Sequence: Synthetic oligonucleotide
  Antisense strand to SEQ ID NO: 1590671
uuuagcacccgcaagauuc

SEQ ID NO: 1590673 - RNA, 19 nt, Artificial Sequence
  Description of Artificial Sequence: Synthetic oligonucleotide
  Sense strand starting at position 2493 of SEQ ID NO: 1560302
ccgccaaggguuuauagua

SEQ ID NO: 1590674 - RNA, 19 nt, Artificial Sequence
  Description of Artificial Sequence: Synthetic oligonucleotide
  Antisense strand to SEQ ID NO: 1590673
uacuauaaacccuuggcgg

SEQ ID NO: 1590675 - RNA, 19 nt, Artificial Sequence
  Description of Artificial Sequence: Synthetic oligonucleotide
  Sense strand starting at position 2500 of SEQ ID NO: 1560302
ggguuuauaguauaguacu

SEQ ID NO: 1590676 - RNA, 19 nt, Artificial Sequence
  Description of Artificial Sequence: Synthetic oligonucleotide
  Antisense strand to SEQ ID NO: 1590675
aguacuauacuauaaaccc

SEQ ID NO: 1590677 - RNA, 19 nt, Artificial Sequence
  Description of Artificial Sequence: Synthetic oligonucleotide
  Sense strand starting at position 2511 of SEQ ID NO: 1560302
auaguacuucuccagagcu

SEQ ID NO: 1590678 - RNA, 19 nt, Artificial Sequence
  Description of Artificial Sequence: Synthetic oligonucleotide
  Antisense strand to SEQ ID NO: 1590677
agcucuggagaaguacuau

SEQ ID NO: 1590679 - RNA, 19 nt, Artificial Sequence
  Description of Artificial Sequence: Synthetic oligonucleotide
  Sense strand starting at position 2513 of SEQ ID NO: 1560302
aguacuucuccagagcucu

SEQ ID NO: 1590680 - RNA, 19 nt, Artificial Sequence
  Description of Artificial Sequence: Synthetic oligonucleotide
  Antisense strand to SEQ ID NO: 1590679
agagcucuggagaaguacu

SEQ ID NO: 1590681 - RNA, 19 nt, Artificial Sequence
  Description of Artificial Sequence: Synthetic oligonucleotide
  Sense strand starting at position 2534 of SEQ ID NO: 1560302
acaggaccuucuuauagga

SEQ ID NO: 1590682 - RNA, 19 nt, Artificial Sequence
  Description of Artificial Sequence: Synthetic oligonucleotide
  Antisense strand to SEQ ID NO: 1590681
uccuauaagaagguccugu

SEQ ID NO: 1590683 - RNA, 19 nt, Artificial Sequence
  Description of Artificial Sequence: Synthetic oligonucleotide
  Sense strand starting at position 2536 of SEQ ID NO: 1560302
aggaccuucuuauaggauu

SEQ ID NO: 1590684 - RNA, 19 nt, Artificial Sequence
  Description of Artificial Sequence: Synthetic oligonucleotide
  Antisense strand to SEQ ID NO: 1590683
aauccuauaagaagguccu

SEQ ID NO: 1590685 - RNA, 19 nt, Artificial Sequence
  Description of Artificial Sequence: Synthetic oligonucleotide
  Sense strand starting at position 2554 of SEQ ID NO: 1560302
uagcucuggccucggaauu

SEQ ID NO: 1590686 - RNA, 19 nt, Artificial Sequence
  Description of Artificial Sequence: Synthetic oligonucleotide
  Antisense strand to SEQ ID NO: 1590685
aauuccgaggccagagcua

SEQ ID NO: 1590687 - RNA, 19 nt, Artificial Sequence
  Description of Artificial Sequence: Synthetic oligonucleotide
  Sense strand starting at position 2555 of SEQ ID NO: 1560302
agcucuggccucggaauuu

SEQ ID NO: 1590688 - RNA, 19 nt, Artificial Sequence
  Description of Artificial Sequence: Synthetic oligonucleotide
  Antisense strand to SEQ ID NO: 1590687
aaauuccgaggccagagcu

SEQ ID NO: 1590689 - RNA, 19 nt, Artificial Sequence
  Description of Artificial Sequence: Synthetic oligonucleotide
  Sense strand starting at position 2595 of SEQ ID NO: 1560302
gguagucccucccuaacuu

SEQ ID NO: 1590690 - RNA, 19 nt, Artificial Sequence
  Description of Artificial Sequence: Synthetic oligonucleotide
  Antisense strand to SEQ ID NO: 1590689
aaguuagggagggacuacc

SEQ ID NO: 1590691 - RNA, 19 nt, Artificial Sequence
  Description of Artificial Sequence: Synthetic oligonucleotide
  Sense strand starting at position 2596 of SEQ ID NO: 1560302
guagucccucccuaacuuu

SEQ ID NO: 1590692 - RNA, 19 nt, Artificial Sequence
  Description of Artificial Sequence: Synthetic oligonucleotide
  Antisense strand to SEQ ID NO: 1590691
aaaguuagggagggacuac

SEQ ID NO: 1590693 - RNA, 19 nt, Artificial Sequence
  Description of Artificial Sequence: Synthetic oligonucleotide
  Sense strand starting at position 2713 of SEQ ID NO: 1560302
aguugugaggcuuggacua

SEQ ID NO: 1590694 - RNA, 19 nt, Artificial Sequence
  Description of Artificial Sequence: Synthetic oligonucleotide
  Antisense strand to SEQ ID NO: 1590693
uaguccaagccucacaacu

SEQ ID NO: 1590695 - RNA, 19 nt, Artificial Sequence
  Description of Artificial Sequence: Synthetic oligonucleotide
  Sense strand starting at position 2734 of SEQ ID NO: 1560302
ccgcgugucaggcagagau

SEQ ID NO: 1590696 - RNA, 19 nt, Artificial Sequence
  Description of Artificial Sequence: Synthetic oligonucleotide
  Antisense strand to SEQ ID NO: 1590695
aucucugccugacacgcgg

SEQ ID NO: 1590697 - RNA, 19 nt, Artificial Sequence
  Description of Artificial Sequence: Synthetic oligonucleotide
  Sense strand starting at position 2746 of SEQ ID NO: 1560302
cagagauggcucgaaaguu

SEQ ID NO: 1590698 - RNA, 19 nt, Artificial Sequence
  Description of Artificial Sequence: Synthetic oligonucleotide
  Antisense strand to SEQ ID NO: 1590697
aacuuucgagccaucucug

SEQ ID NO: 1590699 - RNA, 19 nt, Artificial Sequence
  Description of Artificial Sequence: Synthetic oligonucleotide
  Sense strand starting at position 2747 of SEQ ID NO: 1560302
agagauggcucgaaaguug

SEQ ID NO: 1590700 - RNA, 19 nt, Artificial Sequence
  Description of Artificial Sequence: Synthetic oligonucleotide
  Antisense strand to SEQ ID NO: 1590699
caacuuucgagccaucucu

SEQ ID NO: 1590701 - RNA, 19 nt, Artificial Sequence
  Description of Artificial Sequence: Synthetic oligonucleotide
  Sense strand starting at position 2938 of SEQ ID NO: 1560302
cagauugaccuggguuuga

SEQ ID NO: 1590702 - RNA, 19 nt, Artificial Sequence
  Description of Artificial Sequence: Synthetic oligonucleotide
  Antisense strand to SEQ ID NO: 1590701
ucaaacccaggucaaucug

SEQ ID NO: 1590703 - RNA, 19 nt, Artificial Sequence
  Description of Artificial Sequence: Synthetic oligonucleotide
  Sense strand starting at position 2976 of SEQ ID NO: 1560302
cugguuucgugacccuaaa

SEQ ID NO: 1590704 - RNA, 19 nt, Artificial Sequence
  Description of Artificial Sequence: Synthetic oligonucleotide
  Antisense strand to SEQ ID NO: 1590703
uuuagggucacgaaaccag

SEQ ID NO: 1590705 - RNA, 19 nt, Artificial Sequence
  Description of Artificial Sequence: Synthetic oligonucleotide
  Sense strand starting at position 3060 of SEQ ID NO: 1560302
auguuuacugagugccuaa

SEQ ID NO: 1590706 - RNA, 19 nt, Artificial Sequence
  Description of Artificial Sequence: Synthetic oligonucleotide
  Antisense strand to SEQ ID NO: 1590705
uuaggcacucaguaaacau

SEQ ID NO: 1590707 - RNA, 19 nt, Artificial Sequence
  Description of Artificial Sequence: Synthetic oligonucleotide
  Sense strand starting at position 3088 of SEQ ID NO: 1560302
cucuguucuaggugcugaa

SEQ ID NO: 1590708 - RNA, 19 nt, Artificial Sequence
  Description of Artificial Sequence: Synthetic oligonucleotide
  Antisense strand to SEQ ID NO: 1590707
uucagcaccuagaacagag

SEQ ID NO: 1590709 - RNA, 19 nt, Artificial Sequence
  Description of Artificial Sequence: Synthetic oligonucleotide
  Sense strand starting at position 3092 of SEQ ID NO: 1560302
guucuaggugcugaaguuu

SEQ ID NO: 1590710 - RNA, 19 nt, Artificial Sequence
  Description of Artificial Sequence: Synthetic oligonucleotide
  Antisense strand to SEQ ID NO: 1590709
aaacuucagcaccuagaac

SEQ ID NO: 1590711 - RNA, 19 nt, Artificial Sequence
  Description of Artificial Sequence: Synthetic oligonucleotide
  Sense strand starting at position 3202 of SEQ ID NO: 1560302
aacguuuaaucagcaguca

SEQ ID NO: 1590712 - RNA, 19 nt, Artificial Sequence
  Description of Artificial Sequence: Synthetic oligonucleotide
  Antisense strand to SEQ ID NO: 1590711
ugacugcugauuaaacguu

SEQ ID NO: 1590713 - RNA, 19 nt, Artificial Sequence
  Description of Artificial Sequence: Synthetic oligonucleotide
  Sense strand starting at position 3225 of SEQ ID NO: 1560302
gggcaaagcacucaguuau

SEQ ID NO: 1590714 - RNA, 19 nt, Artificial Sequence
  Description of Artificial Sequence: Synthetic oligonucleotide
  Antisense strand to SEQ ID NO: 1590713
auaacugagugcuuugccc

SEQ ID NO: 1590715 - RNA, 19 nt, Artificial Sequence
  Description of Artificial Sequence: Synthetic oligonucleotide
  Sense strand starting at position 1309 of SEQ ID NO: 1560303
ugacuaagacguuaaguau

SEQ ID NO: 1590716 - RNA, 19 nt, Artificial Sequence
  Description of Artificial Sequence: Synthetic oligonucleotide
  Antisense strand to SEQ ID NO: 1590715
auacuuaacgucuuaguca

SEQ ID NO: 1590717 - RNA, 19 nt, Artificial Sequence
  Description of Artificial Sequence: Synthetic oligonucleotide
  Sense strand starting at position 1312 of SEQ ID NO: 1560303
cuaagacguuaaguaucua

SEQ ID NO: 1590718 - RNA, 19 nt, Artificial Sequence
  Description of Artificial Sequence: Synthetic oligonucleotide
  Antisense strand to SEQ ID NO: 1590717
uagauacuuaacgucuuag

SEQ ID NO: 1590719 - RNA, 19 nt, Artificial Sequence
  Description of Artificial Sequence: Synthetic oligonucleotide
  Sense strand starting at position 1317 of SEQ ID NO: 1560303
acguuaaguaucuaugagu

SEQ ID NO: 1590720 - RNA, 19 nt, Artificial Sequence
  Description of Artificial Sequence: Synthetic oligonucleotide
  Antisense strand to SEQ ID NO: 1590719
acucauagauacuuaacgu

SEQ ID NO: 1590721 - RNA, 19 nt, Artificial Sequence
  Description of Artificial Sequence: Synthetic oligonucleotide
  Sense strand starting at position 1320 of SEQ ID NO: 1560303
uuaaguaucuaugagugau

SEQ ID NO: 1590722 - RNA, 19 nt, Artificial Sequence
  Description of Artificial Sequence: Synthetic oligonucleotide
  Antisense strand to SEQ ID NO: 1590721
aucacucauagauacuuaa

SEQ ID NO: 1590723 - RNA, 19 nt, Artificial Sequence
  Description of Artificial Sequence: Synthetic oligonucleotide
  Sense strand starting at position 1322 of SEQ ID NO: 1560303
aaguaucuaugagugauaa

SEQ ID NO: 1590724 - RNA, 19 nt, Artificial Sequence
  Description of Artificial Sequence: Synthetic oligonucleotide
  Antisense strand to SEQ ID NO: 1590723
uuaucacucauagauacuu

SEQ ID NO: 1590725 - RNA, 19 nt, Artificial Sequence
  Description of Artificial Sequence: Synthetic oligonucleotide
  Sense strand starting at position 1323 of SEQ ID NO: 1560303
aguaucuaugagugauaag

SEQ ID NO: 1590726 - RNA, 19 nt, Artificial Sequence
  Description of Artificial Sequence: Synthetic oligonucleotide
  Antisense strand to SEQ ID NO: 1590725
cuuaucacucauagauacu

SEQ ID NO: 1590727 - RNA, 19 nt, Artificial Sequence
  Description of Artificial Sequence: Synthetic oligonucleotide
  Sense strand starting at position 1404 of SEQ ID NO: 1560303
acauccuccgacgaagauu

SEQ ID NO: 1590728 - RNA, 19 nt, Artificial Sequence
  Description of Artificial Sequence: Synthetic oligonucleotide
  Antisense strand to SEQ ID NO: 1590727
aaucuucgucggaggaugu

SEQ ID NO: 1590729 - RNA, 19 nt, Artificial Sequence
  Description of Artificial Sequence: Synthetic oligonucleotide
  Sense strand starting at position 1412 of SEQ ID NO: 1560303
cgacgaagauucuguuaug

SEQ ID NO: 1590730 - RNA, 19 nt, Artificial Sequence
  Description of Artificial Sequence: Synthetic oligonucleotide
  Antisense strand to SEQ ID NO: 1590729
cauaacagaaucuucgucg

SEQ ID NO: 1590731 - RNA, 19 nt, Artificial Sequence
  Description of Artificial Sequence: Synthetic oligonucleotide
  Sense strand starting at position 1413 of SEQ ID NO: 1560303
gacgaagauucuguuauga

SEQ ID NO: 1590732 - RNA, 19 nt, Artificial Sequence
  Description of Artificial Sequence: Synthetic oligonucleotide
  Antisense strand to SEQ ID NO: 1590731
ucauaacagaaucuucguc

SEQ ID NO: 1590733 - RNA, 19 nt, Artificial Sequence
  Description of Artificial Sequence: Synthetic oligonucleotide
  Sense strand starting at position 1415 of SEQ ID NO: 1560303
cgaagauucuguuaugaau

SEQ ID NO: 1590734 - RNA, 19 nt, Artificial Sequence
  Description of Artificial Sequence: Synthetic oligonucleotide
  Antisense strand to SEQ ID NO: 1590733
auucauaacagaaucuucg

SEQ ID NO: 1590735 - RNA, 19 nt, Artificial Sequence
  Description of Artificial Sequence: Synthetic oligonucleotide
  Sense strand starting at position 1837 of SEQ ID NO: 1560303
gcagaauacucauacccag

SEQ ID NO: 1590736 - RNA, 19 nt, Artificial Sequence
  Description of Artificial Sequence: Synthetic oligonucleotide
  Antisense strand to SEQ ID NO: 1590735
cuggguaugaguauucugc

SEQ ID NO: 1590737 - RNA, 19 nt, Artificial Sequence
  Description of Artificial Sequence: Synthetic oligonucleotide
  Sense strand starting at position 1904 of SEQ ID NO: 1560303
aaguaaaggugguagcuua

SEQ ID NO: 1590738 - RNA, 19 nt, Artificial Sequence
  Description of Artificial Sequence: Synthetic oligonucleotide
  Antisense strand to SEQ ID NO: 1590737
uaagcuaccaccuuuacuu

SEQ ID NO: 1590739 - RNA, 19 nt, Artificial Sequence
  Description of Artificial Sequence: Synthetic oligonucleotide
  Sense strand starting at position 2137 of SEQ ID NO: 1560303
ggagugagccgucaggacu

SEQ ID NO: 1590740 - RNA, 19 nt, Artificial Sequence
  Description of Artificial Sequence: Synthetic oligonucleotide
  Antisense strand to SEQ ID NO: 1590739
aguccugacggcucacucc

SEQ ID NO: 1590741 - RNA, 19 nt, Artificial Sequence
  Description of Artificial Sequence: Synthetic oligonucleotide
  Sense strand starting at position 2144 of SEQ ID NO: 1560303
gccgucaggacuuagaacu

SEQ ID NO: 1590742 - RNA, 19 nt, Artificial Sequence
  Description of Artificial Sequence: Synthetic oligonucleotide
  Antisense strand to SEQ ID NO: 1590741
aguucuaaguccugacggc

SEQ ID NO: 1590743 - RNA, 19 nt, Artificial Sequence
  Description of Artificial Sequence: Synthetic oligonucleotide
  Sense strand starting at position 2151 of SEQ ID NO: 1560303
ggacuuagaacucguaaca

SEQ ID NO: 1590744 - RNA, 19 nt, Artificial Sequence
  Description of Artificial Sequence: Synthetic oligonucleotide
  Antisense strand to SEQ ID NO: 1590743
uguuacgaguucuaagucc

SEQ ID NO: 1590745 - RNA, 19 nt, Artificial Sequence
  Description of Artificial Sequence: Synthetic oligonucleotide
  Sense strand starting at position 2236 of SEQ ID NO: 1560303
guaggagugugcagagaca

SEQ ID NO: 1590746 - RNA, 19 nt, Artificial Sequence
  Description of Artificial Sequence: Synthetic oligonucleotide
  Antisense strand to SEQ ID NO: 1590745
ugucucugcacacuccuac

SEQ ID NO: 1590747 - RNA, 19 nt, Artificial Sequence
  Description of Artificial Sequence: Synthetic oligonucleotide
  Sense strand starting at position 2357 of SEQ ID NO: 1560303
aucuguuacugugagcuua

SEQ ID NO: 1590748 - RNA, 19 nt, Artificial Sequence
  Description of Artificial Sequence: Synthetic oligonucleotide
  Antisense strand to SEQ ID NO: 1590747
uaagcucacaguaacagau

SEQ ID NO: 1590749 - RNA, 19 nt, Artificial Sequence
  Description of Artificial Sequence: Synthetic oligonucleotide
  Sense strand starting at position 2359 of SEQ ID NO: 1560303
cuguuacugugagcuuaca

SEQ ID NO: 1590750 - RNA, 19 nt, Artificial Sequence
  Description of Artificial Sequence: Synthetic oligonucleotide
  Antisense strand to SEQ ID NO: 1590749
uguaagcucacaguaacag

SEQ ID NO: 1590751 - RNA, 19 nt, Artificial Sequence
  Description of Artificial Sequence: Synthetic oligonucleotide
  Sense strand starting at position 2422 of SEQ ID NO: 1560303
ucauguugaugcucgauaa

SEQ ID NO: 1590752 - RNA, 19 nt, Artificial Sequence
  Description of Artificial Sequence: Synthetic oligonucleotide
  Antisense strand to SEQ ID NO: 1590751
uuaucgagcaucaacauga

SEQ ID NO: 1590753 - RNA, 19 nt, Artificial Sequence
  Description of Artificial Sequence: Synthetic oligonucleotide
  Sense strand starting at position 2423 of SEQ ID NO: 1560303
cauguugaugcucgauaaa

SEQ ID NO: 1590754 - RNA, 19 nt, Artificial Sequence
  Description of Artificial Sequence: Synthetic oligonucleotide
  Antisense strand to SEQ ID NO: 1590753
uuuaucgagcaucaacaug

SEQ ID NO: 1590755 - RNA, 19 nt, Artificial Sequence
  Description of Artificial Sequence: Synthetic oligonucleotide
  Sense strand starting at position 2426 of SEQ ID NO: 1560303
guugaugcucgauaaaucc

SEQ ID NO: 1590756 - RNA, 19 nt, Artificial Sequence
  Description of Artificial Sequence: Synthetic oligonucleotide
  Antisense strand to SEQ ID NO: 1590755
ggauuuaucgagcaucaac

SEQ ID NO: 1590757 - RNA, 19 nt, Artificial Sequence
  Description of Artificial Sequence: Synthetic oligonucleotide
  Sense strand starting at position 2551 of SEQ ID NO: 1560303
ccagaaaggugacguuacu

SEQ ID NO: 1590758 - RNA, 19 nt, Artificial Sequence
  Description of Artificial Sequence: Synthetic oligonucleotide
  Antisense strand to SEQ ID NO: 1590757
aguaacgucaccuuucugg

SEQ ID NO: 1590759 - RNA, 19 nt, Artificial Sequence
  Description of Artificial Sequence: Synthetic oligonucleotide
  Sense strand starting at position 2558 of SEQ ID NO: 1560303
ggugacguuacuuguuaca

SEQ ID NO: 1590760 - RNA, 19 nt, Artificial Sequence
  Description of Artificial Sequence: Synthetic oligonucleotide
  Antisense strand to SEQ ID NO: 1590759
uguaacaaguaacgucacc

SEQ ID NO: 1590761 - RNA, 19 nt, Artificial Sequence
  Description of Artificial Sequence: Synthetic oligonucleotide
  Sense strand starting at position 2745 of SEQ ID NO: 1560303
ugaguuaauagaggugcuu

SEQ ID NO: 1590762 - RNA, 19 nt, Artificial Sequence
  Description of Artificial Sequence: Synthetic oligonucleotide
  Antisense strand to SEQ ID NO: 1590761
aagcaccucuauuaacuca

SEQ ID NO: 1590763 - RNA, 19 nt, Artificial Sequence
  Description of Artificial Sequence: Synthetic oligonucleotide
  Sense strand starting at position 2999 of SEQ ID NO: 1560303
agugguccuucugguauca

SEQ ID NO: 1590764 - RNA, 19 nt, Artificial Sequence
  Description of Artificial Sequence: Synthetic oligonucleotide
  Antisense strand to SEQ ID NO: 1590763
ugauaccagaaggaccacu

SEQ ID NO: 1590765 - RNA, 19 nt, Artificial Sequence
  Description of Artificial Sequence: Synthetic oligonucleotide
  Sense strand starting at position 3001 of SEQ ID NO: 1560303
ugguccuucugguaucaca

SEQ ID NO: 1590766 - RNA, 19 nt, Artificial Sequence
  Description of Artificial Sequence: Synthetic oligonucleotide
  Antisense strand to SEQ ID NO: 1590765
ugugauaccagaaggacca

SEQ ID NO: 1590767 - RNA, 19 nt, Artificial Sequence
  Description of Artificial Sequence: Synthetic oligonucleotide
  Sense strand starting at position 3021 of SEQ ID NO: 1560303
ccauuugucuagggagaag

SEQ ID NO: 1590768 - RNA, 19 nt, Artificial Sequence
  Description of Artificial Sequence: Synthetic oligonucleotide
  Antisense strand to SEQ ID NO: 1590767
cuucucccuagacaaaugg

SEQ ID NO: 1590769 - RNA, 19 nt, Artificial Sequence
  Description of Artificial Sequence: Synthetic oligonucleotide
  Sense strand starting at position 3199 of SEQ ID NO: 1560303
gggagcauuccagaagcuu

SEQ ID NO: 1590770 - RNA, 19 nt, Artificial Sequence
  Description of Artificial Sequence: Synthetic oligonucleotide
  Antisense strand to SEQ ID NO: 1590769
aagcuucuggaaugcuccc

SEQ ID NO: 1590771 - RNA, 19 nt, Artificial Sequence
  Description of Artificial Sequence: Synthetic oligonucleotide
  Sense strand starting at position 3234 of SEQ ID NO: 1560303
ggcagaguuccaggcccaa

SEQ ID NO: 1590772 - RNA, 19 nt, Artificial Sequence
  Description of Artificial Sequence: Synthetic oligonucleotide
  Antisense strand to SEQ ID NO: 1590771
uugggccuggaacucugcc

SEQ ID NO: 1590773 - RNA, 19 nt, Artificial Sequence
  Description of Artificial Sequence: Synthetic oligonucleotide
  Sense strand starting at position 3537 of SEQ ID NO: 1560303
gggucucaccguugcagua

SEQ ID NO: 1590774 - RNA, 19 nt, Artificial Sequence
  Description of Artificial Sequence: Synthetic oligonucleotide
  Antisense strand to SEQ ID NO: 1590773
uacugcaacggugagaccc

SEQ ID NO: 1590775 - RNA, 19 nt, Artificial Sequence
  Description of Artificial Sequence: Synthetic oligonucleotide
  Sense strand starting at position 3896 of SEQ ID NO: 1560303
ggaguauagucucucuaga

SEQ ID NO: 1590776 - RNA, 19 nt, Artificial Sequence
  Description of Artificial Sequence: Synthetic oligonucleotide
  Antisense strand to SEQ ID NO: 1590775
ucuagagagacuauacucc

SEQ ID NO: 1590777 - RNA, 19 nt, Artificial Sequence
  Description of Artificial Sequence: Synthetic oligonucleotide
  Sense strand starting at position 7 of SEQ ID NO: 1560304
uacaacagugucugucaga

SEQ ID NO: 1590778 - RNA, 19 nt, Artificial Sequence
  Description of Artificial Sequence: Synthetic oligonucleotide
  Antisense strand to SEQ ID NO: 1590777
ucugacagacacuguugua

SEQ ID NO: 1590779 - RNA, 19 nt, Artificial Sequence
  Description of Artificial Sequence: Synthetic oligonucleotide
  Sense strand starting at position 8 of SEQ ID NO: 1560304
acaacagugucugucagau

SEQ ID NO: 1590780 - RNA, 19 nt, Artificial Sequence
  Description of Artificial Sequence: Synthetic oligonucleotide
  Antisense strand to SEQ ID NO: 1590779
aucugacagacacuguugu

SEQ ID NO: 1590781 - RNA, 19 nt, Artificial Sequence
  Description of Artificial Sequence: Synthetic oligonucleotide
  Sense strand starting at position 14 of SEQ ID NO: 1560304
gugucugucagauaguaag

SEQ ID NO: 1590782 - RNA, 19 nt, Artificial Sequence
  Description of Artificial Sequence: Synthetic oligonucleotide
  Antisense strand to SEQ ID NO: 1590781
cuuacuaucugacagacac

SEQ ID NO: 1590783 - RNA, 19 nt, Artificial Sequence
  Description of Artificial Sequence: Synthetic oligonucleotide
  Sense strand starting at position 21 of SEQ ID NO: 1560304
ucagauaguaagugcuuga

SEQ ID NO: 1590784 - RNA, 19 nt, Artificial Sequence
  Description of Artificial Sequence: Synthetic oligonucleotide
  Antisense strand to SEQ ID NO: 1590783
ucaagcacuuacuaucuga

SEQ ID NO: 1590785 - RNA, 19 nt, Artificial Sequence
  Description of Artificial Sequence: Synthetic oligonucleotide
  Sense strand starting at position 24 of SEQ ID NO: 1560304
gauaguaagugcuugaguu

SEQ ID NO: 1590786 - RNA, 19 nt, Artificial Sequence
  Description of Artificial Sequence: Synthetic oligonucleotide
  Antisense strand to SEQ ID NO: 1590785
aacucaagcacuuacuauc

SEQ ID NO: 1590787 - RNA, 19 nt, Artificial Sequence
  Description of Artificial Sequence: Synthetic oligonucleotide
  Sense strand starting at position 25 of SEQ ID NO: 1560304
auaguaagugcuugaguua

SEQ ID NO: 1590788 - RNA, 19 nt, Artificial Sequence
  Description of Artificial Sequence: Synthetic oligonucleotide
  Antisense strand to SEQ ID NO: 1590787
uaacucaagcacuuacuau

SEQ ID NO: 1590789 - RNA, 19 nt, Artificial Sequence
  Description of Artificial Sequence: Synthetic oligonucleotide
  Sense strand starting at position 26 of SEQ ID NO: 1560304
uaguaagugcuugaguuau

SEQ ID NO: 1590790 - RNA, 19 nt, Artificial Sequence
  Description of Artificial Sequence: Synthetic oligonucleotide
  Antisense strand to SEQ ID NO: 1590789
auaacucaagcacuuacua

SEQ ID NO: 1590791 - RNA, 19 nt, Artificial Sequence
  Description of Artificial Sequence: Synthetic oligonucleotide
  Sense strand starting at position 702 of SEQ ID NO: 1560304
cuaugagcucaguaccuuu

SEQ ID NO: 1590792 - RNA, 19 nt, Artificial Sequence
  Description of Artificial Sequence: Synthetic oligonucleotide
  Antisense strand to SEQ ID NO: 1590791
aaagguacugagcucauag

SEQ ID NO: 1590793 - RNA, 19 nt, Artificial Sequence
  Description of Artificial Sequence: Synthetic oligonucleotide
  Sense strand starting at position 736 of SEQ ID NO: 1560304
ggucuauggaccugagauc

SEQ ID NO: 1590794 - RNA, 19 nt, Artificial Sequence
  Description of Artificial Sequence: Synthetic oligonucleotide
  Antisense strand to SEQ ID NO: 1590793
gaucucagguccauagacc

SEQ ID NO: 1590795 - RNA, 19 nt, Artificial Sequence
  Description of Artificial Sequence: Synthetic oligonucleotide
  Sense strand starting at position 827 of SEQ ID NO: 1560304
ugaacccaucucugucaga

SEQ ID NO: 1590796 - RNA, 19 nt, Artificial Sequence
  Description of Artificial Sequence: Synthetic oligonucleotide
  Antisense strand to SEQ ID NO: 1590795
ucugacagagauggguuca

SEQ ID NO: 1590797 - RNA, 19 nt, Artificial Sequence
  Description of Artificial Sequence: Synthetic oligonucleotide
  Sense strand starting at position 1435 of SEQ ID NO: 1560304
gaagauaacuucuuugguu

SEQ ID NO: 1590798 - RNA, 19 nt, Artificial Sequence
  Description of Artificial Sequence: Synthetic oligonucleotide
  Antisense strand to SEQ ID NO: 1590797
aaccaaagaaguuaucuuc

SEQ ID NO: 1590799 - RNA, 19 nt, Artificial Sequence
  Description of Artificial Sequence: Synthetic oligonucleotide
  Sense strand starting at position 1542 of SEQ ID NO: 1560304
cccggaggucuccgaugaa

SEQ ID NO: 1590800 - RNA, 19 nt, Artificial Sequence
  Description of Artificial Sequence: Synthetic oligonucleotide
  Antisense strand to SEQ ID NO: 1590799
uucaucggagaccuccggg

SEQ ID NO: 1590801 - RNA, 19 nt, Artificial Sequence
  Description of Artificial Sequence: Synthetic oligonucleotide
  Sense strand starting at position 1618 of SEQ ID NO: 1560304
guugaucuugcagagccua

SEQ ID NO: 1590802 - RNA, 19 nt, Artificial Sequence
  Description of Artificial Sequence: Synthetic oligonucleotide
  Antisense strand to SEQ ID NO: 1590801
uaggcucugcaagaucaac

SEQ ID NO: 1590803 - RNA, 19 nt, Artificial Sequence
  Description of Artificial Sequence: Synthetic oligonucleotide
  Sense strand starting at position 1651 of SEQ ID NO: 1560304
agaggcagugaucgccaaa

SEQ ID NO: 1590804 - RNA, 19 nt, Artificial Sequence
  Description of Artificial Sequence: Synthetic oligonucleotide
  Antisense strand to SEQ ID NO: 1590803
uuuggcgaucacugccucu

SEQ ID NO: 1590805 - RNA, 19 nt, Artificial Sequence
  Description of Artificial Sequence: Synthetic oligonucleotide
  Sense strand starting at position 1693 of SEQ ID NO: 1560304
ggacgcgauccuggaagaa

SEQ ID NO: 1590806 - RNA, 19 nt, Artificial Sequence
  Description of Artificial Sequence: Synthetic oligonucleotide
  Antisense strand to SEQ ID NO: 1590805
uucuuccaggaucgcgucc

SEQ ID NO: 1590807 - RNA, 19 nt, Artificial Sequence
  Description of Artificial Sequence: Synthetic oligonucleotide
  Sense strand starting at position 1867 of SEQ ID NO: 1560304
uugggugaaaccugagauc

SEQ ID NO: 1590808 - RNA, 19 nt, Artificial Sequence
  Description of Artificial Sequence: Synthetic oligonucleotide
  Antisense strand to SEQ ID NO: 1590807
gaucucagguuucacccaa

SEQ ID NO: 1590809 - RNA, 19 nt, Artificial Sequence
  Description of Artificial Sequence: Synthetic oligonucleotide
  Sense strand starting at position 2616 of SEQ ID NO: 1560304
ggguaguugcgagggugaa

SEQ ID NO: 1590810 - RNA, 19 nt, Artificial Sequence
  Description of Artificial Sequence: Synthetic oligonucleotide
  Antisense strand to SEQ ID NO: 1590809
uucacccucgcaacuaccc

SEQ ID NO: 1590811 - RNA, 19 nt, Artificial Sequence
  Description of Artificial Sequence: Synthetic oligonucleotide
  Sense strand starting at position 2617 of SEQ ID NO: 1560304
gguaguugcgagggugaaa

SEQ ID NO: 1590812 - RNA, 19 nt, Artificial Sequence
  Description of Artificial Sequence: Synthetic oligonucleotide
  Antisense strand to SEQ ID NO: 1590811
uuucacccucgcaacuacc

SEQ ID NO: 1590813 - RNA, 19 nt, Artificial Sequence
  Description of Artificial Sequence: Synthetic oligonucleotide
  Sense strand starting at position 2626 of SEQ ID NO: 1560304
gagggugaaauugguuaau

SEQ ID NO: 1590814 - RNA, 19 nt, Artificial Sequence
  Description of Artificial Sequence: Synthetic oligonucleotide
  Antisense strand to SEQ ID NO: 1590813
auuaaccaauuucacccuc

SEQ ID NO: 1590815 - RNA, 19 nt, Artificial Sequence
  Description of Artificial Sequence: Synthetic oligonucleotide
  Sense strand starting at position 2628 of SEQ ID NO: 1560304
gggugaaauugguuaauua

SEQ ID NO: 1590816 - RNA, 19 nt, Artificial Sequence
  Description of Artificial Sequence: Synthetic oligonucleotide
  Antisense strand to SEQ ID NO: 1590815
uaauuaaccaauuucaccc

SEQ ID NO: 1590817 - RNA, 19 nt, Artificial Sequence
  Description of Artificial Sequence: Synthetic oligonucleotide
  Sense strand starting at position 2635 of SEQ ID NO: 1560304
auugguuaauuauugggaa

SEQ ID NO: 1590818 - RNA, 19 nt, Artificial Sequence
  Description of Artificial Sequence: Synthetic oligonucleotide
  Antisense strand to SEQ ID NO: 1590817
uucccaauaauuaaccaau

SEQ ID NO: 1590819 - RNA, 19 nt, Artificial Sequence
  Description of Artificial Sequence: Synthetic oligonucleotide
  Sense strand starting at position 2637 of SEQ ID NO: 1560304
ugguuaauuauugggaagu

SEQ ID NO: 1590820 - RNA, 19 nt, Artificial Sequence
  Description of Artificial Sequence: Synthetic oligonucleotide
  Antisense strand to SEQ ID NO: 1590819
acuucccaauaauuaacca

SEQ ID NO: 1590821 - RNA, 19 nt, Artificial Sequence
  Description of Artificial Sequence: Synthetic oligonucleotide
  Sense strand starting at position 2647 of SEQ ID NO: 1560304
uugggaagugccuggagua

SEQ ID NO: 1590822 - RNA, 19 nt, Artificial Sequence
  Description of Artificial Sequence: Synthetic oligonucleotide
  Antisense strand to SEQ ID NO: 1590821
uacuccaggcacuucccaa

SEQ ID NO: 1590823 - RNA, 19 nt, Artificial Sequence
  Description of Artificial Sequence: Synthetic oligonucleotide
  Sense strand starting at position 2648 of SEQ ID NO: 1560304
ugggaagugccuggaguau

SEQ ID NO: 1590824 - RNA, 19 nt, Artificial Sequence
  Description of Artificial Sequence: Synthetic oligonucleotide
  Antisense strand to SEQ ID NO: 1590823
auacuccaggcacuuccca

SEQ ID NO: 1590825 - RNA, 19 nt, Artificial Sequence
  Description of Artificial Sequence: Synthetic oligonucleotide
  Sense strand starting at position 2675 of SEQ ID NO: 1560304
cuguauuuguguuugcuau

SEQ ID NO: 1590826 - RNA, 19 nt, Artificial Sequence
  Description of Artificial Sequence: Synthetic oligonucleotide
  Antisense strand to SEQ ID NO: 1590825
auagcaaacacaaauacag

SEQ ID NO: 1590827 - RNA, 19 nt, Artificial Sequence
  Description of Artificial Sequence: Synthetic oligonucleotide
  Sense strand starting at position 2676 of SEQ ID NO: 1560304
uguauuuguguuugcuaug

SEQ ID NO: 1590828 - RNA, 19 nt, Artificial Sequence
  Description of Artificial Sequence: Synthetic oligonucleotide
  Antisense strand to SEQ ID NO: 1590827
cauagcaaacacaaauaca

SEQ ID NO: 1590829 - RNA, 19 nt, Artificial Sequence
  Description of Artificial Sequence: Synthetic oligonucleotide
  Sense strand starting at position 2677 of SEQ ID NO: 1560304
guauuuguguuugcuaugu

SEQ ID NO: 1590830 - RNA, 19 nt, Artificial Sequence
  Description of Artificial Sequence: Synthetic oligonucleotide
  Antisense strand to SEQ ID NO: 1590829
acauagcaaacacaaauac

SEQ ID NO: 1590831 - RNA, 19 nt, Artificial Sequence
  Description of Artificial Sequence: Synthetic oligonucleotide
  Sense strand starting at position 2691 of SEQ ID NO: 1560304
uauguuugagcagaguuga

SEQ ID NO: 1590832 - RNA, 19 nt, Artificial Sequence
  Description of Artificial Sequence: Synthetic oligonucleotide
  Antisense strand to SEQ ID NO: 1590831
ucaacucugcucaaacaua

SEQ ID NO: 1590833 - RNA, 19 nt, Artificial Sequence
  Description of Artificial Sequence: Synthetic oligonucleotide
  Sense strand starting at position 2704 of SEQ ID NO: 1560304
aguugaaaugugcagcuuu

SEQ ID NO: 1590834 - RNA, 19 nt, Artificial Sequence
  Description of Artificial Sequence: Synthetic oligonucleotide
  Antisense strand to SEQ ID NO: 1590833
aaagcugcacauuucaacu

SEQ ID NO: 1590835 - RNA, 19 nt, Artificial Sequence
  Description of Artificial Sequence: Synthetic oligonucleotide
  Sense strand starting at position 3020 of SEQ ID NO: 1560304
guuuguuuaacggagucuu

SEQ ID NO: 1590836 - RNA, 19 nt, Artificial Sequence
  Description of Artificial Sequence: Synthetic oligonucleotide
  Antisense strand to SEQ ID NO: 1590835
aagacuccguuaaacaaac

SEQ ID NO: 1590837 - RNA, 19 nt, Artificial Sequence
  Description of Artificial Sequence: Synthetic oligonucleotide
  Sense strand starting at position 3364 of SEQ ID NO: 1560304
cugagcucaagcgaugauu

SEQ ID NO: 1590838 - RNA, 19 nt, Artificial Sequence
  Description of Artificial Sequence: Synthetic oligonucleotide
  Antisense strand to SEQ ID NO: 1590837
aaucaucgcuugagcucag

SEQ ID NO: 1590839 - RNA, 19 nt, Artificial Sequence
  Description of Artificial Sequence: Synthetic oligonucleotide
  Sense strand starting at position 3407 of SEQ ID NO: 1560304
agaauuauauagccuuagu

SEQ ID NO: 1590840 - RNA, 19 nt, Artificial Sequence
  Description of Artificial Sequence: Synthetic oligonucleotide
  Antisense strand to SEQ ID NO: 1590839
acuaaggcuauauaauucu

SEQ ID NO: 1590841 - RNA, 19 nt, Artificial Sequence
  Description of Artificial Sequence: Synthetic oligonucleotide
  Sense strand starting at position 3517 of SEQ ID NO: 1560304
uugacucaguugcuugaga

SEQ ID NO: 1590842 - RNA, 19 nt, Artificial Sequence
  Description of Artificial Sequence: Synthetic oligonucleotide
  Antisense strand to SEQ ID NO: 1590841
ucucaagcaacugagucaa

SEQ ID NO: 1590843 - RNA, 19 nt, Artificial Sequence
  Description of Artificial Sequence: Synthetic oligonucleotide
  Sense strand starting at position 3518 of SEQ ID NO: 1560304
ugacucaguugcuugagaa

SEQ ID NO: 1590844 - RNA, 19 nt, Artificial Sequence
  Description of Artificial Sequence: Synthetic oligonucleotide
  Antisense strand to SEQ ID NO: 1590843
uucucaagcaacugaguca

SEQ ID NO: 1590845 - RNA, 19 nt, Artificial Sequence
  Description of Artificial Sequence: Synthetic oligonucleotide
  Sense strand starting at position 3519 of SEQ ID NO: 1560304
gacucaguugcuugagaau

SEQ ID NO: 1590846 - RNA, 19 nt, Artificial Sequence
  Description of Artificial Sequence: Synthetic oligonucleotide
  Antisense strand to SEQ ID NO: 1590845
auucucaagcaacugaguc

SEQ ID NO: 1590847 - RNA, 19 nt, Artificial Sequence
  Description of Artificial Sequence: Synthetic oligonucleotide
  Sense strand starting at position 3601 of SEQ ID NO: 1560304
ucacguauuccuuauguga

SEQ ID NO: 1590848 - RNA, 19 nt, Artificial Sequence
  Description of Artificial Sequence: Synthetic oligonucleotide
  Antisense strand to SEQ ID NO: 1590847
ucacauaaggaauacguga

SEQ ID NO: 1590849 - RNA, 19 nt, Artificial Sequence
  Description of Artificial Sequence: Synthetic oligonucleotide
  Sense strand starting at position 3604 of SEQ ID NO: 1560304
cguauuccuuaugugaaua

SEQ ID NO: 1590850 - RNA, 19 nt, Artificial Sequence
  Description of Artificial Sequence: Synthetic oligonucleotide
  Antisense strand to SEQ ID NO: 1590849
uauucacauaaggaauacg

SEQ ID NO: 1590851 - RNA, 19 nt, Artificial Sequence
  Description of Artificial Sequence: Synthetic oligonucleotide
  Sense strand starting at position 3802 of SEQ ID NO: 1560304
uuuaauuucgcccaggcga

SEQ ID NO: 1590852 - RNA, 19 nt, Artificial Sequence
  Description of Artificial Sequence: Synthetic oligonucleotide
  Antisense strand to SEQ ID NO: 1590851
ucgccugggcgaaauuaaa

SEQ ID NO: 1590853 - RNA, 19 nt, Artificial Sequence
  Description of Artificial Sequence: Synthetic oligonucleotide
  Sense strand starting at position 3852 of SEQ ID NO: 1560304
cucccucuuuccuuguaga

SEQ ID NO: 1590854 - RNA, 19 nt, Artificial Sequence
  Description of Artificial Sequence: Synthetic oligonucleotide
  Antisense strand to SEQ ID NO: 1590853
ucuacaaggaaagagggag

SEQ ID NO: 1590855 - RNA, 19 nt, Artificial Sequence
  Description of Artificial Sequence: Synthetic oligonucleotide
  Sense strand starting at position 3962 of SEQ ID NO: 1560304
cugacuuccucacccagua

SEQ ID NO: 1590856 - RNA, 19 nt, Artificial Sequence
  Description of Artificial Sequence: Synthetic oligonucleotide
  Antisense strand to SEQ ID NO: 1590855
uacugggugaggaagucag

SEQ ID NO: 1590857 - RNA, 19 nt, Artificial Sequence
  Description of Artificial Sequence: Synthetic oligonucleotide
  Sense strand starting at position 371 of SEQ ID NO: 1560305
gggccagaaugccuuuaga

SEQ ID NO: 1590858 - RNA, 19 nt, Artificial Sequence
  Description of Artificial Sequence: Synthetic oligonucleotide
  Antisense strand to SEQ ID NO: 1590857
ucuaaaggcauucuggccc

SEQ ID NO: 1590859 - RNA, 19 nt, Artificial Sequence
  Description of Artificial Sequence: Synthetic oligonucleotide
  Sense strand starting at position 441 of SEQ ID NO: 1560305
guaggcuuaccuuguccaa

SEQ ID NO: 1590860 - RNA, 19 nt, Artificial Sequence
  Description of Artificial Sequence: Synthetic oligonucleotide
  Antisense strand to SEQ ID NO: 1590859
uuggacaagguaagccuac

SEQ ID NO: 1590861 - RNA, 19 nt, Artificial Sequence
  Description of Artificial Sequence: Synthetic oligonucleotide
  Sense strand starting at position 443 of SEQ ID NO: 1560305
aggcuuaccuuguccaaag

SEQ ID NO: 1590862 - RNA, 19 nt, Artificial Sequence
  Description of Artificial Sequence: Synthetic oligonucleotide
  Antisense strand to SEQ ID NO: 1590861
cuuuggacaagguaagccu

SEQ ID NO: 1590863 - RNA, 19 nt, Artificial Sequence
  Description of Artificial Sequence: Synthetic oligonucleotide
  Sense strand starting at position 444 of SEQ ID NO: 1560305
ggcuuaccuuguccaaagu

SEQ ID NO: 1590864 - RNA, 19 nt, Artificial Sequence
  Description of Artificial Sequence: Synthetic oligonucleotide
  Antisense strand to SEQ ID NO: 1590863
acuuuggacaagguaagcc

SEQ ID NO: 1590865 - RNA, 19 nt, Artificial Sequence
  Description of Artificial Sequence: Synthetic oligonucleotide
  Sense strand starting at position 900 of SEQ ID NO: 1560305
gaugucuccugauggagga

SEQ ID NO: 1590866 - RNA, 19 nt, Artificial Sequence
  Description of Artificial Sequence: Synthetic oligonucleotide
  Antisense strand to SEQ ID NO: 1590865
uccuccaucaggagacauc

SEQ ID NO: 1590867 - RNA, 19 nt, Artificial Sequence
  Description of Artificial Sequence: Synthetic oligonucleotide
  Sense strand starting at position 901 of SEQ ID NO: 1560305
augucuccugauggaggaa

SEQ ID NO: 1590868 - RNA, 19 nt, Artificial Sequence
  Description of Artificial Sequence: Synthetic oligonucleotide
  Antisense strand to SEQ ID NO: 1590867
uuccuccaucaggagacau

SEQ ID NO: 1590869 - RNA, 19 nt, Artificial Sequence
  Description of Artificial Sequence: Synthetic oligonucleotide
  Sense strand starting at position 1021 of SEQ ID NO: 1560305
acucuuggguuccuugaau

SEQ ID NO: 1590870 - RNA, 19 nt, Artificial Sequence
  Description of Artificial Sequence: Synthetic oligonucleotide
  Antisense strand to SEQ ID NO: 1590869
auucaaggaacccaagagu

SEQ ID NO: 1590871 - RNA, 19 nt, Artificial Sequence
  Description of Artificial Sequence: Synthetic oligonucleotide
  Sense strand starting at position 1074 of SEQ ID NO: 1560305
gaacccugacucuggguua

SEQ ID NO: 1590872 - RNA, 19 nt, Artificial Sequence
  Description of Artificial Sequence: Synthetic oligonucleotide
  Antisense strand to SEQ ID NO: 1590871
uaacccagagucaggguuc

SEQ ID NO: 1590873 - RNA, 19 nt, Artificial Sequence
  Description of Artificial Sequence: Synthetic oligonucleotide
  Sense strand starting at position 1077 of SEQ ID NO: 1560305
cccugacucuggguuacau

SEQ ID NO: 1590874 - RNA, 19 nt, Artificial Sequence
  Description of Artificial Sequence: Synthetic oligonucleotide
  Antisense strand to SEQ ID NO: 1590873
auguaacccagagucaggg

SEQ ID NO: 1590875 - RNA, 19 nt, Artificial Sequence
  Description of Artificial Sequence: Synthetic oligonucleotide
  Sense strand starting at position 1229 of SEQ ID NO: 1560305
uggugagucaucuggugac

SEQ ID NO: 1590876 - RNA, 19 nt, Artificial Sequence
  Description of Artificial Sequence: Synthetic oligonucleotide
  Antisense strand to SEQ ID NO: 1590875
gucaccagaugacucacca

SEQ ID NO: 1590877 - RNA, 19 nt, Artificial Sequence
  Description of Artificial Sequence: Synthetic oligonucleotide
  Sense strand starting at position 1233 of SEQ ID NO: 1560305
gagucaucuggugacucau

SEQ ID NO: 1590878 - RNA, 19 nt, Artificial Sequence
  Description of Artificial Sequence: Synthetic oligonucleotide
  Antisense strand to SEQ ID NO: 1590877
augagucaccagaugacuc

SEQ ID NO: 1590879 - RNA, 19 nt, Artificial Sequence
  Description of Artificial Sequence: Synthetic oligonucleotide
  Sense strand starting at position 1481 of SEQ ID NO: 1560305
augcaaugcccugaucuca

SEQ ID NO: 1590880 - RNA, 19 nt, Artificial Sequence
  Description of Artificial Sequence: Synthetic oligonucleotide
  Antisense strand to SEQ ID NO: 1590879
ugagaucagggcauugcau

SEQ ID NO: 1590881 - RNA, 19 nt, Artificial Sequence
  Description of Artificial Sequence: Synthetic oligonucleotide
  Sense strand starting at position 1613 of SEQ ID NO: 1560305
caccucaagugcuaagaga

SEQ ID NO: 1590882 - RNA, 19 nt, Artificial Sequence
  Description of Artificial Sequence: Synthetic oligonucleotide
  Antisense strand to SEQ ID NO: 1590881
ucucuuagcacuugaggug

SEQ ID NO: 1590883 - RNA, 19 nt, Artificial Sequence
  Description of Artificial Sequence: Synthetic oligonucleotide
  Sense strand starting at position 1621 of SEQ ID NO: 1560305
gugcuaagagaucacuuau

SEQ ID NO: 1590884 - RNA, 19 nt, Artificial Sequence
  Description of Artificial Sequence: Synthetic oligonucleotide
  Antisense strand to SEQ ID NO: 1590883
auaagugaucucuuagcac

SEQ ID NO: 1590885 - RNA, 19 nt, Artificial Sequence
  Description of Artificial Sequence: Synthetic oligonucleotide
  Sense strand starting at position 2178 of SEQ ID NO: 1560305
augagaaacucuuggaaug

SEQ ID NO: 1590886 - RNA, 19 nt, Artificial Sequence
  Description of Artificial Sequence: Synthetic oligonucleotide
  Antisense strand to SEQ ID NO: 1590885
cauuccaagaguuucucau

SEQ ID NO: 1590887 - RNA, 19 nt, Artificial Sequence
  Description of Artificial Sequence: Synthetic oligonucleotide
  Sense strand starting at position 2280 of SEQ ID NO: 1560305
gaugucugcuuucccugau

SEQ ID NO: 1590888 - RNA, 19 nt, Artificial Sequence
  Description of Artificial Sequence: Synthetic oligonucleotide
  Antisense strand to SEQ ID NO: 1590887
aucagggaaagcagacauc

SEQ ID NO: 1590889 - RNA, 19 nt, Artificial Sequence
  Description of Artificial Sequence: Synthetic oligonucleotide
  Sense strand starting at position 2283 of SEQ ID NO: 1560305
gucugcuuucccugaugga

SEQ ID NO: 1590890 - RNA, 19 nt, Artificial Sequence
  Description of Artificial Sequence: Synthetic oligonucleotide
  Antisense strand to SEQ ID NO: 1590889
uccaucagggaaagcagac

SEQ ID NO: 1590891 - RNA, 19 nt, Artificial Sequence
  Description of Artificial Sequence: Synthetic oligonucleotide
  Sense strand starting at position 2332 of SEQ ID NO: 1560305
aggccagauuucuguggca

SEQ ID NO: 1590892 - RNA, 19 nt, Artificial Sequence
  Description of Artificial Sequence: Synthetic oligonucleotide
  Antisense strand to SEQ ID NO: 1590891
ugccacagaaaucuggccu

SEQ ID NO: 1590893 - RNA, 19 nt, Artificial Sequence
  Description of Artificial Sequence: Synthetic oligonucleotide
  Sense strand starting at position 2334 of SEQ ID NO: 1560305
gccagauuucuguggcaug

SEQ ID NO: 1590894 - RNA, 19 nt, Artificial Sequence
  Description of Artificial Sequence: Synthetic oligonucleotide
  Antisense strand to SEQ ID NO: 1590893
caugccacagaaaucuggc

SEQ ID NO: 1590895 - RNA, 19 nt, Artificial Sequence
  Description of Artificial Sequence: Synthetic oligonucleotide
  Sense strand starting at position 2345 of SEQ ID NO: 1560305
guggcauggacuugagauu

SEQ ID NO: 1590896 - RNA, 19 nt, Artificial Sequence
  Description of Artificial Sequence: Synthetic oligonucleotide
  Antisense strand to SEQ ID NO: 1590895
aaucucaaguccaugccac

SEQ ID NO: 1590897 - RNA, 19 nt, Artificial Sequence
  Description of Artificial Sequence: Synthetic oligonucleotide
  Sense strand starting at position 2356 of SEQ ID NO: 1560305
uugagauugggcuggugaa

SEQ ID NO: 1590898 - RNA, 19 nt, Artificial Sequence
  Description of Artificial Sequence: Synthetic oligonucleotide
  Antisense strand to SEQ ID NO: 1590897
uucaccagcccaaucucaa

SEQ ID NO: 1590899 - RNA, 19 nt, Artificial Sequence
  Description of Artificial Sequence: Synthetic oligonucleotide
  Sense strand starting at position 2357 of SEQ ID NO: 1560305
ugagauugggcuggugaag

SEQ ID NO: 1590900 - RNA, 19 nt, Artificial Sequence
  Description of Artificial Sequence: Synthetic oligonucleotide
  Antisense strand to SEQ ID NO: 1590899
cuucaccagcccaaucuca

SEQ ID NO: 1590901 - RNA, 19 nt, Artificial Sequence
  Description of Artificial Sequence: Synthetic oligonucleotide
  Sense strand starting at position 2407 of SEQ ID NO: 1560305
agaugaaauuugugaaacu

SEQ ID NO: 1590902 - RNA, 19 nt, Artificial Sequence
  Description of Artificial Sequence: Synthetic oligonucleotide
  Antisense strand to SEQ ID NO: 1590901
aguuucacaaauuucaucu

SEQ ID NO: 1590903 - RNA, 19 nt, Artificial Sequence
  Description of Artificial Sequence: Synthetic oligonucleotide
  Sense strand starting at position 2408 of SEQ ID NO: 1560305
gaugaaauuugugaaacuc

SEQ ID NO: 1590904 - RNA, 19 nt, Artificial Sequence
  Description of Artificial Sequence: Synthetic oligonucleotide
  Antisense strand to SEQ ID NO: 1590903
gaguuucacaaauuucauc

SEQ ID NO: 1590905 - RNA, 19 nt, Artificial Sequence
  Description of Artificial Sequence: Synthetic oligonucleotide
  Sense strand starting at position 2530 of SEQ ID NO: 1560305
ggaaacccgucucuaucaa

SEQ ID NO: 1590906 - RNA, 19 nt, Artificial Sequence
  Description of Artificial Sequence: Synthetic oligonucleotide
  Antisense strand to SEQ ID NO: 1590905
uugauagagacggguuucc

SEQ ID NO: 1590907 - RNA, 19 nt, Artificial Sequence
  Description of Artificial Sequence: Synthetic oligonucleotide
  Sense strand starting at position 2823 of SEQ ID NO: 1560305
cagugaccuugagccaauu

SEQ ID NO: 1590908 - RNA, 19 nt, Artificial Sequence
  Description of Artificial Sequence: Synthetic oligonucleotide
  Antisense strand to SEQ ID NO: 1590907
aauuggcucaaggucacug

SEQ ID NO: 1590909 - RNA, 19 nt, Artificial Sequence
  Description of Artificial Sequence: Synthetic oligonucleotide
  Sense strand starting at position 2860 of SEQ ID NO: 1560305
ccaguaucuuagucuaugu

SEQ ID NO: 1590910 - RNA, 19 nt, Artificial Sequence
  Description of Artificial Sequence: Synthetic oligonucleotide
  Antisense strand to SEQ ID NO: 1590909
acauagacuaagauacugg

SEQ ID NO: 1590911 - RNA, 19 nt, Artificial Sequence
  Description of Artificial Sequence: Synthetic oligonucleotide
  Sense strand starting at position 2865 of SEQ ID NO: 1560305
aucuuagucuauguugaga

SEQ ID NO: 1590912 - RNA, 19 nt, Artificial Sequence
  Description of Artificial Sequence: Synthetic oligonucleotide
  Antisense strand to SEQ ID NO: 1590911
ucucaacauagacuaagau

SEQ ID NO: 1590913 - RNA, 19 nt, Artificial Sequence
  Description of Artificial Sequence: Synthetic oligonucleotide
  Sense strand starting at position 2868 of SEQ ID NO: 1560305
uuagucuauguugagagua

SEQ ID NO: 1590914 - RNA, 19 nt, Artificial Sequence
  Description of Artificial Sequence: Synthetic oligonucleotide
  Antisense strand to SEQ ID NO: 1590913
uacucucaacauagacuaa

SEQ ID NO: 1590915 - RNA, 19 nt, Artificial Sequence
  Description of Artificial Sequence: Synthetic oligonucleotide
  Sense strand starting at position 2926 of SEQ ID NO: 1560305
ucugauacuuaugcugaau

SEQ ID NO: 1590916 - RNA, 19 nt, Artificial Sequence
  Description of Artificial Sequence: Synthetic oligonucleotide
  Antisense strand to SEQ ID NO: 1590915
auucagcauaaguaucaga

SEQ ID NO: 1590917 - RNA, 19 nt, Artificial Sequence
  Description of Artificial Sequence: Synthetic oligonucleotide
  Sense strand starting at position 2939 of SEQ ID NO: 1560305
cugaaugaauaagguaaua

SEQ ID NO: 1590918 - RNA, 19 nt, Artificial Sequence
  Description of Artificial Sequence: Synthetic oligonucleotide
  Antisense strand to SEQ ID NO: 1590917
uauuaccuuauucauucag

SEQ ID NO: 1590919 - RNA, 19 nt, Artificial Sequence
  Description of Artificial Sequence: Synthetic oligonucleotide
  Sense strand starting at position 3011 of SEQ ID NO: 1560305
cauguacucugaucuggga

SEQ ID NO: 1590920 - RNA, 19 nt, Artificial Sequence
  Description of Artificial Sequence: Synthetic oligonucleotide
  Antisense strand to SEQ ID NO: 1590919
ucccagaucagaguacaug

SEQ ID NO: 1590921 - RNA, 19 nt, Artificial Sequence
  Description of Artificial Sequence: Synthetic oligonucleotide
  Sense strand starting at position 3013 of SEQ ID NO: 1560305
uguacucugaucugggagu

SEQ ID NO: 1590922 - RNA, 19 nt, Artificial Sequence
  Description of Artificial Sequence: Synthetic oligonucleotide
  Antisense strand to SEQ ID NO: 1590921
acucccagaucagaguaca

SEQ ID NO: 1590923 - RNA, 19 nt, Artificial Sequence
  Description of Artificial Sequence: Synthetic oligonucleotide
  Sense strand starting at position 3015 of SEQ ID NO: 1560305
uacucugaucugggaguua

SEQ ID NO: 1590924 - RNA, 19 nt, Artificial Sequence
  Description of Artificial Sequence: Synthetic oligonucleotide
  Antisense strand to SEQ ID NO: 1590923
uaacucccagaucagagua

SEQ ID NO: 1590925 - RNA, 19 nt, Artificial Sequence
  Description of Artificial Sequence: Synthetic oligonucleotide
  Sense strand starting at position 3068 of SEQ ID NO: 1560305
uggagcuuguauucuagua

SEQ ID NO: 1590926 - RNA, 19 nt, Artificial Sequence
  Description of Artificial Sequence: Synthetic oligonucleotide
  Antisense strand to SEQ ID NO: 1590925
uacuagaauacaagcucca

SEQ ID NO: 1590927 - RNA, 19 nt, Artificial Sequence
  Description of Artificial Sequence: Synthetic oligonucleotide
  Sense strand starting at position 3073 of SEQ ID NO: 1560305
cuuguauucuaguagagga

SEQ ID NO: 1590928 - RNA, 19 nt, Artificial Sequence
  Description of Artificial Sequence: Synthetic oligonucleotide
  Antisense strand to SEQ ID NO: 1590927
uccucuacuagaauacaag

SEQ ID NO: 1590929 - RNA, 19 nt, Artificial Sequence
  Description of Artificial Sequence: Synthetic oligonucleotide
  Sense strand starting at position 3121 of SEQ ID NO: 1560305
agauaaaucucagauaagg

SEQ ID NO: 1590930 - RNA, 19 nt, Artificial Sequence
  Description of Artificial Sequence: Synthetic oligonucleotide
  Antisense strand to SEQ ID NO: 1590929
ccuuaucugagauuuaucu

SEQ ID NO: 1590931 - RNA, 19 nt, Artificial Sequence
  Description of Artificial Sequence: Synthetic oligonucleotide
  Sense strand starting at position 3500 of SEQ ID NO: 1560305
caaacagagugauggagau

SEQ ID NO: 1590932 - RNA, 19 nt, Artificial Sequence
  Description of Artificial Sequence: Synthetic oligonucleotide
  Antisense strand to SEQ ID NO: 1590931
aucuccaucacucuguuug

SEQ ID NO: 1590933 - RNA, 19 nt, Artificial Sequence
  Description of Artificial Sequence: Synthetic oligonucleotide
  Sense strand starting at position 3824 of SEQ ID NO: 1560305
guggaaagccauuagguuu

SEQ ID NO: 1590934 - RNA, 19 nt, Artificial Sequence
  Description of Artificial Sequence: Synthetic oligonucleotide
  Antisense strand to SEQ ID NO: 1590933
aaaccuaauggcuuuccac

SEQ ID NO: 1590935 - RNA, 19 nt, Artificial Sequence
  Description of Artificial Sequence: Synthetic oligonucleotide
  Sense strand starting at position 3844 of SEQ ID NO: 1560305
aacagaguguaguaccaaa

SEQ ID NO: 1590936 - RNA, 19 nt, Artificial Sequence
  Description of Artificial Sequence: Synthetic oligonucleotide
  Antisense strand to SEQ ID NO: 1590935
uuugguacuacacucuguu

SEQ ID NO: 1590937 - RNA, 19 nt, Artificial Sequence
  Description of Artificial Sequence: Synthetic oligonucleotide
  Sense strand starting at position 642 of SEQ ID NO: 1560306
cagaauagggaguguuaau

SEQ ID NO: 1590938 - RNA, 19 nt, Artificial Sequence
  Description of Artificial Sequence: Synthetic oligonucleotide
  Antisense strand to SEQ ID NO: 1590937
auuaacacucccuauucug

SEQ ID NO: 1590939 - RNA, 19 nt, Artificial Sequence
  Description of Artificial Sequence: Synthetic oligonucleotide
  Sense strand starting at position 649 of SEQ ID NO: 1560306
gggaguguuaaugguuaau

SEQ ID NO: 1590940 - RNA, 19 nt, Artificial Sequence
  Description of Artificial Sequence: Synthetic oligonucleotide
  Antisense strand to SEQ ID NO: 1590939
auuaaccauuaacacuccc

SEQ ID NO: 1590941 - RNA, 19 nt, Artificial Sequence
  Description of Artificial Sequence: Synthetic oligonucleotide
  Sense strand starting at position 651 of SEQ ID NO: 1560306
gaguguuaaugguuaauac

SEQ ID NO: 1590942 - RNA, 19 nt, Artificial Sequence
  Description of Artificial Sequence: Synthetic oligonucleotide
  Antisense strand to SEQ ID NO: 1590941
guauuaaccauuaacacuc

SEQ ID NO: 1590943 - RNA, 19 nt, Artificial Sequence
  Description of Artificial Sequence: Synthetic oligonucleotide
  Sense strand starting at position 661 of SEQ ID NO: 1560306
gguuaauaccauugccaac

SEQ ID NO: 1590944 - RNA, 19 nt, Artificial Sequence
  Description of Artificial Sequence: Synthetic oligonucleotide
  Antisense strand to SEQ ID NO: 1590943
guuggcaaugguauuaacc

SEQ ID NO: 1590945 - RNA, 19 nt, Artificial Sequence
  Description of Artificial Sequence: Synthetic oligonucleotide
  Sense strand starting at position 854 of SEQ ID NO: 1560306
gcuguuuaggcauacaaag

SEQ ID NO: 1590946 - RNA, 19 nt, Artificial Sequence
  Description of Artificial Sequence: Synthetic oligonucleotide
  Antisense strand to SEQ ID NO: 1590945
cuuuguaugccuaaacagc

SEQ ID NO: 1590947 - RNA, 19 nt, Artificial Sequence
  Description of Artificial Sequence: Synthetic oligonucleotide
  Sense strand starting at position 878 of SEQ ID NO: 1560306
agucaaagugcuuagguuu

SEQ ID NO: 1590948 - RNA, 19 nt, Artificial Sequence
  Description of Artificial Sequence: Synthetic oligonucleotide
  Antisense strand to SEQ ID NO: 1590947
aaaccuaagcacuuugacu

SEQ ID NO: 1590949 - RNA, 19 nt, Artificial Sequence
  Description of Artificial Sequence: Synthetic oligonucleotide
  Sense strand starting at position 881 of SEQ ID NO: 1560306
caaagugcuuagguuuaaa

SEQ ID NO: 1590950 - RNA, 19 nt, Artificial Sequence
  Description of Artificial Sequence: Synthetic oligonucleotide
  Antisense strand to SEQ ID NO: 1590949
uuuaaaccuaagcacuuug

SEQ ID NO: 1590951 - RNA, 19 nt, Artificial Sequence
  Description of Artificial Sequence: Synthetic oligonucleotide
  Sense strand starting at position 1370 of SEQ ID NO: 1560306
cagacugucuggcuugaaa

SEQ ID NO: 1590952 - RNA, 19 nt, Artificial Sequence
  Description of Artificial Sequence: Synthetic oligonucleotide
  Antisense strand to SEQ ID NO: 1590951
uuucaagccagacagucug

SEQ ID NO: 1590953 - RNA, 19 nt, Artificial Sequence
  Description of Artificial Sequence: Synthetic oligonucleotide
  Sense strand starting at position 1372 of SEQ ID NO: 1560306
gacugucuggcuugaaauc

SEQ ID NO: 1590954 - RNA, 19 nt, Artificial Sequence
  Description of Artificial Sequence: Synthetic oligonucleotide
  Antisense strand to SEQ ID NO: 1590953
gauuucaagccagacaguc

SEQ ID NO: 1590955 - RNA, 19 nt, Artificial Sequence
  Description of Artificial Sequence: Synthetic oligonucleotide
  Sense strand starting at position 1501 of SEQ ID NO: 1560306
uguugugacaauuggauac

SEQ ID NO: 1590956 - RNA, 19 nt, Artificial Sequence
  Description of Artificial Sequence: Synthetic oligonucleotide
  Antisense strand to SEQ ID NO: 1590955
guauccaauugucacaaca

SEQ ID NO: 1590957 - RNA, 19 nt, Artificial Sequence
  Description of Artificial Sequence: Synthetic oligonucleotide
  Sense strand starting at position 1512 of SEQ ID NO: 1560306
uuggauacacucuauguuu

SEQ ID NO: 1590958 - RNA, 19 nt, Artificial Sequence
  Description of Artificial Sequence: Synthetic oligonucleotide
  Antisense strand to SEQ ID NO: 1590957
aaacauagaguguauccaa

SEQ ID NO: 1590959 - RNA, 19 nt, Artificial Sequence
  Description of Artificial Sequence: Synthetic oligonucleotide
  Sense strand starting at position 1514 of SEQ ID NO: 1560306
ggauacacucuauguuuaa

SEQ ID NO: 1590960 - RNA, 19 nt, Artificial Sequence
  Description of Artificial Sequence: Synthetic oligonucleotide
  Antisense strand to SEQ ID NO: 1590959
uuaaacauagaguguaucc

SEQ ID NO: 1590961 - RNA, 19 nt, Artificial Sequence
  Description of Artificial Sequence: Synthetic oligonucleotide
  Sense strand starting at position 1547 of SEQ ID NO: 1560306
ugcuaagugggcuaugauc

SEQ ID NO: 1590962 - RNA, 19 nt, Artificial Sequence
  Description of Artificial Sequence: Synthetic oligonucleotide
  Antisense strand to SEQ ID NO: 1590961
gaucauagcccacuuagca

SEQ ID NO: 1590963 - RNA, 19 nt, Artificial Sequence
  Description of Artificial Sequence: Synthetic oligonucleotide
  Sense strand starting at position 1549 of SEQ ID NO: 1560306
cuaagugggcuaugaucau

SEQ ID NO: 1590964 - RNA, 19 nt, Artificial Sequence
  Description of Artificial Sequence: Synthetic oligonucleotide
  Antisense strand to SEQ ID NO: 1590963
augaucauagcccacuuag

SEQ ID NO: 1590965 - RNA, 19 nt, Artificial Sequence
  Description of Artificial Sequence: Synthetic oligonucleotide
  Sense strand starting at position 1602 of SEQ ID NO: 1560306
gaauaucagccucaagagu

SEQ ID NO: 1590966 - RNA, 19 nt, Artificial Sequence
  Description of Artificial Sequence: Synthetic oligonucleotide
  Antisense strand to SEQ ID NO: 1590965
acucuugaggcugauauuc

SEQ ID NO: 1590967 - RNA, 19 nt, Artificial Sequence
  Description of Artificial Sequence: Synthetic oligonucleotide
  Sense strand starting at position 1654 of SEQ ID NO: 1560306
uccucuagugccuagaaca

SEQ ID NO: 1590968 - RNA, 19 nt, Artificial Sequence
  Description of Artificial Sequence: Synthetic oligonucleotide
  Antisense strand to SEQ ID NO: 1590967
uguucuaggcacuagagga

SEQ ID NO: 1590969 - RNA, 19 nt, Artificial Sequence
  Description of Artificial Sequence: Synthetic oligonucleotide
  Sense strand starting at position 1737 of SEQ ID NO: 1560306
gauggacuucccugagcua

SEQ ID NO: 1590970 - RNA, 19 nt, Artificial Sequence
  Description of Artificial Sequence: Synthetic oligonucleotide
  Antisense strand to SEQ ID NO: 1590969
uagcucagggaaguccauc

SEQ ID NO: 1590971 - RNA, 19 nt, Artificial Sequence
  Description of Artificial Sequence: Synthetic oligonucleotide
  Sense strand starting at position 1738 of SEQ ID NO: 1560306
auggacuucccugagcuau

SEQ ID NO: 1590972 - RNA, 19 nt, Artificial Sequence
  Description of Artificial Sequence: Synthetic oligonucleotide
  Antisense strand to SEQ ID NO: 1590971
auagcucagggaaguccau

SEQ ID NO: 1590973 - RNA, 19 nt, Artificial Sequence
  Description of Artificial Sequence: Synthetic oligonucleotide
  Sense strand starting at position 1744 of SEQ ID NO: 1560306
uucccugagcuauggaauu

SEQ ID NO: 1590974 - RNA, 19 nt, Artificial Sequence
  Description of Artificial Sequence: Synthetic oligonucleotide
  Antisense strand to SEQ ID NO: 1590973
aauuccauagcucagggaa

SEQ ID NO: 1590975 - RNA, 19 nt, Artificial Sequence
  Description of Artificial Sequence: Synthetic oligonucleotide
  Sense strand starting at position 1764 of SEQ ID NO: 1560306
ugucaaagguucccugaau

SEQ ID NO: 1590976 - RNA, 19 nt, Artificial Sequence
  Description of Artificial Sequence: Synthetic oligonucleotide
  Antisense strand to SEQ ID NO: 1590975
auucagggaaccuuugaca

SEQ ID NO: 1590977 - RNA, 19 nt, Artificial Sequence
  Description of Artificial Sequence: Synthetic oligonucleotide
  Sense strand starting at position 1765 of SEQ ID NO: 1560306
gucaaagguucccugaaug

SEQ ID NO: 1590978 - RNA, 19 nt, Artificial Sequence
  Description of Artificial Sequence: Synthetic oligonucleotide
  Antisense strand to SEQ ID NO: 1590977
cauucagggaaccuuugac

SEQ ID NO: 1590979 - RNA, 19 nt, Artificial Sequence
  Description of Artificial Sequence: Synthetic oligonucleotide
  Sense strand starting at position 1796 of SEQ ID NO: 1560306
gcauccagucuggacuuau

SEQ ID NO: 1590980 - RNA, 19 nt, Artificial Sequence
  Description of Artificial Sequence: Synthetic oligonucleotide
  Antisense strand to SEQ ID NO: 1590979
auaaguccagacuggaugc

SEQ ID NO: 1590981 - RNA, 19 nt, Artificial Sequence
  Description of Artificial Sequence: Synthetic oligonucleotide
  Sense strand starting at position 1808 of SEQ ID NO: 1560306
gacuuaugaucucuuggcu

SEQ ID NO: 1590982 - RNA, 19 nt, Artificial Sequence
  Description of Artificial Sequence: Synthetic oligonucleotide
  Antisense strand to SEQ ID NO: 1590981
agccaagagaucauaaguc

SEQ ID NO: 1590983 - RNA, 19 nt, Artificial Sequence
  Description of Artificial Sequence: Synthetic oligonucleotide
  Sense strand starting at position 2032 of SEQ ID NO: 1560306
gagucagaguugcucaaug

SEQ ID NO: 1590984 - RNA, 19 nt, Artificial Sequence
  Description of Artificial Sequence: Synthetic oligonucleotide
  Antisense strand to SEQ ID NO: 1590983
cauugagcaacucugacuc

SEQ ID NO: 1590985 - RNA, 19 nt, Artificial Sequence
  Description of Artificial Sequence: Synthetic oligonucleotide
  Sense strand starting at position 2076 of SEQ ID NO: 1560306
gcugacuugcugcaacuaa

SEQ ID NO: 1590986 - RNA, 19 nt, Artificial Sequence
  Description of Artificial Sequence: Synthetic oligonucleotide
  Antisense strand to SEQ ID NO: 1590985
uuaguugcagcaagucagc

SEQ ID NO: 1590987 - RNA, 19 nt, Artificial Sequence
  Description of Artificial Sequence: Synthetic oligonucleotide
  Sense strand starting at position 2141 of SEQ ID NO: 1560306
agaaguuaaucugccuaau

SEQ ID NO: 1590988 - RNA, 19 nt, Artificial Sequence
  Description of Artificial Sequence: Synthetic oligonucleotide
  Antisense strand to SEQ ID NO: 1590987
auuaggcagauuaacuucu

SEQ ID NO: 1590989 - RNA, 19 nt, Artificial Sequence
  Description of Artificial Sequence: Synthetic oligonucleotide
  Sense strand starting at position 2144 of SEQ ID NO: 1560306
aguuaaucugccuaaugua

SEQ ID NO: 1590990 - RNA, 19 nt, Artificial Sequence
  Description of Artificial Sequence: Synthetic oligonucleotide
  Antisense strand to SEQ ID NO: 1590989
uacauuaggcagauuaacu

SEQ ID NO: 1590991 - RNA, 19 nt, Artificial Sequence
  Description of Artificial Sequence: Synthetic oligonucleotide
  Sense strand starting at position 2319 of SEQ ID NO: 1560306
cccagucucccguauaaag

SEQ ID NO: 1590992 - RNA, 19 nt, Artificial Sequence
  Description of Artificial Sequence: Synthetic oligonucleotide
  Antisense strand to SEQ ID NO: 1590991
cuuuauacgggagacuggg

SEQ ID NO: 1590993 - RNA, 19 nt, Artificial Sequence
  Description of Artificial Sequence: Synthetic oligonucleotide
  Sense strand starting at position 2404 of SEQ ID NO: 1560306
uuaucauguuaaccuugua

SEQ ID NO: 1590994 - RNA, 19 nt, Artificial Sequence
  Description of Artificial Sequence: Synthetic oligonucleotide
  Antisense strand to SEQ ID NO: 1590993
uacaagguuaacaugauaa

SEQ ID NO: 1590995 - RNA, 19 nt, Artificial Sequence
  Description of Artificial Sequence: Synthetic oligonucleotide
  Sense strand starting at position 2407 of SEQ ID NO: 1560306
ucauguuaaccuuguaaag

SEQ ID NO: 1590996 - RNA, 19 nt, Artificial Sequence
  Description of Artificial Sequence: Synthetic oligonucleotide
  Antisense strand to SEQ ID NO: 1590995
cuuuacaagguuaacauga

SEQ ID NO: 1590997 - RNA, 19 nt, Artificial Sequence
  Description of Artificial Sequence: Synthetic oligonucleotide
  Sense strand starting at position 2469 of SEQ ID NO: 1560306
cugagacuugcagaggagu

SEQ ID NO: 1590998 - RNA, 19 nt, Artificial Sequence
  Description of Artificial Sequence: Synthetic oligonucleotide
  Antisense strand to SEQ ID NO: 1590997
acuccucugcaagucucag

SEQ ID NO: 1590999 - RNA, 19 nt, Artificial Sequence
  Description of Artificial Sequence: Synthetic oligonucleotide
  Sense strand starting at position 2471 of SEQ ID NO: 1560306
gagacuugcagaggaguua

SEQ ID NO: 1591000 - RNA, 19 nt, Artificial Sequence
  Description of Artificial Sequence: Synthetic oligonucleotide
  Antisense strand to SEQ ID NO: 1590999
uaacuccucugcaagucuc

SEQ ID NO: 1591001 - RNA, 19 nt, Artificial Sequence
  Description of Artificial Sequence: Synthetic oligonucleotide
  Sense strand starting at position 2485 of SEQ ID NO: 1560306
aguuauaacuuguccaaga

SEQ ID NO: 1591002 - RNA, 19 nt, Artificial Sequence
  Description of Artificial Sequence: Synthetic oligonucleotide
  Antisense strand to SEQ ID NO: 1591001
ucuuggacaaguuauaacu

SEQ ID NO: 1591003 - RNA, 19 nt, Artificial Sequence
  Description of Artificial Sequence: Synthetic oligonucleotide
  Sense strand starting at position 2486 of SEQ ID NO: 1560306
guuauaacuuguccaagau

SEQ ID NO: 1591004 - RNA, 19 nt, Artificial Sequence
  Description of Artificial Sequence: Synthetic oligonucleotide
  Antisense strand to SEQ ID NO: 1591003
aucuuggacaaguuauaac

SEQ ID NO: 1591005 - RNA, 19 nt, Artificial Sequence
  Description of Artificial Sequence: Synthetic oligonucleotide
  Sense strand starting at position 2579 of SEQ ID NO: 1560306
agaucucaacucugucuga

SEQ ID NO: 1591006 - RNA, 19 nt, Artificial Sequence
  Description of Artificial Sequence: Synthetic oligonucleotide
  Antisense strand to SEQ ID NO: 1591005
ucagacagaguugagaucu

SEQ ID NO: 1591007 - RNA, 19 nt, Artificial Sequence
  Description of Artificial Sequence: Synthetic oligonucleotide
  Sense strand starting at position 2703 of SEQ ID NO: 1560306
guaguuuaucaagaaggug

SEQ ID NO: 1591008 - RNA, 19 nt, Artificial Sequence
  Description of Artificial Sequence: Synthetic oligonucleotide
  Antisense strand to SEQ ID NO: 1591007
caccuucuugauaaacuac

SEQ ID NO: 1591009 - RNA, 19 nt, Artificial Sequence
  Description of Artificial Sequence: Synthetic oligonucleotide
  Sense strand starting at position 3040 of SEQ ID NO: 1560306
aaguguagugacuggcaga

SEQ ID NO: 1591010 - RNA, 19 nt, Artificial Sequence
  Description of Artificial Sequence: Synthetic oligonucleotide
  Antisense strand to SEQ ID NO: 1591009
ucugccagucacuacacuu

SEQ ID NO: 1591011 - RNA, 19 nt, Artificial Sequence
  Description of Artificial Sequence: Synthetic oligonucleotide
  Sense strand starting at position 3506 of SEQ ID NO: 1560306
gagguuuaggccgagcaca

SEQ ID NO: 1591012 - RNA, 19 nt, Artificial Sequence
  Description of Artificial Sequence: Synthetic oligonucleotide
  Antisense strand to SEQ ID NO: 1591011
ugugcucggccuaaaccuc

SEQ ID NO: 1591013 - RNA, 19 nt, Artificial Sequence
  Description of Artificial Sequence: Synthetic oligonucleotide
  Sense strand starting at position 3823 of SEQ ID NO: 1560306
aaagaaauuuaauaggcga

SEQ ID NO: 1591014 - RNA, 19 nt, Artificial Sequence
  Description of Artificial Sequence: Synthetic oligonucleotide
  Antisense strand to SEQ ID NO: 1591013
ucgccuauuaaauuucuuu

SEQ ID NO: 1591015 - RNA, 19 nt, Artificial Sequence
  Description of Artificial Sequence: Synthetic oligonucleotide
  Sense strand starting at position 3935 of SEQ ID NO: 1560306
gcuuuagguggugauaucu

SEQ ID NO: 1591016 - RNA, 19 nt, Artificial Sequence
  Description of Artificial Sequence: Synthetic oligonucleotide
  Antisense strand to SEQ ID NO: 1591015
agauaucaccaccuaaagc

SEQ ID NO: 1591017 - RNA, 19 nt, Artificial Sequence
  Description of Artificial Sequence: Synthetic oligonucleotide
  Sense strand starting at position 592 of SEQ ID NO: 1560307
ucuggugugccugagcauu

SEQ ID NO: 1591018 - RNA, 19 nt, Artificial Sequence
  Description of Artificial Sequence: Synthetic oligonucleotide
  Antisense strand to SEQ ID NO: 1591017
aaugcucaggcacaccaga

SEQ ID NO: 1591019 - RNA, 19 nt, Artificial Sequence
  Description of Artificial Sequence: Synthetic oligonucleotide
  Sense strand starting at position 594 of SEQ ID NO: 1560307
uggugugccugagcauuua

SEQ ID NO: 1591020 - RNA, 19 nt, Artificial Sequence
  Description of Artificial Sequence: Synthetic oligonucleotide
  Antisense strand to SEQ ID NO: 1591019
uaaaugcucaggcacacca

SEQ ID NO: 1591021 - RNA, 19 nt, Artificial Sequence
  Description of Artificial Sequence: Synthetic oligonucleotide
  Sense strand starting at position 800 of SEQ ID NO: 1560307
gcagacuccuguuacccaa

SEQ ID NO: 1591022 - RNA, 19 nt, Artificial Sequence
  Description of Artificial Sequence: Synthetic oligonucleotide
  Antisense strand to SEQ ID NO: 1591021
uuggguaacaggagucugc

SEQ ID NO: 1591023 - RNA, 19 nt, Artificial Sequence
  Description of Artificial Sequence: Synthetic oligonucleotide
  Sense strand starting at position 972 of SEQ ID NO: 1560307
gcucuaagaugcccuggaa

SEQ ID NO: 1591024 - RNA, 19 nt, Artificial Sequence
  Description of Artificial Sequence: Synthetic oligonucleotide
  Antisense strand to SEQ ID NO: 1591023
uuccagggcaucuuagagc

SEQ ID NO: 1591025 - RNA, 19 nt, Artificial Sequence
  Description of Artificial Sequence: Synthetic oligonucleotide
  Sense strand starting at position 991 of SEQ ID NO: 1560307
ccgcaugcuuccucaggga

SEQ ID NO: 1591026 - RNA, 19 nt, Artificial Sequence
  Description of Artificial Sequence: Synthetic oligonucleotide
  Antisense strand to SEQ ID NO: 1591025
ucccugaggaagcaugcgg

SEQ ID NO: 1591027 - RNA, 19 nt, Artificial Sequence
  Description of Artificial Sequence: Synthetic oligonucleotide
  Sense strand starting at position 995 of SEQ ID NO: 1560307
augcuuccucagggacaca

SEQ ID NO: 1591028 - RNA, 19 nt, Artificial Sequence
  Description of Artificial Sequence: Synthetic oligonucleotide
  Antisense strand to SEQ ID NO: 1591027
ugugucccugaggaagcau

SEQ ID NO: 1591029 - RNA, 19 nt, Artificial Sequence
  Description of Artificial Sequence: Synthetic oligonucleotide
  Sense strand starting at position 1057 of SEQ ID NO: 1560307
cugaaacccaguggugaua

SEQ ID NO: 1591030 - RNA, 19 nt, Artificial Sequence
  Description of Artificial Sequence: Synthetic oligonucleotide
  Antisense strand to SEQ ID NO: 1591029
uaucaccacuggguuucag

SEQ ID NO: 1591031 - RNA, 19 nt, Artificial Sequence
  Description of Artificial Sequence: Synthetic oligonucleotide
  Sense strand starting at position 1059 of SEQ ID NO: 1560307
gaaacccaguggugauauu

SEQ ID NO: 1591032 - RNA, 19 nt, Artificial Sequence
  Description of Artificial Sequence: Synthetic oligonucleotide
  Antisense strand to SEQ ID NO: 1591031
aauaucaccacuggguuuc

SEQ ID NO: 1591033 - RNA, 19 nt, Artificial Sequence
  Description of Artificial Sequence: Synthetic oligonucleotide
  Sense strand starting at position 1230 of SEQ ID NO: 1560307
uagggaucuccuuguuguu

SEQ ID NO: 1591034 - RNA, 19 nt, Artificial Sequence
  Description of Artificial Sequence: Synthetic oligonucleotide
  Antisense strand to SEQ ID NO: 1591033
aacaacaaggagaucccua

SEQ ID NO: 1591035 - RNA, 19 nt, Artificial Sequence
  Description of Artificial Sequence: Synthetic oligonucleotide
  Sense strand starting at position 1287 of SEQ ID NO: 1560307
aacggagauuagggagaua

SEQ ID NO: 1591036 - RNA, 19 nt, Artificial Sequence
  Description of Artificial Sequence: Synthetic oligonucleotide
  Antisense strand to SEQ ID NO: 1591035
uaucucccuaaucuccguu

SEQ ID NO: 1591037 - RNA, 19 nt, Artificial Sequence
  Description of Artificial Sequence: Synthetic oligonucleotide
  Sense strand starting at position 1384 of SEQ ID NO: 1560307
uggagaaguccuggccucu

SEQ ID NO: 1591038 - RNA, 19 nt, Artificial Sequence
  Description of Artificial Sequence: Synthetic oligonucleotide
  Antisense strand to SEQ ID NO: 1591037
agaggccaggacuucucca

SEQ ID NO: 1591039 - RNA, 19 nt, Artificial Sequence
  Description of Artificial Sequence: Synthetic oligonucleotide
  Sense strand starting at position 1422 of SEQ ID NO: 1560307
caugucuuucuaugcgcua

SEQ ID NO: 1591040 - RNA, 19 nt, Artificial Sequence
  Description of Artificial Sequence: Synthetic oligonucleotide
  Antisense strand to SEQ ID NO: 1591039
uagcgcauagaaagacaug

SEQ ID NO: 1591041 - RNA, 19 nt, Artificial Sequence
  Description of Artificial Sequence: Synthetic oligonucleotide
  Sense strand starting at position 1425 of SEQ ID NO: 1560307
gucuuucuaugcgcuauau

SEQ ID NO: 1591042 - RNA, 19 nt, Artificial Sequence
  Description of Artificial Sequence: Synthetic oligonucleotide
  Antisense strand to SEQ ID NO: 1591041
auauagcgcauagaaagac

SEQ ID NO: 1591043 - RNA, 19 nt, Artificial Sequence
  Description of Artificial Sequence: Synthetic oligonucleotide
  Sense strand starting at position 1427 of SEQ ID NO: 1560307
cuuucuaugcgcuauauua

SEQ ID NO: 1591044 - RNA, 19 nt, Artificial Sequence
  Description of Artificial Sequence: Synthetic oligonucleotide
  Antisense strand to SEQ ID NO: 1591043
uaauauagcgcauagaaag

SEQ ID NO: 1591045 - RNA, 19 nt, Artificial Sequence
  Description of Artificial Sequence: Synthetic oligonucleotide
  Sense strand starting at position 1429 of SEQ ID NO: 1560307
uucuaugcgcuauauuaag

SEQ ID NO: 1591046 - RNA, 19 nt, Artificial Sequence
  Description of Artificial Sequence: Synthetic oligonucleotide
  Antisense strand to SEQ ID NO: 1591045
cuuaauauagcgcauagaa

SEQ ID NO: 1591047 - RNA, 19 nt, Artificial Sequence
  Description of Artificial Sequence: Synthetic oligonucleotide
  Sense strand starting at position 1787 of SEQ ID NO: 1560307
caaaguacuuaccgagaaa

SEQ ID NO: 1591048 - RNA, 19 nt, Artificial Sequence
  Description of Artificial Sequence: Synthetic oligonucleotide
  Antisense strand to SEQ ID NO: 1591047
uuucucgguaaguacuuug

SEQ ID NO: 1591049 - RNA, 19 nt, Artificial Sequence
  Description of Artificial Sequence: Synthetic oligonucleotide
  Sense strand starting at position 2087 of SEQ ID NO: 1560307
acguguacucgcucagcaa

SEQ ID NO: 1591050 - RNA, 19 nt, Artificial Sequence
  Description of Artificial Sequence: Synthetic oligonucleotide
  Antisense strand to SEQ ID NO: 1591049
uugcugagcgaguacacgu

SEQ ID NO: 1591051 - RNA, 19 nt, Artificial Sequence
  Description of Artificial Sequence: Synthetic oligonucleotide
  Sense strand starting at position 2090 of SEQ ID NO: 1560307
uguacucgcucagcaagaa

SEQ ID NO: 1591052 - RNA, 19 nt, Artificial Sequence
  Description of Artificial Sequence: Synthetic oligonucleotide
  Antisense strand to SEQ ID NO: 1591051
uucuugcugagcgaguaca

SEQ ID NO: 1591053 - RNA, 19 nt, Artificial Sequence
  Description of Artificial Sequence: Synthetic oligonucleotide
  Sense strand starting at position 2091 of SEQ ID NO: 1560307
guacucgcucagcaagaau

SEQ ID NO: 1591054 - RNA, 19 nt, Artificial Sequence
  Description of Artificial Sequence: Synthetic oligonucleotide
  Antisense strand to SEQ ID NO: 1591053
auucuugcugagcgaguac

SEQ ID NO: 1591055 - RNA, 19 nt, Artificial Sequence
  Description of Artificial Sequence: Synthetic oligonucleotide
  Sense strand starting at position 2337 of SEQ ID NO: 1560307
agagcuuuggcaugccaga

SEQ ID NO: 1591056 - RNA, 19 nt, Artificial Sequence
  Description of Artificial Sequence: Synthetic oligonucleotide
  Antisense strand to SEQ ID NO: 1591055
ucuggcaugccaaagcucu

SEQ ID NO: 1591057 - RNA, 19 nt, Artificial Sequence
  Description of Artificial Sequence: Synthetic oligonucleotide
  Sense strand starting at position 2520 of SEQ ID NO: 1560307
uggcgaagcucgguuucuu

SEQ ID NO: 1591058 - RNA, 19 nt, Artificial Sequence
  Description of Artificial Sequence: Synthetic oligonucleotide
  Antisense strand to SEQ ID NO: 1591057
aagaaaccgagcuucgcca

SEQ ID NO: 1591059 - RNA, 19 nt, Artificial Sequence
  Description of Artificial Sequence: Synthetic oligonucleotide
  Sense strand starting at position 2521 of SEQ ID NO: 1560307
ggcgaagcucgguuucuuu

SEQ ID NO: 1591060 - RNA, 19 nt, Artificial Sequence
  Description of Artificial Sequence: Synthetic oligonucleotide
  Antisense strand to SEQ ID NO: 1591059
aaagaaaccgagcuucgcc

SEQ ID NO: 1591061 - RNA, 19 nt, Artificial Sequence
  Description of Artificial Sequence: Synthetic oligonucleotide
  Sense strand starting at position 2614 of SEQ ID NO: 1560307
acgagcagguuugauacau

SEQ ID NO: 1591062 - RNA, 19 nt, Artificial Sequence
  Description of Artificial Sequence: Synthetic oligonucleotide
  Antisense strand to SEQ ID NO: 1591061
auguaucaaaccugcucgu

SEQ ID NO: 1591063 - RNA, 19 nt, Artificial Sequence
  Description of Artificial Sequence: Synthetic oligonucleotide
  Sense strand starting at position 3120 of SEQ ID NO: 1560307
cuggauccuugagaaauca

SEQ ID NO: 1591064 - RNA, 19 nt, Artificial Sequence
  Description of Artificial Sequence: Synthetic oligonucleotide
  Antisense strand to SEQ ID NO: 1591063
ugauuucucaaggauccag

SEQ ID NO: 1591065 - RNA, 19 nt, Artificial Sequence
  Description of Artificial Sequence: Synthetic oligonucleotide
  Sense strand starting at position 3292 of SEQ ID NO: 1560307
uggcaaagcucuguuucuu

SEQ ID NO: 1591066 - RNA, 19 nt, Artificial Sequence
  Description of Artificial Sequence: Synthetic oligonucleotide
  Antisense strand to SEQ ID NO: 1591065
aagaaacagagcuuugcca

SEQ ID NO: 1591067 - RNA, 19 nt, Artificial Sequence
  Description of Artificial Sequence: Synthetic oligonucleotide
  Sense strand starting at position 3511 of SEQ ID NO: 1560307
gcauuacaguguccacaua

SEQ ID NO: 1591068 - RNA, 19 nt, Artificial Sequence
  Description of Artificial Sequence: Synthetic oligonucleotide
  Antisense strand to SEQ ID NO: 1591067
uauguggacacuguaaugc

SEQ ID NO: 1591069 - RNA, 19 nt, Artificial Sequence
  Description of Artificial Sequence: Synthetic oligonucleotide
  Sense strand starting at position 3615 of SEQ ID NO: 1560307
ggaucuuucuggucuuucu

SEQ ID NO: 1591070 - RNA, 19 nt, Artificial Sequence
  Description of Artificial Sequence: Synthetic oligonucleotide
  Antisense strand to SEQ ID NO: 1591069
agaaagaccagaaagaucc

SEQ ID NO: 1591071 - RNA, 19 nt, Artificial Sequence
  Description of Artificial Sequence: Synthetic oligonucleotide
  Sense strand starting at position 3637 of SEQ ID NO: 1560307
ccaguuuccuccuguggga

SEQ ID NO: 1591072 - RNA, 19 nt, Artificial Sequence
  Description of Artificial Sequence: Synthetic oligonucleotide
  Antisense strand to SEQ ID NO: 1591071
ucccacaggaggaaacugg

SEQ ID NO: 1591073 - RNA, 19 nt, Artificial Sequence
  Description of Artificial Sequence: Synthetic oligonucleotide
  Sense strand starting at position 3676 of SEQ ID NO: 1560307
cugggcacuucguuaauca

SEQ ID NO: 1591074 - RNA, 19 nt, Artificial Sequence
  Description of Artificial Sequence: Synthetic oligonucleotide
  Antisense strand to SEQ ID NO: 1591073
ugauuaacgaagugcccag

SEQ ID NO: 1591075 - RNA, 19 nt, Artificial Sequence
  Description of Artificial Sequence: Synthetic oligonucleotide
  Sense strand starting at position 3677 of SEQ ID NO: 1560307
ugggcacuucguuaaucaa

SEQ ID NO: 1591076 - RNA, 19 nt, Artificial Sequence
  Description of Artificial Sequence: Synthetic oligonucleotide
  Antisense strand to SEQ ID NO: 1591075
uugauuaacgaagugccca

SEQ ID NO: 1591077 - RNA, 19 nt, Artificial Sequence
  Description of Artificial Sequence: Synthetic oligonucleotide
  Sense strand starting at position 3694 of SEQ ID NO: 1560307
aacagagaaucaugugaua

SEQ ID NO: 1591078 - RNA, 19 nt, Artificial Sequence
  Description of Artificial Sequence: Synthetic oligonucleotide
  Antisense strand to SEQ ID NO: 1591077
uaucacaugauucucuguu

SEQ ID NO: 1591079 - RNA, 19 nt, Artificial Sequence
  Description of Artificial Sequence: Synthetic oligonucleotide
  Sense strand starting at position 3697 of SEQ ID NO: 1560307
agagaaucaugugauagga

SEQ ID NO: 1591080 - RNA, 19 nt, Artificial Sequence
  Description of Artificial Sequence: Synthetic oligonucleotide
  Antisense strand to SEQ ID NO: 1591079
uccuaucacaugauucucu

SEQ ID NO: 1591081 - RNA, 19 nt, Artificial Sequence
  Description of Artificial Sequence: Synthetic oligonucleotide
  Sense strand starting at position 3705 of SEQ ID NO: 1560307
augugauaggaggguucuu

SEQ ID NO: 1591082 - RNA, 19 nt, Artificial Sequence
  Description of Artificial Sequence: Synthetic oligonucleotide
  Antisense strand to SEQ ID NO: 1591081
aagaacccuccuaucacau

SEQ ID NO: 1591083 - RNA, 19 nt, Artificial Sequence
  Description of Artificial Sequence: Synthetic oligonucleotide
  Sense strand starting at position 3718 of SEQ ID NO: 1560307
guucuuuccuuucuggaua

SEQ ID NO: 1591084 - RNA, 19 nt, Artificial Sequence
  Description of Artificial Sequence: Synthetic oligonucleotide
  Antisense strand to SEQ ID NO: 1591083
uauccagaaaggaaagaac

SEQ ID NO: 1591085 - RNA, 19 nt, Artificial Sequence
  Description of Artificial Sequence: Synthetic oligonucleotide
  Sense strand starting at position 3730 of SEQ ID NO: 1560307
cuggauaaaucauaugauu

SEQ ID NO: 1591086 - RNA, 19 nt, Artificial Sequence
  Description of Artificial Sequence: Synthetic oligonucleotide
  Antisense strand to SEQ ID NO: 1591085
aaucauaugauuuauccag

SEQ ID NO: 1591087 - RNA, 19 nt, Artificial Sequence
  Description of Artificial Sequence: Synthetic oligonucleotide
  Sense strand starting at position 3741 of SEQ ID NO: 1560307
auaugauuagcuugucucu

SEQ ID NO: 1591088 - RNA, 19 nt, Artificial Sequence
  Description of Artificial Sequence: Synthetic oligonucleotide
  Antisense strand to SEQ ID NO: 1591087
agagacaagcuaaucauau

SEQ ID NO: 1591089 - RNA, 19 nt, Artificial Sequence
  Description of Artificial Sequence: Synthetic oligonucleotide
  Sense strand starting at position 3744 of SEQ ID NO: 1560307
ugauuagcuugucucuuga

SEQ ID NO: 1591090 - RNA, 19 nt, Artificial Sequence
  Description of Artificial Sequence: Synthetic oligonucleotide
  Antisense strand to SEQ ID NO: 1591089
ucaagagacaagcuaauca

SEQ ID NO: 1591091 - RNA, 19 nt, Artificial Sequence
  Description of Artificial Sequence: Synthetic oligonucleotide
  Sense strand starting at position 3753 of SEQ ID NO: 1560307
ugucucuugagguacguaa

SEQ ID NO: 1591092 - RNA, 19 nt, Artificial Sequence
  Description of Artificial Sequence: Synthetic oligonucleotide
  Antisense strand to SEQ ID NO: 1591091
uuacguaccucaagagaca

SEQ ID NO: 1591093 - RNA, 19 nt, Artificial Sequence
  Description of Artificial Sequence: Synthetic oligonucleotide
  Sense strand starting at position 3757 of SEQ ID NO: 1560307
ucuugagguacguaaucau

SEQ ID NO: 1591094 - RNA, 19 nt, Artificial Sequence
  Description of Artificial Sequence: Synthetic oligonucleotide
  Antisense strand to SEQ ID NO: 1591093
augauuacguaccucaaga

SEQ ID NO: 1591095 - RNA, 19 nt, Artificial Sequence
  Description of Artificial Sequence: Synthetic oligonucleotide
  Sense strand starting at position 3980 of SEQ ID NO: 1560307
acgagaucucgcuauccug

SEQ ID NO: 1591096 - RNA, 19 nt, Artificial Sequence
  Description of Artificial Sequence: Synthetic oligonucleotide
  Antisense strand to SEQ ID NO: 1591095
caggauagcgagaucucgu

SEQ ID NO: 1591097 - RNA, 19 nt, Artificial Sequence
  Description of Artificial Sequence: Synthetic oligonucleotide
  Sense strand starting at position 173 of SEQ ID NO: 1560308
caaaguacuuaccgagaaa

SEQ ID NO: 1591098 - RNA, 19 nt, Artificial Sequence
  Description of Artificial Sequence: Synthetic oligonucleotide
  Antisense strand to SEQ ID NO: 1591097
uuucucgguaaguacuuug

SEQ ID NO: 1591099 - RNA, 19 nt, Artificial Sequence
  Description of Artificial Sequence: Synthetic oligonucleotide
  Sense strand starting at position 473 of SEQ ID NO: 1560308
acguguacucgcucagcaa

SEQ ID NO: 1591100 - RNA, 19 nt, Artificial Sequence
  Description of Artificial Sequence: Synthetic oligonucleotide
  Antisense strand to SEQ ID NO: 1591099
uugcugagcgaguacacgu

SEQ ID NO: 1591101 - RNA, 19 nt, Artificial Sequence
  Description of Artificial Sequence: Synthetic oligonucleotide
  Sense strand starting at position 476 of SEQ ID NO: 1560308
uguacucgcucagcaagaa

SEQ ID NO: 1591102 - RNA, 19 nt, Artificial Sequence
  Description of Artificial Sequence: Synthetic oligonucleotide
  Antisense strand to SEQ ID NO: 1591101
uucuugcugagcgaguaca

SEQ ID NO: 1591103 - RNA, 19 nt, Artificial Sequence
  Description of Artificial Sequence: Synthetic oligonucleotide
  Sense strand starting at position 477 of SEQ ID NO: 1560308
guacucgcucagcaagaau

SEQ ID NO: 1591104 - RNA, 19 nt, Artificial Sequence
  Description of Artificial Sequence: Synthetic oligonucleotide
  Antisense strand to SEQ ID NO: 1591103
auucuugcugagcgaguac

SEQ ID NO: 1591105 - RNA, 19 nt, Artificial Sequence
  Description of Artificial Sequence: Synthetic oligonucleotide
  Sense strand starting at position 723 of SEQ ID NO: 1560308
agagcuuuggcaugccaga

SEQ ID NO: 1591106 - RNA, 19 nt, Artificial Sequence
  Description of Artificial Sequence: Synthetic oligonucleotide
  Antisense strand to SEQ ID NO: 1591105
ucuggcaugccaaagcucu

SEQ ID NO: 1591107 - RNA, 19 nt, Artificial Sequence
  Description of Artificial Sequence: Synthetic oligonucleotide
  Sense strand starting at position 906 of SEQ ID NO: 1560308
uggcgaagcucgguuucuu

SEQ ID NO: 1591108 - RNA, 19 nt, Artificial Sequence
  Description of Artificial Sequence: Synthetic oligonucleotide
  Antisense strand to SEQ ID NO: 1591107
aagaaaccgagcuucgcca

SEQ ID NO: 1591109 - RNA, 19 nt, Artificial Sequence
  Description of Artificial Sequence: Synthetic oligonucleotide
  Sense strand starting at position 907 of SEQ ID NO: 1560308
ggcgaagcucgguuucuuu

SEQ ID NO: 1591110 - RNA, 19 nt, Artificial Sequence
  Description of Artificial Sequence: Synthetic oligonucleotide
  Antisense strand to SEQ ID NO: 1591109
aaagaaaccgagcuucgcc

SEQ ID NO: 1591111 - RNA, 19 nt, Artificial Sequence
  Description of Artificial Sequence: Synthetic oligonucleotide
  Sense strand starting at position 1000 of SEQ ID NO: 1560308
acgagcagguuugauacau

SEQ ID NO: 1591112 - RNA, 19 nt, Artificial Sequence
  Description of Artificial Sequence: Synthetic oligonucleotide
  Antisense strand to SEQ ID NO: 1591111
auguaucaaaccugcucgu

SEQ ID NO: 1591113 - RNA, 19 nt, Artificial Sequence
  Description of Artificial Sequence: Synthetic oligonucleotide
  Sense strand starting at position 1506 of SEQ ID NO: 1560308
cuggauccuugagaaauca

SEQ ID NO: 1591114 - RNA, 19 nt, Artificial Sequence
  Description of Artificial Sequence: Synthetic oligonucleotide
  Antisense strand to SEQ ID NO: 1591113
ugauuucucaaggauccag

SEQ ID NO: 1591115 - RNA, 19 nt, Artificial Sequence
  Description of Artificial Sequence: Synthetic oligonucleotide
  Sense strand starting at position 1678 of SEQ ID NO: 1560308
uggcaaagcucuguuucuu

SEQ ID NO: 1591116 - RNA, 19 nt, Artificial Sequence
  Description of Artificial Sequence: Synthetic oligonucleotide
  Antisense strand to SEQ ID NO: 1591115
aagaaacagagcuuugcca

SEQ ID NO: 1591117 - RNA, 19 nt, Artificial Sequence
  Description of Artificial Sequence: Synthetic oligonucleotide
  Sense strand starting at position 1897 of SEQ ID NO: 1560308
gcauuacaguguccacaua

SEQ ID NO: 1591118 - RNA, 19 nt, Artificial Sequence
  Description of Artificial Sequence: Synthetic oligonucleotide
  Antisense strand to SEQ ID NO: 1591117
uauguggacacuguaaugc

SEQ ID NO: 1591119 - RNA, 19 nt, Artificial Sequence
  Description of Artificial Sequence: Synthetic oligonucleotide
  Sense strand starting at position 2001 of SEQ ID NO: 1560308
ggaucuuucuggucuuucu

SEQ ID NO: 1591120 - RNA, 19 nt, Artificial Sequence
  Description of Artificial Sequence: Synthetic oligonucleotide
  Antisense strand to SEQ ID NO: 1591119
agaaagaccagaaagaucc

SEQ ID NO: 1591121 - RNA, 19 nt, Artificial Sequence
  Description of Artificial Sequence: Synthetic oligonucleotide
  Sense strand starting at position 2023 of SEQ ID NO: 1560308
ccaguuuccuccuguggga

SEQ ID NO: 1591122 - RNA, 19 nt, Artificial Sequence
  Description of Artificial Sequence: Synthetic oligonucleotide
  Antisense strand to SEQ ID NO: 1591121
ucccacaggaggaaacugg

SEQ ID NO: 1591123 - RNA, 19 nt, Artificial Sequence
  Description of Artificial Sequence: Synthetic oligonucleotide
  Sense strand starting at position 2062 of SEQ ID NO: 1560308
cugggcacuucguuaauca

SEQ ID NO: 1591124 - RNA, 19 nt, Artificial Sequence
  Description of Artificial Sequence: Synthetic oligonucleotide
  Antisense strand to SEQ ID NO: 1591123
ugauuaacgaagugcccag

SEQ ID NO: 1591125 - RNA, 19 nt, Artificial Sequence
  Description of Artificial Sequence: Synthetic oligonucleotide
  Sense strand starting at position 2063 of SEQ ID NO: 1560308
ugggcacuucguuaaucaa

SEQ ID NO: 1591126 - RNA, 19 nt, Artificial Sequence
  Description of Artificial Sequence: Synthetic oligonucleotide
  Antisense strand to SEQ ID NO: 1591125
uugauuaacgaagugccca

SEQ ID NO: 1591127 - RNA, 19 nt, Artificial Sequence
  Description of Artificial Sequence: Synthetic oligonucleotide
  Sense strand starting at position 2080 of SEQ ID NO: 1560308
aacagagaaucaugugaua

SEQ ID NO: 1591128 - RNA, 19 nt, Artificial Sequence
  Description of Artificial Sequence: Synthetic oligonucleotide
  Antisense strand to SEQ ID NO: 1591127
uaucacaugauucucuguu

SEQ ID NO: 1591129 - RNA, 19 nt, Artificial Sequence
  Description of Artificial Sequence: Synthetic oligonucleotide
  Sense strand starting at position 2083 of SEQ ID NO: 1560308
agagaaucaugugauagga

SEQ ID NO: 1591130 - RNA, 19 nt, Artificial Sequence
  Description of Artificial Sequence: Synthetic oligonucleotide
  Antisense strand to SEQ ID NO: 1591129
uccuaucacaugauucucu

SEQ ID NO: 1591131 - RNA, 19 nt, Artificial Sequence
  Description of Artificial Sequence: Synthetic oligonucleotide
  Sense strand starting at position 2091 of SEQ ID NO: 1560308
augugauaggaggguucuu

SEQ ID NO: 1591132 - RNA, 19 nt, Artificial Sequence
  Description of Artificial Sequence: Synthetic oligonucleotide
  Antisense strand to SEQ ID NO: 1591131
aagaacccuccuaucacau

SEQ ID NO: 1591133 - RNA, 19 nt, Artificial Sequence
  Description of Artificial Sequence: Synthetic oligonucleotide
  Sense strand starting at position 2104 of SEQ ID NO: 1560308
guucuuuccuuucuggaua

SEQ ID NO: 1591134 - RNA, 19 nt, Artificial Sequence
  Description of Artificial Sequence: Synthetic oligonucleotide
  Antisense strand to SEQ ID NO: 1591133
uauccagaaaggaaagaac

SEQ ID NO: 1591135 - RNA, 19 nt, Artificial Sequence
  Description of Artificial Sequence: Synthetic oligonucleotide
  Sense strand starting at position 2116 of SEQ ID NO: 1560308
cuggauaaaucauaugauu

SEQ ID NO: 1591136 - RNA, 19 nt, Artificial Sequence
  Description of Artificial Sequence: Synthetic oligonucleotide
  Antisense strand to SEQ ID NO: 1591135
aaucauaugauuuauccag

SEQ ID NO: 1591137 - RNA, 19 nt, Artificial Sequence
  Description of Artificial Sequence: Synthetic oligonucleotide
  Sense strand starting at position 2127 of SEQ ID NO: 1560308
auaugauuagcuugucucu

SEQ ID NO: 1591138 - RNA, 19 nt, Artificial Sequence
  Description of Artificial Sequence: Synthetic oligonucleotide
  Antisense strand to SEQ ID NO: 1591137
agagacaagcuaaucauau

SEQ ID NO: 1591139 - RNA, 19 nt, Artificial Sequence
  Description of Artificial Sequence: Synthetic oligonucleotide
  Sense strand starting at position 2130 of SEQ ID NO: 1560308
ugauuagcuugucucuuga

SEQ ID NO: 1591140 - RNA, 19 nt, Artificial Sequence
  Description of Artificial Sequence: Synthetic oligonucleotide
  Antisense strand to SEQ ID NO: 1591139
ucaagagacaagcuaauca

SEQ ID NO: 1591141 - RNA, 19 nt, Artificial Sequence
  Description of Artificial Sequence: Synthetic oligonucleotide
  Sense strand starting at position 2139 of SEQ ID NO: 1560308
ugucucuugagguacguaa

SEQ ID NO: 1591142 - RNA, 19 nt, Artificial Sequence
  Description of Artificial Sequence: Synthetic oligonucleotide
  Antisense strand to SEQ ID NO: 1591141
uuacguaccucaagagaca

SEQ ID NO: 1591143 - RNA, 19 nt, Artificial Sequence
  Description of Artificial Sequence: Synthetic oligonucleotide
  Sense strand starting at position 2143 of SEQ ID NO: 1560308
ucuugagguacguaaucau

SEQ ID NO: 1591144 - RNA, 19 nt, Artificial Sequence
  Description of Artificial Sequence: Synthetic oligonucleotide
  Antisense strand to SEQ ID NO: 1591143
augauuacguaccucaaga

SEQ ID NO: 1591145 - RNA, 19 nt, Artificial Sequence
  Description of Artificial Sequence: Synthetic oligonucleotide
  Sense strand starting at position 2366 of SEQ ID NO: 1560308
acgagaucucgcuauccug

SEQ ID NO: 1591146 - RNA, 19 nt, Artificial Sequence
  Description of Artificial Sequence: Synthetic oligonucleotide
  Antisense strand to SEQ ID NO: 1591145
caggauagcgagaucucgu

SEQ ID NO: 1591147 - RNA, 19 nt, Artificial Sequence
  Description of Artificial Sequence: Synthetic oligonucleotide
  Sense strand starting at position 2374 of SEQ ID NO: 1560308
ucgcuauccugccaagaaa

SEQ ID NO: 1591148 - RNA, 19 nt, Artificial Sequence
  Description of Artificial Sequence: Synthetic oligonucleotide
  Antisense strand to SEQ ID NO: 1591147
uuucuuggcaggauagcga

SEQ ID NO: 1591149 - RNA, 19 nt, Artificial Sequence
  Description of Artificial Sequence: Synthetic oligonucleotide
  Sense strand starting at position 2488 of SEQ ID NO: 1560308
cugcaaugauguugucauu

SEQ ID NO: 1591150 - RNA, 19 nt, Artificial Sequence
  Description of Artificial Sequence: Synthetic oligonucleotide
  Antisense strand to SEQ ID NO: 1591149
aaugacaacaucauugcag

SEQ ID NO: 1591151 - RNA, 19 nt, Artificial Sequence
  Description of Artificial Sequence: Synthetic oligonucleotide
  Sense strand starting at position 2707 of SEQ ID NO: 1560308
uuguguuccucauauuuau

SEQ ID NO: 1591152 - RNA, 19 nt, Artificial Sequence
  Description of Artificial Sequence: Synthetic oligonucleotide
  Antisense strand to SEQ ID NO: 1591151
auaaauaugaggaacacaa

SEQ ID NO: 1591153 - RNA, 19 nt, Artificial Sequence
  Description of Artificial Sequence: Synthetic oligonucleotide
  Sense strand starting at position 2795 of SEQ ID NO: 1560308
gucuccuuguuacaugagu

SEQ ID NO: 1591154 - RNA, 19 nt, Artificial Sequence
  Description of Artificial Sequence: Synthetic oligonucleotide
  Antisense strand to SEQ ID NO: 1591153
acucauguaacaaggagac

SEQ ID NO: 1591155 - RNA, 19 nt, Artificial Sequence
  Description of Artificial Sequence: Synthetic oligonucleotide
  Sense strand starting at position 2872 of SEQ ID NO: 1560308
gggagauugcagcgaugga

SEQ ID NO: 1591156 - RNA, 19 nt, Artificial Sequence
  Description of Artificial Sequence: Synthetic oligonucleotide
  Antisense strand to SEQ ID NO: 1591155
uccaucgcugcaaucuccc

SEQ ID NO: 1591157 - RNA, 19 nt, Artificial Sequence
  Description of Artificial Sequence: Synthetic oligonucleotide
  Sense strand starting at position 2876 of SEQ ID NO: 1560308
gauugcagcgauggagaaa

SEQ ID NO: 1591158 - RNA, 19 nt, Artificial Sequence
  Description of Artificial Sequence: Synthetic oligonucleotide
  Antisense strand to SEQ ID NO: 1591157
uuucuccaucgcugcaauc

SEQ ID NO: 1591159 - RNA, 19 nt, Artificial Sequence
  Description of Artificial Sequence: Synthetic oligonucleotide
  Sense strand starting at position 2918 of SEQ ID NO: 1560308
gagaacuauuguccuggga

SEQ ID NO: 1591160 - RNA, 19 nt, Artificial Sequence
  Description of Artificial Sequence: Synthetic oligonucleotide
  Antisense strand to SEQ ID NO: 1591159
ucccaggacaauaguucuc

SEQ ID NO: 1591161 - RNA, 19 nt, Artificial Sequence
  Description of Artificial Sequence: Synthetic oligonucleotide
  Sense strand starting at position 2920 of SEQ ID NO: 1560308
gaacuauuguccugggaau

SEQ ID NO: 1591162 - RNA, 19 nt, Artificial Sequence
  Description of Artificial Sequence: Synthetic oligonucleotide
  Antisense strand to SEQ ID NO: 1591161
auucccaggacaauaguuc

SEQ ID NO: 1591163 - RNA, 19 nt, Artificial Sequence
  Description of Artificial Sequence: Synthetic oligonucleotide
  Sense strand starting at position 2921 of SEQ ID NO: 1560308
aacuauuguccugggaaua

SEQ ID NO: 1591164 - RNA, 19 nt, Artificial Sequence
  Description of Artificial Sequence: Synthetic oligonucleotide
  Antisense strand to SEQ ID NO: 1591163
uauucccaggacaauaguu

SEQ ID NO: 1591165 - RNA, 19 nt, Artificial Sequence
  Description of Artificial Sequence: Synthetic oligonucleotide
  Sense strand starting at position 2922 of SEQ ID NO: 1560308
acuauuguccugggaauaa

SEQ ID NO: 1591166 - RNA, 19 nt, Artificial Sequence
  Description of Artificial Sequence: Synthetic oligonucleotide
  Antisense strand to SEQ ID NO: 1591165
uuauucccaggacaauagu

SEQ ID NO: 1591167 - RNA, 19 nt, Artificial Sequence
  Description of Artificial Sequence: Synthetic oligonucleotide
  Sense strand starting at position 3130 of SEQ ID NO: 1560308
gucccuucucugcagauca

SEQ ID NO: 1591168 - RNA, 19 nt, Artificial Sequence
  Description of Artificial Sequence: Synthetic oligonucleotide
  Antisense strand to SEQ ID NO: 1591167
ugaucugcagagaagggac

SEQ ID NO: 1591169 - RNA, 19 nt, Artificial Sequence
  Description of Artificial Sequence: Synthetic oligonucleotide
  Sense strand starting at position 3132 of SEQ ID NO: 1560308
cccuucucugcagaucaga

SEQ ID NO: 1591170 - RNA, 19 nt, Artificial Sequence
  Description of Artificial Sequence: Synthetic oligonucleotide
  Antisense strand to SEQ ID NO: 1591169
ucugaucugcagagaaggg

SEQ ID NO: 1591171 - RNA, 19 nt, Artificial Sequence
  Description of Artificial Sequence: Synthetic oligonucleotide
  Sense strand starting at position 3175 of SEQ ID NO: 1560308
ugcagaaucucagggaggu

SEQ ID NO: 1591172 - RNA, 19 nt, Artificial Sequence
  Description of Artificial Sequence: Synthetic oligonucleotide
  Antisense strand to SEQ ID NO: 1591171
accucccugagauucugca

SEQ ID NO: 1591173 - RNA, 19 nt, Artificial Sequence
  Description of Artificial Sequence: Synthetic oligonucleotide
  Sense strand starting at position 3176 of SEQ ID NO: 1560308
gcagaaucucagggaggua

SEQ ID NO: 1591174 - RNA, 19 nt, Artificial Sequence
  Description of Artificial Sequence: Synthetic oligonucleotide
  Antisense strand to SEQ ID NO: 1591173
uaccucccugagauucugc

SEQ ID NO: 1591175 - RNA, 19 nt, Artificial Sequence
  Description of Artificial Sequence: Synthetic oligonucleotide
  Sense strand starting at position 3203 of SEQ ID NO: 1560308
uccugaugccagggauugu

SEQ ID NO: 1591176 - RNA, 19 nt, Artificial Sequence
  Description of Artificial Sequence: Synthetic oligonucleotide
  Antisense strand to SEQ ID NO: 1591175
acaaucccuggcaucagga

SEQ ID NO: 1591177 - RNA, 19 nt, Artificial Sequence
  Description of Artificial Sequence: Synthetic oligonucleotide
  Sense strand starting at position 41 of SEQ ID NO: 1560309
uguaccauccagugauaug

SEQ ID NO: 1591178 - RNA, 19 nt, Artificial Sequence
  Description of Artificial Sequence: Synthetic oligonucleotide
  Antisense strand to SEQ ID NO: 1591177
cauaucacuggaugguaca

SEQ ID NO: 1591179 - RNA, 19 nt, Artificial Sequence
  Description of Artificial Sequence: Synthetic oligonucleotide
  Sense strand starting at position 48 of SEQ ID NO: 1560309
uccagugauaugggcuaaa

SEQ ID NO: 1591180 - RNA, 19 nt, Artificial Sequence
  Description of Artificial Sequence: Synthetic oligonucleotide
  Antisense strand to SEQ ID NO: 1591179
uuuagcccauaucacugga

SEQ ID NO: 1591181 - RNA, 19 nt, Artificial Sequence
  Description of Artificial Sequence: Synthetic oligonucleotide
  Sense strand starting at position 113 of SEQ ID NO: 1560309
ggaggacucugucuccagu

SEQ ID NO: 1591182 - RNA, 19 nt, Artificial Sequence
  Description of Artificial Sequence: Synthetic oligonucleotide
  Antisense strand to SEQ ID NO: 1591181
acuggagacagaguccucc

SEQ ID NO: 1591183 - RNA, 19 nt, Artificial Sequence
  Description of Artificial Sequence: Synthetic oligonucleotide
  Sense strand starting at position 241 of SEQ ID NO: 1560309
auuuaaguguagcuuguau

SEQ ID NO: 1591184 - RNA, 19 nt, Artificial Sequence
  Description of Artificial Sequence: Synthetic oligonucleotide
  Antisense strand to SEQ ID NO: 1591183
auacaagcuacacuuaaau

SEQ ID NO: 1591185 - RNA, 19 nt, Artificial Sequence
  Description of Artificial Sequence: Synthetic oligonucleotide
  Sense strand starting at position 432 of SEQ ID NO: 1560309
aaauguaagcuuugauuga

SEQ ID NO: 1591186 - RNA, 19 nt, Artificial Sequence
  Description of Artificial Sequence: Synthetic oligonucleotide
  Antisense strand to SEQ ID NO: 1591185
ucaaucaaagcuuacauuu

SEQ ID NO: 1591187 - RNA, 19 nt, Artificial Sequence
  Description of Artificial Sequence: Synthetic oligonucleotide
  Sense strand starting at position 436 of SEQ ID NO: 1560309
guaagcuuugauugauauu

SEQ ID NO: 1591188 - RNA, 19 nt, Artificial Sequence
  Description of Artificial Sequence: Synthetic oligonucleotide
  Antisense strand to SEQ ID NO: 1591187
aauaucaaucaaagcuuac

SEQ ID NO: 1591189 - RNA, 19 nt, Artificial Sequence
  Description of Artificial Sequence: Synthetic oligonucleotide
  Sense strand starting at position 513 of SEQ ID NO: 1560309
uacagagauggugguugaa

SEQ ID NO: 1591190 - RNA, 19 nt, Artificial Sequence
  Description of Artificial Sequence: Synthetic oligonucleotide
  Antisense strand to SEQ ID NO: 1591189
uucaaccaccaucucugua

SEQ ID NO: 1591191 - RNA, 19 nt, Artificial Sequence
  Description of Artificial Sequence: Synthetic oligonucleotide
  Sense strand starting at position 525 of SEQ ID NO: 1560309
gguugaagccauggaauua

SEQ ID NO: 1591192 - RNA, 19 nt, Artificial Sequence
  Description of Artificial Sequence: Synthetic oligonucleotide
  Antisense strand to SEQ ID NO: 1591191
uaauuccauggcuucaacc

SEQ ID NO: 1591193 - RNA, 19 nt, Artificial Sequence
  Description of Artificial Sequence: Synthetic oligonucleotide
  Sense strand starting at position 742 of SEQ ID NO: 1560309
gagcauacugaugaugcaa

SEQ ID NO: 1591194 - RNA, 19 nt, Artificial Sequence
  Description of Artificial Sequence: Synthetic oligonucleotide
  Antisense strand to SEQ ID NO: 1591193
uugcaucaucaguaugcuc

SEQ ID NO: 1591195 - RNA, 19 nt, Artificial Sequence
  Description of Artificial Sequence: Synthetic oligonucleotide
  Sense strand starting at position 1276 of SEQ ID NO: 1560309
gaagaugaacaacguauua

SEQ ID NO: 1591196 - RNA, 19 nt, Artificial Sequence
  Description of Artificial Sequence: Synthetic oligonucleotide
  Antisense strand to SEQ ID NO: 1591195
uaauacguuguucaucuuc

SEQ ID NO: 1591197 - RNA, 19 nt, Artificial Sequence
  Description of Artificial Sequence: Synthetic oligonucleotide
  Sense strand starting at position 1652 of SEQ ID NO: 1560309
gauauucgagagcauacuu

SEQ ID NO: 1591198 - RNA, 19 nt, Artificial Sequence
  Description of Artificial Sequence: Synthetic oligonucleotide
  Antisense strand to SEQ ID NO: 1591197
aaguaugcucucgaauauc

SEQ ID NO: 1591199 - RNA, 19 nt, Artificial Sequence
  Description of Artificial Sequence: Synthetic oligonucleotide
  Sense strand starting at position 1657 of SEQ ID NO: 1560309
ucgagagcauacuuugaau

SEQ ID NO: 1591200 - RNA, 19 nt, Artificial Sequence
  Description of Artificial Sequence: Synthetic oligonucleotide
  Antisense strand to SEQ ID NO: 1591199
auucaaaguaugcucucga

SEQ ID NO: 1591201 - RNA, 19 nt, Artificial Sequence
  Description of Artificial Sequence: Synthetic oligonucleotide
  Sense strand starting at position 1659 of SEQ ID NO: 1560309
gagagcauacuuugaauag

SEQ ID NO: 1591202 - RNA, 19 nt, Artificial Sequence
  Description of Artificial Sequence: Synthetic oligonucleotide
  Antisense strand to SEQ ID NO: 1591201
cuauucaaaguaugcucuc

SEQ ID NO: 1591203 - RNA, 19 nt, Artificial Sequence
  Description of Artificial Sequence: Synthetic oligonucleotide
  Sense strand starting at position 1663 of SEQ ID NO: 1560309
gcauacuuugaauagggua

SEQ ID NO: 1591204 - RNA, 19 nt, Artificial Sequence
  Description of Artificial Sequence: Synthetic oligonucleotide
  Antisense strand to SEQ ID NO: 1591203
uacccuauucaaaguaugc

SEQ ID NO: 1591205 - RNA, 19 nt, Artificial Sequence
  Description of Artificial Sequence: Synthetic oligonucleotide
  Sense strand starting at position 1791 of SEQ ID NO: 1560309
uagguuaagccucagucau

SEQ ID NO: 1591206 - RNA, 19 nt, Artificial Sequence
  Description of Artificial Sequence: Synthetic oligonucleotide
  Antisense strand to SEQ ID NO: 1591205
augacugaggcuuaaccua

SEQ ID NO: 1591207 - RNA, 19 nt, Artificial Sequence
  Description of Artificial Sequence: Synthetic oligonucleotide
  Sense strand starting at position 1836 of SEQ ID NO: 1560309
agcaauggucccugcauuu

SEQ ID NO: 1591208 - RNA, 19 nt, Artificial Sequence
  Description of Artificial Sequence: Synthetic oligonucleotide
  Antisense strand to SEQ ID NO: 1591207
aaaugcagggaccauugcu

SEQ ID NO: 1591209 - RNA, 19 nt, Artificial Sequence
  Description of Artificial Sequence: Synthetic oligonucleotide
  Sense strand starting at position 1945 of SEQ ID NO: 1560309
agaauugaaguauguaucu

SEQ ID NO: 1591210 - RNA, 19 nt, Artificial Sequence
  Description of Artificial Sequence: Synthetic oligonucleotide
  Antisense strand to SEQ ID NO: 1591209
agauacauacuucaauucu

SEQ ID NO: 1591211 - RNA, 19 nt, Artificial Sequence
  Description of Artificial Sequence: Synthetic oligonucleotide
  Sense strand starting at position 1950 of SEQ ID NO: 1560309
ugaaguauguaucuuaggu

SEQ ID NO: 1591212 - RNA, 19 nt, Artificial Sequence
  Description of Artificial Sequence: Synthetic oligonucleotide
  Antisense strand to SEQ ID NO: 1591211
accuaagauacauacuuca

SEQ ID NO: 1591213 - RNA, 19 nt, Artificial Sequence
  Description of Artificial Sequence: Synthetic oligonucleotide
  Sense strand starting at position 2047 of SEQ ID NO: 1560309
guuuauuugcuguaccuuu

SEQ ID NO: 1591214 - RNA, 19 nt, Artificial Sequence
  Description of Artificial Sequence: Synthetic oligonucleotide
  Antisense strand to SEQ ID NO: 1591213
aaagguacagcaaauaaac

SEQ ID NO: 1591215 - RNA, 19 nt, Artificial Sequence
  Description of Artificial Sequence: Synthetic oligonucleotide
  Sense strand starting at position 2080 of SEQ ID NO: 1560309
guugaucaccuuugggaug

SEQ ID NO: 1591216 - RNA, 19 nt, Artificial Sequence
  Description of Artificial Sequence: Synthetic oligonucleotide
  Antisense strand to SEQ ID NO: 1591215
caucccaaaggugaucaac

SEQ ID NO: 1591217 - RNA, 19 nt, Artificial Sequence
  Description of Artificial Sequence: Synthetic oligonucleotide
  Sense strand starting at position 2085 of SEQ ID NO: 1560309
ucaccuuugggaugauuga

SEQ ID NO: 1591218 - RNA, 19 nt, Artificial Sequence
  Description of Artificial Sequence: Synthetic oligonucleotide
  Antisense strand to SEQ ID NO: 1591217
ucaaucaucccaaagguga

SEQ ID NO: 1591219 - RNA, 19 nt, Artificial Sequence
  Description of Artificial Sequence: Synthetic oligonucleotide
  Sense strand starting at position 2092 of SEQ ID NO: 1560309
ugggaugauugaguuggua

SEQ ID NO: 1591220 - RNA, 19 nt, Artificial Sequence
  Description of Artificial Sequence: Synthetic oligonucleotide
  Antisense strand to SEQ ID NO: 1591219
uaccaacucaaucauccca

SEQ ID NO: 1591221 - RNA, 19 nt, Artificial Sequence
  Description of Artificial Sequence: Synthetic oligonucleotide
  Sense strand starting at position 2094 of SEQ ID NO: 1560309
ggaugauugaguugguaaa

SEQ ID NO: 1591222 - RNA, 19 nt, Artificial Sequence
  Description of Artificial Sequence: Synthetic oligonucleotide
  Antisense strand to SEQ ID NO: 1591221
uuuaccaacucaaucaucc

SEQ ID NO: 1591223 - RNA, 19 nt, Artificial Sequence
  Description of Artificial Sequence: Synthetic oligonucleotide
  Sense strand starting at position 2095 of SEQ ID NO: 1560309
gaugauugaguugguaaac

SEQ ID NO: 1591224 - RNA, 19 nt, Artificial Sequence
  Description of Artificial Sequence: Synthetic oligonucleotide
  Antisense strand to SEQ ID NO: 1591223
guuuaccaacucaaucauc

SEQ ID NO: 1591225 - RNA, 19 nt, Artificial Sequence
  Description of Artificial Sequence: Synthetic oligonucleotide
  Sense strand starting at position 2120 of SEQ ID NO: 1560309
gaggaaaugcccugaaagu

SEQ ID NO: 1591226 - RNA, 19 nt, Artificial Sequence
  Description of Artificial Sequence: Synthetic oligonucleotide
  Antisense strand to SEQ ID NO: 1591225
acuuucagggcauuuccuc

SEQ ID NO: 1591227 - RNA, 19 nt, Artificial Sequence
  Description of Artificial Sequence: Synthetic oligonucleotide
  Sense strand starting at position 2137 of SEQ ID NO: 1560309
guuacaucacauugucuga

SEQ ID NO: 1591228 - RNA, 19 nt, Artificial Sequence
  Description of Artificial Sequence: Synthetic oligonucleotide
  Antisense strand to SEQ ID NO: 1591227
ucagacaaugugauguaac

SEQ ID NO: 1591229 - RNA, 19 nt, Artificial Sequence
  Description of Artificial Sequence: Synthetic oligonucleotide
  Sense strand starting at position 2203 of SEQ ID NO: 1560309
uggcuuugaggugaguaaa

SEQ ID NO: 1591230 - RNA, 19 nt, Artificial Sequence
  Description of Artificial Sequence: Synthetic oligonucleotide
  Antisense strand to SEQ ID NO: 1591229
uuuacucaccucaaagcca

SEQ ID NO: 1591231 - RNA, 19 nt, Artificial Sequence
  Description of Artificial Sequence: Synthetic oligonucleotide
  Sense strand starting at position 2252 of SEQ ID NO: 1560309
gaaguuuccagaggaguca

SEQ ID NO: 1591232 - RNA, 19 nt, Artificial Sequence
  Description of Artificial Sequence: Synthetic oligonucleotide
  Antisense strand to SEQ ID NO: 1591231
ugacuccucuggaaacuuc

SEQ ID NO: 1591233 - RNA, 19 nt, Artificial Sequence
  Description of Artificial Sequence: Synthetic oligonucleotide
  Sense strand starting at position 2299 of SEQ ID NO: 1560309
agaugauacuuacugguua

SEQ ID NO: 1591234 - RNA, 19 nt, Artificial Sequence
  Description of Artificial Sequence: Synthetic oligonucleotide
  Antisense strand to SEQ ID NO: 1591233
uaaccaguaaguaucaucu

SEQ ID NO: 1591235 - RNA, 19 nt, Artificial Sequence
  Description of Artificial Sequence: Synthetic oligonucleotide
  Sense strand starting at position 2303 of SEQ ID NO: 1560309
gauacuuacugguuaugau

SEQ ID NO: 1591236 - RNA, 19 nt, Artificial Sequence
  Description of Artificial Sequence: Synthetic oligonucleotide
  Antisense strand to SEQ ID NO: 1591235
aucauaaccaguaaguauc

SEQ ID NO: 1591237 - RNA, 19 nt, Artificial Sequence
  Description of Artificial Sequence: Synthetic oligonucleotide
  Sense strand starting at position 2304 of SEQ ID NO: 1560309
auacuuacugguuaugauu

SEQ ID NO: 1591238 - RNA, 19 nt, Artificial Sequence
  Description of Artificial Sequence: Synthetic oligonucleotide
  Antisense strand to SEQ ID NO: 1591237
aaucauaaccaguaaguau

SEQ ID NO: 1591239 - RNA, 19 nt, Artificial Sequence
  Description of Artificial Sequence: Synthetic oligonucleotide
  Sense strand starting at position 2320 of SEQ ID NO: 1560309
auugcugagccauaagaag

SEQ ID NO: 1591240 - RNA, 19 nt, Artificial Sequence
  Description of Artificial Sequence: Synthetic oligonucleotide
  Antisense strand to SEQ ID NO: 1591239
cuucuuauggcucagcaau

SEQ ID NO: 1591241 - RNA, 19 nt, Artificial Sequence
  Description of Artificial Sequence: Synthetic oligonucleotide
  Sense strand starting at position 2328 of SEQ ID NO: 1560309
gccauaagaaguuaagagu

SEQ ID NO: 1591242 - RNA, 19 nt, Artificial Sequence
  Description of Artificial Sequence: Synthetic oligonucleotide
  Antisense strand to SEQ ID NO: 1591241
acucuuaacuucuuauggc

SEQ ID NO: 1591243 - RNA, 19 nt, Artificial Sequence
  Description of Artificial Sequence: Synthetic oligonucleotide
  Sense strand starting at position 3201 of SEQ ID NO: 1560309
ugaguuucagagcagaagu

SEQ ID NO: 1591244 - RNA, 19 nt, Artificial Sequence
  Description of Artificial Sequence: Synthetic oligonucleotide
  Antisense strand to SEQ ID NO: 1591243
acuucugcucugaaacuca

SEQ ID NO: 1591245 - RNA, 19 nt, Artificial Sequence
  Description of Artificial Sequence: Synthetic oligonucleotide
  Sense strand starting at position 3214 of SEQ ID NO: 1560309
agaaguuuaacaggcaaga

SEQ ID NO: 1591246 - RNA, 19 nt, Artificial Sequence
  Description of Artificial Sequence: Synthetic oligonucleotide
  Antisense strand to SEQ ID NO: 1591245
ucuugccuguuaaacuucu

SEQ ID NO: 1591247 - RNA, 19 nt, Artificial Sequence
  Description of Artificial Sequence: Synthetic oligonucleotide
  Sense strand starting at position 3251 of SEQ ID NO: 1560309
agcucuauccugcagagag

SEQ ID NO: 1591248 - RNA, 19 nt, Artificial Sequence
  Description of Artificial Sequence: Synthetic oligonucleotide
  Antisense strand to SEQ ID NO: 1591247
cucucugcaggauagagcu

SEQ ID NO: 1591249 - RNA, 19 nt, Artificial Sequence
  Description of Artificial Sequence: Synthetic oligonucleotide
  Sense strand starting at position 3364 of SEQ ID NO: 1560309
ccgagagauuggucggacu

SEQ ID NO: 1591250 - RNA, 19 nt, Artificial Sequence
  Description of Artificial Sequence: Synthetic oligonucleotide
  Antisense strand to SEQ ID NO: 1591249
aguccgaccaaucucucgg

SEQ ID NO: 1591251 - RNA, 19 nt, Artificial Sequence
  Description of Artificial Sequence: Synthetic oligonucleotide
  Sense strand starting at position 3912 of SEQ ID NO: 1560309
gauggugguaaucauggua

SEQ ID NO: 1591252 - RNA, 19 nt, Artificial Sequence
  Description of Artificial Sequence: Synthetic oligonucleotide
  Antisense strand to SEQ ID NO: 1591251
uaccaugauuaccaccauc

SEQ ID NO: 1591253 - RNA, 19 nt, Artificial Sequence
  Description of Artificial Sequence: Synthetic oligonucleotide
  Sense strand starting at position 3936 of SEQ ID NO: 1560309
aggagugaugguggagcua

SEQ ID NO: 1591254 - RNA, 19 nt, Artificial Sequence
  Description of Artificial Sequence: Synthetic oligonucleotide
  Antisense strand to SEQ ID NO: 1591253
uagcuccaccaucacuccu

SEQ ID NO: 1591255 - RNA, 19 nt, Artificial Sequence
  Description of Artificial Sequence: Synthetic oligonucleotide
  Sense strand starting at position 3937 of SEQ ID NO: 1560309
ggagugaugguggagcuau

SEQ ID NO: 1591256 - RNA, 19 nt, Artificial Sequence
  Description of Artificial Sequence: Synthetic oligonucleotide
  Antisense strand to SEQ ID NO: 1591255
auagcuccaccaucacucc

SEQ ID NO: 1591257 - RNA, 19 nt, Artificial Sequence
  Description of Artificial Sequence: Synthetic oligonucleotide
  Sense strand starting at position 24 of SEQ ID NO: 1560310
aaggaugcacuucgaguaa

SEQ ID NO: 1591258 - RNA, 19 nt, Artificial Sequence
  Description of Artificial Sequence: Synthetic oligonucleotide
  Antisense strand to SEQ ID NO: 1591257
uuacucgaagugcauccuu

SEQ ID NO: 1591259 - RNA, 19 nt, Artificial Sequence
  Description of Artificial Sequence: Synthetic oligonucleotide
  Sense strand starting at position 33 of SEQ ID NO: 1560310
cuucgaguaaccuguggga

SEQ ID NO: 1591260 - RNA, 19 nt, Artificial Sequence
  Description of Artificial Sequence: Synthetic oligonucleotide
  Antisense strand to SEQ ID NO: 1591259
ucccacagguuacucgaag

SEQ ID NO: 1591261 - RNA, 19 nt, Artificial Sequence
  Description of Artificial Sequence: Synthetic oligonucleotide
  Sense strand starting at position 35 of SEQ ID NO: 1560310
ucgaguaaccugugggaau

SEQ ID NO: 1591262 - RNA, 19 nt, Artificial Sequence
  Description of Artificial Sequence: Synthetic oligonucleotide
  Antisense strand to SEQ ID NO: 1591261
auucccacagguuacucga

SEQ ID NO: 1591263 - RNA, 19 nt, Artificial Sequence
  Description of Artificial Sequence: Synthetic oligonucleotide
  Sense strand starting at position 37 of SEQ ID NO: 1560310
gaguaaccugugggaauuc

SEQ ID NO: 1591264 - RNA, 19 nt, Artificial Sequence
  Description of Artificial Sequence: Synthetic oligonucleotide
  Antisense strand to SEQ ID NO: 1591263
gaauucccacagguuacuc

SEQ ID NO: 1591265 - RNA, 19 nt, Artificial Sequence
  Description of Artificial Sequence: Synthetic oligonucleotide
  Sense strand starting at position 201 of SEQ ID NO: 1560310
ggaugacaucuuugauguc

SEQ ID NO: 1591266 - RNA, 19 nt, Artificial Sequence
  Description of Artificial Sequence: Synthetic oligonucleotide
  Antisense strand to SEQ ID NO: 1591265
gacaucaaagaugucaucc

SEQ ID NO: 1591267 - RNA, 19 nt, Artificial Sequence
  Description of Artificial Sequence: Synthetic oligonucleotide
  Sense strand starting at position 225 of SEQ ID NO: 1560310
gcagcaggucgauugugua

SEQ ID NO: 1591268 - RNA, 19 nt, Artificial Sequence
  Description of Artificial Sequence: Synthetic oligonucleotide
  Antisense strand to SEQ ID NO: 1591267
uacacaaucgaccugcugc

SEQ ID NO: 1591269 - RNA, 19 nt, Artificial Sequence
  Description of Artificial Sequence: Synthetic oligonucleotide
  Sense strand starting at position 518 of SEQ ID NO: 1560310
cccugaauccagggaacuu

SEQ ID NO: 1591270 - RNA, 19 nt, Artificial Sequence
  Description of Artificial Sequence: Synthetic oligonucleotide
  Antisense strand to SEQ ID NO: 1591269
aaguucccuggauucaggg

SEQ ID NO: 1591271 - RNA, 19 nt, Artificial Sequence
  Description of Artificial Sequence: Synthetic oligonucleotide
  Sense strand starting at position 625 of SEQ ID NO: 1560310
ucagcuugucccgaucuau

SEQ ID NO: 1591272 - RNA, 19 nt, Artificial Sequence
  Description of Artificial Sequence: Synthetic oligonucleotide
  Antisense strand to SEQ ID NO: 1591271
auagaucgggacaagcuga

SEQ ID NO: 1591273 - RNA, 19 nt, Artificial Sequence
  Description of Artificial Sequence: Synthetic oligonucleotide
  Sense strand starting at position 2032 of SEQ ID NO: 1560310
ggaggugaggccuaacauu

SEQ ID NO: 1591274 - RNA, 19 nt, Artificial Sequence
  Description of Artificial Sequence: Synthetic oligonucleotide
  Antisense strand to SEQ ID NO: 1591273
aauguuaggccucaccucc

SEQ ID NO: 1591275 - RNA, 19 nt, Artificial Sequence
  Description of Artificial Sequence: Synthetic oligonucleotide
  Sense strand starting at position 2042 of SEQ ID NO: 1560310
ccuaacauugggcgaagaa

SEQ ID NO: 1591276 - RNA, 19 nt, Artificial Sequence
  Description of Artificial Sequence: Synthetic oligonucleotide
  Antisense strand to SEQ ID NO: 1591275
uucuucgcccaauguuagg

SEQ ID NO: 1591277 - RNA, 19 nt, Artificial Sequence
  Description of Artificial Sequence: Synthetic oligonucleotide
  Sense strand starting at position 2241 of SEQ ID NO: 1560310
gguauuagcggcuggagga

SEQ ID NO: 1591278 - RNA, 19 nt, Artificial Sequence
  Description of Artificial Sequence: Synthetic oligonucleotide
  Antisense strand to SEQ ID NO: 1591277
uccuccagccgcuaauacc

SEQ ID NO: 1591279 - RNA, 19 nt, Artificial Sequence
  Description of Artificial Sequence: Synthetic oligonucleotide
  Sense strand starting at position 2475 of SEQ ID NO: 1560310
gccacugauguucaagcga

SEQ ID NO: 1591280 - RNA, 19 nt, Artificial Sequence
  Description of Artificial Sequence: Synthetic oligonucleotide
  Antisense strand to SEQ ID NO: 1591279
ucgcuugaacaucaguggc

SEQ ID NO: 1591281 - RNA, 19 nt, Artificial Sequence
  Description of Artificial Sequence: Synthetic oligonucleotide
  Sense strand starting at position 2560 of SEQ ID NO: 1560310
cguggauacccugauuccu

SEQ ID NO: 1591282 - RNA, 19 nt, Artificial Sequence
  Description of Artificial Sequence: Synthetic oligonucleotide
  Antisense strand to SEQ ID NO: 1591281
aggaaucaggguauccacg

SEQ ID NO: 1591283 - RNA, 19 nt, Artificial Sequence
  Description of Artificial Sequence: Synthetic oligonucleotide
  Sense strand starting at position 2604 of SEQ ID NO: 1560310
gaggacccggccuaugaau

SEQ ID NO: 1591284 - RNA, 19 nt, Artificial Sequence
  Description of Artificial Sequence: Synthetic oligonucleotide
  Antisense strand to SEQ ID NO: 1591283
auucauaggccggguccuc

SEQ ID NO: 1591285 - RNA, 19 nt, Artificial Sequence
  Description of Artificial Sequence: Synthetic oligonucleotide
  Sense strand starting at position 2615 of SEQ ID NO: 1560310
cuaugaaugacuggaguuc

SEQ ID NO: 1591286 - RNA, 19 nt, Artificial Sequence
  Description of Artificial Sequence: Synthetic oligonucleotide
  Antisense strand to SEQ ID NO: 1591285
gaacuccagucauucauag

SEQ ID NO: 1591287 - RNA, 19 nt, Artificial Sequence
  Description of Artificial Sequence: Synthetic oligonucleotide
  Sense strand starting at position 3052 of SEQ ID NO: 1560310
uugcaaccuucucccgaua

SEQ ID NO: 1591288 - RNA, 19 nt, Artificial Sequence
  Description of Artificial Sequence: Synthetic oligonucleotide
  Antisense strand to SEQ ID NO: 1591287
uaucgggagaagguugcaa

SEQ ID NO: 1591289 - RNA, 19 nt, Artificial Sequence
  Description of Artificial Sequence: Synthetic oligonucleotide
  Sense strand starting at position 3063 of SEQ ID NO: 1560310
ucccgauauccuugaacau

SEQ ID NO: 1591290 - RNA, 19 nt, Artificial Sequence
  Description of Artificial Sequence: Synthetic oligonucleotide
  Antisense strand to SEQ ID NO: 1591289
auguucaaggauaucggga

SEQ ID NO: 1591291 - RNA, 19 nt, Artificial Sequence
  Description of Artificial Sequence: Synthetic oligonucleotide
  Sense strand starting at position 3064 of SEQ ID NO: 1560310
cccgauauccuugaacauu

SEQ ID NO: 1591292 - RNA, 19 nt, Artificial Sequence
  Description of Artificial Sequence: Synthetic oligonucleotide
  Antisense strand to SEQ ID NO: 1591291
aauguucaaggauaucggg

SEQ ID NO: 1591293 - RNA, 19 nt, Artificial Sequence
  Description of Artificial Sequence: Synthetic oligonucleotide
  Sense strand starting at position 3138 of SEQ ID NO: 1560310
aucacauuccuguaguaua

SEQ ID NO: 1591294 - RNA, 19 nt, Artificial Sequence
  Description of Artificial Sequence: Synthetic oligonucleotide
  Antisense strand to SEQ ID NO: 1591293
uauacuacaggaaugugau

SEQ ID NO: 1591295 - RNA, 19 nt, Artificial Sequence
  Description of Artificial Sequence: Synthetic oligonucleotide
  Sense strand starting at position 3143 of SEQ ID NO: 1560310
auuccuguaguauagauca

SEQ ID NO: 1591296 - RNA, 19 nt, Artificial Sequence
  Description of Artificial Sequence: Synthetic oligonucleotide
  Antisense strand to SEQ ID NO: 1591295
ugaucuauacuacaggaau

SEQ ID NO: 1591297 - RNA, 19 nt, Artificial Sequence
  Description of Artificial Sequence: Synthetic oligonucleotide
  Sense strand starting at position 3326 of SEQ ID NO: 1560310
uggaguuucgaucauagcu

SEQ ID NO: 1591298 - RNA, 19 nt, Artificial Sequence
  Description of Artificial Sequence: Synthetic oligonucleotide
  Antisense strand to SEQ ID NO: 1591297
agcuaugaucgaaacucca

SEQ ID NO: 1591299 - RNA, 19 nt, Artificial Sequence
  Description of Artificial Sequence: Synthetic oligonucleotide
  Sense strand starting at position 3444 of SEQ ID NO: 1560310
agagacgacuugcuauauu

SEQ ID NO: 1591300 - RNA, 19 nt, Artificial Sequence
  Description of Artificial Sequence: Synthetic oligonucleotide
  Antisense strand to SEQ ID NO: 1591299
aauauagcaagucgucucu

SEQ ID NO: 1591301 - RNA, 19 nt, Artificial Sequence
  Description of Artificial Sequence: Synthetic oligonucleotide
  Sense strand starting at position 3564 of SEQ ID NO: 1560310
ugacuuaaccaauguauga

SEQ ID NO: 1591302 - RNA, 19 nt, Artificial Sequence
  Description of Artificial Sequence: Synthetic oligonucleotide
  Antisense strand to SEQ ID NO: 1591301
ucauacauugguuaaguca

SEQ ID NO: 1591303 - RNA, 19 nt, Artificial Sequence
  Description of Artificial Sequence: Synthetic oligonucleotide
  Sense strand starting at position 3636 of SEQ ID NO: 1560310
cccuguuaguuuccuuuaa

SEQ ID NO: 1591304 - RNA, 19 nt, Artificial Sequence
  Description of Artificial Sequence: Synthetic oligonucleotide
  Antisense strand to SEQ ID NO: 1591303
uuaaaggaaacuaacaggg

SEQ ID NO: 1591305 - RNA, 19 nt, Artificial Sequence
  Description of Artificial Sequence: Synthetic oligonucleotide
  Sense strand starting at position 3637 of SEQ ID NO: 1560310
ccuguuaguuuccuuuaaa

SEQ ID NO: 1591306 - RNA, 19 nt, Artificial Sequence
  Description of Artificial Sequence: Synthetic oligonucleotide
  Antisense strand to SEQ ID NO: 1591305
uuuaaaggaaacuaacagg

SEQ ID NO: 1591307 - RNA, 19 nt, Artificial Sequence
  Description of Artificial Sequence: Synthetic oligonucleotide
  Sense strand starting at position 3716 of SEQ ID NO: 1560310
uacugucaaggcugcuaaa

SEQ ID NO: 1591308 - RNA, 19 nt, Artificial Sequence
  Description of Artificial Sequence: Synthetic oligonucleotide
  Antisense strand to SEQ ID NO: 1591307
uuuagcagccuugacagua

SEQ ID NO: 1591309 - RNA, 19 nt, Artificial Sequence
  Description of Artificial Sequence: Synthetic oligonucleotide
  Sense strand starting at position 3734 of SEQ ID NO: 1560310
acauuauacuguccuggga

SEQ ID NO: 1591310 - RNA, 19 nt, Artificial Sequence
  Description of Artificial Sequence: Synthetic oligonucleotide
  Antisense strand to SEQ ID NO: 1591309
ucccaggacaguauaaugu

SEQ ID NO: 1591311 - RNA, 19 nt, Artificial Sequence
  Description of Artificial Sequence: Synthetic oligonucleotide
  Sense strand starting at position 3738 of SEQ ID NO: 1560310
uauacuguccugggaccau

SEQ ID NO: 1591312 - RNA, 19 nt, Artificial Sequence
  Description of Artificial Sequence: Synthetic oligonucleotide
  Antisense strand to SEQ ID NO: 1591311
auggucccaggacaguaua

SEQ ID NO: 1591313 - RNA, 19 nt, Artificial Sequence
  Description of Artificial Sequence: Synthetic oligonucleotide
  Sense strand starting at position 3775 of SEQ ID NO: 1560310
gccacuuaaaggugaauag

SEQ ID NO: 1591314 - RNA, 19 nt, Artificial Sequence
  Description of Artificial Sequence: Synthetic oligonucleotide
  Antisense strand to SEQ ID NO: 1591313
cuauucaccuuuaaguggc

SEQ ID NO: 1591315 - RNA, 19 nt, Artificial Sequence
  Description of Artificial Sequence: Synthetic oligonucleotide
  Sense strand starting at position 3785 of SEQ ID NO: 1560310
ggugaauagugguuuaugu

SEQ ID NO: 1591316 - RNA, 19 nt, Artificial Sequence
  Description of Artificial Sequence: Synthetic oligonucleotide
  Antisense strand to SEQ ID NO: 1591315
acauaaaccacuauucacc

SEQ ID NO: 1591317 - RNA, 19 nt, Artificial Sequence
  Description of Artificial Sequence: Synthetic oligonucleotide
  Sense strand starting at position 3787 of SEQ ID NO: 1560310
ugaauagugguuuauguuc

SEQ ID NO: 1591318 - RNA, 19 nt, Artificial Sequence
  Description of Artificial Sequence: Synthetic oligonucleotide
  Antisense strand to SEQ ID NO: 1591317
gaacauaaaccacuauuca

SEQ ID NO: 1591319 - RNA, 19 nt, Artificial Sequence
  Description of Artificial Sequence: Synthetic oligonucleotide
  Sense strand starting at position 3796 of SEQ ID NO: 1560310
guuuauguucugccucagu

SEQ ID NO: 1591320 - RNA, 19 nt, Artificial Sequence
  Description of Artificial Sequence: Synthetic oligonucleotide
  Antisense strand to SEQ ID NO: 1591319
acugaggcagaacauaaac

SEQ ID NO: 1591321 - RNA, 19 nt, Artificial Sequence
  Description of Artificial Sequence: Synthetic oligonucleotide
  Sense strand starting at position 3799 of SEQ ID NO: 1560310
uauguucugccucagugaa

SEQ ID NO: 1591322 - RNA, 19 nt, Artificial Sequence
  Description of Artificial Sequence: Synthetic oligonucleotide
  Antisense strand to SEQ ID NO: 1591321
uucacugaggcagaacaua

SEQ ID NO: 1591323 - RNA, 19 nt, Artificial Sequence
  Description of Artificial Sequence: Synthetic oligonucleotide
  Sense strand starting at position 3801 of SEQ ID NO: 1560310
uguucugccucagugaaca

SEQ ID NO: 1591324 - RNA, 19 nt, Artificial Sequence
  Description of Artificial Sequence: Synthetic oligonucleotide
  Antisense strand to SEQ ID NO: 1591323
uguucacugaggcagaaca

SEQ ID NO: 1591325 - RNA, 19 nt, Artificial Sequence
  Description of Artificial Sequence: Synthetic oligonucleotide
  Sense strand starting at position 3849 of SEQ ID NO: 1560310
ugauuacauugcccauagu

SEQ ID NO: 1591326 - RNA, 19 nt, Artificial Sequence
  Description of Artificial Sequence: Synthetic oligonucleotide
  Antisense strand to SEQ ID NO: 1591325
acuaugggcaauguaauca

SEQ ID NO: 1591327 - RNA, 19 nt, Artificial Sequence
  Description of Artificial Sequence: Synthetic oligonucleotide
  Sense strand starting at position 3852 of SEQ ID NO: 1560310
uuacauugcccauagugua

SEQ ID NO: 1591328 - RNA, 19 nt, Artificial Sequence
  Description of Artificial Sequence: Synthetic oligonucleotide
  Antisense strand to SEQ ID NO: 1591327
uacacuaugggcaauguaa

SEQ ID NO: 1591329 - RNA, 19 nt, Artificial Sequence
  Description of Artificial Sequence: Synthetic oligonucleotide
  Sense strand starting at position 3859 of SEQ ID NO: 1560310
gcccauaguguacaaacuu

SEQ ID NO: 1591330 - RNA, 19 nt, Artificial Sequence
  Description of Artificial Sequence: Synthetic oligonucleotide
  Antisense strand to SEQ ID NO: 1591329
aaguuuguacacuaugggc

SEQ ID NO: 1591331 - RNA, 19 nt, Artificial Sequence
  Description of Artificial Sequence: Synthetic oligonucleotide
  Sense strand starting at position 3919 of SEQ ID NO: 1560310
gugugauuagccuacauca

SEQ ID NO: 1591332 - RNA, 19 nt, Artificial Sequence
  Description of Artificial Sequence: Synthetic oligonucleotide
  Antisense strand to SEQ ID NO: 1591331
ugauguaggcuaaucacac

SEQ ID NO: 1591333 - RNA, 19 nt, Artificial Sequence
  Description of Artificial Sequence: Synthetic oligonucleotide
  Sense strand starting at position 3921 of SEQ ID NO: 1560310
gugauuagccuacaucaaa

SEQ ID NO: 1591334 - RNA, 19 nt, Artificial Sequence
  Description of Artificial Sequence: Synthetic oligonucleotide
  Antisense strand to SEQ ID NO: 1591333
uuugauguaggcuaaucac

SEQ ID NO: 1591335 - RNA, 19 nt, Artificial Sequence
  Description of Artificial Sequence: Synthetic oligonucleotide
  Sense strand starting at position 3975 of SEQ ID NO: 1560310
augggagucucaccauauc

SEQ ID NO: 1591336 - RNA, 19 nt, Artificial Sequence
  Description of Artificial Sequence: Synthetic oligonucleotide
  Antisense strand to SEQ ID NO: 1591335
gauauggugagacucccau

SEQ ID NO: 1591337 - RNA, 19 nt, Artificial Sequence
  Description of Artificial Sequence: Synthetic oligonucleotide
  Sense strand starting at position 213 of SEQ ID NO: 1560311
accaaugccuggcuaauua

SEQ ID NO: 1591338 - RNA, 19 nt, Artificial Sequence
  Description of Artificial Sequence: Synthetic oligonucleotide
  Antisense strand to SEQ ID NO: 1591337
uaauuagccaggcauuggu

SEQ ID NO: 1591339 - RNA, 19 nt, Artificial Sequence
  Description of Artificial Sequence: Synthetic oligonucleotide
  Sense strand starting at position 361 of SEQ ID NO: 1560311
cugggucuggcgugucauu

SEQ ID NO: 1591340 - RNA, 19 nt, Artificial Sequence
  Description of Artificial Sequence: Synthetic oligonucleotide
  Antisense strand to SEQ ID NO: 1591339
aaugacacgccagacccag

SEQ ID NO: 1591341 - RNA, 19 nt, Artificial Sequence
  Description of Artificial Sequence: Synthetic oligonucleotide
  Sense strand starting at position 362 of SEQ ID NO: 1560311
ugggucuggcgugucauua

SEQ ID NO: 1591342 - RNA, 19 nt, Artificial Sequence
  Description of Artificial Sequence: Synthetic oligonucleotide
  Antisense strand to SEQ ID NO: 1591341
uaaugacacgccagaccca

SEQ ID NO: 1591343 - RNA, 19 nt, Artificial Sequence
  Description of Artificial Sequence: Synthetic oligonucleotide
  Sense strand starting at position 366 of SEQ ID NO: 1560311
ucuggcgugucauuaauuu

SEQ ID NO: 1591344 - RNA, 19 nt, Artificial Sequence
  Description of Artificial Sequence: Synthetic oligonucleotide
  Antisense strand to SEQ ID NO: 1591343
aaauuaaugacacgccaga

SEQ ID NO: 1591345 - RNA, 19 nt, Artificial Sequence
  Description of Artificial Sequence: Synthetic oligonucleotide
  Sense strand starting at position 370 of SEQ ID NO: 1560311
gcgugucauuaauuuccga

SEQ ID NO: 1591346 - RNA, 19 nt, Artificial Sequence
  Description of Artificial Sequence: Synthetic oligonucleotide
  Antisense strand to SEQ ID NO: 1591345
ucggaaauuaaugacacgc

SEQ ID NO: 1591347 - RNA, 19 nt, Artificial Sequence
  Description of Artificial Sequence: Synthetic oligonucleotide
  Sense strand starting at position 374 of SEQ ID NO: 1560311
gucauuaauuuccgaauga

SEQ ID NO: 1591348 - RNA, 19 nt, Artificial Sequence
  Description of Artificial Sequence: Synthetic oligonucleotide
  Antisense strand to SEQ ID NO: 1591347
ucauucggaaauuaaugac

SEQ ID NO: 1591349 - RNA, 19 nt, Artificial Sequence
  Description of Artificial Sequence: Synthetic oligonucleotide
  Sense strand starting at position 375 of SEQ ID NO: 1560311
ucauuaauuuccgaaugag

SEQ ID NO: 1591350 - RNA, 19 nt, Artificial Sequence
  Description of Artificial Sequence: Synthetic oligonucleotide
  Antisense strand to SEQ ID NO: 1591349
cucauucggaaauuaauga

SEQ ID NO: 1591351 - RNA, 19 nt, Artificial Sequence
  Description of Artificial Sequence: Synthetic oligonucleotide
  Sense strand starting at position 446 of SEQ ID NO: 1560311
uguguugacagguauacag

SEQ ID NO: 1591352 - RNA, 19 nt, Artificial Sequence
  Description of Artificial Sequence: Synthetic oligonucleotide
  Antisense strand to SEQ ID NO: 1591351
cuguauaccugucaacaca

SEQ ID NO: 1591353 - RNA, 19 nt, Artificial Sequence
  Description of Artificial Sequence: Synthetic oligonucleotide
  Sense strand starting at position 599 of SEQ ID NO: 1560311
gguaguagauggagaaaug

SEQ ID NO: 1591354 - RNA, 19 nt, Artificial Sequence
  Description of Artificial Sequence: Synthetic oligonucleotide
  Antisense strand to SEQ ID NO: 1591353
cauuucuccaucuacuacc

SEQ ID NO: 1591355 - RNA, 19 nt, Artificial Sequence
  Description of Artificial Sequence: Synthetic oligonucleotide
  Sense strand starting at position 651 of SEQ ID NO: 1560311
aaggaugcacuucgaguaa

SEQ ID NO: 1591356 - RNA, 19 nt, Artificial Sequence
  Description of Artificial Sequence: Synthetic oligonucleotide
  Antisense strand to SEQ ID NO: 1591355
uuacucgaagugcauccuu

SEQ ID NO: 1591357 - RNA, 19 nt, Artificial Sequence
  Description of Artificial Sequence: Synthetic oligonucleotide
  Sense strand starting at position 660 of SEQ ID NO: 1560311
cuucgaguaaccuguggga

SEQ ID NO: 1591358 - RNA, 19 nt, Artificial Sequence
  Description of Artificial Sequence: Synthetic oligonucleotide
  Antisense strand to SEQ ID NO: 1591357
ucccacagguuacucgaag

SEQ ID NO: 1591359 - RNA, 19 nt, Artificial Sequence
  Description of Artificial Sequence: Synthetic oligonucleotide
  Sense strand starting at position 662 of SEQ ID NO: 1560311
ucgaguaaccugugggaau

SEQ ID NO: 1591360 - RNA, 19 nt, Artificial Sequence
  Description of Artificial Sequence: Synthetic oligonucleotide
  Antisense strand to SEQ ID NO: 1591359
auucccacagguuacucga

SEQ ID NO: 1591361 - RNA, 19 nt, Artificial Sequence
  Description of Artificial Sequence: Synthetic oligonucleotide
  Sense strand starting at position 663 of SEQ ID NO: 1560311
cgaguaaccugugggaauu

SEQ ID NO: 1591362 - RNA, 19 nt, Artificial Sequence
  Description of Artificial Sequence: Synthetic oligonucleotide
  Antisense strand to SEQ ID NO: 1591361
aauucccacagguuacucg

SEQ ID NO: 1591363 - RNA, 19 nt, Artificial Sequence
  Description of Artificial Sequence: Synthetic oligonucleotide
  Sense strand starting at position 664 of SEQ ID NO: 1560311
gaguaaccugugggaauuc

SEQ ID NO: 1591364 - RNA, 19 nt, Artificial Sequence
  Description of Artificial Sequence: Synthetic oligonucleotide
  Antisense strand to SEQ ID NO: 1591363
gaauucccacagguuacuc

SEQ ID NO: 1591365 - RNA, 19 nt, Artificial Sequence
  Description of Artificial Sequence: Synthetic oligonucleotide
  Sense strand starting at position 828 of SEQ ID NO: 1560311
ggaugacaucuuugauguc

SEQ ID NO: 1591366 - RNA, 19 nt, Artificial Sequence
  Description of Artificial Sequence: Synthetic oligonucleotide
  Antisense strand to SEQ ID NO: 1591365
gacaucaaagaugucaucc

SEQ ID NO: 1591367 - RNA, 19 nt, Artificial Sequence
  Description of Artificial Sequence: Synthetic oligonucleotide
  Sense strand starting at position 852 of SEQ ID NO: 1560311
gcagcaggucgauugugua

SEQ ID NO: 1591368 - RNA, 19 nt, Artificial Sequence
  Description of Artificial Sequence: Synthetic oligonucleotide
  Antisense strand to SEQ ID NO: 1591367
uacacaaucgaccugcugc

SEQ ID NO: 1591369 - RNA, 19 nt, Artificial Sequence
  Description of Artificial Sequence: Synthetic oligonucleotide
  Sense strand starting at position 1145 of SEQ ID NO: 1560311
cccugaauccagggaacuu

SEQ ID NO: 1591370 - RNA, 19 nt, Artificial Sequence
  Description of Artificial Sequence: Synthetic oligonucleotide
  Antisense strand to SEQ ID NO: 1591369
aaguucccuggauucaggg

SEQ ID NO: 1591371 - RNA, 19 nt, Artificial Sequence
  Description of Artificial Sequence: Synthetic oligonucleotide
  Sense strand starting at position 1214 of SEQ ID NO: 1560311
uggguaugcuggcucagua

SEQ ID NO: 1591372 - RNA, 19 nt, Artificial Sequence
  Description of Artificial Sequence: Synthetic oligonucleotide
  Antisense strand to SEQ ID NO: 1591371
uacugagccagcauaccca

SEQ ID NO: 1591373 - RNA, 19 nt, Artificial Sequence
  Description of Artificial Sequence: Synthetic oligonucleotide
  Sense strand starting at position 1252 of SEQ ID NO: 1560311
ucagcuugucccgaucuau

SEQ ID NO: 1591374 - RNA, 19 nt, Artificial Sequence
  Description of Artificial Sequence: Synthetic oligonucleotide
  Antisense strand to SEQ ID NO: 1591373
auagaucgggacaagcuga

SEQ ID NO: 1591375 - RNA, 19 nt, Artificial Sequence
  Description of Artificial Sequence: Synthetic oligonucleotide
  Sense strand starting at position 1351 of SEQ ID NO: 1560311
cguaccaguucucagggaa

SEQ ID NO: 1591376 - RNA, 19 nt, Artificial Sequence
  Description of Artificial Sequence: Synthetic oligonucleotide
  Antisense strand to SEQ ID NO: 1591375
uucccugagaacugguacg

SEQ ID NO: 1591377 - RNA, 19 nt, Artificial Sequence
  Description of Artificial Sequence: Synthetic oligonucleotide
  Sense strand starting at position 1539 of SEQ ID NO: 1560311
gugcgaucaccuugagguu

SEQ ID NO: 1591378 - RNA, 19 nt, Artificial Sequence
  Description of Artificial Sequence: Synthetic oligonucleotide
  Antisense strand to SEQ ID NO: 1591377
aaccucaaggugaucgcac

SEQ ID NO: 1591379 - RNA, 19 nt, Artificial Sequence
  Description of Artificial Sequence: Synthetic oligonucleotide
  Sense strand starting at position 2659 of SEQ ID NO: 1560311
ggaggugaggccuaacauu

SEQ ID NO: 1591380 - RNA, 19 nt, Artificial Sequence
  Description of Artificial Sequence: Synthetic oligonucleotide
  Antisense strand to SEQ ID NO: 1591379
aauguuaggccucaccucc

SEQ ID NO: 1591381 - RNA, 19 nt, Artificial Sequence
  Description of Artificial Sequence: Synthetic oligonucleotide
  Sense strand starting at position 2669 of SEQ ID NO: 1560311
ccuaacauugggcgaagaa

SEQ ID NO: 1591382 - RNA, 19 nt, Artificial Sequence
  Description of Artificial Sequence: Synthetic oligonucleotide
  Antisense strand to SEQ ID NO: 1591381
uucuucgcccaauguuagg

SEQ ID NO: 1591383 - RNA, 19 nt, Artificial Sequence
  Description of Artificial Sequence: Synthetic oligonucleotide
  Sense strand starting at position 2868 of SEQ ID NO: 1560311
gguauuagcggcuggagga

SEQ ID NO: 1591384 - RNA, 19 nt, Artificial Sequence
  Description of Artificial Sequence: Synthetic oligonucleotide
  Antisense strand to SEQ ID NO: 1591383
uccuccagccgcuaauacc

SEQ ID NO: 1591385 - RNA, 19 nt, Artificial Sequence
  Description of Artificial Sequence: Synthetic oligonucleotide
  Sense strand starting at position 3102 of SEQ ID NO: 1560311
gccacugauguucaagcga

SEQ ID NO: 1591386 - RNA, 19 nt, Artificial Sequence
  Description of Artificial Sequence: Synthetic oligonucleotide
  Antisense strand to SEQ ID NO: 1591385
ucgcuugaacaucaguggc

SEQ ID NO: 1591387 - RNA, 19 nt, Artificial Sequence
  Description of Artificial Sequence: Synthetic oligonucleotide
  Sense strand starting at position 3187 of SEQ ID NO: 1560311
cguggauacccugauuccu

SEQ ID NO: 1591388 - RNA, 19 nt, Artificial Sequence
  Description of Artificial Sequence: Synthetic oligonucleotide
  Antisense strand to SEQ ID NO: 1591387
aggaaucaggguauccacg

SEQ ID NO: 1591389 - RNA, 19 nt, Artificial Sequence
  Description of Artificial Sequence: Synthetic oligonucleotide
  Sense strand starting at position 3231 of SEQ ID NO: 1560311
gaggacccggccuaugaau

SEQ ID NO: 1591390 - RNA, 19 nt, Artificial Sequence
  Description of Artificial Sequence: Synthetic oligonucleotide
  Antisense strand to SEQ ID NO: 1591389
auucauaggccggguccuc

SEQ ID NO: 1591391 - RNA, 19 nt, Artificial Sequence
  Description of Artificial Sequence: Synthetic oligonucleotide
  Sense strand starting at position 3242 of SEQ ID NO: 1560311
cuaugaaugacuggaguuc

SEQ ID NO: 1591392 - RNA, 19 nt, Artificial Sequence
  Description of Artificial Sequence: Synthetic oligonucleotide
  Antisense strand to SEQ ID NO: 1591391
gaacuccagucauucauag

SEQ ID NO: 1591393 - RNA, 19 nt, Artificial Sequence
  Description of Artificial Sequence: Synthetic oligonucleotide
  Sense strand starting at position 3333 of SEQ ID NO: 1560311
cccugcugucccugcaaga

SEQ ID NO: 1591394 - RNA, 19 nt, Artificial Sequence
  Description of Artificial Sequence: Synthetic oligonucleotide
  Antisense strand to SEQ ID NO: 1591393
ucuugcagggacagcaggg

SEQ ID NO: 1591395 - RNA, 19 nt, Artificial Sequence
  Description of Artificial Sequence: Synthetic oligonucleotide
  Sense strand starting at position 3679 of SEQ ID NO: 1560311
uugcaaccuucucccgaua

SEQ ID NO: 1591396 - RNA, 19 nt, Artificial Sequence
  Description of Artificial Sequence: Synthetic oligonucleotide
  Antisense strand to SEQ ID NO: 1591395
uaucgggagaagguugcaa

SEQ ID NO: 1591397 - RNA, 19 nt, Artificial Sequence
  Description of Artificial Sequence: Synthetic oligonucleotide
  Sense strand starting at position 3681 of SEQ ID NO: 1560311
gcaaccuucucccgauauc

SEQ ID NO: 1591398 - RNA, 19 nt, Artificial Sequence
  Description of Artificial Sequence: Synthetic oligonucleotide
  Antisense strand to SEQ ID NO: 1591397
gauaucgggagaagguugc

SEQ ID NO: 1591399 - RNA, 19 nt, Artificial Sequence
  Description of Artificial Sequence: Synthetic oligonucleotide
  Sense strand starting at position 3690 of SEQ ID NO: 1560311
ucccgauauccuugaacau

SEQ ID NO: 1591400 - RNA, 19 nt, Artificial Sequence
  Description of Artificial Sequence: Synthetic oligonucleotide
  Antisense strand to SEQ ID NO: 1591399
auguucaaggauaucggga

SEQ ID NO: 1591401 - RNA, 19 nt, Artificial Sequence
  Description of Artificial Sequence: Synthetic oligonucleotide
  Sense strand starting at position 3691 of SEQ ID NO: 1560311
cccgauauccuugaacauu

SEQ ID NO: 1591402 - RNA, 19 nt, Artificial Sequence
  Description of Artificial Sequence: Synthetic oligonucleotide
  Antisense strand to SEQ ID NO: 1591401
aauguucaaggauaucggg

SEQ ID NO: 1591403 - RNA, 19 nt, Artificial Sequence
  Description of Artificial Sequence: Synthetic oligonucleotide
  Sense strand starting at position 3765 of SEQ ID NO: 1560311
aucacauuccuguaguaua

SEQ ID NO: 1591404 - RNA, 19 nt, Artificial Sequence
  Description of Artificial Sequence: Synthetic oligonucleotide
  Antisense strand to SEQ ID NO: 1591403
uauacuacaggaaugugau

SEQ ID NO: 1591405 - RNA, 19 nt, Artificial Sequence
  Description of Artificial Sequence: Synthetic oligonucleotide
  Sense strand starting at position 3768 of SEQ ID NO: 1560311
acauuccuguaguauagau

SEQ ID NO: 1591406 - RNA, 19 nt, Artificial Sequence
  Description of Artificial Sequence: Synthetic oligonucleotide
  Antisense strand to SEQ ID NO: 1591405
aucuauacuacaggaaugu

SEQ ID NO: 1591407 - RNA, 19 nt, Artificial Sequence
  Description of Artificial Sequence: Synthetic oligonucleotide
  Sense strand starting at position 3770 of SEQ ID NO: 1560311
auuccuguaguauagauca

SEQ ID NO: 1591408 - RNA, 19 nt, Artificial Sequence
  Description of Artificial Sequence: Synthetic oligonucleotide
  Antisense strand to SEQ ID NO: 1591407
ugaucuauacuacaggaau

SEQ ID NO: 1591409 - RNA, 19 nt, Artificial Sequence
  Description of Artificial Sequence: Synthetic oligonucleotide
  Sense strand starting at position 3953 of SEQ ID NO: 1560311
uggaguuucgaucauagcu

SEQ ID NO: 1591410 - RNA, 19 nt, Artificial Sequence
  Description of Artificial Sequence: Synthetic oligonucleotide
  Antisense strand to SEQ ID NO: 1591409
agcuaugaucgaaacucca

SEQ ID NO: 1591411 - RNA, 19 nt, Artificial Sequence
  Description of Artificial Sequence: Synthetic oligonucleotide
  Sense strand starting at position 3955 of SEQ ID NO: 1560311
gaguuucgaucauagcuca

SEQ ID NO: 1591412 - RNA, 19 nt, Artificial Sequence
  Description of Artificial Sequence: Synthetic oligonucleotide
  Antisense strand to SEQ ID NO: 1591411
ugagcuaugaucgaaacuc

SEQ ID NO: 1591413 - RNA, 19 nt, Artificial Sequence
  Description of Artificial Sequence: Synthetic oligonucleotide
  Sense strand starting at position 152 of SEQ ID NO: 1560312
agcccucagggucaaagau

SEQ ID NO: 1591414 - RNA, 19 nt, Artificial Sequence
  Description of Artificial Sequence: Synthetic oligonucleotide
  Antisense strand to SEQ ID NO: 1591413
aucuuugacccugagggcu

SEQ ID NO: 1591415 - RNA, 19 nt, Artificial Sequence
  Description of Artificial Sequence: Synthetic oligonucleotide
  Sense strand starting at position 161 of SEQ ID NO: 1560312
ggucaaagaugaguuccua

SEQ ID NO: 1591416 - RNA, 19 nt, Artificial Sequence
  Description of Artificial Sequence: Synthetic oligonucleotide
  Antisense strand to SEQ ID NO: 1591415
uaggaacucaucuuugacc

SEQ ID NO: 1591417 - RNA, 19 nt, Artificial Sequence
  Description of Artificial Sequence: Synthetic oligonucleotide
  Sense strand starting at position 165 of SEQ ID NO: 1560312
aaagaugaguuccuaacug

SEQ ID NO: 1591418 - RNA, 19 nt, Artificial Sequence
  Description of Artificial Sequence: Synthetic oligonucleotide
  Antisense strand to SEQ ID NO: 1591417
caguuaggaacucaucuuu

SEQ ID NO: 1591419 - RNA, 19 nt, Artificial Sequence
  Description of Artificial Sequence: Synthetic oligonucleotide
  Sense strand starting at position 211 of SEQ ID NO: 1560312
accucuaggucucaaagua

SEQ ID NO: 1591420 - RNA, 19 nt, Artificial Sequence
  Description of Artificial Sequence: Synthetic oligonucleotide
  Antisense strand to SEQ ID NO: 1591419
uacuuugagaccuagaggu

SEQ ID NO: 1591421 - RNA, 19 nt, Artificial Sequence
  Description of Artificial Sequence: Synthetic oligonucleotide
  Sense strand starting at position 287 of SEQ ID NO: 1560312
cucagugaggcagaguaua

SEQ ID NO: 1591422 - RNA, 19 nt, Artificial Sequence
  Description of Artificial Sequence: Synthetic oligonucleotide
  Antisense strand to SEQ ID NO: 1591421
uauacucugccucacugag

SEQ ID NO: 1591423 - RNA, 19 nt, Artificial Sequence
  Description of Artificial Sequence: Synthetic oligonucleotide
  Sense strand starting at position 299 of SEQ ID NO: 1560312
gaguauaugcaguggcaga

SEQ ID NO: 1591424 - RNA, 19 nt, Artificial Sequence
  Description of Artificial Sequence: Synthetic oligonucleotide
  Antisense strand to SEQ ID NO: 1591423
ucugccacugcauauacuc

SEQ ID NO: 1591425 - RNA, 19 nt, Artificial Sequence
  Description of Artificial Sequence: Synthetic oligonucleotide
  Sense strand starting at position 300 of SEQ ID NO: 1560312
aguauaugcaguggcagau

SEQ ID NO: 1591426 - RNA, 19 nt, Artificial Sequence
  Description of Artificial Sequence: Synthetic oligonucleotide
  Antisense strand to SEQ ID NO: 1591425
aucugccacugcauauacu

SEQ ID NO: 1591427 - RNA, 19 nt, Artificial Sequence
  Description of Artificial Sequence: Synthetic oligonucleotide
  Sense strand starting at position 418 of SEQ ID NO: 1560312
ugcggucaucuagagaacu

SEQ ID NO: 1591428 - RNA, 19 nt, Artificial Sequence
  Description of Artificial Sequence: Synthetic oligonucleotide
  Antisense strand to SEQ ID NO: 1591427
aguucucuagaugaccgca

SEQ ID NO: 1591429 - RNA, 19 nt, Artificial Sequence
  Description of Artificial Sequence: Synthetic oligonucleotide
  Sense strand starting at position 500 of SEQ ID NO: 1560312
cuuccucauccagggauau

SEQ ID NO: 1591430 - RNA, 19 nt, Artificial Sequence
  Description of Artificial Sequence: Synthetic oligonucleotide
  Antisense strand to SEQ ID NO: 1591429
auaucccuggaugaggaag

SEQ ID NO: 1591431 - RNA, 19 nt, Artificial Sequence
  Description of Artificial Sequence: Synthetic oligonucleotide
  Sense strand starting at position 501 of SEQ ID NO: 1560312
uuccucauccagggauauc

SEQ ID NO: 1591432 - RNA, 19 nt, Artificial Sequence
  Description of Artificial Sequence: Synthetic oligonucleotide
  Antisense strand to SEQ ID NO: 1591431
gauaucccuggaugaggaa

SEQ ID NO: 1591433 - RNA, 19 nt, Artificial Sequence
  Description of Artificial Sequence: Synthetic oligonucleotide
  Sense strand starting at position 604 of SEQ ID NO: 1560312
cucagucucccucaugauu

SEQ ID NO: 1591434 - RNA, 19 nt, Artificial Sequence
  Description of Artificial Sequence: Synthetic oligonucleotide
  Antisense strand to SEQ ID NO: 1591433
aaucaugagggagacugag

SEQ ID NO: 1591435 - RNA, 19 nt, Artificial Sequence
  Description of Artificial Sequence: Synthetic oligonucleotide
  Sense strand starting at position 622 of SEQ ID NO: 1560312
uuuauauucucgucugauu

SEQ ID NO: 1591436 - RNA, 19 nt, Artificial Sequence
  Description of Artificial Sequence: Synthetic oligonucleotide
  Antisense strand to SEQ ID NO: 1591435
aaucagacgagaauauaaa

SEQ ID NO: 1591437 - RNA, 19 nt, Artificial Sequence
  Description of Artificial Sequence: Synthetic oligonucleotide
  Sense strand starting at position 627 of SEQ ID NO: 1560312
auucucgucugauucugua

SEQ ID NO: 1591438 - RNA, 19 nt, Artificial Sequence
  Description of Artificial Sequence: Synthetic oligonucleotide
  Antisense strand to SEQ ID NO: 1591437
uacagaaucagacgagaau

SEQ ID NO: 1591439 - RNA, 19 nt, Artificial Sequence
  Description of Artificial Sequence: Synthetic oligonucleotide
  Sense strand starting at position 631 of SEQ ID NO: 1560312
ucgucugauucuguagcua

SEQ ID NO: 1591440 - RNA, 19 nt, Artificial Sequence
  Description of Artificial Sequence: Synthetic oligonucleotide
  Antisense strand to SEQ ID NO: 1591439
uagcuacagaaucagacga

SEQ ID NO: 1591441 - RNA, 19 nt, Artificial Sequence
  Description of Artificial Sequence: Synthetic oligonucleotide
  Sense strand starting at position 1199 of SEQ ID NO: 1560312
cgagacuggugacgagaaa

SEQ ID NO: 1591442 - RNA, 19 nt, Artificial Sequence
  Description of Artificial Sequence: Synthetic oligonucleotide
  Antisense strand to SEQ ID NO: 1591441
uuucucgucaccagucucg

SEQ ID NO: 1591443 - RNA, 19 nt, Artificial Sequence
  Description of Artificial Sequence: Synthetic oligonucleotide
  Sense strand starting at position 2011 of SEQ ID NO: 1560312
uaggccuguugauuaaaua

SEQ ID NO: 1591444 - RNA, 19 nt, Artificial Sequence
  Description of Artificial Sequence: Synthetic oligonucleotide
  Antisense strand to SEQ ID NO: 1591443
uauuuaaucaacaggccua

SEQ ID NO: 1591445 - RNA, 19 nt, Artificial Sequence
  Description of Artificial Sequence: Synthetic oligonucleotide
  Sense strand starting at position 2012 of SEQ ID NO: 1560312
aggccuguugauuaaauaa

SEQ ID NO: 1591446 - RNA, 19 nt, Artificial Sequence
  Description of Artificial Sequence: Synthetic oligonucleotide
  Antisense strand to SEQ ID NO: 1591445
uuauuuaaucaacaggccu

SEQ ID NO: 1591447 - RNA, 19 nt, Artificial Sequence
  Description of Artificial Sequence: Synthetic oligonucleotide
  Sense strand starting at position 2090 of SEQ ID NO: 1560312
ggcugcuauuauuaucaga

SEQ ID NO: 1591448 - RNA, 19 nt, Artificial Sequence
  Description of Artificial Sequence: Synthetic oligonucleotide
  Antisense strand to SEQ ID NO: 1591447
ucugauaauaauagcagcc

SEQ ID NO: 1591449 - RNA, 19 nt, Artificial Sequence
  Description of Artificial Sequence: Synthetic oligonucleotide
  Sense strand starting at position 2092 of SEQ ID NO: 1560312
cugcuauuauuaucagaga

SEQ ID NO: 1591450 - RNA, 19 nt, Artificial Sequence
  Description of Artificial Sequence: Synthetic oligonucleotide
  Antisense strand to SEQ ID NO: 1591449
ucucugauaauaauagcag

SEQ ID NO: 1591451 - RNA, 19 nt, Artificial Sequence
  Description of Artificial Sequence: Synthetic oligonucleotide
  Sense strand starting at position 2093 of SEQ ID NO: 1560312
ugcuauuauuaucagagaa

SEQ ID NO: 1591452 - RNA, 19 nt, Artificial Sequence
  Description of Artificial Sequence: Synthetic oligonucleotide
  Antisense strand to SEQ ID NO: 1591451
uucucugauaauaauagca

SEQ ID NO: 1591453 - RNA, 19 nt, Artificial Sequence
  Description of Artificial Sequence: Synthetic oligonucleotide
  Sense strand starting at position 2169 of SEQ ID NO: 1560312
guacuuauuuggcgugcau

SEQ ID NO: 1591454 - RNA, 19 nt, Artificial Sequence
  Description of Artificial Sequence: Synthetic oligonucleotide
  Antisense strand to SEQ ID NO: 1591453
augcacgccaaauaaguac

SEQ ID NO: 1591455 - RNA, 19 nt, Artificial Sequence
  Description of Artificial Sequence: Synthetic oligonucleotide
  Sense strand starting at position 2171 of SEQ ID NO: 1560312
acuuauuuggcgugcauua

SEQ ID NO: 1591456 - RNA, 19 nt, Artificial Sequence
  Description of Artificial Sequence: Synthetic oligonucleotide
  Antisense strand to SEQ ID NO: 1591455
uaaugcacgccaaauaagu

SEQ ID NO: 1591457 - RNA, 19 nt, Artificial Sequence
  Description of Artificial Sequence: Synthetic oligonucleotide
  Sense strand starting at position 2173 of SEQ ID NO: 1560312
uuauuuggcgugcauuaga

SEQ ID NO: 1591458 - RNA, 19 nt, Artificial Sequence
  Description of Artificial Sequence: Synthetic oligonucleotide
  Antisense strand to SEQ ID NO: 1591457
ucuaaugcacgccaaauaa

SEQ ID NO: 1591459 - RNA, 19 nt, Artificial Sequence
  Description of Artificial Sequence: Synthetic oligonucleotide
  Sense strand starting at position 2220 of SEQ ID NO: 1560312
ugagauuucucagauacug

SEQ ID NO: 1591460 - RNA, 19 nt, Artificial Sequence
  Description of Artificial Sequence: Synthetic oligonucleotide
  Antisense strand to SEQ ID NO: 1591459
caguaucugagaaaucuca

SEQ ID NO: 1591461 - RNA, 19 nt, Artificial Sequence
  Description of Artificial Sequence: Synthetic oligonucleotide
  Sense strand starting at position 2228 of SEQ ID NO: 1560312
cucagauacugcuuagaau

SEQ ID NO: 1591462 - RNA, 19 nt, Artificial Sequence
  Description of Artificial Sequence: Synthetic oligonucleotide
  Antisense strand to SEQ ID NO: 1591461
auucuaagcaguaucugag

SEQ ID NO: 1591463 - RNA, 19 nt, Artificial Sequence
  Description of Artificial Sequence: Synthetic oligonucleotide
  Sense strand starting at position 2237 of SEQ ID NO: 1560312
ugcuuagaaugagacugua

SEQ ID NO: 1591464 - RNA, 19 nt, Artificial Sequence
  Description of Artificial Sequence: Synthetic oligonucleotide
  Antisense strand to SEQ ID NO: 1591463
uacagucucauucuaagca

SEQ ID NO: 1591465 - RNA, 19 nt, Artificial Sequence
  Description of Artificial Sequence: Synthetic oligonucleotide
  Sense strand starting at position 2312 of SEQ ID NO: 1560312
uggcaaaguucuccaagga

SEQ ID NO: 1591466 - RNA, 19 nt, Artificial Sequence
  Description of Artificial Sequence: Synthetic oligonucleotide
  Antisense strand to SEQ ID NO: 1591465
uccuuggagaacuuugcca

SEQ ID NO: 1591467 - RNA, 19 nt, Artificial Sequence
  Description of Artificial Sequence: Synthetic oligonucleotide
  Sense strand starting at position 2316 of SEQ ID NO: 1560312
aaaguucuccaaggaguac

SEQ ID NO: 1591468 - RNA, 19 nt, Artificial Sequence
  Description of Artificial Sequence: Synthetic oligonucleotide
  Antisense strand to SEQ ID NO: 1591467
guacuccuuggagaacuuu

SEQ ID NO: 1591469 - RNA, 19 nt, Artificial Sequence
  Description of Artificial Sequence: Synthetic oligonucleotide
  Sense strand starting at position 2336 of SEQ ID NO: 1560312
ccaauaaccgaccgauauc

SEQ ID NO: 1591470 - RNA, 19 nt, Artificial Sequence
  Description of Artificial Sequence: Synthetic oligonucleotide
  Antisense strand to SEQ ID NO: 1591469
gauaucggucgguuauugg

SEQ ID NO: 1591471 - RNA, 19 nt, Artificial Sequence
  Description of Artificial Sequence: Synthetic oligonucleotide
  Sense strand starting at position 2353 of SEQ ID NO: 1560312
ucuaacacuuacuguguaa

SEQ ID NO: 1591472 - RNA, 19 nt, Artificial Sequence
  Description of Artificial Sequence: Synthetic oligonucleotide
  Antisense strand to SEQ ID NO: 1591471
uuacacaguaaguguuaga

SEQ ID NO: 1591473 - RNA, 19 nt, Artificial Sequence
  Description of Artificial Sequence: Synthetic oligonucleotide
  Sense strand starting at position 2423 of SEQ ID NO: 1560312
cuugcuaugugucagauac

SEQ ID NO: 1591474 - RNA, 19 nt, Artificial Sequence
  Description of Artificial Sequence: Synthetic oligonucleotide
  Antisense strand to SEQ ID NO: 1591473
guaucugacacauagcaag

SEQ ID NO: 1591475 - RNA, 19 nt, Artificial Sequence
  Description of Artificial Sequence: Synthetic oligonucleotide
  Sense strand starting at position 2487 of SEQ ID NO: 1560312
cccuaugauguaggaacua

SEQ ID NO: 1591476 - RNA, 19 nt, Artificial Sequence
  Description of Artificial Sequence: Synthetic oligonucleotide
  Antisense strand to SEQ ID NO: 1591475
uaguuccuacaucauaggg

SEQ ID NO: 1591477 - RNA, 19 nt, Artificial Sequence
  Description of Artificial Sequence: Synthetic oligonucleotide
  Sense strand starting at position 2504 of SEQ ID NO: 1560312
uacgaaugccuacgaacua

SEQ ID NO: 1591478 - RNA, 19 nt, Artificial Sequence
  Description of Artificial Sequence: Synthetic oligonucleotide
  Antisense strand to SEQ ID NO: 1591477
uaguucguaggcauucgua

SEQ ID NO: 1591479 - RNA, 19 nt, Artificial Sequence
  Description of Artificial Sequence: Synthetic oligonucleotide
  Sense strand starting at position 2562 of SEQ ID NO: 1560312
agacuaucaccuggcaauu

SEQ ID NO: 1591480 - RNA, 19 nt, Artificial Sequence
  Description of Artificial Sequence: Synthetic oligonucleotide
  Antisense strand to SEQ ID NO: 1591479
aauugccaggugauagucu

SEQ ID NO: 1591481 - RNA, 19 nt, Artificial Sequence
  Description of Artificial Sequence: Synthetic oligonucleotide
  Sense strand starting at position 2686 of SEQ ID NO: 1560312
uuaacagacuccuggaaag

SEQ ID NO: 1591482 - RNA, 19 nt, Artificial Sequence
  Description of Artificial Sequence: Synthetic oligonucleotide
  Antisense strand to SEQ ID NO: 1591481
cuuuccaggagucuguuaa

SEQ ID NO: 1591483 - RNA, 19 nt, Artificial Sequence
  Description of Artificial Sequence: Synthetic oligonucleotide
  Sense strand starting at position 2765 of SEQ ID NO: 1560312
ggguaagauuugcaccaua

SEQ ID NO: 1591484 - RNA, 19 nt, Artificial Sequence
  Description of Artificial Sequence: Synthetic oligonucleotide
  Antisense strand to SEQ ID NO: 1591483
uauggugcaaaucuuaccc

SEQ ID NO: 1591485 - RNA, 19 nt, Artificial Sequence
  Description of Artificial Sequence: Synthetic oligonucleotide
  Sense strand starting at position 2852 of SEQ ID NO: 1560312
acgaacaaauccugacaga

SEQ ID NO: 1591486 - RNA, 19 nt, Artificial Sequence
  Description of Artificial Sequence: Synthetic oligonucleotide
  Antisense strand to SEQ ID NO: 1591485
ucugucaggauuuguucgu

SEQ ID NO: 1591487 - RNA, 19 nt, Artificial Sequence
  Description of Artificial Sequence: Synthetic oligonucleotide
  Sense strand starting at position 581 of SEQ ID NO: 1560313
uaggccuguugauuaaaua

SEQ ID NO: 1591488 - RNA, 19 nt, Artificial Sequence
  Description of Artificial Sequence: Synthetic oligonucleotide
  Antisense strand to SEQ ID NO: 1591487
uauuuaaucaacaggccua

SEQ ID NO: 1591489 - RNA, 19 nt, Artificial Sequence
  Description of Artificial Sequence: Synthetic oligonucleotide
  Sense strand starting at position 582 of SEQ ID NO: 1560313
aggccuguugauuaaauaa

SEQ ID NO: 1591490 - RNA, 19 nt, Artificial Sequence
  Description of Artificial Sequence: Synthetic oligonucleotide
  Antisense strand to SEQ ID NO: 1591489
uuauuuaaucaacaggccu

SEQ ID NO: 1591491 - RNA, 19 nt, Artificial Sequence
  Description of Artificial Sequence: Synthetic oligonucleotide
  Sense strand starting at position 660 of SEQ ID NO: 1560313
ggcugcuauuauuaucaga

SEQ ID NO: 1591492 - RNA, 19 nt, Artificial Sequence
  Description of Artificial Sequence: Synthetic oligonucleotide
  Antisense strand to SEQ ID NO: 1591491
ucugauaauaauagcagcc

SEQ ID NO: 1591493 - RNA, 19 nt, Artificial Sequence
  Description of Artificial Sequence: Synthetic oligonucleotide
  Sense strand starting at position 662 of SEQ ID NO: 1560313
cugcuauuauuaucagaga

SEQ ID NO: 1591494 - RNA, 19 nt, Artificial Sequence
  Description of Artificial Sequence: Synthetic oligonucleotide
  Antisense strand to SEQ ID NO: 1591493
ucucugauaauaauagcag

SEQ ID NO: 1591495 - RNA, 19 nt, Artificial Sequence
  Description of Artificial Sequence: Synthetic oligonucleotide
  Sense strand starting at position 663 of SEQ ID NO: 1560313
ugcuauuauuaucagagaa

SEQ ID NO: 1591496 - RNA, 19 nt, Artificial Sequence
  Description of Artificial Sequence: Synthetic oligonucleotide
  Antisense strand to SEQ ID NO: 1591495
uucucugauaauaauagca

SEQ ID NO: 1591497 - RNA, 19 nt, Artificial Sequence
  Description of Artificial Sequence: Synthetic oligonucleotide
  Sense strand starting at position 739 of SEQ ID NO: 1560313
guacuuauuuggcgugcau

SEQ ID NO: 1591498 - RNA, 19 nt, Artificial Sequence
  Description of Artificial Sequence: Synthetic oligonucleotide
  Antisense strand to SEQ ID NO: 1591497
augcacgccaaauaaguac

SEQ ID NO: 1591499 - RNA, 19 nt, Artificial Sequence
  Description of Artificial Sequence: Synthetic oligonucleotide
  Sense strand starting at position 741 of SEQ ID NO: 1560313
acuuauuuggcgugcauua

SEQ ID NO: 1591500 - RNA, 19 nt, Artificial Sequence
  Description of Artificial Sequence: Synthetic oligonucleotide
  Antisense strand to SEQ ID NO: 1591499
uaaugcacgccaaauaagu

SEQ ID NO: 1591501 - RNA, 19 nt, Artificial Sequence
  Description of Artificial Sequence: Synthetic oligonucleotide
  Sense strand starting at position 743 of SEQ ID NO: 1560313
uuauuuggcgugcauuaga

SEQ ID NO: 1591502 - RNA, 19 nt, Artificial Sequence
  Description of Artificial Sequence: Synthetic oligonucleotide
  Antisense strand to SEQ ID NO: 1591501
ucuaaugcacgccaaauaa

SEQ ID NO: 1591503 - RNA, 19 nt, Artificial Sequence
  Description of Artificial Sequence: Synthetic oligonucleotide
  Sense strand starting at position 790 of SEQ ID NO: 1560313
ugagauuucucagauacug

SEQ ID NO: 1591504 - RNA, 19 nt, Artificial Sequence
  Description of Artificial Sequence: Synthetic oligonucleotide
  Antisense strand to SEQ ID NO: 1591503
caguaucugagaaaucuca

SEQ ID NO: 1591505 - RNA, 19 nt, Artificial Sequence
  Description of Artificial Sequence: Synthetic oligonucleotide
  Sense strand starting at position 798 of SEQ ID NO: 1560313
cucagauacugcuuagaau

SEQ ID NO: 1591506 - RNA, 19 nt, Artificial Sequence
  Description of Artificial Sequence: Synthetic oligonucleotide
  Antisense strand to SEQ ID NO: 1591505
auucuaagcaguaucugag

SEQ ID NO: 1591507 - RNA, 19 nt, Artificial Sequence
  Description of Artificial Sequence: Synthetic oligonucleotide
  Sense strand starting at position 807 of SEQ ID NO: 1560313
ugcuuagaaugagacugua

SEQ ID NO: 1591508 - RNA, 19 nt, Artificial Sequence
  Description of Artificial Sequence: Synthetic oligonucleotide
  Antisense strand to SEQ ID NO: 1591507
uacagucucauucuaagca

SEQ ID NO: 1591509 - RNA, 19 nt, Artificial Sequence
  Description of Artificial Sequence: Synthetic oligonucleotide
  Sense strand starting at position 882 of SEQ ID NO: 1560313
uggcaaaguucuccaagga

SEQ ID NO: 1591510 - RNA, 19 nt, Artificial Sequence
  Description of Artificial Sequence: Synthetic oligonucleotide
  Antisense strand to SEQ ID NO: 1591509
uccuuggagaacuuugcca

SEQ ID NO: 1591511 - RNA, 19 nt, Artificial Sequence
  Description of Artificial Sequence: Synthetic oligonucleotide
  Sense strand starting at position 886 of SEQ ID NO: 1560313
aaaguucuccaaggaguac

SEQ ID NO: 1591512 - RNA, 19 nt, Artificial Sequence
  Description of Artificial Sequence: Synthetic oligonucleotide
  Antisense strand to SEQ ID NO: 1591511
guacuccuuggagaacuuu

SEQ ID NO: 1591513 - RNA, 19 nt, Artificial Sequence
  Description of Artificial Sequence: Synthetic oligonucleotide
  Sense strand starting at position 906 of SEQ ID NO: 1560313
ccaauaaccgaccgauauc

SEQ ID NO: 1591514 - RNA, 19 nt, Artificial Sequence
  Description of Artificial Sequence: Synthetic oligonucleotide
  Antisense strand to SEQ ID NO: 1591513
gauaucggucgguuauugg

SEQ ID NO: 1591515 - RNA, 19 nt, Artificial Sequence
  Description of Artificial Sequence: Synthetic oligonucleotide
  Sense strand starting at position 923 of SEQ ID NO: 1560313
ucuaacacuuacuguguaa

SEQ ID NO: 1591516 - RNA, 19 nt, Artificial Sequence
  Description of Artificial Sequence: Synthetic oligonucleotide
  Antisense strand to SEQ ID NO: 1591515
uuacacaguaaguguuaga

SEQ ID NO: 1591517 - RNA, 19 nt, Artificial Sequence
  Description of Artificial Sequence: Synthetic oligonucleotide
  Sense strand starting at position 993 of SEQ ID NO: 1560313
cuugcuaugugucagauac

SEQ ID NO: 1591518 - RNA, 19 nt, Artificial Sequence
  Description of Artificial Sequence: Synthetic oligonucleotide
  Antisense strand to SEQ ID NO: 1591517
guaucugacacauagcaag

SEQ ID NO: 1591519 - RNA, 19 nt, Artificial Sequence
  Description of Artificial Sequence: Synthetic oligonucleotide
  Sense strand starting at position 1057 of SEQ ID NO: 1560313
cccuaugauguaggaacua

SEQ ID NO: 1591520 - RNA, 19 nt, Artificial Sequence
  Description of Artificial Sequence: Synthetic oligonucleotide
  Antisense strand to SEQ ID NO: 1591519
uaguuccuacaucauaggg

SEQ ID NO: 1591521 - RNA, 19 nt, Artificial Sequence
  Description of Artificial Sequence: Synthetic oligonucleotide
  Sense strand starting at position 1074 of SEQ ID NO: 1560313
uacgaaugccuacgaacua

SEQ ID NO: 1591522 - RNA, 19 nt, Artificial Sequence
  Description of Artificial Sequence: Synthetic oligonucleotide
  Antisense strand to SEQ ID NO: 1591521
uaguucguaggcauucgua

SEQ ID NO: 1591523 - RNA, 19 nt, Artificial Sequence
  Description of Artificial Sequence: Synthetic oligonucleotide
  Sense strand starting at position 1132 of SEQ ID NO: 1560313
agacuaucaccuggcaauu

SEQ ID NO: 1591524 - RNA, 19 nt, Artificial Sequence
  Description of Artificial Sequence: Synthetic oligonucleotide
  Antisense strand to SEQ ID NO: 1591523
aauugccaggugauagucu

SEQ ID NO: 1591525 - RNA, 19 nt, Artificial Sequence
  Description of Artificial Sequence: Synthetic oligonucleotide
  Sense strand starting at position 1256 of SEQ ID NO: 1560313
uuaacagacuccuggaaag

SEQ ID NO: 1591526 - RNA, 19 nt, Artificial Sequence
  Description of Artificial Sequence: Synthetic oligonucleotide
  Antisense strand to SEQ ID NO: 1591525
cuuuccaggagucuguuaa

SEQ ID NO: 1591527 - RNA, 19 nt, Artificial Sequence
  Description of Artificial Sequence: Synthetic oligonucleotide
  Sense strand starting at position 1335 of SEQ ID NO: 1560313
ggguaagauuugcaccaua

SEQ ID NO: 1591528 - RNA, 19 nt, Artificial Sequence
  Description of Artificial Sequence: Synthetic oligonucleotide
  Antisense strand to SEQ ID NO: 1591527
uauggugcaaaucuuaccc

SEQ ID NO: 1591529 - RNA, 19 nt, Artificial Sequence
  Description of Artificial Sequence: Synthetic oligonucleotide
  Sense strand starting at position 1422 of SEQ ID NO: 1560313
acgaacaaauccugacaga

SEQ ID NO: 1591530 - RNA, 19 nt, Artificial Sequence
  Description of Artificial Sequence: Synthetic oligonucleotide
  Antisense strand to SEQ ID NO: 1591529
ucugucaggauuuguucgu

SEQ ID NO: 1591531 - RNA, 19 nt, Artificial Sequence
  Description of Artificial Sequence: Synthetic oligonucleotide
  Sense strand starting at position 3277 of SEQ ID NO: 1560313
gaggcagguuugugaacaa

SEQ ID NO: 1591532 - RNA, 19 nt, Artificial Sequence
  Description of Artificial Sequence: Synthetic oligonucleotide
  Antisense strand to SEQ ID NO: 1591531
uuguucacaaaccugccuc

SEQ ID NO: 1591533 - RNA, 19 nt, Artificial Sequence
  Description of Artificial Sequence: Synthetic oligonucleotide
  Sense strand starting at position 3405 of SEQ ID NO: 1560313
gcagguuugguggaguuca

SEQ ID NO: 1591534 - RNA, 19 nt, Artificial Sequence
  Description of Artificial Sequence: Synthetic oligonucleotide
  Antisense strand to SEQ ID NO: 1591533
ugaacuccaccaaaccugc

SEQ ID NO: 1591535 - RNA, 19 nt, Artificial Sequence
  Description of Artificial Sequence: Synthetic oligonucleotide
  Sense strand starting at position 3662 of SEQ ID NO: 1560313
aagggaagcucagaaauua

SEQ ID NO: 1591536 - RNA, 19 nt, Artificial Sequence
  Description of Artificial Sequence: Synthetic oligonucleotide
  Antisense strand to SEQ ID NO: 1591535
uaauuucugagcuucccuu

SEQ ID NO: 1591537 - RNA, 19 nt, Artificial Sequence
  Description of Artificial Sequence: Synthetic oligonucleotide
  Sense strand starting at position 3936 of SEQ ID NO: 1560313
ugauauggauccuuacuga

SEQ ID NO: 1591538 - RNA, 19 nt, Artificial Sequence
  Description of Artificial Sequence: Synthetic oligonucleotide
  Antisense strand to SEQ ID NO: 1591537
ucaguaaggauccauauca

SEQ ID NO: 1591539 - RNA, 19 nt, Artificial Sequence
  Description of Artificial Sequence: Synthetic oligonucleotide
  Sense strand starting at position 3940 of SEQ ID NO: 1560313
auggauccuuacugaaaca

SEQ ID NO: 1591540 - RNA, 19 nt, Artificial Sequence
  Description of Artificial Sequence: Synthetic oligonucleotide
  Antisense strand to SEQ ID NO: 1591539
uguuucaguaaggauccau

SEQ ID NO: 1591541 - RNA, 19 nt, Artificial Sequence
  Description of Artificial Sequence: Synthetic oligonucleotide
  Sense strand starting at position 453 of SEQ ID NO: 1560314
uuuggauacuaccucgaga

SEQ ID NO: 1591542 - RNA, 19 nt, Artificial Sequence
  Description of Artificial Sequence: Synthetic oligonucleotide
  Antisense strand to SEQ ID NO: 1591541
ucucgagguaguauccaaa

SEQ ID NO: 1591543 - RNA, 19 nt, Artificial Sequence
  Description of Artificial Sequence: Synthetic oligonucleotide
  Sense strand starting at position 455 of SEQ ID NO: 1560314
uggauacuaccucgagaag

SEQ ID NO: 1591544 - RNA, 19 nt, Artificial Sequence
  Description of Artificial Sequence: Synthetic oligonucleotide
  Antisense strand to SEQ ID NO: 1591543
cuucucgagguaguaucca

SEQ ID NO: 1591545 - RNA, 19 nt, Artificial Sequence
  Description of Artificial Sequence: Synthetic oligonucleotide
  Sense strand starting at position 558 of SEQ ID NO: 1560314
cggugaucgcgggaguguu

SEQ ID NO: 1591546 - RNA, 19 nt, Artificial Sequence
  Description of Artificial Sequence: Synthetic oligonucleotide
  Antisense strand to SEQ ID NO: 1591545
aacacucccgcgaucaccg

SEQ ID NO: 1591547 - RNA, 19 nt, Artificial Sequence
  Description of Artificial Sequence: Synthetic oligonucleotide
  Sense strand starting at position 927 of SEQ ID NO: 1560314
gagcucuauccucgggaga

SEQ ID NO: 1591548 - RNA, 19 nt, Artificial Sequence
  Description of Artificial Sequence: Synthetic oligonucleotide
  Antisense strand to SEQ ID NO: 1591547
ucucccgaggauagagcuc

SEQ ID NO: 1591549 - RNA, 19 nt, Artificial Sequence
  Description of Artificial Sequence: Synthetic oligonucleotide
  Sense strand starting at position 929 of SEQ ID NO: 1560314
gcucuauccucgggagaca

SEQ ID NO: 1591550 - RNA, 19 nt, Artificial Sequence
  Description of Artificial Sequence: Synthetic oligonucleotide
  Antisense strand to SEQ ID NO: 1591549
ugucucccgaggauagagc

SEQ ID NO: 1591551 - RNA, 19 nt, Artificial Sequence
  Description of Artificial Sequence: Synthetic oligonucleotide
  Sense strand starting at position 1069 of SEQ ID NO: 1560314
gggcaaguuucucgccuua

SEQ ID NO: 1591552 - RNA, 19 nt, Artificial Sequence
  Description of Artificial Sequence: Synthetic oligonucleotide
  Antisense strand to SEQ ID NO: 1591551
uaaggcgagaaacuugccc

SEQ ID NO: 1591553 - RNA, 19 nt, Artificial Sequence
  Description of Artificial Sequence: Synthetic oligonucleotide
  Sense strand starting at position 1071 of SEQ ID NO: 1560314
gcaaguuucucgccuuacu

SEQ ID NO: 1591554 - RNA, 19 nt, Artificial Sequence
  Description of Artificial Sequence: Synthetic oligonucleotide
  Antisense strand to SEQ ID NO: 1591553
aguaaggcgagaaacuugc

SEQ ID NO: 1591555 - RNA, 19 nt, Artificial Sequence
  Description of Artificial Sequence: Synthetic oligonucleotide
  Sense strand starting at position 1546 of SEQ ID NO: 1560314
ucaggagucuuggauccua

SEQ ID NO: 1591556 - RNA, 19 nt, Artificial Sequence
  Description of Artificial Sequence: Synthetic oligonucleotide
  Antisense strand to SEQ ID NO: 1591555
uaggauccaagacuccuga

SEQ ID NO: 1591557 - RNA, 19 nt, Artificial Sequence
  Description of Artificial Sequence: Synthetic oligonucleotide
  Sense strand starting at position 1551 of SEQ ID NO: 1560314
agucuuggauccuaacaua

SEQ ID NO: 1591558 - RNA, 19 nt, Artificial Sequence
  Description of Artificial Sequence: Synthetic oligonucleotide
  Antisense strand to SEQ ID NO: 1591557
uauguuaggauccaagacu

SEQ ID NO: 1591559 - RNA, 19 nt, Artificial Sequence
  Description of Artificial Sequence: Synthetic oligonucleotide
  Sense strand starting at position 1853 of SEQ ID NO: 1560314
cgaggugguccaugauaca

SEQ ID NO: 1591560 - RNA, 19 nt, Artificial Sequence
  Description of Artificial Sequence: Synthetic oligonucleotide
  Antisense strand to SEQ ID NO: 1591559
uguaucauggaccaccucg

SEQ ID NO: 1591561 - RNA, 19 nt, Artificial Sequence
  Description of Artificial Sequence: Synthetic oligonucleotide
  Sense strand starting at position 2183 of SEQ ID NO: 1560314
ggugacuuaccuuaccuga

SEQ ID NO: 1591562 - RNA, 19 nt, Artificial Sequence
  Description of Artificial Sequence: Synthetic oligonucleotide
  Antisense strand to SEQ ID NO: 1591561
ucagguaagguaagucacc

SEQ ID NO: 1591563 - RNA, 19 nt, Artificial Sequence
  Description of Artificial Sequence: Synthetic oligonucleotide
  Sense strand starting at position 2277 of SEQ ID NO: 1560314
cgcagaaaucagcaucucu

SEQ ID NO: 1591564 - RNA, 19 nt, Artificial Sequence
  Description of Artificial Sequence: Synthetic oligonucleotide
  Antisense strand to SEQ ID NO: 1591563
agagaugcugauuucugcg

SEQ ID NO: 1591565 - RNA, 19 nt, Artificial Sequence
  Description of Artificial Sequence: Synthetic oligonucleotide
  Sense strand starting at position 2293 of SEQ ID NO: 1560314
ucuucccagccuggaaaua

SEQ ID NO: 1591566 - RNA, 19 nt, Artificial Sequence
  Description of Artificial Sequence: Synthetic oligonucleotide
  Antisense strand to SEQ ID NO: 1591565
uauuuccaggcugggaaga

SEQ ID NO: 1591567 - RNA, 19 nt, Artificial Sequence
  Description of Artificial Sequence: Synthetic oligonucleotide
  Sense strand starting at position 2598 of SEQ ID NO: 1560314
ucuugaaaucccggacuua

SEQ ID NO: 1591568 - RNA, 19 nt, Artificial Sequence
  Description of Artificial Sequence: Synthetic oligonucleotide
  Antisense strand to SEQ ID NO: 1591567
uaaguccgggauuucaaga

SEQ ID NO: 1591569 - RNA, 19 nt, Artificial Sequence
  Description of Artificial Sequence: Synthetic oligonucleotide
  Sense strand starting at position 2705 of SEQ ID NO: 1560314
gcaguugaguguuugcaca

SEQ ID NO: 1591570 - RNA, 19 nt, Artificial Sequence
  Description of Artificial Sequence: Synthetic oligonucleotide
  Antisense strand to SEQ ID NO: 1591569
ugugcaaacacucaacugc

SEQ ID NO: 1591571 - RNA, 19 nt, Artificial Sequence
  Description of Artificial Sequence: Synthetic oligonucleotide
  Sense strand starting at position 2707 of SEQ ID NO: 1560314
aguugaguguuugcacagu

SEQ ID NO: 1591572 - RNA, 19 nt, Artificial Sequence
  Description of Artificial Sequence: Synthetic oligonucleotide
  Antisense strand to SEQ ID NO: 1591571
acugugcaaacacucaacu

SEQ ID NO: 1591573 - RNA, 19 nt, Artificial Sequence
  Description of Artificial Sequence: Synthetic oligonucleotide
  Sense strand starting at position 2740 of SEQ ID NO: 1560314
cugggcaguaugcauaaua

SEQ ID NO: 1591574 - RNA, 19 nt, Artificial Sequence
  Description of Artificial Sequence: Synthetic oligonucleotide
  Antisense strand to SEQ ID NO: 1591573
uauuaugcauacugcccag

SEQ ID NO: 1591575 - RNA, 19 nt, Artificial Sequence
  Description of Artificial Sequence: Synthetic oligonucleotide
  Sense strand starting at position 2747 of SEQ ID NO: 1560314
guaugcauaauaugugaga

SEQ ID NO: 1591576 - RNA, 19 nt, Artificial Sequence
  Description of Artificial Sequence: Synthetic oligonucleotide
  Antisense strand to SEQ ID NO: 1591575
ucucacauauuaugcauac

SEQ ID NO: 1591577 - RNA, 19 nt, Artificial Sequence
  Description of Artificial Sequence: Synthetic oligonucleotide
  Sense strand starting at position 2748 of SEQ ID NO: 1560314
uaugcauaauaugugagau

SEQ ID NO: 1591578 - RNA, 19 nt, Artificial Sequence
  Description of Artificial Sequence: Synthetic oligonucleotide
  Antisense strand to SEQ ID NO: 1591577
aucucacauauuaugcaua

SEQ ID NO: 1591579 - RNA, 19 nt, Artificial Sequence
  Description of Artificial Sequence: Synthetic oligonucleotide
  Sense strand starting at position 2750 of SEQ ID NO: 1560314
ugcauaauaugugagauuu

SEQ ID NO: 1591580 - RNA, 19 nt, Artificial Sequence
  Description of Artificial Sequence: Synthetic oligonucleotide
  Antisense strand to SEQ ID NO: 1591579
aaaucucacauauuaugca

SEQ ID NO: 1591581 - RNA, 19 nt, Artificial Sequence
  Description of Artificial Sequence: Synthetic oligonucleotide
  Sense strand starting at position 3018 of SEQ ID NO: 1560314
acugcuucagucugggaga

SEQ ID NO: 1591582 - RNA, 19 nt, Artificial Sequence
  Description of Artificial Sequence: Synthetic oligonucleotide
  Antisense strand to SEQ ID NO: 1591581
ucucccagacugaagcagu

SEQ ID NO: 1591583 - RNA, 19 nt, Artificial Sequence
  Description of Artificial Sequence: Synthetic oligonucleotide
  Sense strand starting at position 3019 of SEQ ID NO: 1560314
cugcuucagucugggagau

SEQ ID NO: 1591584 - RNA, 19 nt, Artificial Sequence
  Description of Artificial Sequence: Synthetic oligonucleotide
  Antisense strand to SEQ ID NO: 1591583
aucucccagacugaagcag

SEQ ID NO: 1591585 - RNA, 19 nt, Artificial Sequence
  Description of Artificial Sequence: Synthetic oligonucleotide
  Sense strand starting at position 3021 of SEQ ID NO: 1560314
gcuucagucugggagauga

SEQ ID NO: 1591586 - RNA, 19 nt, Artificial Sequence
  Description of Artificial Sequence: Synthetic oligonucleotide
  Antisense strand to SEQ ID NO: 1591585
ucaucucccagacugaagc

SEQ ID NO: 1591587 - RNA, 19 nt, Artificial Sequence
  Description of Artificial Sequence: Synthetic oligonucleotide
  Sense strand starting at position 3556 of SEQ ID NO: 1560314
uauauauucgagcguggug

SEQ ID NO: 1591588 - RNA, 19 nt, Artificial Sequence
  Description of Artificial Sequence: Synthetic oligonucleotide
  Antisense strand to SEQ ID NO: 1591587
caccacgcucgaauauaua

SEQ ID NO: 1591589 - RNA, 19 nt, Artificial Sequence
  Description of Artificial Sequence: Synthetic oligonucleotide
  Sense strand starting at position 3677 of SEQ ID NO: 1560314
caggcugugcaacaagauu

SEQ ID NO: 1591590 - RNA, 19 nt, Artificial Sequence
  Description of Artificial Sequence: Synthetic oligonucleotide
  Antisense strand to SEQ ID NO: 1591589
aaucuuguugcacagccug

SEQ ID NO: 1591591 - RNA, 19 nt, Artificial Sequence
  Description of Artificial Sequence: Synthetic oligonucleotide
  Sense strand starting at position 431 of SEQ ID NO: 1560315
agugcuuagugcuuucuca

SEQ ID NO: 1591592 - RNA, 19 nt, Artificial Sequence
  Description of Artificial Sequence: Synthetic oligonucleotide
  Antisense strand to SEQ ID NO: 1591591
ugagaaagcacuaagcacu

SEQ ID NO: 1591593 - RNA, 19 nt, Artificial Sequence
  Description of Artificial Sequence: Synthetic oligonucleotide
  Sense strand starting at position 432 of SEQ ID NO: 1560315
gugcuuagugcuuucucau

SEQ ID NO: 1591594 - RNA, 19 nt, Artificial Sequence
  Description of Artificial Sequence: Synthetic oligonucleotide
  Antisense strand to SEQ ID NO: 1591593
augagaaagcacuaagcac

SEQ ID NO: 1591595 - RNA, 19 nt, Artificial Sequence
  Description of Artificial Sequence: Synthetic oligonucleotide
  Sense strand starting at position 435 of SEQ ID NO: 1560315
cuuagugcuuucucaugaa

SEQ ID NO: 1591596 - RNA, 19 nt, Artificial Sequence
  Description of Artificial Sequence: Synthetic oligonucleotide
  Antisense strand to SEQ ID NO: 1591595
uucaugagaaagcacuaag

SEQ ID NO: 1591597 - RNA, 19 nt, Artificial Sequence
  Description of Artificial Sequence: Synthetic oligonucleotide
  Sense strand starting at position 439 of SEQ ID NO: 1560315
gugcuuucucaugaaauga

SEQ ID NO: 1591598 - RNA, 19 nt, Artificial Sequence
  Description of Artificial Sequence: Synthetic oligonucleotide
  Antisense strand to SEQ ID NO: 1591597
ucauuucaugagaaagcac

SEQ ID NO: 1591599 - RNA, 19 nt, Artificial Sequence
  Description of Artificial Sequence: Synthetic oligonucleotide
  Sense strand starting at position 449 of SEQ ID NO: 1560315
augaaaugaucuuagguga

SEQ ID NO: 1591600 - RNA, 19 nt, Artificial Sequence
  Description of Artificial Sequence: Synthetic oligonucleotide
  Antisense strand to SEQ ID NO: 1591599
ucaccuaagaucauuucau

SEQ ID NO: 1591601 - RNA, 19 nt, Artificial Sequence
  Description of Artificial Sequence: Synthetic oligonucleotide
  Sense strand starting at position 524 of SEQ ID NO: 1560315
uguagcacuuagcuauuaa

SEQ ID NO: 1591602 - RNA, 19 nt, Artificial Sequence
  Description of Artificial Sequence: Synthetic oligonucleotide
  Antisense strand to SEQ ID NO: 1591601
uuaauagcuaagugcuaca

SEQ ID NO: 1591603 - RNA, 19 nt, Artificial Sequence
  Description of Artificial Sequence: Synthetic oligonucleotide
  Sense strand starting at position 542 of SEQ ID NO: 1560315
acaccuauuaucgguagga

SEQ ID NO: 1591604 - RNA, 19 nt, Artificial Sequence
  Description of Artificial Sequence: Synthetic oligonucleotide
  Antisense strand to SEQ ID NO: 1591603
uccuaccgauaauaggugu

SEQ ID NO: 1591605 - RNA, 19 nt, Artificial Sequence
  Description of Artificial Sequence: Synthetic oligonucleotide
  Sense strand starting at position 543 of SEQ ID NO: 1560315
caccuauuaucgguaggac

SEQ ID NO: 1591606 - RNA, 19 nt, Artificial Sequence
  Description of Artificial Sequence: Synthetic oligonucleotide
  Antisense strand to SEQ ID NO: 1591605
guccuaccgauaauaggug

SEQ ID NO: 1591607 - RNA, 19 nt, Artificial Sequence
  Description of Artificial Sequence: Synthetic oligonucleotide
  Sense strand starting at position 544 of SEQ ID NO: 1560315
accuauuaucgguaggaca

SEQ ID NO: 1591608 - RNA, 19 nt, Artificial Sequence
  Description of Artificial Sequence: Synthetic oligonucleotide
  Antisense strand to SEQ ID NO: 1591607
uguccuaccgauaauaggu

SEQ ID NO: 1591609 - RNA, 19 nt, Artificial Sequence
  Description of Artificial Sequence: Synthetic oligonucleotide
  Sense strand starting at position 546 of SEQ ID NO: 1560315
cuauuaucgguaggacacu

SEQ ID NO: 1591610 - RNA, 19 nt, Artificial Sequence
  Description of Artificial Sequence: Synthetic oligonucleotide
  Antisense strand to SEQ ID NO: 1591609
aguguccuaccgauaauag

SEQ ID NO: 1591611 - RNA, 19 nt, Artificial Sequence
  Description of Artificial Sequence: Synthetic oligonucleotide
  Sense strand starting at position 610 of SEQ ID NO: 1560315
auuaauaaucaccggguuu

SEQ ID NO: 1591612 - RNA, 19 nt, Artificial Sequence
  Description of Artificial Sequence: Synthetic oligonucleotide
  Antisense strand to SEQ ID NO: 1591611
aaacccggugauuauuaau

SEQ ID NO: 1591613 - RNA, 19 nt, Artificial Sequence
  Description of Artificial Sequence: Synthetic oligonucleotide
  Sense strand starting at position 733 of SEQ ID NO: 1560315
ucucuuuggguuuggaauu

SEQ ID NO: 1591614 - RNA, 19 nt, Artificial Sequence
  Description of Artificial Sequence: Synthetic oligonucleotide
  Antisense strand to SEQ ID NO: 1591613
aauuccaaacccaaagaga

SEQ ID NO: 1591615 - RNA, 19 nt, Artificial Sequence
  Description of Artificial Sequence: Synthetic oligonucleotide
  Sense strand starting at position 761 of SEQ ID NO: 1560315
ugcggucucuacucccaaa

SEQ ID NO: 1591616 - RNA, 19 nt, Artificial Sequence
  Description of Artificial Sequence: Synthetic oligonucleotide
  Antisense strand to SEQ ID NO: 1591615
uuugggaguagagaccgca

SEQ ID NO: 1591617 - RNA, 19 nt, Artificial Sequence
  Description of Artificial Sequence: Synthetic oligonucleotide
  Sense strand starting at position 795 of SEQ ID NO: 1560315
gagauuaaaugaugacagu

SEQ ID NO: 1591618 - RNA, 19 nt, Artificial Sequence
  Description of Artificial Sequence: Synthetic oligonucleotide
  Antisense strand to SEQ ID NO: 1591617
acugucaucauuuaaucuc

SEQ ID NO: 1591619 - RNA, 19 nt, Artificial Sequence
  Description of Artificial Sequence: Synthetic oligonucleotide
  Sense strand starting at position 1035 of SEQ ID NO: 1560315
ucaccaugcugugcuagau

SEQ ID NO: 1591620 - RNA, 19 nt, Artificial Sequence
  Description of Artificial Sequence: Synthetic oligonucleotide
  Antisense strand to SEQ ID NO: 1591619
aucuagcacagcaugguga

SEQ ID NO: 1591621 - RNA, 19 nt, Artificial Sequence
  Description of Artificial Sequence: Synthetic oligonucleotide
  Sense strand starting at position 1039 of SEQ ID NO: 1560315
caugcugugcuagaucauu

SEQ ID NO: 1591622 - RNA, 19 nt, Artificial Sequence
  Description of Artificial Sequence: Synthetic oligonucleotide
  Antisense strand to SEQ ID NO: 1591621
aaugaucuagcacagcaug

SEQ ID NO: 1591623 - RNA, 19 nt, Artificial Sequence
  Description of Artificial Sequence: Synthetic oligonucleotide
  Sense strand starting at position 1068 of SEQ ID NO: 1560315
gcuuauauggugcuuugca

SEQ ID NO: 1591624 - RNA, 19 nt, Artificial Sequence
  Description of Artificial Sequence: Synthetic oligonucleotide
  Antisense strand to SEQ ID NO: 1591623
ugcaaagcaccauauaagc

SEQ ID NO: 1591625 - RNA, 19 nt, Artificial Sequence
  Description of Artificial Sequence: Synthetic oligonucleotide
  Sense strand starting at position 1075 of SEQ ID NO: 1560315
uggugcuuugcacaacaca

SEQ ID NO: 1591626 - RNA, 19 nt, Artificial Sequence
  Description of Artificial Sequence: Synthetic oligonucleotide
  Antisense strand to SEQ ID NO: 1591625
uguguugugcaaagcacca

SEQ ID NO: 1591627 - RNA, 19 nt, Artificial Sequence
  Description of Artificial Sequence: Synthetic oligonucleotide
  Sense strand starting at position 1111 of SEQ ID NO: 1560315
ggcagcugugauuagcaua

SEQ ID NO: 1591628 - RNA, 19 nt, Artificial Sequence
  Description of Artificial Sequence: Synthetic oligonucleotide
  Antisense strand to SEQ ID NO: 1591627
uaugcuaaucacagcugcc

SEQ ID NO: 1591629 - RNA, 19 nt, Artificial Sequence
  Description of Artificial Sequence: Synthetic oligonucleotide
  Sense strand starting at position 1116 of SEQ ID NO: 1560315
cugugauuagcauaacaca

SEQ ID NO: 1591630 - RNA, 19 nt, Artificial Sequence
  Description of Artificial Sequence: Synthetic oligonucleotide
  Antisense strand to SEQ ID NO: 1591629
uguguuaugcuaaucacag

SEQ ID NO: 1591631 - RNA, 19 nt, Artificial Sequence
  Description of Artificial Sequence: Synthetic oligonucleotide
  Sense strand starting at position 1181 of SEQ ID NO: 1560315
cuugucugucuggaagaau

SEQ ID NO: 1591632 - RNA, 19 nt, Artificial Sequence
  Description of Artificial Sequence: Synthetic oligonucleotide
  Antisense strand to SEQ ID NO: 1591631
auucuuccagacagacaag

SEQ ID NO: 1591633 - RNA, 19 nt, Artificial Sequence
  Description of Artificial Sequence: Synthetic oligonucleotide
  Sense strand starting at position 1184 of SEQ ID NO: 1560315
gucugucuggaagaaugca

SEQ ID NO: 1591634 - RNA, 19 nt, Artificial Sequence
  Description of Artificial Sequence: Synthetic oligonucleotide
  Antisense strand to SEQ ID NO: 1591633
ugcauucuuccagacagac

SEQ ID NO: 1591635 - RNA, 19 nt, Artificial Sequence
  Description of Artificial Sequence: Synthetic oligonucleotide
  Sense strand starting at position 1353 of SEQ ID NO: 1560315
aggcgaauuugaggacaca

SEQ ID NO: 1591636 - RNA, 19 nt, Artificial Sequence
  Description of Artificial Sequence: Synthetic oligonucleotide
  Antisense strand to SEQ ID NO: 1591635
uguguccucaaauucgccu

SEQ ID NO: 1591637 - RNA, 19 nt, Artificial Sequence
  Description of Artificial Sequence: Synthetic oligonucleotide
  Sense strand starting at position 2268 of SEQ ID NO: 1560315
gaggccugguucucuguua

SEQ ID NO: 1591638 - RNA, 19 nt, Artificial Sequence
  Description of Artificial Sequence: Synthetic oligonucleotide
  Antisense strand to SEQ ID NO: 1591637
uaacagagaaccaggccuc

SEQ ID NO: 1591639 - RNA, 19 nt, Artificial Sequence
  Description of Artificial Sequence: Synthetic oligonucleotide
  Sense strand starting at position 3111 of SEQ ID NO: 1560315
uuguuacaucaauagagua

SEQ ID NO: 1591640 - RNA, 19 nt, Artificial Sequence
  Description of Artificial Sequence: Synthetic oligonucleotide
  Antisense strand to SEQ ID NO: 1591639
uacucuauugauguaacaa

SEQ ID NO: 1591641 - RNA, 19 nt, Artificial Sequence
  Description of Artificial Sequence: Synthetic oligonucleotide
  Sense strand starting at position 3142 of SEQ ID NO: 1560315
aacagucuugagugcuuua

SEQ ID NO: 1591642 - RNA, 19 nt, Artificial Sequence
  Description of Artificial Sequence: Synthetic oligonucleotide
  Antisense strand to SEQ ID NO: 1591641
uaaagcacucaagacuguu

SEQ ID NO: 1591643 - RNA, 19 nt, Artificial Sequence
  Description of Artificial Sequence: Synthetic oligonucleotide
  Sense strand starting at position 3145 of SEQ ID NO: 1560315
agucuugagugcuuuauca

SEQ ID NO: 1591644 - RNA, 19 nt, Artificial Sequence
  Description of Artificial Sequence: Synthetic oligonucleotide
  Antisense strand to SEQ ID NO: 1591643
ugauaaagcacucaagacu

SEQ ID NO: 1591645 - RNA, 19 nt, Artificial Sequence
  Description of Artificial Sequence: Synthetic oligonucleotide
  Sense strand starting at position 3147 of SEQ ID NO: 1560315
ucuugagugcuuuaucagu

SEQ ID NO: 1591646 - RNA, 19 nt, Artificial Sequence
  Description of Artificial Sequence: Synthetic oligonucleotide
  Antisense strand to SEQ ID NO: 1591645
acugauaaagcacucaaga

SEQ ID NO: 1591647 - RNA, 19 nt, Artificial Sequence
  Description of Artificial Sequence: Synthetic oligonucleotide
  Sense strand starting at position 3149 of SEQ ID NO: 1560315
uugagugcuuuaucaguac

SEQ ID NO: 1591648 - RNA, 19 nt, Artificial Sequence
  Description of Artificial Sequence: Synthetic oligonucleotide
  Antisense strand to SEQ ID NO: 1591647
guacugauaaagcacucaa

SEQ ID NO: 1591649 - RNA, 19 nt, Artificial Sequence
  Description of Artificial Sequence: Synthetic oligonucleotide
  Sense strand starting at position 3152 of SEQ ID NO: 1560315
agugcuuuaucaguacgua

SEQ ID NO: 1591650 - RNA, 19 nt, Artificial Sequence
  Description of Artificial Sequence: Synthetic oligonucleotide
  Antisense strand to SEQ ID NO: 1591649
uacguacugauaaagcacu

SEQ ID NO: 1591651 - RNA, 19 nt, Artificial Sequence
  Description of Artificial Sequence: Synthetic oligonucleotide
  Sense strand starting at position 3153 of SEQ ID NO: 1560315
gugcuuuaucaguacguau

SEQ ID NO: 1591652 - RNA, 19 nt, Artificial Sequence
  Description of Artificial Sequence: Synthetic oligonucleotide
  Antisense strand to SEQ ID NO: 1591651
auacguacugauaaagcac

SEQ ID NO: 1591653 - RNA, 19 nt, Artificial Sequence
  Description of Artificial Sequence: Synthetic oligonucleotide
  Sense strand starting at position 3155 of SEQ ID NO: 1560315
gcuuuaucaguacguauuc

SEQ ID NO: 1591654 - RNA, 19 nt, Artificial Sequence
  Description of Artificial Sequence: Synthetic oligonucleotide
  Antisense strand to SEQ ID NO: 1591653
gaauacguacugauaaagc

SEQ ID NO: 1591655 - RNA, 19 nt, Artificial Sequence
  Description of Artificial Sequence: Synthetic oligonucleotide
  Sense strand starting at position 3160 of SEQ ID NO: 1560315
aucaguacguauuccauaa

SEQ ID NO: 1591656 - RNA, 19 nt, Artificial Sequence
  Description of Artificial Sequence: Synthetic oligonucleotide
  Antisense strand to SEQ ID NO: 1591655
uuauggaauacguacugau

SEQ ID NO: 1591657 - RNA, 19 nt, Artificial Sequence
  Description of Artificial Sequence: Synthetic oligonucleotide
  Sense strand starting at position 3164 of SEQ ID NO: 1560315
guacguauuccauaaggaa

SEQ ID NO: 1591658 - RNA, 19 nt, Artificial Sequence
  Description of Artificial Sequence: Synthetic oligonucleotide
  Antisense strand to SEQ ID NO: 1591657
uuccuuauggaauacguac

SEQ ID NO: 1591659 - RNA, 19 nt, Artificial Sequence
  Description of Artificial Sequence: Synthetic oligonucleotide
  Sense strand starting at position 3274 of SEQ ID NO: 1560315
ccaguugagacagguagau

SEQ ID NO: 1591660 - RNA, 19 nt, Artificial Sequence
  Description of Artificial Sequence: Synthetic oligonucleotide
  Antisense strand to SEQ ID NO: 1591659
aucuaccugucucaacugg

SEQ ID NO: 1591661 - RNA, 19 nt, Artificial Sequence
  Description of Artificial Sequence: Synthetic oligonucleotide
  Sense strand starting at position 3432 of SEQ ID NO: 1560315
guugcaauaagcugagaac

SEQ ID NO: 1591662 - RNA, 19 nt, Artificial Sequence
  Description of Artificial Sequence: Synthetic oligonucleotide
  Antisense strand to SEQ ID NO: 1591661
guucucagcuuauugcaac

SEQ ID NO: 1591663 - RNA, 19 nt, Artificial Sequence
  Description of Artificial Sequence: Synthetic oligonucleotide
  Sense strand starting at position 3433 of SEQ ID NO: 1560315
uugcaauaagcugagaacu

SEQ ID NO: 1591664 - RNA, 19 nt, Artificial Sequence
  Description of Artificial Sequence: Synthetic oligonucleotide
  Antisense strand to SEQ ID NO: 1591663
aguucucagcuuauugcaa

SEQ ID NO: 1591665 - RNA, 19 nt, Artificial Sequence
  Description of Artificial Sequence: Synthetic oligonucleotide
  Sense strand starting at position 3558 of SEQ ID NO: 1560315
guuggaaguacuggaagaa

SEQ ID NO: 1591666 - RNA, 19 nt, Artificial Sequence
  Description of Artificial Sequence: Synthetic oligonucleotide
  Antisense strand to SEQ ID NO: 1591665
uucuuccaguacuuccaac

SEQ ID NO: 1591667 - RNA, 19 nt, Artificial Sequence
  Description of Artificial Sequence: Synthetic oligonucleotide
  Sense strand starting at position 3586 of SEQ ID NO: 1560315
aagguaaguuuaccuaaag

SEQ ID NO: 1591668 - RNA, 19 nt, Artificial Sequence
  Description of Artificial Sequence: Synthetic oligonucleotide
  Antisense strand to SEQ ID NO: 1591667
cuuuagguaaacuuaccuu

SEQ ID NO: 1591669 - RNA, 19 nt, Artificial Sequence
  Description of Artificial Sequence: Synthetic oligonucleotide
  Sense strand starting at position 3587 of SEQ ID NO: 1560315
agguaaguuuaccuaaaga

SEQ ID NO: 1591670 - RNA, 19 nt, Artificial Sequence
  Description of Artificial Sequence: Synthetic oligonucleotide
  Antisense strand to SEQ ID NO: 1591669
ucuuuagguaaacuuaccu

SEQ ID NO: 1591671 - RNA, 19 nt, Artificial Sequence
  Description of Artificial Sequence: Synthetic oligonucleotide
  Sense strand starting at position 789 of SEQ ID NO: 1560316
gcagaagucugaccagaga

SEQ ID NO: 1591672 - RNA, 19 nt, Artificial Sequence
  Description of Artificial Sequence: Synthetic oligonucleotide
  Antisense strand to SEQ ID NO: 1591671
ucucuggucagacuucugc

SEQ ID NO: 1591673 - RNA, 19 nt, Artificial Sequence
  Description of Artificial Sequence: Synthetic oligonucleotide
  Sense strand starting at position 1313 of SEQ ID NO: 1560316
gauagcaccucucuagagu

SEQ ID NO: 1591674 - RNA, 19 nt, Artificial Sequence
  Description of Artificial Sequence: Synthetic oligonucleotide
  Antisense strand to SEQ ID NO: 1591673
acucuagagaggugcuauc

SEQ ID NO: 1591675 - RNA, 19 nt, Artificial Sequence
  Description of Artificial Sequence: Synthetic oligonucleotide
  Sense strand starting at position 1319 of SEQ ID NO: 1560316
accucucuagagugaaacu

SEQ ID NO: 1591676 - RNA, 19 nt, Artificial Sequence
  Description of Artificial Sequence: Synthetic oligonucleotide
  Antisense strand to SEQ ID NO: 1591675
aguuucacucuagagaggu

SEQ ID NO: 1591677 - RNA, 19 nt, Artificial Sequence
  Description of Artificial Sequence: Synthetic oligonucleotide
  Sense strand starting at position 1365 of SEQ ID NO: 1560316
gaagcagaguucuggagaa

SEQ ID NO: 1591678 - RNA, 19 nt, Artificial Sequence
  Description of Artificial Sequence: Synthetic oligonucleotide
  Antisense strand to SEQ ID NO: 1591677
uucuccagaacucugcuuc

SEQ ID NO: 1591679 - RNA, 19 nt, Artificial Sequence
  Description of Artificial Sequence: Synthetic oligonucleotide
  Sense strand starting at position 1427 of SEQ ID NO: 1560316
ugugcuugacuccaugcaa

SEQ ID NO: 1591680 - RNA, 19 nt, Artificial Sequence
  Description of Artificial Sequence: Synthetic oligonucleotide
  Antisense strand to SEQ ID NO: 1591679
uugcauggagucaagcaca

SEQ ID NO: 1591681 - RNA, 19 nt, Artificial Sequence
  Description of Artificial Sequence: Synthetic oligonucleotide
  Sense strand starting at position 1468 of SEQ ID NO: 1560316
gguguuguagacugaggca

SEQ ID NO: 1591682 - RNA, 19 nt, Artificial Sequence
  Description of Artificial Sequence: Synthetic oligonucleotide
  Antisense strand to SEQ ID NO: 1591681
ugccucagucuacaacacc

SEQ ID NO: 1591683 - RNA, 19 nt, Artificial Sequence
  Description of Artificial Sequence: Synthetic oligonucleotide
  Sense strand starting at position 2298 of SEQ ID NO: 1560316
ccgaaaugaugguacuacu

SEQ ID NO: 1591684 - RNA, 19 nt, Artificial Sequence
  Description of Artificial Sequence: Synthetic oligonucleotide
  Antisense strand to SEQ ID NO: 1591683
aguaguaccaucauuucgg

SEQ ID NO: 1591685 - RNA, 19 nt, Artificial Sequence
  Description of Artificial Sequence: Synthetic oligonucleotide
  Sense strand starting at position 2377 of SEQ ID NO: 1560316
ggauaacagcccuguuuaa

SEQ ID NO: 1591686 - RNA, 19 nt, Artificial Sequence
  Description of Artificial Sequence: Synthetic oligonucleotide
  Antisense strand to SEQ ID NO: 1591685
uuaaacagggcuguuaucc

SEQ ID NO: 1591687 - RNA, 19 nt, Artificial Sequence
  Description of Artificial Sequence: Synthetic oligonucleotide
  Sense strand starting at position 2384 of SEQ ID NO: 1560316
agcccuguuuaauagauga

SEQ ID NO: 1591688 - RNA, 19 nt, Artificial Sequence
  Description of Artificial Sequence: Synthetic oligonucleotide
  Antisense strand to SEQ ID NO: 1591687
ucaucuauuaaacagggcu

SEQ ID NO: 1591689 - RNA, 19 nt, Artificial Sequence
  Description of Artificial Sequence: Synthetic oligonucleotide
  Sense strand starting at position 2388 of SEQ ID NO: 1560316
cuguuuaauagaugaggcu

SEQ ID NO: 1591690 - RNA, 19 nt, Artificial Sequence
  Description of Artificial Sequence: Synthetic oligonucleotide
  Antisense strand to SEQ ID NO: 1591689
agccucaucuauuaaacag

SEQ ID NO: 1591691 - RNA, 19 nt, Artificial Sequence
  Description of Artificial Sequence: Synthetic oligonucleotide
  Sense strand starting at position 2389 of SEQ ID NO: 1560316
uguuuaauagaugaggcua

SEQ ID NO: 1591692 - RNA, 19 nt, Artificial Sequence
  Description of Artificial Sequence: Synthetic oligonucleotide
  Antisense strand to SEQ ID NO: 1591691
uagccucaucuauuaaaca

SEQ ID NO: 1591693 - RNA, 19 nt, Artificial Sequence
  Description of Artificial Sequence: Synthetic oligonucleotide
  Sense strand starting at position 2404 of SEQ ID NO: 1560316
gcuauuaaggcucaagaag

SEQ ID NO: 1591694 - RNA, 19 nt, Artificial Sequence
  Description of Artificial Sequence: Synthetic oligonucleotide
  Antisense strand to SEQ ID NO: 1591693
cuucuugagccuuaauagc

SEQ ID NO: 1591695 - RNA, 19 nt, Artificial Sequence
  Description of Artificial Sequence: Synthetic oligonucleotide
  Sense strand starting at position 2898 of SEQ ID NO: 1560316
gagucuggcuucucacaga

SEQ ID NO: 1591696 - RNA, 19 nt, Artificial Sequence
  Description of Artificial Sequence: Synthetic oligonucleotide
  Antisense strand to SEQ ID NO: 1591695
ucugugagaagccagacuc

SEQ ID NO: 1591697 - RNA, 19 nt, Artificial Sequence
  Description of Artificial Sequence: Synthetic oligonucleotide
  Sense strand starting at position 2941 of SEQ ID NO: 1560316
aggagucuggauuauagcu

SEQ ID NO: 1591698 - RNA, 19 nt, Artificial Sequence
  Description of Artificial Sequence: Synthetic oligonucleotide
  Antisense strand to SEQ ID NO: 1591697
agcuauaauccagacuccu

SEQ ID NO: 1591699 - RNA, 19 nt, Artificial Sequence
  Description of Artificial Sequence: Synthetic oligonucleotide
  Sense strand starting at position 3032 of SEQ ID NO: 1560316
uguggauuccucuggaccu

SEQ ID NO: 1591700 - RNA, 19 nt, Artificial Sequence
  Description of Artificial Sequence: Synthetic oligonucleotide
  Antisense strand to SEQ ID NO: 1591699
agguccagaggaauccaca

SEQ ID NO: 1591701 - RNA, 19 nt, Artificial Sequence
  Description of Artificial Sequence: Synthetic oligonucleotide
  Sense strand starting at position 3033 of SEQ ID NO: 1560316
guggauuccucuggaccuu

SEQ ID NO: 1591702 - RNA, 19 nt, Artificial Sequence
  Description of Artificial Sequence: Synthetic oligonucleotide
  Antisense strand to SEQ ID NO: 1591701
aagguccagaggaauccac

SEQ ID NO: 1591703 - RNA, 19 nt, Artificial Sequence
  Description of Artificial Sequence: Synthetic oligonucleotide
  Sense strand starting at position 3129 of SEQ ID NO: 1560316
aggaaaggcuggcagauua

SEQ ID NO: 1591704 - RNA, 19 nt, Artificial Sequence
  Description of Artificial Sequence: Synthetic oligonucleotide
  Antisense strand to SEQ ID NO: 1591703
uaaucugccagccuuuccu

SEQ ID NO: 1591705 - RNA, 19 nt, Artificial Sequence
  Description of Artificial Sequence: Synthetic oligonucleotide
  Sense strand starting at position 3409 of SEQ ID NO: 1560316
agagaaugagccugggagu

SEQ ID NO: 1591706 - RNA, 19 nt, Artificial Sequence
  Description of Artificial Sequence: Synthetic oligonucleotide
  Antisense strand to SEQ ID NO: 1591705
acucccaggcucauucucu

SEQ ID NO: 1591707 - RNA, 19 nt, Artificial Sequence
  Description of Artificial Sequence: Synthetic oligonucleotide
  Sense strand starting at position 312 of SEQ ID NO: 1560317
ugaucucuaccauggcaua

SEQ ID NO: 1591708 - RNA, 19 nt, Artificial Sequence
  Description of Artificial Sequence: Synthetic oligonucleotide
  Antisense strand to SEQ ID NO: 1591707
uaugccaugguagagauca

SEQ ID NO: 1591709 - RNA, 19 nt, Artificial Sequence
  Description of Artificial Sequence: Synthetic oligonucleotide
  Sense strand starting at position 324 of SEQ ID NO: 1560317
uggcauaguccgggauuca

SEQ ID NO: 1591710 - RNA, 19 nt, Artificial Sequence
  Description of Artificial Sequence: Synthetic oligonucleotide
  Antisense strand to SEQ ID NO: 1591709
ugaaucccggacuaugcca

SEQ ID NO: 1591711 - RNA, 19 nt, Artificial Sequence
  Description of Artificial Sequence: Synthetic oligonucleotide
  Sense strand starting at position 325 of SEQ ID NO: 1560317
ggcauaguccgggauucaa

SEQ ID NO: 1591712 - RNA, 19 nt, Artificial Sequence
  Description of Artificial Sequence: Synthetic oligonucleotide
  Antisense strand to SEQ ID NO: 1591711
uugaaucccggacuaugcc

SEQ ID NO: 1591713 - RNA, 19 nt, Artificial Sequence
  Description of Artificial Sequence: Synthetic oligonucleotide
  Sense strand starting at position 464 of SEQ ID NO: 1560317
agaugaugcaggugaagua

SEQ ID NO: 1591714 - RNA, 19 nt, Artificial Sequence
  Description of Artificial Sequence: Synthetic oligonucleotide
  Antisense strand to SEQ ID NO: 1591713
uacuucaccugcaucaucu

SEQ ID NO: 1591715 - RNA, 19 nt, Artificial Sequence
  Description of Artificial Sequence: Synthetic oligonucleotide
  Sense strand starting at position 529 of SEQ ID NO: 1560317
gggcuuagcacacagaagu

SEQ ID NO: 1591716 - RNA, 19 nt, Artificial Sequence
  Description of Artificial Sequence: Synthetic oligonucleotide
  Antisense strand to SEQ ID NO: 1591715
acuucugugugcuaagccc

SEQ ID NO: 1591717 - RNA, 19 nt, Artificial Sequence
  Description of Artificial Sequence: Synthetic oligonucleotide
  Sense strand starting at position 570 of SEQ ID NO: 1560317
auaauagcauuagugguau

SEQ ID NO: 1591718 - RNA, 19 nt, Artificial Sequence
  Description of Artificial Sequence: Synthetic oligonucleotide
  Antisense strand to SEQ ID NO: 1591717
auaccacuaaugcuauuau

SEQ ID NO: 1591719 - RNA, 19 nt, Artificial Sequence
  Description of Artificial Sequence: Synthetic oligonucleotide
  Sense strand starting at position 578 of SEQ ID NO: 1560317
auuagugguaucugaagua

SEQ ID NO: 1591720 - RNA, 19 nt, Artificial Sequence
  Description of Artificial Sequence: Synthetic oligonucleotide
  Antisense strand to SEQ ID NO: 1591719
uacuucagauaccacuaau

SEQ ID NO: 1591721 - RNA, 19 nt, Artificial Sequence
  Description of Artificial Sequence: Synthetic oligonucleotide
  Sense strand starting at position 822 of SEQ ID NO: 1560317
gucugaugucaccacaauu

SEQ ID NO: 1591722 - RNA, 19 nt, Artificial Sequence
  Description of Artificial Sequence: Synthetic oligonucleotide
  Antisense strand to SEQ ID NO: 1591721
aauuguggugacaucagac

SEQ ID NO: 1591723 - RNA, 19 nt, Artificial Sequence
  Description of Artificial Sequence: Synthetic oligonucleotide
  Sense strand starting at position 963 of SEQ ID NO: 1560317
cuagcaaaggguuaauauu

SEQ ID NO: 1591724 - RNA, 19 nt, Artificial Sequence
  Description of Artificial Sequence: Synthetic oligonucleotide
  Antisense strand to SEQ ID NO: 1591723
aauauuaacccuuugcuag

SEQ ID NO: 1591725 - RNA, 19 nt, Artificial Sequence
  Description of Artificial Sequence: Synthetic oligonucleotide
  Sense strand starting at position 1005 of SEQ ID NO: 1560317
uagcgacuccuaugaguug

SEQ ID NO: 1591726 - RNA, 19 nt, Artificial Sequence
  Description of Artificial Sequence: Synthetic oligonucleotide
  Antisense strand to SEQ ID NO: 1591725
caacucauaggagucgcua

SEQ ID NO: 1591727 - RNA, 19 nt, Artificial Sequence
  Description of Artificial Sequence: Synthetic oligonucleotide
  Sense strand starting at position 1036 of SEQ ID NO: 1560317
cagugagguggucagcuaa

SEQ ID NO: 1591728 - RNA, 19 nt, Artificial Sequence
  Description of Artificial Sequence: Synthetic oligonucleotide
  Antisense strand to SEQ ID NO: 1591727
uuagcugaccaccucacug

SEQ ID NO: 1591729 - RNA, 19 nt, Artificial Sequence
  Description of Artificial Sequence: Synthetic oligonucleotide
  Sense strand starting at position 1049 of SEQ ID NO: 1560317
agcuaaguccuguaaugca

SEQ ID NO: 1591730 - RNA, 19 nt, Artificial Sequence
  Description of Artificial Sequence: Synthetic oligonucleotide
  Antisense strand to SEQ ID NO: 1591729
ugcauuacaggacuuagcu

SEQ ID NO: 1591731 - RNA, 19 nt, Artificial Sequence
  Description of Artificial Sequence: Synthetic oligonucleotide
  Sense strand starting at position 1129 of SEQ ID NO: 1560317
ggugauguccucugaccag

SEQ ID NO: 1591732 - RNA, 19 nt, Artificial Sequence
  Description of Artificial Sequence: Synthetic oligonucleotide
  Antisense strand to SEQ ID NO: 1591731
cuggucagaggacaucacc

SEQ ID NO: 1591733 - RNA, 19 nt, Artificial Sequence
  Description of Artificial Sequence: Synthetic oligonucleotide
  Sense strand starting at position 1146 of SEQ ID NO: 1560317
aggguuacaucagcacuga

SEQ ID NO: 1591734 - RNA, 19 nt, Artificial Sequence
  Description of Artificial Sequence: Synthetic oligonucleotide
  Antisense strand to SEQ ID NO: 1591733
ucagugcugauguaacccu

SEQ ID NO: 1591735 - RNA, 19 nt, Artificial Sequence
  Description of Artificial Sequence: Synthetic oligonucleotide
  Sense strand starting at position 2167 of SEQ ID NO: 1560317
acagaauaauagcaacgaa

SEQ ID NO: 1591736 - RNA, 19 nt, Artificial Sequence
  Description of Artificial Sequence: Synthetic oligonucleotide
  Antisense strand to SEQ ID NO: 1591735
uucguugcuauuauucugu

SEQ ID NO: 1591737 - RNA, 19 nt, Artificial Sequence
  Description of Artificial Sequence: Synthetic oligonucleotide
  Sense strand starting at position 2221 of SEQ ID NO: 1560317
aguugaaagcucugucuuu

SEQ ID NO: 1591738 - RNA, 19 nt, Artificial Sequence
  Description of Artificial Sequence: Synthetic oligonucleotide
  Antisense strand to SEQ ID NO: 1591737
aaagacagagcuuucaacu

SEQ ID NO: 1591739 - RNA, 19 nt, Artificial Sequence
  Description of Artificial Sequence: Synthetic oligonucleotide
  Sense strand starting at position 2222 of SEQ ID NO: 1560317
guugaaagcucugucuuua

SEQ ID NO: 1591740 - RNA, 19 nt, Artificial Sequence
  Description of Artificial Sequence: Synthetic oligonucleotide
  Antisense strand to SEQ ID NO: 1591739
uaaagacagagcuuucaac

SEQ ID NO: 1591741 - RNA, 19 nt, Artificial Sequence
  Description of Artificial Sequence: Synthetic oligonucleotide
  Sense strand starting at position 2265 of SEQ ID NO: 1560317
gggaggaaguucgagguuu

SEQ ID NO: 1591742 - RNA, 19 nt, Artificial Sequence
  Description of Artificial Sequence: Synthetic oligonucleotide
  Antisense strand to SEQ ID NO: 1591741
aaaccucgaacuuccuccc

SEQ ID NO: 1591743 - RNA, 19 nt, Artificial Sequence
  Description of Artificial Sequence: Synthetic oligonucleotide
  Sense strand starting at position 2266 of SEQ ID NO: 1560317
ggaggaaguucgagguuug

SEQ ID NO: 1591744 - RNA, 19 nt, Artificial Sequence
  Description of Artificial Sequence: Synthetic oligonucleotide
  Antisense strand to SEQ ID NO: 1591743
caaaccucgaacuuccucc

SEQ ID NO: 1591745 - RNA, 19 nt, Artificial Sequence
  Description of Artificial Sequence: Synthetic oligonucleotide
  Sense strand starting at position 2267 of SEQ ID NO: 1560317
gaggaaguucgagguuuga

SEQ ID NO: 1591746 - RNA, 19 nt, Artificial Sequence
  Description of Artificial Sequence: Synthetic oligonucleotide
  Antisense strand to SEQ ID NO: 1591745
ucaaaccucgaacuuccuc

SEQ ID NO: 1591747 - RNA, 19 nt, Artificial Sequence
  Description of Artificial Sequence: Synthetic oligonucleotide
  Sense strand starting at position 2281 of SEQ ID NO: 1560317
uuugauuccugcuugacag

SEQ ID NO: 1591748 - RNA, 19 nt, Artificial Sequence
  Description of Artificial Sequence: Synthetic oligonucleotide
  Antisense strand to SEQ ID NO: 1591747
cugucaagcaggaaucaaa

SEQ ID NO: 1591749 - RNA, 19 nt, Artificial Sequence
  Description of Artificial Sequence: Synthetic oligonucleotide
  Sense strand starting at position 2282 of SEQ ID NO: 1560317
uugauuccugcuugacaga

SEQ ID NO: 1591750 - RNA, 19 nt, Artificial Sequence
  Description of Artificial Sequence: Synthetic oligonucleotide
  Antisense strand to SEQ ID NO: 1591749
ucugucaagcaggaaucaa

SEQ ID NO: 1591751 - RNA, 19 nt, Artificial Sequence
  Description of Artificial Sequence: Synthetic oligonucleotide
  Sense strand starting at position 2283 of SEQ ID NO: 1560317
ugauuccugcuugacagau

SEQ ID NO: 1591752 - RNA, 19 nt, Artificial Sequence
  Description of Artificial Sequence: Synthetic oligonucleotide
  Antisense strand to SEQ ID NO: 1591751
aucugucaagcaggaauca

SEQ ID NO: 1591753 - RNA, 19 nt, Artificial Sequence
  Description of Artificial Sequence: Synthetic oligonucleotide
  Sense strand starting at position 2289 of SEQ ID NO: 1560317
cugcuugacagaugaggaa

SEQ ID NO: 1591754 - RNA, 19 nt, Artificial Sequence
  Description of Artificial Sequence: Synthetic oligonucleotide
  Antisense strand to SEQ ID NO: 1591753
uuccucaucugucaagcag

SEQ ID NO: 1591755 - RNA, 19 nt, Artificial Sequence
  Description of Artificial Sequence: Synthetic oligonucleotide
  Sense strand starting at position 2325 of SEQ ID NO: 1560317
uugagcaacuuguccauuu

SEQ ID NO: 1591756 - RNA, 19 nt, Artificial Sequence
  Description of Artificial Sequence: Synthetic oligonucleotide
  Antisense strand to SEQ ID NO: 1591755
aaauggacaaguugcucaa

SEQ ID NO: 1591757 - RNA, 19 nt, Artificial Sequence
  Description of Artificial Sequence: Synthetic oligonucleotide
  Sense strand starting at position 2479 of SEQ ID NO: 1560317
guuccaccuuccuuuggaa

SEQ ID NO: 1591758 - RNA, 19 nt, Artificial Sequence
  Description of Artificial Sequence: Synthetic oligonucleotide
  Antisense strand to SEQ ID NO: 1591757
uuccaaaggaagguggaac

SEQ ID NO: 1591759 - RNA, 19 nt, Artificial Sequence
  Description of Artificial Sequence: Synthetic oligonucleotide
  Sense strand starting at position 2530 of SEQ ID NO: 1560317
agcuaagauuuagcucgau

SEQ ID NO: 1591760 - RNA, 19 nt, Artificial Sequence
  Description of Artificial Sequence: Synthetic oligonucleotide
  Antisense strand to SEQ ID NO: 1591759
aucgagcuaaaucuuagcu

SEQ ID NO: 1591761 - RNA, 19 nt, Artificial Sequence
  Description of Artificial Sequence: Synthetic oligonucleotide
  Sense strand starting at position 2586 of SEQ ID NO: 1560317
acaggcuuuccaggcauaa

SEQ ID NO: 1591762 - RNA, 19 nt, Artificial Sequence
  Description of Artificial Sequence: Synthetic oligonucleotide
  Antisense strand to SEQ ID NO: 1591761
uuaugccuggaaagccugu

SEQ ID NO: 1591763 - RNA, 19 nt, Artificial Sequence
  Description of Artificial Sequence: Synthetic oligonucleotide
  Sense strand starting at position 2645 of SEQ ID NO: 1560317
uguagagguuacuagcaaa

SEQ ID NO: 1591764 - RNA, 19 nt, Artificial Sequence
  Description of Artificial Sequence: Synthetic oligonucleotide
  Antisense strand to SEQ ID NO: 1591763
uuugcuaguaaccucuaca

SEQ ID NO: 1591765 - RNA, 19 nt, Artificial Sequence
  Description of Artificial Sequence: Synthetic oligonucleotide
  Sense strand starting at position 2725 of SEQ ID NO: 1560317
cuucgucucacagaugaga

SEQ ID NO: 1591766 - RNA, 19 nt, Artificial Sequence
  Description of Artificial Sequence: Synthetic oligonucleotide
  Antisense strand to SEQ ID NO: 1591765
ucucaucugugagacgaag

SEQ ID NO: 1591767 - RNA, 19 nt, Artificial Sequence
  Description of Artificial Sequence: Synthetic oligonucleotide
  Sense strand starting at position 3388 of SEQ ID NO: 1560317
ggccuuaagggacgugauu

SEQ ID NO: 1591768 - RNA, 19 nt, Artificial Sequence
  Description of Artificial Sequence: Synthetic oligonucleotide
  Antisense strand to SEQ ID NO: 1591767
aaucacgucccuuaaggcc

SEQ ID NO: 1591769 - RNA, 19 nt, Artificial Sequence
  Description of Artificial Sequence: Synthetic oligonucleotide
  Sense strand starting at position 3390 of SEQ ID NO: 1560317
ccuuaagggacgugauucu

SEQ ID NO: 1591770 - RNA, 19 nt, Artificial Sequence
  Description of Artificial Sequence: Synthetic oligonucleotide
  Antisense strand to SEQ ID NO: 1591769
agaaucacgucccuuaagg

SEQ ID NO: 1591771 - RNA, 19 nt, Artificial Sequence
  Description of Artificial Sequence: Synthetic oligonucleotide
  Sense strand starting at position 3399 of SEQ ID NO: 1560317
acgugauucugaucucauc

SEQ ID NO: 1591772 - RNA, 19 nt, Artificial Sequence
  Description of Artificial Sequence: Synthetic oligonucleotide
  Antisense strand to SEQ ID NO: 1591771
gaugagaucagaaucacgu

SEQ ID NO: 1591773 - RNA, 19 nt, Artificial Sequence
  Description of Artificial Sequence: Synthetic oligonucleotide
  Sense strand starting at position 3516 of SEQ ID NO: 1560317
cuggaaugcucuucuacca

SEQ ID NO: 1591774 - RNA, 19 nt, Artificial Sequence
  Description of Artificial Sequence: Synthetic oligonucleotide
  Antisense strand to SEQ ID NO: 1591773
ugguagaagagcauuccag

SEQ ID NO: 1591775 - RNA, 19 nt, Artificial Sequence
  Description of Artificial Sequence: Synthetic oligonucleotide
  Sense strand starting at position 3562 of SEQ ID NO: 1560317
uccuuugaucuuugccuga

SEQ ID NO: 1591776 - RNA, 19 nt, Artificial Sequence
  Description of Artificial Sequence: Synthetic oligonucleotide
  Antisense strand to SEQ ID NO: 1591775
ucaggcaaagaucaaagga

SEQ ID NO: 1591777 - RNA, 19 nt, Artificial Sequence
  Description of Artificial Sequence: Synthetic oligonucleotide
  Sense strand starting at position 3564 of SEQ ID NO: 1560317
cuuugaucuuugccugaau

SEQ ID NO: 1591778 - RNA, 19 nt, Artificial Sequence
  Description of Artificial Sequence: Synthetic oligonucleotide
  Antisense strand to SEQ ID NO: 1591777
auucaggcaaagaucaaag

SEQ ID NO: 1591779 - RNA, 19 nt, Artificial Sequence
  Description of Artificial Sequence: Synthetic oligonucleotide
  Sense strand starting at position 3565 of SEQ ID NO: 1560317
uuugaucuuugccugaaug

SEQ ID NO: 1591780 - RNA, 19 nt, Artificial Sequence
  Description of Artificial Sequence: Synthetic oligonucleotide
  Antisense strand to SEQ ID NO: 1591779
cauucaggcaaagaucaaa

SEQ ID NO: 1591781 - RNA, 19 nt, Artificial Sequence
  Description of Artificial Sequence: Synthetic oligonucleotide
  Sense strand starting at position 3566 of SEQ ID NO: 1560317
uugaucuuugccugaaugu

SEQ ID NO: 1591782 - RNA, 19 nt, Artificial Sequence
  Description of Artificial Sequence: Synthetic oligonucleotide
  Antisense strand to SEQ ID NO: 1591781
acauucaggcaaagaucaa

SEQ ID NO: 1591783 - RNA, 19 nt, Artificial Sequence
  Description of Artificial Sequence: Synthetic oligonucleotide
  Sense strand starting at position 3567 of SEQ ID NO: 1560317
ugaucuuugccugaauguc

SEQ ID NO: 1591784 - RNA, 19 nt, Artificial Sequence
  Description of Artificial Sequence: Synthetic oligonucleotide
  Antisense strand to SEQ ID NO: 1591783
gacauucaggcaaagauca

SEQ ID NO: 1591785 - RNA, 19 nt, Artificial Sequence
  Description of Artificial Sequence: Synthetic oligonucleotide
  Sense strand starting at position 3583 of SEQ ID NO: 1560317
gucaccuucucagaggacu

SEQ ID NO: 1591786 - RNA, 19 nt, Artificial Sequence
  Description of Artificial Sequence: Synthetic oligonucleotide
  Antisense strand to SEQ ID NO: 1591785
aguccucugagaaggugac

SEQ ID NO: 1591787 - RNA, 19 nt, Artificial Sequence
  Description of Artificial Sequence: Synthetic oligonucleotide
  Sense strand starting at position 504 of SEQ ID NO: 1560318
cgucucuaccaagauguca

SEQ ID NO: 1591788 - RNA, 19 nt, Artificial Sequence
  Description of Artificial Sequence: Synthetic oligonucleotide
  Antisense strand to SEQ ID NO: 1591787
ugacaucuugguagagacg

SEQ ID NO: 1591789 - RNA, 19 nt, Artificial Sequence
  Description of Artificial Sequence: Synthetic oligonucleotide
  Sense strand starting at position 976 of SEQ ID NO: 1560318
ucaauauugccagguccuu

SEQ ID NO: 1591790 - RNA, 19 nt, Artificial Sequence
  Description of Artificial Sequence: Synthetic oligonucleotide
  Antisense strand to SEQ ID NO: 1591789
aaggaccuggcaauauuga

SEQ ID NO: 1591791 - RNA, 19 nt, Artificial Sequence
  Description of Artificial Sequence: Synthetic oligonucleotide
  Sense strand starting at position 1007 of SEQ ID NO: 1560318
auaugucuaaaguguagau

SEQ ID NO: 1591792 - RNA, 19 nt, Artificial Sequence
  Description of Artificial Sequence: Synthetic oligonucleotide
  Antisense strand to SEQ ID NO: 1591791
aucuacacuuuagacauau

SEQ ID NO: 1591793 - RNA, 19 nt, Artificial Sequence
  Description of Artificial Sequence: Synthetic oligonucleotide
  Sense strand starting at position 1051 of SEQ ID NO: 1560318
auucuuaaacacgagcaau

SEQ ID NO: 1591794 - RNA, 19 nt, Artificial Sequence
  Description of Artificial Sequence: Synthetic oligonucleotide
  Antisense strand to SEQ ID NO: 1591793
auugcucguguuuaagaau

SEQ ID NO: 1591795 - RNA, 19 nt, Artificial Sequence
  Description of Artificial Sequence: Synthetic oligonucleotide
  Sense strand starting at position 2040 of SEQ ID NO: 1560318
cagggcgaucucuguacaa

SEQ ID NO: 1591796 - RNA, 19 nt, Artificial Sequence
  Description of Artificial Sequence: Synthetic oligonucleotide
  Antisense strand to SEQ ID NO: 1591795
uuguacagagaucgcccug

SEQ ID NO: 1591797 - RNA, 19 nt, Artificial Sequence
  Description of Artificial Sequence: Synthetic oligonucleotide
  Sense strand starting at position 2042 of SEQ ID NO: 1560318
gggcgaucucuguacaacu

SEQ ID NO: 1591798 - RNA, 19 nt, Artificial Sequence
  Description of Artificial Sequence: Synthetic oligonucleotide
  Antisense strand to SEQ ID NO: 1591797
aguuguacagagaucgccc

SEQ ID NO: 1591799 - RNA, 19 nt, Artificial Sequence
  Description of Artificial Sequence: Synthetic oligonucleotide
  Sense strand starting at position 2052 of SEQ ID NO: 1560318
uguacaacucucuaugguu

SEQ ID NO: 1591800 - RNA, 19 nt, Artificial Sequence
  Description of Artificial Sequence: Synthetic oligonucleotide
  Antisense strand to SEQ ID NO: 1591799
aaccauagagaguuguaca

SEQ ID NO: 1591801 - RNA, 19 nt, Artificial Sequence
  Description of Artificial Sequence: Synthetic oligonucleotide
  Sense strand starting at position 2100 of SEQ ID NO: 1560318
agagauguggccugaggau

SEQ ID NO: 1591802 - RNA, 19 nt, Artificial Sequence
  Description of Artificial Sequence: Synthetic oligonucleotide
  Antisense strand to SEQ ID NO: 1591801
auccucaggccacaucucu

SEQ ID NO: 1591803 - RNA, 19 nt, Artificial Sequence
  Description of Artificial Sequence: Synthetic oligonucleotide
  Sense strand starting at position 2584 of SEQ ID NO: 1560318
gcugaugaguuaguauuag

SEQ ID NO: 1591804 - RNA, 19 nt, Artificial Sequence
  Description of Artificial Sequence: Synthetic oligonucleotide
  Antisense strand to SEQ ID NO: 1591803
cuaauacuaacucaucagc

SEQ ID NO: 1591805 - RNA, 19 nt, Artificial Sequence
  Description of Artificial Sequence: Synthetic oligonucleotide
  Sense strand starting at position 2590 of SEQ ID NO: 1560318
gaguuaguauuagucacuu

SEQ ID NO: 1591806 - RNA, 19 nt, Artificial Sequence
  Description of Artificial Sequence: Synthetic oligonucleotide
  Antisense strand to SEQ ID NO: 1591805
aagugacuaauacuaacuc

SEQ ID NO: 1591807 - RNA, 19 nt, Artificial Sequence
  Description of Artificial Sequence: Synthetic oligonucleotide
  Sense strand starting at position 2598 of SEQ ID NO: 1560318
auuagucacuuccugaaag

SEQ ID NO: 1591808 - RNA, 19 nt, Artificial Sequence
  Description of Artificial Sequence: Synthetic oligonucleotide
  Antisense strand to SEQ ID NO: 1591807
cuuucaggaagugacuaau

SEQ ID NO: 1591809 - RNA, 19 nt, Artificial Sequence
  Description of Artificial Sequence: Synthetic oligonucleotide
  Sense strand starting at position 2610 of SEQ ID NO: 1560318
cugaaaggauaguaucaca

SEQ ID NO: 1591810 - RNA, 19 nt, Artificial Sequence
  Description of Artificial Sequence: Synthetic oligonucleotide
  Antisense strand to SEQ ID NO: 1591809
ugugauacuauccuuucag

SEQ ID NO: 1591811 - RNA, 19 nt, Artificial Sequence
  Description of Artificial Sequence: Synthetic oligonucleotide
  Sense strand starting at position 2618 of SEQ ID NO: 1560318
auaguaucacacuguucua

SEQ ID NO: 1591812 - RNA, 19 nt, Artificial Sequence
  Description of Artificial Sequence: Synthetic oligonucleotide
  Antisense strand to SEQ ID NO: 1591811
uagaacagugugauacuau

SEQ ID NO: 1591813 - RNA, 19 nt, Artificial Sequence
  Description of Artificial Sequence: Synthetic oligonucleotide
  Sense strand starting at position 2621 of SEQ ID NO: 1560318
guaucacacuguucuaacu

SEQ ID NO: 1591814 - RNA, 19 nt, Artificial Sequence
  Description of Artificial Sequence: Synthetic oligonucleotide
  Antisense strand to SEQ ID NO: 1591813
aguuagaacagugugauac

SEQ ID NO: 1591815 - RNA, 19 nt, Artificial Sequence
  Description of Artificial Sequence: Synthetic oligonucleotide
  Sense strand starting at position 2637 of SEQ ID NO: 1560318
acuugcagcucucugauua

SEQ ID NO: 1591816 - RNA, 19 nt, Artificial Sequence
  Description of Artificial Sequence: Synthetic oligonucleotide
  Antisense strand to SEQ ID NO: 1591815
uaaucagagagcugcaagu

SEQ ID NO: 1591817 - RNA, 19 nt, Artificial Sequence
  Description of Artificial Sequence: Synthetic oligonucleotide
  Sense strand starting at position 2641 of SEQ ID NO: 1560318
gcagcucucugauuacuaa

SEQ ID NO: 1591818 - RNA, 19 nt, Artificial Sequence
  Description of Artificial Sequence: Synthetic oligonucleotide
  Antisense strand to SEQ ID NO: 1591817
uuaguaaucagagagcugc

SEQ ID NO: 1591819 - RNA, 19 nt, Artificial Sequence
  Description of Artificial Sequence: Synthetic oligonucleotide
  Sense strand starting at position 2644 of SEQ ID NO: 1560318
gcucucugauuacuaagga

SEQ ID NO: 1591820 - RNA, 19 nt, Artificial Sequence
  Description of Artificial Sequence: Synthetic oligonucleotide
  Antisense strand to SEQ ID NO: 1591819
uccuuaguaaucagagagc

SEQ ID NO: 1591821 - RNA, 19 nt, Artificial Sequence
  Description of Artificial Sequence: Synthetic oligonucleotide
  Sense strand starting at position 2678 of SEQ ID NO: 1560318
gugaaaguauuggucuugu

SEQ ID NO: 1591822 - RNA, 19 nt, Artificial Sequence
  Description of Artificial Sequence: Synthetic oligonucleotide
  Antisense strand to SEQ ID NO: 1591821
acaagaccaauacuuucac

SEQ ID NO: 1591823 - RNA, 19 nt, Artificial Sequence
  Description of Artificial Sequence: Synthetic oligonucleotide
  Sense strand starting at position 2711 of SEQ ID NO: 1560318
gugaauugcuugcucauau

SEQ ID NO: 1591824 - RNA, 19 nt, Artificial Sequence
  Description of Artificial Sequence: Synthetic oligonucleotide
  Antisense strand to SEQ ID NO: 1591823
auaugagcaagcaauucac

SEQ ID NO: 1591825 - RNA, 19 nt, Artificial Sequence
  Description of Artificial Sequence: Synthetic oligonucleotide
  Sense strand starting at position 2712 of SEQ ID NO: 1560318
ugaauugcuugcucauauu

SEQ ID NO: 1591826 - RNA, 19 nt, Artificial Sequence
  Description of Artificial Sequence: Synthetic oligonucleotide
  Antisense strand to SEQ ID NO: 1591825
aauaugagcaagcaauuca

SEQ ID NO: 1591827 - RNA, 19 nt, Artificial Sequence
  Description of Artificial Sequence: Synthetic oligonucleotide
  Sense strand starting at position 2721 of SEQ ID NO: 1560318
ugcucauauuccuugucca

SEQ ID NO: 1591828 - RNA, 19 nt, Artificial Sequence
  Description of Artificial Sequence: Synthetic oligonucleotide
  Antisense strand to SEQ ID NO: 1591827
uggacaaggaauaugagca

SEQ ID NO: 1591829 - RNA, 19 nt, Artificial Sequence
  Description of Artificial Sequence: Synthetic oligonucleotide
  Sense strand starting at position 2722 of SEQ ID NO: 1560318
gcucauauuccuuguccau

SEQ ID NO: 1591830 - RNA, 19 nt, Artificial Sequence
  Description of Artificial Sequence: Synthetic oligonucleotide
  Antisense strand to SEQ ID NO: 1591829
auggacaaggaauaugagc

SEQ ID NO: 1591831 - RNA, 19 nt, Artificial Sequence
  Description of Artificial Sequence: Synthetic oligonucleotide
  Sense strand starting at position 2814 of SEQ ID NO: 1560318
cuuaguuacccauauugca

SEQ ID NO: 1591832 - RNA, 19 nt, Artificial Sequence
  Description of Artificial Sequence: Synthetic oligonucleotide
  Antisense strand to SEQ ID NO: 1591831
ugcaauauggguaacuaag

SEQ ID NO: 1591833 - RNA, 19 nt, Artificial Sequence
  Description of Artificial Sequence: Synthetic oligonucleotide
  Sense strand starting at position 2858 of SEQ ID NO: 1560318
gggcuuuaacuuuaguuau

SEQ ID NO: 1591834 - RNA, 19 nt, Artificial Sequence
  Description of Artificial Sequence: Synthetic oligonucleotide
  Antisense strand to SEQ ID NO: 1591833
auaacuaaaguuaaagccc

SEQ ID NO: 1591835 - RNA, 19 nt, Artificial Sequence
  Description of Artificial Sequence: Synthetic oligonucleotide
  Sense strand starting at position 2903 of SEQ ID NO: 1560318
augcgcaacuauuuaucaa

SEQ ID NO: 1591836 - RNA, 19 nt, Artificial Sequence
  Description of Artificial Sequence: Synthetic oligonucleotide
  Antisense strand to SEQ ID NO: 1591835
uugauaaauaguugcgcau

SEQ ID NO: 1591837 - RNA, 19 nt, Artificial Sequence
  Description of Artificial Sequence: Synthetic oligonucleotide
  Sense strand starting at position 2952 of SEQ ID NO: 1560318
uguuaagagcccugccaua

SEQ ID NO: 1591838 - RNA, 19 nt, Artificial Sequence
  Description of Artificial Sequence: Synthetic oligonucleotide
  Antisense strand to SEQ ID NO: 1591837
uauggcagggcucuuaaca

SEQ ID NO: 1591839 - RNA, 19 nt, Artificial Sequence
  Description of Artificial Sequence: Synthetic oligonucleotide
  Sense strand starting at position 2965 of SEQ ID NO: 1560318
gccauaacccagggucaua

SEQ ID NO: 1591840 - RNA, 19 nt, Artificial Sequence
  Description of Artificial Sequence: Synthetic oligonucleotide
  Antisense strand to SEQ ID NO: 1591839
uaugacccuggguuauggc

SEQ ID NO: 1591841 - RNA, 19 nt, Artificial Sequence
  Description of Artificial Sequence: Synthetic oligonucleotide
  Sense strand starting at position 3361 of SEQ ID NO: 1560318
guuguccucccagagcuua

SEQ ID NO: 1591842 - RNA, 19 nt, Artificial Sequence
  Description of Artificial Sequence: Synthetic oligonucleotide
  Antisense strand to SEQ ID NO: 1591841
uaagcucugggaggacaac

SEQ ID NO: 1591843 - RNA, 19 nt, Artificial Sequence
  Description of Artificial Sequence: Synthetic oligonucleotide
  Sense strand starting at position 3433 of SEQ ID NO: 1560318
caggucaucuggcuuuaau

SEQ ID NO: 1591844 - RNA, 19 nt, Artificial Sequence
  Description of Artificial Sequence: Synthetic oligonucleotide
  Antisense strand to SEQ ID NO: 1591843
auuaaagccagaugaccug

SEQ ID NO: 1591845 - RNA, 19 nt, Artificial Sequence
  Description of Artificial Sequence: Synthetic oligonucleotide
  Sense strand starting at position 3436 of SEQ ID NO: 1560318
gucaucuggcuuuaaucua

SEQ ID NO: 1591846 - RNA, 19 nt, Artificial Sequence
  Description of Artificial Sequence: Synthetic oligonucleotide
  Antisense strand to SEQ ID NO: 1591845
uagauuaaagccagaugac

SEQ ID NO: 1591847 - RNA, 19 nt, Artificial Sequence
  Description of Artificial Sequence: Synthetic oligonucleotide
  Sense strand starting at position 3443 of SEQ ID NO: 1560318
ggcuuuaaucuauguaaga

SEQ ID NO: 1591848 - RNA, 19 nt, Artificial Sequence
  Description of Artificial Sequence: Synthetic oligonucleotide
  Antisense strand to SEQ ID NO: 1591847
ucuuacauagauuaaagcc

SEQ ID NO: 1591849 - RNA, 19 nt, Artificial Sequence
  Description of Artificial Sequence: Synthetic oligonucleotide
  Sense strand starting at position 3444 of SEQ ID NO: 1560318
gcuuuaaucuauguaagau

SEQ ID NO: 1591850 - RNA, 19 nt, Artificial Sequence
  Description of Artificial Sequence: Synthetic oligonucleotide
  Antisense strand to SEQ ID NO: 1591849
aucuuacauagauuaaagc

SEQ ID NO: 1591851 - RNA, 19 nt, Artificial Sequence
  Description of Artificial Sequence: Synthetic oligonucleotide
  Sense strand starting at position 3775 of SEQ ID NO: 1560318
gaggucguuguuuaugagu

SEQ ID NO: 1591852 - RNA, 19 nt, Artificial Sequence
  Description of Artificial Sequence: Synthetic oligonucleotide
  Antisense strand to SEQ ID NO: 1591851
acucauaaacaacgaccuc

SEQ ID NO: 1591853 - RNA, 19 nt, Artificial Sequence
  Description of Artificial Sequence: Synthetic oligonucleotide
  Sense strand starting at position 3781 of SEQ ID NO: 1560318
guuguuuaugagugaugua

SEQ ID NO: 1591854 - RNA, 19 nt, Artificial Sequence
  Description of Artificial Sequence: Synthetic oligonucleotide
  Antisense strand to SEQ ID NO: 1591853
uacaucacucauaaacaac

SEQ ID NO: 1591855 - RNA, 19 nt, Artificial Sequence
  Description of Artificial Sequence: Synthetic oligonucleotide
  Sense strand starting at position 3782 of SEQ ID NO: 1560318
uuguuuaugagugauguaa

SEQ ID NO: 1591856 - RNA, 19 nt, Artificial Sequence
  Description of Artificial Sequence: Synthetic oligonucleotide
  Antisense strand to SEQ ID NO: 1591855
uuacaucacucauaaacaa

SEQ ID NO: 1591857 - RNA, 19 nt, Artificial Sequence
  Description of Artificial Sequence: Synthetic oligonucleotide
  Sense strand starting at position 3797 of SEQ ID NO: 1560318
guaaccaauugucucaagu

SEQ ID NO: 1591858 - RNA, 19 nt, Artificial Sequence
  Description of Artificial Sequence: Synthetic oligonucleotide
  Antisense strand to SEQ ID NO: 1591857
acuugagacaauugguuac

SEQ ID NO: 1591859 - RNA, 19 nt, Artificial Sequence
  Description of Artificial Sequence: Synthetic oligonucleotide
  Sense strand starting at position 3888 of SEQ ID NO: 1560318
acgucuauuucugacauuu

SEQ ID NO: 1591860 - RNA, 19 nt, Artificial Sequence
  Description of Artificial Sequence: Synthetic oligonucleotide
  Antisense strand to SEQ ID NO: 1591859
aaaugucagaaauagacgu

SEQ ID NO: 1591861 - RNA, 19 nt, Artificial Sequence
  Description of Artificial Sequence: Synthetic oligonucleotide
  Sense strand starting at position 3890 of SEQ ID NO: 1560318
gucuauuucugacauuucu

SEQ ID NO: 1591862 - RNA, 19 nt, Artificial Sequence
  Description of Artificial Sequence: Synthetic oligonucleotide
  Antisense strand to SEQ ID NO: 1591861
agaaaugucagaaauagac

SEQ ID NO: 1591863 - RNA, 19 nt, Artificial Sequence
  Description of Artificial Sequence: Synthetic oligonucleotide
  Sense strand starting at position 3897 of SEQ ID NO: 1560318
ucugacauuucuguuaugu

SEQ ID NO: 1591864 - RNA, 19 nt, Artificial Sequence
  Description of Artificial Sequence: Synthetic oligonucleotide
  Antisense strand to SEQ ID NO: 1591863
acauaacagaaaugucaga

SEQ ID NO: 1591865 - RNA, 19 nt, Artificial Sequence
  Description of Artificial Sequence: Synthetic oligonucleotide
  Sense strand starting at position 3952 of SEQ ID NO: 1560318
augacaucccucuguuucu

SEQ ID NO: 1591866 - RNA, 19 nt, Artificial Sequence
  Description of Artificial Sequence: Synthetic oligonucleotide
  Antisense strand to SEQ ID NO: 1591865
agaaacagagggaugucau

SEQ ID NO: 1591867 - RNA, 19 nt, Artificial Sequence
  Description of Artificial Sequence: Synthetic oligonucleotide
  Sense strand starting at position 861 of SEQ ID NO: 1560319
cgucucuaccaagauguca

SEQ ID NO: 1591868 - RNA, 19 nt, Artificial Sequence
  Description of Artificial Sequence: Synthetic oligonucleotide
  Antisense strand to SEQ ID NO: 1591867
ugacaucuugguagagacg

SEQ ID NO: 1591869 - RNA, 19 nt, Artificial Sequence
  Description of Artificial Sequence: Synthetic oligonucleotide
  Sense strand starting at position 1333 of SEQ ID NO: 1560319
ucaauauugccagguccuu

SEQ ID NO: 1591870 - RNA, 19 nt, Artificial Sequence
  Description of Artificial Sequence: Synthetic oligonucleotide
  Antisense strand to SEQ ID NO: 1591869
aaggaccuggcaauauuga

SEQ ID NO: 1591871 - RNA, 19 nt, Artificial Sequence
  Description of Artificial Sequence: Synthetic oligonucleotide
  Sense strand starting at position 1364 of SEQ ID NO: 1560319
auaugucuaaaguguagau

SEQ ID NO: 1591872 - RNA, 19 nt, Artificial Sequence
  Description of Artificial Sequence: Synthetic oligonucleotide
  Antisense strand to SEQ ID NO: 1591871
aucuacacuuuagacauau

SEQ ID NO: 1591873 - RNA, 19 nt, Artificial Sequence
  Description of Artificial Sequence: Synthetic oligonucleotide
  Sense strand starting at position 1408 of SEQ ID NO: 1560319
auucuuaaacacgagcaau

SEQ ID NO: 1591874 - RNA, 19 nt, Artificial Sequence
  Description of Artificial Sequence: Synthetic oligonucleotide
  Antisense strand to SEQ ID NO: 1591873
auugcucguguuuaagaau

SEQ ID NO: 1591875 - RNA, 19 nt, Artificial Sequence
  Description of Artificial Sequence: Synthetic oligonucleotide
  Sense strand starting at position 2397 of SEQ ID NO: 1560319
cagggcgaucucuguacaa

SEQ ID NO: 1591876 - RNA, 19 nt, Artificial Sequence
  Description of Artificial Sequence: Synthetic oligonucleotide
  Antisense strand to SEQ ID NO: 1591875
uuguacagagaucgcccug

SEQ ID NO: 1591877 - RNA, 19 nt, Artificial Sequence
  Description of Artificial Sequence: Synthetic oligonucleotide
  Sense strand starting at position 2399 of SEQ ID NO: 1560319
gggcgaucucuguacaacu

SEQ ID NO: 1591878 - RNA, 19 nt, Artificial Sequence
  Description of Artificial Sequence: Synthetic oligonucleotide
  Antisense strand to SEQ ID NO: 1591877
aguuguacagagaucgccc

SEQ ID NO: 1591879 - RNA, 19 nt, Artificial Sequence
  Description of Artificial Sequence: Synthetic oligonucleotide
  Sense strand starting at position 2409 of SEQ ID NO: 1560319
uguacaacucucuaugguu

SEQ ID NO: 1591880 - RNA, 19 nt, Artificial Sequence
  Description of Artificial Sequence: Synthetic oligonucleotide
  Antisense strand to SEQ ID NO: 1591879
aaccauagagaguuguaca

SEQ ID NO: 1591881 - RNA, 19 nt, Artificial Sequence
  Description of Artificial Sequence: Synthetic oligonucleotide
  Sense strand starting at position 2457 of SEQ ID NO: 1560319
agagauguggccugaggau

SEQ ID NO: 1591882 - RNA, 19 nt, Artificial Sequence
  Description of Artificial Sequence: Synthetic oligonucleotide
  Antisense strand to SEQ ID NO: 1591881
auccucaggccacaucucu

SEQ ID NO: 1591883 - RNA, 19 nt, Artificial Sequence
  Description of Artificial Sequence: Synthetic oligonucleotide
  Sense strand starting at position 2601 of SEQ ID NO: 1560319
agacuuaaguuugaaucca

SEQ ID NO: 1591884 - RNA, 19 nt, Artificial Sequence
  Description of Artificial Sequence: Synthetic oligonucleotide
  Antisense strand to SEQ ID NO: 1591883
uggauucaaacuuaagucu

SEQ ID NO: 1591885 - RNA, 19 nt, Artificial Sequence
  Description of Artificial Sequence: Synthetic oligonucleotide
  Sense strand starting at position 2941 of SEQ ID NO: 1560319
gcugaugaguuaguauuag

SEQ ID NO: 1591886 - RNA, 19 nt, Artificial Sequence
  Description of Artificial Sequence: Synthetic oligonucleotide
  Antisense strand to SEQ ID NO: 1591885
cuaauacuaacucaucagc

SEQ ID NO: 1591887 - RNA, 19 nt, Artificial Sequence
  Description of Artificial Sequence: Synthetic oligonucleotide
  Sense strand starting at position 2947 of SEQ ID NO: 1560319
gaguuaguauuagucacuu

SEQ ID NO: 1591888 - RNA, 19 nt, Artificial Sequence
  Description of Artificial Sequence: Synthetic oligonucleotide
  Antisense strand to SEQ ID NO: 1591887
aagugacuaauacuaacuc

SEQ ID NO: 1591889 - RNA, 19 nt, Artificial Sequence
  Description of Artificial Sequence: Synthetic oligonucleotide
  Sense strand starting at position 2955 of SEQ ID NO: 1560319
auuagucacuuccugaaag

SEQ ID NO: 1591890 - RNA, 19 nt, Artificial Sequence
  Description of Artificial Sequence: Synthetic oligonucleotide
  Antisense strand to SEQ ID NO: 1591889
cuuucaggaagugacuaau

SEQ ID NO: 1591891 - RNA, 19 nt, Artificial Sequence
  Description of Artificial Sequence: Synthetic oligonucleotide
  Sense strand starting at position 2967 of SEQ ID NO: 1560319
cugaaaggauaguaucaca

SEQ ID NO: 1591892 - RNA, 19 nt, Artificial Sequence
  Description of Artificial Sequence: Synthetic oligonucleotide
  Antisense strand to SEQ ID NO: 1591891
ugugauacuauccuuucag

SEQ ID NO: 1591893 - RNA, 19 nt, Artificial Sequence
  Description of Artificial Sequence: Synthetic oligonucleotide
  Sense strand starting at position 2975 of SEQ ID NO: 1560319
auaguaucacacuguucua

SEQ ID NO: 1591894 - RNA, 19 nt, Artificial Sequence
  Description of Artificial Sequence: Synthetic oligonucleotide
  Antisense strand to SEQ ID NO: 1591893
uagaacagugugauacuau

SEQ ID NO: 1591895 - RNA, 19 nt, Artificial Sequence
  Description of Artificial Sequence: Synthetic oligonucleotide
  Sense strand starting at position 2978 of SEQ ID NO: 1560319
guaucacacuguucuaacu

SEQ ID NO: 1591896 - RNA, 19 nt, Artificial Sequence
  Description of Artificial Sequence: Synthetic oligonucleotide
  Antisense strand to SEQ ID NO: 1591895
aguuagaacagugugauac

SEQ ID NO: 1591897 - RNA, 19 nt, Artificial Sequence
  Description of Artificial Sequence: Synthetic oligonucleotide
  Sense strand starting at position 2994 of SEQ ID NO: 1560319
acuugcagcucucugauua

SEQ ID NO: 1591898 - RNA, 19 nt, Artificial Sequence
  Description of Artificial Sequence: Synthetic oligonucleotide
  Antisense strand to SEQ ID NO: 1591897
uaaucagagagcugcaagu

SEQ ID NO: 1591899 - RNA, 19 nt, Artificial Sequence
  Description of Artificial Sequence: Synthetic oligonucleotide
  Sense strand starting at position 2998 of SEQ ID NO: 1560319
gcagcucucugauuacuaa

SEQ ID NO: 1591900 - RNA, 19 nt, Artificial Sequence
  Description of Artificial Sequence: Synthetic oligonucleotide
  Antisense strand to SEQ ID NO: 1591899
uuaguaaucagagagcugc

SEQ ID NO: 1591901 - RNA, 19 nt, Artificial Sequence
  Description of Artificial Sequence: Synthetic oligonucleotide
  Sense strand starting at position 3001 of SEQ ID NO: 1560319
gcucucugauuacuaagga

SEQ ID NO: 1591902 - RNA, 19 nt, Artificial Sequence
  Description of Artificial Sequence: Synthetic oligonucleotide
  Antisense strand to SEQ ID NO: 1591901
uccuuaguaaucagagagc

SEQ ID NO: 1591903 - RNA, 19 nt, Artificial Sequence
  Description of Artificial Sequence: Synthetic oligonucleotide
  Sense strand starting at position 3002 of SEQ ID NO: 1560319
cucucugauuacuaaggaa

SEQ ID NO: 1591904 - RNA, 19 nt, Artificial Sequence
  Description of Artificial Sequence: Synthetic oligonucleotide
  Antisense strand to SEQ ID NO: 1591903
uuccuuaguaaucagagag

SEQ ID NO: 1591905 - RNA, 19 nt, Artificial Sequence
  Description of Artificial Sequence: Synthetic oligonucleotide
  Sense strand starting at position 3005 of SEQ ID NO: 1560319
ucugauuacuaaggaaaug

SEQ ID NO: 1591906 - RNA, 19 nt, Artificial Sequence
  Description of Artificial Sequence: Synthetic oligonucleotide
  Antisense strand to SEQ ID NO: 1591905
cauuuccuuaguaaucaga

SEQ ID NO: 1591907 - RNA, 19 nt, Artificial Sequence
  Description of Artificial Sequence: Synthetic oligonucleotide
  Sense strand starting at position 3035 of SEQ ID NO: 1560319
gugaaaguauuggucuugu

SEQ ID NO: 1591908 - RNA, 19 nt, Artificial Sequence
  Description of Artificial Sequence: Synthetic oligonucleotide
  Antisense strand to SEQ ID NO: 1591907
acaagaccaauacuuucac

SEQ ID NO: 1591909 - RNA, 19 nt, Artificial Sequence
  Description of Artificial Sequence: Synthetic oligonucleotide
  Sense strand starting at position 3068 of SEQ ID NO: 1560319
gugaauugcuugcucauau

SEQ ID NO: 1591910 - RNA, 19 nt, Artificial Sequence
  Description of Artificial Sequence: Synthetic oligonucleotide
  Antisense strand to SEQ ID NO: 1591909
auaugagcaagcaauucac

SEQ ID NO: 1591911 - RNA, 19 nt, Artificial Sequence
  Description of Artificial Sequence: Synthetic oligonucleotide
  Sense strand starting at position 3069 of SEQ ID NO: 1560319
ugaauugcuugcucauauu

SEQ ID NO: 1591912 - RNA, 19 nt, Artificial Sequence
  Description of Artificial Sequence: Synthetic oligonucleotide
  Antisense strand to SEQ ID NO: 1591911
aauaugagcaagcaauuca

SEQ ID NO: 1591913 - RNA, 19 nt, Artificial Sequence
  Description of Artificial Sequence: Synthetic oligonucleotide
  Sense strand starting at position 3078 of SEQ ID NO: 1560319
ugcucauauuccuugucca

SEQ ID NO: 1591914 - RNA, 19 nt, Artificial Sequence
  Description of Artificial Sequence: Synthetic oligonucleotide
  Antisense strand to SEQ ID NO: 1591913
uggacaaggaauaugagca

SEQ ID NO: 1591915 - RNA, 19 nt, Artificial Sequence
  Description of Artificial Sequence: Synthetic oligonucleotide
  Sense strand starting at position 3079 of SEQ ID NO: 1560319
gcucauauuccuuguccau

SEQ ID NO: 1591916 - RNA, 19 nt, Artificial Sequence
  Description of Artificial Sequence: Synthetic oligonucleotide
  Antisense strand to SEQ ID NO: 1591915
auggacaaggaauaugagc

SEQ ID NO: 1591917 - RNA, 19 nt, Artificial Sequence
  Description of Artificial Sequence: Synthetic oligonucleotide
  Sense strand starting at position 3154 of SEQ ID NO: 1560319
ggauucugauucuaauccu

SEQ ID NO: 1591918 - RNA, 19 nt, Artificial Sequence
  Description of Artificial Sequence: Synthetic oligonucleotide
  Antisense strand to SEQ ID NO: 1591917
aggauuagaaucagaaucc

SEQ ID NO: 1591919 - RNA, 19 nt, Artificial Sequence
  Description of Artificial Sequence: Synthetic oligonucleotide
  Sense strand starting at position 3171 of SEQ ID NO: 1560319
cuuaguuacccauauugca

SEQ ID NO: 1591920 - RNA, 19 nt, Artificial Sequence
  Description of Artificial Sequence: Synthetic oligonucleotide
  Antisense strand to SEQ ID NO: 1591919
ugcaauauggguaacuaag

SEQ ID NO: 1591921 - RNA, 19 nt, Artificial Sequence
  Description of Artificial Sequence: Synthetic oligonucleotide
  Sense strand starting at position 3215 of SEQ ID NO: 1560319
gggcuuuaacuuuaguuau

SEQ ID NO: 1591922 - RNA, 19 nt, Artificial Sequence
  Description of Artificial Sequence: Synthetic oligonucleotide
  Antisense strand to SEQ ID NO: 1591921
auaacuaaaguuaaagccc

SEQ ID NO: 1591923 - RNA, 19 nt, Artificial Sequence
  Description of Artificial Sequence: Synthetic oligonucleotide
  Sense strand starting at position 3253 of SEQ ID NO: 1560319
uguguuuaugcgcaacuau

SEQ ID NO: 1591924 - RNA, 19 nt, Artificial Sequence
  Description of Artificial Sequence: Synthetic oligonucleotide
  Antisense strand to SEQ ID NO: 1591923
auaguugcgcauaaacaca

SEQ ID NO: 1591925 - RNA, 19 nt, Artificial Sequence
  Description of Artificial Sequence: Synthetic oligonucleotide
  Sense strand starting at position 3260 of SEQ ID NO: 1560319
augcgcaacuauuuaucaa

SEQ ID NO: 1591926 - RNA, 19 nt, Artificial Sequence
  Description of Artificial Sequence: Synthetic oligonucleotide
  Antisense strand to SEQ ID NO: 1591925
uugauaaauaguugcgcau

SEQ ID NO: 1591927 - RNA, 19 nt, Artificial Sequence
  Description of Artificial Sequence: Synthetic oligonucleotide
  Sense strand starting at position 3275 of SEQ ID NO: 1560319
ucaaucuguuccguucuga

SEQ ID NO: 1591928 - RNA, 19 nt, Artificial Sequence
  Description of Artificial Sequence: Synthetic oligonucleotide
  Antisense strand to SEQ ID NO: 1591927
ucagaacggaacagauuga

SEQ ID NO: 1591929 - RNA, 19 nt, Artificial Sequence
  Description of Artificial Sequence: Synthetic oligonucleotide
  Sense strand starting at position 3309 of SEQ ID NO: 1560319
uguuaagagcccugccaua

SEQ ID NO: 1591930 - RNA, 19 nt, Artificial Sequence
  Description of Artificial Sequence: Synthetic oligonucleotide
  Antisense strand to SEQ ID NO: 1591929
uauggcagggcucuuaaca

SEQ ID NO: 1591931 - RNA, 19 nt, Artificial Sequence
  Description of Artificial Sequence: Synthetic oligonucleotide
  Sense strand starting at position 3322 of SEQ ID NO: 1560319
gccauaacccagggucaua

SEQ ID NO: 1591932 - RNA, 19 nt, Artificial Sequence
  Description of Artificial Sequence: Synthetic oligonucleotide
  Antisense strand to SEQ ID NO: 1591931
uaugacccuggguuauggc

SEQ ID NO: 1591933 - RNA, 19 nt, Artificial Sequence
  Description of Artificial Sequence: Synthetic oligonucleotide
  Sense strand starting at position 3327 of SEQ ID NO: 1560319
aacccagggucauaaugau

SEQ ID NO: 1591934 - RNA, 19 nt, Artificial Sequence
  Description of Artificial Sequence: Synthetic oligonucleotide
  Antisense strand to SEQ ID NO: 1591933
aucauuaugacccuggguu

SEQ ID NO: 1591935 - RNA, 19 nt, Artificial Sequence
  Description of Artificial Sequence: Synthetic oligonucleotide
  Sense strand starting at position 3333 of SEQ ID NO: 1560319
gggucauaaugauaaauuc

SEQ ID NO: 1591936 - RNA, 19 nt, Artificial Sequence
  Description of Artificial Sequence: Synthetic oligonucleotide
  Antisense strand to SEQ ID NO: 1591935
gaauuuaucauuaugaccc

SEQ ID NO: 1591937 - RNA, 19 nt, Artificial Sequence
  Description of Artificial Sequence: Synthetic oligonucleotide
  Sense strand starting at position 3718 of SEQ ID NO: 1560319
guuguccucccagagcuua

SEQ ID NO: 1591938 - RNA, 19 nt, Artificial Sequence
  Description of Artificial Sequence: Synthetic oligonucleotide
  Antisense strand to SEQ ID NO: 1591937
uaagcucugggaggacaac

SEQ ID NO: 1591939 - RNA, 19 nt, Artificial Sequence
  Description of Artificial Sequence: Synthetic oligonucleotide
  Sense strand starting at position 3790 of SEQ ID NO: 1560319
caggucaucuggcuuuaau

SEQ ID NO: 1591940 - RNA, 19 nt, Artificial Sequence
  Description of Artificial Sequence: Synthetic oligonucleotide
  Antisense strand to SEQ ID NO: 1591939
auuaaagccagaugaccug

SEQ ID NO: 1591941 - RNA, 19 nt, Artificial Sequence
  Description of Artificial Sequence: Synthetic oligonucleotide
  Sense strand starting at position 3793 of SEQ ID NO: 1560319
gucaucuggcuuuaaucua

SEQ ID NO: 1591942 - RNA, 19 nt, Artificial Sequence
  Description of Artificial Sequence: Synthetic oligonucleotide
  Antisense strand to SEQ ID NO: 1591941
uagauuaaagccagaugac

SEQ ID NO: 1591943 - RNA, 19 nt, Artificial Sequence
  Description of Artificial Sequence: Synthetic oligonucleotide
  Sense strand starting at position 3800 of SEQ ID NO: 1560319
ggcuuuaaucuauguaaga

SEQ ID NO: 1591944 - RNA, 19 nt, Artificial Sequence
  Description of Artificial Sequence: Synthetic oligonucleotide
  Antisense strand to SEQ ID NO: 1591943
ucuuacauagauuaaagcc

SEQ ID NO: 1591945 - RNA, 19 nt, Artificial Sequence
  Description of Artificial Sequence: Synthetic oligonucleotide
  Sense strand starting at position 3801 of SEQ ID NO: 1560319
gcuuuaaucuauguaagau

SEQ ID NO: 1591946 - RNA, 19 nt, Artificial Sequence
  Description of Artificial Sequence: Synthetic oligonucleotide
  Antisense strand to SEQ ID NO: 1591945
aucuuacauagauuaaagc

SEQ ID NO: 1591947 - RNA, 19 nt, Artificial Sequence
  Description of Artificial Sequence: Synthetic oligonucleotide
  Sense strand starting at position 36 of SEQ ID NO: 1560320
ugcucaccucagggugaau

SEQ ID NO: 1591948 - RNA, 19 nt, Artificial Sequence
  Description of Artificial Sequence: Synthetic oligonucleotide
  Antisense strand to SEQ ID NO: 1591947
auucacccugaggugagca

SEQ ID NO: 1591949 - RNA, 19 nt, Artificial Sequence
  Description of Artificial Sequence: Synthetic oligonucleotide
  Sense strand starting at position 105 of SEQ ID NO: 1560320
cgcccuccugcuucucaua

SEQ ID NO: 1591950 - RNA, 19 nt, Artificial Sequence
  Description of Artificial Sequence: Synthetic oligonucleotide
  Antisense strand to SEQ ID NO: 1591949
uaugagaagcaggagggcg

SEQ ID NO: 1591951 - RNA, 19 nt, Artificial Sequence
  Description of Artificial Sequence: Synthetic oligonucleotide
  Sense strand starting at position 120 of SEQ ID NO: 1560320
cauagaaguugagcaacuu

SEQ ID NO: 1591952 - RNA, 19 nt, Artificial Sequence
  Description of Artificial Sequence: Synthetic oligonucleotide
  Antisense strand to SEQ ID NO: 1591951
aaguugcucaacuucuaug

SEQ ID NO: 1591953 - RNA, 19 nt, Artificial Sequence
  Description of Artificial Sequence: Synthetic oligonucleotide
  Sense strand starting at position 121 of SEQ ID NO: 1560320
auagaaguugagcaacuuu

SEQ ID NO: 1591954 - RNA, 19 nt, Artificial Sequence
  Description of Artificial Sequence: Synthetic oligonucleotide
  Antisense strand to SEQ ID NO: 1591953
aaaguugcucaacuucuau

SEQ ID NO: 1591955 - RNA, 19 nt, Artificial Sequence
  Description of Artificial Sequence: Synthetic oligonucleotide
  Sense strand starting at position 181 of SEQ ID NO: 1560320
ggagcuugugcucauugga

SEQ ID NO: 1591956 - RNA, 19 nt, Artificial Sequence
  Description of Artificial Sequence: Synthetic oligonucleotide
  Antisense strand to SEQ ID NO: 1591955
uccaaugagcacaagcucc

SEQ ID NO: 1591957 - RNA, 19 nt, Artificial Sequence
  Description of Artificial Sequence: Synthetic oligonucleotide
  Sense strand starting at position 356 of SEQ ID NO: 1560320
ggcacaguucuugagcagu

SEQ ID NO: 1591958 - RNA, 19 nt, Artificial Sequence
  Description of Artificial Sequence: Synthetic oligonucleotide
  Antisense strand to SEQ ID NO: 1591957
acugcucaagaacugugcc

SEQ ID NO: 1591959 - RNA, 19 nt, Artificial Sequence
  Description of Artificial Sequence: Synthetic oligonucleotide
  Sense strand starting at position 359 of SEQ ID NO: 1560320
acaguucuugagcaguaga

SEQ ID NO: 1591960 - RNA, 19 nt, Artificial Sequence
  Description of Artificial Sequence: Synthetic oligonucleotide
  Antisense strand to SEQ ID NO: 1591959
ucuacugcucaagaacugu

SEQ ID NO: 1591961 - RNA, 19 nt, Artificial Sequence
  Description of Artificial Sequence: Synthetic oligonucleotide
  Sense strand starting at position 362 of SEQ ID NO: 1560320
guucuugagcaguagauga

SEQ ID NO: 1591962 - RNA, 19 nt, Artificial Sequence
  Description of Artificial Sequence: Synthetic oligonucleotide
  Antisense strand to SEQ ID NO: 1591961
ucaucuacugcucaagaac

SEQ ID NO: 1591963 - RNA, 19 nt, Artificial Sequence
  Description of Artificial Sequence: Synthetic oligonucleotide
  Sense strand starting at position 366 of SEQ ID NO: 1560320
uugagcaguagaugaguuu

SEQ ID NO: 1591964 - RNA, 19 nt, Artificial Sequence
  Description of Artificial Sequence: Synthetic oligonucleotide
  Antisense strand to SEQ ID NO: 1591963
aaacucaucuacugcucaa

SEQ ID NO: 1591965 - RNA, 19 nt, Artificial Sequence
  Description of Artificial Sequence: Synthetic oligonucleotide
  Sense strand starting at position 396 of SEQ ID NO: 1560320
gcggauaugccugccgaua

SEQ ID NO: 1591966 - RNA, 19 nt, Artificial Sequence
  Description of Artificial Sequence: Synthetic oligonucleotide
  Antisense strand to SEQ ID NO: 1591965
uaucggcaggcauauccgc

SEQ ID NO: 1591967 - RNA, 19 nt, Artificial Sequence
  Description of Artificial Sequence: Synthetic oligonucleotide
  Sense strand starting at position 485 of SEQ ID NO: 1560320
ucugguaugccaugaucag

SEQ ID NO: 1591968 - RNA, 19 nt, Artificial Sequence
  Description of Artificial Sequence: Synthetic oligonucleotide
  Antisense strand to SEQ ID NO: 1591967
cugaucauggcauaccaga

SEQ ID NO: 1591969 - RNA, 19 nt, Artificial Sequence
  Description of Artificial Sequence: Synthetic oligonucleotide
  Sense strand starting at position 679 of SEQ ID NO: 1560320
gcaguuaagauugggcagu

SEQ ID NO: 1591970 - RNA, 19 nt, Artificial Sequence
  Description of Artificial Sequence: Synthetic oligonucleotide
  Antisense strand to SEQ ID NO: 1591969
acugcccaaucuuaacugc

SEQ ID NO: 1591971 - RNA, 19 nt, Artificial Sequence
  Description of Artificial Sequence: Synthetic oligonucleotide
  Sense strand starting at position 1028 of SEQ ID NO: 1560320
cuaugaggauugugagaaa

SEQ ID NO: 1591972 - RNA, 19 nt, Artificial Sequence
  Description of Artificial Sequence: Synthetic oligonucleotide
  Antisense strand to SEQ ID NO: 1591971
uuucucacaauccucauag

SEQ ID NO: 1591973 - RNA, 19 nt, Artificial Sequence
  Description of Artificial Sequence: Synthetic oligonucleotide
  Sense strand starting at position 1031 of SEQ ID NO: 1560320
ugaggauugugagaaauug

SEQ ID NO: 1591974 - RNA, 19 nt, Artificial Sequence
  Description of Artificial Sequence: Synthetic oligonucleotide
  Antisense strand to SEQ ID NO: 1591973
caauuucucacaauccuca

SEQ ID NO: 1591975 - RNA, 19 nt, Artificial Sequence
  Description of Artificial Sequence: Synthetic oligonucleotide
  Sense strand starting at position 1040 of SEQ ID NO: 1560320
ugagaaauugcagguuaaa

SEQ ID NO: 1591976 - RNA, 19 nt, Artificial Sequence
  Description of Artificial Sequence: Synthetic oligonucleotide
  Antisense strand to SEQ ID NO: 1591975
uuuaaccugcaauuucuca

SEQ ID NO: 1591977 - RNA, 19 nt, Artificial Sequence
  Description of Artificial Sequence: Synthetic oligonucleotide
  Sense strand starting at position 1054 of SEQ ID NO: 1560320
uuaaauauuuggcacagua

SEQ ID NO: 1591978 - RNA, 19 nt, Artificial Sequence
  Description of Artificial Sequence: Synthetic oligonucleotide
  Antisense strand to SEQ ID NO: 1591977
uacugugccaaauauuuaa

SEQ ID NO: 1591979 - RNA, 19 nt, Artificial Sequence
  Description of Artificial Sequence: Synthetic oligonucleotide
  Sense strand starting at position 1070 of SEQ ID NO: 1560320
guagcugauauauagugaa

SEQ ID NO: 1591980 - RNA, 19 nt, Artificial Sequence
  Description of Artificial Sequence: Synthetic oligonucleotide
  Antisense strand to SEQ ID NO: 1591979
uucacuauauaucagcuac

SEQ ID NO: 1591981 - RNA, 19 nt, Artificial Sequence
  Description of Artificial Sequence: Synthetic oligonucleotide
  Sense strand starting at position 1563 of SEQ ID NO: 1560320
guuugagcucccgcaugua

SEQ ID NO: 1591982 - RNA, 19 nt, Artificial Sequence
  Description of Artificial Sequence: Synthetic oligonucleotide
  Antisense strand to SEQ ID NO: 1591981
uacaugcgggagcucaaac

SEQ ID NO: 1591983 - RNA, 19 nt, Artificial Sequence
  Description of Artificial Sequence: Synthetic oligonucleotide
  Sense strand starting at position 1600 of SEQ ID NO: 1560320
gauguagucguacgggaag

SEQ ID NO: 1591984 - RNA, 19 nt, Artificial Sequence
  Description of Artificial Sequence: Synthetic oligonucleotide
  Antisense strand to SEQ ID NO: 1591983
cuucccguacgacuacauc

SEQ ID NO: 1591985 - RNA, 19 nt, Artificial Sequence
  Description of Artificial Sequence: Synthetic oligonucleotide
  Sense strand starting at position 1602 of SEQ ID NO: 1560320
uguagucguacgggaagua

SEQ ID NO: 1591986 - RNA, 19 nt, Artificial Sequence
  Description of Artificial Sequence: Synthetic oligonucleotide
  Antisense strand to SEQ ID NO: 1591985
uacuucccguacgacuaca

SEQ ID NO: 1591987 - RNA, 19 nt, Artificial Sequence
  Description of Artificial Sequence: Synthetic oligonucleotide
  Sense strand starting at position 1791 of SEQ ID NO: 1560320
gugucuccucgcuaucacu

SEQ ID NO: 1591988 - RNA, 19 nt, Artificial Sequence
  Description of Artificial Sequence: Synthetic oligonucleotide
  Antisense strand to SEQ ID NO: 1591987
agugauagcgaggagacac

SEQ ID NO: 1591989 - RNA, 19 nt, Artificial Sequence
  Description of Artificial Sequence: Synthetic oligonucleotide
  Sense strand starting at position 2054 of SEQ ID NO: 1560320
uuacgagaccauuggcuaa

SEQ ID NO: 1591990 - RNA, 19 nt, Artificial Sequence
  Description of Artificial Sequence: Synthetic oligonucleotide
  Antisense strand to SEQ ID NO: 1591989
uuagccaauggucucguaa

SEQ ID NO: 1591991 - RNA, 19 nt, Artificial Sequence
  Description of Artificial Sequence: Synthetic oligonucleotide
  Sense strand starting at position 2269 of SEQ ID NO: 1560320
cugccaagauugucugagu

SEQ ID NO: 1591992 - RNA, 19 nt, Artificial Sequence
  Description of Artificial Sequence: Synthetic oligonucleotide
  Antisense strand to SEQ ID NO: 1591991
acucagacaaucuuggcag

SEQ ID NO: 1591993 - RNA, 19 nt, Artificial Sequence
  Description of Artificial Sequence: Synthetic oligonucleotide
  Sense strand starting at position 2270 of SEQ ID NO: 1560320
ugccaagauugucugagua

SEQ ID NO: 1591994 - RNA, 19 nt, Artificial Sequence
  Description of Artificial Sequence: Synthetic oligonucleotide
  Antisense strand to SEQ ID NO: 1591993
uacucagacaaucuuggca

SEQ ID NO: 1591995 - RNA, 19 nt, Artificial Sequence
  Description of Artificial Sequence: Synthetic oligonucleotide
  Sense strand starting at position 2274 of SEQ ID NO: 1560320
aagauugucugaguauuga

SEQ ID NO: 1591996 - RNA, 19 nt, Artificial Sequence
  Description of Artificial Sequence: Synthetic oligonucleotide
  Antisense strand to SEQ ID NO: 1591995
ucaauacucagacaaucuu

SEQ ID NO: 1591997 - RNA, 19 nt, Artificial Sequence
  Description of Artificial Sequence: Synthetic oligonucleotide
  Sense strand starting at position 2283 of SEQ ID NO: 1560320
ugaguauugaucgaaccca

SEQ ID NO: 1591998 - RNA, 19 nt, Artificial Sequence
  Description of Artificial Sequence: Synthetic oligonucleotide
  Antisense strand to SEQ ID NO: 1591997
uggguucgaucaauacuca

SEQ ID NO: 1591999 - RNA, 19 nt, Artificial Sequence
  Description of Artificial Sequence: Synthetic oligonucleotide
  Sense strand starting at position 2310 of SEQ ID NO: 1560320
agaucagcuugagcaagau

SEQ ID NO: 1592000 - RNA, 19 nt, Artificial Sequence
  Description of Artificial Sequence: Synthetic oligonucleotide
  Antisense strand to SEQ ID NO: 1591999
aucuugcucaagcugaucu

SEQ ID NO: 1592001 - RNA, 19 nt, Artificial Sequence
  Description of Artificial Sequence: Synthetic oligonucleotide
  Sense strand starting at position 2379 of SEQ ID NO: 1560320
cucaguagcgaauagucua

SEQ ID NO: 1592002 - RNA, 19 nt, Artificial Sequence
  Description of Artificial Sequence: Synthetic oligonucleotide
  Antisense strand to SEQ ID NO: 1592001
uagacuauucgcuacugag

SEQ ID NO: 1592003 - RNA, 19 nt, Artificial Sequence
  Description of Artificial Sequence: Synthetic oligonucleotide
  Sense strand starting at position 2384 of SEQ ID NO: 1560320
uagcgaauagucuaacgga

SEQ ID NO: 1592004 - RNA, 19 nt, Artificial Sequence
  Description of Artificial Sequence: Synthetic oligonucleotide
  Antisense strand to SEQ ID NO: 1592003
uccguuagacuauucgcua

SEQ ID NO: 1592005 - RNA, 19 nt, Artificial Sequence
  Description of Artificial Sequence: Synthetic oligonucleotide
  Sense strand starting at position 2412 of SEQ ID NO: 1560320
ggaaauuggugauccuuuc

SEQ ID NO: 1592006 - RNA, 19 nt, Artificial Sequence
  Description of Artificial Sequence: Synthetic oligonucleotide
  Antisense strand to SEQ ID NO: 1592005
gaaaggaucaccaauuucc

SEQ ID NO: 1592007 - RNA, 19 nt, Artificial Sequence
  Description of Artificial Sequence: Synthetic oligonucleotide
  Sense strand starting at position 2425 of SEQ ID NO: 1560320
ccuuucugggcccaagagu

SEQ ID NO: 1592008 - RNA, 19 nt, Artificial Sequence
  Description of Artificial Sequence: Synthetic oligonucleotide
  Antisense strand to SEQ ID NO: 1592007
acucuugggcccagaaagg

SEQ ID NO: 1592009 - RNA, 19 nt, Artificial Sequence
  Description of Artificial Sequence: Synthetic oligonucleotide
  Sense strand starting at position 2604 of SEQ ID NO: 1560320
gcuggcaaaugcuuguaau

SEQ ID NO: 1592010 - RNA, 19 nt, Artificial Sequence
  Description of Artificial Sequence: Synthetic oligonucleotide
  Antisense strand to SEQ ID NO: 1592009
auuacaagcauuugccagc

SEQ ID NO: 1592011 - RNA, 19 nt, Artificial Sequence
  Description of Artificial Sequence: Synthetic oligonucleotide
  Sense strand starting at position 2605 of SEQ ID NO: 1560320
cuggcaaaugcuuguaauc

SEQ ID NO: 1592012 - RNA, 19 nt, Artificial Sequence
  Description of Artificial Sequence: Synthetic oligonucleotide
  Antisense strand to SEQ ID NO: 1592011
gauuacaagcauuugccag

SEQ ID NO: 1592013 - RNA, 19 nt, Artificial Sequence
  Description of Artificial Sequence: Synthetic oligonucleotide
  Sense strand starting at position 2923 of SEQ ID NO: 1560320
ggucuuucucugucgccaa

SEQ ID NO: 1592014 - RNA, 19 nt, Artificial Sequence
  Description of Artificial Sequence: Synthetic oligonucleotide
  Antisense strand to SEQ ID NO: 1592013
uuggcgacagagaaagacc

SEQ ID NO: 1592015 - RNA, 19 nt, Artificial Sequence
  Description of Artificial Sequence: Synthetic oligonucleotide
  Sense strand starting at position 3298 of SEQ ID NO: 1560320
aguacauugcuugagcuca

SEQ ID NO: 1592016 - RNA, 19 nt, Artificial Sequence
  Description of Artificial Sequence: Synthetic oligonucleotide
  Antisense strand to SEQ ID NO: 1592015
ugagcucaagcaauguacu

SEQ ID NO: 1592017 - RNA, 19 nt, Artificial Sequence
  Description of Artificial Sequence: Synthetic oligonucleotide
  Sense strand starting at position 3557 of SEQ ID NO: 1560320
gugugcgcacguguauaau

SEQ ID NO: 1592018 - RNA, 19 nt, Artificial Sequence
  Description of Artificial Sequence: Synthetic oligonucleotide
  Antisense strand to SEQ ID NO: 1592017
auuauacacgugcgcacac

SEQ ID NO: 1592019 - RNA, 19 nt, Artificial Sequence
  Description of Artificial Sequence: Synthetic oligonucleotide
  Sense strand starting at position 3563 of SEQ ID NO: 1560320
gcacguguauaaucacaag

SEQ ID NO: 1592020 - RNA, 19 nt, Artificial Sequence
  Description of Artificial Sequence: Synthetic oligonucleotide
  Antisense strand to SEQ ID NO: 1592019
cuugugauuauacacgugc

SEQ ID NO: 1592021 - RNA, 19 nt, Artificial Sequence
  Description of Artificial Sequence: Synthetic oligonucleotide
  Sense strand starting at position 3935 of SEQ ID NO: 1560320
gacuuauuaugacaggaug

SEQ ID NO: 1592022 - RNA, 19 nt, Artificial Sequence
  Description of Artificial Sequence: Synthetic oligonucleotide
  Antisense strand to SEQ ID NO: 1592021
cauccugucauaauaaguc

SEQ ID NO: 1592023 - RNA, 19 nt, Artificial Sequence
  Description of Artificial Sequence: Synthetic oligonucleotide
  Sense strand starting at position 3974 of SEQ ID NO: 1560320
gugaguguuggccaaguga

SEQ ID NO: 1592024 - RNA, 19 nt, Artificial Sequence
  Description of Artificial Sequence: Synthetic oligonucleotide
  Antisense strand to SEQ ID NO: 1592023
ucacuuggccaacacucac

SEQ ID NO: 1592025 - RNA, 19 nt, Artificial Sequence
  Description of Artificial Sequence: Synthetic oligonucleotide
  Sense strand starting at position 3981 of SEQ ID NO: 1560320
uuggccaagugaucagaga

SEQ ID NO: 1592026 - RNA, 19 nt, Artificial Sequence
  Description of Artificial Sequence: Synthetic oligonucleotide
  Antisense strand to SEQ ID NO: 1592025
ucucugaucacuuggccaa

SEQ ID NO: 1592027 - RNA, 19 nt, Artificial Sequence
  Description of Artificial Sequence: Synthetic oligonucleotide
  Sense strand starting at position 44 of SEQ ID NO: 1560321
cggcuuuccucaucggaca

SEQ ID NO: 1592028 - RNA, 19 nt, Artificial Sequence
  Description of Artificial Sequence: Synthetic oligonucleotide
  Antisense strand to SEQ ID NO: 1592027
uguccgaugaggaaagccg

SEQ ID NO: 1592029 - RNA, 19 nt, Artificial Sequence
  Description of Artificial Sequence: Synthetic oligonucleotide
  Sense strand starting at position 193 of SEQ ID NO: 1560321
gugugagugugcuguguau

SEQ ID NO: 1592030 - RNA, 19 nt, Artificial Sequence
  Description of Artificial Sequence: Synthetic oligonucleotide
  Antisense strand to SEQ ID NO: 1592029
auacacagcacacucacac

SEQ ID NO: 1592031 - RNA, 19 nt, Artificial Sequence
  Description of Artificial Sequence: Synthetic oligonucleotide
  Sense strand starting at position 208 of SEQ ID NO: 1560321
guaugcguccacgugcuua

SEQ ID NO: 1592032 - RNA, 19 nt, Artificial Sequence
  Description of Artificial Sequence: Synthetic oligonucleotide
  Antisense strand to SEQ ID NO: 1592031
uaagcacguggacgcauac

SEQ ID NO: 1592033 - RNA, 19 nt, Artificial Sequence
  Description of Artificial Sequence: Synthetic oligonucleotide
  Sense strand starting at position 210 of SEQ ID NO: 1560321
augcguccacgugcuuaaa

SEQ ID NO: 1592034 - RNA, 19 nt, Artificial Sequence
  Description of Artificial Sequence: Synthetic oligonucleotide
  Antisense strand to SEQ ID NO: 1592033
uuuaagcacguggacgcau

SEQ ID NO: 1592035 - RNA, 19 nt, Artificial Sequence
  Description of Artificial Sequence: Synthetic oligonucleotide
  Sense strand starting at position 434 of SEQ ID NO: 1560321
uagggauucucccagacag

SEQ ID NO: 1592036 - RNA, 19 nt, Artificial Sequence
  Description of Artificial Sequence: Synthetic oligonucleotide
  Antisense strand to SEQ ID NO: 1592035
cugucugggagaaucccua

SEQ ID NO: 1592037 - RNA, 19 nt, Artificial Sequence
  Description of Artificial Sequence: Synthetic oligonucleotide
  Sense strand starting at position 736 of SEQ ID NO: 1560321
gaaagaugcaccgaucgga

SEQ ID NO: 1592038 - RNA, 19 nt, Artificial Sequence
  Description of Artificial Sequence: Synthetic oligonucleotide
  Antisense strand to SEQ ID NO: 1592037
uccgaucggugcaucuuuc

SEQ ID NO: 1592039 - RNA, 19 nt, Artificial Sequence
  Description of Artificial Sequence: Synthetic oligonucleotide
  Sense strand starting at position 1090 of SEQ ID NO: 1560321
cucggagcccuuuaagauu

SEQ ID NO: 1592040 - RNA, 19 nt, Artificial Sequence
  Description of Artificial Sequence: Synthetic oligonucleotide
  Antisense strand to SEQ ID NO: 1592039
aaucuuaaagggcuccgag

SEQ ID NO: 1592041 - RNA, 19 nt, Artificial Sequence
  Description of Artificial Sequence: Synthetic oligonucleotide
  Sense strand starting at position 1704 of SEQ ID NO: 1560321
gcgcguucuaaggucggaa

SEQ ID NO: 1592042 - RNA, 19 nt, Artificial Sequence
  Description of Artificial Sequence: Synthetic oligonucleotide
  Antisense strand to SEQ ID NO: 1592041
uuccgaccuuagaacgcgc

SEQ ID NO: 1592043 - RNA, 19 nt, Artificial Sequence
  Description of Artificial Sequence: Synthetic oligonucleotide
  Sense strand starting at position 1707 of SEQ ID NO: 1560321
cguucuaaggucggaaaca

SEQ ID NO: 1592044 - RNA, 19 nt, Artificial Sequence
  Description of Artificial Sequence: Synthetic oligonucleotide
  Antisense strand to SEQ ID NO: 1592043
uguuuccgaccuuagaacg

SEQ ID NO: 1592045 - RNA, 19 nt, Artificial Sequence
  Description of Artificial Sequence: Synthetic oligonucleotide
  Sense strand starting at position 1708 of SEQ ID NO: 1560321
guucuaaggucggaaacaa

SEQ ID NO: 1592046 - RNA, 19 nt, Artificial Sequence
  Description of Artificial Sequence: Synthetic oligonucleotide
  Antisense strand to SEQ ID NO: 1592045
uuguuuccgaccuuagaac

SEQ ID NO: 1592047 - RNA, 19 nt, Artificial Sequence
  Description of Artificial Sequence: Synthetic oligonucleotide
  Sense strand starting at position 2203 of SEQ ID NO: 1560321
acaggucuccagugcuuga

SEQ ID NO: 1592048 - RNA, 19 nt, Artificial Sequence
  Description of Artificial Sequence: Synthetic oligonucleotide
  Antisense strand to SEQ ID NO: 1592047
ucaagcacuggagaccugu

SEQ ID NO: 1592049 - RNA, 19 nt, Artificial Sequence
  Description of Artificial Sequence: Synthetic oligonucleotide
  Sense strand starting at position 2277 of SEQ ID NO: 1560321
caaaguuucuccguucggu

SEQ ID NO: 1592050 - RNA, 19 nt, Artificial Sequence
  Description of Artificial Sequence: Synthetic oligonucleotide
  Antisense strand to SEQ ID NO: 1592049
accgaacggagaaacuuug

SEQ ID NO: 1592051 - RNA, 19 nt, Artificial Sequence
  Description of Artificial Sequence: Synthetic oligonucleotide
  Sense strand starting at position 2278 of SEQ ID NO: 1560321
aaaguuucuccguucgguu

SEQ ID NO: 1592052 - RNA, 19 nt, Artificial Sequence
  Description of Artificial Sequence: Synthetic oligonucleotide
  Antisense strand to SEQ ID NO: 1592051
aaccgaacggagaaacuuu

SEQ ID NO: 1592053 - RNA, 19 nt, Artificial Sequence
  Description of Artificial Sequence: Synthetic oligonucleotide
  Sense strand starting at position 2505 of SEQ ID NO: 1560321
gccgccucccggguuaaua

SEQ ID NO: 1592054 - RNA, 19 nt, Artificial Sequence
  Description of Artificial Sequence: Synthetic oligonucleotide
  Antisense strand to SEQ ID NO: 1592053
uauuaacccgggaggcggc

SEQ ID NO: 1592055 - RNA, 19 nt, Artificial Sequence
  Description of Artificial Sequence: Synthetic oligonucleotide
  Sense strand starting at position 2757 of SEQ ID NO: 1560321
cgagucugcagcuaacuua

SEQ ID NO: 1592056 - RNA, 19 nt, Artificial Sequence
  Description of Artificial Sequence: Synthetic oligonucleotide
  Antisense strand to SEQ ID NO: 1592055
uaaguuagcugcagacucg

SEQ ID NO: 1592057 - RNA, 19 nt, Artificial Sequence
  Description of Artificial Sequence: Synthetic oligonucleotide
  Sense strand starting at position 2913 of SEQ ID NO: 1560321
ggcagaaucuucucugcag

SEQ ID NO: 1592058 - RNA, 19 nt, Artificial Sequence
  Description of Artificial Sequence: Synthetic oligonucleotide
  Antisense strand to SEQ ID NO: 1592057
cugcagagaagauucugcc

SEQ ID NO: 1592059 - RNA, 19 nt, Artificial Sequence
  Description of Artificial Sequence: Synthetic oligonucleotide
  Sense strand starting at position 2914 of SEQ ID NO: 1560321
gcagaaucuucucugcaga

SEQ ID NO: 1592060 - RNA, 19 nt, Artificial Sequence
  Description of Artificial Sequence: Synthetic oligonucleotide
  Antisense strand to SEQ ID NO: 1592059
ucugcagagaagauucugc

SEQ ID NO: 1592061 - RNA, 19 nt, Artificial Sequence
  Description of Artificial Sequence: Synthetic oligonucleotide
  Sense strand starting at position 3117 of SEQ ID NO: 1560321
ggucuuggcuucccugaua

SEQ ID NO: 1592062 - RNA, 19 nt, Artificial Sequence
  Description of Artificial Sequence: Synthetic oligonucleotide
  Antisense strand to SEQ ID NO: 1592061
uaucagggaagccaagacc

SEQ ID NO: 1592063 - RNA, 19 nt, Artificial Sequence
  Description of Artificial Sequence: Synthetic oligonucleotide
  Sense strand starting at position 3389 of SEQ ID NO: 1560321
agcguagagaaguguuaag

SEQ ID NO: 1592064 - RNA, 19 nt, Artificial Sequence
  Description of Artificial Sequence: Synthetic oligonucleotide
  Antisense strand to SEQ ID NO: 1592063
cuuaacacuucucuacgcu

SEQ ID NO: 1592065 - RNA, 19 nt, Artificial Sequence
  Description of Artificial Sequence: Synthetic oligonucleotide
  Sense strand starting at position 3399 of SEQ ID NO: 1560321
aguguuaagucuccguucu

SEQ ID NO: 1592066 - RNA, 19 nt, Artificial Sequence
  Description of Artificial Sequence: Synthetic oligonucleotide
  Antisense strand to SEQ ID NO: 1592065
agaacggagacuuaacacu

SEQ ID NO: 1592067 - RNA, 19 nt, Artificial Sequence
  Description of Artificial Sequence: Synthetic oligonucleotide
  Sense strand starting at position 3400 of SEQ ID NO: 1560321
guguuaagucuccguucuc

SEQ ID NO: 1592068 - RNA, 19 nt, Artificial Sequence
  Description of Artificial Sequence: Synthetic oligonucleotide
  Antisense strand to SEQ ID NO: 1592067
gagaacggagacuuaacac

SEQ ID NO: 1592069 - RNA, 19 nt, Artificial Sequence
  Description of Artificial Sequence: Synthetic oligonucleotide
  Sense strand starting at position 3464 of SEQ ID NO: 1560321
aggaaaucacagcgcagau

SEQ ID NO: 1592070 - RNA, 19 nt, Artificial Sequence
  Description of Artificial Sequence: Synthetic oligonucleotide
  Antisense strand to SEQ ID NO: 1592069
aucugcgcugugauuuccu

SEQ ID NO: 1592071 - RNA, 19 nt, Artificial Sequence
  Description of Artificial Sequence: Synthetic oligonucleotide
  Sense strand starting at position 3852 of SEQ ID NO: 1560321
ccgggaauuauguaaccuu

SEQ ID NO: 1592072 - RNA, 19 nt, Artificial Sequence
  Description of Artificial Sequence: Synthetic oligonucleotide
  Antisense strand to SEQ ID NO: 1592071
aagguuacauaauucccgg

SEQ ID NO: 1592073 - RNA, 19 nt, Artificial Sequence
  Description of Artificial Sequence: Synthetic oligonucleotide
  Sense strand starting at position 3917 of SEQ ID NO: 1560321
agcggugugguccagcaau

SEQ ID NO: 1592074 - RNA, 19 nt, Artificial Sequence
  Description of Artificial Sequence: Synthetic oligonucleotide
  Antisense strand to SEQ ID NO: 1592073
auugcuggaccacaccgcu

SEQ ID NO: 1592075 - RNA, 19 nt, Artificial Sequence
  Description of Artificial Sequence: Synthetic oligonucleotide
  Sense strand starting at position 3923 of SEQ ID NO: 1560321
gugguccagcaauaauaau

SEQ ID NO: 1592076 - RNA, 19 nt, Artificial Sequence
  Description of Artificial Sequence: Synthetic oligonucleotide
  Antisense strand to SEQ ID NO: 1592075
auuauuauugcuggaccac

SEQ ID NO: 1592077 - RNA, 19 nt, Artificial Sequence
  Description of Artificial Sequence: Synthetic oligonucleotide
  Sense strand starting at position 3968 of SEQ ID NO: 1560321
ccgaauuccgaguguucau

SEQ ID NO: 1592078 - RNA, 19 nt, Artificial Sequence
  Description of Artificial Sequence: Synthetic oligonucleotide
  Antisense strand to SEQ ID NO: 1592077
augaacacucggaauucgg

SEQ ID NO: 1592079 - RNA, 19 nt, Artificial Sequence
  Description of Artificial Sequence: Synthetic oligonucleotide
  Sense strand starting at position 207 of SEQ ID NO: 1560322
gaaagaugcaccgaucgga

SEQ ID NO: 1592080 - RNA, 19 nt, Artificial Sequence
  Description of Artificial Sequence: Synthetic oligonucleotide
  Antisense strand to SEQ ID NO: 1592079
uccgaucggugcaucuuuc

SEQ ID NO: 1592081 - RNA, 19 nt, Artificial Sequence
  Description of Artificial Sequence: Synthetic oligonucleotide
  Sense strand starting at position 561 of SEQ ID NO: 1560322
cucggagcccuuuaagauu

SEQ ID NO: 1592082 - RNA, 19 nt, Artificial Sequence
  Description of Artificial Sequence: Synthetic oligonucleotide
  Antisense strand to SEQ ID NO: 1592081
aaucuuaaagggcuccgag

SEQ ID NO: 1592083 - RNA, 19 nt, Artificial Sequence
  Description of Artificial Sequence: Synthetic oligonucleotide
  Sense strand starting at position 1175 of SEQ ID NO: 1560322
gcgcguucuaaggucggaa

SEQ ID NO: 1592084 - RNA, 19 nt, Artificial Sequence
  Description of Artificial Sequence: Synthetic oligonucleotide
  Antisense strand to SEQ ID NO: 1592083
uuccgaccuuagaacgcgc

SEQ ID NO: 1592085 - RNA, 19 nt, Artificial Sequence
  Description of Artificial Sequence: Synthetic oligonucleotide
  Sense strand starting at position 1178 of SEQ ID NO: 1560322
cguucuaaggucggaaaca

SEQ ID NO: 1592086 - RNA, 19 nt, Artificial Sequence
  Description of Artificial Sequence: Synthetic oligonucleotide
  Antisense strand to SEQ ID NO: 1592085
uguuuccgaccuuagaacg

SEQ ID NO: 1592087 - RNA, 19 nt, Artificial Sequence
  Description of Artificial Sequence: Synthetic oligonucleotide
  Sense strand starting at position 1179 of SEQ ID NO: 1560322
guucuaaggucggaaacaa

SEQ ID NO: 1592088 - RNA, 19 nt, Artificial Sequence
  Description of Artificial Sequence: Synthetic oligonucleotide
  Antisense strand to SEQ ID NO: 1592087
uuguuuccgaccuuagaac

SEQ ID NO: 1592089 - RNA, 19 nt, Artificial Sequence
  Description of Artificial Sequence: Synthetic oligonucleotide
  Sense strand starting at position 1674 of SEQ ID NO: 1560322
acaggucuccagugcuuga

SEQ ID NO: 1592090 - RNA, 19 nt, Artificial Sequence
  Description of Artificial Sequence: Synthetic oligonucleotide
  Antisense strand to SEQ ID NO: 1592089
ucaagcacuggagaccugu

SEQ ID NO: 1592091 - RNA, 19 nt, Artificial Sequence
  Description of Artificial Sequence: Synthetic oligonucleotide
  Sense strand starting at position 1748 of SEQ ID NO: 1560322
caaaguuucuccguucggu

SEQ ID NO: 1592092 - RNA, 19 nt, Artificial Sequence
  Description of Artificial Sequence: Synthetic oligonucleotide
  Antisense strand to SEQ ID NO: 1592091
accgaacggagaaacuuug

SEQ ID NO: 1592093 - RNA, 19 nt, Artificial Sequence
  Description of Artificial Sequence: Synthetic oligonucleotide
  Sense strand starting at position 1749 of SEQ ID NO: 1560322
aaaguuucuccguucgguu

SEQ ID NO: 1592094 - RNA, 19 nt, Artificial Sequence
  Description of Artificial Sequence: Synthetic oligonucleotide
  Antisense strand to SEQ ID NO: 1592093
aaccgaacggagaaacuuu

SEQ ID NO: 1592095 - RNA, 19 nt, Artificial Sequence
  Description of Artificial Sequence: Synthetic oligonucleotide
  Sense strand starting at position 1976 of SEQ ID NO: 1560322
gccgccucccggguuaaua

SEQ ID NO: 1592096 - RNA, 19 nt, Artificial Sequence
  Description of Artificial Sequence: Synthetic oligonucleotide
  Antisense strand to SEQ ID NO: 1592095
uauuaacccgggaggcggc

SEQ ID NO: 1592097 - RNA, 19 nt, Artificial Sequence
  Description of Artificial Sequence: Synthetic oligonucleotide
  Sense strand starting at position 2228 of SEQ ID NO: 1560322
cgagucugcagcuaacuua

SEQ ID NO: 1592098 - RNA, 19 nt, Artificial Sequence
  Description of Artificial Sequence: Synthetic oligonucleotide
  Antisense strand to SEQ ID NO: 1592097
uaaguuagcugcagacucg

SEQ ID NO: 1592099 - RNA, 19 nt, Artificial Sequence
  Description of Artificial Sequence: Synthetic oligonucleotide
  Sense strand starting at position 2384 of SEQ ID NO: 1560322
ggcagaaucuucucugcag

SEQ ID NO: 1592100 - RNA, 19 nt, Artificial Sequence
  Description of Artificial Sequence: Synthetic oligonucleotide
  Antisense strand to SEQ ID NO: 1592099
cugcagagaagauucugcc

SEQ ID NO: 1592101 - RNA, 19 nt, Artificial Sequence
  Description of Artificial Sequence: Synthetic oligonucleotide
  Sense strand starting at position 2385 of SEQ ID NO: 1560322
gcagaaucuucucugcaga

SEQ ID NO: 1592102 - RNA, 19 nt, Artificial Sequence
  Description of Artificial Sequence: Synthetic oligonucleotide
  Antisense strand to SEQ ID NO: 1592101
ucugcagagaagauucugc

SEQ ID NO: 1592103 - RNA, 19 nt, Artificial Sequence
  Description of Artificial Sequence: Synthetic oligonucleotide
  Sense strand starting at position 2588 of SEQ ID NO: 1560322
ggucuuggcuucccugaua

SEQ ID NO: 1592104 - RNA, 19 nt, Artificial Sequence
  Description of Artificial Sequence: Synthetic oligonucleotide
  Antisense strand to SEQ ID NO: 1592103
uaucagggaagccaagacc

SEQ ID NO: 1592105 - RNA, 19 nt, Artificial Sequence
  Description of Artificial Sequence: Synthetic oligonucleotide
  Sense strand starting at position 2860 of SEQ ID NO: 1560322
agcguagagaaguguuaag

SEQ ID NO: 1592106 - RNA, 19 nt, Artificial Sequence
  Description of Artificial Sequence: Synthetic oligonucleotide
  Antisense strand to SEQ ID NO: 1592105
cuuaacacuucucuacgcu

SEQ ID NO: 1592107 - RNA, 19 nt, Artificial Sequence
  Description of Artificial Sequence: Synthetic oligonucleotide
  Sense strand starting at position 2870 of SEQ ID NO: 1560322
aguguuaagucuccguucu

SEQ ID NO: 1592108 - RNA, 19 nt, Artificial Sequence
  Description of Artificial Sequence: Synthetic oligonucleotide
  Antisense strand to SEQ ID NO: 1592107
agaacggagacuuaacacu

SEQ ID NO: 1592109 - RNA, 19 nt, Artificial Sequence
  Description of Artificial Sequence: Synthetic oligonucleotide
  Sense strand starting at position 2871 of SEQ ID NO: 1560322
guguuaagucuccguucuc

SEQ ID NO: 1592110 - RNA, 19 nt, Artificial Sequence
  Description of Artificial Sequence: Synthetic oligonucleotide
  Antisense strand to SEQ ID NO: 1592109
gagaacggagacuuaacac

SEQ ID NO: 1592111 - RNA, 19 nt, Artificial Sequence
  Description of Artificial Sequence: Synthetic oligonucleotide
  Sense strand starting at position 2935 of SEQ ID NO: 1560322
aggaaaucacagcgcagau

SEQ ID NO: 1592112 - RNA, 19 nt, Artificial Sequence
  Description of Artificial Sequence: Synthetic oligonucleotide
  Antisense strand to SEQ ID NO: 1592111
aucugcgcugugauuuccu

SEQ ID NO: 1592113 - RNA, 19 nt, Artificial Sequence
  Description of Artificial Sequence: Synthetic oligonucleotide
  Sense strand starting at position 3323 of SEQ ID NO: 1560322
ccgggaauuauguaaccuu

SEQ ID NO: 1592114 - RNA, 19 nt, Artificial Sequence
  Description of Artificial Sequence: Synthetic oligonucleotide
  Antisense strand to SEQ ID NO: 1592113
aagguuacauaauucccgg

SEQ ID NO: 1592115 - RNA, 19 nt, Artificial Sequence
  Description of Artificial Sequence: Synthetic oligonucleotide
  Sense strand starting at position 3388 of SEQ ID NO: 1560322
agcggugugguccagcaau

SEQ ID NO: 1592116 - RNA, 19 nt, Artificial Sequence
  Description of Artificial Sequence: Synthetic oligonucleotide
  Antisense strand to SEQ ID NO: 1592115
auugcuggaccacaccgcu

SEQ ID NO: 1592117 - RNA, 19 nt, Artificial Sequence
  Description of Artificial Sequence: Synthetic oligonucleotide
  Sense strand starting at position 3394 of SEQ ID NO: 1560322
gugguccagcaauaauaau

SEQ ID NO: 1592118 - RNA, 19 nt, Artificial Sequence
  Description of Artificial Sequence: Synthetic oligonucleotide
  Antisense strand to SEQ ID NO: 1592117
auuauuauugcuggaccac

SEQ ID NO: 1592119 - RNA, 19 nt, Artificial Sequence
  Description of Artificial Sequence: Synthetic oligonucleotide
  Sense strand starting at position 3439 of SEQ ID NO: 1560322
ccgaauuccgaguguucau

SEQ ID NO: 1592120 - RNA, 19 nt, Artificial Sequence
  Description of Artificial Sequence: Synthetic oligonucleotide
  Antisense strand to SEQ ID NO: 1592119
augaacacucggaauucgg

SEQ ID NO: 1592121 - RNA, 19 nt, Artificial Sequence
  Description of Artificial Sequence: Synthetic oligonucleotide
  Sense strand starting at position 3529 of SEQ ID NO: 1560322
gggaauuacugcuguuauc

SEQ ID NO: 1592122 - RNA, 19 nt, Artificial Sequence
  Description of Artificial Sequence: Synthetic oligonucleotide
  Antisense strand to SEQ ID NO: 1592121
gauaacagcaguaauuccc

SEQ ID NO: 1592123 - RNA, 19 nt, Artificial Sequence
  Description of Artificial Sequence: Synthetic oligonucleotide
  Sense strand starting at position 3567 of SEQ ID NO: 1560322
agugaugcucucugaggga

SEQ ID NO: 1592124 - RNA, 19 nt, Artificial Sequence
  Description of Artificial Sequence: Synthetic oligonucleotide
  Antisense strand to SEQ ID NO: 1592123
ucccucagagagcaucacu

SEQ ID NO: 1592125 - RNA, 19 nt, Artificial Sequence
  Description of Artificial Sequence: Synthetic oligonucleotide
  Sense strand starting at position 3611 of SEQ ID NO: 1560322
caggaaguauuggaacuaa

SEQ ID NO: 1592126 - RNA, 19 nt, Artificial Sequence
  Description of Artificial Sequence: Synthetic oligonucleotide
  Antisense strand to SEQ ID NO: 1592125
uuaguuccaauacuuccug

SEQ ID NO: 1592127 - RNA, 19 nt, Artificial Sequence
  Description of Artificial Sequence: Synthetic oligonucleotide
  Sense strand starting at position 3956 of SEQ ID NO: 1560322
ccaggaggaucgcuugaau

SEQ ID NO: 1592128 - RNA, 19 nt, Artificial Sequence
  Description of Artificial Sequence: Synthetic oligonucleotide
  Antisense strand to SEQ ID NO: 1592127
auucaagcgauccuccugg

SEQ ID NO: 1592129 - RNA, 19 nt, Artificial Sequence
  Description of Artificial Sequence: Synthetic oligonucleotide
  Sense strand starting at position 3 of SEQ ID NO: 1560323
cagaaagugcuuuguaaca

SEQ ID NO: 1592130 - RNA, 19 nt, Artificial Sequence
  Description of Artificial Sequence: Synthetic oligonucleotide
  Antisense strand to SEQ ID NO: 1592129
uguuacaaagcacuuucug

SEQ ID NO: 1592131 - RNA, 19 nt, Artificial Sequence
  Description of Artificial Sequence: Synthetic oligonucleotide
  Sense strand starting at position 8 of SEQ ID NO: 1560323
agugcuuuguaacacaaca

SEQ ID NO: 1592132 - RNA, 19 nt, Artificial Sequence
  Description of Artificial Sequence: Synthetic oligonucleotide
  Antisense strand to SEQ ID NO: 1592131
uguuguguuacaaagcacu

SEQ ID NO: 1592133 - RNA, 19 nt, Artificial Sequence
  Description of Artificial Sequence: Synthetic oligonucleotide
  Sense strand starting at position 159 of SEQ ID NO: 1560323
aaauuaguuccguguggug

SEQ ID NO: 1592134 - RNA, 19 nt, Artificial Sequence
  Description of Artificial Sequence: Synthetic oligonucleotide
  Antisense strand to SEQ ID NO: 1592133
caccacacggaacuaauuu

SEQ ID NO: 1592135 - RNA, 19 nt, Artificial Sequence
  Description of Artificial Sequence: Synthetic oligonucleotide
  Sense strand starting at position 1308 of SEQ ID NO: 1560323
cucagagugucucuugauc

SEQ ID NO: 1592136 - RNA, 19 nt, Artificial Sequence
  Description of Artificial Sequence: Synthetic oligonucleotide
  Antisense strand to SEQ ID NO: 1592135
gaucaagagacacucugag

SEQ ID NO: 1592137 - RNA, 19 nt, Artificial Sequence
  Description of Artificial Sequence: Synthetic oligonucleotide
  Sense strand starting at position 1310 of SEQ ID NO: 1560323
cagagugucucuugaucuc

SEQ ID NO: 1592138 - RNA, 19 nt, Artificial Sequence
  Description of Artificial Sequence: Synthetic oligonucleotide
  Antisense strand to SEQ ID NO: 1592137
gagaucaagagacacucug

SEQ ID NO: 1592139 - RNA, 19 nt, Artificial Sequence
  Description of Artificial Sequence: Synthetic oligonucleotide
  Sense strand starting at position 1313 of SEQ ID NO: 1560323
agugucucuugaucucuaa

SEQ ID NO: 1592140 - RNA, 19 nt, Artificial Sequence
  Description of Artificial Sequence: Synthetic oligonucleotide
  Antisense strand to SEQ ID NO: 1592139
uuagagaucaagagacacu

SEQ ID NO: 1592141 - RNA, 19 nt, Artificial Sequence
  Description of Artificial Sequence: Synthetic oligonucleotide
  Sense strand starting at position 1468 of SEQ ID NO: 1560323
ugucuuuauguguugccau

SEQ ID NO: 1592142 - RNA, 19 nt, Artificial Sequence
  Description of Artificial Sequence: Synthetic oligonucleotide
  Antisense strand to SEQ ID NO: 1592141
auggcaacacauaaagaca

SEQ ID NO: 1592143 - RNA, 19 nt, Artificial Sequence
  Description of Artificial Sequence: Synthetic oligonucleotide
  Sense strand starting at position 1469 of SEQ ID NO: 1560323
gucuuuauguguugccauu

SEQ ID NO: 1592144 - RNA, 19 nt, Artificial Sequence
  Description of Artificial Sequence: Synthetic oligonucleotide
  Antisense strand to SEQ ID NO: 1592143
aauggcaacacauaaagac

SEQ ID NO: 1592145 - RNA, 19 nt, Artificial Sequence
  Description of Artificial Sequence: Synthetic oligonucleotide
  Sense strand starting at position 1693 of SEQ ID NO: 1560323
ucucaugucucugcuucua

SEQ ID NO: 1592146 - RNA, 19 nt, Artificial Sequence
  Description of Artificial Sequence: Synthetic oligonucleotide
  Antisense strand to SEQ ID NO: 1592145
uagaagcagagacaugaga

SEQ ID NO: 1592147 - RNA, 19 nt, Artificial Sequence
  Description of Artificial Sequence: Synthetic oligonucleotide
  Sense strand starting at position 1984 of SEQ ID NO: 1560323
uuccaucgucucugagcua

SEQ ID NO: 1592148 - RNA, 19 nt, Artificial Sequence
  Description of Artificial Sequence: Synthetic oligonucleotide
  Antisense strand to SEQ ID NO: 1592147
uagcucagagacgauggaa

SEQ ID NO: 1592149 - RNA, 19 nt, Artificial Sequence
  Description of Artificial Sequence: Synthetic oligonucleotide
  Sense strand starting at position 1985 of SEQ ID NO: 1560323
uccaucgucucugagcuau

SEQ ID NO: 1592150 - RNA, 19 nt, Artificial Sequence
  Description of Artificial Sequence: Synthetic oligonucleotide
  Antisense strand to SEQ ID NO: 1592149
auagcucagagacgaugga

SEQ ID NO: 1592151 - RNA, 19 nt, Artificial Sequence
  Description of Artificial Sequence: Synthetic oligonucleotide
  Sense strand starting at position 2062 of SEQ ID NO: 1560323
gugcgugguggagaguaaa

SEQ ID NO: 1592152 - RNA, 19 nt, Artificial Sequence
  Description of Artificial Sequence: Synthetic oligonucleotide
  Antisense strand to SEQ ID NO: 1592151
uuuacucuccaccacgcac

SEQ ID NO: 1592153 - RNA, 19 nt, Artificial Sequence
  Description of Artificial Sequence: Synthetic oligonucleotide
  Sense strand starting at position 2216 of SEQ ID NO: 1560323
gccucuugcagaggucuaa

SEQ ID NO: 1592154 - RNA, 19 nt, Artificial Sequence
  Description of Artificial Sequence: Synthetic oligonucleotide
  Antisense strand to SEQ ID NO: 1592153
uuagaccucugcaagaggc

SEQ ID NO: 1592155 - RNA, 19 nt, Artificial Sequence
  Description of Artificial Sequence: Synthetic oligonucleotide
  Sense strand starting at position 2276 of SEQ ID NO: 1560323
gcgcucagugucuguagau

SEQ ID NO: 1592156 - RNA, 19 nt, Artificial Sequence
  Description of Artificial Sequence: Synthetic oligonucleotide
  Antisense strand to SEQ ID NO: 1592155
aucuacagacacugagcgc

SEQ ID NO: 1592157 - RNA, 19 nt, Artificial Sequence
  Description of Artificial Sequence: Synthetic oligonucleotide
  Sense strand starting at position 2550 of SEQ ID NO: 1560323
uggacuugccuauggguau

SEQ ID NO: 1592158 - RNA, 19 nt, Artificial Sequence
  Description of Artificial Sequence: Synthetic oligonucleotide
  Antisense strand to SEQ ID NO: 1592157
auacccauaggcaagucca

SEQ ID NO: 1592159 - RNA, 19 nt, Artificial Sequence
  Description of Artificial Sequence: Synthetic oligonucleotide
  Sense strand starting at position 2551 of SEQ ID NO: 1560323
ggacuugccuauggguaua

SEQ ID NO: 1592160 - RNA, 19 nt, Artificial Sequence
  Description of Artificial Sequence: Synthetic oligonucleotide
  Antisense strand to SEQ ID NO: 1592159
uauacccauaggcaagucc

SEQ ID NO: 1592161 - RNA, 19 nt, Artificial Sequence
  Description of Artificial Sequence: Synthetic oligonucleotide
  Sense strand starting at position 2554 of SEQ ID NO: 1560323
cuugccuauggguauauua

SEQ ID NO: 1592162 - RNA, 19 nt, Artificial Sequence
  Description of Artificial Sequence: Synthetic oligonucleotide
  Antisense strand to SEQ ID NO: 1592161
uaauauacccauaggcaag

SEQ ID NO: 1592163 - RNA, 19 nt, Artificial Sequence
  Description of Artificial Sequence: Synthetic oligonucleotide
  Sense strand starting at position 2556 of SEQ ID NO: 1560323
ugccuauggguauauuauc

SEQ ID NO: 1592164 - RNA, 19 nt, Artificial Sequence
  Description of Artificial Sequence: Synthetic oligonucleotide
  Antisense strand to SEQ ID NO: 1592163
gauaauauacccauaggca

SEQ ID NO: 1592165 - RNA, 19 nt, Artificial Sequence
  Description of Artificial Sequence: Synthetic oligonucleotide
  Sense strand starting at position 2564 of SEQ ID NO: 1560323
gguauauuaucccuguuga

SEQ ID NO: 1592166 - RNA, 19 nt, Artificial Sequence
  Description of Artificial Sequence: Synthetic oligonucleotide
  Antisense strand to SEQ ID NO: 1592165
ucaacagggauaauauacc

SEQ ID NO: 1592167 - RNA, 19 nt, Artificial Sequence
  Description of Artificial Sequence: Synthetic oligonucleotide
  Sense strand starting at position 2565 of SEQ ID NO: 1560323
guauauuaucccuguugag

SEQ ID NO: 1592168 - RNA, 19 nt, Artificial Sequence
  Description of Artificial Sequence: Synthetic oligonucleotide
  Antisense strand to SEQ ID NO: 1592167
cucaacagggauaauauac

SEQ ID NO: 1592169 - RNA, 19 nt, Artificial Sequence
  Description of Artificial Sequence: Synthetic oligonucleotide
  Sense strand starting at position 2587 of SEQ ID NO: 1560323
gagggcuucugcuguggaa

SEQ ID NO: 1592170 - RNA, 19 nt, Artificial Sequence
  Description of Artificial Sequence: Synthetic oligonucleotide
  Antisense strand to SEQ ID NO: 1592169
uuccacagcagaagcccuc

SEQ ID NO: 1592171 - RNA, 19 nt, Artificial Sequence
  Description of Artificial Sequence: Synthetic oligonucleotide
  Sense strand starting at position 3300 of SEQ ID NO: 1560323
gggagaggguucguuauuc

SEQ ID NO: 1592172 - RNA, 19 nt, Artificial Sequence
  Description of Artificial Sequence: Synthetic oligonucleotide
  Antisense strand to SEQ ID NO: 1592171
gaauaacgaacccucuccc

SEQ ID NO: 1592173 - RNA, 19 nt, Artificial Sequence
  Description of Artificial Sequence: Synthetic oligonucleotide
  Sense strand starting at position 3304 of SEQ ID NO: 1560323
gaggguucguuauucagcu

SEQ ID NO: 1592174 - RNA, 19 nt, Artificial Sequence
  Description of Artificial Sequence: Synthetic oligonucleotide
  Antisense strand to SEQ ID NO: 1592173
agcugaauaacgaacccuc

SEQ ID NO: 1592175 - RNA, 19 nt, Artificial Sequence
  Description of Artificial Sequence: Synthetic oligonucleotide
  Sense strand starting at position 3397 of SEQ ID NO: 1560323
uucucaaucuguuggcuua

SEQ ID NO: 1592176 - RNA, 19 nt, Artificial Sequence
  Description of Artificial Sequence: Synthetic oligonucleotide
  Antisense strand to SEQ ID NO: 1592175
uaagccaacagauugagaa

SEQ ID NO: 1592177 - RNA, 19 nt, Artificial Sequence
  Description of Artificial Sequence: Synthetic oligonucleotide
  Sense strand starting at position 3398 of SEQ ID NO: 1560323
ucucaaucuguuggcuuaa

SEQ ID NO: 1592178 - RNA, 19 nt, Artificial Sequence
  Description of Artificial Sequence: Synthetic oligonucleotide
  Antisense strand to SEQ ID NO: 1592177
uuaagccaacagauugaga

SEQ ID NO: 1592179 - RNA, 19 nt, Artificial Sequence
  Description of Artificial Sequence: Synthetic oligonucleotide
  Sense strand starting at position 3857 of SEQ ID NO: 1560323
accagucccugguaacaaa

SEQ ID NO: 1592180 - RNA, 19 nt, Artificial Sequence
  Description of Artificial Sequence: Synthetic oligonucleotide
  Antisense strand to SEQ ID NO: 1592179
uuuguuaccagggacuggu

SEQ ID NO: 1592181 - RNA, 19 nt, Artificial Sequence
  Description of Artificial Sequence: Synthetic oligonucleotide
  Sense strand starting at position 3905 of SEQ ID NO: 1560323
uucuccaccuggcagaaau

SEQ ID NO: 1592182 - RNA, 19 nt, Artificial Sequence
  Description of Artificial Sequence: Synthetic oligonucleotide
  Antisense strand to SEQ ID NO: 1592181
auuucugccagguggagaa

SEQ ID NO: 1592183 - RNA, 19 nt, Artificial Sequence
  Description of Artificial Sequence: Synthetic oligonucleotide
  Sense strand starting at position 2333 of SEQ ID NO: 1560324
uuuacucaggagugaugua

SEQ ID NO: 1592184 - RNA, 19 nt, Artificial Sequence
  Description of Artificial Sequence: Synthetic oligonucleotide
  Antisense strand to SEQ ID NO: 1592183
uacaucacuccugaguaaa

SEQ ID NO: 1592185 - RNA, 19 nt, Artificial Sequence
  Description of Artificial Sequence: Synthetic oligonucleotide
  Sense strand starting at position 2334 of SEQ ID NO: 1560324
uuacucaggagugauguau

SEQ ID NO: 1592186 - RNA, 19 nt, Artificial Sequence
  Description of Artificial Sequence: Synthetic oligonucleotide
  Antisense strand to SEQ ID NO: 1592185
auacaucacuccugaguaa

SEQ ID NO: 1592187 - RNA, 19 nt, Artificial Sequence
  Description of Artificial Sequence: Synthetic oligonucleotide
  Sense strand starting at position 2365 of SEQ ID NO: 1560324
uccagaaacuuugauagcu

SEQ ID NO: 1592188 - RNA, 19 nt, Artificial Sequence
  Description of Artificial Sequence: Synthetic oligonucleotide
  Antisense strand to SEQ ID NO: 1592187
agcuaucaaaguuucugga

SEQ ID NO: 1592189 - RNA, 19 nt, Artificial Sequence
  Description of Artificial Sequence: Synthetic oligonucleotide
  Sense strand starting at position 2434 of SEQ ID NO: 1560324
cuaguugagaccuggguga

SEQ ID NO: 1592190 - RNA, 19 nt, Artificial Sequence
  Description of Artificial Sequence: Synthetic oligonucleotide
  Antisense strand to SEQ ID NO: 1592189
ucacccaggucucaacuag

SEQ ID NO: 1592191 - RNA, 19 nt, Artificial Sequence
  Description of Artificial Sequence: Synthetic oligonucleotide
  Sense strand starting at position 2480 of SEQ ID NO: 1560324
uugugacccuggcuaguau

SEQ ID NO: 1592192 - RNA, 19 nt, Artificial Sequence
  Description of Artificial Sequence: Synthetic oligonucleotide
  Antisense strand to SEQ ID NO: 1592191
auacuagccagggucacaa

SEQ ID NO: 1592193 - RNA, 19 nt, Artificial Sequence
  Description of Artificial Sequence: Synthetic oligonucleotide
  Sense strand starting at position 2493 of SEQ ID NO: 1560324
uaguauaaggguugauuac

SEQ ID NO: 1592194 - RNA, 19 nt, Artificial Sequence
  Description of Artificial Sequence: Synthetic oligonucleotide
  Antisense strand to SEQ ID NO: 1592193
guaaucaacccuuauacua

SEQ ID NO: 1592195 - RNA, 19 nt, Artificial Sequence
  Description of Artificial Sequence: Synthetic oligonucleotide
  Sense strand starting at position 2552 of SEQ ID NO: 1560324
cuggauggcuuguugaaau

SEQ ID NO: 1592196 - RNA, 19 nt, Artificial Sequence
  Description of Artificial Sequence: Synthetic oligonucleotide
  Antisense strand to SEQ ID NO: 1592195
auuucaacaagccauccag

SEQ ID NO: 1592197 - RNA, 19 nt, Artificial Sequence
  Description of Artificial Sequence: Synthetic oligonucleotide
  Sense strand starting at position 2564 of SEQ ID NO: 1560324
uugaaauugggccagugau

SEQ ID NO: 1592198 - RNA, 19 nt, Artificial Sequence
  Description of Artificial Sequence: Synthetic oligonucleotide
  Antisense strand to SEQ ID NO: 1592197
aucacuggcccaauuucaa

SEQ ID NO: 1592199 - RNA, 19 nt, Artificial Sequence
  Description of Artificial Sequence: Synthetic oligonucleotide
  Sense strand starting at position 2591 of SEQ ID NO: 1560324
uuugauuaauuggguaacu

SEQ ID NO: 1592200 - RNA, 19 nt, Artificial Sequence
  Description of Artificial Sequence: Synthetic oligonucleotide
  Antisense strand to SEQ ID NO: 1592199
aguuacccaauuaaucaaa

SEQ ID NO: 1592201 - RNA, 19 nt, Artificial Sequence
  Description of Artificial Sequence: Synthetic oligonucleotide
  Sense strand starting at position 2592 of SEQ ID NO: 1560324
uugauuaauuggguaacuu

SEQ ID NO: 1592202 - RNA, 19 nt, Artificial Sequence
  Description of Artificial Sequence: Synthetic oligonucleotide
  Antisense strand to SEQ ID NO: 1592201
aaguuacccaauuaaucaa

SEQ ID NO: 1592203 - RNA, 19 nt, Artificial Sequence
  Description of Artificial Sequence: Synthetic oligonucleotide
  Sense strand starting at position 2600 of SEQ ID NO: 1560324
uuggguaacuucuggaucu

SEQ ID NO: 1592204 - RNA, 19 nt, Artificial Sequence
  Description of Artificial Sequence: Synthetic oligonucleotide
  Antisense strand to SEQ ID NO: 1592203
agauccagaaguuacccaa

SEQ ID NO: 1592205 - RNA, 19 nt, Artificial Sequence
  Description of Artificial Sequence: Synthetic oligonucleotide
  Sense strand starting at position 2601 of SEQ ID NO: 1560324
uggguaacuucuggaucua

SEQ ID NO: 1592206 - RNA, 19 nt, Artificial Sequence
  Description of Artificial Sequence: Synthetic oligonucleotide
  Antisense strand to SEQ ID NO: 1592205
uagauccagaaguuaccca

SEQ ID NO: 1592207 - RNA, 19 nt, Artificial Sequence
  Description of Artificial Sequence: Synthetic oligonucleotide
  Sense strand starting at position 2618 of SEQ ID NO: 1560324
uaacauuaggucugcaugu

SEQ ID NO: 1592208 - RNA, 19 nt, Artificial Sequence
  Description of Artificial Sequence: Synthetic oligonucleotide
  Antisense strand to SEQ ID NO: 1592207
acaugcagaccuaauguua

SEQ ID NO: 1592209 - RNA, 19 nt, Artificial Sequence
  Description of Artificial Sequence: Synthetic oligonucleotide
  Sense strand starting at position 2619 of SEQ ID NO: 1560324
aacauuaggucugcaugua

SEQ ID NO: 1592210 - RNA, 19 nt, Artificial Sequence
  Description of Artificial Sequence: Synthetic oligonucleotide
  Antisense strand to SEQ ID NO: 1592209
uacaugcagaccuaauguu

SEQ ID NO: 1592211 - RNA, 19 nt, Artificial Sequence
  Description of Artificial Sequence: Synthetic oligonucleotide
  Sense strand starting at position 2659 of SEQ ID NO: 1560324
gggucaugcucagaacagu

SEQ ID NO: 1592212 - RNA, 19 nt, Artificial Sequence
  Description of Artificial Sequence: Synthetic oligonucleotide
  Antisense strand to SEQ ID NO: 1592211
acuguucugagcaugaccc

SEQ ID NO: 1592213 - RNA, 19 nt, Artificial Sequence
  Description of Artificial Sequence: Synthetic oligonucleotide
  Sense strand starting at position 2689 of SEQ ID NO: 1560324
gaguucuaaccauggugag

SEQ ID NO: 1592214 - RNA, 19 nt, Artificial Sequence
  Description of Artificial Sequence: Synthetic oligonucleotide
  Antisense strand to SEQ ID NO: 1592213
cucaccaugguuagaacuc

SEQ ID NO: 1592215 - RNA, 19 nt, Artificial Sequence
  Description of Artificial Sequence: Synthetic oligonucleotide
  Sense strand starting at position 2708 of SEQ ID NO: 1560324
gagguuuccuggcacacuu

SEQ ID NO: 1592216 - RNA, 19 nt, Artificial Sequence
  Description of Artificial Sequence: Synthetic oligonucleotide
  Antisense strand to SEQ ID NO: 1592215
aagugugccaggaaaccuc

SEQ ID NO: 1592217 - RNA, 19 nt, Artificial Sequence
  Description of Artificial Sequence: Synthetic oligonucleotide
  Sense strand starting at position 2748 of SEQ ID NO: 1560324
uuugauuagugcuuucuac

SEQ ID NO: 1592218 - RNA, 19 nt, Artificial Sequence
  Description of Artificial Sequence: Synthetic oligonucleotide
  Antisense strand to SEQ ID NO: 1592217
guagaaagcacuaaucaaa

SEQ ID NO: 1592219 - RNA, 19 nt, Artificial Sequence
  Description of Artificial Sequence: Synthetic oligonucleotide
  Sense strand starting at position 2757 of SEQ ID NO: 1560324
ugcuuucuaccuugccaga

SEQ ID NO: 1592220 - RNA, 19 nt, Artificial Sequence
  Description of Artificial Sequence: Synthetic oligonucleotide
  Antisense strand to SEQ ID NO: 1592219
ucuggcaagguagaaagca

SEQ ID NO: 1592221 - RNA, 19 nt, Artificial Sequence
  Description of Artificial Sequence: Synthetic oligonucleotide
  Sense strand starting at position 2762 of SEQ ID NO: 1560324
ucuaccuugccagaggaau

SEQ ID NO: 1592222 - RNA, 19 nt, Artificial Sequence
  Description of Artificial Sequence: Synthetic oligonucleotide
  Antisense strand to SEQ ID NO: 1592221
auuccucuggcaagguaga

SEQ ID NO: 1592223 - RNA, 19 nt, Artificial Sequence
  Description of Artificial Sequence: Synthetic oligonucleotide
  Sense strand starting at position 2775 of SEQ ID NO: 1560324
aggaauguguucuccagga

SEQ ID NO: 1592224 - RNA, 19 nt, Artificial Sequence
  Description of Artificial Sequence: Synthetic oligonucleotide
  Antisense strand to SEQ ID NO: 1592223
uccuggagaacacauuccu

SEQ ID NO: 1592225 - RNA, 19 nt, Artificial Sequence
  Description of Artificial Sequence: Synthetic oligonucleotide
  Sense strand starting at position 2777 of SEQ ID NO: 1560324
gaauguguucuccaggagu

SEQ ID NO: 1592226 - RNA, 19 nt, Artificial Sequence
  Description of Artificial Sequence: Synthetic oligonucleotide
  Antisense strand to SEQ ID NO: 1592225
acuccuggagaacacauuc

SEQ ID NO: 1592227 - RNA, 19 nt, Artificial Sequence
  Description of Artificial Sequence: Synthetic oligonucleotide
  Sense strand starting at position 2792 of SEQ ID NO: 1560324
gagugcuaggaguacuuua

SEQ ID NO: 1592228 - RNA, 19 nt, Artificial Sequence
  Description of Artificial Sequence: Synthetic oligonucleotide
  Antisense strand to SEQ ID NO: 1592227
uaaaguacuccuagcacuc

SEQ ID NO: 1592229 - RNA, 19 nt, Artificial Sequence
  Description of Artificial Sequence: Synthetic oligonucleotide
  Sense strand starting at position 2831 of SEQ ID NO: 1560324
aauuaaagggugcgugaaa

SEQ ID NO: 1592230 - RNA, 19 nt, Artificial Sequence
  Description of Artificial Sequence: Synthetic oligonucleotide
  Antisense strand to SEQ ID NO: 1592229
uuucacgcacccuuuaauu

SEQ ID NO: 1592231 - RNA, 19 nt, Artificial Sequence
  Description of Artificial Sequence: Synthetic oligonucleotide
  Sense strand starting at position 2832 of SEQ ID NO: 1560324
auuaaagggugcgugaaau

SEQ ID NO: 1592232 - RNA, 19 nt, Artificial Sequence
  Description of Artificial Sequence: Synthetic oligonucleotide
  Antisense strand to SEQ ID NO: 1592231
auuucacgcacccuuuaau

SEQ ID NO: 1592233 - RNA, 19 nt, Artificial Sequence
  Description of Artificial Sequence: Synthetic oligonucleotide
  Sense strand starting at position 2859 of SEQ ID NO: 1560324
ggccguugucacuuuguaa

SEQ ID NO: 1592234 - RNA, 19 nt, Artificial Sequence
  Description of Artificial Sequence: Synthetic oligonucleotide
  Antisense strand to SEQ ID NO: 1592233
uuacaaagugacaacggcc

SEQ ID NO: 1592235 - RNA, 19 nt, Artificial Sequence
  Description of Artificial Sequence: Synthetic oligonucleotide
  Sense strand starting at position 2860 of SEQ ID NO: 1560324
gccguugucacuuuguaaa

SEQ ID NO: 1592236 - RNA, 19 nt, Artificial Sequence
  Description of Artificial Sequence: Synthetic oligonucleotide
  Antisense strand to SEQ ID NO: 1592235
uuuacaaagugacaacggc

SEQ ID NO: 1592237 - RNA, 19 nt, Artificial Sequence
  Description of Artificial Sequence: Synthetic oligonucleotide
  Sense strand starting at position 2862 of SEQ ID NO: 1560324
cguugucacuuuguaaaca

SEQ ID NO: 1592238 - RNA, 19 nt, Artificial Sequence
  Description of Artificial Sequence: Synthetic oligonucleotide
  Antisense strand to SEQ ID NO: 1592237
uguuuacaaagugacaacg

SEQ ID NO: 1592239 - RNA, 19 nt, Artificial Sequence
  Description of Artificial Sequence: Synthetic oligonucleotide
  Sense strand starting at position 3343 of SEQ ID NO: 1560324
gcuggcaauugagugaaau

SEQ ID NO: 1592240 - RNA, 19 nt, Artificial Sequence
  Description of Artificial Sequence: Synthetic oligonucleotide
  Antisense strand to SEQ ID NO: 1592239
auuucacucaauugccagc

SEQ ID NO: 1592241 - RNA, 19 nt, Artificial Sequence
  Description of Artificial Sequence: Synthetic oligonucleotide
  Sense strand starting at position 3368 of SEQ ID NO: 1560324
aucagucuuucccugggua

SEQ ID NO: 1592242 - RNA, 19 nt, Artificial Sequence
  Description of Artificial Sequence: Synthetic oligonucleotide
  Antisense strand to SEQ ID NO: 1592241
uacccagggaaagacugau

SEQ ID NO: 1592243 - RNA, 19 nt, Artificial Sequence
  Description of Artificial Sequence: Synthetic oligonucleotide
  Sense strand starting at position 3369 of SEQ ID NO: 1560324
ucagucuuucccuggguaa

SEQ ID NO: 1592244 - RNA, 19 nt, Artificial Sequence
  Description of Artificial Sequence: Synthetic oligonucleotide
  Antisense strand to SEQ ID NO: 1592243
uuacccagggaaagacuga

SEQ ID NO: 1592245 - RNA, 19 nt, Artificial Sequence
  Description of Artificial Sequence: Synthetic oligonucleotide
  Sense strand starting at position 3370 of SEQ ID NO: 1560324
cagucuuucccuggguaag

SEQ ID NO: 1592246 - RNA, 19 nt, Artificial Sequence
  Description of Artificial Sequence: Synthetic oligonucleotide
  Antisense strand to SEQ ID NO: 1592245
cuuacccagggaaagacug

SEQ ID NO: 1592247 - RNA, 19 nt, Artificial Sequence
  Description of Artificial Sequence: Synthetic oligonucleotide
  Sense strand starting at position 3382 of SEQ ID NO: 1560324
ggguaagcuucccaaugcu

SEQ ID NO: 1592248 - RNA, 19 nt, Artificial Sequence
  Description of Artificial Sequence: Synthetic oligonucleotide
  Antisense strand to SEQ ID NO: 1592247
agcauugggaagcuuaccc

SEQ ID NO: 1592249 - RNA, 19 nt, Artificial Sequence
  Description of Artificial Sequence: Synthetic oligonucleotide
  Sense strand starting at position 3398 of SEQ ID NO: 1560324
gcugaacuggcucaacuaa

SEQ ID NO: 1592250 - RNA, 19 nt, Artificial Sequence
  Description of Artificial Sequence: Synthetic oligonucleotide
  Antisense strand to SEQ ID NO: 1592249
uuaguugagccaguucagc

SEQ ID NO: 1592251 - RNA, 19 nt, Artificial Sequence
  Description of Artificial Sequence: Synthetic oligonucleotide
  Sense strand starting at position 3445 of SEQ ID NO: 1560324
ccgguuguccugggucaca

SEQ ID NO: 1592252 - RNA, 19 nt, Artificial Sequence
  Description of Artificial Sequence: Synthetic oligonucleotide
  Antisense strand to SEQ ID NO: 1592251
ugugacccaggacaaccgg

SEQ ID NO: 1592253 - RNA, 19 nt, Artificial Sequence
  Description of Artificial Sequence: Synthetic oligonucleotide
  Sense strand starting at position 3755 of SEQ ID NO: 1560324
gagagauugcgaugagcug

SEQ ID NO: 1592254 - RNA, 19 nt, Artificial Sequence
  Description of Artificial Sequence: Synthetic oligonucleotide
  Antisense strand to SEQ ID NO: 1592253
cagcucaucgcaaucucuc

SEQ ID NO: 1592255 - RNA, 19 nt, Artificial Sequence
  Description of Artificial Sequence: Synthetic oligonucleotide
  Sense strand starting at position 3887 of SEQ ID NO: 1560324
acaggaugcacagguguua

SEQ ID NO: 1592256 - RNA, 19 nt, Artificial Sequence
  Description of Artificial Sequence: Synthetic oligonucleotide
  Antisense strand to SEQ ID NO: 1592255
uaacaccugugcauccugu

SEQ ID NO: 1592257 - RNA, 19 nt, Artificial Sequence
  Description of Artificial Sequence: Synthetic oligonucleotide
  Sense strand starting at position 3910 of SEQ ID NO: 1560324
ccugacaaauagucuagua

SEQ ID NO: 1592258 - RNA, 19 nt, Artificial Sequence
  Description of Artificial Sequence: Synthetic oligonucleotide
  Antisense strand to SEQ ID NO: 1592257
uacuagacuauuugucagg

SEQ ID NO: 1592259 - RNA, 19 nt, Artificial Sequence
  Description of Artificial Sequence: Synthetic oligonucleotide
  Sense strand starting at position 3966 of SEQ ID NO: 1560324
uggagaugaugucucccaa

SEQ ID NO: 1592260 - RNA, 19 nt, Artificial Sequence
  Description of Artificial Sequence: Synthetic oligonucleotide
  Antisense strand to SEQ ID NO: 1592259
uugggagacaucaucucca

SEQ ID NO: 1592261 - RNA, 19 nt, Artificial Sequence
  Description of Artificial Sequence: Synthetic oligonucleotide
  Sense strand starting at position 3970 of SEQ ID NO: 1560324
gaugaugucucccaaagug

SEQ ID NO: 1592262 - RNA, 19 nt, Artificial Sequence
  Description of Artificial Sequence: Synthetic oligonucleotide
  Antisense strand to SEQ ID NO: 1592261
cacuuugggagacaucauc

SEQ ID NO: 1592263 - RNA, 19 nt, Artificial Sequence
  Description of Artificial Sequence: Synthetic oligonucleotide
  Sense strand starting at position 113 of SEQ ID NO: 1560325
ggcucagaguuagugaacu

SEQ ID NO: 1592264 - RNA, 19 nt, Artificial Sequence
  Description of Artificial Sequence: Synthetic oligonucleotide
  Antisense strand to SEQ ID NO: 1592263
aguucacuaacucugagcc

SEQ ID NO: 1592265 - RNA, 19 nt, Artificial Sequence
  Description of Artificial Sequence: Synthetic oligonucleotide
  Sense strand starting at position 124 of SEQ ID NO: 1560325
agugaacugggcuguugau

SEQ ID NO: 1592266 - RNA, 19 nt, Artificial Sequence
  Description of Artificial Sequence: Synthetic oligonucleotide
  Antisense strand to SEQ ID NO: 1592265
aucaacagcccaguucacu

SEQ ID NO: 1592267 - RNA, 19 nt, Artificial Sequence
  Description of Artificial Sequence: Synthetic oligonucleotide
  Sense strand starting at position 264 of SEQ ID NO: 1560325
ggccuaaugagguggagaa

SEQ ID NO: 1592268 - RNA, 19 nt, Artificial Sequence
  Description of Artificial Sequence: Synthetic oligonucleotide
  Antisense strand to SEQ ID NO: 1592267
uucuccaccucauuaggcc

SEQ ID NO: 1592269 - RNA, 19 nt, Artificial Sequence
  Description of Artificial Sequence: Synthetic oligonucleotide
  Sense strand starting at position 265 of SEQ ID NO: 1560325
gccuaaugagguggagaaa

SEQ ID NO: 1592270 - RNA, 19 nt, Artificial Sequence
  Description of Artificial Sequence: Synthetic oligonucleotide
  Antisense strand to SEQ ID NO: 1592269
uuucuccaccucauuaggc

SEQ ID NO: 1592271 - RNA, 19 nt, Artificial Sequence
  Description of Artificial Sequence: Synthetic oligonucleotide
  Sense strand starting at position 301 of SEQ ID NO: 1560325
auuggaaacccugguugua

SEQ ID NO: 1592272 - RNA, 19 nt, Artificial Sequence
  Description of Artificial Sequence: Synthetic oligonucleotide
  Antisense strand to SEQ ID NO: 1592271
uacaaccaggguuuccaau

SEQ ID NO: 1592273 - RNA, 19 nt, Artificial Sequence
  Description of Artificial Sequence: Synthetic oligonucleotide
  Sense strand starting at position 303 of SEQ ID NO: 1560325
uggaaacccugguuguaca

SEQ ID NO: 1592274 - RNA, 19 nt, Artificial Sequence
  Description of Artificial Sequence: Synthetic oligonucleotide
  Antisense strand to SEQ ID NO: 1592273
uguacaaccaggguuucca

SEQ ID NO: 1592275 - RNA, 19 nt, Artificial Sequence
  Description of Artificial Sequence: Synthetic oligonucleotide
  Sense strand starting at position 333 of SEQ ID NO: 1560325
gaguaaggaaguggucaca

SEQ ID NO: 1592276 - RNA, 19 nt, Artificial Sequence
  Description of Artificial Sequence: Synthetic oligonucleotide
  Antisense strand to SEQ ID NO: 1592275
ugugaccacuuccuuacuc

SEQ ID NO: 1592277 - RNA, 19 nt, Artificial Sequence
  Description of Artificial Sequence: Synthetic oligonucleotide
  Sense strand starting at position 373 of SEQ ID NO: 1560325
ggcaguuccauugaggagu

SEQ ID NO: 1592278 - RNA, 19 nt, Artificial Sequence
  Description of Artificial Sequence: Synthetic oligonucleotide
  Antisense strand to SEQ ID NO: 1592277
acuccucaauggaacugcc

SEQ ID NO: 1592279 - RNA, 19 nt, Artificial Sequence
  Description of Artificial Sequence: Synthetic oligonucleotide
  Sense strand starting at position 438 of SEQ ID NO: 1560325
aauaauaagugagggauuu

SEQ ID NO: 1592280 - RNA, 19 nt, Artificial Sequence
  Description of Artificial Sequence: Synthetic oligonucleotide
  Antisense strand to SEQ ID NO: 1592279
aaaucccucacuuauuauu

SEQ ID NO: 1592281 - RNA, 19 nt, Artificial Sequence
  Description of Artificial Sequence: Synthetic oligonucleotide
  Sense strand starting at position 799 of SEQ ID NO: 1560325
cggucccuccagugaaaca

SEQ ID NO: 1592282 - RNA, 19 nt, Artificial Sequence
  Description of Artificial Sequence: Synthetic oligonucleotide
  Antisense strand to SEQ ID NO: 1592281
uguuucacuggagggaccg

SEQ ID NO: 1592283 - RNA, 19 nt, Artificial Sequence
  Description of Artificial Sequence: Synthetic oligonucleotide
  Sense strand starting at position 832 of SEQ ID NO: 1560325
ggacaaagcugagucucau

SEQ ID NO: 1592284 - RNA, 19 nt, Artificial Sequence
  Description of Artificial Sequence: Synthetic oligonucleotide
  Antisense strand to SEQ ID NO: 1592283
augagacucagcuuugucc

SEQ ID NO: 1592285 - RNA, 19 nt, Artificial Sequence
  Description of Artificial Sequence: Synthetic oligonucleotide
  Sense strand starting at position 842 of SEQ ID NO: 1560325
gagucucauuucugaggaa

SEQ ID NO: 1592286 - RNA, 19 nt, Artificial Sequence
  Description of Artificial Sequence: Synthetic oligonucleotide
  Antisense strand to SEQ ID NO: 1592285
uuccucagaaaugagacuc

SEQ ID NO: 1592287 - RNA, 19 nt, Artificial Sequence
  Description of Artificial Sequence: Synthetic oligonucleotide
  Sense strand starting at position 843 of SEQ ID NO: 1560325
agucucauuucugaggaaa

SEQ ID NO: 1592288 - RNA, 19 nt, Artificial Sequence
  Description of Artificial Sequence: Synthetic oligonucleotide
  Antisense strand to SEQ ID NO: 1592287
uuuccucagaaaugagacu

SEQ ID NO: 1592289 - RNA, 19 nt, Artificial Sequence
  Description of Artificial Sequence: Synthetic oligonucleotide
  Sense strand starting at position 1017 of SEQ ID NO: 1560325
cagagugaccugggagauu

SEQ ID NO: 1592290 - RNA, 19 nt, Artificial Sequence
  Description of Artificial Sequence: Synthetic oligonucleotide
  Antisense strand to SEQ ID NO: 1592289
aaucucccaggucacucug

SEQ ID NO: 1592291 - RNA, 19 nt, Artificial Sequence
  Description of Artificial Sequence: Synthetic oligonucleotide
  Sense strand starting at position 1100 of SEQ ID NO: 1560325
ugacuuaacaccggauugu

SEQ ID NO: 1592292 - RNA, 19 nt, Artificial Sequence
  Description of Artificial Sequence: Synthetic oligonucleotide
  Antisense strand to SEQ ID NO: 1592291
acaauccgguguuaaguca

SEQ ID NO: 1592293 - RNA, 19 nt, Artificial Sequence
  Description of Artificial Sequence: Synthetic oligonucleotide
  Sense strand starting at position 1101 of SEQ ID NO: 1560325
gacuuaacaccggauugua

SEQ ID NO: 1592294 - RNA, 19 nt, Artificial Sequence
  Description of Artificial Sequence: Synthetic oligonucleotide
  Antisense strand to SEQ ID NO: 1592293
uacaauccgguguuaaguc

SEQ ID NO: 1592295 - RNA, 19 nt, Artificial Sequence
  Description of Artificial Sequence: Synthetic oligonucleotide
  Sense strand starting at position 1507 of SEQ ID NO: 1560325
gucaccaugugucucagau

SEQ ID NO: 1592296 - RNA, 19 nt, Artificial Sequence
  Description of Artificial Sequence: Synthetic oligonucleotide
  Antisense strand to SEQ ID NO: 1592295
aucugagacacauggugac

SEQ ID NO: 1592297 - RNA, 19 nt, Artificial Sequence
  Description of Artificial Sequence: Synthetic oligonucleotide
  Sense strand starting at position 1634 of SEQ ID NO: 1560325
cugggcagucguuagugaa

SEQ ID NO: 1592298 - RNA, 19 nt, Artificial Sequence
  Description of Artificial Sequence: Synthetic oligonucleotide
  Antisense strand to SEQ ID NO: 1592297
uucacuaacgacugcccag

SEQ ID NO: 1592299 - RNA, 19 nt, Artificial Sequence
  Description of Artificial Sequence: Synthetic oligonucleotide
  Sense strand starting at position 1635 of SEQ ID NO: 1560325
ugggcagucguuagugaac

SEQ ID NO: 1592300 - RNA, 19 nt, Artificial Sequence
  Description of Artificial Sequence: Synthetic oligonucleotide
  Antisense strand to SEQ ID NO: 1592299
guucacuaacgacugccca

SEQ ID NO: 1592301 - RNA, 19 nt, Artificial Sequence
  Description of Artificial Sequence: Synthetic oligonucleotide
  Sense strand starting at position 1638 of SEQ ID NO: 1560325
gcagucguuagugaacaga

SEQ ID NO: 1592302 - RNA, 19 nt, Artificial Sequence
  Description of Artificial Sequence: Synthetic oligonucleotide
  Antisense strand to SEQ ID NO: 1592301
ucuguucacuaacgacugc

SEQ ID NO: 1592303 - RNA, 19 nt, Artificial Sequence
  Description of Artificial Sequence: Synthetic oligonucleotide
  Sense strand starting at position 1736 of SEQ ID NO: 1560325
gaggucgucaaccagagaa

SEQ ID NO: 1592304 - RNA, 19 nt, Artificial Sequence
  Description of Artificial Sequence: Synthetic oligonucleotide
  Antisense strand to SEQ ID NO: 1592303
uucucugguugacgaccuc

SEQ ID NO: 1592305 - RNA, 19 nt, Artificial Sequence
  Description of Artificial Sequence: Synthetic oligonucleotide
  Sense strand starting at position 1738 of SEQ ID NO: 1560325
ggucgucaaccagagaauc

SEQ ID NO: 1592306 - RNA, 19 nt, Artificial Sequence
  Description of Artificial Sequence: Synthetic oligonucleotide
  Antisense strand to SEQ ID NO: 1592305
gauucucugguugacgacc

SEQ ID NO: 1592307 - RNA, 19 nt, Artificial Sequence
  Description of Artificial Sequence: Synthetic oligonucleotide
  Sense strand starting at position 1769 of SEQ ID NO: 1560325
uuugguacuuaccuggaua

SEQ ID NO: 1592308 - RNA, 19 nt, Artificial Sequence
  Description of Artificial Sequence: Synthetic oligonucleotide
  Antisense strand to SEQ ID NO: 1592307
uauccagguaaguaccaaa

SEQ ID NO: 1592309 - RNA, 19 nt, Artificial Sequence
  Description of Artificial Sequence: Synthetic oligonucleotide
  Sense strand starting at position 1990 of SEQ ID NO: 1560325
gaaggagucuguccuuacu

SEQ ID NO: 1592310 - RNA, 19 nt, Artificial Sequence
  Description of Artificial Sequence: Synthetic oligonucleotide
  Antisense strand to SEQ ID NO: 1592309
aguaaggacagacuccuuc

SEQ ID NO: 1592311 - RNA, 19 nt, Artificial Sequence
  Description of Artificial Sequence: Synthetic oligonucleotide
  Sense strand starting at position 1992 of SEQ ID NO: 1560325
aggagucuguccuuacuua

SEQ ID NO: 1592312 - RNA, 19 nt, Artificial Sequence
  Description of Artificial Sequence: Synthetic oligonucleotide
  Antisense strand to SEQ ID NO: 1592311
uaaguaaggacagacuccu

SEQ ID NO: 1592313 - RNA, 19 nt, Artificial Sequence
  Description of Artificial Sequence: Synthetic oligonucleotide
  Sense strand starting at position 1993 of SEQ ID NO: 1560325
ggagucuguccuuacuuau

SEQ ID NO: 1592314 - RNA, 19 nt, Artificial Sequence
  Description of Artificial Sequence: Synthetic oligonucleotide
  Antisense strand to SEQ ID NO: 1592313
auaaguaaggacagacucc

SEQ ID NO: 1592315 - RNA, 19 nt, Artificial Sequence
  Description of Artificial Sequence: Synthetic oligonucleotide
  Sense strand starting at position 2030 of SEQ ID NO: 1560325
augagaaccugacaugauu

SEQ ID NO: 1592316 - RNA, 19 nt, Artificial Sequence
  Description of Artificial Sequence: Synthetic oligonucleotide
  Antisense strand to SEQ ID NO: 1592315
aaucaugucagguucucau

SEQ ID NO: 1592317 - RNA, 19 nt, Artificial Sequence
  Description of Artificial Sequence: Synthetic oligonucleotide
  Sense strand starting at position 2064 of SEQ ID NO: 1560325
gugcacagccauuauuagu

SEQ ID NO: 1592318 - RNA, 19 nt, Artificial Sequence
  Description of Artificial Sequence: Synthetic oligonucleotide
  Antisense strand to SEQ ID NO: 1592317
acuaauaauggcugugcac

SEQ ID NO: 1592319 - RNA, 19 nt, Artificial Sequence
  Description of Artificial Sequence: Synthetic oligonucleotide
  Sense strand starting at position 2083 of SEQ ID NO: 1560325
aagcauguucugggaaguc

SEQ ID NO: 1592320 - RNA, 19 nt, Artificial Sequence
  Description of Artificial Sequence: Synthetic oligonucleotide
  Antisense strand to SEQ ID NO: 1592319
gacuucccagaacaugcuu

SEQ ID NO: 1592321 - RNA, 19 nt, Artificial Sequence
  Description of Artificial Sequence: Synthetic oligonucleotide
  Sense strand starting at position 2095 of SEQ ID NO: 1560325
ggaagucauuugggcagga

SEQ ID NO: 1592322 - RNA, 19 nt, Artificial Sequence
  Description of Artificial Sequence: Synthetic oligonucleotide
  Antisense strand to SEQ ID NO: 1592321
uccugcccaaaugacuucc

SEQ ID NO: 1592323 - RNA, 19 nt, Artificial Sequence
  Description of Artificial Sequence: Synthetic oligonucleotide
  Sense strand starting at position 2559 of SEQ ID NO: 1560325
gccauucuaggaugaauua

SEQ ID NO: 1592324 - RNA, 19 nt, Artificial Sequence
  Description of Artificial Sequence: Synthetic oligonucleotide
  Antisense strand to SEQ ID NO: 1592323
uaauucauccuagaauggc

SEQ ID NO: 1592325 - RNA, 19 nt, Artificial Sequence
  Description of Artificial Sequence: Synthetic oligonucleotide
  Sense strand starting at position 2571 of SEQ ID NO: 1560325
ugaauuauuagaggagugu

SEQ ID NO: 1592326 - RNA, 19 nt, Artificial Sequence
  Description of Artificial Sequence: Synthetic oligonucleotide
  Antisense strand to SEQ ID NO: 1592325
acacuccucuaauaauuca

SEQ ID NO: 1592327 - RNA, 19 nt, Artificial Sequence
  Description of Artificial Sequence: Synthetic oligonucleotide
  Sense strand starting at position 2584 of SEQ ID NO: 1560325
gagugugcacgcuccuuaa

SEQ ID NO: 1592328 - RNA, 19 nt, Artificial Sequence
  Description of Artificial Sequence: Synthetic oligonucleotide
  Antisense strand to SEQ ID NO: 1592327
uuaaggagcgugcacacuc

SEQ ID NO: 1592329 - RNA, 19 nt, Artificial Sequence
  Description of Artificial Sequence: Synthetic oligonucleotide
  Sense strand starting at position 2586 of SEQ ID NO: 1560325
gugugcacgcuccuuaaua

SEQ ID NO: 1592330 - RNA, 19 nt, Artificial Sequence
  Description of Artificial Sequence: Synthetic oligonucleotide
  Antisense strand to SEQ ID NO: 1592329
uauuaaggagcgugcacac

SEQ ID NO: 1592331 - RNA, 19 nt, Artificial Sequence
  Description of Artificial Sequence: Synthetic oligonucleotide
  Sense strand starting at position 2632 of SEQ ID NO: 1560325
uggcuagggccagauaacu

SEQ ID NO: 1592332 - RNA, 19 nt, Artificial Sequence
  Description of Artificial Sequence: Synthetic oligonucleotide
  Antisense strand to SEQ ID NO: 1592331
aguuaucuggcccuagcca

SEQ ID NO: 1592333 - RNA, 19 nt, Artificial Sequence
  Description of Artificial Sequence: Synthetic oligonucleotide
  Sense strand starting at position 2741 of SEQ ID NO: 1560325
ugggcuguguuucuuaaga

SEQ ID NO: 1592334 - RNA, 19 nt, Artificial Sequence
  Description of Artificial Sequence: Synthetic oligonucleotide
  Antisense strand to SEQ ID NO: 1592333
ucuuaagaaacacagccca

SEQ ID NO: 1592335 - RNA, 19 nt, Artificial Sequence
  Description of Artificial Sequence: Synthetic oligonucleotide
  Sense strand starting at position 2816 of SEQ ID NO: 1560325
cugguuuguggacagaaau

SEQ ID NO: 1592336 - RNA, 19 nt, Artificial Sequence
  Description of Artificial Sequence: Synthetic oligonucleotide
  Antisense strand to SEQ ID NO: 1592335
auuucuguccacaaaccag

SEQ ID NO: 1592337 - RNA, 19 nt, Artificial Sequence
  Description of Artificial Sequence: Synthetic oligonucleotide
  Sense strand starting at position 3591 of SEQ ID NO: 1560325
aguuuauucucauuagguu

SEQ ID NO: 1592338 - RNA, 19 nt, Artificial Sequence
  Description of Artificial Sequence: Synthetic oligonucleotide
  Antisense strand to SEQ ID NO: 1592337
aaccuaaugagaauaaacu

SEQ ID NO: 1592339 - RNA, 19 nt, Artificial Sequence
  Description of Artificial Sequence: Synthetic oligonucleotide
  Sense strand starting at position 3592 of SEQ ID NO: 1560325
guuuauucucauuagguua

SEQ ID NO: 1592340 - RNA, 19 nt, Artificial Sequence
  Description of Artificial Sequence: Synthetic oligonucleotide
  Antisense strand to SEQ ID NO: 1592339
uaaccuaaugagaauaaac

SEQ ID NO: 1592341 - RNA, 19 nt, Artificial Sequence
  Description of Artificial Sequence: Synthetic oligonucleotide
  Sense strand starting at position 3606 of SEQ ID NO: 1560325
gguuauuucucugaucaca

SEQ ID NO: 1592342 - RNA, 19 nt, Artificial Sequence
  Description of Artificial Sequence: Synthetic oligonucleotide
  Antisense strand to SEQ ID NO: 1592341
ugugaucagagaaauaacc

SEQ ID NO: 1592343 - RNA, 19 nt, Artificial Sequence
  Description of Artificial Sequence: Synthetic oligonucleotide
  Sense strand starting at position 128 of SEQ ID NO: 1560326
gcucaaacucucugucaga

SEQ ID NO: 1592344 - RNA, 19 nt, Artificial Sequence
  Description of Artificial Sequence: Synthetic oligonucleotide
  Antisense strand to SEQ ID NO: 1592343
ucugacagagaguuugagc

SEQ ID NO: 1592345 - RNA, 19 nt, Artificial Sequence
  Description of Artificial Sequence: Synthetic oligonucleotide
  Sense strand starting at position 1621 of SEQ ID NO: 1560326
ggguuagaguuuguaggca

SEQ ID NO: 1592346 - RNA, 19 nt, Artificial Sequence
  Description of Artificial Sequence: Synthetic oligonucleotide
  Antisense strand to SEQ ID NO: 1592345
ugccuacaaacucuaaccc

SEQ ID NO: 1592347 - RNA, 19 nt, Artificial Sequence
  Description of Artificial Sequence: Synthetic oligonucleotide
  Sense strand starting at position 1671 of SEQ ID NO: 1560326
cagccauuccuggguacca

SEQ ID NO: 1592348 - RNA, 19 nt, Artificial Sequence
  Description of Artificial Sequence: Synthetic oligonucleotide
  Antisense strand to SEQ ID NO: 1592347
ugguacccaggaauggcug

SEQ ID NO: 1592349 - RNA, 19 nt, Artificial Sequence
  Description of Artificial Sequence: Synthetic oligonucleotide
  Sense strand starting at position 1701 of SEQ ID NO: 1560326
cuugaucaucccuacuguu

SEQ ID NO: 1592350 - RNA, 19 nt, Artificial Sequence
  Description of Artificial Sequence: Synthetic oligonucleotide
  Antisense strand to SEQ ID NO: 1592349
aacaguagggaugaucaag

SEQ ID NO: 1592351 - RNA, 19 nt, Artificial Sequence
  Description of Artificial Sequence: Synthetic oligonucleotide
  Sense strand starting at position 1728 of SEQ ID NO: 1560326
uccucucaggccugaaaga

SEQ ID NO: 1592352 - RNA, 19 nt, Artificial Sequence
  Description of Artificial Sequence: Synthetic oligonucleotide
  Antisense strand to SEQ ID NO: 1592351
ucuuucaggccugagagga

SEQ ID NO: 1592353 - RNA, 19 nt, Artificial Sequence
  Description of Artificial Sequence: Synthetic oligonucleotide
  Sense strand starting at position 1739 of SEQ ID NO: 1560326
cugaaagaguguuucucaa

SEQ ID NO: 1592354 - RNA, 19 nt, Artificial Sequence
  Description of Artificial Sequence: Synthetic oligonucleotide
  Antisense strand to SEQ ID NO: 1592353
uugagaaacacucuuucag

SEQ ID NO: 1592355 - RNA, 19 nt, Artificial Sequence
  Description of Artificial Sequence: Synthetic oligonucleotide
  Sense strand starting at position 1741 of SEQ ID NO: 1560326
gaaagaguguuucucaaau

SEQ ID NO: 1592356 - RNA, 19 nt, Artificial Sequence
  Description of Artificial Sequence: Synthetic oligonucleotide
  Antisense strand to SEQ ID NO: 1592355
auuugagaaacacucuuuc

SEQ ID NO: 1592357 - RNA, 19 nt, Artificial Sequence
  Description of Artificial Sequence: Synthetic oligonucleotide
  Sense strand starting at position 1806 of SEQ ID NO: 1560326
ucuccaaguguauauaaau

SEQ ID NO: 1592358 - RNA, 19 nt, Artificial Sequence
  Description of Artificial Sequence: Synthetic oligonucleotide
  Antisense strand to SEQ ID NO: 1592357
auuuauauacacuuggaga

SEQ ID NO: 1592359 - RNA, 19 nt, Artificial Sequence
  Description of Artificial Sequence: Synthetic oligonucleotide
  Sense strand starting at position 1992 of SEQ ID NO: 1560326
uuguucuuugcgugacuga

SEQ ID NO: 1592360 - RNA, 19 nt, Artificial Sequence
  Description of Artificial Sequence: Synthetic oligonucleotide
  Antisense strand to SEQ ID NO: 1592359
ucagucacgcaaagaacaa

SEQ ID NO: 1592361 - RNA, 19 nt, Artificial Sequence
  Description of Artificial Sequence: Synthetic oligonucleotide
  Sense strand starting at position 2055 of SEQ ID NO: 1560326
gguggucucugugggaacu

SEQ ID NO: 1592362 - RNA, 19 nt, Artificial Sequence
  Description of Artificial Sequence: Synthetic oligonucleotide
  Antisense strand to SEQ ID NO: 1592361
aguucccacagagaccacc

SEQ ID NO: 1592363 - RNA, 19 nt, Artificial Sequence
  Description of Artificial Sequence: Synthetic oligonucleotide
  Sense strand starting at position 2134 of SEQ ID NO: 1560326
ggagcuuugugcuugccua

SEQ ID NO: 1592364 - RNA, 19 nt, Artificial Sequence
  Description of Artificial Sequence: Synthetic oligonucleotide
  Antisense strand to SEQ ID NO: 1592363
uaggcaagcacaaagcucc

SEQ ID NO: 1592365 - RNA, 19 nt, Artificial Sequence
  Description of Artificial Sequence: Synthetic oligonucleotide
  Sense strand starting at position 2135 of SEQ ID NO: 1560326
gagcuuugugcuugccuaa

SEQ ID NO: 1592366 - RNA, 19 nt, Artificial Sequence
  Description of Artificial Sequence: Synthetic oligonucleotide
  Antisense strand to SEQ ID NO: 1592365
uuaggcaagcacaaagcuc

SEQ ID NO: 1592367 - RNA, 19 nt, Artificial Sequence
  Description of Artificial Sequence: Synthetic oligonucleotide
  Sense strand starting at position 2178 of SEQ ID NO: 1560326
aacggagaguuaugcagau

SEQ ID NO: 1592368 - RNA, 19 nt, Artificial Sequence
  Description of Artificial Sequence: Synthetic oligonucleotide
  Antisense strand to SEQ ID NO: 1592367
aucugcauaacucuccguu

SEQ ID NO: 1592369 - RNA, 19 nt, Artificial Sequence
  Description of Artificial Sequence: Synthetic oligonucleotide
  Sense strand starting at position 2180 of SEQ ID NO: 1560326
cggagaguuaugcagauag

SEQ ID NO: 1592370 - RNA, 19 nt, Artificial Sequence
  Description of Artificial Sequence: Synthetic oligonucleotide
  Antisense strand to SEQ ID NO: 1592369
cuaucugcauaacucuccg

SEQ ID NO: 1592371 - RNA, 19 nt, Artificial Sequence
  Description of Artificial Sequence: Synthetic oligonucleotide
  Sense strand starting at position 2182 of SEQ ID NO: 1560326
gagaguuaugcagauagcu

SEQ ID NO: 1592372 - RNA, 19 nt, Artificial Sequence
  Description of Artificial Sequence: Synthetic oligonucleotide
  Antisense strand to SEQ ID NO: 1592371
agcuaucugcauaacucuc

SEQ ID NO: 1592373 - RNA, 19 nt, Artificial Sequence
  Description of Artificial Sequence: Synthetic oligonucleotide
  Sense strand starting at position 2190 of SEQ ID NO: 1560326
ugcagauagcuuuacagau

SEQ ID NO: 1592374 - RNA, 19 nt, Artificial Sequence
  Description of Artificial Sequence: Synthetic oligonucleotide
  Antisense strand to SEQ ID NO: 1592373
aucuguaaagcuaucugca

SEQ ID NO: 1592375 - RNA, 19 nt, Artificial Sequence
  Description of Artificial Sequence: Synthetic oligonucleotide
  Sense strand starting at position 2287 of SEQ ID NO: 1560326
uaguuuaaccaucagagug

SEQ ID NO: 1592376 - RNA, 19 nt, Artificial Sequence
  Description of Artificial Sequence: Synthetic oligonucleotide
  Antisense strand to SEQ ID NO: 1592375
cacucugaugguuaaacua

SEQ ID NO: 1592377 - RNA, 19 nt, Artificial Sequence
  Description of Artificial Sequence: Synthetic oligonucleotide
  Sense strand starting at position 2289 of SEQ ID NO: 1560326
guuuaaccaucagagugaa

SEQ ID NO: 1592378 - RNA, 19 nt, Artificial Sequence
  Description of Artificial Sequence: Synthetic oligonucleotide
  Antisense strand to SEQ ID NO: 1592377
uucacucugaugguuaaac

SEQ ID NO: 1592379 - RNA, 19 nt, Artificial Sequence
  Description of Artificial Sequence: Synthetic oligonucleotide
  Sense strand starting at position 3397 of SEQ ID NO: 1560326
gguggucuaugcucuuuaa

SEQ ID NO: 1592380 - RNA, 19 nt, Artificial Sequence
  Description of Artificial Sequence: Synthetic oligonucleotide
  Antisense strand to SEQ ID NO: 1592379
uuaaagagcauagaccacc

SEQ ID NO: 1592381 - RNA, 19 nt, Artificial Sequence
  Description of Artificial Sequence: Synthetic oligonucleotide
  Sense strand starting at position 3400 of SEQ ID NO: 1560326
ggucuaugcucuuuaauuc

SEQ ID NO: 1592382 - RNA, 19 nt, Artificial Sequence
  Description of Artificial Sequence: Synthetic oligonucleotide
  Antisense strand to SEQ ID NO: 1592381
gaauuaaagagcauagacc

SEQ ID NO: 1592383 - RNA, 19 nt, Artificial Sequence
  Description of Artificial Sequence: Synthetic oligonucleotide
  Sense strand starting at position 3410 of SEQ ID NO: 1560326
cuuuaauucucuugguugu

SEQ ID NO: 1592384 - RNA, 19 nt, Artificial Sequence
  Description of Artificial Sequence: Synthetic oligonucleotide
  Antisense strand to SEQ ID NO: 1592383
acaaccaagagaauuaaag

SEQ ID NO: 1592385 - RNA, 19 nt, Artificial Sequence
  Description of Artificial Sequence: Synthetic oligonucleotide
  Sense strand starting at position 3417 of SEQ ID NO: 1560326
ucucuugguugugaaacga

SEQ ID NO: 1592386 - RNA, 19 nt, Artificial Sequence
  Description of Artificial Sequence: Synthetic oligonucleotide
  Antisense strand to SEQ ID NO: 1592385
ucguuucacaaccaagaga

SEQ ID NO: 1592387 - RNA, 19 nt, Artificial Sequence
  Description of Artificial Sequence: Synthetic oligonucleotide
  Sense strand starting at position 3427 of SEQ ID NO: 1560326
gugaaacgagcucggauaa

SEQ ID NO: 1592388 - RNA, 19 nt, Artificial Sequence
  Description of Artificial Sequence: Synthetic oligonucleotide
  Antisense strand to SEQ ID NO: 1592387
uuauccgagcucguuucac

SEQ ID NO: 1592389 - RNA, 19 nt, Artificial Sequence
  Description of Artificial Sequence: Synthetic oligonucleotide
  Sense strand starting at position 3794 of SEQ ID NO: 1560326
gagagaggcuuccggugua

SEQ ID NO: 1592390 - RNA, 19 nt, Artificial Sequence
  Description of Artificial Sequence: Synthetic oligonucleotide
  Antisense strand to SEQ ID NO: 1592389
uacaccggaagccucucuc

SEQ ID NO: 1592391 - RNA, 19 nt, Artificial Sequence
  Description of Artificial Sequence: Synthetic oligonucleotide
  Sense strand starting at position 3880 of SEQ ID NO: 1560326
ccauauauuugguggcuua

SEQ ID NO: 1592392 - RNA, 19 nt, Artificial Sequence
  Description of Artificial Sequence: Synthetic oligonucleotide
  Antisense strand to SEQ ID NO: 1592391
uaagccaccaaauauaugg

SEQ ID NO: 1592393 - RNA, 19 nt, Artificial Sequence
  Description of Artificial Sequence: Synthetic oligonucleotide
  Sense strand starting at position 46 of SEQ ID NO: 1560327
cagagacauccaugugcca

SEQ ID NO: 1592394 - RNA, 19 nt, Artificial Sequence
  Description of Artificial Sequence: Synthetic oligonucleotide
  Antisense strand to SEQ ID NO: 1592393
uggcacauggaugucucug

SEQ ID NO: 1592395 - RNA, 19 nt, Artificial Sequence
  Description of Artificial Sequence: Synthetic oligonucleotide
  Sense strand starting at position 64 of SEQ ID NO: 1560327
aggcucugugcugagugau

SEQ ID NO: 1592396 - RNA, 19 nt, Artificial Sequence
  Description of Artificial Sequence: Synthetic oligonucleotide
  Antisense strand to SEQ ID NO: 1592395
aucacucagcacagagccu

SEQ ID NO: 1592397 - RNA, 19 nt, Artificial Sequence
  Description of Artificial Sequence: Synthetic oligonucleotide
  Sense strand starting at position 65 of SEQ ID NO: 1560327
ggcucugugcugagugaug

SEQ ID NO: 1592398 - RNA, 19 nt, Artificial Sequence
  Description of Artificial Sequence: Synthetic oligonucleotide
  Antisense strand to SEQ ID NO: 1592397
caucacucagcacagagcc

SEQ ID NO: 1592399 - RNA, 19 nt, Artificial Sequence
  Description of Artificial Sequence: Synthetic oligonucleotide
  Sense strand starting at position 76 of SEQ ID NO: 1560327
gagugaugcugggaccaga

SEQ ID NO: 1592400 - RNA, 19 nt, Artificial Sequence
  Description of Artificial Sequence: Synthetic oligonucleotide
  Antisense strand to SEQ ID NO: 1592399
ucuggucccagcaucacuc

SEQ ID NO: 1592401 - RNA, 19 nt, Artificial Sequence
  Description of Artificial Sequence: Synthetic oligonucleotide
  Sense strand starting at position 197 of SEQ ID NO: 1560327
gcuguaggacuccaaagau

SEQ ID NO: 1592402 - RNA, 19 nt, Artificial Sequence
  Description of Artificial Sequence: Synthetic oligonucleotide
  Antisense strand to SEQ ID NO: 1592401
aucuuuggaguccuacagc

SEQ ID NO: 1592403 - RNA, 19 nt, Artificial Sequence
  Description of Artificial Sequence: Synthetic oligonucleotide
  Sense strand starting at position 301 of SEQ ID NO: 1560327
aggugacaucccugucaug

SEQ ID NO: 1592404 - RNA, 19 nt, Artificial Sequence
  Description of Artificial Sequence: Synthetic oligonucleotide
  Antisense strand to SEQ ID NO: 1592403
caugacagggaugucaccu

SEQ ID NO: 1592405 - RNA, 19 nt, Artificial Sequence
  Description of Artificial Sequence: Synthetic oligonucleotide
  Sense strand starting at position 402 of SEQ ID NO: 1560327
gaucguaacucugccacuu

SEQ ID NO: 1592406 - RNA, 19 nt, Artificial Sequence
  Description of Artificial Sequence: Synthetic oligonucleotide
  Antisense strand to SEQ ID NO: 1592405
aaguggcagaguuacgauc

SEQ ID NO: 1592407 - RNA, 19 nt, Artificial Sequence
  Description of Artificial Sequence: Synthetic oligonucleotide
  Sense strand starting at position 415 of SEQ ID NO: 1560327
ccacuuacuggcugggaga

SEQ ID NO: 1592408 - RNA, 19 nt, Artificial Sequence
  Description of Artificial Sequence: Synthetic oligonucleotide
  Antisense strand to SEQ ID NO: 1592407
ucucccagccaguaagugg

SEQ ID NO: 1592409 - RNA, 19 nt, Artificial Sequence
  Description of Artificial Sequence: Synthetic oligonucleotide
  Sense strand starting at position 416 of SEQ ID NO: 1560327
cacuuacuggcugggagau

SEQ ID NO: 1592410 - RNA, 19 nt, Artificial Sequence
  Description of Artificial Sequence: Synthetic oligonucleotide
  Antisense strand to SEQ ID NO: 1592409
aucucccagccaguaagug

SEQ ID NO: 1592411 - RNA, 19 nt, Artificial Sequence
  Description of Artificial Sequence: Synthetic oligonucleotide
  Sense strand starting at position 827 of SEQ ID NO: 1560327
auggguuaaucucugcaaa

SEQ ID NO: 1592412 - RNA, 19 nt, Artificial Sequence
  Description of Artificial Sequence: Synthetic oligonucleotide
  Antisense strand to SEQ ID NO: 1592411
uuugcagagauuaacccau

SEQ ID NO: 1592413 - RNA, 19 nt, Artificial Sequence
  Description of Artificial Sequence: Synthetic oligonucleotide
  Sense strand starting at position 828 of SEQ ID NO: 1560327
uggguuaaucucugcaaag

SEQ ID NO: 1592414 - RNA, 19 nt, Artificial Sequence
  Description of Artificial Sequence: Synthetic oligonucleotide
  Antisense strand to SEQ ID NO: 1592413
cuuugcagagauuaaccca

SEQ ID NO: 1592415 - RNA, 19 nt, Artificial Sequence
  Description of Artificial Sequence: Synthetic oligonucleotide
  Sense strand starting at position 829 of SEQ ID NO: 1560327
ggguuaaucucugcaaagg

SEQ ID NO: 1592416 - RNA, 19 nt, Artificial Sequence
  Description of Artificial Sequence: Synthetic oligonucleotide
  Antisense strand to SEQ ID NO: 1592415
ccuuugcagagauuaaccc

SEQ ID NO: 1592417 - RNA, 19 nt, Artificial Sequence
  Description of Artificial Sequence: Synthetic oligonucleotide
  Sense strand starting at position 830 of SEQ ID NO: 1560327
gguuaaucucugcaaagga

SEQ ID NO: 1592418 - RNA, 19 nt, Artificial Sequence
  Description of Artificial Sequence: Synthetic oligonucleotide
  Antisense strand to SEQ ID NO: 1592417
uccuuugcagagauuaacc

SEQ ID NO: 1592419 - RNA, 19 nt, Artificial Sequence
  Description of Artificial Sequence: Synthetic oligonucleotide
  Sense strand starting at position 878 of SEQ ID NO: 1560327
cgcuaaaugcuggcugcua

SEQ ID NO: 1592420 - RNA, 19 nt, Artificial Sequence
  Description of Artificial Sequence: Synthetic oligonucleotide
  Antisense strand to SEQ ID NO: 1592419
uagcagccagcauuuagcg

SEQ ID NO: 1592421 - RNA, 19 nt, Artificial Sequence
  Description of Artificial Sequence: Synthetic oligonucleotide
  Sense strand starting at position 1277 of SEQ ID NO: 1560327
cagguuggcuccuugaacu

SEQ ID NO: 1592422 - RNA, 19 nt, Artificial Sequence
  Description of Artificial Sequence: Synthetic oligonucleotide
  Antisense strand to SEQ ID NO: 1592421
aguucaaggagccaaccug

SEQ ID NO: 1592423 - RNA, 19 nt, Artificial Sequence
  Description of Artificial Sequence: Synthetic oligonucleotide
  Sense strand starting at position 1397 of SEQ ID NO: 1560327
cugucugacucccucuaua

SEQ ID NO: 1592424 - RNA, 19 nt, Artificial Sequence
  Description of Artificial Sequence: Synthetic oligonucleotide
  Antisense strand to SEQ ID NO: 1592423
uauagagggagucagacag

SEQ ID NO: 1592425 - RNA, 19 nt, Artificial Sequence
  Description of Artificial Sequence: Synthetic oligonucleotide
  Sense strand starting at position 1413 of SEQ ID NO: 1560327
auagcacauuucggguaau

SEQ ID NO: 1592426 - RNA, 19 nt, Artificial Sequence
  Description of Artificial Sequence: Synthetic oligonucleotide
  Antisense strand to SEQ ID NO: 1592425
auuacccgaaaugugcuau

SEQ ID NO: 1592427 - RNA, 19 nt, Artificial Sequence
  Description of Artificial Sequence: Synthetic oligonucleotide
  Sense strand starting at position 1414 of SEQ ID NO: 1560327
uagcacauuucggguaaua

SEQ ID NO: 1592428 - RNA, 19 nt, Artificial Sequence
  Description of Artificial Sequence: Synthetic oligonucleotide
  Antisense strand to SEQ ID NO: 1592427
uauuacccgaaaugugcua

SEQ ID NO: 1592429 - RNA, 19 nt, Artificial Sequence
  Description of Artificial Sequence: Synthetic oligonucleotide
  Sense strand starting at position 1419 of SEQ ID NO: 1560327
cauuucggguaauauaaga

SEQ ID NO: 1592430 - RNA, 19 nt, Artificial Sequence
  Description of Artificial Sequence: Synthetic oligonucleotide
  Antisense strand to SEQ ID NO: 1592429
ucuuauauuacccgaaaug

SEQ ID NO: 1592431 - RNA, 19 nt, Artificial Sequence
  Description of Artificial Sequence: Synthetic oligonucleotide
  Sense strand starting at position 1435 of SEQ ID NO: 1560327
agaguacaaugguaaguaa

SEQ ID NO: 1592432 - RNA, 19 nt, Artificial Sequence
  Description of Artificial Sequence: Synthetic oligonucleotide
  Antisense strand to SEQ ID NO: 1592431
uuacuuaccauuguacucu

SEQ ID NO: 1592433 - RNA, 19 nt, Artificial Sequence
  Description of Artificial Sequence: Synthetic oligonucleotide
  Sense strand starting at position 1542 of SEQ ID NO: 1560327
aguuucuccgugcauuaaa

SEQ ID NO: 1592434 - RNA, 19 nt, Artificial Sequence
  Description of Artificial Sequence: Synthetic oligonucleotide
  Antisense strand to SEQ ID NO: 1592433
uuuaaugcacggagaaacu

SEQ ID NO: 1592435 - RNA, 19 nt, Artificial Sequence
  Description of Artificial Sequence: Synthetic oligonucleotide
  Sense strand starting at position 1565 of SEQ ID NO: 1560327
gaccgugacuucuuccagu

SEQ ID NO: 1592436 - RNA, 19 nt, Artificial Sequence
  Description of Artificial Sequence: Synthetic oligonucleotide
  Antisense strand to SEQ ID NO: 1592435
acuggaagaagucacgguc

SEQ ID NO: 1592437 - RNA, 19 nt, Artificial Sequence
  Description of Artificial Sequence: Synthetic oligonucleotide
  Sense strand starting at position 1571 of SEQ ID NO: 1560327
gacuucuuccaguggguaa

SEQ ID NO: 1592438 - RNA, 19 nt, Artificial Sequence
  Description of Artificial Sequence: Synthetic oligonucleotide
  Antisense strand to SEQ ID NO: 1592437
uuacccacuggaagaaguc

SEQ ID NO: 1592439 - RNA, 19 nt, Artificial Sequence
  Description of Artificial Sequence: Synthetic oligonucleotide
  Sense strand starting at position 1573 of SEQ ID NO: 1560327
cuucuuccaguggguaaga

SEQ ID NO: 1592440 - RNA, 19 nt, Artificial Sequence
  Description of Artificial Sequence: Synthetic oligonucleotide
  Antisense strand to SEQ ID NO: 1592439
ucuuacccacuggaagaag

SEQ ID NO: 1592441 - RNA, 19 nt, Artificial Sequence
  Description of Artificial Sequence: Synthetic oligonucleotide
  Sense strand starting at position 1612 of SEQ ID NO: 1560327
cugaacaguuaucaagaga

SEQ ID NO: 1592442 - RNA, 19 nt, Artificial Sequence
  Description of Artificial Sequence: Synthetic oligonucleotide
  Antisense strand to SEQ ID NO: 1592441
ucucuugauaacuguucag

SEQ ID NO: 1592443 - RNA, 19 nt, Artificial Sequence
  Description of Artificial Sequence: Synthetic oligonucleotide
  Sense strand starting at position 1673 of SEQ ID NO: 1560327
ggagggaucggauguuaga

SEQ ID NO: 1592444 - RNA, 19 nt, Artificial Sequence
  Description of Artificial Sequence: Synthetic oligonucleotide
  Antisense strand to SEQ ID NO: 1592443
ucuaacauccgaucccucc

SEQ ID NO: 1592445 - RNA, 19 nt, Artificial Sequence
  Description of Artificial Sequence: Synthetic oligonucleotide
  Sense strand starting at position 2576 of SEQ ID NO: 1560327
cuccacguucccuaugagu

SEQ ID NO: 1592446 - RNA, 19 nt, Artificial Sequence
  Description of Artificial Sequence: Synthetic oligonucleotide
  Antisense strand to SEQ ID NO: 1592445
acucauagggaacguggag

SEQ ID NO: 1592447 - RNA, 19 nt, Artificial Sequence
  Description of Artificial Sequence: Synthetic oligonucleotide
  Sense strand starting at position 2578 of SEQ ID NO: 1560327
ccacguucccuaugaguuc

SEQ ID NO: 1592448 - RNA, 19 nt, Artificial Sequence
  Description of Artificial Sequence: Synthetic oligonucleotide
  Antisense strand to SEQ ID NO: 1592447
gaacucauagggaacgugg

SEQ ID NO: 1592449 - RNA, 19 nt, Artificial Sequence
  Description of Artificial Sequence: Synthetic oligonucleotide
  Sense strand starting at position 2599 of SEQ ID NO: 1560327
guccuuaugucuucccuga

SEQ ID NO: 1592450 - RNA, 19 nt, Artificial Sequence
  Description of Artificial Sequence: Synthetic oligonucleotide
  Antisense strand to SEQ ID NO: 1592449
ucagggaagacauaaggac

SEQ ID NO: 1592451 - RNA, 19 nt, Artificial Sequence
  Description of Artificial Sequence: Synthetic oligonucleotide
  Sense strand starting at position 2603 of SEQ ID NO: 1560327
uuaugucuucccugagccu

SEQ ID NO: 1592452 - RNA, 19 nt, Artificial Sequence
  Description of Artificial Sequence: Synthetic oligonucleotide
  Antisense strand to SEQ ID NO: 1592451
aggcucagggaagacauaa

SEQ ID NO: 1592453 - RNA, 19 nt, Artificial Sequence
  Description of Artificial Sequence: Synthetic oligonucleotide
  Sense strand starting at position 2756 of SEQ ID NO: 1560327
cggugcucugcaugaucau

SEQ ID NO: 1592454 - RNA, 19 nt, Artificial Sequence
  Description of Artificial Sequence: Synthetic oligonucleotide
  Antisense strand to SEQ ID NO: 1592453
augaucaugcagagcaccg

SEQ ID NO: 1592455 - RNA, 19 nt, Artificial Sequence
  Description of Artificial Sequence: Synthetic oligonucleotide
  Sense strand starting at position 2909 of SEQ ID NO: 1560327
gcgggagucguuagugugu

SEQ ID NO: 1592456 - RNA, 19 nt, Artificial Sequence
  Description of Artificial Sequence: Synthetic oligonucleotide
  Antisense strand to SEQ ID NO: 1592455
acacacuaacgacucccgc

SEQ ID NO: 1592457 - RNA, 19 nt, Artificial Sequence
  Description of Artificial Sequence: Synthetic oligonucleotide
  Sense strand starting at position 3030 of SEQ ID NO: 1560327
ccaguuuacccgcgagaau

SEQ ID NO: 1592458 - RNA, 19 nt, Artificial Sequence
  Description of Artificial Sequence: Synthetic oligonucleotide
  Antisense strand to SEQ ID NO: 1592457
auucucgcggguaaacugg

SEQ ID NO: 1592459 - RNA, 19 nt, Artificial Sequence
  Description of Artificial Sequence: Synthetic oligonucleotide
  Sense strand starting at position 3031 of SEQ ID NO: 1560327
caguuuacccgcgagaauu

SEQ ID NO: 1592460 - RNA, 19 nt, Artificial Sequence
  Description of Artificial Sequence: Synthetic oligonucleotide
  Antisense strand to SEQ ID NO: 1592459
aauucucgcggguaaacug

SEQ ID NO: 1592461 - RNA, 19 nt, Artificial Sequence
  Description of Artificial Sequence: Synthetic oligonucleotide
  Sense strand starting at position 3033 of SEQ ID NO: 1560327
guuuacccgcgagaauuga

SEQ ID NO: 1592462 - RNA, 19 nt, Artificial Sequence
  Description of Artificial Sequence: Synthetic oligonucleotide
  Antisense strand to SEQ ID NO: 1592461
ucaauucucgcggguaaac

SEQ ID NO: 1592463 - RNA, 19 nt, Artificial Sequence
  Description of Artificial Sequence: Synthetic oligonucleotide
  Sense strand starting at position 3090 of SEQ ID NO: 1560327
agaagaagacguuguucuu

SEQ ID NO: 1592464 - RNA, 19 nt, Artificial Sequence
  Description of Artificial Sequence: Synthetic oligonucleotide
  Antisense strand to SEQ ID NO: 1592463
aagaacaacgucuucuucu

SEQ ID NO: 1592465 - RNA, 19 nt, Artificial Sequence
  Description of Artificial Sequence: Synthetic oligonucleotide
  Sense strand starting at position 3744 of SEQ ID NO: 1560327
aggcguuuggauugagacu

SEQ ID NO: 1592466 - RNA, 19 nt, Artificial Sequence
  Description of Artificial Sequence: Synthetic oligonucleotide
  Antisense strand to SEQ ID NO: 1592465
agucucaauccaaacgccu

SEQ ID NO: 1592467 - RNA, 19 nt, Artificial Sequence
  Description of Artificial Sequence: Synthetic oligonucleotide
  Sense strand starting at position 3745 of SEQ ID NO: 1560327
ggcguuuggauugagacuu

SEQ ID NO: 1592468 - RNA, 19 nt, Artificial Sequence
  Description of Artificial Sequence: Synthetic oligonucleotide
  Antisense strand to SEQ ID NO: 1592467
aagucucaauccaaacgcc

SEQ ID NO: 1592469 - RNA, 19 nt, Artificial Sequence
  Description of Artificial Sequence: Synthetic oligonucleotide
  Sense strand starting at position 3753 of SEQ ID NO: 1560327
gauugagacuuggagguca

SEQ ID NO: 1592470 - RNA, 19 nt, Artificial Sequence
  Description of Artificial Sequence: Synthetic oligonucleotide
  Antisense strand to SEQ ID NO: 1592469
ugaccuccaagucucaauc

SEQ ID NO: 1592471 - RNA, 19 nt, Artificial Sequence
  Description of Artificial Sequence: Synthetic oligonucleotide
  Sense strand starting at position 3953 of SEQ ID NO: 1560327
ugaaaugcccucugacauc

SEQ ID NO: 1592472 - RNA, 19 nt, Artificial Sequence
  Description of Artificial Sequence: Synthetic oligonucleotide
  Antisense strand to SEQ ID NO: 1592471
gaugucagagggcauuuca

SEQ ID NO: 1592473 - RNA, 19 nt, Artificial Sequence
  Description of Artificial Sequence: Synthetic oligonucleotide
  Sense strand starting at position 167 of SEQ ID NO: 1560328
ugucuucugucaccugaca

SEQ ID NO: 1592474 - RNA, 19 nt, Artificial Sequence
  Description of Artificial Sequence: Synthetic oligonucleotide
  Antisense strand to SEQ ID NO: 1592473
ugucaggugacagaagaca

SEQ ID NO: 1592475 - RNA, 19 nt, Artificial Sequence
  Description of Artificial Sequence: Synthetic oligonucleotide
  Sense strand starting at position 226 of SEQ ID NO: 1560328
agcaauugaucagaagaau

SEQ ID NO: 1592476 - RNA, 19 nt, Artificial Sequence
  Description of Artificial Sequence: Synthetic oligonucleotide
  Antisense strand to SEQ ID NO: 1592475
auucuucugaucaauugcu

SEQ ID NO: 1592477 - RNA, 19 nt, Artificial Sequence
  Description of Artificial Sequence: Synthetic oligonucleotide
  Sense strand starting at position 308 of SEQ ID NO: 1560328
uugcaauucuggccggaaa

SEQ ID NO: 1592478 - RNA, 19 nt, Artificial Sequence
  Description of Artificial Sequence: Synthetic oligonucleotide
  Antisense strand to SEQ ID NO: 1592477
uuuccggccagaauugcaa

SEQ ID NO: 1592479 - RNA, 19 nt, Artificial Sequence
  Description of Artificial Sequence: Synthetic oligonucleotide
  Sense strand starting at position 309 of SEQ ID NO: 1560328
ugcaauucuggccggaaac

SEQ ID NO: 1592480 - RNA, 19 nt, Artificial Sequence
  Description of Artificial Sequence: Synthetic oligonucleotide
  Antisense strand to SEQ ID NO: 1592479
guuuccggccagaauugca

SEQ ID NO: 1592481 - RNA, 19 nt, Artificial Sequence
  Description of Artificial Sequence: Synthetic oligonucleotide
  Sense strand starting at position 368 of SEQ ID NO: 1560328
ccuuuagacuucccagugu

SEQ ID NO: 1592482 - RNA, 19 nt, Artificial Sequence
  Description of Artificial Sequence: Synthetic oligonucleotide
  Antisense strand to SEQ ID NO: 1592481
acacugggaagucuaaagg

SEQ ID NO: 1592483 - RNA, 19 nt, Artificial Sequence
  Description of Artificial Sequence: Synthetic oligonucleotide
  Sense strand starting at position 487 of SEQ ID NO: 1560328
gcgagugccuccuuaaaug

SEQ ID NO: 1592484 - RNA, 19 nt, Artificial Sequence
  Description of Artificial Sequence: Synthetic oligonucleotide
  Antisense strand to SEQ ID NO: 1592483
cauuuaaggaggcacucgc

SEQ ID NO: 1592485 - RNA, 19 nt, Artificial Sequence
  Description of Artificial Sequence: Synthetic oligonucleotide
  Sense strand starting at position 980 of SEQ ID NO: 1560328
cuccauccucaauguguaa

SEQ ID NO: 1592486 - RNA, 19 nt, Artificial Sequence
  Description of Artificial Sequence: Synthetic oligonucleotide
  Antisense strand to SEQ ID NO: 1592485
uuacacauugaggauggag

SEQ ID NO: 1592487 - RNA, 19 nt, Artificial Sequence
  Description of Artificial Sequence: Synthetic oligonucleotide
  Sense strand starting at position 1095 of SEQ ID NO: 1560328
guggguauucacugggaga

SEQ ID NO: 1592488 - RNA, 19 nt, Artificial Sequence
  Description of Artificial Sequence: Synthetic oligonucleotide
  Antisense strand to SEQ ID NO: 1592487
ucucccagugaauacccac

SEQ ID NO: 1592489 - RNA, 19 nt, Artificial Sequence
  Description of Artificial Sequence: Synthetic oligonucleotide
  Sense strand starting at position 1098 of SEQ ID NO: 1560328
gguauucacugggagagag

SEQ ID NO: 1592490 - RNA, 19 nt, Artificial Sequence
  Description of Artificial Sequence: Synthetic oligonucleotide
  Antisense strand to SEQ ID NO: 1592489
cucucucccagugaauacc

SEQ ID NO: 1592491 - RNA, 19 nt, Artificial Sequence
  Description of Artificial Sequence: Synthetic oligonucleotide
  Sense strand starting at position 1763 of SEQ ID NO: 1560328
ccggaucucucccuauuaa

SEQ ID NO: 1592492 - RNA, 19 nt, Artificial Sequence
  Description of Artificial Sequence: Synthetic oligonucleotide
  Antisense strand to SEQ ID NO: 1592491
uuaauagggagagauccgg

SEQ ID NO: 1592493 - RNA, 19 nt, Artificial Sequence
  Description of Artificial Sequence: Synthetic oligonucleotide
  Sense strand starting at position 1764 of SEQ ID NO: 1560328
cggaucucucccuauuaag

SEQ ID NO: 1592494 - RNA, 19 nt, Artificial Sequence
  Description of Artificial Sequence: Synthetic oligonucleotide
  Antisense strand to SEQ ID NO: 1592493
cuuaauagggagagauccg

SEQ ID NO: 1592495 - RNA, 19 nt, Artificial Sequence
  Description of Artificial Sequence: Synthetic oligonucleotide
  Sense strand starting at position 2207 of SEQ ID NO: 1560328
cagacauacucauguagga

SEQ ID NO: 1592496 - RNA, 19 nt, Artificial Sequence
  Description of Artificial Sequence: Synthetic oligonucleotide
  Antisense strand to SEQ ID NO: 1592495
uccuacaugaguaugucug

SEQ ID NO: 1592497 - RNA, 19 nt, Artificial Sequence
  Description of Artificial Sequence: Synthetic oligonucleotide
  Sense strand starting at position 2364 of SEQ ID NO: 1560328
ucgaucucagcuuacuaca

SEQ ID NO: 1592498 - RNA, 19 nt, Artificial Sequence
  Description of Artificial Sequence: Synthetic oligonucleotide
  Antisense strand to SEQ ID NO: 1592497
uguaguaagcugagaucga

SEQ ID NO: 1592499 - RNA, 19 nt, Artificial Sequence
  Description of Artificial Sequence: Synthetic oligonucleotide
  Sense strand starting at position 2704 of SEQ ID NO: 1560328
guaggauagucaugguuag

SEQ ID NO: 1592500 - RNA, 19 nt, Artificial Sequence
  Description of Artificial Sequence: Synthetic oligonucleotide
  Antisense strand to SEQ ID NO: 1592499
cuaaccaugacuauccuac

SEQ ID NO: 1592501 - RNA, 19 nt, Artificial Sequence
  Description of Artificial Sequence: Synthetic oligonucleotide
  Sense strand starting at position 2705 of SEQ ID NO: 1560328
uaggauagucaugguuaga

SEQ ID NO: 1592502 - RNA, 19 nt, Artificial Sequence
  Description of Artificial Sequence: Synthetic oligonucleotide
  Antisense strand to SEQ ID NO: 1592501
ucuaaccaugacuauccua

SEQ ID NO: 1592503 - RNA, 19 nt, Artificial Sequence
  Description of Artificial Sequence: Synthetic oligonucleotide
  Sense strand starting at position 2835 of SEQ ID NO: 1560328
ucgguuccaggucauuaau

SEQ ID NO: 1592504 - RNA, 19 nt, Artificial Sequence
  Description of Artificial Sequence: Synthetic oligonucleotide
  Antisense strand to SEQ ID NO: 1592503
auuaaugaccuggaaccga

SEQ ID NO: 1592505 - RNA, 19 nt, Artificial Sequence
  Description of Artificial Sequence: Synthetic oligonucleotide
  Sense strand starting at position 2837 of SEQ ID NO: 1560328
gguuccaggucauuaauau

SEQ ID NO: 1592506 - RNA, 19 nt, Artificial Sequence
  Description of Artificial Sequence: Synthetic oligonucleotide
  Antisense strand to SEQ ID NO: 1592505
auauuaaugaccuggaacc

SEQ ID NO: 1592507 - RNA, 19 nt, Artificial Sequence
  Description of Artificial Sequence: Synthetic oligonucleotide
  Sense strand starting at position 2838 of SEQ ID NO: 1560328
guuccaggucauuaauauc

SEQ ID NO: 1592508 - RNA, 19 nt, Artificial Sequence
  Description of Artificial Sequence: Synthetic oligonucleotide
  Antisense strand to SEQ ID NO: 1592507
gauauuaaugaccuggaac

SEQ ID NO: 1592509 - RNA, 19 nt, Artificial Sequence
  Description of Artificial Sequence: Synthetic oligonucleotide
  Sense strand starting at position 2846 of SEQ ID NO: 1560328
ucauuaauaucuugaggga

SEQ ID NO: 1592510 - RNA, 19 nt, Artificial Sequence
  Description of Artificial Sequence: Synthetic oligonucleotide
  Antisense strand to SEQ ID NO: 1592509
ucccucaagauauuaauga

SEQ ID NO: 1592511 - RNA, 19 nt, Artificial Sequence
  Description of Artificial Sequence: Synthetic oligonucleotide
  Sense strand starting at position 2849 of SEQ ID NO: 1560328
uuaauaucuugagggacuu

SEQ ID NO: 1592512 - RNA, 19 nt, Artificial Sequence
  Description of Artificial Sequence: Synthetic oligonucleotide
  Antisense strand to SEQ ID NO: 1592511
aagucccucaagauauuaa

SEQ ID NO: 1592513 - RNA, 19 nt, Artificial Sequence
  Description of Artificial Sequence: Synthetic oligonucleotide
  Sense strand starting at position 2876 of SEQ ID NO: 1560328
gugccugguuaccagaaca

SEQ ID NO: 1592514 - RNA, 19 nt, Artificial Sequence
  Description of Artificial Sequence: Synthetic oligonucleotide
  Antisense strand to SEQ ID NO: 1592513
uguucugguaaccaggcac

SEQ ID NO: 1592515 - RNA, 19 nt, Artificial Sequence
  Description of Artificial Sequence: Synthetic oligonucleotide
  Sense strand starting at position 2919 of SEQ ID NO: 1560328
ccagaaauugcauaagcau

SEQ ID NO: 1592516 - RNA, 19 nt, Artificial Sequence
  Description of Artificial Sequence: Synthetic oligonucleotide
  Antisense strand to SEQ ID NO: 1592515
augcuuaugcaauuucugg

SEQ ID NO: 1592517 - RNA, 19 nt, Artificial Sequence
  Description of Artificial Sequence: Synthetic oligonucleotide
  Sense strand starting at position 2942 of SEQ ID NO: 1560328
ucaggaauguuucucucuu

SEQ ID NO: 1592518 - RNA, 19 nt, Artificial Sequence
  Description of Artificial Sequence: Synthetic oligonucleotide
  Antisense strand to SEQ ID NO: 1592517
aagagagaaacauuccuga

SEQ ID NO: 1592519 - RNA, 19 nt, Artificial Sequence
  Description of Artificial Sequence: Synthetic oligonucleotide
  Sense strand starting at position 2950 of SEQ ID NO: 1560328
guuucucucuuuccaggaa

SEQ ID NO: 1592520 - RNA, 19 nt, Artificial Sequence
  Description of Artificial Sequence: Synthetic oligonucleotide
  Antisense strand to SEQ ID NO: 1592519
uuccuggaaagagagaaac

SEQ ID NO: 1592521 - RNA, 19 nt, Artificial Sequence
  Description of Artificial Sequence: Synthetic oligonucleotide
  Sense strand starting at position 2953 of SEQ ID NO: 1560328
ucucucuuuccaggaagaa

SEQ ID NO: 1592522 - RNA, 19 nt, Artificial Sequence
  Description of Artificial Sequence: Synthetic oligonucleotide
  Antisense strand to SEQ ID NO: 1592521
uucuuccuggaaagagaga

SEQ ID NO: 1592523 - RNA, 19 nt, Artificial Sequence
  Description of Artificial Sequence: Synthetic oligonucleotide
  Sense strand starting at position 3130 of SEQ ID NO: 1560328
gucagaaagucugcucuuu

SEQ ID NO: 1592524 - RNA, 19 nt, Artificial Sequence
  Description of Artificial Sequence: Synthetic oligonucleotide
  Antisense strand to SEQ ID NO: 1592523
aaagagcagacuuucugac

SEQ ID NO: 1592525 - RNA, 19 nt, Artificial Sequence
  Description of Artificial Sequence: Synthetic oligonucleotide
  Sense strand starting at position 3132 of SEQ ID NO: 1560328
cagaaagucugcucuuugu

SEQ ID NO: 1592526 - RNA, 19 nt, Artificial Sequence
  Description of Artificial Sequence: Synthetic oligonucleotide
  Antisense strand to SEQ ID NO: 1592525
acaaagagcagacuuucug

SEQ ID NO: 1592527 - RNA, 19 nt, Artificial Sequence
  Description of Artificial Sequence: Synthetic oligonucleotide
  Sense strand starting at position 3142 of SEQ ID NO: 1560328
gcucuuuguaaucguagca

SEQ ID NO: 1592528 - RNA, 19 nt, Artificial Sequence
  Description of Artificial Sequence: Synthetic oligonucleotide
  Antisense strand to SEQ ID NO: 1592527
ugcuacgauuacaaagagc

SEQ ID NO: 1592529 - RNA, 19 nt, Artificial Sequence
  Description of Artificial Sequence: Synthetic oligonucleotide
  Sense strand starting at position 3154 of SEQ ID NO: 1560328
cguagcaguagugagaaua

SEQ ID NO: 1592530 - RNA, 19 nt, Artificial Sequence
  Description of Artificial Sequence: Synthetic oligonucleotide
  Antisense strand to SEQ ID NO: 1592529
uauucucacuacugcuacg

SEQ ID NO: 1592531 - RNA, 19 nt, Artificial Sequence
  Description of Artificial Sequence: Synthetic oligonucleotide
  Sense strand starting at position 3180 of SEQ ID NO: 1560328
ccacucucaucuggaggau

SEQ ID NO: 1592532 - RNA, 19 nt, Artificial Sequence
  Description of Artificial Sequence: Synthetic oligonucleotide
  Antisense strand to SEQ ID NO: 1592531
auccuccagaugagagugg

SEQ ID NO: 1592533 - RNA, 19 nt, Artificial Sequence
  Description of Artificial Sequence: Synthetic oligonucleotide
  Sense strand starting at position 3183 of SEQ ID NO: 1560328
cucucaucuggaggaucua

SEQ ID NO: 1592534 - RNA, 19 nt, Artificial Sequence
  Description of Artificial Sequence: Synthetic oligonucleotide
  Antisense strand to SEQ ID NO: 1592533
uagauccuccagaugagag

SEQ ID NO: 1592535 - RNA, 19 nt, Artificial Sequence
  Description of Artificial Sequence: Synthetic oligonucleotide
  Sense strand starting at position 3199 of SEQ ID NO: 1560328
cuaugucacuuugugacau

SEQ ID NO: 1592536 - RNA, 19 nt, Artificial Sequence
  Description of Artificial Sequence: Synthetic oligonucleotide
  Antisense strand to SEQ ID NO: 1592535
augucacaaagugacauag

SEQ ID NO: 1592537 - RNA, 19 nt, Artificial Sequence
  Description of Artificial Sequence: Synthetic oligonucleotide
  Sense strand starting at position 3203 of SEQ ID NO: 1560328
gucacuuugugacaucaga

SEQ ID NO: 1592538 - RNA, 19 nt, Artificial Sequence
  Description of Artificial Sequence: Synthetic oligonucleotide
  Antisense strand to SEQ ID NO: 1592537
ucugaugucacaaagugac

SEQ ID NO: 1592539 - RNA, 19 nt, Artificial Sequence
  Description of Artificial Sequence: Synthetic oligonucleotide
  Sense strand starting at position 3398 of SEQ ID NO: 1560328
gaguuauccugucccacag

SEQ ID NO: 1592540 - RNA, 19 nt, Artificial Sequence
  Description of Artificial Sequence: Synthetic oligonucleotide
  Antisense strand to SEQ ID NO: 1592539
cugugggacaggauaacuc

SEQ ID NO: 1592541 - RNA, 19 nt, Artificial Sequence
  Description of Artificial Sequence: Synthetic oligonucleotide
  Sense strand starting at position 3429 of SEQ ID NO: 1560328
gguuuccugcaacaacauu

SEQ ID NO: 1592542 - RNA, 19 nt, Artificial Sequence
  Description of Artificial Sequence: Synthetic oligonucleotide
  Antisense strand to SEQ ID NO: 1592541
aauguuguugcaggaaacc

SEQ ID NO: 1592543 - RNA, 19 nt, Artificial Sequence
  Description of Artificial Sequence: Synthetic oligonucleotide
  Sense strand starting at position 3447 of SEQ ID NO: 1560328
uuaucuuaauucuggaguu

SEQ ID NO: 1592544 - RNA, 19 nt, Artificial Sequence
  Description of Artificial Sequence: Synthetic oligonucleotide
  Antisense strand to SEQ ID NO: 1592543
aacuccagaauuaagauaa

SEQ ID NO: 1592545 - RNA, 19 nt, Artificial Sequence
  Description of Artificial Sequence: Synthetic oligonucleotide
  Sense strand starting at position 3449 of SEQ ID NO: 1560328
aucuuaauucuggaguuuc

SEQ ID NO: 1592546 - RNA, 19 nt, Artificial Sequence
  Description of Artificial Sequence: Synthetic oligonucleotide
  Antisense strand to SEQ ID NO: 1592545
gaaacuccagaauuaagau

SEQ ID NO: 1592547 - RNA, 19 nt, Artificial Sequence
  Description of Artificial Sequence: Synthetic oligonucleotide
  Sense strand starting at position 3470 of SEQ ID NO: 1560328
gggaauggucccuggagcu

SEQ ID NO: 1592548 - RNA, 19 nt, Artificial Sequence
  Description of Artificial Sequence: Synthetic oligonucleotide
  Antisense strand to SEQ ID NO: 1592547
agcuccagggaccauuccc

SEQ ID NO: 1592549 - RNA, 19 nt, Artificial Sequence
  Description of Artificial Sequence: Synthetic oligonucleotide
  Sense strand starting at position 3505 of SEQ ID NO: 1560328
cugugugaaugccuuuaca

SEQ ID NO: 1592550 - RNA, 19 nt, Artificial Sequence
  Description of Artificial Sequence: Synthetic oligonucleotide
  Antisense strand to SEQ ID NO: 1592549
uguaaaggcauucacacag

SEQ ID NO: 1592551 - RNA, 19 nt, Artificial Sequence
  Description of Artificial Sequence: Synthetic oligonucleotide
  Sense strand starting at position 3508 of SEQ ID NO: 1560328
ugugaaugccuuuacacag

SEQ ID NO: 1592552 - RNA, 19 nt, Artificial Sequence
  Description of Artificial Sequence: Synthetic oligonucleotide
  Antisense strand to SEQ ID NO: 1592551
cuguguaaaggcauucaca

SEQ ID NO: 1592553 - RNA, 19 nt, Artificial Sequence
  Description of Artificial Sequence: Synthetic oligonucleotide
  Sense strand starting at position 458 of SEQ ID NO: 1560329
ucgggcucugugaggagua

SEQ ID NO: 1592554 - RNA, 19 nt, Artificial Sequence
  Description of Artificial Sequence: Synthetic oligonucleotide
  Antisense strand to SEQ ID NO: 1592553
uacuccucacagagcccga

SEQ ID NO: 1592555 - RNA, 19 nt, Artificial Sequence
  Description of Artificial Sequence: Synthetic oligonucleotide
  Sense strand starting at position 459 of SEQ ID NO: 1560329
cgggcucugugaggaguaa

SEQ ID NO: 1592556 - RNA, 19 nt, Artificial Sequence
  Description of Artificial Sequence: Synthetic oligonucleotide
  Antisense strand to SEQ ID NO: 1592555
uuacuccucacagagcccg

SEQ ID NO: 1592557 - RNA, 19 nt, Artificial Sequence
  Description of Artificial Sequence: Synthetic oligonucleotide
  Sense strand starting at position 524 of SEQ ID NO: 1560329
ggucuaagcucucaacccu

SEQ ID NO: 1592558 - RNA, 19 nt, Artificial Sequence
  Description of Artificial Sequence: Synthetic oligonucleotide
  Antisense strand to SEQ ID NO: 1592557
aggguugagagcuuagacc

SEQ ID NO: 1592559 - RNA, 19 nt, Artificial Sequence
  Description of Artificial Sequence: Synthetic oligonucleotide
  Sense strand starting at position 598 of SEQ ID NO: 1560329
uguucucaguccucaaaga

SEQ ID NO: 1592560 - RNA, 19 nt, Artificial Sequence
  Description of Artificial Sequence: Synthetic oligonucleotide
  Antisense strand to SEQ ID NO: 1592559
ucuuugaggacugagaaca

SEQ ID NO: 1592561 - RNA, 19 nt, Artificial Sequence
  Description of Artificial Sequence: Synthetic oligonucleotide
  Sense strand starting at position 599 of SEQ ID NO: 1560329
guucucaguccucaaagau

SEQ ID NO: 1592562 - RNA, 19 nt, Artificial Sequence
  Description of Artificial Sequence: Synthetic oligonucleotide
  Antisense strand to SEQ ID NO: 1592561
aucuuugaggacugagaac

SEQ ID NO: 1592563 - RNA, 19 nt, Artificial Sequence
  Description of Artificial Sequence: Synthetic oligonucleotide
  Sense strand starting at position 763 of SEQ ID NO: 1560329
ugagcuuguaccugaguuu

SEQ ID NO: 1592564 - RNA, 19 nt, Artificial Sequence
  Description of Artificial Sequence: Synthetic oligonucleotide
  Antisense strand to SEQ ID NO: 1592563
aaacucagguacaagcuca

SEQ ID NO: 1592565 - RNA, 19 nt, Artificial Sequence
  Description of Artificial Sequence: Synthetic oligonucleotide
  Sense strand starting at position 764 of SEQ ID NO: 1560329
gagcuuguaccugaguuua

SEQ ID NO: 1592566 - RNA, 19 nt, Artificial Sequence
  Description of Artificial Sequence: Synthetic oligonucleotide
  Antisense strand to SEQ ID NO: 1592565
uaaacucagguacaagcuc

SEQ ID NO: 1592567 - RNA, 19 nt, Artificial Sequence
  Description of Artificial Sequence: Synthetic oligonucleotide
  Sense strand starting at position 784 of SEQ ID NO: 1560329
ggaggacugugagcaauga

SEQ ID NO: 1592568 - RNA, 19 nt, Artificial Sequence
  Description of Artificial Sequence: Synthetic oligonucleotide
  Antisense strand to SEQ ID NO: 1592567
ucauugcucacaguccucc

SEQ ID NO: 1592569 - RNA, 19 nt, Artificial Sequence
  Description of Artificial Sequence: Synthetic oligonucleotide
  Sense strand starting at position 788 of SEQ ID NO: 1560329
gacugugagcaaugaaaga

SEQ ID NO: 1592570 - RNA, 19 nt, Artificial Sequence
  Description of Artificial Sequence: Synthetic oligonucleotide
  Antisense strand to SEQ ID NO: 1592569
ucuuucauugcucacaguc

SEQ ID NO: 1592571 - RNA, 19 nt, Artificial Sequence
  Description of Artificial Sequence: Synthetic oligonucleotide
  Sense strand starting at position 830 of SEQ ID NO: 1560329
agucucuacuugucaggga

SEQ ID NO: 1592572 - RNA, 19 nt, Artificial Sequence
  Description of Artificial Sequence: Synthetic oligonucleotide
  Antisense strand to SEQ ID NO: 1592571
ucccugacaaguagagacu

SEQ ID NO: 1592573 - RNA, 19 nt, Artificial Sequence
  Description of Artificial Sequence: Synthetic oligonucleotide
  Sense strand starting at position 1117 of SEQ ID NO: 1560329
gcuccuucugcaggcgaua

SEQ ID NO: 1592574 - RNA, 19 nt, Artificial Sequence
  Description of Artificial Sequence: Synthetic oligonucleotide
  Antisense strand to SEQ ID NO: 1592573
uaucgccugcagaaggagc

SEQ ID NO: 1592575 - RNA, 19 nt, Artificial Sequence
  Description of Artificial Sequence: Synthetic oligonucleotide
  Sense strand starting at position 1297 of SEQ ID NO: 1560329
ugaauguucugggucggga

SEQ ID NO: 1592576 - RNA, 19 nt, Artificial Sequence
  Description of Artificial Sequence: Synthetic oligonucleotide
  Antisense strand to SEQ ID NO: 1592575
ucccgacccagaacauuca

SEQ ID NO: 1592577 - RNA, 19 nt, Artificial Sequence
  Description of Artificial Sequence: Synthetic oligonucleotide
  Sense strand starting at position 1299 of SEQ ID NO: 1560329
aauguucugggucgggaaa

SEQ ID NO: 1592578 - RNA, 19 nt, Artificial Sequence
  Description of Artificial Sequence: Synthetic oligonucleotide
  Antisense strand to SEQ ID NO: 1592577
uuucccgacccagaacauu

SEQ ID NO: 1592579 - RNA, 19 nt, Artificial Sequence
  Description of Artificial Sequence: Synthetic oligonucleotide
  Sense strand starting at position 1467 of SEQ ID NO: 1560329
gcucucuuccucuguuaga

SEQ ID NO: 1592580 - RNA, 19 nt, Artificial Sequence
  Description of Artificial Sequence: Synthetic oligonucleotide
  Antisense strand to SEQ ID NO: 1592579
ucuaacagaggaagagagc

SEQ ID NO: 1592581 - RNA, 19 nt, Artificial Sequence
  Description of Artificial Sequence: Synthetic oligonucleotide
  Sense strand starting at position 1476 of SEQ ID NO: 1560329
cucuguuagacccaggagu

SEQ ID NO: 1592582 - RNA, 19 nt, Artificial Sequence
  Description of Artificial Sequence: Synthetic oligonucleotide
  Antisense strand to SEQ ID NO: 1592581
acuccugggucuaacagag

SEQ ID NO: 1592583 - RNA, 19 nt, Artificial Sequence
  Description of Artificial Sequence: Synthetic oligonucleotide
  Sense strand starting at position 1503 of SEQ ID NO: 1560329
ccggcuucuugggagucua

SEQ ID NO: 1592584 - RNA, 19 nt, Artificial Sequence
  Description of Artificial Sequence: Synthetic oligonucleotide
  Antisense strand to SEQ ID NO: 1592583
uagacucccaagaagccgg

SEQ ID NO: 1592585 - RNA, 19 nt, Artificial Sequence
  Description of Artificial Sequence: Synthetic oligonucleotide
  Sense strand starting at position 2049 of SEQ ID NO: 1560329
cgucacaaucggcagagua

SEQ ID NO: 1592586 - RNA, 19 nt, Artificial Sequence
  Description of Artificial Sequence: Synthetic oligonucleotide
  Antisense strand to SEQ ID NO: 1592585
uacucugccgauugugacg

SEQ ID NO: 1592587 - RNA, 19 nt, Artificial Sequence
  Description of Artificial Sequence: Synthetic oligonucleotide
  Sense strand starting at position 2153 of SEQ ID NO: 1560329
gagugccaaucauagcaau

SEQ ID NO: 1592588 - RNA, 19 nt, Artificial Sequence
  Description of Artificial Sequence: Synthetic oligonucleotide
  Antisense strand to SEQ ID NO: 1592587
auugcuaugauuggcacuc

SEQ ID NO: 1592589 - RNA, 19 nt, Artificial Sequence
  Description of Artificial Sequence: Synthetic oligonucleotide
  Sense strand starting at position 2205 of SEQ ID NO: 1560329
agcaauaacggccaacauu

SEQ ID NO: 1592590 - RNA, 19 nt, Artificial Sequence
  Description of Artificial Sequence: Synthetic oligonucleotide
  Antisense strand to SEQ ID NO: 1592589
aauguuggccguuauugcu

SEQ ID NO: 1592591 - RNA, 19 nt, Artificial Sequence
  Description of Artificial Sequence: Synthetic oligonucleotide
  Sense strand starting at position 2228 of SEQ ID NO: 1560329
gagggcucauugugugaaa

SEQ ID NO: 1592592 - RNA, 19 nt, Artificial Sequence
  Description of Artificial Sequence: Synthetic oligonucleotide
  Antisense strand to SEQ ID NO: 1592591
uuucacacaaugagcccuc

SEQ ID NO: 1592593 - RNA, 19 nt, Artificial Sequence
  Description of Artificial Sequence: Synthetic oligonucleotide
  Sense strand starting at position 2231 of SEQ ID NO: 1560329
ggcucauugugugaaacca

SEQ ID NO: 1592594 - RNA, 19 nt, Artificial Sequence
  Description of Artificial Sequence: Synthetic oligonucleotide
  Antisense strand to SEQ ID NO: 1592593
ugguuucacacaaugagcc

SEQ ID NO: 1592595 - RNA, 19 nt, Artificial Sequence
  Description of Artificial Sequence: Synthetic oligonucleotide
  Sense strand starting at position 2268 of SEQ ID NO: 1560329
auugaauccuucuaugagg

SEQ ID NO: 1592596 - RNA, 19 nt, Artificial Sequence
  Description of Artificial Sequence: Synthetic oligonucleotide
  Antisense strand to SEQ ID NO: 1592595
ccucauagaaggauucaau

SEQ ID NO: 1592597 - RNA, 19 nt, Artificial Sequence
  Description of Artificial Sequence: Synthetic oligonucleotide
  Sense strand starting at position 2270 of SEQ ID NO: 1560329
ugaauccuucuaugaggca

SEQ ID NO: 1592598 - RNA, 19 nt, Artificial Sequence
  Description of Artificial Sequence: Synthetic oligonucleotide
  Antisense strand to SEQ ID NO: 1592597
ugccucauagaaggauuca

SEQ ID NO: 1592599 - RNA, 19 nt, Artificial Sequence
  Description of Artificial Sequence: Synthetic oligonucleotide
  Sense strand starting at position 2368 of SEQ ID NO: 1560329
ugcccuuccgcgcuguaau

SEQ ID NO: 1592600 - RNA, 19 nt, Artificial Sequence
  Description of Artificial Sequence: Synthetic oligonucleotide
  Antisense strand to SEQ ID NO: 1592599
auuacagcgcggaagggca

SEQ ID NO: 1592601 - RNA, 19 nt, Artificial Sequence
  Description of Artificial Sequence: Synthetic oligonucleotide
  Sense strand starting at position 2369 of SEQ ID NO: 1560329
gcccuuccgcgcuguaaua

SEQ ID NO: 1592602 - RNA, 19 nt, Artificial Sequence
  Description of Artificial Sequence: Synthetic oligonucleotide
  Antisense strand to SEQ ID NO: 1592601
uauuacagcgcggaagggc

SEQ ID NO: 1592603 - RNA, 19 nt, Artificial Sequence
  Description of Artificial Sequence: Synthetic oligonucleotide
  Sense strand starting at position 2381 of SEQ ID NO: 1560329
uguaauaguuuaggacaau

SEQ ID NO: 1592604 - RNA, 19 nt, Artificial Sequence
  Description of Artificial Sequence: Synthetic oligonucleotide
  Antisense strand to SEQ ID NO: 1592603
auuguccuaaacuauuaca

SEQ ID NO: 1592605 - RNA, 19 nt, Artificial Sequence
  Description of Artificial Sequence: Synthetic oligonucleotide
  Sense strand starting at position 2382 of SEQ ID NO: 1560329
guaauaguuuaggacaauu

SEQ ID NO: 1592606 - RNA, 19 nt, Artificial Sequence
  Description of Artificial Sequence: Synthetic oligonucleotide
  Antisense strand to SEQ ID NO: 1592605
aauuguccuaaacuauuac

SEQ ID NO: 1592607 - RNA, 19 nt, Artificial Sequence
  Description of Artificial Sequence: Synthetic oligonucleotide
  Sense strand starting at position 2512 of SEQ ID NO: 1560329
auguuauaaugucuguaac

SEQ ID NO: 1592608 - RNA, 19 nt, Artificial Sequence
  Description of Artificial Sequence: Synthetic oligonucleotide
  Antisense strand to SEQ ID NO: 1592607
guuacagacauuauaacau

SEQ ID NO: 1592609 - RNA, 19 nt, Artificial Sequence
  Description of Artificial Sequence: Synthetic oligonucleotide
  Sense strand starting at position 2513 of SEQ ID NO: 1560329
uguuauaaugucuguaacu

SEQ ID NO: 1592610 - RNA, 19 nt, Artificial Sequence
  Description of Artificial Sequence: Synthetic oligonucleotide
  Antisense strand to SEQ ID NO: 1592609
aguuacagacauuauaaca

SEQ ID NO: 1592611 - RNA, 19 nt, Artificial Sequence
  Description of Artificial Sequence: Synthetic oligonucleotide
  Sense strand starting at position 2843 of SEQ ID NO: 1560329
gucuguaacuugcucaaau

SEQ ID NO: 1592612 - RNA, 19 nt, Artificial Sequence
  Description of Artificial Sequence: Synthetic oligonucleotide
  Antisense strand to SEQ ID NO: 1592611
auuugagcaaguuacagac

SEQ ID NO: 1592613 - RNA, 19 nt, Artificial Sequence
  Description of Artificial Sequence: Synthetic oligonucleotide
  Sense strand starting at position 2967 of SEQ ID NO: 1560329
ucaauaacuggguguccua

SEQ ID NO: 1592614 - RNA, 19 nt, Artificial Sequence
  Description of Artificial Sequence: Synthetic oligonucleotide
  Antisense strand to SEQ ID NO: 1592613
uaggacacccaguuauuga

SEQ ID NO: 1592615 - RNA, 19 nt, Artificial Sequence
  Description of Artificial Sequence: Synthetic oligonucleotide
  Sense strand starting at position 2970 of SEQ ID NO: 1560329
auaacuggguguccuauau

SEQ ID NO: 1592616 - RNA, 19 nt, Artificial Sequence
  Description of Artificial Sequence: Synthetic oligonucleotide
  Antisense strand to SEQ ID NO: 1592615
auauaggacacccaguuau

SEQ ID NO: 1592617 - RNA, 19 nt, Artificial Sequence
  Description of Artificial Sequence: Synthetic oligonucleotide
  Sense strand starting at position 3379 of SEQ ID NO: 1560329
gccuuagugcuguaauuag

SEQ ID NO: 1592618 - RNA, 19 nt, Artificial Sequence
  Description of Artificial Sequence: Synthetic oligonucleotide
  Antisense strand to SEQ ID NO: 1592617
cuaauuacagcacuaaggc

SEQ ID NO: 1592619 - RNA, 19 nt, Artificial Sequence
  Description of Artificial Sequence: Synthetic oligonucleotide
  Sense strand starting at position 3501 of SEQ ID NO: 1560329
agcccagccucuugaucau

SEQ ID NO: 1592620 - RNA, 19 nt, Artificial Sequence
  Description of Artificial Sequence: Synthetic oligonucleotide
  Antisense strand to SEQ ID NO: 1592619
augaucaagaggcugggcu

SEQ ID NO: 1592621 - RNA, 19 nt, Artificial Sequence
  Description of Artificial Sequence: Synthetic oligonucleotide
  Sense strand starting at position 3830 of SEQ ID NO: 1560329
ccuggucucuucugacauc

SEQ ID NO: 1592622 - RNA, 19 nt, Artificial Sequence
  Description of Artificial Sequence: Synthetic oligonucleotide
  Antisense strand to SEQ ID NO: 1592621
gaugucagaagagaccagg

SEQ ID NO: 1592623 - RNA, 19 nt, Artificial Sequence
  Description of Artificial Sequence: Synthetic oligonucleotide
  Sense strand starting at position 3859 of SEQ ID NO: 1560329
cccaucugucuuugagugu

SEQ ID NO: 1592624 - RNA, 19 nt, Artificial Sequence
  Description of Artificial Sequence: Synthetic oligonucleotide
  Antisense strand to SEQ ID NO: 1592623
acacucaaagacagauggg

SEQ ID NO: 1592625 - RNA, 19 nt, Artificial Sequence
  Description of Artificial Sequence: Synthetic oligonucleotide
  Sense strand starting at position 3860 of SEQ ID NO: 1560329
ccaucugucuuugaguguu

SEQ ID NO: 1592626 - RNA, 19 nt, Artificial Sequence
  Description of Artificial Sequence: Synthetic oligonucleotide
  Antisense strand to SEQ ID NO: 1592625
aacacucaaagacagaugg

SEQ ID NO: 1592627 - RNA, 19 nt, Artificial Sequence
  Description of Artificial Sequence: Synthetic oligonucleotide
  Sense strand starting at position 3866 of SEQ ID NO: 1560329
gucuuugaguguuccuauc

SEQ ID NO: 1592628 - RNA, 19 nt, Artificial Sequence
  Description of Artificial Sequence: Synthetic oligonucleotide
  Antisense strand to SEQ ID NO: 1592627
gauaggaacacucaaagac

SEQ ID NO: 1592629 - RNA, 19 nt, Artificial Sequence
  Description of Artificial Sequence: Synthetic oligonucleotide
  Sense strand starting at position 3868 of SEQ ID NO: 1560329
cuuugaguguuccuaucuc

SEQ ID NO: 1592630 - RNA, 19 nt, Artificial Sequence
  Description of Artificial Sequence: Synthetic oligonucleotide
  Antisense strand to SEQ ID NO: 1592629
gagauaggaacacucaaag

SEQ ID NO: 1592631 - RNA, 19 nt, Artificial Sequence
  Description of Artificial Sequence: Synthetic oligonucleotide
  Sense strand starting at position 3942 of SEQ ID NO: 1560329
ugcacagucucugaugguu

SEQ ID NO: 1592632 - RNA, 19 nt, Artificial Sequence
  Description of Artificial Sequence: Synthetic oligonucleotide
  Antisense strand to SEQ ID NO: 1592631
aaccaucagagacugugca

SEQ ID NO: 1592633 - RNA, 19 nt, Artificial Sequence
  Description of Artificial Sequence: Synthetic oligonucleotide
  Sense strand starting at position 217 of SEQ ID NO: 1560330
gucggagucucauuacguu

SEQ ID NO: 1592634 - RNA, 19 nt, Artificial Sequence
  Description of Artificial Sequence: Synthetic oligonucleotide
  Antisense strand to SEQ ID NO: 1592633
aacguaaugagacuccgac

SEQ ID NO: 1592635 - RNA, 19 nt, Artificial Sequence
  Description of Artificial Sequence: Synthetic oligonucleotide
  Sense strand starting at position 439 of SEQ ID NO: 1560330
ccugaaagugccugcacau

SEQ ID NO: 1592636 - RNA, 19 nt, Artificial Sequence
  Description of Artificial Sequence: Synthetic oligonucleotide
  Antisense strand to SEQ ID NO: 1592635
augugcaggcacuuucagg

SEQ ID NO: 1592637 - RNA, 19 nt, Artificial Sequence
  Description of Artificial Sequence: Synthetic oligonucleotide
  Sense strand starting at position 875 of SEQ ID NO: 1560330
gggauuaggucccucuugu

SEQ ID NO: 1592638 - RNA, 19 nt, Artificial Sequence
  Description of Artificial Sequence: Synthetic oligonucleotide
  Antisense strand to SEQ ID NO: 1592637
acaagagggaccuaauccc

SEQ ID NO: 1592639 - RNA, 19 nt, Artificial Sequence
  Description of Artificial Sequence: Synthetic oligonucleotide
  Sense strand starting at position 1666 of SEQ ID NO: 1560330
gaugaaaggaggugucugu

SEQ ID NO: 1592640 - RNA, 19 nt, Artificial Sequence
  Description of Artificial Sequence: Synthetic oligonucleotide
  Antisense strand to SEQ ID NO: 1592639
acagacaccuccuuucauc

SEQ ID NO: 1592641 - RNA, 19 nt, Artificial Sequence
  Description of Artificial Sequence: Synthetic oligonucleotide
  Sense strand starting at position 1673 of SEQ ID NO: 1560330
ggaggugucugucccucau

SEQ ID NO: 1592642 - RNA, 19 nt, Artificial Sequence
  Description of Artificial Sequence: Synthetic oligonucleotide
  Antisense strand to SEQ ID NO: 1592641
augagggacagacaccucc

SEQ ID NO: 1592643 - RNA, 19 nt, Artificial Sequence
  Description of Artificial Sequence: Synthetic oligonucleotide
  Sense strand starting at position 2177 of SEQ ID NO: 1560330
guucgagacccuggcgauu

SEQ ID NO: 1592644 - RNA, 19 nt, Artificial Sequence
  Description of Artificial Sequence: Synthetic oligonucleotide
  Antisense strand to SEQ ID NO: 1592643
aaucgccagggucucgaac

SEQ ID NO: 1592645 - RNA, 19 nt, Artificial Sequence
  Description of Artificial Sequence: Synthetic oligonucleotide
  Sense strand starting at position 2245 of SEQ ID NO: 1560330
gacuguugccaggauguga

SEQ ID NO: 1592646 - RNA, 19 nt, Artificial Sequence
  Description of Artificial Sequence: Synthetic oligonucleotide
  Antisense strand to SEQ ID NO: 1592645
ucacauccuggcaacaguc

SEQ ID NO: 1592647 - RNA, 19 nt, Artificial Sequence
  Description of Artificial Sequence: Synthetic oligonucleotide
  Sense strand starting at position 2463 of SEQ ID NO: 1560330
ccauaucagugucugacuu

SEQ ID NO: 1592648 - RNA, 19 nt, Artificial Sequence
  Description of Artificial Sequence: Synthetic oligonucleotide
  Antisense strand to SEQ ID NO: 1592647
aagucagacacugauaugg

SEQ ID NO: 1592649 - RNA, 19 nt, Artificial Sequence
  Description of Artificial Sequence: Synthetic oligonucleotide
  Sense strand starting at position 2523 of SEQ ID NO: 1560330
agcaauuacuuucgacugu

SEQ ID NO: 1592650 - RNA, 19 nt, Artificial Sequence
  Description of Artificial Sequence: Synthetic oligonucleotide
  Antisense strand to SEQ ID NO: 1592649
acagucgaaaguaauugcu

SEQ ID NO: 1592651 - RNA, 19 nt, Artificial Sequence
  Description of Artificial Sequence: Synthetic oligonucleotide
  Sense strand starting at position 2524 of SEQ ID NO: 1560330
gcaauuacuuucgacuguu

SEQ ID NO: 1592652 - RNA, 19 nt, Artificial Sequence
  Description of Artificial Sequence: Synthetic oligonucleotide
  Antisense strand to SEQ ID NO: 1592651
aacagucgaaaguaauugc

SEQ ID NO: 1592653 - RNA, 19 nt, Artificial Sequence
  Description of Artificial Sequence: Synthetic oligonucleotide
  Sense strand starting at position 2527 of SEQ ID NO: 1560330
auuacuuucgacuguuaau

SEQ ID NO: 1592654 - RNA, 19 nt, Artificial Sequence
  Description of Artificial Sequence: Synthetic oligonucleotide
  Antisense strand to SEQ ID NO: 1592653
auuaacagucgaaaguaau

SEQ ID NO: 1592655 - RNA, 19 nt, Artificial Sequence
  Description of Artificial Sequence: Synthetic oligonucleotide
  Sense strand starting at position 2556 of SEQ ID NO: 1560330
ugccaauggccagaagagu

SEQ ID NO: 1592656 - RNA, 19 nt, Artificial Sequence
  Description of Artificial Sequence: Synthetic oligonucleotide
  Antisense strand to SEQ ID NO: 1592655
acucuucuggccauuggca

SEQ ID NO: 1592657 - RNA, 19 nt, Artificial Sequence
  Description of Artificial Sequence: Synthetic oligonucleotide
  Sense strand starting at position 2605 of SEQ ID NO: 1560330
guggcagagugcugggaau

SEQ ID NO: 1592658 - RNA, 19 nt, Artificial Sequence
  Description of Artificial Sequence: Synthetic oligonucleotide
  Antisense strand to SEQ ID NO: 1592657
auucccagcacucugccac

SEQ ID NO: 1592659 - RNA, 19 nt, Artificial Sequence
  Description of Artificial Sequence: Synthetic oligonucleotide
  Sense strand starting at position 2620 of SEQ ID NO: 1560330
gaaucugugcccuggcaga

SEQ ID NO: 1592660 - RNA, 19 nt, Artificial Sequence
  Description of Artificial Sequence: Synthetic oligonucleotide
  Antisense strand to SEQ ID NO: 1592659
ucugccagggcacagauuc

SEQ ID NO: 1592661 - RNA, 19 nt, Artificial Sequence
  Description of Artificial Sequence: Synthetic oligonucleotide
  Sense strand starting at position 2696 of SEQ ID NO: 1560330
aggugagucccaggcacau

SEQ ID NO: 1592662 - RNA, 19 nt, Artificial Sequence
  Description of Artificial Sequence: Synthetic oligonucleotide
  Antisense strand to SEQ ID NO: 1592661
augugccugggacucaccu

SEQ ID NO: 1592663 - RNA, 19 nt, Artificial Sequence
  Description of Artificial Sequence: Synthetic oligonucleotide
  Sense strand starting at position 2804 of SEQ ID NO: 1560330
gcagaucaaugccauguca

SEQ ID NO: 1592664 - RNA, 19 nt, Artificial Sequence
  Description of Artificial Sequence: Synthetic oligonucleotide
  Antisense strand to SEQ ID NO: 1592663
ugacauggcauugaucugc

SEQ ID NO: 1592665 - RNA, 19 nt, Artificial Sequence
  Description of Artificial Sequence: Synthetic oligonucleotide
  Sense strand starting at position 2806 of SEQ ID NO: 1560330
agaucaaugccaugucaaa

SEQ ID NO: 1592666 - RNA, 19 nt, Artificial Sequence
  Description of Artificial Sequence: Synthetic oligonucleotide
  Antisense strand to SEQ ID NO: 1592665
uuugacauggcauugaucu

SEQ ID NO: 1592667 - RNA, 19 nt, Artificial Sequence
  Description of Artificial Sequence: Synthetic oligonucleotide
  Sense strand starting at position 2847 of SEQ ID NO: 1560330
ggaucugcgucugaagcau

SEQ ID NO: 1592668 - RNA, 19 nt, Artificial Sequence
  Description of Artificial Sequence: Synthetic oligonucleotide
  Antisense strand to SEQ ID NO: 1592667
augcuucagacgcagaucc

SEQ ID NO: 1592669 - RNA, 19 nt, Artificial Sequence
  Description of Artificial Sequence: Synthetic oligonucleotide
  Sense strand starting at position 2921 of SEQ ID NO: 1560330
uccguacacugagaucaua

SEQ ID NO: 1592670 - RNA, 19 nt, Artificial Sequence
  Description of Artificial Sequence: Synthetic oligonucleotide
  Antisense strand to SEQ ID NO: 1592669
uaugaucucaguguacgga

SEQ ID NO: 1592671 - RNA, 19 nt, Artificial Sequence
  Description of Artificial Sequence: Synthetic oligonucleotide
  Sense strand starting at position 2984 of SEQ ID NO: 1560330
ugcacauaaccuggucaga

SEQ ID NO: 1592672 - RNA, 19 nt, Artificial Sequence
  Description of Artificial Sequence: Synthetic oligonucleotide
  Antisense strand to SEQ ID NO: 1592671
ucugaccagguuaugugca

SEQ ID NO: 1592673 - RNA, 19 nt, Artificial Sequence
  Description of Artificial Sequence: Synthetic oligonucleotide
  Sense strand starting at position 3450 of SEQ ID NO: 1560330
ggacauuggcgggaccaua

SEQ ID NO: 1592674 - RNA, 19 nt, Artificial Sequence
  Description of Artificial Sequence: Synthetic oligonucleotide
  Antisense strand to SEQ ID NO: 1592673
uauggucccgccaaugucc

SEQ ID NO: 1592675 - RNA, 19 nt, Artificial Sequence
  Description of Artificial Sequence: Synthetic oligonucleotide
  Sense strand starting at position 3826 of SEQ ID NO: 1560330
accaccuaaucaggaguua

SEQ ID NO: 1592676 - RNA, 19 nt, Artificial Sequence
  Description of Artificial Sequence: Synthetic oligonucleotide
  Antisense strand to SEQ ID NO: 1592675
uaacuccugauuagguggu

SEQ ID NO: 1592677 - RNA, 19 nt, Artificial Sequence
  Description of Artificial Sequence: Synthetic oligonucleotide
  Sense strand starting at position 3837 of SEQ ID NO: 1560330
aggaguuaaucauucccga

SEQ ID NO: 1592678 - RNA, 19 nt, Artificial Sequence
  Description of Artificial Sequence: Synthetic oligonucleotide
  Antisense strand to SEQ ID NO: 1592677
ucgggaaugauuaacuccu

SEQ ID NO: 1592679 - RNA, 19 nt, Artificial Sequence
  Description of Artificial Sequence: Synthetic oligonucleotide
  Sense strand starting at position 3841 of SEQ ID NO: 1560330
guuaaucauucccgaggca

SEQ ID NO: 1592680 - RNA, 19 nt, Artificial Sequence
  Description of Artificial Sequence: Synthetic oligonucleotide
  Antisense strand to SEQ ID NO: 1592679
ugccucgggaaugauuaac

SEQ ID NO: 1592681 - RNA, 19 nt, Artificial Sequence
  Description of Artificial Sequence: Synthetic oligonucleotide
  Sense strand starting at position 3897 of SEQ ID NO: 1560330
caaagucugcccggacaga

SEQ ID NO: 1592682 - RNA, 19 nt, Artificial Sequence
  Description of Artificial Sequence: Synthetic oligonucleotide
  Antisense strand to SEQ ID NO: 1592681
ucuguccgggcagacuuug

SEQ ID NO: 1592683 - RNA, 19 nt, Artificial Sequence
  Description of Artificial Sequence: Synthetic oligonucleotide
  Sense strand starting at position 356 of SEQ ID NO: 1560331
ggucucaaaugccaagaua

SEQ ID NO: 1592684 - RNA, 19 nt, Artificial Sequence
  Description of Artificial Sequence: Synthetic oligonucleotide
  Antisense strand to SEQ ID NO: 1592683
uaucuuggcauuugagacc

SEQ ID NO: 1592685 - RNA, 19 nt, Artificial Sequence
  Description of Artificial Sequence: Synthetic oligonucleotide
  Sense strand starting at position 403 of SEQ ID NO: 1560331
acacuaguugugggugaaa

SEQ ID NO: 1592686 - RNA, 19 nt, Artificial Sequence
  Description of Artificial Sequence: Synthetic oligonucleotide
  Antisense strand to SEQ ID NO: 1592685
uuucacccacaacuagugu

SEQ ID NO: 1592687 - RNA, 19 nt, Artificial Sequence
  Description of Artificial Sequence: Synthetic oligonucleotide
  Sense strand starting at position 405 of SEQ ID NO: 1560331
acuaguugugggugaaaga

SEQ ID NO: 1592688 - RNA, 19 nt, Artificial Sequence
  Description of Artificial Sequence: Synthetic oligonucleotide
  Antisense strand to SEQ ID NO: 1592687
ucuuucacccacaacuagu

SEQ ID NO: 1592689 - RNA, 19 nt, Artificial Sequence
  Description of Artificial Sequence: Synthetic oligonucleotide
  Sense strand starting at position 406 of SEQ ID NO: 1560331
cuaguugugggugaaagaa

SEQ ID NO: 1592690 - RNA, 19 nt, Artificial Sequence
  Description of Artificial Sequence: Synthetic oligonucleotide
  Antisense strand to SEQ ID NO: 1592689
uucuuucacccacaacuag

SEQ ID NO: 1592691 - RNA, 19 nt, Artificial Sequence
  Description of Artificial Sequence: Synthetic oligonucleotide
  Sense strand starting at position 418 of SEQ ID NO: 1560331
gaaagaacucucgggcugu

SEQ ID NO: 1592692 - RNA, 19 nt, Artificial Sequence
  Description of Artificial Sequence: Synthetic oligonucleotide
  Antisense strand to SEQ ID NO: 1592691
acagcccgagaguucuuuc

SEQ ID NO: 1592693 - RNA, 19 nt, Artificial Sequence
  Description of Artificial Sequence: Synthetic oligonucleotide
  Sense strand starting at position 540 of SEQ ID NO: 1560331
gaagccaggagcugugaau

SEQ ID NO: 1592694 - RNA, 19 nt, Artificial Sequence
  Description of Artificial Sequence: Synthetic oligonucleotide
  Antisense strand to SEQ ID NO: 1592693
auucacagcuccuggcuuc

SEQ ID NO: 1592695 - RNA, 19 nt, Artificial Sequence
  Description of Artificial Sequence: Synthetic oligonucleotide
  Sense strand starting at position 600 of SEQ ID NO: 1560331
ggcagugguuccuucggga

SEQ ID NO: 1592696 - RNA, 19 nt, Artificial Sequence
  Description of Artificial Sequence: Synthetic oligonucleotide
  Antisense strand to SEQ ID NO: 1592695
ucccgaaggaaccacugcc

SEQ ID NO: 1592697 - RNA, 19 nt, Artificial Sequence
  Description of Artificial Sequence: Synthetic oligonucleotide
  Sense strand starting at position 617 of SEQ ID NO: 1560331
gacacuaguguaggagaga

SEQ ID NO: 1592698 - RNA, 19 nt, Artificial Sequence
  Description of Artificial Sequence: Synthetic oligonucleotide
  Antisense strand to SEQ ID NO: 1592697
ucucuccuacacuaguguc

SEQ ID NO: 1592699 - RNA, 19 nt, Artificial Sequence
  Description of Artificial Sequence: Synthetic oligonucleotide
  Sense strand starting at position 618 of SEQ ID NO: 1560331
acacuaguguaggagagaa

SEQ ID NO: 1592700 - RNA, 19 nt, Artificial Sequence
  Description of Artificial Sequence: Synthetic oligonucleotide
  Antisense strand to SEQ ID NO: 1592699
uucucuccuacacuagugu

SEQ ID NO: 1592701 - RNA, 19 nt, Artificial Sequence
  Description of Artificial Sequence: Synthetic oligonucleotide
  Sense strand starting at position 640 of SEQ ID NO: 1560331
gagcguccuucccuuugaa

SEQ ID NO: 1592702 - RNA, 19 nt, Artificial Sequence
  Description of Artificial Sequence: Synthetic oligonucleotide
  Antisense strand to SEQ ID NO: 1592701
uucaaagggaaggacgcuc

SEQ ID NO: 1592703 - RNA, 19 nt, Artificial Sequence
  Description of Artificial Sequence: Synthetic oligonucleotide
  Sense strand starting at position 818 of SEQ ID NO: 1560331
accucauggucucuggaau

SEQ ID NO: 1592704 - RNA, 19 nt, Artificial Sequence
  Description of Artificial Sequence: Synthetic oligonucleotide
  Antisense strand to SEQ ID NO: 1592703
auuccagagaccaugaggu

SEQ ID NO: 1592705 - RNA, 19 nt, Artificial Sequence
  Description of Artificial Sequence: Synthetic oligonucleotide
  Sense strand starting at position 829 of SEQ ID NO: 1560331
ucuggaaucucugcuugag

SEQ ID NO: 1592706 - RNA, 19 nt, Artificial Sequence
  Description of Artificial Sequence: Synthetic oligonucleotide
  Antisense strand to SEQ ID NO: 1592705
cucaagcagagauuccaga

SEQ ID NO: 1592707 - RNA, 19 nt, Artificial Sequence
  Description of Artificial Sequence: Synthetic oligonucleotide
  Sense strand starting at position 906 of SEQ ID NO: 1560331
gcagaaguguugagugggu

SEQ ID NO: 1592708 - RNA, 19 nt, Artificial Sequence
  Description of Artificial Sequence: Synthetic oligonucleotide
  Antisense strand to SEQ ID NO: 1592707
acccacucaacacuucugc

SEQ ID NO: 1592709 - RNA, 19 nt, Artificial Sequence
  Description of Artificial Sequence: Synthetic oligonucleotide
  Sense strand starting at position 1397 of SEQ ID NO: 1560331
caguucugggcccaagaua

SEQ ID NO: 1592710 - RNA, 19 nt, Artificial Sequence
  Description of Artificial Sequence: Synthetic oligonucleotide
  Antisense strand to SEQ ID NO: 1592709
uaucuugggcccagaacug

SEQ ID NO: 1592711 - RNA, 19 nt, Artificial Sequence
  Description of Artificial Sequence: Synthetic oligonucleotide
  Sense strand starting at position 1450 of SEQ ID NO: 1560331
uggcaaguguuguccagaa

SEQ ID NO: 1592712 - RNA, 19 nt, Artificial Sequence
  Description of Artificial Sequence: Synthetic oligonucleotide
  Antisense strand to SEQ ID NO: 1592711
uucuggacaacacuugcca

SEQ ID NO: 1592713 - RNA, 19 nt, Artificial Sequence
  Description of Artificial Sequence: Synthetic oligonucleotide
  Sense strand starting at position 2152 of SEQ ID NO: 1560331
ugaccauuccguggccauu

SEQ ID NO: 1592714 - RNA, 19 nt, Artificial Sequence
  Description of Artificial Sequence: Synthetic oligonucleotide
  Antisense strand to SEQ ID NO: 1592713
aauggccacggaaugguca

SEQ ID NO: 1592715 - RNA, 19 nt, Artificial Sequence
  Description of Artificial Sequence: Synthetic oligonucleotide
  Sense strand starting at position 2263 of SEQ ID NO: 1560331
ugcguaucggaaugaggaa

SEQ ID NO: 1592716 - RNA, 19 nt, Artificial Sequence
  Description of Artificial Sequence: Synthetic oligonucleotide
  Antisense strand to SEQ ID NO: 1592715
uuccucauuccgauacgca

SEQ ID NO: 1592717 - RNA, 19 nt, Artificial Sequence
  Description of Artificial Sequence: Synthetic oligonucleotide
  Sense strand starting at position 2264 of SEQ ID NO: 1560331
gcguaucggaaugaggaau

SEQ ID NO: 1592718 - RNA, 19 nt, Artificial Sequence
  Description of Artificial Sequence: Synthetic oligonucleotide
  Antisense strand to SEQ ID NO: 1592717
auuccucauuccgauacgc

SEQ ID NO: 1592719 - RNA, 19 nt, Artificial Sequence
  Description of Artificial Sequence: Synthetic oligonucleotide
  Sense strand starting at position 2305 of SEQ ID NO: 1560331
gaccaauagcaaggaaagu

SEQ ID NO: 1592720 - RNA, 19 nt, Artificial Sequence
  Description of Artificial Sequence: Synthetic oligonucleotide
  Antisense strand to SEQ ID NO: 1592719
acuuuccuugcuauugguc

SEQ ID NO: 1592721 - RNA, 19 nt, Artificial Sequence
  Description of Artificial Sequence: Synthetic oligonucleotide
  Sense strand starting at position 2326 of SEQ ID NO: 1560331
ggguguguccgugaggaaa

SEQ ID NO: 1592722 - RNA, 19 nt, Artificial Sequence
  Description of Artificial Sequence: Synthetic oligonucleotide
  Antisense strand to SEQ ID NO: 1592721
uuuccucacggacacaccc

SEQ ID NO: 1592723 - RNA, 19 nt, Artificial Sequence
  Description of Artificial Sequence: Synthetic oligonucleotide
  Sense strand starting at position 2411 of SEQ ID NO: 1560331
cgggcuuucugcccaauaa

SEQ ID NO: 1592724 - RNA, 19 nt, Artificial Sequence
  Description of Artificial Sequence: Synthetic oligonucleotide
  Antisense strand to SEQ ID NO: 1592723
uuauugggcagaaagcccg

SEQ ID NO: 1592725 - RNA, 19 nt, Artificial Sequence
  Description of Artificial Sequence: Synthetic oligonucleotide
  Sense strand starting at position 2412 of SEQ ID NO: 1560331
gggcuuucugcccaauaac

SEQ ID NO: 1592726 - RNA, 19 nt, Artificial Sequence
  Description of Artificial Sequence: Synthetic oligonucleotide
  Antisense strand to SEQ ID NO: 1592725
guuauugggcagaaagccc

SEQ ID NO: 1592727 - RNA, 19 nt, Artificial Sequence
  Description of Artificial Sequence: Synthetic oligonucleotide
  Sense strand starting at position 2440 of SEQ ID NO: 1560331
cgagacguccauuauuauc

SEQ ID NO: 1592728 - RNA, 19 nt, Artificial Sequence
  Description of Artificial Sequence: Synthetic oligonucleotide
  Antisense strand to SEQ ID NO: 1592727
gauaauaauggacgucucg

SEQ ID NO: 1592729 - RNA, 19 nt, Artificial Sequence
  Description of Artificial Sequence: Synthetic oligonucleotide
  Sense strand starting at position 2551 of SEQ ID NO: 1560331
gugacacucucugaccaau

SEQ ID NO: 1592730 - RNA, 19 nt, Artificial Sequence
  Description of Artificial Sequence: Synthetic oligonucleotide
  Antisense strand to SEQ ID NO: 1592729
auuggucagagagugucac

SEQ ID NO: 1592731 - RNA, 19 nt, Artificial Sequence
  Description of Artificial Sequence: Synthetic oligonucleotide
  Sense strand starting at position 2557 of SEQ ID NO: 1560331
cucucugaccaauggguau

SEQ ID NO: 1592732 - RNA, 19 nt, Artificial Sequence
  Description of Artificial Sequence: Synthetic oligonucleotide
  Antisense strand to SEQ ID NO: 1592731
auacccauuggucagagag

SEQ ID NO: 1592733 - RNA, 19 nt, Artificial Sequence
  Description of Artificial Sequence: Synthetic oligonucleotide
  Sense strand starting at position 2563 of SEQ ID NO: 1560331
gaccaauggguaugugaga

SEQ ID NO: 1592734 - RNA, 19 nt, Artificial Sequence
  Description of Artificial Sequence: Synthetic oligonucleotide
  Antisense strand to SEQ ID NO: 1592733
ucucacauacccauugguc

SEQ ID NO: 1592735 - RNA, 19 nt, Artificial Sequence
  Description of Artificial Sequence: Synthetic oligonucleotide
  Sense strand starting at position 2572 of SEQ ID NO: 1560331
guaugugagauugguggga

SEQ ID NO: 1592736 - RNA, 19 nt, Artificial Sequence
  Description of Artificial Sequence: Synthetic oligonucleotide
  Antisense strand to SEQ ID NO: 1592735
ucccaccaaucucacauac

SEQ ID NO: 1592737 - RNA, 19 nt, Artificial Sequence
  Description of Artificial Sequence: Synthetic oligonucleotide
  Sense strand starting at position 2576 of SEQ ID NO: 1560331
gugagauuggugggagcau

SEQ ID NO: 1592738 - RNA, 19 nt, Artificial Sequence
  Description of Artificial Sequence: Synthetic oligonucleotide
  Antisense strand to SEQ ID NO: 1592737
augcucccaccaaucucac

SEQ ID NO: 1592739 - RNA, 19 nt, Artificial Sequence
  Description of Artificial Sequence: Synthetic oligonucleotide
  Sense strand starting at position 2614 of SEQ ID NO: 1560331
gcuugaggccuggguugaa

SEQ ID NO: 1592740 - RNA, 19 nt, Artificial Sequence
  Description of Artificial Sequence: Synthetic oligonucleotide
  Antisense strand to SEQ ID NO: 1592739
uucaacccaggccucaagc

SEQ ID NO: 1592741 - RNA, 19 nt, Artificial Sequence
  Description of Artificial Sequence: Synthetic oligonucleotide
  Sense strand starting at position 2876 of SEQ ID NO: 1560331
gguuaaauguguucucuaa

SEQ ID NO: 1592742 - RNA, 19 nt, Artificial Sequence
  Description of Artificial Sequence: Synthetic oligonucleotide
  Antisense strand to SEQ ID NO: 1592741
uuagagaacacauuuaacc

SEQ ID NO: 1592743 - RNA, 19 nt, Artificial Sequence
  Description of Artificial Sequence: Synthetic oligonucleotide
  Sense strand starting at position 2878 of SEQ ID NO: 1560331
uuaaauguguucucuaaag

SEQ ID NO: 1592744 - RNA, 19 nt, Artificial Sequence
  Description of Artificial Sequence: Synthetic oligonucleotide
  Antisense strand to SEQ ID NO: 1592743
cuuuagagaacacauuuaa

SEQ ID NO: 1592745 - RNA, 19 nt, Artificial Sequence
  Description of Artificial Sequence: Synthetic oligonucleotide
  Sense strand starting at position 2910 of SEQ ID NO: 1560331
guguuucuccaucaaagcu

SEQ ID NO: 1592746 - RNA, 19 nt, Artificial Sequence
  Description of Artificial Sequence: Synthetic oligonucleotide
  Antisense strand to SEQ ID NO: 1592745
agcuuugauggagaaacac

SEQ ID NO: 1592747 - RNA, 19 nt, Artificial Sequence
  Description of Artificial Sequence: Synthetic oligonucleotide
  Sense strand starting at position 3050 of SEQ ID NO: 1560331
ggaaacugcuuauaaacau

SEQ ID NO: 1592748 - RNA, 19 nt, Artificial Sequence
  Description of Artificial Sequence: Synthetic oligonucleotide
  Antisense strand to SEQ ID NO: 1592747
auguuuauaagcaguuucc

SEQ ID NO: 1592749 - RNA, 19 nt, Artificial Sequence
  Description of Artificial Sequence: Synthetic oligonucleotide
  Sense strand starting at position 3147 of SEQ ID NO: 1560331
gaggaauucguagggacag

SEQ ID NO: 1592750 - RNA, 19 nt, Artificial Sequence
  Description of Artificial Sequence: Synthetic oligonucleotide
  Antisense strand to SEQ ID NO: 1592749
cugucccuacgaauuccuc

SEQ ID NO: 1592751 - RNA, 19 nt, Artificial Sequence
  Description of Artificial Sequence: Synthetic oligonucleotide
  Sense strand starting at position 3149 of SEQ ID NO: 1560331
ggaauucguagggacaguu

SEQ ID NO: 1592752 - RNA, 19 nt, Artificial Sequence
  Description of Artificial Sequence: Synthetic oligonucleotide
  Antisense strand to SEQ ID NO: 1592751
aacugucccuacgaauucc

SEQ ID NO: 1592753 - RNA, 19 nt, Artificial Sequence
  Description of Artificial Sequence: Synthetic oligonucleotide
  Sense strand starting at position 3276 of SEQ ID NO: 1560331
ugacgucauaaguguguuu

SEQ ID NO: 1592754 - RNA, 19 nt, Artificial Sequence
  Description of Artificial Sequence: Synthetic oligonucleotide
  Antisense strand to SEQ ID NO: 1592753
aaacacacuuaugacguca

SEQ ID NO: 1592755 - RNA, 19 nt, Artificial Sequence
  Description of Artificial Sequence: Synthetic oligonucleotide
  Sense strand starting at position 3582 of SEQ ID NO: 1560331
ccagcuagauguccuaagu

SEQ ID NO: 1592756 - RNA, 19 nt, Artificial Sequence
  Description of Artificial Sequence: Synthetic oligonucleotide
  Antisense strand to SEQ ID NO: 1592755
acuuaggacaucuagcugg

SEQ ID NO: 1592757 - RNA, 19 nt, Artificial Sequence
  Description of Artificial Sequence: Synthetic oligonucleotide
  Sense strand starting at position 3666 of SEQ ID NO: 1560331
cucaaccuucucuguagua

SEQ ID NO: 1592758 - RNA, 19 nt, Artificial Sequence
  Description of Artificial Sequence: Synthetic oligonucleotide
  Antisense strand to SEQ ID NO: 1592757
uacuacagagaagguugag

SEQ ID NO: 1592759 - RNA, 19 nt, Artificial Sequence
  Description of Artificial Sequence: Synthetic oligonucleotide
  Sense strand starting at position 3711 of SEQ ID NO: 1560331
gugacugacauccacguau

SEQ ID NO: 1592760 - RNA, 19 nt, Artificial Sequence
  Description of Artificial Sequence: Synthetic oligonucleotide
  Antisense strand to SEQ ID NO: 1592759
auacguggaugucagucac

SEQ ID NO: 1592761 - RNA, 19 nt, Artificial Sequence
  Description of Artificial Sequence: Synthetic oligonucleotide
  Sense strand starting at position 3796 of SEQ ID NO: 1560331
acguucuggaacuguuaau

SEQ ID NO: 1592762 - RNA, 19 nt, Artificial Sequence
  Description of Artificial Sequence: Synthetic oligonucleotide
  Antisense strand to SEQ ID NO: 1592761
auuaacaguuccagaacgu

SEQ ID NO: 1592763 - RNA, 19 nt, Artificial Sequence
  Description of Artificial Sequence: Synthetic oligonucleotide
  Sense strand starting at position 48 of SEQ ID NO: 1560332
gcuuacaugccuggagcua

SEQ ID NO: 1592764 - RNA, 19 nt, Artificial Sequence
  Description of Artificial Sequence: Synthetic oligonucleotide
  Antisense strand to SEQ ID NO: 1592763
uagcuccaggcauguaagc

SEQ ID NO: 1592765 - RNA, 19 nt, Artificial Sequence
  Description of Artificial Sequence: Synthetic oligonucleotide
  Sense strand starting at position 49 of SEQ ID NO: 1560332
cuuacaugccuggagcuau

SEQ ID NO: 1592766 - RNA, 19 nt, Artificial Sequence
  Description of Artificial Sequence: Synthetic oligonucleotide
  Antisense strand to SEQ ID NO: 1592765
auagcuccaggcauguaag

SEQ ID NO: 1592767 - RNA, 19 nt, Artificial Sequence
  Description of Artificial Sequence: Synthetic oligonucleotide
  Sense strand starting at position 57 of SEQ ID NO: 1560332
ccuggagcuaugugauauc

SEQ ID NO: 1592768 - RNA, 19 nt, Artificial Sequence
  Description of Artificial Sequence: Synthetic oligonucleotide
  Antisense strand to SEQ ID NO: 1592767
gauaucacauagcuccagg

SEQ ID NO: 1592769 - RNA, 19 nt, Artificial Sequence
  Description of Artificial Sequence: Synthetic oligonucleotide
  Sense strand starting at position 178 of SEQ ID NO: 1560332
uuaggaagcuuuccggacu

SEQ ID NO: 1592770 - RNA, 19 nt, Artificial Sequence
  Description of Artificial Sequence: Synthetic oligonucleotide
  Antisense strand to SEQ ID NO: 1592769
aguccggaaagcuuccuaa

SEQ ID NO: 1592771 - RNA, 19 nt, Artificial Sequence
  Description of Artificial Sequence: Synthetic oligonucleotide
  Sense strand starting at position 215 of SEQ ID NO: 1560332
ccuuauagauaacaugaga

SEQ ID NO: 1592772 - RNA, 19 nt, Artificial Sequence
  Description of Artificial Sequence: Synthetic oligonucleotide
  Antisense strand to SEQ ID NO: 1592771
ucucauguuaucuauaagg

SEQ ID NO: 1592773 - RNA, 19 nt, Artificial Sequence
  Description of Artificial Sequence: Synthetic oligonucleotide
  Sense strand starting at position 228 of SEQ ID NO: 1560332
augagagcauuauugacau

SEQ ID NO: 1592774 - RNA, 19 nt, Artificial Sequence
  Description of Artificial Sequence: Synthetic oligonucleotide
  Antisense strand to SEQ ID NO: 1592773
augucaauaaugcucucau

SEQ ID NO: 1592775 - RNA, 19 nt, Artificial Sequence
  Description of Artificial Sequence: Synthetic oligonucleotide
  Sense strand starting at position 257 of SEQ ID NO: 1560332
augagaucuauguggucaa

SEQ ID NO: 1592776 - RNA, 19 nt, Artificial Sequence
  Description of Artificial Sequence: Synthetic oligonucleotide
  Antisense strand to SEQ ID NO: 1592775
uugaccacauagaucucau

SEQ ID NO: 1592777 - RNA, 19 nt, Artificial Sequence
  Description of Artificial Sequence: Synthetic oligonucleotide
  Sense strand starting at position 260 of SEQ ID NO: 1560332
agaucuauguggucaaugu

SEQ ID NO: 1592778 - RNA, 19 nt, Artificial Sequence
  Description of Artificial Sequence: Synthetic oligonucleotide
  Antisense strand to SEQ ID NO: 1592777
acauugaccacauagaucu

SEQ ID NO: 1592779 - RNA, 19 nt, Artificial Sequence
  Description of Artificial Sequence: Synthetic oligonucleotide
  Sense strand starting at position 261 of SEQ ID NO: 1560332
gaucuauguggucaaugug

SEQ ID NO: 1592780 - RNA, 19 nt, Artificial Sequence
  Description of Artificial Sequence: Synthetic oligonucleotide
  Antisense strand to SEQ ID NO: 1592779
cacauugaccacauagauc

SEQ ID NO: 1592781 - RNA, 19 nt, Artificial Sequence
  Description of Artificial Sequence: Synthetic oligonucleotide
  Sense strand starting at position 270 of SEQ ID NO: 1560332
ggucaauguggguaucugu

SEQ ID NO: 1592782 - RNA, 19 nt, Artificial Sequence
  Description of Artificial Sequence: Synthetic oligonucleotide
  Antisense strand to SEQ ID NO: 1592781
acagauacccacauugacc

SEQ ID NO: 1592783 - RNA, 19 nt, Artificial Sequence
  Description of Artificial Sequence: Synthetic oligonucleotide
  Sense strand starting at position 419 of SEQ ID NO: 1560332
ggcuaaucaccauagucca

SEQ ID NO: 1592784 - RNA, 19 nt, Artificial Sequence
  Description of Artificial Sequence: Synthetic oligonucleotide
  Antisense strand to SEQ ID NO: 1592783
uggacuauggugauuagcc

SEQ ID NO: 1592785 - RNA, 19 nt, Artificial Sequence
  Description of Artificial Sequence: Synthetic oligonucleotide
  Sense strand starting at position 446 of SEQ ID NO: 1560332
ccacaagaauggguauguu

SEQ ID NO: 1592786 - RNA, 19 nt, Artificial Sequence
  Description of Artificial Sequence: Synthetic oligonucleotide
  Antisense strand to SEQ ID NO: 1592785
aacauacccauucuugugg

SEQ ID NO: 1592787 - RNA, 19 nt, Artificial Sequence
  Description of Artificial Sequence: Synthetic oligonucleotide
  Sense strand starting at position 486 of SEQ ID NO: 1560332
guaauaagauucuaggacu

SEQ ID NO: 1592788 - RNA, 19 nt, Artificial Sequence
  Description of Artificial Sequence: Synthetic oligonucleotide
  Antisense strand to SEQ ID NO: 1592787
aguccuagaaucuuauuac

SEQ ID NO: 1592789 - RNA, 19 nt, Artificial Sequence
  Description of Artificial Sequence: Synthetic oligonucleotide
  Sense strand starting at position 489 of SEQ ID NO: 1560332
auaagauucuaggacugag

SEQ ID NO: 1592790 - RNA, 19 nt, Artificial Sequence
  Description of Artificial Sequence: Synthetic oligonucleotide
  Antisense strand to SEQ ID NO: 1592789
cucaguccuagaaucuuau

SEQ ID NO: 1592791 - RNA, 19 nt, Artificial Sequence
  Description of Artificial Sequence: Synthetic oligonucleotide
  Sense strand starting at position 531 of SEQ ID NO: 1560332
gggugcuacccuuauagaa

SEQ ID NO: 1592792 - RNA, 19 nt, Artificial Sequence
  Description of Artificial Sequence: Synthetic oligonucleotide
  Antisense strand to SEQ ID NO: 1592791
uucuauaaggguagcaccc

SEQ ID NO: 1592793 - RNA, 19 nt, Artificial Sequence
  Description of Artificial Sequence: Synthetic oligonucleotide
  Sense strand starting at position 761 of SEQ ID NO: 1560332
uugggaguucgaggcaagu

SEQ ID NO: 1592794 - RNA, 19 nt, Artificial Sequence
  Description of Artificial Sequence: Synthetic oligonucleotide
  Antisense strand to SEQ ID NO: 1592793
acuugccucgaacucccaa

SEQ ID NO: 1592795 - RNA, 19 nt, Artificial Sequence
  Description of Artificial Sequence: Synthetic oligonucleotide
  Sense strand starting at position 851 of SEQ ID NO: 1560332
agaaauuagcugugcauga

SEQ ID NO: 1592796 - RNA, 19 nt, Artificial Sequence
  Description of Artificial Sequence: Synthetic oligonucleotide
  Antisense strand to SEQ ID NO: 1592795
ucaugcacagcuaauuucu

SEQ ID NO: 1592797 - RNA, 19 nt, Artificial Sequence
  Description of Artificial Sequence: Synthetic oligonucleotide
  Sense strand starting at position 852 of SEQ ID NO: 1560332
gaaauuagcugugcaugau

SEQ ID NO: 1592798 - RNA, 19 nt, Artificial Sequence
  Description of Artificial Sequence: Synthetic oligonucleotide
  Antisense strand to SEQ ID NO: 1592797
aucaugcacagcuaauuuc

SEQ ID NO: 1592799 - RNA, 19 nt, Artificial Sequence
  Description of Artificial Sequence: Synthetic oligonucleotide
  Sense strand starting at position 1202 of SEQ ID NO: 1560332
gagaaagcaguguaggauu

SEQ ID NO: 1592800 - RNA, 19 nt, Artificial Sequence
  Description of Artificial Sequence: Synthetic oligonucleotide
  Antisense strand to SEQ ID NO: 1592799
aauccuacacugcuuucuc

SEQ ID NO: 1592801 - RNA, 19 nt, Artificial Sequence
  Description of Artificial Sequence: Synthetic oligonucleotide
  Sense strand starting at position 1221 of SEQ ID NO: 1560332
cuagaauucuaagugucau

SEQ ID NO: 1592802 - RNA, 19 nt, Artificial Sequence
  Description of Artificial Sequence: Synthetic oligonucleotide
  Antisense strand to SEQ ID NO: 1592801
augacacuuagaauucuag

SEQ ID NO: 1592803 - RNA, 19 nt, Artificial Sequence
  Description of Artificial Sequence: Synthetic oligonucleotide
  Sense strand starting at position 1227 of SEQ ID NO: 1560332
uucuaagugucauuguauu

SEQ ID NO: 1592804 - RNA, 19 nt, Artificial Sequence
  Description of Artificial Sequence: Synthetic oligonucleotide
  Antisense strand to SEQ ID NO: 1592803
aauacaaugacacuuagaa

SEQ ID NO: 1592805 - RNA, 19 nt, Artificial Sequence
  Description of Artificial Sequence: Synthetic oligonucleotide
  Sense strand starting at position 1283 of SEQ ID NO: 1560332
aauggucaacagugcuaaa

SEQ ID NO: 1592806 - RNA, 19 nt, Artificial Sequence
  Description of Artificial Sequence: Synthetic oligonucleotide
  Antisense strand to SEQ ID NO: 1592805
uuuagcacuguugaccauu

SEQ ID NO: 1592807 - RNA, 19 nt, Artificial Sequence
  Description of Artificial Sequence: Synthetic oligonucleotide
  Sense strand starting at position 1332 of SEQ ID NO: 1560332
auucuaguagcguaagugu

SEQ ID NO: 1592808 - RNA, 19 nt, Artificial Sequence
  Description of Artificial Sequence: Synthetic oligonucleotide
  Antisense strand to SEQ ID NO: 1592807
acacuuacgcuacuagaau

SEQ ID NO: 1592809 - RNA, 19 nt, Artificial Sequence
  Description of Artificial Sequence: Synthetic oligonucleotide
  Sense strand starting at position 1392 of SEQ ID NO: 1560332
agcuacuaggauugaaacu

SEQ ID NO: 1592810 - RNA, 19 nt, Artificial Sequence
  Description of Artificial Sequence: Synthetic oligonucleotide
  Antisense strand to SEQ ID NO: 1592809
aguuucaauccuaguagcu

SEQ ID NO: 1592811 - RNA, 19 nt, Artificial Sequence
  Description of Artificial Sequence: Synthetic oligonucleotide
  Sense strand starting at position 1477 of SEQ ID NO: 1560332
gugggaaugcuaggauucu

SEQ ID NO: 1592812 - RNA, 19 nt, Artificial Sequence
  Description of Artificial Sequence: Synthetic oligonucleotide
  Antisense strand to SEQ ID NO: 1592811
agaauccuagcauucccac

SEQ ID NO: 1592813 - RNA, 19 nt, Artificial Sequence
  Description of Artificial Sequence: Synthetic oligonucleotide
  Sense strand starting at position 1486 of SEQ ID NO: 1560332
cuaggauucuaagacugga

SEQ ID NO: 1592814 - RNA, 19 nt, Artificial Sequence
  Description of Artificial Sequence: Synthetic oligonucleotide
  Antisense strand to SEQ ID NO: 1592813
uccagucuuagaauccuag

SEQ ID NO: 1592815 - RNA, 19 nt, Artificial Sequence
  Description of Artificial Sequence: Synthetic oligonucleotide
  Sense strand starting at position 1521 of SEQ ID NO: 1560332
agaugcuaggaguguaacu

SEQ ID NO: 1592816 - RNA, 19 nt, Artificial Sequence
  Description of Artificial Sequence: Synthetic oligonucleotide
  Antisense strand to SEQ ID NO: 1592815
aguuacacuccuagcaucu

SEQ ID NO: 1592817 - RNA, 19 nt, Artificial Sequence
  Description of Artificial Sequence: Synthetic oligonucleotide
  Sense strand starting at position 1531 of SEQ ID NO: 1560332
aguguaacugucgaugaug

SEQ ID NO: 1592818 - RNA, 19 nt, Artificial Sequence
  Description of Artificial Sequence: Synthetic oligonucleotide
  Antisense strand to SEQ ID NO: 1592817
caucaucgacaguuacacu

SEQ ID NO: 1592819 - RNA, 19 nt, Artificial Sequence
  Description of Artificial Sequence: Synthetic oligonucleotide
  Sense strand starting at position 1534 of SEQ ID NO: 1560332
guaacugucgaugaugcua

SEQ ID NO: 1592820 - RNA, 19 nt, Artificial Sequence
  Description of Artificial Sequence: Synthetic oligonucleotide
  Antisense strand to SEQ ID NO: 1592819
uagcaucaucgacaguuac

SEQ ID NO: 1592821 - RNA, 19 nt, Artificial Sequence
  Description of Artificial Sequence: Synthetic oligonucleotide
  Sense strand starting at position 1554 of SEQ ID NO: 1560332
gguuguauguaggucuaga

SEQ ID NO: 1592822 - RNA, 19 nt, Artificial Sequence
  Description of Artificial Sequence: Synthetic oligonucleotide
  Antisense strand to SEQ ID NO: 1592821
ucuagaccuacauacaacc

SEQ ID NO: 1592823 - RNA, 19 nt, Artificial Sequence
  Description of Artificial Sequence: Synthetic oligonucleotide
  Sense strand starting at position 1633 of SEQ ID NO: 1560332
agaggaaucaauggugcua

SEQ ID NO: 1592824 - RNA, 19 nt, Artificial Sequence
  Description of Artificial Sequence: Synthetic oligonucleotide
  Antisense strand to SEQ ID NO: 1592823
uagcaccauugauuccucu

SEQ ID NO: 1592825 - RNA, 19 nt, Artificial Sequence
  Description of Artificial Sequence: Synthetic oligonucleotide
  Sense strand starting at position 1682 of SEQ ID NO: 1560332
ggcgaucuagaguguaagu

SEQ ID NO: 1592826 - RNA, 19 nt, Artificial Sequence
  Description of Artificial Sequence: Synthetic oligonucleotide
  Antisense strand to SEQ ID NO: 1592825
acuuacacucuagaucgcc

SEQ ID NO: 1592827 - RNA, 19 nt, Artificial Sequence
  Description of Artificial Sequence: Synthetic oligonucleotide
  Sense strand starting at position 1684 of SEQ ID NO: 1560332
cgaucuagaguguaagugu

SEQ ID NO: 1592828 - RNA, 19 nt, Artificial Sequence
  Description of Artificial Sequence: Synthetic oligonucleotide
  Antisense strand to SEQ ID NO: 1592827
acacuuacacucuagaucg

SEQ ID NO: 1592829 - RNA, 19 nt, Artificial Sequence
  Description of Artificial Sequence: Synthetic oligonucleotide
  Sense strand starting at position 1739 of SEQ ID NO: 1560332
cggagcucuuauucuagga

SEQ ID NO: 1592830 - RNA, 19 nt, Artificial Sequence
  Description of Artificial Sequence: Synthetic oligonucleotide
  Antisense strand to SEQ ID NO: 1592829
uccuagaauaagagcuccg

SEQ ID NO: 1592831 - RNA, 19 nt, Artificial Sequence
  Description of Artificial Sequence: Synthetic oligonucleotide
  Sense strand starting at position 1811 of SEQ ID NO: 1560332
agagucuaggauuguaacu

SEQ ID NO: 1592832 - RNA, 19 nt, Artificial Sequence
  Description of Artificial Sequence: Synthetic oligonucleotide
  Antisense strand to SEQ ID NO: 1592831
aguuacaauccuagacucu

SEQ ID NO: 1592833 - RNA, 19 nt, Artificial Sequence
  Description of Artificial Sequence: Synthetic oligonucleotide
  Sense strand starting at position 1842 of SEQ ID NO: 1560332
gacgacuggauggguuaau

SEQ ID NO: 1592834 - RNA, 19 nt, Artificial Sequence
  Description of Artificial Sequence: Synthetic oligonucleotide
  Antisense strand to SEQ ID NO: 1592833
auuaacccauccagucguc

SEQ ID NO: 1592835 - RNA, 19 nt, Artificial Sequence
  Description of Artificial Sequence: Synthetic oligonucleotide
  Sense strand starting at position 1902 of SEQ ID NO: 1560332
uccuuaaggucugaagaag

SEQ ID NO: 1592836 - RNA, 19 nt, Artificial Sequence
  Description of Artificial Sequence: Synthetic oligonucleotide
  Antisense strand to SEQ ID NO: 1592835
cuucuucagaccuuaagga

SEQ ID NO: 1592837 - RNA, 19 nt, Artificial Sequence
  Description of Artificial Sequence: Synthetic oligonucleotide
  Sense strand starting at position 3062 of SEQ ID NO: 1560332
caacauguugagcgagacu

SEQ ID NO: 1592838 - RNA, 19 nt, Artificial Sequence
  Description of Artificial Sequence: Synthetic oligonucleotide
  Antisense strand to SEQ ID NO: 1592837
agucucgcucaacauguug

SEQ ID NO: 1592839 - RNA, 19 nt, Artificial Sequence
  Description of Artificial Sequence: Synthetic oligonucleotide
  Sense strand starting at position 3065 of SEQ ID NO: 1560332
cauguugagcgagacucua

SEQ ID NO: 1592840 - RNA, 19 nt, Artificial Sequence
  Description of Artificial Sequence: Synthetic oligonucleotide
  Antisense strand to SEQ ID NO: 1592839
uagagucucgcucaacaug

SEQ ID NO: 1592841 - RNA, 19 nt, Artificial Sequence
  Description of Artificial Sequence: Synthetic oligonucleotide
  Sense strand starting at position 3934 of SEQ ID NO: 1560332
guaggugaaagcugaggau

SEQ ID NO: 1592842 - RNA, 19 nt, Artificial Sequence
  Description of Artificial Sequence: Synthetic oligonucleotide
  Antisense strand to SEQ ID NO: 1592841
auccucagcuuucaccuac

SEQ ID NO: 1592843 - RNA, 19 nt, Artificial Sequence
  Description of Artificial Sequence: Synthetic oligonucleotide
  Sense strand starting at position 454 of SEQ ID NO: 1560333
aggcaauagccugaaauac

SEQ ID NO: 1592844 - RNA, 19 nt, Artificial Sequence
  Description of Artificial Sequence: Synthetic oligonucleotide
  Antisense strand to SEQ ID NO: 1592843
guauuucaggcuauugccu

SEQ ID NO: 1592845 - RNA, 19 nt, Artificial Sequence
  Description of Artificial Sequence: Synthetic oligonucleotide
  Sense strand starting at position 472 of SEQ ID NO: 1560333
ccaucuauauagccagaga

SEQ ID NO: 1592846 - RNA, 19 nt, Artificial Sequence
  Description of Artificial Sequence: Synthetic oligonucleotide
  Antisense strand to SEQ ID NO: 1592845
ucucuggcuauauagaugg

SEQ ID NO: 1592847 - RNA, 19 nt, Artificial Sequence
  Description of Artificial Sequence: Synthetic oligonucleotide
  Sense strand starting at position 475 of SEQ ID NO: 1560333
ucuauauagccagagaguu

SEQ ID NO: 1592848 - RNA, 19 nt, Artificial Sequence
  Description of Artificial Sequence: Synthetic oligonucleotide
  Antisense strand to SEQ ID NO: 1592847
aacucucuggcuauauaga

SEQ ID NO: 1592849 - RNA, 19 nt, Artificial Sequence
  Description of Artificial Sequence: Synthetic oligonucleotide
  Sense strand starting at position 541 of SEQ ID NO: 1560333
uguacagaucugggcagaa

SEQ ID NO: 1592850 - RNA, 19 nt, Artificial Sequence
  Description of Artificial Sequence: Synthetic oligonucleotide
  Antisense strand to SEQ ID NO: 1592849
uucugcccagaucuguaca

SEQ ID NO: 1592851 - RNA, 19 nt, Artificial Sequence
  Description of Artificial Sequence: Synthetic oligonucleotide
  Sense strand starting at position 563 of SEQ ID NO: 1560333
uuaguuaugccugaaucuu

SEQ ID NO: 1592852 - RNA, 19 nt, Artificial Sequence
  Description of Artificial Sequence: Synthetic oligonucleotide
  Antisense strand to SEQ ID NO: 1592851
aagauucaggcauaacuaa

SEQ ID NO: 1592853 - RNA, 19 nt, Artificial Sequence
  Description of Artificial Sequence: Synthetic oligonucleotide
  Sense strand starting at position 1179 of SEQ ID NO: 1560333
agaaauauucuuggaguua

SEQ ID NO: 1592854 - RNA, 19 nt, Artificial Sequence
  Description of Artificial Sequence: Synthetic oligonucleotide
  Antisense strand to SEQ ID NO: 1592853
uaacuccaagaauauuucu

SEQ ID NO: 1592855 - RNA, 19 nt, Artificial Sequence
  Description of Artificial Sequence: Synthetic oligonucleotide
  Sense strand starting at position 1192 of SEQ ID NO: 1560333
gaguuaaucuacuucugag

SEQ ID NO: 1592856 - RNA, 19 nt, Artificial Sequence
  Description of Artificial Sequence: Synthetic oligonucleotide
  Antisense strand to SEQ ID NO: 1592855
cucagaaguagauuaacuc

SEQ ID NO: 1592857 - RNA, 19 nt, Artificial Sequence
  Description of Artificial Sequence: Synthetic oligonucleotide
  Sense strand starting at position 1247 of SEQ ID NO: 1560333
agguaagacuugcccuaau

SEQ ID NO: 1592858 - RNA, 19 nt, Artificial Sequence
  Description of Artificial Sequence: Synthetic oligonucleotide
  Antisense strand to SEQ ID NO: 1592857
auuagggcaagucuuaccu

SEQ ID NO: 1592859 - RNA, 19 nt, Artificial Sequence
  Description of Artificial Sequence: Synthetic oligonucleotide
  Sense strand starting at position 1310 of SEQ ID NO: 1560333
uuuacuuguguggagagau

SEQ ID NO: 1592860 - RNA, 19 nt, Artificial Sequence
  Description of Artificial Sequence: Synthetic oligonucleotide
  Antisense strand to SEQ ID NO: 1592859
aucucuccacacaaguaaa

SEQ ID NO: 1592861 - RNA, 19 nt, Artificial Sequence
  Description of Artificial Sequence: Synthetic oligonucleotide
  Sense strand starting at position 1405 of SEQ ID NO: 1560333
gggugaaagauccgccaca

SEQ ID NO: 1592862 - RNA, 19 nt, Artificial Sequence
  Description of Artificial Sequence: Synthetic oligonucleotide
  Antisense strand to SEQ ID NO: 1592861
uguggcggaucuuucaccc

SEQ ID NO: 1592863 - RNA, 19 nt, Artificial Sequence
  Description of Artificial Sequence: Synthetic oligonucleotide
  Sense strand starting at position 1651 of SEQ ID NO: 1560333
ucuagucgugagggagaga

SEQ ID NO: 1592864 - RNA, 19 nt, Artificial Sequence
  Description of Artificial Sequence: Synthetic oligonucleotide
  Antisense strand to SEQ ID NO: 1592863
ucucucccucacgacuaga

SEQ ID NO: 1592865 - RNA, 19 nt, Artificial Sequence
  Description of Artificial Sequence: Synthetic oligonucleotide
  Sense strand starting at position 1652 of SEQ ID NO: 1560333
cuagucgugagggagagau

SEQ ID NO: 1592866 - RNA, 19 nt, Artificial Sequence
  Description of Artificial Sequence: Synthetic oligonucleotide
  Antisense strand to SEQ ID NO: 1592865
aucucucccucacgacuag

SEQ ID NO: 1592867 - RNA, 19 nt, Artificial Sequence
  Description of Artificial Sequence: Synthetic oligonucleotide
  Sense strand starting at position 1660 of SEQ ID NO: 1560333
gagggagagauguguguau

SEQ ID NO: 1592868 - RNA, 19 nt, Artificial Sequence
  Description of Artificial Sequence: Synthetic oligonucleotide
  Antisense strand to SEQ ID NO: 1592867
auacacacaucucucccuc

SEQ ID NO: 1592869 - RNA, 19 nt, Artificial Sequence
  Description of Artificial Sequence: Synthetic oligonucleotide
  Sense strand starting at position 1664 of SEQ ID NO: 1560333
gagagauguguguaucccu

SEQ ID NO: 1592870 - RNA, 19 nt, Artificial Sequence
  Description of Artificial Sequence: Synthetic oligonucleotide
  Antisense strand to SEQ ID NO: 1592869
agggauacacacaucucuc

SEQ ID NO: 1592871 - RNA, 19 nt, Artificial Sequence
  Description of Artificial Sequence: Synthetic oligonucleotide
  Sense strand starting at position 1671 of SEQ ID NO: 1560333
guguguaucccugcguauu

SEQ ID NO: 1592872 - RNA, 19 nt, Artificial Sequence
  Description of Artificial Sequence: Synthetic oligonucleotide
  Antisense strand to SEQ ID NO: 1592871
aauacgcagggauacacac

SEQ ID NO: 1592873 - RNA, 19 nt, Artificial Sequence
  Description of Artificial Sequence: Synthetic oligonucleotide
  Sense strand starting at position 1746 of SEQ ID NO: 1560333
gcugguaucgugaggaggu

SEQ ID NO: 1592874 - RNA, 19 nt, Artificial Sequence
  Description of Artificial Sequence: Synthetic oligonucleotide
  Antisense strand to SEQ ID NO: 1592873
accuccucacgauaccagc

SEQ ID NO: 1592875 - RNA, 19 nt, Artificial Sequence
  Description of Artificial Sequence: Synthetic oligonucleotide
  Sense strand starting at position 1806 of SEQ ID NO: 1560333
gaaagaccugggugaaguu

SEQ ID NO: 1592876 - RNA, 19 nt, Artificial Sequence
  Description of Artificial Sequence: Synthetic oligonucleotide
  Antisense strand to SEQ ID NO: 1592875
aacuucacccaggucuuuc

SEQ ID NO: 1592877 - RNA, 19 nt, Artificial Sequence
  Description of Artificial Sequence: Synthetic oligonucleotide
  Sense strand starting at position 1820 of SEQ ID NO: 1560333
aaguucuuaccuugcagga

SEQ ID NO: 1592878 - RNA, 19 nt, Artificial Sequence
  Description of Artificial Sequence: Synthetic oligonucleotide
  Antisense strand to SEQ ID NO: 1592877
uccugcaagguaagaacuu

SEQ ID NO: 1592879 - RNA, 19 nt, Artificial Sequence
  Description of Artificial Sequence: Synthetic oligonucleotide
  Sense strand starting at position 1871 of SEQ ID NO: 1560333
uucuguucgcaggcaaagu

SEQ ID NO: 1592880 - RNA, 19 nt, Artificial Sequence
  Description of Artificial Sequence: Synthetic oligonucleotide
  Antisense strand to SEQ ID NO: 1592879
acuuugccugcgaacagaa

SEQ ID NO: 1592881 - RNA, 19 nt, Artificial Sequence
  Description of Artificial Sequence: Synthetic oligonucleotide
  Sense strand starting at position 2095 of SEQ ID NO: 1560333
guggcuuagcguuuaccaa

SEQ ID NO: 1592882 - RNA, 19 nt, Artificial Sequence
  Description of Artificial Sequence: Synthetic oligonucleotide
  Antisense strand to SEQ ID NO: 1592881
uugguaaacgcuaagccac

SEQ ID NO: 1592883 - RNA, 19 nt, Artificial Sequence
  Description of Artificial Sequence: Synthetic oligonucleotide
  Sense strand starting at position 2159 of SEQ ID NO: 1560333
uuggacauuugggaacaga

SEQ ID NO: 1592884 - RNA, 19 nt, Artificial Sequence
  Description of Artificial Sequence: Synthetic oligonucleotide
  Antisense strand to SEQ ID NO: 1592883
ucuguucccaaauguccaa

SEQ ID NO: 1592885 - RNA, 19 nt, Artificial Sequence
  Description of Artificial Sequence: Synthetic oligonucleotide
  Sense strand starting at position 2282 of SEQ ID NO: 1560333
caaugaggcgauuggagaa

SEQ ID NO: 1592886 - RNA, 19 nt, Artificial Sequence
  Description of Artificial Sequence: Synthetic oligonucleotide
  Antisense strand to SEQ ID NO: 1592885
uucuccaaucgccucauug

SEQ ID NO: 1592887 - RNA, 19 nt, Artificial Sequence
  Description of Artificial Sequence: Synthetic oligonucleotide
  Sense strand starting at position 2395 of SEQ ID NO: 1560333
ggaguuugcgucaggcaca

SEQ ID NO: 1592888 - RNA, 19 nt, Artificial Sequence
  Description of Artificial Sequence: Synthetic oligonucleotide
  Antisense strand to SEQ ID NO: 1592887
ugugccugacgcaaacucc

SEQ ID NO: 1592889 - RNA, 19 nt, Artificial Sequence
  Description of Artificial Sequence: Synthetic oligonucleotide
  Sense strand starting at position 2702 of SEQ ID NO: 1560333
gugggagacuccuuggaga

SEQ ID NO: 1592890 - RNA, 19 nt, Artificial Sequence
  Description of Artificial Sequence: Synthetic oligonucleotide
  Antisense strand to SEQ ID NO: 1592889
ucuccaaggagucucccac

SEQ ID NO: 1592891 - RNA, 19 nt, Artificial Sequence
  Description of Artificial Sequence: Synthetic oligonucleotide
  Sense strand starting at position 2739 of SEQ ID NO: 1560333
cugccacuuccuuaggaga

SEQ ID NO: 1592892 - RNA, 19 nt, Artificial Sequence
  Description of Artificial Sequence: Synthetic oligonucleotide
  Antisense strand to SEQ ID NO: 1592891
ucuccuaaggaaguggcag

SEQ ID NO: 1592893 - RNA, 19 nt, Artificial Sequence
  Description of Artificial Sequence: Synthetic oligonucleotide
  Sense strand starting at position 2938 of SEQ ID NO: 1560333
gaaugaaacugacuuugua

SEQ ID NO: 1592894 - RNA, 19 nt, Artificial Sequence
  Description of Artificial Sequence: Synthetic oligonucleotide
  Antisense strand to SEQ ID NO: 1592893
uacaaagucaguuucauuc

SEQ ID NO: 1592895 - RNA, 19 nt, Artificial Sequence
  Description of Artificial Sequence: Synthetic oligonucleotide
  Sense strand starting at position 2964 of SEQ ID NO: 1560333
gacuuucuucugggcaaag

SEQ ID NO: 1592896 - RNA, 19 nt, Artificial Sequence
  Description of Artificial Sequence: Synthetic oligonucleotide
  Antisense strand to SEQ ID NO: 1592895
cuuugcccagaagaaaguc

SEQ ID NO: 1592897 - RNA, 19 nt, Artificial Sequence
  Description of Artificial Sequence: Synthetic oligonucleotide
  Sense strand starting at position 2965 of SEQ ID NO: 1560333
acuuucuucugggcaaaga

SEQ ID NO: 1592898 - RNA, 19 nt, Artificial Sequence
  Description of Artificial Sequence: Synthetic oligonucleotide
  Antisense strand to SEQ ID NO: 1592897
ucuuugcccagaagaaagu

SEQ ID NO: 1592899 - RNA, 19 nt, Artificial Sequence
  Description of Artificial Sequence: Synthetic oligonucleotide
  Sense strand starting at position 2966 of SEQ ID NO: 1560333
cuuucuucugggcaaagau

SEQ ID NO: 1592900 - RNA, 19 nt, Artificial Sequence
  Description of Artificial Sequence: Synthetic oligonucleotide
  Antisense strand to SEQ ID NO: 1592899
aucuuugcccagaagaaag

SEQ ID NO: 1592901 - RNA, 19 nt, Artificial Sequence
  Description of Artificial Sequence: Synthetic oligonucleotide
  Sense strand starting at position 3009 of SEQ ID NO: 1560333
agaacaggucccugucaca

SEQ ID NO: 1592902 - RNA, 19 nt, Artificial Sequence
  Description of Artificial Sequence: Synthetic oligonucleotide
  Antisense strand to SEQ ID NO: 1592901
ugugacagggaccuguucu

SEQ ID NO: 1592903 - RNA, 19 nt, Artificial Sequence
  Description of Artificial Sequence: Synthetic oligonucleotide
  Sense strand starting at position 3031 of SEQ ID NO: 1560333
ugcauagggccuuguauuu

SEQ ID NO: 1592904 - RNA, 19 nt, Artificial Sequence
  Description of Artificial Sequence: Synthetic oligonucleotide
  Antisense strand to SEQ ID NO: 1592903
aaauacaaggcccuaugca

SEQ ID NO: 1592905 - RNA, 19 nt, Artificial Sequence
  Description of Artificial Sequence: Synthetic oligonucleotide
  Sense strand starting at position 3348 of SEQ ID NO: 1560333
guggaagccuaucuuuaga

SEQ ID NO: 1592906 - RNA, 19 nt, Artificial Sequence
  Description of Artificial Sequence: Synthetic oligonucleotide
  Antisense strand to SEQ ID NO: 1592905
ucuaaagauaggcuuccac

SEQ ID NO: 1592907 - RNA, 19 nt, Artificial Sequence
  Description of Artificial Sequence: Synthetic oligonucleotide
  Sense strand starting at position 3373 of SEQ ID NO: 1560333
gaggcaauggguugcagaa

SEQ ID NO: 1592908 - RNA, 19 nt, Artificial Sequence
  Description of Artificial Sequence: Synthetic oligonucleotide
  Antisense strand to SEQ ID NO: 1592907
uucugcaacccauugccuc

SEQ ID NO: 1592909 - RNA, 19 nt, Artificial Sequence
  Description of Artificial Sequence: Synthetic oligonucleotide
  Sense strand starting at position 3386 of SEQ ID NO: 1560333
gcagaagagcuuugaacua

SEQ ID NO: 1592910 - RNA, 19 nt, Artificial Sequence
  Description of Artificial Sequence: Synthetic oligonucleotide
  Antisense strand to SEQ ID NO: 1592909
uaguucaaagcucuucugc

SEQ ID NO: 1592911 - RNA, 19 nt, Artificial Sequence
  Description of Artificial Sequence: Synthetic oligonucleotide
  Sense strand starting at position 3425 of SEQ ID NO: 1560333
agugguuacauggguggau

SEQ ID NO: 1592912 - RNA, 19 nt, Artificial Sequence
  Description of Artificial Sequence: Synthetic oligonucleotide
  Antisense strand to SEQ ID NO: 1592911
auccacccauguaaccacu

SEQ ID NO: 1592913 - RNA, 19 nt, Artificial Sequence
  Description of Artificial Sequence: Synthetic oligonucleotide
  Sense strand starting at position 3459 of SEQ ID NO: 1560333
gccgcuuuccacuugugua

SEQ ID NO: 1592914 - RNA, 19 nt, Artificial Sequence
  Description of Artificial Sequence: Synthetic oligonucleotide
  Antisense strand to SEQ ID NO: 1592913
uacacaaguggaaagcggc

SEQ ID NO: 1592915 - RNA, 19 nt, Artificial Sequence
  Description of Artificial Sequence: Synthetic oligonucleotide
  Sense strand starting at position 3494 of SEQ ID NO: 1560333
ugcacuucucuggaucuau

SEQ ID NO: 1592916 - RNA, 19 nt, Artificial Sequence
  Description of Artificial Sequence: Synthetic oligonucleotide
  Antisense strand to SEQ ID NO: 1592915
auagauccagagaagugca

SEQ ID NO: 1592917 - RNA, 19 nt, Artificial Sequence
  Description of Artificial Sequence: Synthetic oligonucleotide
  Sense strand starting at position 3550 of SEQ ID NO: 1560333
accucauagggcugugaaa

SEQ ID NO: 1592918 - RNA, 19 nt, Artificial Sequence
  Description of Artificial Sequence: Synthetic oligonucleotide
  Antisense strand to SEQ ID NO: 1592917
uuucacagcccuaugaggu

SEQ ID NO: 1592919 - RNA, 19 nt, Artificial Sequence
  Description of Artificial Sequence: Synthetic oligonucleotide
  Sense strand starting at position 3613 of SEQ ID NO: 1560333
gggcaauaggaauguugau

SEQ ID NO: 1592920 - RNA, 19 nt, Artificial Sequence
  Description of Artificial Sequence: Synthetic oligonucleotide
  Antisense strand to SEQ ID NO: 1592919
aucaacauuccuauugccc

SEQ ID NO: 1592921 - RNA, 19 nt, Artificial Sequence
  Description of Artificial Sequence: Synthetic oligonucleotide
  Sense strand starting at position 3871 of SEQ ID NO: 1560333
guaguagguaucuaggaac

SEQ ID NO: 1592922 - RNA, 19 nt, Artificial Sequence
  Description of Artificial Sequence: Synthetic oligonucleotide
  Antisense strand to SEQ ID NO: 1592921
guuccuagauaccuacuac

SEQ ID NO: 1592923 - RNA, 19 nt, Artificial Sequence
  Description of Artificial Sequence: Synthetic oligonucleotide
  Sense strand starting at position 1433 of SEQ ID NO: 1560334
gggcgugcugucugggaga

SEQ ID NO: 1592924 - RNA, 19 nt, Artificial Sequence
  Description of Artificial Sequence: Synthetic oligonucleotide
  Antisense strand to SEQ ID NO: 1592923
ucucccagacagcacgccc

SEQ ID NO: 1592925 - RNA, 19 nt, Artificial Sequence
  Description of Artificial Sequence: Synthetic oligonucleotide
  Sense strand starting at position 1435 of SEQ ID NO: 1560334
gcgugcugucugggagaga

SEQ ID NO: 1592926 - RNA, 19 nt, Artificial Sequence
  Description of Artificial Sequence: Synthetic oligonucleotide
  Antisense strand to SEQ ID NO: 1592925
ucucucccagacagcacgc

SEQ ID NO: 1592927 - RNA, 19 nt, Artificial Sequence
  Description of Artificial Sequence: Synthetic oligonucleotide
  Sense strand starting at position 1664 of SEQ ID NO: 1560334
agcuccaucucugauguaa

SEQ ID NO: 1592928 - RNA, 19 nt, Artificial Sequence
  Description of Artificial Sequence: Synthetic oligonucleotide
  Antisense strand to SEQ ID NO: 1592927
uuacaucagagauggagcu

SEQ ID NO: 1592929 - RNA, 19 nt, Artificial Sequence
  Description of Artificial Sequence: Synthetic oligonucleotide
  Sense strand starting at position 2147 of SEQ ID NO: 1560334
ggaagcaucugcgguucaa

SEQ ID NO: 1592930 - RNA, 19 nt, Artificial Sequence
  Description of Artificial Sequence: Synthetic oligonucleotide
  Antisense strand to SEQ ID NO: 1592929
uugaaccgcagaugcuucc

SEQ ID NO: 1592931 - RNA, 19 nt, Artificial Sequence
  Description of Artificial Sequence: Synthetic oligonucleotide
  Sense strand starting at position 2761 of SEQ ID NO: 1560334
cuguaugagugccucacuu

SEQ ID NO: 1592932 - RNA, 19 nt, Artificial Sequence
  Description of Artificial Sequence: Synthetic oligonucleotide
  Antisense strand to SEQ ID NO: 1592931
aagugaggcacucauacag

SEQ ID NO: 1592933 - RNA, 19 nt, Artificial Sequence
  Description of Artificial Sequence: Synthetic oligonucleotide
  Sense strand starting at position 2887 of SEQ ID NO: 1560334
gaccucugacccugaguga

SEQ ID NO: 1592934 - RNA, 19 nt, Artificial Sequence
  Description of Artificial Sequence: Synthetic oligonucleotide
  Antisense strand to SEQ ID NO: 1592933
ucacucagggucagagguc

SEQ ID NO: 1592935 - RNA, 19 nt, Artificial Sequence
  Description of Artificial Sequence: Synthetic oligonucleotide
  Sense strand starting at position 2998 of SEQ ID NO: 1560334
gggcucaucgggcagauga

SEQ ID NO: 1592936 - RNA, 19 nt, Artificial Sequence
  Description of Artificial Sequence: Synthetic oligonucleotide
  Antisense strand to SEQ ID NO: 1592935
ucaucugcccgaugagccc

SEQ ID NO: 1592937 - RNA, 19 nt, Artificial Sequence
  Description of Artificial Sequence: Synthetic oligonucleotide
  Sense strand starting at position 3452 of SEQ ID NO: 1560334
ucccauuucugggcaguuu

SEQ ID NO: 1592938 - RNA, 19 nt, Artificial Sequence
  Description of Artificial Sequence: Synthetic oligonucleotide
  Antisense strand to SEQ ID NO: 1592937
aaacugcccagaaauggga

SEQ ID NO: 1592939 - RNA, 19 nt, Artificial Sequence
  Description of Artificial Sequence: Synthetic oligonucleotide
  Sense strand starting at position 3579 of SEQ ID NO: 1560334
cgucuucucugugagcaga

SEQ ID NO: 1592940 - RNA, 19 nt, Artificial Sequence
  Description of Artificial Sequence: Synthetic oligonucleotide
  Antisense strand to SEQ ID NO: 1592939
ucugcucacagagaagacg

SEQ ID NO: 1592941 - RNA, 19 nt, Artificial Sequence
  Description of Artificial Sequence: Synthetic oligonucleotide
  Sense strand starting at position 3650 of SEQ ID NO: 1560334
ggcagggugguuugaagau

SEQ ID NO: 1592942 - RNA, 19 nt, Artificial Sequence
  Description of Artificial Sequence: Synthetic oligonucleotide
  Antisense strand to SEQ ID NO: 1592941
aucuucaaaccacccugcc

SEQ ID NO: 1592943 - RNA, 19 nt, Artificial Sequence
  Description of Artificial Sequence: Synthetic oligonucleotide
  Sense strand starting at position 3656 of SEQ ID NO: 1560334
gugguuugaagaugaugca

SEQ ID NO: 1592944 - RNA, 19 nt, Artificial Sequence
  Description of Artificial Sequence: Synthetic oligonucleotide
  Antisense strand to SEQ ID NO: 1592943
ugcaucaucuucaaaccac

SEQ ID NO: 1592945 - RNA, 19 nt, Artificial Sequence
  Description of Artificial Sequence: Synthetic oligonucleotide
  Sense strand starting at position 3659 of SEQ ID NO: 1560334
guuugaagaugaugcauca

SEQ ID NO: 1592946 - RNA, 19 nt, Artificial Sequence
  Description of Artificial Sequence: Synthetic oligonucleotide
  Antisense strand to SEQ ID NO: 1592945
ugaugcaucaucuucaaac

SEQ ID NO: 1592947 - RNA, 19 nt, Artificial Sequence
  Description of Artificial Sequence: Synthetic oligonucleotide
  Sense strand starting at position 9 of SEQ ID NO: 1560335
gcggaaaugugaucaaaug

SEQ ID NO: 1592948 - RNA, 19 nt, Artificial Sequence
  Description of Artificial Sequence: Synthetic oligonucleotide
  Antisense strand to SEQ ID NO: 1592947
cauuugaucacauuuccgc

SEQ ID NO: 1592949 - RNA, 19 nt, Artificial Sequence
  Description of Artificial Sequence: Synthetic oligonucleotide
  Sense strand starting at position 230 of SEQ ID NO: 1560335
cgggcaggucaucgaugaa

SEQ ID NO: 1592950 - RNA, 19 nt, Artificial Sequence
  Description of Artificial Sequence: Synthetic oligonucleotide
  Antisense strand to SEQ ID NO: 1592949
uucaucgaugaccugcccg

SEQ ID NO: 1592951 - RNA, 19 nt, Artificial Sequence
  Description of Artificial Sequence: Synthetic oligonucleotide
  Sense strand starting at position 233 of SEQ ID NO: 1560335
gcaggucaucgaugaauag

SEQ ID NO: 1592952 - RNA, 19 nt, Artificial Sequence
  Description of Artificial Sequence: Synthetic oligonucleotide
  Antisense strand to SEQ ID NO: 1592951
cuauucaucgaugaccugc

SEQ ID NO: 1592953 - RNA, 19 nt, Artificial Sequence
  Description of Artificial Sequence: Synthetic oligonucleotide
  Sense strand starting at position 280 of SEQ ID NO: 1560335
uccuauuggccucaguagu

SEQ ID NO: 1592954 - RNA, 19 nt, Artificial Sequence
  Description of Artificial Sequence: Synthetic oligonucleotide
  Antisense strand to SEQ ID NO: 1592953
acuacugaggccaauagga

SEQ ID NO: 1592955 - RNA, 19 nt, Artificial Sequence
  Description of Artificial Sequence: Synthetic oligonucleotide
  Sense strand starting at position 294 of SEQ ID NO: 1560335
guaguagaaucccugauca

SEQ ID NO: 1592956 - RNA, 19 nt, Artificial Sequence
  Description of Artificial Sequence: Synthetic oligonucleotide
  Antisense strand to SEQ ID NO: 1592955
ugaucagggauucuacuac

SEQ ID NO: 1592957 - RNA, 19 nt, Artificial Sequence
  Description of Artificial Sequence: Synthetic oligonucleotide
  Sense strand starting at position 408 of SEQ ID NO: 1560335
gcagaagugucuucgguga

SEQ ID NO: 1592958 - RNA, 19 nt, Artificial Sequence
  Description of Artificial Sequence: Synthetic oligonucleotide
  Antisense strand to SEQ ID NO: 1592957
ucaccgaagacacuucugc

SEQ ID NO: 1592959 - RNA, 19 nt, Artificial Sequence
  Description of Artificial Sequence: Synthetic oligonucleotide
  Sense strand starting at position 413 of SEQ ID NO: 1560335
agugucuucggugaauccu

SEQ ID NO: 1592960 - RNA, 19 nt, Artificial Sequence
  Description of Artificial Sequence: Synthetic oligonucleotide
  Antisense strand to SEQ ID NO: 1592959
aggauucaccgaagacacu

SEQ ID NO: 1592961 - RNA, 19 nt, Artificial Sequence
  Description of Artificial Sequence: Synthetic oligonucleotide
  Sense strand starting at position 422 of SEQ ID NO: 1560335
ggugaauccugggaagcuu

SEQ ID NO: 1592962 - RNA, 19 nt, Artificial Sequence
  Description of Artificial Sequence: Synthetic oligonucleotide
  Antisense strand to SEQ ID NO: 1592961
aagcuucccaggauucacc

SEQ ID NO: 1592963 - RNA, 19 nt, Artificial Sequence
  Description of Artificial Sequence: Synthetic oligonucleotide
  Sense strand starting at position 506 of SEQ ID NO: 1560335
gcagaauccagcugaugac

SEQ ID NO: 1592964 - RNA, 19 nt, Artificial Sequence
  Description of Artificial Sequence: Synthetic oligonucleotide
  Antisense strand to SEQ ID NO: 1592963
gucaucagcuggauucugc

SEQ ID NO: 1592965 - RNA, 19 nt, Artificial Sequence
  Description of Artificial Sequence: Synthetic oligonucleotide
  Sense strand starting at position 525 of SEQ ID NO: 1560335
agggcaaagcaaugaugua

SEQ ID NO: 1592966 - RNA, 19 nt, Artificial Sequence
  Description of Artificial Sequence: Synthetic oligonucleotide
  Antisense strand to SEQ ID NO: 1592965
uacaucauugcuuugcccu

SEQ ID NO: 1592967 - RNA, 19 nt, Artificial Sequence
  Description of Artificial Sequence: Synthetic oligonucleotide
  Sense strand starting at position 556 of SEQ ID NO: 1560335
guuccugaagaauguguga

SEQ ID NO: 1592968 - RNA, 19 nt, Artificial Sequence
  Description of Artificial Sequence: Synthetic oligonucleotide
  Antisense strand to SEQ ID NO: 1592967
ucacacauucuucaggaac

SEQ ID NO: 1592969 - RNA, 19 nt, Artificial Sequence
  Description of Artificial Sequence: Synthetic oligonucleotide
  Sense strand starting at position 558 of SEQ ID NO: 1560335
uccugaagaaugugugaca

SEQ ID NO: 1592970 - RNA, 19 nt, Artificial Sequence
  Description of Artificial Sequence: Synthetic oligonucleotide
  Antisense strand to SEQ ID NO: 1592969
ugucacacauucuucagga

SEQ ID NO: 1592971 - RNA, 19 nt, Artificial Sequence
  Description of Artificial Sequence: Synthetic oligonucleotide
  Sense strand starting at position 561 of SEQ ID NO: 1560335
ugaagaaugugugacauug

SEQ ID NO: 1592972 - RNA, 19 nt, Artificial Sequence
  Description of Artificial Sequence: Synthetic oligonucleotide
  Antisense strand to SEQ ID NO: 1592971
caaugucacacauucuuca

SEQ ID NO: 1592973 - RNA, 19 nt, Artificial Sequence
  Description of Artificial Sequence: Synthetic oligonucleotide
  Sense strand starting at position 569 of SEQ ID NO: 1560335
gugugacauugcucuacca

SEQ ID NO: 1592974 - RNA, 19 nt, Artificial Sequence
  Description of Artificial Sequence: Synthetic oligonucleotide
  Antisense strand to SEQ ID NO: 1592973
ugguagagcaaugucacac

SEQ ID NO: 1592975 - RNA, 19 nt, Artificial Sequence
  Description of Artificial Sequence: Synthetic oligonucleotide
  Sense strand starting at position 594 of SEQ ID NO: 1560335
aauggugucucuccagaga

SEQ ID NO: 1592976 - RNA, 19 nt, Artificial Sequence
  Description of Artificial Sequence: Synthetic oligonucleotide
  Antisense strand to SEQ ID NO: 1592975
ucucuggagagacaccauu

SEQ ID NO: 1592977 - RNA, 19 nt, Artificial Sequence
  Description of Artificial Sequence: Synthetic oligonucleotide
  Sense strand starting at position 597 of SEQ ID NO: 1560335
ggugucucuccagagaaag

SEQ ID NO: 1592978 - RNA, 19 nt, Artificial Sequence
  Description of Artificial Sequence: Synthetic oligonucleotide
  Antisense strand to SEQ ID NO: 1592977
cuuucucuggagagacacc

SEQ ID NO: 1592979 - RNA, 19 nt, Artificial Sequence
  Description of Artificial Sequence: Synthetic oligonucleotide
  Sense strand starting at position 632 of SEQ ID NO: 1560335
ugcuuaagccucuaguaau

SEQ ID NO: 1592980 - RNA, 19 nt, Artificial Sequence
  Description of Artificial Sequence: Synthetic oligonucleotide
  Antisense strand to SEQ ID NO: 1592979
auuacuagaggcuuaagca

SEQ ID NO: 1592981 - RNA, 19 nt, Artificial Sequence
  Description of Artificial Sequence: Synthetic oligonucleotide
  Sense strand starting at position 643 of SEQ ID NO: 1560335
cuaguaauaucugaaugua

SEQ ID NO: 1592982 - RNA, 19 nt, Artificial Sequence
  Description of Artificial Sequence: Synthetic oligonucleotide
  Antisense strand to SEQ ID NO: 1592981
uacauucagauauuacuag

SEQ ID NO: 1592983 - RNA, 19 nt, Artificial Sequence
  Description of Artificial Sequence: Synthetic oligonucleotide
  Sense strand starting at position 646 of SEQ ID NO: 1560335
guaauaucugaauguaauc

SEQ ID NO: 1592984 - RNA, 19 nt, Artificial Sequence
  Description of Artificial Sequence: Synthetic oligonucleotide
  Antisense strand to SEQ ID NO: 1592983
gauuacauucagauauuac

SEQ ID NO: 1592985 - RNA, 19 nt, Artificial Sequence
  Description of Artificial Sequence: Synthetic oligonucleotide
  Sense strand starting at position 1209 of SEQ ID NO: 1560335
cguggugaaacucaauguu

SEQ ID NO: 1592986 - RNA, 19 nt, Artificial Sequence
  Description of Artificial Sequence: Synthetic oligonucleotide
  Antisense strand to SEQ ID NO: 1592985
aacauugaguuucaccacg

SEQ ID NO: 1592987 - RNA, 19 nt, Artificial Sequence
  Description of Artificial Sequence: Synthetic oligonucleotide
  Sense strand starting at position 1212 of SEQ ID NO: 1560335
ggugaaacucaauguuucu

SEQ ID NO: 1592988 - RNA, 19 nt, Artificial Sequence
  Description of Artificial Sequence: Synthetic oligonucleotide
  Antisense strand to SEQ ID NO: 1592987
agaaacauugaguuucacc

SEQ ID NO: 1592989 - RNA, 19 nt, Artificial Sequence
  Description of Artificial Sequence: Synthetic oligonucleotide
  Sense strand starting at position 1643 of SEQ ID NO: 1560335
caggaagaguugucacucu

SEQ ID NO: 1592990 - RNA, 19 nt, Artificial Sequence
  Description of Artificial Sequence: Synthetic oligonucleotide
  Antisense strand to SEQ ID NO: 1592989
agagugacaacucuuccug

SEQ ID NO: 1592991 - RNA, 19 nt, Artificial Sequence
  Description of Artificial Sequence: Synthetic oligonucleotide
  Sense strand starting at position 2114 of SEQ ID NO: 1560335
gggccaugagcagaugcau

SEQ ID NO: 1592992 - RNA, 19 nt, Artificial Sequence
  Description of Artificial Sequence: Synthetic oligonucleotide
  Antisense strand to SEQ ID NO: 1592991
augcaucugcucauggccc

SEQ ID NO: 1592993 - RNA, 19 nt, Artificial Sequence
  Description of Artificial Sequence: Synthetic oligonucleotide
  Sense strand starting at position 2253 of SEQ ID NO: 1560335
ucagcagaggguugacuua

SEQ ID NO: 1592994 - RNA, 19 nt, Artificial Sequence
  Description of Artificial Sequence: Synthetic oligonucleotide
  Antisense strand to SEQ ID NO: 1592993
uaagucaacccucugcuga

SEQ ID NO: 1592995 - RNA, 19 nt, Artificial Sequence
  Description of Artificial Sequence: Synthetic oligonucleotide
  Sense strand starting at position 2283 of SEQ ID NO: 1560335
ggacaugucuacguccuga

SEQ ID NO: 1592996 - RNA, 19 nt, Artificial Sequence
  Description of Artificial Sequence: Synthetic oligonucleotide
  Antisense strand to SEQ ID NO: 1592995
ucaggacguagacaugucc

SEQ ID NO: 1592997 - RNA, 19 nt, Artificial Sequence
  Description of Artificial Sequence: Synthetic oligonucleotide
  Sense strand starting at position 2317 of SEQ ID NO: 1560335
augugaccuuauucggaau

SEQ ID NO: 1592998 - RNA, 19 nt, Artificial Sequence
  Description of Artificial Sequence: Synthetic oligonucleotide
  Antisense strand to SEQ ID NO: 1592997
auuccgaauaaggucacau

SEQ ID NO: 1592999 - RNA, 19 nt, Artificial Sequence
  Description of Artificial Sequence: Synthetic oligonucleotide
  Sense strand starting at position 2318 of SEQ ID NO: 1560335
ugugaccuuauucggaaua

SEQ ID NO: 1593000 - RNA, 19 nt, Artificial Sequence
  Description of Artificial Sequence: Synthetic oligonucleotide
  Antisense strand to SEQ ID NO: 1592999
uauuccgaauaaggucaca

SEQ ID NO: 1593001 - RNA, 19 nt, Artificial Sequence
  Description of Artificial Sequence: Synthetic oligonucleotide
  Sense strand starting at position 2320 of SEQ ID NO: 1560335
ugaccuuauucggaauacu

SEQ ID NO: 1593002 - RNA, 19 nt, Artificial Sequence
  Description of Artificial Sequence: Synthetic oligonucleotide
  Antisense strand to SEQ ID NO: 1593001
aguauuccgaauaagguca

SEQ ID NO: 1593003 - RNA, 19 nt, Artificial Sequence
  Description of Artificial Sequence: Synthetic oligonucleotide
  Sense strand starting at position 2323 of SEQ ID NO: 1560335
ccuuauucggaauacuuau

SEQ ID NO: 1593004 - RNA, 19 nt, Artificial Sequence
  Description of Artificial Sequence: Synthetic oligonucleotide
  Antisense strand to SEQ ID NO: 1593003
auaaguauuccgaauaagg

SEQ ID NO: 1593005 - RNA, 19 nt, Artificial Sequence
  Description of Artificial Sequence: Synthetic oligonucleotide
  Sense strand starting at position 2329 of SEQ ID NO: 1560335
ucggaauacuuauuccaaa

SEQ ID NO: 1593006 - RNA, 19 nt, Artificial Sequence
  Description of Artificial Sequence: Synthetic oligonucleotide
  Antisense strand to SEQ ID NO: 1593005
uuuggaauaaguauuccga

SEQ ID NO: 1593007 - RNA, 19 nt, Artificial Sequence
  Description of Artificial Sequence: Synthetic oligonucleotide
  Sense strand starting at position 2330 of SEQ ID NO: 1560335
cggaauacuuauuccaaau

SEQ ID NO: 1593008 - RNA, 19 nt, Artificial Sequence
  Description of Artificial Sequence: Synthetic oligonucleotide
  Antisense strand to SEQ ID NO: 1593007
auuuggaauaaguauuccg

SEQ ID NO: 1593009 - RNA, 19 nt, Artificial Sequence
  Description of Artificial Sequence: Synthetic oligonucleotide
  Sense strand starting at position 2361 of SEQ ID NO: 1560335
ggaacuuauuuggaauacu

SEQ ID NO: 1593010 - RNA, 19 nt, Artificial Sequence
  Description of Artificial Sequence: Synthetic oligonucleotide
  Antisense strand to SEQ ID NO: 1593009
aguauuccaaauaaguucc

SEQ ID NO: 1593011 - RNA, 19 nt, Artificial Sequence
  Description of Artificial Sequence: Synthetic oligonucleotide
  Sense strand starting at position 2383 of SEQ ID NO: 1560335
uugguaucuugagaugaaa

SEQ ID NO: 1593012 - RNA, 19 nt, Artificial Sequence
  Description of Artificial Sequence: Synthetic oligonucleotide
  Antisense strand to SEQ ID NO: 1593011
uuucaucucaagauaccaa

SEQ ID NO: 1593013 - RNA, 19 nt, Artificial Sequence
  Description of Artificial Sequence: Synthetic oligonucleotide
  Sense strand starting at position 2385 of SEQ ID NO: 1560335
gguaucuugagaugaaacc

SEQ ID NO: 1593014 - RNA, 19 nt, Artificial Sequence
  Description of Artificial Sequence: Synthetic oligonucleotide
  Antisense strand to SEQ ID NO: 1593013
gguuucaucucaagauacc

SEQ ID NO: 1593015 - RNA, 19 nt, Artificial Sequence
  Description of Artificial Sequence: Synthetic oligonucleotide
  Sense strand starting at position 2657 of SEQ ID NO: 1560335
cgcuuuagcccaggagaug

SEQ ID NO: 1593016 - RNA, 19 nt, Artificial Sequence
  Description of Artificial Sequence: Synthetic oligonucleotide
  Antisense strand to SEQ ID NO: 1593015
caucuccugggcuaaagcg

SEQ ID NO: 1593017 - RNA, 19 nt, Artificial Sequence
  Description of Artificial Sequence: Synthetic oligonucleotide
  Sense strand starting at position 2798 of SEQ ID NO: 1560335
aggagagacuggagugaua

SEQ ID NO: 1593018 - RNA, 19 nt, Artificial Sequence
  Description of Artificial Sequence: Synthetic oligonucleotide
  Antisense strand to SEQ ID NO: 1593017
uaucacuccagucucuccu

SEQ ID NO: 1593019 - RNA, 19 nt, Artificial Sequence
  Description of Artificial Sequence: Synthetic oligonucleotide
  Sense strand starting at position 2811 of SEQ ID NO: 1560335
gugauauggccacaagcua

SEQ ID NO: 1593020 - RNA, 19 nt, Artificial Sequence
  Description of Artificial Sequence: Synthetic oligonucleotide
  Antisense strand to SEQ ID NO: 1593019
uagcuuguggccauaucac

SEQ ID NO: 1593021 - RNA, 19 nt, Artificial Sequence
  Description of Artificial Sequence: Synthetic oligonucleotide
  Sense strand starting at position 2913 of SEQ ID NO: 1560335
uuggacuucugaucucuau

SEQ ID NO: 1593022 - RNA, 19 nt, Artificial Sequence
  Description of Artificial Sequence: Synthetic oligonucleotide
  Antisense strand to SEQ ID NO: 1593021
auagagaucagaaguccaa

SEQ ID NO: 1593023 - RNA, 19 nt, Artificial Sequence
  Description of Artificial Sequence: Synthetic oligonucleotide
  Sense strand starting at position 2926 of SEQ ID NO: 1560335
cucuauagcuaagacagaa

SEQ ID NO: 1593024 - RNA, 19 nt, Artificial Sequence
  Description of Artificial Sequence: Synthetic oligonucleotide
  Antisense strand to SEQ ID NO: 1593023
uucugucuuagcuauagag

SEQ ID NO: 1593025 - RNA, 19 nt, Artificial Sequence
  Description of Artificial Sequence: Synthetic oligonucleotide
  Sense strand starting at position 3935 of SEQ ID NO: 1560335
agaugagggcuauggauca

SEQ ID NO: 1593026 - RNA, 19 nt, Artificial Sequence
  Description of Artificial Sequence: Synthetic oligonucleotide
  Antisense strand to SEQ ID NO: 1593025
ugauccauagcccucaucu

SEQ ID NO: 1593027 - RNA, 19 nt, Artificial Sequence
  Description of Artificial Sequence: Synthetic oligonucleotide
  Sense strand starting at position 75 of SEQ ID NO: 1560336
agaccucugcacugaguua

SEQ ID NO: 1593028 - RNA, 19 nt, Artificial Sequence
  Description of Artificial Sequence: Synthetic oligonucleotide
  Antisense strand to SEQ ID NO: 1593027
uaacucagugcagaggucu

SEQ ID NO: 1593029 - RNA, 19 nt, Artificial Sequence
  Description of Artificial Sequence: Synthetic oligonucleotide
  Sense strand starting at position 153 of SEQ ID NO: 1560336
gaaauuggaucauugcaga

SEQ ID NO: 1593030 - RNA, 19 nt, Artificial Sequence
  Description of Artificial Sequence: Synthetic oligonucleotide
  Antisense strand to SEQ ID NO: 1593029
ucugcaaugauccaauuuc

SEQ ID NO: 1593031 - RNA, 19 nt, Artificial Sequence
  Description of Artificial Sequence: Synthetic oligonucleotide
  Sense strand starting at position 173 of SEQ ID NO: 1560336
auaaucaguugagaugaga

SEQ ID NO: 1593032 - RNA, 19 nt, Artificial Sequence
  Description of Artificial Sequence: Synthetic oligonucleotide
  Antisense strand to SEQ ID NO: 1593031
ucucaucucaacugauuau

SEQ ID NO: 1593033 - RNA, 19 nt, Artificial Sequence
  Description of Artificial Sequence: Synthetic oligonucleotide
  Sense strand starting at position 378 of SEQ ID NO: 1560336
ggaggauucugcccagcuc

SEQ ID NO: 1593034 - RNA, 19 nt, Artificial Sequence
  Description of Artificial Sequence: Synthetic oligonucleotide
  Antisense strand to SEQ ID NO: 1593033
gagcugggcagaauccucc

SEQ ID NO: 1593035 - RNA, 19 nt, Artificial Sequence
  Description of Artificial Sequence: Synthetic oligonucleotide
  Sense strand starting at position 379 of SEQ ID NO: 1560336
gaggauucugcccagcuca

SEQ ID NO: 1593036 - RNA, 19 nt, Artificial Sequence
  Description of Artificial Sequence: Synthetic oligonucleotide
  Antisense strand to SEQ ID NO: 1593035
ugagcugggcagaauccuc

SEQ ID NO: 1593037 - RNA, 19 nt, Artificial Sequence
  Description of Artificial Sequence: Synthetic oligonucleotide
  Sense strand starting at position 510 of SEQ ID NO: 1560336
gagucagaguugucucgug

SEQ ID NO: 1593038 - RNA, 19 nt, Artificial Sequence
  Description of Artificial Sequence: Synthetic oligonucleotide
  Antisense strand to SEQ ID NO: 1593037
cacgagacaacucugacuc

SEQ ID NO: 1593039 - RNA, 19 nt, Artificial Sequence
  Description of Artificial Sequence: Synthetic oligonucleotide
  Sense strand starting at position 792 of SEQ ID NO: 1560336
gccugcauuucuuauuaag

SEQ ID NO: 1593040 - RNA, 19 nt, Artificial Sequence
  Description of Artificial Sequence: Synthetic oligonucleotide
  Antisense strand to SEQ ID NO: 1593039
cuuaauaagaaaugcaggc

SEQ ID NO: 1593041 - RNA, 19 nt, Artificial Sequence
  Description of Artificial Sequence: Synthetic oligonucleotide
  Sense strand starting at position 869 of SEQ ID NO: 1560336
gaaguaagaagaugagugu

SEQ ID NO: 1593042 - RNA, 19 nt, Artificial Sequence
  Description of Artificial Sequence: Synthetic oligonucleotide
  Antisense strand to SEQ ID NO: 1593041
acacucaucuucuuacuuc

SEQ ID NO: 1593043 - RNA, 19 nt, Artificial Sequence
  Description of Artificial Sequence: Synthetic oligonucleotide
  Sense strand starting at position 873 of SEQ ID NO: 1560336
uaagaagaugagugugagu

SEQ ID NO: 1593044 - RNA, 19 nt, Artificial Sequence
  Description of Artificial Sequence: Synthetic oligonucleotide
  Antisense strand to SEQ ID NO: 1593043
acucacacucaucuucuua

SEQ ID NO: 1593045 - RNA, 19 nt, Artificial Sequence
  Description of Artificial Sequence: Synthetic oligonucleotide
  Sense strand starting at position 875 of SEQ ID NO: 1560336
agaagaugagugugaguuc

SEQ ID NO: 1593046 - RNA, 19 nt, Artificial Sequence
  Description of Artificial Sequence: Synthetic oligonucleotide
  Antisense strand to SEQ ID NO: 1593045
gaacucacacucaucuucu

SEQ ID NO: 1593047 - RNA, 19 nt, Artificial Sequence
  Description of Artificial Sequence: Synthetic oligonucleotide
  Sense strand starting at position 884 of SEQ ID NO: 1560336
gugugaguucugggaggca

SEQ ID NO: 1593048 - RNA, 19 nt, Artificial Sequence
  Description of Artificial Sequence: Synthetic oligonucleotide
  Antisense strand to SEQ ID NO: 1593047
ugccucccagaacucacac

SEQ ID NO: 1593049 - RNA, 19 nt, Artificial Sequence
  Description of Artificial Sequence: Synthetic oligonucleotide
  Sense strand starting at position 1219 of SEQ ID NO: 1560336
cagggauuccaucaccugu

SEQ ID NO: 1593050 - RNA, 19 nt, Artificial Sequence
  Description of Artificial Sequence: Synthetic oligonucleotide
  Antisense strand to SEQ ID NO: 1593049
acaggugauggaaucccug

SEQ ID NO: 1593051 - RNA, 19 nt, Artificial Sequence
  Description of Artificial Sequence: Synthetic oligonucleotide
  Sense strand starting at position 1236 of SEQ ID NO: 1560336
guacauggauccuaaggga

SEQ ID NO: 1593052 - RNA, 19 nt, Artificial Sequence
  Description of Artificial Sequence: Synthetic oligonucleotide
  Antisense strand to SEQ ID NO: 1593051
ucccuuaggauccauguac

SEQ ID NO: 1593053 - RNA, 19 nt, Artificial Sequence
  Description of Artificial Sequence: Synthetic oligonucleotide
  Sense strand starting at position 1280 of SEQ ID NO: 1560336
ucucaucgagccugaaguu

SEQ ID NO: 1593054 - RNA, 19 nt, Artificial Sequence
  Description of Artificial Sequence: Synthetic oligonucleotide
  Antisense strand to SEQ ID NO: 1593053
aacuucaggcucgaugaga

SEQ ID NO: 1593055 - RNA, 19 nt, Artificial Sequence
  Description of Artificial Sequence: Synthetic oligonucleotide
  Sense strand starting at position 1286 of SEQ ID NO: 1560336
cgagccugaaguugucaaa

SEQ ID NO: 1593056 - RNA, 19 nt, Artificial Sequence
  Description of Artificial Sequence: Synthetic oligonucleotide
  Antisense strand to SEQ ID NO: 1593055
uuugacaacuucaggcucg

SEQ ID NO: 1593057 - RNA, 19 nt, Artificial Sequence
  Description of Artificial Sequence: Synthetic oligonucleotide
  Sense strand starting at position 1318 of SEQ ID NO: 1560336
acccuuaacuguguguuau

SEQ ID NO: 1593058 - RNA, 19 nt, Artificial Sequence
  Description of Artificial Sequence: Synthetic oligonucleotide
  Antisense strand to SEQ ID NO: 1593057
auaacacacaguuaagggu

SEQ ID NO: 1593059 - RNA, 19 nt, Artificial Sequence
  Description of Artificial Sequence: Synthetic oligonucleotide
  Sense strand starting at position 1319 of SEQ ID NO: 1560336
cccuuaacuguguguuauu

SEQ ID NO: 1593060 - RNA, 19 nt, Artificial Sequence
  Description of Artificial Sequence: Synthetic oligonucleotide
  Antisense strand to SEQ ID NO: 1593059
aauaacacacaguuaaggg

SEQ ID NO: 1593061 - RNA, 19 nt, Artificial Sequence
  Description of Artificial Sequence: Synthetic oligonucleotide
  Sense strand starting at position 1330 of SEQ ID NO: 1560336
guguuauuggugcacugga

SEQ ID NO: 1593062 - RNA, 19 nt, Artificial Sequence
  Description of Artificial Sequence: Synthetic oligonucleotide
  Antisense strand to SEQ ID NO: 1593061
uccagugcaccaauaacac

SEQ ID NO: 1593063 - RNA, 19 nt, Artificial Sequence
  Description of Artificial Sequence: Synthetic oligonucleotide
  Sense strand starting at position 1425 of SEQ ID NO: 1560336
gggcauggcuuccuccaga

SEQ ID NO: 1593064 - RNA, 19 nt, Artificial Sequence
  Description of Artificial Sequence: Synthetic oligonucleotide
  Antisense strand to SEQ ID NO: 1593063
ucuggaggaagccaugccc

SEQ ID NO: 1593065 - RNA, 19 nt, Artificial Sequence
  Description of Artificial Sequence: Synthetic oligonucleotide
  Sense strand starting at position 1587 of SEQ ID NO: 1560336
cagguccuuguguguuaua

SEQ ID NO: 1593066 - RNA, 19 nt, Artificial Sequence
  Description of Artificial Sequence: Synthetic oligonucleotide
  Antisense strand to SEQ ID NO: 1593065
uauaacacacaaggaccug

SEQ ID NO: 1593067 - RNA, 19 nt, Artificial Sequence
  Description of Artificial Sequence: Synthetic oligonucleotide
  Sense strand starting at position 1588 of SEQ ID NO: 1560336
agguccuuguguguuauau

SEQ ID NO: 1593068 - RNA, 19 nt, Artificial Sequence
  Description of Artificial Sequence: Synthetic oligonucleotide
  Antisense strand to SEQ ID NO: 1593067
auauaacacacaaggaccu

SEQ ID NO: 1593069 - RNA, 19 nt, Artificial Sequence
  Description of Artificial Sequence: Synthetic oligonucleotide
  Sense strand starting at position 1655 of SEQ ID NO: 1560336
ggccauucuuguuccagca

SEQ ID NO: 1593070 - RNA, 19 nt, Artificial Sequence
  Description of Artificial Sequence: Synthetic oligonucleotide
  Antisense strand to SEQ ID NO: 1593069
ugcuggaacaagaauggcc

SEQ ID NO: 1593071 - RNA, 19 nt, Artificial Sequence
  Description of Artificial Sequence: Synthetic oligonucleotide
  Sense strand starting at position 1696 of SEQ ID NO: 1560336
ggcaauggaucuuuaauga

SEQ ID NO: 1593072 - RNA, 19 nt, Artificial Sequence
  Description of Artificial Sequence: Synthetic oligonucleotide
  Antisense strand to SEQ ID NO: 1593071
ucauuaaagauccauugcc

SEQ ID NO: 1593073 - RNA, 19 nt, Artificial Sequence
  Description of Artificial Sequence: Synthetic oligonucleotide
  Sense strand starting at position 1700 of SEQ ID NO: 1560336
auggaucuuuaaugagaag

SEQ ID NO: 1593074 - RNA, 19 nt, Artificial Sequence
  Description of Artificial Sequence: Synthetic oligonucleotide
  Antisense strand to SEQ ID NO: 1593073
cuucucauuaaagauccau

SEQ ID NO: 1593075 - RNA, 19 nt, Artificial Sequence
  Description of Artificial Sequence: Synthetic oligonucleotide
  Sense strand starting at position 1703 of SEQ ID NO: 1560336
gaucuuuaaugagaaggcu

SEQ ID NO: 1593076 - RNA, 19 nt, Artificial Sequence
  Description of Artificial Sequence: Synthetic oligonucleotide
  Antisense strand to SEQ ID NO: 1593075
agccuucucauuaaagauc

SEQ ID NO: 1593077 - RNA, 19 nt, Artificial Sequence
  Description of Artificial Sequence: Synthetic oligonucleotide
  Sense strand starting at position 1727 of SEQ ID NO: 1560336
cgggcauuauuuccauauu

SEQ ID NO: 1593078 - RNA, 19 nt, Artificial Sequence
  Description of Artificial Sequence: Synthetic oligonucleotide
  Antisense strand to SEQ ID NO: 1593077
aauauggaaauaaugcccg

SEQ ID NO: 1593079 - RNA, 19 nt, Artificial Sequence
  Description of Artificial Sequence: Synthetic oligonucleotide
  Sense strand starting at position 1728 of SEQ ID NO: 1560336
gggcauuauuuccauauug

SEQ ID NO: 1593080 - RNA, 19 nt, Artificial Sequence
  Description of Artificial Sequence: Synthetic oligonucleotide
  Antisense strand to SEQ ID NO: 1593079
caauauggaaauaaugccc

SEQ ID NO: 1593081 - RNA, 19 nt, Artificial Sequence
  Description of Artificial Sequence: Synthetic oligonucleotide
  Sense strand starting at position 1778 of SEQ ID NO: 1560336
ucuugccuugugugaauaa

SEQ ID NO: 1593082 - RNA, 19 nt, Artificial Sequence
  Description of Artificial Sequence: Synthetic oligonucleotide
  Antisense strand to SEQ ID NO: 1593081
uuauucacacaaggcaaga

SEQ ID NO: 1593083 - RNA, 19 nt, Artificial Sequence
  Description of Artificial Sequence: Synthetic oligonucleotide
  Sense strand starting at position 1820 of SEQ ID NO: 1560336
aguugcaauacaggagaau

SEQ ID NO: 1593084 - RNA, 19 nt, Artificial Sequence
  Description of Artificial Sequence: Synthetic oligonucleotide
  Antisense strand to SEQ ID NO: 1593083
auucuccuguauugcaacu

SEQ ID NO: 1593085 - RNA, 19 nt, Artificial Sequence
  Description of Artificial Sequence: Synthetic oligonucleotide
  Sense strand starting at position 1832 of SEQ ID NO: 1560336
ggagaauaucauugccuga

SEQ ID NO: 1593086 - RNA, 19 nt, Artificial Sequence
  Description of Artificial Sequence: Synthetic oligonucleotide
  Antisense strand to SEQ ID NO: 1593085
ucaggcaaugauauucucc

SEQ ID NO: 1593087 - RNA, 19 nt, Artificial Sequence
  Description of Artificial Sequence: Synthetic oligonucleotide
  Sense strand starting at position 1834 of SEQ ID NO: 1560336
agaauaucauugccugaga

SEQ ID NO: 1593088 - RNA, 19 nt, Artificial Sequence
  Description of Artificial Sequence: Synthetic oligonucleotide
  Antisense strand to SEQ ID NO: 1593087
ucucaggcaaugauauucu

SEQ ID NO: 1593089 - RNA, 19 nt, Artificial Sequence
  Description of Artificial Sequence: Synthetic oligonucleotide
  Sense strand starting at position 1835 of SEQ ID NO: 1560336
gaauaucauugccugagag

SEQ ID NO: 1593090 - RNA, 19 nt, Artificial Sequence
  Description of Artificial Sequence: Synthetic oligonucleotide
  Antisense strand to SEQ ID NO: 1593089
cucucaggcaaugauauuc

SEQ ID NO: 1593091 - RNA, 19 nt, Artificial Sequence
  Description of Artificial Sequence: Synthetic oligonucleotide
  Sense strand starting at position 1836 of SEQ ID NO: 1560336
aauaucauugccugagagu

SEQ ID NO: 1593092 - RNA, 19 nt, Artificial Sequence
  Description of Artificial Sequence: Synthetic oligonucleotide
  Antisense strand to SEQ ID NO: 1593091
acucucaggcaaugauauu

SEQ ID NO: 1593093 - RNA, 19 nt, Artificial Sequence
  Description of Artificial Sequence: Synthetic oligonucleotide
  Sense strand starting at position 1837 of SEQ ID NO: 1560336
auaucauugccugagagua

SEQ ID NO: 1593094 - RNA, 19 nt, Artificial Sequence
  Description of Artificial Sequence: Synthetic oligonucleotide
  Antisense strand to SEQ ID NO: 1593093
uacucucaggcaaugauau

SEQ ID NO: 1593095 - RNA, 19 nt, Artificial Sequence
  Description of Artificial Sequence: Synthetic oligonucleotide
  Sense strand starting at position 2534 of SEQ ID NO: 1560336
agacuacauucccagggau

SEQ ID NO: 1593096 - RNA, 19 nt, Artificial Sequence
  Description of Artificial Sequence: Synthetic oligonucleotide
  Antisense strand to SEQ ID NO: 1593095
aucccugggaauguagucu

SEQ ID NO: 1593097 - RNA, 19 nt, Artificial Sequence
  Description of Artificial Sequence: Synthetic oligonucleotide
  Sense strand starting at position 2566 of SEQ ID NO: 1560336
gaaggugucacaugugaac

SEQ ID NO: 1593098 - RNA, 19 nt, Artificial Sequence
  Description of Artificial Sequence: Synthetic oligonucleotide
  Antisense strand to SEQ ID NO: 1593097
guucacaugugacaccuuc

SEQ ID NO: 1593099 - RNA, 19 nt, Artificial Sequence
  Description of Artificial Sequence: Synthetic oligonucleotide
  Sense strand starting at position 2572 of SEQ ID NO: 1560336
gucacaugugaacacucaa

SEQ ID NO: 1593100 - RNA, 19 nt, Artificial Sequence
  Description of Artificial Sequence: Synthetic oligonucleotide
  Antisense strand to SEQ ID NO: 1593099
uugaguguucacaugugac

SEQ ID NO: 1593101 - RNA, 19 nt, Artificial Sequence
  Description of Artificial Sequence: Synthetic oligonucleotide
  Sense strand starting at position 3124 of SEQ ID NO: 1560336
agccaucugcaugacucaa

SEQ ID NO: 1593102 - RNA, 19 nt, Artificial Sequence
  Description of Artificial Sequence: Synthetic oligonucleotide
  Antisense strand to SEQ ID NO: 1593101
uugagucaugcagauggcu

SEQ ID NO: 1593103 - RNA, 19 nt, Artificial Sequence
  Description of Artificial Sequence: Synthetic oligonucleotide
  Sense strand starting at position 3573 of SEQ ID NO: 1560336
ugagacuugcaucaccuua

SEQ ID NO: 1593104 - RNA, 19 nt, Artificial Sequence
  Description of Artificial Sequence: Synthetic oligonucleotide
  Antisense strand to SEQ ID NO: 1593103
uaaggugaugcaagucuca

SEQ ID NO: 1593105 - RNA, 19 nt, Artificial Sequence
  Description of Artificial Sequence: Synthetic oligonucleotide
  Sense strand starting at position 3760 of SEQ ID NO: 1560336
ggguuauauuugcacauca

SEQ ID NO: 1593106 - RNA, 19 nt, Artificial Sequence
  Description of Artificial Sequence: Synthetic oligonucleotide
  Antisense strand to SEQ ID NO: 1593105
ugaugugcaaauauaaccc

SEQ ID NO: 1593107 - RNA, 19 nt, Artificial Sequence
  Description of Artificial Sequence: Synthetic oligonucleotide
  Sense strand starting at position 35 of SEQ ID NO: 1560337
cggguacugguucaagcaa

SEQ ID NO: 1593108 - RNA, 19 nt, Artificial Sequence
  Description of Artificial Sequence: Synthetic oligonucleotide
  Antisense strand to SEQ ID NO: 1593107
uugcuugaaccaguacccg

SEQ ID NO: 1593109 - RNA, 19 nt, Artificial Sequence
  Description of Artificial Sequence: Synthetic oligonucleotide
  Sense strand starting at position 190 of SEQ ID NO: 1560337
gcccgccugacuuguuaaa

SEQ ID NO: 1593110 - RNA, 19 nt, Artificial Sequence
  Description of Artificial Sequence: Synthetic oligonucleotide
  Antisense strand to SEQ ID NO: 1593109
uuuaacaagucaggcgggc

SEQ ID NO: 1593111 - RNA, 19 nt, Artificial Sequence
  Description of Artificial Sequence: Synthetic oligonucleotide
  Sense strand starting at position 192 of SEQ ID NO: 1560337
ccgccugacuuguuaaauc

SEQ ID NO: 1593112 - RNA, 19 nt, Artificial Sequence
  Description of Artificial Sequence: Synthetic oligonucleotide
  Antisense strand to SEQ ID NO: 1593111
gauuuaacaagucaggcgg

SEQ ID NO: 1593113 - RNA, 19 nt, Artificial Sequence
  Description of Artificial Sequence: Synthetic oligonucleotide
  Sense strand starting at position 232 of SEQ ID NO: 1560337
agacuuuagugcuacuuua

SEQ ID NO: 1593114 - RNA, 19 nt, Artificial Sequence
  Description of Artificial Sequence: Synthetic oligonucleotide
  Antisense strand to SEQ ID NO: 1593113
uaaaguagcacuaaagucu

SEQ ID NO: 1593115 - RNA, 19 nt, Artificial Sequence
  Description of Artificial Sequence: Synthetic oligonucleotide
  Sense strand starting at position 240 of SEQ ID NO: 1560337
gugcuacuuuaaguaauag

SEQ ID NO: 1593116 - RNA, 19 nt, Artificial Sequence
  Description of Artificial Sequence: Synthetic oligonucleotide
  Antisense strand to SEQ ID NO: 1593115
cuauuacuuaaaguagcac

SEQ ID NO: 1593117 - RNA, 19 nt, Artificial Sequence
  Description of Artificial Sequence: Synthetic oligonucleotide
  Sense strand starting at position 282 of SEQ ID NO: 1560337
accacuaauuugugguaga

SEQ ID NO: 1593118 - RNA, 19 nt, Artificial Sequence
  Description of Artificial Sequence: Synthetic oligonucleotide
  Antisense strand to SEQ ID NO: 1593117
ucuaccacaaauuaguggu

SEQ ID NO: 1593119 - RNA, 19 nt, Artificial Sequence
  Description of Artificial Sequence: Synthetic oligonucleotide
  Sense strand starting at position 283 of SEQ ID NO: 1560337
ccacuaauuugugguagag

SEQ ID NO: 1593120 - RNA, 19 nt, Artificial Sequence
  Description of Artificial Sequence: Synthetic oligonucleotide
  Antisense strand to SEQ ID NO: 1593119
cucuaccacaaauuagugg

SEQ ID NO: 1593121 - RNA, 19 nt, Artificial Sequence
  Description of Artificial Sequence: Synthetic oligonucleotide
  Sense strand starting at position 352 of SEQ ID NO: 1560337
uucuguaugccugaauuag

SEQ ID NO: 1593122 - RNA, 19 nt, Artificial Sequence
  Description of Artificial Sequence: Synthetic oligonucleotide
  Antisense strand to SEQ ID NO: 1593121
cuaauucaggcauacagaa

SEQ ID NO: 1593123 - RNA, 19 nt, Artificial Sequence
  Description of Artificial Sequence: Synthetic oligonucleotide
  Sense strand starting at position 362 of SEQ ID NO: 1560337
cugaauuagaucugggagu

SEQ ID NO: 1593124 - RNA, 19 nt, Artificial Sequence
  Description of Artificial Sequence: Synthetic oligonucleotide
  Antisense strand to SEQ ID NO: 1593123
acucccagaucuaauucag

SEQ ID NO: 1593125 - RNA, 19 nt, Artificial Sequence
  Description of Artificial Sequence: Synthetic oligonucleotide
  Sense strand starting at position 363 of SEQ ID NO: 1560337
ugaauuagaucugggagua

SEQ ID NO: 1593126 - RNA, 19 nt, Artificial Sequence
  Description of Artificial Sequence: Synthetic oligonucleotide
  Antisense strand to SEQ ID NO: 1593125
uacucccagaucuaauuca

SEQ ID NO: 1593127 - RNA, 19 nt, Artificial Sequence
  Description of Artificial Sequence: Synthetic oligonucleotide
  Sense strand starting at position 722 of SEQ ID NO: 1560337
guuucugucuuacugugaa

SEQ ID NO: 1593128 - RNA, 19 nt, Artificial Sequence
  Description of Artificial Sequence: Synthetic oligonucleotide
  Antisense strand to SEQ ID NO: 1593127
uucacaguaagacagaaac

SEQ ID NO: 1593129 - RNA, 19 nt, Artificial Sequence
  Description of Artificial Sequence: Synthetic oligonucleotide
  Sense strand starting at position 758 of SEQ ID NO: 1560337
gcacacauuuaugguguua

SEQ ID NO: 1593130 - RNA, 19 nt, Artificial Sequence
  Description of Artificial Sequence: Synthetic oligonucleotide
  Antisense strand to SEQ ID NO: 1593129
uaacaccauaaaugugugc

SEQ ID NO: 1593131 - RNA, 19 nt, Artificial Sequence
  Description of Artificial Sequence: Synthetic oligonucleotide
  Sense strand starting at position 760 of SEQ ID NO: 1560337
acacauuuaugguguuaag

SEQ ID NO: 1593132 - RNA, 19 nt, Artificial Sequence
  Description of Artificial Sequence: Synthetic oligonucleotide
  Antisense strand to SEQ ID NO: 1593131
cuuaacaccauaaaugugu

SEQ ID NO: 1593133 - RNA, 19 nt, Artificial Sequence
  Description of Artificial Sequence: Synthetic oligonucleotide
  Sense strand starting at position 763 of SEQ ID NO: 1560337
cauuuaugguguuaagaaa

SEQ ID NO: 1593134 - RNA, 19 nt, Artificial Sequence
  Description of Artificial Sequence: Synthetic oligonucleotide
  Antisense strand to SEQ ID NO: 1593133
uuucuuaacaccauaaaug

SEQ ID NO: 1593135 - RNA, 19 nt, Artificial Sequence
  Description of Artificial Sequence: Synthetic oligonucleotide
  Sense strand starting at position 791 of SEQ ID NO: 1560337
aucggagccuuauaauaca

SEQ ID NO: 1593136 - RNA, 19 nt, Artificial Sequence
  Description of Artificial Sequence: Synthetic oligonucleotide
  Antisense strand to SEQ ID NO: 1593135
uguauuauaaggcuccgau

SEQ ID NO: 1593137 - RNA, 19 nt, Artificial Sequence
  Description of Artificial Sequence: Synthetic oligonucleotide
  Sense strand starting at position 794 of SEQ ID NO: 1560337
ggagccuuauaauacaaua

SEQ ID NO: 1593138 - RNA, 19 nt, Artificial Sequence
  Description of Artificial Sequence: Synthetic oligonucleotide
  Antisense strand to SEQ ID NO: 1593137
uauuguauuauaaggcucc

SEQ ID NO: 1593139 - RNA, 19 nt, Artificial Sequence
  Description of Artificial Sequence: Synthetic oligonucleotide
  Sense strand starting at position 1128 of SEQ ID NO: 1560337
auguuugaaucugccaaac

SEQ ID NO: 1593140 - RNA, 19 nt, Artificial Sequence
  Description of Artificial Sequence: Synthetic oligonucleotide
  Antisense strand to SEQ ID NO: 1593139
guuuggcagauucaaacau

SEQ ID NO: 1593141 - RNA, 19 nt, Artificial Sequence
  Description of Artificial Sequence: Synthetic oligonucleotide
  Sense strand starting at position 1130 of SEQ ID NO: 1560337
guuugaaucugccaaacaa

SEQ ID NO: 1593142 - RNA, 19 nt, Artificial Sequence
  Description of Artificial Sequence: Synthetic oligonucleotide
  Antisense strand to SEQ ID NO: 1593141
uuguuuggcagauucaaac

SEQ ID NO: 1593143 - RNA, 19 nt, Artificial Sequence
  Description of Artificial Sequence: Synthetic oligonucleotide
  Sense strand starting at position 1142 of SEQ ID NO: 1560337
caaacaaaguugucuugga

SEQ ID NO: 1593144 - RNA, 19 nt, Artificial Sequence
  Description of Artificial Sequence: Synthetic oligonucleotide
  Antisense strand to SEQ ID NO: 1593143
uccaagacaacuuuguuug

SEQ ID NO: 1593145 - RNA, 19 nt, Artificial Sequence
  Description of Artificial Sequence: Synthetic oligonucleotide
  Sense strand starting at position 1143 of SEQ ID NO: 1560337
aaacaaaguugucuuggaa

SEQ ID NO: 1593146 - RNA, 19 nt, Artificial Sequence
  Description of Artificial Sequence: Synthetic oligonucleotide
  Antisense strand to SEQ ID NO: 1593145
uuccaagacaacuuuguuu

SEQ ID NO: 1593147 - RNA, 19 nt, Artificial Sequence
  Description of Artificial Sequence: Synthetic oligonucleotide
  Sense strand starting at position 1159 of SEQ ID NO: 1560337
gaaacaaacuuugugguga

SEQ ID NO: 1593148 - RNA, 19 nt, Artificial Sequence
  Description of Artificial Sequence: Synthetic oligonucleotide
  Antisense strand to SEQ ID NO: 1593147
ucaccacaaaguuuguuuc

SEQ ID NO: 1593149 - RNA, 19 nt, Artificial Sequence
  Description of Artificial Sequence: Synthetic oligonucleotide
  Sense strand starting at position 1213 of SEQ ID NO: 1560337
gcuggcauccacugaacau

SEQ ID NO: 1593150 - RNA, 19 nt, Artificial Sequence
  Description of Artificial Sequence: Synthetic oligonucleotide
  Antisense strand to SEQ ID NO: 1593149
auguucaguggaugccagc

SEQ ID NO: 1593151 - RNA, 19 nt, Artificial Sequence
  Description of Artificial Sequence: Synthetic oligonucleotide
  Sense strand starting at position 1296 of SEQ ID NO: 1560337
uacccugacucguacagaa

SEQ ID NO: 1593152 - RNA, 19 nt, Artificial Sequence
  Description of Artificial Sequence: Synthetic oligonucleotide
  Antisense strand to SEQ ID NO: 1593151
uucuguacgagucagggua

SEQ ID NO: 1593153 - RNA, 19 nt, Artificial Sequence
  Description of Artificial Sequence: Synthetic oligonucleotide
  Sense strand starting at position 1298 of SEQ ID NO: 1560337
cccugacucguacagaaga

SEQ ID NO: 1593154 - RNA, 19 nt, Artificial Sequence
  Description of Artificial Sequence: Synthetic oligonucleotide
  Antisense strand to SEQ ID NO: 1593153
ucuucuguacgagucaggg

SEQ ID NO: 1593155 - RNA, 19 nt, Artificial Sequence
  Description of Artificial Sequence: Synthetic oligonucleotide
  Sense strand starting at position 1319 of SEQ ID NO: 1560337
aaacuugaggcacggaaau

SEQ ID NO: 1593156 - RNA, 19 nt, Artificial Sequence
  Description of Artificial Sequence: Synthetic oligonucleotide
  Antisense strand to SEQ ID NO: 1593155
auuuccgugccucaaguuu

SEQ ID NO: 1593157 - RNA, 19 nt, Artificial Sequence
  Description of Artificial Sequence: Synthetic oligonucleotide
  Sense strand starting at position 1352 of SEQ ID NO: 1560337
ccuagugucgcagggcaaa

SEQ ID NO: 1593158 - RNA, 19 nt, Artificial Sequence
  Description of Artificial Sequence: Synthetic oligonucleotide
  Antisense strand to SEQ ID NO: 1593157
uuugcccugcgacacuagg

SEQ ID NO: 1593159 - RNA, 19 nt, Artificial Sequence
  Description of Artificial Sequence: Synthetic oligonucleotide
  Sense strand starting at position 1501 of SEQ ID NO: 1560337
gggcgacucuucucucacu

SEQ ID NO: 1593160 - RNA, 19 nt, Artificial Sequence
  Description of Artificial Sequence: Synthetic oligonucleotide
  Antisense strand to SEQ ID NO: 1593159
agugagagaagagucgccc

SEQ ID NO: 1593161 - RNA, 19 nt, Artificial Sequence
  Description of Artificial Sequence: Synthetic oligonucleotide
  Sense strand starting at position 2069 of SEQ ID NO: 1560337
uugauuggcugagcuacaa

SEQ ID NO: 1593162 - RNA, 19 nt, Artificial Sequence
  Description of Artificial Sequence: Synthetic oligonucleotide
  Antisense strand to SEQ ID NO: 1593161
uuguagcucagccaaucaa

SEQ ID NO: 1593163 - RNA, 19 nt, Artificial Sequence
  Description of Artificial Sequence: Synthetic oligonucleotide
  Sense strand starting at position 2156 of SEQ ID NO: 1560337
gcgaaugagugcccuucga

SEQ ID NO: 1593164 - RNA, 19 nt, Artificial Sequence
  Description of Artificial Sequence: Synthetic oligonucleotide
  Antisense strand to SEQ ID NO: 1593163
ucgaagggcacucauucgc

SEQ ID NO: 1593165 - RNA, 19 nt, Artificial Sequence
  Description of Artificial Sequence: Synthetic oligonucleotide
  Sense strand starting at position 2326 of SEQ ID NO: 1560337
acacgaucuuggucuguca

SEQ ID NO: 1593166 - RNA, 19 nt, Artificial Sequence
  Description of Artificial Sequence: Synthetic oligonucleotide
  Antisense strand to SEQ ID NO: 1593165
ugacagaccaagaucgugu

SEQ ID NO: 1593167 - RNA, 19 nt, Artificial Sequence
  Description of Artificial Sequence: Synthetic oligonucleotide
  Sense strand starting at position 2454 of SEQ ID NO: 1560337
cacugagcgcggcuaauau

SEQ ID NO: 1593168 - RNA, 19 nt, Artificial Sequence
  Description of Artificial Sequence: Synthetic oligonucleotide
  Antisense strand to SEQ ID NO: 1593167
auauuagccgcgcucagug

SEQ ID NO: 1593169 - RNA, 19 nt, Artificial Sequence
  Description of Artificial Sequence: Synthetic oligonucleotide
  Sense strand starting at position 2665 of SEQ ID NO: 1560337
uuguaaaccuaaucaguau

SEQ ID NO: 1593170 - RNA, 19 nt, Artificial Sequence
  Description of Artificial Sequence: Synthetic oligonucleotide
  Antisense strand to SEQ ID NO: 1593169
auacugauuagguuuacaa

SEQ ID NO: 1593171 - RNA, 19 nt, Artificial Sequence
  Description of Artificial Sequence: Synthetic oligonucleotide
  Sense strand starting at position 2709 of SEQ ID NO: 1560337
augacaauaucaugugaca

SEQ ID NO: 1593172 - RNA, 19 nt, Artificial Sequence
  Description of Artificial Sequence: Synthetic oligonucleotide
  Antisense strand to SEQ ID NO: 1593171
ugucacaugauauugucau

SEQ ID NO: 1593173 - RNA, 19 nt, Artificial Sequence
  Description of Artificial Sequence: Synthetic oligonucleotide
  Sense strand starting at position 2714 of SEQ ID NO: 1560337
aauaucaugugacaagguu

SEQ ID NO: 1593174 - RNA, 19 nt, Artificial Sequence
  Description of Artificial Sequence: Synthetic oligonucleotide
  Antisense strand to SEQ ID NO: 1593173
aaccuugucacaugauauu

SEQ ID NO: 1593175 - RNA, 19 nt, Artificial Sequence
  Description of Artificial Sequence: Synthetic oligonucleotide
  Sense strand starting at position 3071 of SEQ ID NO: 1560337
aaaucagcacuuugggaga

SEQ ID NO: 1593176 - RNA, 19 nt, Artificial Sequence
  Description of Artificial Sequence: Synthetic oligonucleotide
  Antisense strand to SEQ ID NO: 1593175
ucucccaaagugcugauuu

SEQ ID NO: 1593177 - RNA, 19 nt, Artificial Sequence
  Description of Artificial Sequence: Synthetic oligonucleotide
  Sense strand starting at position 3428 of SEQ ID NO: 1560337
agcaguccuccugaagcau

SEQ ID NO: 1593178 - RNA, 19 nt, Artificial Sequence
  Description of Artificial Sequence: Synthetic oligonucleotide
  Antisense strand to SEQ ID NO: 1593177
augcuucaggaggacugcu

SEQ ID NO: 1593179 - RNA, 19 nt, Artificial Sequence
  Description of Artificial Sequence: Synthetic oligonucleotide
  Sense strand starting at position 3527 of SEQ ID NO: 1560337
auacgauguguacaugcau

SEQ ID NO: 1593180 - RNA, 19 nt, Artificial Sequence
  Description of Artificial Sequence: Synthetic oligonucleotide
  Antisense strand to SEQ ID NO: 1593179
augcauguacacaucguau

SEQ ID NO: 1593181 - RNA, 19 nt, Artificial Sequence
  Description of Artificial Sequence: Synthetic oligonucleotide
  Sense strand starting at position 3891 of SEQ ID NO: 1560337
uuugguuucuucucuauuu

SEQ ID NO: 1593182 - RNA, 19 nt, Artificial Sequence
  Description of Artificial Sequence: Synthetic oligonucleotide
  Antisense strand to SEQ ID NO: 1593181
aaauagagaagaaaccaaa

SEQ ID NO: 1593183 - RNA, 19 nt, Artificial Sequence
  Description of Artificial Sequence: Synthetic oligonucleotide
  Sense strand starting at position 3975 of SEQ ID NO: 1560337
uaccaaguaucugugaaga

SEQ ID NO: 1593184 - RNA, 19 nt, Artificial Sequence
  Description of Artificial Sequence: Synthetic oligonucleotide
  Antisense strand to SEQ ID NO: 1593183
ucuucacagauacuuggua

SEQ ID NO: 1593185 - RNA, 19 nt, Artificial Sequence
  Description of Artificial Sequence: Synthetic oligonucleotide
  Sense strand starting at position 3977 of SEQ ID NO: 1560337
ccaaguaucugugaagaug

SEQ ID NO: 1593186 - RNA, 19 nt, Artificial Sequence
  Description of Artificial Sequence: Synthetic oligonucleotide
  Antisense strand to SEQ ID NO: 1593185
caucuucacagauacuugg

SEQ ID NO: 1593187 - RNA, 19 nt, Artificial Sequence
  Description of Artificial Sequence: Synthetic oligonucleotide
  Sense strand starting at position 128 of SEQ ID NO: 1560338
ucaugacaagcuuggcauu

SEQ ID NO: 1593188 - RNA, 19 nt, Artificial Sequence
  Description of Artificial Sequence: Synthetic oligonucleotide
  Antisense strand to SEQ ID NO: 1593187
aaugccaagcuugucauga

SEQ ID NO: 1593189 - RNA, 19 nt, Artificial Sequence
  Description of Artificial Sequence: Synthetic oligonucleotide
  Sense strand starting at position 323 of SEQ ID NO: 1560338
cggaaaugaucauucuccu

SEQ ID NO: 1593190 - RNA, 19 nt, Artificial Sequence
  Description of Artificial Sequence: Synthetic oligonucleotide
  Antisense strand to SEQ ID NO: 1593189
aggagaaugaucauuuccg

SEQ ID NO: 1593191 - RNA, 19 nt, Artificial Sequence
  Description of Artificial Sequence: Synthetic oligonucleotide
  Sense strand starting at position 379 of SEQ ID NO: 1560338
aggucugucuaaucucuga

SEQ ID NO: 1593192 - RNA, 19 nt, Artificial Sequence
  Description of Artificial Sequence: Synthetic oligonucleotide
  Antisense strand to SEQ ID NO: 1593191
ucagagauuagacagaccu

SEQ ID NO: 1593193 - RNA, 19 nt, Artificial Sequence
  Description of Artificial Sequence: Synthetic oligonucleotide
  Sense strand starting at position 799 of SEQ ID NO: 1560338
ggucaugaaccaggugagu

SEQ ID NO: 1593194 - RNA, 19 nt, Artificial Sequence
  Description of Artificial Sequence: Synthetic oligonucleotide
  Antisense strand to SEQ ID NO: 1593193
acucaccugguucaugacc

SEQ ID NO: 1593195 - RNA, 19 nt, Artificial Sequence
  Description of Artificial Sequence: Synthetic oligonucleotide
  Sense strand starting at position 858 of SEQ ID NO: 1560338
ucaagaaucauaugggugu

SEQ ID NO: 1593196 - RNA, 19 nt, Artificial Sequence
  Description of Artificial Sequence: Synthetic oligonucleotide
  Antisense strand to SEQ ID NO: 1593195
acacccauaugauucuuga

SEQ ID NO: 1593197 - RNA, 19 nt, Artificial Sequence
  Description of Artificial Sequence: Synthetic oligonucleotide
  Sense strand starting at position 861 of SEQ ID NO: 1560338
agaaucauaugggugugaa

SEQ ID NO: 1593198 - RNA, 19 nt, Artificial Sequence
  Description of Artificial Sequence: Synthetic oligonucleotide
  Antisense strand to SEQ ID NO: 1593197
uucacacccauaugauucu

SEQ ID NO: 1593199 - RNA, 19 nt, Artificial Sequence
  Description of Artificial Sequence: Synthetic oligonucleotide
  Sense strand starting at position 862 of SEQ ID NO: 1560338
gaaucauaugggugugaag

SEQ ID NO: 1593200 - RNA, 19 nt, Artificial Sequence
  Description of Artificial Sequence: Synthetic oligonucleotide
  Antisense strand to SEQ ID NO: 1593199
cuucacacccauaugauuc

SEQ ID NO: 1593201 - RNA, 19 nt, Artificial Sequence
  Description of Artificial Sequence: Synthetic oligonucleotide
  Sense strand starting at position 873 of SEQ ID NO: 1560338
gugugaagucagggaaacu

SEQ ID NO: 1593202 - RNA, 19 nt, Artificial Sequence
  Description of Artificial Sequence: Synthetic oligonucleotide
  Antisense strand to SEQ ID NO: 1593201
aguuucccugacuucacac

SEQ ID NO: 1593203 - RNA, 19 nt, Artificial Sequence
  Description of Artificial Sequence: Synthetic oligonucleotide
  Sense strand starting at position 967 of SEQ ID NO: 1560338
ggaguugggagucgggaau

SEQ ID NO: 1593204 - RNA, 19 nt, Artificial Sequence
  Description of Artificial Sequence: Synthetic oligonucleotide
  Antisense strand to SEQ ID NO: 1593203
auucccgacucccaacucc

SEQ ID NO: 1593205 - RNA, 19 nt, Artificial Sequence
  Description of Artificial Sequence: Synthetic oligonucleotide
  Sense strand starting at position 978 of SEQ ID NO: 1560338
ucgggaaucccacgagaug

SEQ ID NO: 1593206 - RNA, 19 nt, Artificial Sequence
  Description of Artificial Sequence: Synthetic oligonucleotide
  Antisense strand to SEQ ID NO: 1593205
caucucgugggauucccga

SEQ ID NO: 1593207 - RNA, 19 nt, Artificial Sequence
  Description of Artificial Sequence: Synthetic oligonucleotide
  Sense strand starting at position 1089 of SEQ ID NO: 1560338
guacgaaguugcucucaaa

SEQ ID NO: 1593208 - RNA, 19 nt, Artificial Sequence
  Description of Artificial Sequence: Synthetic oligonucleotide
  Antisense strand to SEQ ID NO: 1593207
uuugagagcaacuucguac

SEQ ID NO: 1593209 - RNA, 19 nt, Artificial Sequence
  Description of Artificial Sequence: Synthetic oligonucleotide
  Sense strand starting at position 1118 of SEQ ID NO: 1560338
ucccgaaacuggucgaauu

SEQ ID NO: 1593210 - RNA, 19 nt, Artificial Sequence
  Description of Artificial Sequence: Synthetic oligonucleotide
  Antisense strand to SEQ ID NO: 1593209
aauucgaccaguuucggga

SEQ ID NO: 1593211 - RNA, 19 nt, Artificial Sequence
  Description of Artificial Sequence: Synthetic oligonucleotide
  Sense strand starting at position 1119 of SEQ ID NO: 1560338
cccgaaacuggucgaauuc

SEQ ID NO: 1593212 - RNA, 19 nt, Artificial Sequence
  Description of Artificial Sequence: Synthetic oligonucleotide
  Antisense strand to SEQ ID NO: 1593211
gaauucgaccaguuucggg

SEQ ID NO: 1593213 - RNA, 19 nt, Artificial Sequence
  Description of Artificial Sequence: Synthetic oligonucleotide
  Sense strand starting at position 1549 of SEQ ID NO: 1560338
gcuuuaugacgucacacaa

SEQ ID NO: 1593214 - RNA, 19 nt, Artificial Sequence
  Description of Artificial Sequence: Synthetic oligonucleotide
  Antisense strand to SEQ ID NO: 1593213
uugugugacgucauaaagc

SEQ ID NO: 1593215 - RNA, 19 nt, Artificial Sequence
  Description of Artificial Sequence: Synthetic oligonucleotide
  Sense strand starting at position 1570 of SEQ ID NO: 1560338
gcgggcuccugauuuguga

SEQ ID NO: 1593216 - RNA, 19 nt, Artificial Sequence
  Description of Artificial Sequence: Synthetic oligonucleotide
  Antisense strand to SEQ ID NO: 1593215
ucacaaaucaggagcccgc

SEQ ID NO: 1593217 - RNA, 19 nt, Artificial Sequence
  Description of Artificial Sequence: Synthetic oligonucleotide
  Sense strand starting at position 1967 of SEQ ID NO: 1560338
ugggucuuuaggugaguua

SEQ ID NO: 1593218 - RNA, 19 nt, Artificial Sequence
  Description of Artificial Sequence: Synthetic oligonucleotide
  Antisense strand to SEQ ID NO: 1593217
uaacucaccuaaagaccca

SEQ ID NO: 1593219 - RNA, 19 nt, Artificial Sequence
  Description of Artificial Sequence: Synthetic oligonucleotide
  Sense strand starting at position 2131 of SEQ ID NO: 1560338
aggcucuggcucgggaaua

SEQ ID NO: 1593220 - RNA, 19 nt, Artificial Sequence
  Description of Artificial Sequence: Synthetic oligonucleotide
  Antisense strand to SEQ ID NO: 1593219
uauucccgagccagagccu

SEQ ID NO: 1593221 - RNA, 19 nt, Artificial Sequence
  Description of Artificial Sequence: Synthetic oligonucleotide
  Sense strand starting at position 2330 of SEQ ID NO: 1560338
cgagcccugucucuacaaa

SEQ ID NO: 1593222 - RNA, 19 nt, Artificial Sequence
  Description of Artificial Sequence: Synthetic oligonucleotide
  Antisense strand to SEQ ID NO: 1593221
uuuguagagacagggcucg

SEQ ID NO: 1593223 - RNA, 19 nt, Artificial Sequence
  Description of Artificial Sequence: Synthetic oligonucleotide
  Sense strand starting at position 2717 of SEQ ID NO: 1560338
cuaaauaugcgugaguaug

SEQ ID NO: 1593224 - RNA, 19 nt, Artificial Sequence
  Description of Artificial Sequence: Synthetic oligonucleotide
  Antisense strand to SEQ ID NO: 1593223
cauacucacgcauauuuag

SEQ ID NO: 1593225 - RNA, 19 nt, Artificial Sequence
  Description of Artificial Sequence: Synthetic oligonucleotide
  Sense strand starting at position 2737 of SEQ ID NO: 1560338
aaguuuggagguuggagaa

SEQ ID NO: 1593226 - RNA, 19 nt, Artificial Sequence
  Description of Artificial Sequence: Synthetic oligonucleotide
  Antisense strand to SEQ ID NO: 1593225
uucuccaaccuccaaacuu

SEQ ID NO: 1593227 - RNA, 19 nt, Artificial Sequence
  Description of Artificial Sequence: Synthetic oligonucleotide
  Sense strand starting at position 2818 of SEQ ID NO: 1560338
ugggcugucaggugauaag

SEQ ID NO: 1593228 - RNA, 19 nt, Artificial Sequence
  Description of Artificial Sequence: Synthetic oligonucleotide
  Antisense strand to SEQ ID NO: 1593227
cuuaucaccugacagccca

SEQ ID NO: 1593229 - RNA, 19 nt, Artificial Sequence
  Description of Artificial Sequence: Synthetic oligonucleotide
  Sense strand starting at position 2874 of SEQ ID NO: 1560338
ggagagggagagugucauu

SEQ ID NO: 1593230 - RNA, 19 nt, Artificial Sequence
  Description of Artificial Sequence: Synthetic oligonucleotide
  Antisense strand to SEQ ID NO: 1593229
aaugacacucucccucucc

SEQ ID NO: 1593231 - RNA, 19 nt, Artificial Sequence
  Description of Artificial Sequence: Synthetic oligonucleotide
  Sense strand starting at position 2877 of SEQ ID NO: 1560338
gagggagagugucauuuaa

SEQ ID NO: 1593232 - RNA, 19 nt, Artificial Sequence
  Description of Artificial Sequence: Synthetic oligonucleotide
  Antisense strand to SEQ ID NO: 1593231
uuaaaugacacucucccuc

SEQ ID NO: 1593233 - RNA, 19 nt, Artificial Sequence
  Description of Artificial Sequence: Synthetic oligonucleotide
  Sense strand starting at position 2934 of SEQ ID NO: 1560338
ugggauaguugcuuuggca

SEQ ID NO: 1593234 - RNA, 19 nt, Artificial Sequence
  Description of Artificial Sequence: Synthetic oligonucleotide
  Antisense strand to SEQ ID NO: 1593233
ugccaaagcaacuauccca

SEQ ID NO: 1593235 - RNA, 19 nt, Artificial Sequence
  Description of Artificial Sequence: Synthetic oligonucleotide
  Sense strand starting at position 2938 of SEQ ID NO: 1560338
auaguugcuuuggcaauga

SEQ ID NO: 1593236 - RNA, 19 nt, Artificial Sequence
  Description of Artificial Sequence: Synthetic oligonucleotide
  Antisense strand to SEQ ID NO: 1593235
ucauugccaaagcaacuau

SEQ ID NO: 1593237 - RNA, 19 nt, Artificial Sequence
  Description of Artificial Sequence: Synthetic oligonucleotide
  Sense strand starting at position 2943 of SEQ ID NO: 1560338
ugcuuuggcaaugagguua

SEQ ID NO: 1593238 - RNA, 19 nt, Artificial Sequence
  Description of Artificial Sequence: Synthetic oligonucleotide
  Antisense strand to SEQ ID NO: 1593237
uaaccucauugccaaagca

SEQ ID NO: 1593239 - RNA, 19 nt, Artificial Sequence
  Description of Artificial Sequence: Synthetic oligonucleotide
  Sense strand starting at position 2996 of SEQ ID NO: 1560338
gggagugcagaguaugaau

SEQ ID NO: 1593240 - RNA, 19 nt, Artificial Sequence
  Description of Artificial Sequence: Synthetic oligonucleotide
  Antisense strand to SEQ ID NO: 1593239
auucauacucugcacuccc

SEQ ID NO: 1593241 - RNA, 19 nt, Artificial Sequence
  Description of Artificial Sequence: Synthetic oligonucleotide
  Sense strand starting at position 2998 of SEQ ID NO: 1560338
gagugcagaguaugaauau

SEQ ID NO: 1593242 - RNA, 19 nt, Artificial Sequence
  Description of Artificial Sequence: Synthetic oligonucleotide
  Antisense strand to SEQ ID NO: 1593241
auauucauacucugcacuc

SEQ ID NO: 1593243 - RNA, 19 nt, Artificial Sequence
  Description of Artificial Sequence: Synthetic oligonucleotide
  Sense strand starting at position 3028 of SEQ ID NO: 1560338
gugguuucuagugaaauaa

SEQ ID NO: 1593244 - RNA, 19 nt, Artificial Sequence
  Description of Artificial Sequence: Synthetic oligonucleotide
  Antisense strand to SEQ ID NO: 1593243
uuauuucacuagaaaccac

SEQ ID NO: 1593245 - RNA, 19 nt, Artificial Sequence
  Description of Artificial Sequence: Synthetic oligonucleotide
  Sense strand starting at position 3111 of SEQ ID NO: 1560338
uggguucugugggugacua

SEQ ID NO: 1593246 - RNA, 19 nt, Artificial Sequence
  Description of Artificial Sequence: Synthetic oligonucleotide
  Antisense strand to SEQ ID NO: 1593245
uagucacccacagaaccca

SEQ ID NO: 1593247 - RNA, 19 nt, Artificial Sequence
  Description of Artificial Sequence: Synthetic oligonucleotide
  Sense strand starting at position 3269 of SEQ ID NO: 1560338
cguccucuccuagacacuu

SEQ ID NO: 1593248 - RNA, 19 nt, Artificial Sequence
  Description of Artificial Sequence: Synthetic oligonucleotide
  Antisense strand to SEQ ID NO: 1593247
aagugucuaggagaggacg

SEQ ID NO: 1593249 - RNA, 19 nt, Artificial Sequence
  Description of Artificial Sequence: Synthetic oligonucleotide
  Sense strand starting at position 3287 of SEQ ID NO: 1560338
uaacauuggugcccugaga

SEQ ID NO: 1593250 - RNA, 19 nt, Artificial Sequence
  Description of Artificial Sequence: Synthetic oligonucleotide
  Antisense strand to SEQ ID NO: 1593249
ucucagggcaccaauguua

SEQ ID NO: 1593251 - RNA, 19 nt, Artificial Sequence
  Description of Artificial Sequence: Synthetic oligonucleotide
  Sense strand starting at position 3463 of SEQ ID NO: 1560338
aggucaucacagcaguaau

SEQ ID NO: 1593252 - RNA, 19 nt, Artificial Sequence
  Description of Artificial Sequence: Synthetic oligonucleotide
  Antisense strand to SEQ ID NO: 1593251
auuacugcugugaugaccu

SEQ ID NO: 1593253 - RNA, 19 nt, Artificial Sequence
  Description of Artificial Sequence: Synthetic oligonucleotide
  Sense strand starting at position 3554 of SEQ ID NO: 1560338
cucagauguccucacagca

SEQ ID NO: 1593254 - RNA, 19 nt, Artificial Sequence
  Description of Artificial Sequence: Synthetic oligonucleotide
  Antisense strand to SEQ ID NO: 1593253
ugcugugaggacaucugag

SEQ ID NO: 1593255 - RNA, 19 nt, Artificial Sequence
  Description of Artificial Sequence: Synthetic oligonucleotide
  Sense strand starting at position 3650 of SEQ ID NO: 1560338
ggucucaucgugagugagu

SEQ ID NO: 1593256 - RNA, 19 nt, Artificial Sequence
  Description of Artificial Sequence: Synthetic oligonucleotide
  Antisense strand to SEQ ID NO: 1593255
acucacucacgaugagacc

SEQ ID NO: 1593257 - RNA, 19 nt, Artificial Sequence
  Description of Artificial Sequence: Synthetic oligonucleotide
  Sense strand starting at position 3699 of SEQ ID NO: 1560338
cuuaaauugccaugaugca

SEQ ID NO: 1593258 - RNA, 19 nt, Artificial Sequence
  Description of Artificial Sequence: Synthetic oligonucleotide
  Antisense strand to SEQ ID NO: 1593257
ugcaucauggcaauuuaag

SEQ ID NO: 1593259 - RNA, 19 nt, Artificial Sequence
  Description of Artificial Sequence: Synthetic oligonucleotide
  Sense strand starting at position 3829 of SEQ ID NO: 1560338
cuggcaucugcucagugaa

SEQ ID NO: 1593260 - RNA, 19 nt, Artificial Sequence
  Description of Artificial Sequence: Synthetic oligonucleotide
  Antisense strand to SEQ ID NO: 1593259
uucacugagcagaugccag

SEQ ID NO: 1593261 - RNA, 19 nt, Artificial Sequence
  Description of Artificial Sequence: Synthetic oligonucleotide
  Sense strand starting at position 3831 of SEQ ID NO: 1560338
ggcaucugcucagugaaca

SEQ ID NO: 1593262 - RNA, 19 nt, Artificial Sequence
  Description of Artificial Sequence: Synthetic oligonucleotide
  Antisense strand to SEQ ID NO: 1593261
uguucacugagcagaugcc

SEQ ID NO: 1593263 - RNA, 19 nt, Artificial Sequence
  Description of Artificial Sequence: Synthetic oligonucleotide
  Sense strand starting at position 3832 of SEQ ID NO: 1560338
gcaucugcucagugaacag

SEQ ID NO: 1593264 - RNA, 19 nt, Artificial Sequence
  Description of Artificial Sequence: Synthetic oligonucleotide
  Antisense strand to SEQ ID NO: 1593263
cuguucacugagcagaugc

SEQ ID NO: 1593265 - RNA, 19 nt, Artificial Sequence
  Description of Artificial Sequence: Synthetic oligonucleotide
  Sense strand starting at position 3935 of SEQ ID NO: 1560338
cagagagguuguguggcua

SEQ ID NO: 1593266 - RNA, 19 nt, Artificial Sequence
  Description of Artificial Sequence: Synthetic oligonucleotide
  Antisense strand to SEQ ID NO: 1593265
uagccacacaaccucucug

SEQ ID NO: 1593267 - RNA, 19 nt, Artificial Sequence
  Description of Artificial Sequence: Synthetic oligonucleotide
  Sense strand starting at position 1437 of SEQ ID NO: 1560339
uugguucugugauucacga

SEQ ID NO: 1593268 - RNA, 19 nt, Artificial Sequence
  Description of Artificial Sequence: Synthetic oligonucleotide
  Antisense strand to SEQ ID NO: 1593267
ucgugaaucacagaaccaa

SEQ ID NO: 1593269 - RNA, 19 nt, Artificial Sequence
  Description of Artificial Sequence: Synthetic oligonucleotide
  Sense strand starting at position 1560 of SEQ ID NO: 1560339
ccacacagugacugcuaaa

SEQ ID NO: 1593270 - RNA, 19 nt, Artificial Sequence
  Description of Artificial Sequence: Synthetic oligonucleotide
  Antisense strand to SEQ ID NO: 1593269
uuuagcagucacugugugg

SEQ ID NO: 1593271 - RNA, 19 nt, Artificial Sequence
  Description of Artificial Sequence: Synthetic oligonucleotide
  Sense strand starting at position 1671 of SEQ ID NO: 1560339
aaaguuacucucgaacaug

SEQ ID NO: 1593272 - RNA, 19 nt, Artificial Sequence
  Description of Artificial Sequence: Synthetic oligonucleotide
  Antisense strand to SEQ ID NO: 1593271
cauguucgagaguaacuuu

SEQ ID NO: 1593273 - RNA, 19 nt, Artificial Sequence
  Description of Artificial Sequence: Synthetic oligonucleotide
  Sense strand starting at position 1917 of SEQ ID NO: 1560339
ccuggagcucagcguuaca

SEQ ID NO: 1593274 - RNA, 19 nt, Artificial Sequence
  Description of Artificial Sequence: Synthetic oligonucleotide
  Antisense strand to SEQ ID NO: 1593273
uguaacgcugagcuccagg

SEQ ID NO: 1593275 - RNA, 19 nt, Artificial Sequence
  Description of Artificial Sequence: Synthetic oligonucleotide
  Sense strand starting at position 2107 of SEQ ID NO: 1560339
agggauacagccuggaguu

SEQ ID NO: 1593276 - RNA, 19 nt, Artificial Sequence
  Description of Artificial Sequence: Synthetic oligonucleotide
  Antisense strand to SEQ ID NO: 1593275
aacuccaggcuguaucccu

SEQ ID NO: 1593277 - RNA, 19 nt, Artificial Sequence
  Description of Artificial Sequence: Synthetic oligonucleotide
  Sense strand starting at position 2108 of SEQ ID NO: 1560339
gggauacagccuggaguuu

SEQ ID NO: 1593278 - RNA, 19 nt, Artificial Sequence
  Description of Artificial Sequence: Synthetic oligonucleotide
  Antisense strand to SEQ ID NO: 1593277
aaacuccaggcuguauccc

SEQ ID NO: 1593279 - RNA, 19 nt, Artificial Sequence
  Description of Artificial Sequence: Synthetic oligonucleotide
  Sense strand starting at position 2187 of SEQ ID NO: 1560339
gugagcuuagauugccaca

SEQ ID NO: 1593280 - RNA, 19 nt, Artificial Sequence
  Description of Artificial Sequence: Synthetic oligonucleotide
  Antisense strand to SEQ ID NO: 1593279
uguggcaaucuaagcucac

SEQ ID NO: 1593281 - RNA, 19 nt, Artificial Sequence
  Description of Artificial Sequence: Synthetic oligonucleotide
  Sense strand starting at position 2189 of SEQ ID NO: 1560339
gagcuuagauugccacacu

SEQ ID NO: 1593282 - RNA, 19 nt, Artificial Sequence
  Description of Artificial Sequence: Synthetic oligonucleotide
  Antisense strand to SEQ ID NO: 1593281
aguguggcaaucuaagcuc

SEQ ID NO: 1593283 - RNA, 19 nt, Artificial Sequence
  Description of Artificial Sequence: Synthetic oligonucleotide
  Sense strand starting at position 2192 of SEQ ID NO: 1560339
cuuagauugccacacugca

SEQ ID NO: 1593284 - RNA, 19 nt, Artificial Sequence
  Description of Artificial Sequence: Synthetic oligonucleotide
  Antisense strand to SEQ ID NO: 1593283
ugcaguguggcaaucuaag

SEQ ID NO: 1593285 - RNA, 19 nt, Artificial Sequence
  Description of Artificial Sequence: Synthetic oligonucleotide
  Sense strand starting at position 2603 of SEQ ID NO: 1560339
agucuugagggcuaugaug

SEQ ID NO: 1593286 - RNA, 19 nt, Artificial Sequence
  Description of Artificial Sequence: Synthetic oligonucleotide
  Antisense strand to SEQ ID NO: 1593285
caucauagcccucaagacu

SEQ ID NO: 1593287 - RNA, 19 nt, Artificial Sequence
  Description of Artificial Sequence: Synthetic oligonucleotide
  Sense strand starting at position 2610 of SEQ ID NO: 1560339
agggcuaugaugggugaau

SEQ ID NO: 1593288 - RNA, 19 nt, Artificial Sequence
  Description of Artificial Sequence: Synthetic oligonucleotide
  Antisense strand to SEQ ID NO: 1593287
auucacccaucauagcccu

SEQ ID NO: 1593289 - RNA, 19 nt, Artificial Sequence
  Description of Artificial Sequence: Synthetic oligonucleotide
  Sense strand starting at position 2611 of SEQ ID NO: 1560339
gggcuaugaugggugaauc

SEQ ID NO: 1593290 - RNA, 19 nt, Artificial Sequence
  Description of Artificial Sequence: Synthetic oligonucleotide
  Antisense strand to SEQ ID NO: 1593289
gauucacccaucauagccc

SEQ ID NO: 1593291 - RNA, 19 nt, Artificial Sequence
  Description of Artificial Sequence: Synthetic oligonucleotide
  Sense strand starting at position 2612 of SEQ ID NO: 1560339
ggcuaugaugggugaauca

SEQ ID NO: 1593292 - RNA, 19 nt, Artificial Sequence
  Description of Artificial Sequence: Synthetic oligonucleotide
  Antisense strand to SEQ ID NO: 1593291
ugauucacccaucauagcc

SEQ ID NO: 1593293 - RNA, 19 nt, Artificial Sequence
  Description of Artificial Sequence: Synthetic oligonucleotide
  Sense strand starting at position 2697 of SEQ ID NO: 1560339
gaagucugucuggguuauu

SEQ ID NO: 1593294 - RNA, 19 nt, Artificial Sequence
  Description of Artificial Sequence: Synthetic oligonucleotide
  Antisense strand to SEQ ID NO: 1593293
aauaacccagacagacuuc

SEQ ID NO: 1593295 - RNA, 19 nt, Artificial Sequence
  Description of Artificial Sequence: Synthetic oligonucleotide
  Sense strand starting at position 2700 of SEQ ID NO: 1560339
gucugucuggguuauugua

SEQ ID NO: 1593296 - RNA, 19 nt, Artificial Sequence
  Description of Artificial Sequence: Synthetic oligonucleotide
  Antisense strand to SEQ ID NO: 1593295
uacaauaacccagacagac

SEQ ID NO: 1593297 - RNA, 19 nt, Artificial Sequence
  Description of Artificial Sequence: Synthetic oligonucleotide
  Sense strand starting at position 2834 of SEQ ID NO: 1560339
ugugcauguggcgaggauu

SEQ ID NO: 1593298 - RNA, 19 nt, Artificial Sequence
  Description of Artificial Sequence: Synthetic oligonucleotide
  Antisense strand to SEQ ID NO: 1593297
aauccucgccacaugcaca

SEQ ID NO: 1593299 - RNA, 19 nt, Artificial Sequence
  Description of Artificial Sequence: Synthetic oligonucleotide
  Sense strand starting at position 2842 of SEQ ID NO: 1560339
uggcgaggauuccucaaca

SEQ ID NO: 1593300 - RNA, 19 nt, Artificial Sequence
  Description of Artificial Sequence: Synthetic oligonucleotide
  Antisense strand to SEQ ID NO: 1593299
uguugaggaauccucgcca

SEQ ID NO: 1593301 - RNA, 19 nt, Artificial Sequence
  Description of Artificial Sequence: Synthetic oligonucleotide
  Sense strand starting at position 2871 of SEQ ID NO: 1560339
aagagagcuuugggaaaga

SEQ ID NO: 1593302 - RNA, 19 nt, Artificial Sequence
  Description of Artificial Sequence: Synthetic oligonucleotide
  Antisense strand to SEQ ID NO: 1593301
ucuuucccaaagcucucuu

SEQ ID NO: 1593303 - RNA, 19 nt, Artificial Sequence
  Description of Artificial Sequence: Synthetic oligonucleotide
  Sense strand starting at position 2933 of SEQ ID NO: 1560339
ugugacuuugugcaacaga

SEQ ID NO: 1593304 - RNA, 19 nt, Artificial Sequence
  Description of Artificial Sequence: Synthetic oligonucleotide
  Antisense strand to SEQ ID NO: 1593303
ucuguugcacaaagucaca

SEQ ID NO: 1593305 - RNA, 19 nt, Artificial Sequence
  Description of Artificial Sequence: Synthetic oligonucleotide
  Sense strand starting at position 2956 of SEQ ID NO: 1560339
ccacuccuugucugagacu

SEQ ID NO: 1593306 - RNA, 19 nt, Artificial Sequence
  Description of Artificial Sequence: Synthetic oligonucleotide
  Antisense strand to SEQ ID NO: 1593305
agucucagacaaggagugg

SEQ ID NO: 1593307 - RNA, 19 nt, Artificial Sequence
  Description of Artificial Sequence: Synthetic oligonucleotide
  Sense strand starting at position 2998 of SEQ ID NO: 1560339
gggcguauucaagagucca

SEQ ID NO: 1593308 - RNA, 19 nt, Artificial Sequence
  Description of Artificial Sequence: Synthetic oligonucleotide
  Antisense strand to SEQ ID NO: 1593307
uggacucuugaauacgccc

SEQ ID NO: 1593309 - RNA, 19 nt, Artificial Sequence
  Description of Artificial Sequence: Synthetic oligonucleotide
  Sense strand starting at position 3065 of SEQ ID NO: 1560339
ggcucaaucagcggucaac

SEQ ID NO: 1593310 - RNA, 19 nt, Artificial Sequence
  Description of Artificial Sequence: Synthetic oligonucleotide
  Antisense strand to SEQ ID NO: 1593309
guugaccgcugauugagcc

SEQ ID NO: 1593311 - RNA, 19 nt, Artificial Sequence
  Description of Artificial Sequence: Synthetic oligonucleotide
  Sense strand starting at position 3068 of SEQ ID NO: 1560339
ucaaucagcggucaacuuu

SEQ ID NO: 1593312 - RNA, 19 nt, Artificial Sequence
  Description of Artificial Sequence: Synthetic oligonucleotide
  Antisense strand to SEQ ID NO: 1593311
aaaguugaccgcugauuga

SEQ ID NO: 1593313 - RNA, 19 nt, Artificial Sequence
  Description of Artificial Sequence: Synthetic oligonucleotide
  Sense strand starting at position 3119 of SEQ ID NO: 1560339
ggaggcugauauucuguua

SEQ ID NO: 1593314 - RNA, 19 nt, Artificial Sequence
  Description of Artificial Sequence: Synthetic oligonucleotide
  Antisense strand to SEQ ID NO: 1593313
uaacagaauaucagccucc

SEQ ID NO: 1593315 - RNA, 19 nt, Artificial Sequence
  Description of Artificial Sequence: Synthetic oligonucleotide
  Sense strand starting at position 3122 of SEQ ID NO: 1560339
ggcugauauucuguuauuc

SEQ ID NO: 1593316 - RNA, 19 nt, Artificial Sequence
  Description of Artificial Sequence: Synthetic oligonucleotide
  Antisense strand to SEQ ID NO: 1593315
gaauaacagaauaucagcc

SEQ ID NO: 1593317 - RNA, 19 nt, Artificial Sequence
  Description of Artificial Sequence: Synthetic oligonucleotide
  Sense strand starting at position 3185 of SEQ ID NO: 1560339
acagucauggcagaaauuc

SEQ ID NO: 1593318 - RNA, 19 nt, Artificial Sequence
  Description of Artificial Sequence: Synthetic oligonucleotide
  Antisense strand to SEQ ID NO: 1593317
gaauuucugccaugacugu

SEQ ID NO: 1593319 - RNA, 19 nt, Artificial Sequence
  Description of Artificial Sequence: Synthetic oligonucleotide
  Sense strand starting at position 3256 of SEQ ID NO: 1560339
cuccuuugaccuggagaca

SEQ ID NO: 1593320 - RNA, 19 nt, Artificial Sequence
  Description of Artificial Sequence: Synthetic oligonucleotide
  Antisense strand to SEQ ID NO: 1593319
ugucuccaggucaaaggag

SEQ ID NO: 1593321 - RNA, 19 nt, Artificial Sequence
  Description of Artificial Sequence: Synthetic oligonucleotide
  Sense strand starting at position 3267 of SEQ ID NO: 1560339
uggagacagucauugucaa

SEQ ID NO: 1593322 - RNA, 19 nt, Artificial Sequence
  Description of Artificial Sequence: Synthetic oligonucleotide
  Antisense strand to SEQ ID NO: 1593321
uugacaaugacugucucca

SEQ ID NO: 1593323 - RNA, 19 nt, Artificial Sequence
  Description of Artificial Sequence: Synthetic oligonucleotide
  Sense strand starting at position 3268 of SEQ ID NO: 1560339
ggagacagucauugucaac

SEQ ID NO: 1593324 - RNA, 19 nt, Artificial Sequence
  Description of Artificial Sequence: Synthetic oligonucleotide
  Antisense strand to SEQ ID NO: 1593323
guugacaaugacugucucc

SEQ ID NO: 1593325 - RNA, 19 nt, Artificial Sequence
  Description of Artificial Sequence: Synthetic oligonucleotide
  Sense strand starting at position 3530 of SEQ ID NO: 1560339
ggccaaugucaggauaucu

SEQ ID NO: 1593326 - RNA, 19 nt, Artificial Sequence
  Description of Artificial Sequence: Synthetic oligonucleotide
  Antisense strand to SEQ ID NO: 1593325
agauauccugacauuggcc

SEQ ID NO: 1593327 - RNA, 19 nt, Artificial Sequence
  Description of Artificial Sequence: Synthetic oligonucleotide
  Sense strand starting at position 3535 of SEQ ID NO: 1560339
augucaggauaucuuucua

SEQ ID NO: 1593328 - RNA, 19 nt, Artificial Sequence
  Description of Artificial Sequence: Synthetic oligonucleotide
  Antisense strand to SEQ ID NO: 1593327
uagaaagauauccugacau

SEQ ID NO: 1593329 - RNA, 19 nt, Artificial Sequence
  Description of Artificial Sequence: Synthetic oligonucleotide
  Sense strand starting at position 3617 of SEQ ID NO: 1560339
uggcguucuauccacagau

SEQ ID NO: 1593330 - RNA, 19 nt, Artificial Sequence
  Description of Artificial Sequence: Synthetic oligonucleotide
  Antisense strand to SEQ ID NO: 1593329
aucuguggauagaacgcca

SEQ ID NO: 1593331 - RNA, 19 nt, Artificial Sequence
  Description of Artificial Sequence: Synthetic oligonucleotide
  Sense strand starting at position 3657 of SEQ ID NO: 1560339
acuguuggauaucuagauu

SEQ ID NO: 1593332 - RNA, 19 nt, Artificial Sequence
  Description of Artificial Sequence: Synthetic oligonucleotide
  Antisense strand to SEQ ID NO: 1593331
aaucuagauauccaacagu

SEQ ID NO: 1593333 - RNA, 19 nt, Artificial Sequence
  Description of Artificial Sequence: Synthetic oligonucleotide
  Sense strand starting at position 3660 of SEQ ID NO: 1560339
guuggauaucuagauuguu

SEQ ID NO: 1593334 - RNA, 19 nt, Artificial Sequence
  Description of Artificial Sequence: Synthetic oligonucleotide
  Antisense strand to SEQ ID NO: 1593333
aacaaucuagauauccaac

SEQ ID NO: 1593335 - RNA, 19 nt, Artificial Sequence
  Description of Artificial Sequence: Synthetic oligonucleotide
  Sense strand starting at position 3679 of SEQ ID NO: 1560339
uccaguuugcuauggugaa

SEQ ID NO: 1593336 - RNA, 19 nt, Artificial Sequence
  Description of Artificial Sequence: Synthetic oligonucleotide
  Antisense strand to SEQ ID NO: 1593335
uucaccauagcaaacugga

SEQ ID NO: 1593337 - RNA, 19 nt, Artificial Sequence
  Description of Artificial Sequence: Synthetic oligonucleotide
  Sense strand starting at position 3683 of SEQ ID NO: 1560339
guuugcuauggugaacaca

SEQ ID NO: 1593338 - RNA, 19 nt, Artificial Sequence
  Description of Artificial Sequence: Synthetic oligonucleotide
  Antisense strand to SEQ ID NO: 1593337
uguguucaccauagcaaac

SEQ ID NO: 1593339 - RNA, 19 nt, Artificial Sequence
  Description of Artificial Sequence: Synthetic oligonucleotide
  Sense strand starting at position 3723 of SEQ ID NO: 1560339
cuugcagcuuugucccaua

SEQ ID NO: 1593340 - RNA, 19 nt, Artificial Sequence
  Description of Artificial Sequence: Synthetic oligonucleotide
  Antisense strand to SEQ ID NO: 1593339
uaugggacaaagcugcaag

SEQ ID NO: 1593341 - RNA, 19 nt, Artificial Sequence
  Description of Artificial Sequence: Synthetic oligonucleotide
  Sense strand starting at position 3741 of SEQ ID NO: 1560339
acggguacuguugaucaca

SEQ ID NO: 1593342 - RNA, 19 nt, Artificial Sequence
  Description of Artificial Sequence: Synthetic oligonucleotide
  Antisense strand to SEQ ID NO: 1593341
ugugaucaacaguacccgu

SEQ ID NO: 1593343 - RNA, 19 nt, Artificial Sequence
  Description of Artificial Sequence: Synthetic oligonucleotide
  Sense strand starting at position 3749 of SEQ ID NO: 1560339
uguugaucacagggugacu

SEQ ID NO: 1593344 - RNA, 19 nt, Artificial Sequence
  Description of Artificial Sequence: Synthetic oligonucleotide
  Antisense strand to SEQ ID NO: 1593343
agucacccugugaucaaca

SEQ ID NO: 1593345 - RNA, 19 nt, Artificial Sequence
  Description of Artificial Sequence: Synthetic oligonucleotide
  Sense strand starting at position 3760 of SEQ ID NO: 1560339
gggugacuuguggaaccuu

SEQ ID NO: 1593346 - RNA, 19 nt, Artificial Sequence
  Description of Artificial Sequence: Synthetic oligonucleotide
  Antisense strand to SEQ ID NO: 1593345
aagguuccacaagucaccc

SEQ ID NO: 1593347 - RNA, 19 nt, Artificial Sequence
  Description of Artificial Sequence: Synthetic oligonucleotide
  Sense strand starting at position 329 of SEQ ID NO: 1560340
gccuacaaaucacguuuau

SEQ ID NO: 1593348 - RNA, 19 nt, Artificial Sequence
  Description of Artificial Sequence: Synthetic oligonucleotide
  Antisense strand to SEQ ID NO: 1593347
auaaacgugauuuguaggc

SEQ ID NO: 1593349 - RNA, 19 nt, Artificial Sequence
  Description of Artificial Sequence: Synthetic oligonucleotide
  Sense strand starting at position 338 of SEQ ID NO: 1560340
ucacguuuauaacacagaa

SEQ ID NO: 1593350 - RNA, 19 nt, Artificial Sequence
  Description of Artificial Sequence: Synthetic oligonucleotide
  Antisense strand to SEQ ID NO: 1593349
uucuguguuauaaacguga

SEQ ID NO: 1593351 - RNA, 19 nt, Artificial Sequence
  Description of Artificial Sequence: Synthetic oligonucleotide
  Sense strand starting at position 387 of SEQ ID NO: 1560340
cccaaauguccacggcagu

SEQ ID NO: 1593352 - RNA, 19 nt, Artificial Sequence
  Description of Artificial Sequence: Synthetic oligonucleotide
  Antisense strand to SEQ ID NO: 1593351
acugccguggacauuuggg

SEQ ID NO: 1593353 - RNA, 19 nt, Artificial Sequence
  Description of Artificial Sequence: Synthetic oligonucleotide
  Sense strand starting at position 388 of SEQ ID NO: 1560340
ccaaauguccacggcaguu

SEQ ID NO: 1593354 - RNA, 19 nt, Artificial Sequence
  Description of Artificial Sequence: Synthetic oligonucleotide
  Antisense strand to SEQ ID NO: 1593353
aacugccguggacauuugg

SEQ ID NO: 1593355 - RNA, 19 nt, Artificial Sequence
  Description of Artificial Sequence: Synthetic oligonucleotide
  Sense strand starting at position 401 of SEQ ID NO: 1560340
gcaguuuggcuguaggauc

SEQ ID NO: 1593356 - RNA, 19 nt, Artificial Sequence
  Description of Artificial Sequence: Synthetic oligonucleotide
  Antisense strand to SEQ ID NO: 1593355
gauccuacagccaaacugc

SEQ ID NO: 1593357 - RNA, 19 nt, Artificial Sequence
  Description of Artificial Sequence: Synthetic oligonucleotide
  Sense strand starting at position 557 of SEQ ID NO: 1560340
ggaucuugcaggcagcaua

SEQ ID NO: 1593358 - RNA, 19 nt, Artificial Sequence
  Description of Artificial Sequence: Synthetic oligonucleotide
  Antisense strand to SEQ ID NO: 1593357
uaugcugccugcaagaucc

SEQ ID NO: 1593359 - RNA, 19 nt, Artificial Sequence
  Description of Artificial Sequence: Synthetic oligonucleotide
  Sense strand starting at position 710 of SEQ ID NO: 1560340
gacgaugaugcacauuagu

SEQ ID NO: 1593360 - RNA, 19 nt, Artificial Sequence
  Description of Artificial Sequence: Synthetic oligonucleotide
  Antisense strand to SEQ ID NO: 1593359
acuaaugugcaucaucguc

SEQ ID NO: 1593361 - RNA, 19 nt, Artificial Sequence
  Description of Artificial Sequence: Synthetic oligonucleotide
  Sense strand starting at position 719 of SEQ ID NO: 1560340
gcacauuagucccugagaa

SEQ ID NO: 1593362 - RNA, 19 nt, Artificial Sequence
  Description of Artificial Sequence: Synthetic oligonucleotide
  Antisense strand to SEQ ID NO: 1593361
uucucagggacuaaugugc

SEQ ID NO: 1593363 - RNA, 19 nt, Artificial Sequence
  Description of Artificial Sequence: Synthetic oligonucleotide
  Sense strand starting at position 761 of SEQ ID NO: 1560340
acgcuaaggcugugaagua

SEQ ID NO: 1593364 - RNA, 19 nt, Artificial Sequence
  Description of Artificial Sequence: Synthetic oligonucleotide
  Antisense strand to SEQ ID NO: 1593363
uacuucacagccuuagcgu

SEQ ID NO: 1593365 - RNA, 19 nt, Artificial Sequence
  Description of Artificial Sequence: Synthetic oligonucleotide
  Sense strand starting at position 1839 of SEQ ID NO: 1560340
gccgcuggcccucggaaua

SEQ ID NO: 1593366 - RNA, 19 nt, Artificial Sequence
  Description of Artificial Sequence: Synthetic oligonucleotide
  Antisense strand to SEQ ID NO: 1593365
uauuccgagggccagcggc

SEQ ID NO: 1593367 - RNA, 19 nt, Artificial Sequence
  Description of Artificial Sequence: Synthetic oligonucleotide
  Sense strand starting at position 2109 of SEQ ID NO: 1560340
gccacacuguucugacaau

SEQ ID NO: 1593368 - RNA, 19 nt, Artificial Sequence
  Description of Artificial Sequence: Synthetic oligonucleotide
  Antisense strand to SEQ ID NO: 1593367
auugucagaacaguguggc

SEQ ID NO: 1593369 - RNA, 19 nt, Artificial Sequence
  Description of Artificial Sequence: Synthetic oligonucleotide
  Sense strand starting at position 2144 of SEQ ID NO: 1560340
gcgaccauccaauguguca

SEQ ID NO: 1593370 - RNA, 19 nt, Artificial Sequence
  Description of Artificial Sequence: Synthetic oligonucleotide
  Antisense strand to SEQ ID NO: 1593369
ugacacauuggauggucgc

SEQ ID NO: 1593371 - RNA, 19 nt, Artificial Sequence
  Description of Artificial Sequence: Synthetic oligonucleotide
  Sense strand starting at position 2385 of SEQ ID NO: 1560340
ggcugaccacuugaucauu

SEQ ID NO: 1593372 - RNA, 19 nt, Artificial Sequence
  Description of Artificial Sequence: Synthetic oligonucleotide
  Antisense strand to SEQ ID NO: 1593371
aaugaucaaguggucagcc

SEQ ID NO: 1593373 - RNA, 19 nt, Artificial Sequence
  Description of Artificial Sequence: Synthetic oligonucleotide
  Sense strand starting at position 2396 of SEQ ID NO: 1560340
ugaucauuuccaggcggca

SEQ ID NO: 1593374 - RNA, 19 nt, Artificial Sequence
  Description of Artificial Sequence: Synthetic oligonucleotide
  Antisense strand to SEQ ID NO: 1593373
ugccgccuggaaaugauca

SEQ ID NO: 1593375 - RNA, 19 nt, Artificial Sequence
  Description of Artificial Sequence: Synthetic oligonucleotide
  Sense strand starting at position 2533 of SEQ ID NO: 1560340
auggcuuccgacugacagu

SEQ ID NO: 1593376 - RNA, 19 nt, Artificial Sequence
  Description of Artificial Sequence: Synthetic oligonucleotide
  Antisense strand to SEQ ID NO: 1593375
acugucagucggaagccau

SEQ ID NO: 1593377 - RNA, 19 nt, Artificial Sequence
  Description of Artificial Sequence: Synthetic oligonucleotide
  Sense strand starting at position 2553 of SEQ ID NO: 1560340
acaguaucugccuguugga

SEQ ID NO: 1593378 - RNA, 19 nt, Artificial Sequence
  Description of Artificial Sequence: Synthetic oligonucleotide
  Antisense strand to SEQ ID NO: 1593377
uccaacaggcagauacugu

SEQ ID NO: 1593379 - RNA, 19 nt, Artificial Sequence
  Description of Artificial Sequence: Synthetic oligonucleotide
  Sense strand starting at position 2572 of SEQ ID NO: 1560340
gcaucugucucuggccaaa

SEQ ID NO: 1593380 - RNA, 19 nt, Artificial Sequence
  Description of Artificial Sequence: Synthetic oligonucleotide
  Antisense strand to SEQ ID NO: 1593379
uuuggccagagacagaugc

SEQ ID NO: 1593381 - RNA, 19 nt, Artificial Sequence
  Description of Artificial Sequence: Synthetic oligonucleotide
  Sense strand starting at position 2604 of SEQ ID NO: 1560340
acgaguuucuccugcucau

SEQ ID NO: 1593382 - RNA, 19 nt, Artificial Sequence
  Description of Artificial Sequence: Synthetic oligonucleotide
  Antisense strand to SEQ ID NO: 1593381
augagcaggagaaacucgu

SEQ ID NO: 1593383 - RNA, 19 nt, Artificial Sequence
  Description of Artificial Sequence: Synthetic oligonucleotide
  Sense strand starting at position 2798 of SEQ ID NO: 1560340
ucuccauuacuaugggaca

SEQ ID NO: 1593384 - RNA, 19 nt, Artificial Sequence
  Description of Artificial Sequence: Synthetic oligonucleotide
  Antisense strand to SEQ ID NO: 1593383
ugucccauaguaauggaga

SEQ ID NO: 1593385 - RNA, 19 nt, Artificial Sequence
  Description of Artificial Sequence: Synthetic oligonucleotide
  Sense strand starting at position 2811 of SEQ ID NO: 1560340
gggacaggucuaugaucuu

SEQ ID NO: 1593386 - RNA, 19 nt, Artificial Sequence
  Description of Artificial Sequence: Synthetic oligonucleotide
  Antisense strand to SEQ ID NO: 1593385
aagaucauagaccuguccc

SEQ ID NO: 1593387 - RNA, 19 nt, Artificial Sequence
  Description of Artificial Sequence: Synthetic oligonucleotide
  Sense strand starting at position 2833 of SEQ ID NO: 1560340
agcccaucuaggugugagu

SEQ ID NO: 1593388 - RNA, 19 nt, Artificial Sequence
  Description of Artificial Sequence: Synthetic oligonucleotide
  Antisense strand to SEQ ID NO: 1593387
acucacaccuagaugggcu

SEQ ID NO: 1593389 - RNA, 19 nt, Artificial Sequence
  Description of Artificial Sequence: Synthetic oligonucleotide
  Sense strand starting at position 2966 of SEQ ID NO: 1560340
ccugguuucugccuaaaug

SEQ ID NO: 1593390 - RNA, 19 nt, Artificial Sequence
  Description of Artificial Sequence: Synthetic oligonucleotide
  Antisense strand to SEQ ID NO: 1593389
cauuuaggcagaaaccagg

SEQ ID NO: 1593391 - RNA, 19 nt, Artificial Sequence
  Description of Artificial Sequence: Synthetic oligonucleotide
  Sense strand starting at position 3005 of SEQ ID NO: 1560340
ggacgcuucuucccggaca

SEQ ID NO: 1593392 - RNA, 19 nt, Artificial Sequence
  Description of Artificial Sequence: Synthetic oligonucleotide
  Antisense strand to SEQ ID NO: 1593391
uguccgggaagaagcgucc

SEQ ID NO: 1593393 - RNA, 19 nt, Artificial Sequence
  Description of Artificial Sequence: Synthetic oligonucleotide
  Sense strand starting at position 3559 of SEQ ID NO: 1560340
uugagauugccucaccugu

SEQ ID NO: 1593394 - RNA, 19 nt, Artificial Sequence
  Description of Artificial Sequence: Synthetic oligonucleotide
  Antisense strand to SEQ ID NO: 1593393
acaggugaggcaaucucaa

SEQ ID NO: 1593395 - RNA, 19 nt, Artificial Sequence
  Description of Artificial Sequence: Synthetic oligonucleotide
  Sense strand starting at position 3670 of SEQ ID NO: 1560340
ggcacaggauccuuuaaga

SEQ ID NO: 1593396 - RNA, 19 nt, Artificial Sequence
  Description of Artificial Sequence: Synthetic oligonucleotide
  Antisense strand to SEQ ID NO: 1593395
ucuuaaaggauccugugcc

SEQ ID NO: 1593397 - RNA, 19 nt, Artificial Sequence
  Description of Artificial Sequence: Synthetic oligonucleotide
  Sense strand starting at position 2228 of SEQ ID NO: 1560341
cgggaucuccgcugucaag

SEQ ID NO: 1593398 - RNA, 19 nt, Artificial Sequence
  Description of Artificial Sequence: Synthetic oligonucleotide
  Antisense strand to SEQ ID NO: 1593397
cuugacagcggagaucccg

SEQ ID NO: 1593399 - RNA, 19 nt, Artificial Sequence
  Description of Artificial Sequence: Synthetic oligonucleotide
  Sense strand starting at position 2264 of SEQ ID NO: 1560341
gucacuguugcggcgacau

SEQ ID NO: 1593400 - RNA, 19 nt, Artificial Sequence
  Description of Artificial Sequence: Synthetic oligonucleotide
  Antisense strand to SEQ ID NO: 1593399
augucgccgcaacagugac

SEQ ID NO: 1593401 - RNA, 19 nt, Artificial Sequence
  Description of Artificial Sequence: Synthetic oligonucleotide
  Sense strand starting at position 2266 of SEQ ID NO: 1560341
cacuguugcggcgacauaa

SEQ ID NO: 1593402 - RNA, 19 nt, Artificial Sequence
  Description of Artificial Sequence: Synthetic oligonucleotide
  Antisense strand to SEQ ID NO: 1593401
uuaugucgccgcaacagug

SEQ ID NO: 1593403 - RNA, 19 nt, Artificial Sequence
  Description of Artificial Sequence: Synthetic oligonucleotide
  Sense strand starting at position 2285 of SEQ ID NO: 1560341
aaacaacuucggugccauu

SEQ ID NO: 1593404 - RNA, 19 nt, Artificial Sequence
  Description of Artificial Sequence: Synthetic oligonucleotide
  Antisense strand to SEQ ID NO: 1593403
aauggcaccgaaguuguuu

SEQ ID NO: 1593405 - RNA, 19 nt, Artificial Sequence
  Description of Artificial Sequence: Synthetic oligonucleotide
  Sense strand starting at position 2356 of SEQ ID NO: 1560341
gaggcagauuucgcucuau

SEQ ID NO: 1593406 - RNA, 19 nt, Artificial Sequence
  Description of Artificial Sequence: Synthetic oligonucleotide
  Antisense strand to SEQ ID NO: 1593405
auagagcgaaaucugccuc

SEQ ID NO: 1593407 - RNA, 19 nt, Artificial Sequence
  Description of Artificial Sequence: Synthetic oligonucleotide
  Sense strand starting at position 2360 of SEQ ID NO: 1560341
cagauuucgcucuaucguu

SEQ ID NO: 1593408 - RNA, 19 nt, Artificial Sequence
  Description of Artificial Sequence: Synthetic oligonucleotide
  Antisense strand to SEQ ID NO: 1593407
aacgauagagcgaaaucug

SEQ ID NO: 1593409 - RNA, 19 nt, Artificial Sequence
  Description of Artificial Sequence: Synthetic oligonucleotide
  Sense strand starting at position 2867 of SEQ ID NO: 1560341
gccuguagucaccacuauu

SEQ ID NO: 1593410 - RNA, 19 nt, Artificial Sequence
  Description of Artificial Sequence: Synthetic oligonucleotide
  Antisense strand to SEQ ID NO: 1593409
aauaguggugacuacaggc

SEQ ID NO: 1593411 - RNA, 19 nt, Artificial Sequence
  Description of Artificial Sequence: Synthetic oligonucleotide
  Sense strand starting at position 3025 of SEQ ID NO: 1560341
uagcuaugucgcccagguu

SEQ ID NO: 1593412 - RNA, 19 nt, Artificial Sequence
  Description of Artificial Sequence: Synthetic oligonucleotide
  Antisense strand to SEQ ID NO: 1593411
aaccugggcgacauagcua

SEQ ID NO: 1593413 - RNA, 19 nt, Artificial Sequence
  Description of Artificial Sequence: Synthetic oligonucleotide
  Sense strand starting at position 3026 of SEQ ID NO: 1560341
agcuaugucgcccagguuu

SEQ ID NO: 1593414 - RNA, 19 nt, Artificial Sequence
  Description of Artificial Sequence: Synthetic oligonucleotide
  Antisense strand to SEQ ID NO: 1593413
aaaccugggcgacauagcu

SEQ ID NO: 1593415 - RNA, 19 nt, Artificial Sequence
  Description of Artificial Sequence: Synthetic oligonucleotide
  Sense strand starting at position 3085 of SEQ ID NO: 1560341
cuuccaaagcuugggauua

SEQ ID NO: 1593416 - RNA, 19 nt, Artificial Sequence
  Description of Artificial Sequence: Synthetic oligonucleotide
  Antisense strand to SEQ ID NO: 1593415
uaaucccaagcuuuggaag

SEQ ID NO: 1593417 - RNA, 19 nt, Artificial Sequence
  Description of Artificial Sequence: Synthetic oligonucleotide
  Sense strand starting at position 3087 of SEQ ID NO: 1560341
uccaaagcuugggauuaca

SEQ ID NO: 1593418 - RNA, 19 nt, Artificial Sequence
  Description of Artificial Sequence: Synthetic oligonucleotide
  Antisense strand to SEQ ID NO: 1593417
uguaaucccaagcuuugga

SEQ ID NO: 1593419 - RNA, 19 nt, Artificial Sequence
  Description of Artificial Sequence: Synthetic oligonucleotide
  Sense strand starting at position 3157 of SEQ ID NO: 1560341
cggagugguguucacccaa

SEQ ID NO: 1593420 - RNA, 19 nt, Artificial Sequence
  Description of Artificial Sequence: Synthetic oligonucleotide
  Antisense strand to SEQ ID NO: 1593419
uugggugaacaccacuccg

SEQ ID NO: 1593421 - RNA, 19 nt, Artificial Sequence
  Description of Artificial Sequence: Synthetic oligonucleotide
  Sense strand starting at position 3211 of SEQ ID NO: 1560341
caccucaggguuugaauua

SEQ ID NO: 1593422 - RNA, 19 nt, Artificial Sequence
  Description of Artificial Sequence: Synthetic oligonucleotide
  Antisense strand to SEQ ID NO: 1593421
uaauucaaacccugaggug

SEQ ID NO: 1593423 - RNA, 19 nt, Artificial Sequence
  Description of Artificial Sequence: Synthetic oligonucleotide
  Sense strand starting at position 3350 of SEQ ID NO: 1560341
gcaccauagugguuaagag

SEQ ID NO: 1593424 - RNA, 19 nt, Artificial Sequence
  Description of Artificial Sequence: Synthetic oligonucleotide
  Antisense strand to SEQ ID NO: 1593423
cucuuaaccacuauggugc

SEQ ID NO: 1593425 - RNA, 19 nt, Artificial Sequence
  Description of Artificial Sequence: Synthetic oligonucleotide
  Sense strand starting at position 3354 of SEQ ID NO: 1560341
cauagugguuaagagauua

SEQ ID NO: 1593426 - RNA, 19 nt, Artificial Sequence
  Description of Artificial Sequence: Synthetic oligonucleotide
  Antisense strand to SEQ ID NO: 1593425
uaaucucuuaaccacuaug

SEQ ID NO: 1593427 - RNA, 19 nt, Artificial Sequence
  Description of Artificial Sequence: Synthetic oligonucleotide
  Sense strand starting at position 3392 of SEQ ID NO: 1560341
aggguuagggcuugauucu

SEQ ID NO: 1593428 - RNA, 19 nt, Artificial Sequence
  Description of Artificial Sequence: Synthetic oligonucleotide
  Antisense strand to SEQ ID NO: 1593427
agaaucaagcccuaacccu

SEQ ID NO: 1593429 - RNA, 19 nt, Artificial Sequence
  Description of Artificial Sequence: Synthetic oligonucleotide
  Sense strand starting at position 3399 of SEQ ID NO: 1560341
gggcuugauucuguuacuc

SEQ ID NO: 1593430 - RNA, 19 nt, Artificial Sequence
  Description of Artificial Sequence: Synthetic oligonucleotide
  Antisense strand to SEQ ID NO: 1593429
gaguaacagaaucaagccc

SEQ ID NO: 1593431 - RNA, 19 nt, Artificial Sequence
  Description of Artificial Sequence: Synthetic oligonucleotide
  Sense strand starting at position 3443 of SEQ ID NO: 1560341
gcuucccaucuguauaaug

SEQ ID NO: 1593432 - RNA, 19 nt, Artificial Sequence
  Description of Artificial Sequence: Synthetic oligonucleotide
  Antisense strand to SEQ ID NO: 1593431
cauuauacagaugggaagc

SEQ ID NO: 1593433 - RNA, 19 nt, Artificial Sequence
  Description of Artificial Sequence: Synthetic oligonucleotide
  Sense strand starting at position 3479 of SEQ ID NO: 1560341
cucuuagaguuguugcuga

SEQ ID NO: 1593434 - RNA, 19 nt, Artificial Sequence
  Description of Artificial Sequence: Synthetic oligonucleotide
  Antisense strand to SEQ ID NO: 1593433
ucagcaacaacucuaagag

SEQ ID NO: 1593435 - RNA, 19 nt, Artificial Sequence
  Description of Artificial Sequence: Synthetic oligonucleotide
  Sense strand starting at position 3484 of SEQ ID NO: 1560341
agaguuguugcugaggauu

SEQ ID NO: 1593436 - RNA, 19 nt, Artificial Sequence
  Description of Artificial Sequence: Synthetic oligonucleotide
  Antisense strand to SEQ ID NO: 1593435
aauccucagcaacaacucu

SEQ ID NO: 1593437 - RNA, 19 nt, Artificial Sequence
  Description of Artificial Sequence: Synthetic oligonucleotide
  Sense strand starting at position 3487 of SEQ ID NO: 1560341
guuguugcugaggauuaau

SEQ ID NO: 1593438 - RNA, 19 nt, Artificial Sequence
  Description of Artificial Sequence: Synthetic oligonucleotide
  Antisense strand to SEQ ID NO: 1593437
auuaauccucagcaacaac

SEQ ID NO: 1593439 - RNA, 19 nt, Artificial Sequence
  Description of Artificial Sequence: Synthetic oligonucleotide
  Sense strand starting at position 3496 of SEQ ID NO: 1560341
gaggauuaauuagaguuuc

SEQ ID NO: 1593440 - RNA, 19 nt, Artificial Sequence
  Description of Artificial Sequence: Synthetic oligonucleotide
  Antisense strand to SEQ ID NO: 1593439
gaaacucuaauuaauccuc

SEQ ID NO: 1593441 - RNA, 19 nt, Artificial Sequence
  Description of Artificial Sequence: Synthetic oligonucleotide
  Sense strand starting at position 3524 of SEQ ID NO: 1560341
aagugcuuagcagauauau

SEQ ID NO: 1593442 - RNA, 19 nt, Artificial Sequence
  Description of Artificial Sequence: Synthetic oligonucleotide
  Antisense strand to SEQ ID NO: 1593441
auauaucugcuaagcacuu

SEQ ID NO: 1593443 - RNA, 19 nt, Artificial Sequence
  Description of Artificial Sequence: Synthetic oligonucleotide
  Sense strand starting at position 3526 of SEQ ID NO: 1560341
gugcuuagcagauauauag

SEQ ID NO: 1593444 - RNA, 19 nt, Artificial Sequence
  Description of Artificial Sequence: Synthetic oligonucleotide
  Antisense strand to SEQ ID NO: 1593443
cuauauaucugcuaagcac

SEQ ID NO: 1593445 - RNA, 19 nt, Artificial Sequence
  Description of Artificial Sequence: Synthetic oligonucleotide
  Sense strand starting at position 3532 of SEQ ID NO: 1560341
agcagauauauagggagua

SEQ ID NO: 1593446 - RNA, 19 nt, Artificial Sequence
  Description of Artificial Sequence: Synthetic oligonucleotide
  Antisense strand to SEQ ID NO: 1593445
uacucccuauauaucugcu

SEQ ID NO: 1593447 - RNA, 19 nt, Artificial Sequence
  Description of Artificial Sequence: Synthetic oligonucleotide
  Sense strand starting at position 3544 of SEQ ID NO: 1560341
gggaguacuuaauaaggaa

SEQ ID NO: 1593448 - RNA, 19 nt, Artificial Sequence
  Description of Artificial Sequence: Synthetic oligonucleotide
  Antisense strand to SEQ ID NO: 1593447
uuccuuauuaaguacuccc

SEQ ID NO: 1593449 - RNA, 19 nt, Artificial Sequence
  Description of Artificial Sequence: Synthetic oligonucleotide
  Sense strand starting at position 3587 of SEQ ID NO: 1560341
auguguacuauugggcgaa

SEQ ID NO: 1593450 - RNA, 19 nt, Artificial Sequence
  Description of Artificial Sequence: Synthetic oligonucleotide
  Antisense strand to SEQ ID NO: 1593449
uucgcccaauaguacacau

SEQ ID NO: 1593451 - RNA, 19 nt, Artificial Sequence
  Description of Artificial Sequence: Synthetic oligonucleotide
  Sense strand starting at position 3589 of SEQ ID NO: 1560341
guguacuauugggcgaagu

SEQ ID NO: 1593452 - RNA, 19 nt, Artificial Sequence
  Description of Artificial Sequence: Synthetic oligonucleotide
  Antisense strand to SEQ ID NO: 1593451
acuucgcccaauaguacac

SEQ ID NO: 1593453 - RNA, 19 nt, Artificial Sequence
  Description of Artificial Sequence: Synthetic oligonucleotide
  Sense strand starting at position 3590 of SEQ ID NO: 1560341
uguacuauugggcgaagua

SEQ ID NO: 1593454 - RNA, 19 nt, Artificial Sequence
  Description of Artificial Sequence: Synthetic oligonucleotide
  Antisense strand to SEQ ID NO: 1593453
uacuucgcccaauaguaca

SEQ ID NO: 1593455 - RNA, 19 nt, Artificial Sequence
  Description of Artificial Sequence: Synthetic oligonucleotide
  Sense strand starting at position 3591 of SEQ ID NO: 1560341
guacuauugggcgaaguau

SEQ ID NO: 1593456 - RNA, 19 nt, Artificial Sequence
  Description of Artificial Sequence: Synthetic oligonucleotide
  Antisense strand to SEQ ID NO: 1593455
auacuucgcccaauaguac

SEQ ID NO: 1593457 - RNA, 19 nt, Artificial Sequence
  Description of Artificial Sequence: Synthetic oligonucleotide
  Sense strand starting at position 3602 of SEQ ID NO: 1560341
cgaaguaucuuaucucuuu

SEQ ID NO: 1593458 - RNA, 19 nt, Artificial Sequence
  Description of Artificial Sequence: Synthetic oligonucleotide
  Antisense strand to SEQ ID NO: 1593457
aaagagauaagauacuucg

SEQ ID NO: 1593459 - RNA, 19 nt, Artificial Sequence
  Description of Artificial Sequence: Synthetic oligonucleotide
  Sense strand starting at position 3647 of SEQ ID NO: 1560341
gaagauaagucacagagug

SEQ ID NO: 1593460 - RNA, 19 nt, Artificial Sequence
  Description of Artificial Sequence: Synthetic oligonucleotide
  Antisense strand to SEQ ID NO: 1593459
cacucugugacuuaucuuc

SEQ ID NO: 1593461 - RNA, 19 nt, Artificial Sequence
  Description of Artificial Sequence: Synthetic oligonucleotide
  Sense strand starting at position 3672 of SEQ ID NO: 1560341
uggugaugccaaggcuuga

SEQ ID NO: 1593462 - RNA, 19 nt, Artificial Sequence
  Description of Artificial Sequence: Synthetic oligonucleotide
  Antisense strand to SEQ ID NO: 1593461
ucaagccuuggcaucacca

SEQ ID NO: 1593463 - RNA, 19 nt, Artificial Sequence
  Description of Artificial Sequence: Synthetic oligonucleotide
  Sense strand starting at position 3676 of SEQ ID NO: 1560341
gaugccaaggcuugaagau

SEQ ID NO: 1593464 - RNA, 19 nt, Artificial Sequence
  Description of Artificial Sequence: Synthetic oligonucleotide
  Antisense strand to SEQ ID NO: 1593463
aucuucaagccuuggcauc

SEQ ID NO: 1593465 - RNA, 19 nt, Artificial Sequence
  Description of Artificial Sequence: Synthetic oligonucleotide
  Sense strand starting at position 3763 of SEQ ID NO: 1560341
ugcuguugcuaaguaaaca

SEQ ID NO: 1593466 - RNA, 19 nt, Artificial Sequence
  Description of Artificial Sequence: Synthetic oligonucleotide
  Antisense strand to SEQ ID NO: 1593465
uguuuacuuagcaacagca

SEQ ID NO: 1593467 - RNA, 19 nt, Artificial Sequence
  Description of Artificial Sequence: Synthetic oligonucleotide
  Sense strand starting at position 3771 of SEQ ID NO: 1560341
cuaaguaaacauuguguca

SEQ ID NO: 1593468 - RNA, 19 nt, Artificial Sequence
  Description of Artificial Sequence: Synthetic oligonucleotide
  Antisense strand to SEQ ID NO: 1593467
ugacacaauguuuacuuag

SEQ ID NO: 1593469 - RNA, 19 nt, Artificial Sequence
  Description of Artificial Sequence: Synthetic oligonucleotide
  Sense strand starting at position 3774 of SEQ ID NO: 1560341
aguaaacauugugucagau

SEQ ID NO: 1593470 - RNA, 19 nt, Artificial Sequence
  Description of Artificial Sequence: Synthetic oligonucleotide
  Antisense strand to SEQ ID NO: 1593469
aucugacacaauguuuacu

SEQ ID NO: 1593471 - RNA, 19 nt, Artificial Sequence
  Description of Artificial Sequence: Synthetic oligonucleotide
  Sense strand starting at position 3832 of SEQ ID NO: 1560341
cuagacaauucugcuggaa

SEQ ID NO: 1593472 - RNA, 19 nt, Artificial Sequence
  Description of Artificial Sequence: Synthetic oligonucleotide
  Antisense strand to SEQ ID NO: 1593471
uuccagcagaauugucuag

SEQ ID NO: 1593473 - RNA, 19 nt, Artificial Sequence
  Description of Artificial Sequence: Synthetic oligonucleotide
  Sense strand starting at position 3835 of SEQ ID NO: 1560341
gacaauucugcuggaaguu

SEQ ID NO: 1593474 - RNA, 19 nt, Artificial Sequence
  Description of Artificial Sequence: Synthetic oligonucleotide
  Antisense strand to SEQ ID NO: 1593473
aacuuccagcagaauuguc

SEQ ID NO: 1593475 - RNA, 19 nt, Artificial Sequence
  Description of Artificial Sequence: Synthetic oligonucleotide
  Sense strand starting at position 3888 of SEQ ID NO: 1560341
gguagaacuuguuccuuaa

SEQ ID NO: 1593476 - RNA, 19 nt, Artificial Sequence
  Description of Artificial Sequence: Synthetic oligonucleotide
  Antisense strand to SEQ ID NO: 1593475
uuaaggaacaaguucuacc

SEQ ID NO: 1593477 - RNA, 19 nt, Artificial Sequence
  Description of Artificial Sequence: Synthetic oligonucleotide
  Sense strand starting at position 35 of SEQ ID NO: 1560342
guuccagguccagagucau

SEQ ID NO: 1593478 - RNA, 19 nt, Artificial Sequence
  Description of Artificial Sequence: Synthetic oligonucleotide
  Antisense strand to SEQ ID NO: 1593477
augacucuggaccuggaac

SEQ ID NO: 1593479 - RNA, 19 nt, Artificial Sequence
  Description of Artificial Sequence: Synthetic oligonucleotide
  Sense strand starting at position 147 of SEQ ID NO: 1560342
caggaaaguugcuuaaccu

SEQ ID NO: 1593480 - RNA, 19 nt, Artificial Sequence
  Description of Artificial Sequence: Synthetic oligonucleotide
  Antisense strand to SEQ ID NO: 1593479
agguuaagcaacuuuccug

SEQ ID NO: 1593481 - RNA, 19 nt, Artificial Sequence
  Description of Artificial Sequence: Synthetic oligonucleotide
  Sense strand starting at position 148 of SEQ ID NO: 1560342
aggaaaguugcuuaaccuc

SEQ ID NO: 1593482 - RNA, 19 nt, Artificial Sequence
  Description of Artificial Sequence: Synthetic oligonucleotide
  Antisense strand to SEQ ID NO: 1593481
gagguuaagcaacuuuccu

SEQ ID NO: 1593483 - RNA, 19 nt, Artificial Sequence
  Description of Artificial Sequence: Synthetic oligonucleotide
  Sense strand starting at position 166 of SEQ ID NO: 1560342
cucagugacucuucucauc

SEQ ID NO: 1593484 - RNA, 19 nt, Artificial Sequence
  Description of Artificial Sequence: Synthetic oligonucleotide
  Antisense strand to SEQ ID NO: 1593483
gaugagaagagucacugag

SEQ ID NO: 1593485 - RNA, 19 nt, Artificial Sequence
  Description of Artificial Sequence: Synthetic oligonucleotide
  Sense strand starting at position 193 of SEQ ID NO: 1560342
aaaggugugauggguucua

SEQ ID NO: 1593486 - RNA, 19 nt, Artificial Sequence
  Description of Artificial Sequence: Synthetic oligonucleotide
  Antisense strand to SEQ ID NO: 1593485
uagaacccaucacaccuuu

SEQ ID NO: 1593487 - RNA, 19 nt, Artificial Sequence
  Description of Artificial Sequence: Synthetic oligonucleotide
  Sense strand starting at position 617 of SEQ ID NO: 1560342
cuauuacugucauuagauu

SEQ ID NO: 1593488 - RNA, 19 nt, Artificial Sequence
  Description of Artificial Sequence: Synthetic oligonucleotide
  Antisense strand to SEQ ID NO: 1593487
aaucuaaugacaguaauag

SEQ ID NO: 1593489 - RNA, 19 nt, Artificial Sequence
  Description of Artificial Sequence: Synthetic oligonucleotide
  Sense strand starting at position 623 of SEQ ID NO: 1560342
cugucauuagauugaaccu

SEQ ID NO: 1593490 - RNA, 19 nt, Artificial Sequence
  Description of Artificial Sequence: Synthetic oligonucleotide
  Antisense strand to SEQ ID NO: 1593489
agguucaaucuaaugacag

SEQ ID NO: 1593491 - RNA, 19 nt, Artificial Sequence
  Description of Artificial Sequence: Synthetic oligonucleotide
  Sense strand starting at position 664 of SEQ ID NO: 1560342
cucugugacguauacaaau

SEQ ID NO: 1593492 - RNA, 19 nt, Artificial Sequence
  Description of Artificial Sequence: Synthetic oligonucleotide
  Antisense strand to SEQ ID NO: 1593491
auuuguauacgucacagag

SEQ ID NO: 1593493 - RNA, 19 nt, Artificial Sequence
  Description of Artificial Sequence: Synthetic oligonucleotide
  Sense strand starting at position 666 of SEQ ID NO: 1560342
cugugacguauacaaaugu

SEQ ID NO: 1593494 - RNA, 19 nt, Artificial Sequence
  Description of Artificial Sequence: Synthetic oligonucleotide
  Antisense strand to SEQ ID NO: 1593493
acauuuguauacgucacag

SEQ ID NO: 1593495 - RNA, 19 nt, Artificial Sequence
  Description of Artificial Sequence: Synthetic oligonucleotide
  Sense strand starting at position 687 of SEQ ID NO: 1560342
gaucauauuggucaaggca

SEQ ID NO: 1593496 - RNA, 19 nt, Artificial Sequence
  Description of Artificial Sequence: Synthetic oligonucleotide
  Antisense strand to SEQ ID NO: 1593495
ugccuugaccaauaugauc

SEQ ID NO: 1593497 - RNA, 19 nt, Artificial Sequence
  Description of Artificial Sequence: Synthetic oligonucleotide
  Sense strand starting at position 765 of SEQ ID NO: 1560342
cagccugagugccuaauuu

SEQ ID NO: 1593498 - RNA, 19 nt, Artificial Sequence
  Description of Artificial Sequence: Synthetic oligonucleotide
  Antisense strand to SEQ ID NO: 1593497
aaauuaggcacucaggcug

SEQ ID NO: 1593499 - RNA, 19 nt, Artificial Sequence
  Description of Artificial Sequence: Synthetic oligonucleotide
  Sense strand starting at position 817 of SEQ ID NO: 1560342
cugauuauguuacugacca

SEQ ID NO: 1593500 - RNA, 19 nt, Artificial Sequence
  Description of Artificial Sequence: Synthetic oligonucleotide
  Antisense strand to SEQ ID NO: 1593499
uggucaguaacauaaucag

SEQ ID NO: 1593501 - RNA, 19 nt, Artificial Sequence
  Description of Artificial Sequence: Synthetic oligonucleotide
  Sense strand starting at position 869 of SEQ ID NO: 1560342
ggccaucagccaggauuau

SEQ ID NO: 1593502 - RNA, 19 nt, Artificial Sequence
  Description of Artificial Sequence: Synthetic oligonucleotide
  Antisense strand to SEQ ID NO: 1593501
auaauccuggcugauggcc

SEQ ID NO: 1593503 - RNA, 19 nt, Artificial Sequence
  Description of Artificial Sequence: Synthetic oligonucleotide
  Sense strand starting at position 930 of SEQ ID NO: 1560342
gaacaugagcucuacggau

SEQ ID NO: 1593504 - RNA, 19 nt, Artificial Sequence
  Description of Artificial Sequence: Synthetic oligonucleotide
  Antisense strand to SEQ ID NO: 1593503
auccguagagcucauguuc

SEQ ID NO: 1593505 - RNA, 19 nt, Artificial Sequence
  Description of Artificial Sequence: Synthetic oligonucleotide
  Sense strand starting at position 932 of SEQ ID NO: 1560342
acaugagcucuacggauaa

SEQ ID NO: 1593506 - RNA, 19 nt, Artificial Sequence
  Description of Artificial Sequence: Synthetic oligonucleotide
  Antisense strand to SEQ ID NO: 1593505
uuauccguagagcucaugu

SEQ ID NO: 1593507 - RNA, 19 nt, Artificial Sequence
  Description of Artificial Sequence: Synthetic oligonucleotide
  Sense strand starting at position 934 of SEQ ID NO: 1560342
augagcucuacggauaaac

SEQ ID NO: 1593508 - RNA, 19 nt, Artificial Sequence
  Description of Artificial Sequence: Synthetic oligonucleotide
  Antisense strand to SEQ ID NO: 1593507
guuuauccguagagcucau

SEQ ID NO: 1593509 - RNA, 19 nt, Artificial Sequence
  Description of Artificial Sequence: Synthetic oligonucleotide
  Sense strand starting at position 1224 of SEQ ID NO: 1560342
aggugauguggauagcaca

SEQ ID NO: 1593510 - RNA, 19 nt, Artificial Sequence
  Description of Artificial Sequence: Synthetic oligonucleotide
  Antisense strand to SEQ ID NO: 1593509
ugugcuauccacaucaccu

SEQ ID NO: 1593511 - RNA, 19 nt, Artificial Sequence
  Description of Artificial Sequence: Synthetic oligonucleotide
  Sense strand starting at position 1302 of SEQ ID NO: 1560342
cuaagaggcuuugcaauua

SEQ ID NO: 1593512 - RNA, 19 nt, Artificial Sequence
  Description of Artificial Sequence: Synthetic oligonucleotide
  Antisense strand to SEQ ID NO: 1593511
uaauugcaaagccucuuag

SEQ ID NO: 1593513 - RNA, 19 nt, Artificial Sequence
  Description of Artificial Sequence: Synthetic oligonucleotide
  Sense strand starting at position 1366 of SEQ ID NO: 1560342
ggccacugaucucuaaagu

SEQ ID NO: 1593514 - RNA, 19 nt, Artificial Sequence
  Description of Artificial Sequence: Synthetic oligonucleotide
  Antisense strand to SEQ ID NO: 1593513
acuuuagagaucaguggcc

SEQ ID NO: 1593515 - RNA, 19 nt, Artificial Sequence
  Description of Artificial Sequence: Synthetic oligonucleotide
  Sense strand starting at position 1367 of SEQ ID NO: 1560342
gccacugaucucuaaagug

SEQ ID NO: 1593516 - RNA, 19 nt, Artificial Sequence
  Description of Artificial Sequence: Synthetic oligonucleotide
  Antisense strand to SEQ ID NO: 1593515
cacuuuagagaucaguggc

SEQ ID NO: 1593517 - RNA, 19 nt, Artificial Sequence
  Description of Artificial Sequence: Synthetic oligonucleotide
  Sense strand starting at position 1494 of SEQ ID NO: 1560342
ccaucacucugguucuuga

SEQ ID NO: 1593518 - RNA, 19 nt, Artificial Sequence
  Description of Artificial Sequence: Synthetic oligonucleotide
  Antisense strand to SEQ ID NO: 1593517
ucaagaaccagagugaugg

SEQ ID NO: 1593519 - RNA, 19 nt, Artificial Sequence
  Description of Artificial Sequence: Synthetic oligonucleotide
  Sense strand starting at position 1593 of SEQ ID NO: 1560342
cugaccgugccucaauaaa

SEQ ID NO: 1593520 - RNA, 19 nt, Artificial Sequence
  Description of Artificial Sequence: Synthetic oligonucleotide
  Antisense strand to SEQ ID NO: 1593519
uuuauugaggcacggucag

SEQ ID NO: 1593521 - RNA, 19 nt, Artificial Sequence
  Description of Artificial Sequence: Synthetic oligonucleotide
  Sense strand starting at position 1611 of SEQ ID NO: 1560342
acguuuauugcaugaggaa

SEQ ID NO: 1593522 - RNA, 19 nt, Artificial Sequence
  Description of Artificial Sequence: Synthetic oligonucleotide
  Antisense strand to SEQ ID NO: 1593521
uuccucaugcaauaaacgu

SEQ ID NO: 1593523 - RNA, 19 nt, Artificial Sequence
  Description of Artificial Sequence: Synthetic oligonucleotide
  Sense strand starting at position 1612 of SEQ ID NO: 1560342
cguuuauugcaugaggaac

SEQ ID NO: 1593524 - RNA, 19 nt, Artificial Sequence
  Description of Artificial Sequence: Synthetic oligonucleotide
  Antisense strand to SEQ ID NO: 1593523
guuccucaugcaauaaacg

SEQ ID NO: 1593525 - RNA, 19 nt, Artificial Sequence
  Description of Artificial Sequence: Synthetic oligonucleotide
  Sense strand starting at position 2026 of SEQ ID NO: 1560342
gaguguguaccgccaucuu

SEQ ID NO: 1593526 - RNA, 19 nt, Artificial Sequence
  Description of Artificial Sequence: Synthetic oligonucleotide
  Antisense strand to SEQ ID NO: 1593525
aagauggcgguacacacuc

SEQ ID NO: 1593527 - RNA, 19 nt, Artificial Sequence
  Description of Artificial Sequence: Synthetic oligonucleotide
  Sense strand starting at position 2041 of SEQ ID NO: 1560342
ucuugaaugugucuaacug

SEQ ID NO: 1593528 - RNA, 19 nt, Artificial Sequence
  Description of Artificial Sequence: Synthetic oligonucleotide
  Antisense strand to SEQ ID NO: 1593527
caguuagacacauucaaga

SEQ ID NO: 1593529 - RNA, 19 nt, Artificial Sequence
  Description of Artificial Sequence: Synthetic oligonucleotide
  Sense strand starting at position 2042 of SEQ ID NO: 1560342
cuugaaugugucuaacugu

SEQ ID NO: 1593530 - RNA, 19 nt, Artificial Sequence
  Description of Artificial Sequence: Synthetic oligonucleotide
  Antisense strand to SEQ ID NO: 1593529
acaguuagacacauucaag

SEQ ID NO: 1593531 - RNA, 19 nt, Artificial Sequence
  Description of Artificial Sequence: Synthetic oligonucleotide
  Sense strand starting at position 2045 of SEQ ID NO: 1560342
gaaugugucuaacuguaga

SEQ ID NO: 1593532 - RNA, 19 nt, Artificial Sequence
  Description of Artificial Sequence: Synthetic oligonucleotide
  Antisense strand to SEQ ID NO: 1593531
ucuacaguuagacacauuc

SEQ ID NO: 1593533 - RNA, 19 nt, Artificial Sequence
  Description of Artificial Sequence: Synthetic oligonucleotide
  Sense strand starting at position 2048 of SEQ ID NO: 1560342
ugugucuaacuguagaaca

SEQ ID NO: 1593534 - RNA, 19 nt, Artificial Sequence
  Description of Artificial Sequence: Synthetic oligonucleotide
  Antisense strand to SEQ ID NO: 1593533
uguucuacaguuagacaca

SEQ ID NO: 1593535 - RNA, 19 nt, Artificial Sequence
  Description of Artificial Sequence: Synthetic oligonucleotide
  Sense strand starting at position 2069 of SEQ ID NO: 1560342
gcucaaugugucgucaucu

SEQ ID NO: 1593536 - RNA, 19 nt, Artificial Sequence
  Description of Artificial Sequence: Synthetic oligonucleotide
  Antisense strand to SEQ ID NO: 1593535
agaugacgacacauugagc

SEQ ID NO: 1593537 - RNA, 19 nt, Artificial Sequence
  Description of Artificial Sequence: Synthetic oligonucleotide
  Sense strand starting at position 2185 of SEQ ID NO: 1560342
ugauuaucucaaggucaga

SEQ ID NO: 1593538 - RNA, 19 nt, Artificial Sequence
  Description of Artificial Sequence: Synthetic oligonucleotide
  Antisense strand to SEQ ID NO: 1593537
ucugaccuugagauaauca

SEQ ID NO: 1593539 - RNA, 19 nt, Artificial Sequence
  Description of Artificial Sequence: Synthetic oligonucleotide
  Sense strand starting at position 2269 of SEQ ID NO: 1560342
ccgucucuggguuacagaa

SEQ ID NO: 1593540 - RNA, 19 nt, Artificial Sequence
  Description of Artificial Sequence: Synthetic oligonucleotide
  Antisense strand to SEQ ID NO: 1593539
uucuguaacccagagacgg

SEQ ID NO: 1593541 - RNA, 19 nt, Artificial Sequence
  Description of Artificial Sequence: Synthetic oligonucleotide
  Sense strand starting at position 2307 of SEQ ID NO: 1560342
ucucucuugcccuaggaga

SEQ ID NO: 1593542 - RNA, 19 nt, Artificial Sequence
  Description of Artificial Sequence: Synthetic oligonucleotide
  Antisense strand to SEQ ID NO: 1593541
ucuccuagggcaagagaga

SEQ ID NO: 1593543 - RNA, 19 nt, Artificial Sequence
  Description of Artificial Sequence: Synthetic oligonucleotide
  Sense strand starting at position 2333 of SEQ ID NO: 1560342
gguggugggcuccagagau

SEQ ID NO: 1593544 - RNA, 19 nt, Artificial Sequence
  Description of Artificial Sequence: Synthetic oligonucleotide
  Antisense strand to SEQ ID NO: 1593543
aucucuggagcccaccacc

SEQ ID NO: 1593545 - RNA, 19 nt, Artificial Sequence
  Description of Artificial Sequence: Synthetic oligonucleotide
  Sense strand starting at position 2488 of SEQ ID NO: 1560342
gguaguacuuagcccagaa

SEQ ID NO: 1593546 - RNA, 19 nt, Artificial Sequence
  Description of Artificial Sequence: Synthetic oligonucleotide
  Antisense strand to SEQ ID NO: 1593545
uucugggcuaaguacuacc

SEQ ID NO: 1593547 - RNA, 19 nt, Artificial Sequence
  Description of Artificial Sequence: Synthetic oligonucleotide
  Sense strand starting at position 2492 of SEQ ID NO: 1560342
guacuuagcccagaacuga

SEQ ID NO: 1593548 - RNA, 19 nt, Artificial Sequence
  Description of Artificial Sequence: Synthetic oligonucleotide
  Antisense strand to SEQ ID NO: 1593547
ucaguucugggcuaaguac

SEQ ID NO: 1593549 - RNA, 19 nt, Artificial Sequence
  Description of Artificial Sequence: Synthetic oligonucleotide
  Sense strand starting at position 2562 of SEQ ID NO: 1560342
cugauauaaccgcauuaca

SEQ ID NO: 1593550 - RNA, 19 nt, Artificial Sequence
  Description of Artificial Sequence: Synthetic oligonucleotide
  Antisense strand to SEQ ID NO: 1593549
uguaaugcgguuauaucag

SEQ ID NO: 1593551 - RNA, 19 nt, Artificial Sequence
  Description of Artificial Sequence: Synthetic oligonucleotide
  Sense strand starting at position 2632 of SEQ ID NO: 1560342
cagagaguugguggaaaug

SEQ ID NO: 1593552 - RNA, 19 nt, Artificial Sequence
  Description of Artificial Sequence: Synthetic oligonucleotide
  Antisense strand to SEQ ID NO: 1593551
cauuuccaccaacucucug

SEQ ID NO: 1593553 - RNA, 19 nt, Artificial Sequence
  Description of Artificial Sequence: Synthetic oligonucleotide
  Sense strand starting at position 2717 of SEQ ID NO: 1560342
uacugcauggccuagauua

SEQ ID NO: 1593554 - RNA, 19 nt, Artificial Sequence
  Description of Artificial Sequence: Synthetic oligonucleotide
  Antisense strand to SEQ ID NO: 1593553
uaaucuaggccaugcagua

SEQ ID NO: 1593555 - RNA, 19 nt, Artificial Sequence
  Description of Artificial Sequence: Synthetic oligonucleotide
  Sense strand starting at position 3489 of SEQ ID NO: 1560342
ucaaauggucaguaaucac

SEQ ID NO: 1593556 - RNA, 19 nt, Artificial Sequence
  Description of Artificial Sequence: Synthetic oligonucleotide
  Antisense strand to SEQ ID NO: 1593555
gugauuacugaccauuuga

SEQ ID NO: 1593557 - RNA, 19 nt, Artificial Sequence
  Description of Artificial Sequence: Synthetic oligonucleotide
  Sense strand starting at position 170 of SEQ ID NO: 1560343
gguuauccuugacuccgau

SEQ ID NO: 1593558 - RNA, 19 nt, Artificial Sequence
  Description of Artificial Sequence: Synthetic oligonucleotide
  Antisense strand to SEQ ID NO: 1593557
aucggagucaaggauaacc

SEQ ID NO: 1593559 - RNA, 19 nt, Artificial Sequence
  Description of Artificial Sequence: Synthetic oligonucleotide
  Sense strand starting at position 530 of SEQ ID NO: 1560343
uccuccauuuaugagggaa

SEQ ID NO: 1593560 - RNA, 19 nt, Artificial Sequence
  Description of Artificial Sequence: Synthetic oligonucleotide
  Antisense strand to SEQ ID NO: 1593559
uucccucauaaauggagga

SEQ ID NO: 1593561 - RNA, 19 nt, Artificial Sequence
  Description of Artificial Sequence: Synthetic oligonucleotide
  Sense strand starting at position 532 of SEQ ID NO: 1560343
cuccauuuaugagggaauc

SEQ ID NO: 1593562 - RNA, 19 nt, Artificial Sequence
  Description of Artificial Sequence: Synthetic oligonucleotide
  Antisense strand to SEQ ID NO: 1593561
gauucccucauaaauggag

SEQ ID NO: 1593563 - RNA, 19 nt, Artificial Sequence
  Description of Artificial Sequence: Synthetic oligonucleotide
  Sense strand starting at position 773 of SEQ ID NO: 1560343
gguggaaauucuccaaacu

SEQ ID NO: 1593564 - RNA, 19 nt, Artificial Sequence
  Description of Artificial Sequence: Synthetic oligonucleotide
  Antisense strand to SEQ ID NO: 1593563
aguuuggagaauuuccacc

SEQ ID NO: 1593565 - RNA, 19 nt, Artificial Sequence
  Description of Artificial Sequence: Synthetic oligonucleotide
  Sense strand starting at position 795 of SEQ ID NO: 1560343
ugaagcaaguucucacaca

SEQ ID NO: 1593566 - RNA, 19 nt, Artificial Sequence
  Description of Artificial Sequence: Synthetic oligonucleotide
  Antisense strand to SEQ ID NO: 1593565
ugugugagaacuugcuuca

SEQ ID NO: 1593567 - RNA, 19 nt, Artificial Sequence
  Description of Artificial Sequence: Synthetic oligonucleotide
  Sense strand starting at position 878 of SEQ ID NO: 1560343
uguuguucucuuugagaaa

SEQ ID NO: 1593568 - RNA, 19 nt, Artificial Sequence
  Description of Artificial Sequence: Synthetic oligonucleotide
  Antisense strand to SEQ ID NO: 1593567
uuucucaaagagaacaaca

SEQ ID NO: 1593569 - RNA, 19 nt, Artificial Sequence
  Description of Artificial Sequence: Synthetic oligonucleotide
  Sense strand starting at position 2183 of SEQ ID NO: 1560343
cccaauaaucagggcucau

SEQ ID NO: 1593570 - RNA, 19 nt, Artificial Sequence
  Description of Artificial Sequence: Synthetic oligonucleotide
  Antisense strand to SEQ ID NO: 1593569
augagcccugauuauuggg

SEQ ID NO: 1593571 - RNA, 19 nt, Artificial Sequence
  Description of Artificial Sequence: Synthetic oligonucleotide
  Sense strand starting at position 2396 of SEQ ID NO: 1560343
agcgguguacgagacauaa

SEQ ID NO: 1593572 - RNA, 19 nt, Artificial Sequence
  Description of Artificial Sequence: Synthetic oligonucleotide
  Antisense strand to SEQ ID NO: 1593571
uuaugucucguacaccgcu

SEQ ID NO: 1593573 - RNA, 19 nt, Artificial Sequence
  Description of Artificial Sequence: Synthetic oligonucleotide
  Sense strand starting at position 2465 of SEQ ID NO: 1560343
aaacauguugaauguuuga

SEQ ID NO: 1593574 - RNA, 19 nt, Artificial Sequence
  Description of Artificial Sequence: Synthetic oligonucleotide
  Antisense strand to SEQ ID NO: 1593573
ucaaacauucaacauguuu

SEQ ID NO: 1593575 - RNA, 19 nt, Artificial Sequence
  Description of Artificial Sequence: Synthetic oligonucleotide
  Sense strand starting at position 2468 of SEQ ID NO: 1560343
cauguugaauguuugaaag

SEQ ID NO: 1593576 - RNA, 19 nt, Artificial Sequence
  Description of Artificial Sequence: Synthetic oligonucleotide
  Antisense strand to SEQ ID NO: 1593575
cuuucaaacauucaacaug

SEQ ID NO: 1593577 - RNA, 19 nt, Artificial Sequence
  Description of Artificial Sequence: Synthetic oligonucleotide
  Sense strand starting at position 2476 of SEQ ID NO: 1560343
auguuugaaagcgauaagu

SEQ ID NO: 1593578 - RNA, 19 nt, Artificial Sequence
  Description of Artificial Sequence: Synthetic oligonucleotide
  Antisense strand to SEQ ID NO: 1593577
acuuaucgcuuucaaacau

SEQ ID NO: 1593579 - RNA, 19 nt, Artificial Sequence
  Description of Artificial Sequence: Synthetic oligonucleotide
  Sense strand starting at position 2487 of SEQ ID NO: 1560343
cgauaagugcuuuggagaa

SEQ ID NO: 1593580 - RNA, 19 nt, Artificial Sequence
  Description of Artificial Sequence: Synthetic oligonucleotide
  Antisense strand to SEQ ID NO: 1593579
uucuccaaagcacuuaucg

SEQ ID NO: 1593581 - RNA, 19 nt, Artificial Sequence
  Description of Artificial Sequence: Synthetic oligonucleotide
  Sense strand starting at position 2809 of SEQ ID NO: 1560343
cggagcuuugugggacaua

SEQ ID NO: 1593582 - RNA, 19 nt, Artificial Sequence
  Description of Artificial Sequence: Synthetic oligonucleotide
  Antisense strand to SEQ ID NO: 1593581
uaugucccacaaagcuccg

SEQ ID NO: 1593583 - RNA, 19 nt, Artificial Sequence
  Description of Artificial Sequence: Synthetic oligonucleotide
  Sense strand starting at position 3032 of SEQ ID NO: 1560343
ucaacagauucugcuuaag

SEQ ID NO: 1593584 - RNA, 19 nt, Artificial Sequence
  Description of Artificial Sequence: Synthetic oligonucleotide
  Antisense strand to SEQ ID NO: 1593583
cuuaagcagaaucuguuga

SEQ ID NO: 1593585 - RNA, 19 nt, Artificial Sequence
  Description of Artificial Sequence: Synthetic oligonucleotide
  Sense strand starting at position 3035 of SEQ ID NO: 1560343
acagauucugcuuaaguau

SEQ ID NO: 1593586 - RNA, 19 nt, Artificial Sequence
  Description of Artificial Sequence: Synthetic oligonucleotide
  Antisense strand to SEQ ID NO: 1593585
auacuuaagcagaaucugu

SEQ ID NO: 1593587 - RNA, 19 nt, Artificial Sequence
  Description of Artificial Sequence: Synthetic oligonucleotide
  Sense strand starting at position 3064 of SEQ ID NO: 1560343
gggcuuuguaauuguguaa

SEQ ID NO: 1593588 - RNA, 19 nt, Artificial Sequence
  Description of Artificial Sequence: Synthetic oligonucleotide
  Antisense strand to SEQ ID NO: 1593587
uuacacaauuacaaagccc

SEQ ID NO: 1593589 - RNA, 19 nt, Artificial Sequence
  Description of Artificial Sequence: Synthetic oligonucleotide
  Sense strand starting at position 3076 of SEQ ID NO: 1560343
uguguaauaucaguaucca

SEQ ID NO: 1593590 - RNA, 19 nt, Artificial Sequence
  Description of Artificial Sequence: Synthetic oligonucleotide
  Antisense strand to SEQ ID NO: 1593589
uggauacugauauuacaca

SEQ ID NO: 1593591 - RNA, 19 nt, Artificial Sequence
  Description of Artificial Sequence: Synthetic oligonucleotide
  Sense strand starting at position 3077 of SEQ ID NO: 1560343
guguaauaucaguauccau

SEQ ID NO: 1593592 - RNA, 19 nt, Artificial Sequence
  Description of Artificial Sequence: Synthetic oligonucleotide
  Antisense strand to SEQ ID NO: 1593591
auggauacugauauuacac

SEQ ID NO: 1593593 - RNA, 19 nt, Artificial Sequence
  Description of Artificial Sequence: Synthetic oligonucleotide
  Sense strand starting at position 3178 of SEQ ID NO: 1560343
ccuagauguugacucuguu

SEQ ID NO: 1593594 - RNA, 19 nt, Artificial Sequence
  Description of Artificial Sequence: Synthetic oligonucleotide
  Antisense strand to SEQ ID NO: 1593593
aacagagucaacaucuagg

SEQ ID NO: 1593595 - RNA, 19 nt, Artificial Sequence
  Description of Artificial Sequence: Synthetic oligonucleotide
  Sense strand starting at position 3181 of SEQ ID NO: 1560343
agauguugacucuguucca

SEQ ID NO: 1593596 - RNA, 19 nt, Artificial Sequence
  Description of Artificial Sequence: Synthetic oligonucleotide
  Antisense strand to SEQ ID NO: 1593595
uggaacagagucaacaucu

SEQ ID NO: 1593597 - RNA, 19 nt, Artificial Sequence
  Description of Artificial Sequence: Synthetic oligonucleotide
  Sense strand starting at position 3182 of SEQ ID NO: 1560343
gauguugacucuguuccau

SEQ ID NO: 1593598 - RNA, 19 nt, Artificial Sequence
  Description of Artificial Sequence: Synthetic oligonucleotide
  Antisense strand to SEQ ID NO: 1593597
auggaacagagucaacauc

SEQ ID NO: 1593599 - RNA, 19 nt, Artificial Sequence
  Description of Artificial Sequence: Synthetic oligonucleotide
  Sense strand starting at position 3236 of SEQ ID NO: 1560343
cugggugcccaguaaaugu

SEQ ID NO: 1593600 - RNA, 19 nt, Artificial Sequence
  Description of Artificial Sequence: Synthetic oligonucleotide
  Antisense strand to SEQ ID NO: 1593599
acauuuacugggcacccag

SEQ ID NO: 1593601 - RNA, 19 nt, Artificial Sequence
  Description of Artificial Sequence: Synthetic oligonucleotide
  Sense strand starting at position 3262 of SEQ ID NO: 1560343
augaauggauggccucaua

SEQ ID NO: 1593602 - RNA, 19 nt, Artificial Sequence
  Description of Artificial Sequence: Synthetic oligonucleotide
  Antisense strand to SEQ ID NO: 1593601
uaugaggccauccauucau

SEQ ID NO: 1593603 - RNA, 19 nt, Artificial Sequence
  Description of Artificial Sequence: Synthetic oligonucleotide
  Sense strand starting at position 3286 of SEQ ID NO: 1560343
gugaguucucuguguacag

SEQ ID NO: 1593604 - RNA, 19 nt, Artificial Sequence
  Description of Artificial Sequence: Synthetic oligonucleotide
  Antisense strand to SEQ ID NO: 1593603
cuguacacagagaacucac

SEQ ID NO: 1593605 - RNA, 19 nt, Artificial Sequence
  Description of Artificial Sequence: Synthetic oligonucleotide
  Sense strand starting at position 3302 of SEQ ID NO: 1560343
caguguuccagcuguggaa

SEQ ID NO: 1593606 - RNA, 19 nt, Artificial Sequence
  Description of Artificial Sequence: Synthetic oligonucleotide
  Antisense strand to SEQ ID NO: 1593605
uuccacagcuggaacacug

SEQ ID NO: 1593607 - RNA, 19 nt, Artificial Sequence
  Description of Artificial Sequence: Synthetic oligonucleotide
  Sense strand starting at position 3346 of SEQ ID NO: 1560343
ccugaaagauuguuuagau

SEQ ID NO: 1593608 - RNA, 19 nt, Artificial Sequence
  Description of Artificial Sequence: Synthetic oligonucleotide
  Antisense strand to SEQ ID NO: 1593607
aucuaaacaaucuuucagg

SEQ ID NO: 1593609 - RNA, 19 nt, Artificial Sequence
  Description of Artificial Sequence: Synthetic oligonucleotide
  Sense strand starting at position 3347 of SEQ ID NO: 1560343
cugaaagauuguuuagaua

SEQ ID NO: 1593610 - RNA, 19 nt, Artificial Sequence
  Description of Artificial Sequence: Synthetic oligonucleotide
  Antisense strand to SEQ ID NO: 1593609
uaucuaaacaaucuuucag

SEQ ID NO: 1593611 - RNA, 19 nt, Artificial Sequence
  Description of Artificial Sequence: Synthetic oligonucleotide
  Sense strand starting at position 3607 of SEQ ID NO: 1560343
guaggucuaggcugaaaug

SEQ ID NO: 1593612 - RNA, 19 nt, Artificial Sequence
  Description of Artificial Sequence: Synthetic oligonucleotide
  Antisense strand to SEQ ID NO: 1593611
cauuucagccuagaccuac

SEQ ID NO: 1593613 - RNA, 19 nt, Artificial Sequence
  Description of Artificial Sequence: Synthetic oligonucleotide
  Sense strand starting at position 3617 of SEQ ID NO: 1560343
gcugaaaugagccaugacu

SEQ ID NO: 1593614 - RNA, 19 nt, Artificial Sequence
  Description of Artificial Sequence: Synthetic oligonucleotide
  Antisense strand to SEQ ID NO: 1593613
agucauggcucauuucagc

SEQ ID NO: 1593615 - RNA, 19 nt, Artificial Sequence
  Description of Artificial Sequence: Synthetic oligonucleotide
  Sense strand starting at position 3728 of SEQ ID NO: 1560343
agaugaaauaguugagucu

SEQ ID NO: 1593616 - RNA, 19 nt, Artificial Sequence
  Description of Artificial Sequence: Synthetic oligonucleotide
  Antisense strand to SEQ ID NO: 1593615
agacucaacuauuucaucu

SEQ ID NO: 1593617 - RNA, 19 nt, Artificial Sequence
  Description of Artificial Sequence: Synthetic oligonucleotide
  Sense strand starting at position 3731 of SEQ ID NO: 1560343
ugaaauaguugagucuauu

SEQ ID NO: 1593618 - RNA, 19 nt, Artificial Sequence
  Description of Artificial Sequence: Synthetic oligonucleotide
  Antisense strand to SEQ ID NO: 1593617
aauagacucaacuauuuca

SEQ ID NO: 1593619 - RNA, 19 nt, Artificial Sequence
  Description of Artificial Sequence: Synthetic oligonucleotide
  Sense strand starting at position 3737 of SEQ ID NO: 1560343
aguugagucuauucuggau

SEQ ID NO: 1593620 - RNA, 19 nt, Artificial Sequence
  Description of Artificial Sequence: Synthetic oligonucleotide
  Antisense strand to SEQ ID NO: 1593619
auccagaauagacucaacu

SEQ ID NO: 1593621 - RNA, 19 nt, Artificial Sequence
  Description of Artificial Sequence: Synthetic oligonucleotide
  Sense strand starting at position 3755 of SEQ ID NO: 1560343
uuucuagaugugcaaugau

SEQ ID NO: 1593622 - RNA, 19 nt, Artificial Sequence
  Description of Artificial Sequence: Synthetic oligonucleotide
  Antisense strand to SEQ ID NO: 1593621
aucauugcacaucuagaaa

SEQ ID NO: 1593623 - RNA, 19 nt, Artificial Sequence
  Description of Artificial Sequence: Synthetic oligonucleotide
  Sense strand starting at position 3781 of SEQ ID NO: 1560343
gguccaauuccggauaaug

SEQ ID NO: 1593624 - RNA, 19 nt, Artificial Sequence
  Description of Artificial Sequence: Synthetic oligonucleotide
  Antisense strand to SEQ ID NO: 1593623
cauuauccggaauuggacc

SEQ ID NO: 1593625 - RNA, 19 nt, Artificial Sequence
  Description of Artificial Sequence: Synthetic oligonucleotide
  Sense strand starting at position 3783 of SEQ ID NO: 1560343
uccaauuccggauaauguu

SEQ ID NO: 1593626 - RNA, 19 nt, Artificial Sequence
  Description of Artificial Sequence: Synthetic oligonucleotide
  Antisense strand to SEQ ID NO: 1593625
aacauuauccggaauugga

SEQ ID NO: 1593627 - RNA, 19 nt, Artificial Sequence
  Description of Artificial Sequence: Synthetic oligonucleotide
  Sense strand starting at position 3938 of SEQ ID NO: 1560343
ugagauacuuugccugcua

SEQ ID NO: 1593628 - RNA, 19 nt, Artificial Sequence
  Description of Artificial Sequence: Synthetic oligonucleotide
  Antisense strand to SEQ ID NO: 1593627
uagcaggcaaaguaucuca

SEQ ID NO: 1593629 - RNA, 19 nt, Artificial Sequence
  Description of Artificial Sequence: Synthetic oligonucleotide
  Sense strand starting at position 3970 of SEQ ID NO: 1560343
accugaaauuggcucuauc

SEQ ID NO: 1593630 - RNA, 19 nt, Artificial Sequence
  Description of Artificial Sequence: Synthetic oligonucleotide
  Antisense strand to SEQ ID NO: 1593629
gauagagccaauuucaggu

SEQ ID NO: 1593631 - RNA, 19 nt, Artificial Sequence
  Description of Artificial Sequence: Synthetic oligonucleotide
  Sense strand starting at position 3973 of SEQ ID NO: 1560343
ugaaauuggcucuaucggu

SEQ ID NO: 1593632 - RNA, 19 nt, Artificial Sequence
  Description of Artificial Sequence: Synthetic oligonucleotide
  Antisense strand to SEQ ID NO: 1593631
accgauagagccaauuuca

SEQ ID NO: 1593633 - RNA, 19 nt, Artificial Sequence
  Description of Artificial Sequence: Synthetic oligonucleotide
  Sense strand starting at position 3979 of SEQ ID NO: 1560343
uggcucuaucgguaaguaa

SEQ ID NO: 1593634 - RNA, 19 nt, Artificial Sequence
  Description of Artificial Sequence: Synthetic oligonucleotide
  Antisense strand to SEQ ID NO: 1593633
uuacuuaccgauagagcca

SEQ ID NO: 1593635 - RNA, 19 nt, Artificial Sequence
  Description of Artificial Sequence: Synthetic oligonucleotide
  Sense strand starting at position 3982 of SEQ ID NO: 1560343
cucuaucgguaaguaauua

SEQ ID NO: 1593636 - RNA, 19 nt, Artificial Sequence
  Description of Artificial Sequence: Synthetic oligonucleotide
  Antisense strand to SEQ ID NO: 1593635
uaauuacuuaccgauagag

SEQ ID NO: 1593637 - RNA, 19 nt, Artificial Sequence
  Description of Artificial Sequence: Synthetic oligonucleotide
  Sense strand starting at position 198 of SEQ ID NO: 1560344
aagagacuguggcaauaaa

SEQ ID NO: 1593638 - RNA, 19 nt, Artificial Sequence
  Description of Artificial Sequence: Synthetic oligonucleotide
  Antisense strand to SEQ ID NO: 1593637
uuuauugccacagucucuu

SEQ ID NO: 1593639 - RNA, 19 nt, Artificial Sequence
  Description of Artificial Sequence: Synthetic oligonucleotide
  Sense strand starting at position 281 of SEQ ID NO: 1560344
cuaauacucugggaucaca

SEQ ID NO: 1593640 - RNA, 19 nt, Artificial Sequence
  Description of Artificial Sequence: Synthetic oligonucleotide
  Antisense strand to SEQ ID NO: 1593639
ugugaucccagaguauuag

SEQ ID NO: 1593641 - RNA, 19 nt, Artificial Sequence
  Description of Artificial Sequence: Synthetic oligonucleotide
  Sense strand starting at position 458 of SEQ ID NO: 1560344
cgcauaguaauguggagau

SEQ ID NO: 1593642 - RNA, 19 nt, Artificial Sequence
  Description of Artificial Sequence: Synthetic oligonucleotide
  Antisense strand to SEQ ID NO: 1593641
aucuccacauuacuaugcg

SEQ ID NO: 1593643 - RNA, 19 nt, Artificial Sequence
  Description of Artificial Sequence: Synthetic oligonucleotide
  Sense strand starting at position 572 of SEQ ID NO: 1560344
accagaacccugugaacuu

SEQ ID NO: 1593644 - RNA, 19 nt, Artificial Sequence
  Description of Artificial Sequence: Synthetic oligonucleotide
  Antisense strand to SEQ ID NO: 1593643
aaguucacaggguucuggu

SEQ ID NO: 1593645 - RNA, 19 nt, Artificial Sequence
  Description of Artificial Sequence: Synthetic oligonucleotide
  Sense strand starting at position 716 of SEQ ID NO: 1560344
uacagauggcuggaugagu

SEQ ID NO: 1593646 - RNA, 19 nt, Artificial Sequence
  Description of Artificial Sequence: Synthetic oligonucleotide
  Antisense strand to SEQ ID NO: 1593645
acucauccagccaucugua

SEQ ID NO: 1593647 - RNA, 19 nt, Artificial Sequence
  Description of Artificial Sequence: Synthetic oligonucleotide
  Sense strand starting at position 963 of SEQ ID NO: 1560344
gagaaugcucuuugggcca

SEQ ID NO: 1593648 - RNA, 19 nt, Artificial Sequence
  Description of Artificial Sequence: Synthetic oligonucleotide
  Antisense strand to SEQ ID NO: 1593647
uggcccaaagagcauucuc

SEQ ID NO: 1593649 - RNA, 19 nt, Artificial Sequence
  Description of Artificial Sequence: Synthetic oligonucleotide
  Sense strand starting at position 965 of SEQ ID NO: 1560344
gaaugcucuuugggccaga

SEQ ID NO: 1593650 - RNA, 19 nt, Artificial Sequence
  Description of Artificial Sequence: Synthetic oligonucleotide
  Antisense strand to SEQ ID NO: 1593649
ucuggcccaaagagcauuc

SEQ ID NO: 1593651 - RNA, 19 nt, Artificial Sequence
  Description of Artificial Sequence: Synthetic oligonucleotide
  Sense strand starting at position 1037 of SEQ ID NO: 1560344
uugggugucuccugggaag

SEQ ID NO: 1593652 - RNA, 19 nt, Artificial Sequence
  Description of Artificial Sequence: Synthetic oligonucleotide
  Antisense strand to SEQ ID NO: 1593651
cuucccaggagacacccaa

SEQ ID NO: 1593653 - RNA, 19 nt, Artificial Sequence
  Description of Artificial Sequence: Synthetic oligonucleotide
  Sense strand starting at position 1144 of SEQ ID NO: 1560344
gagaaucaguuagauagag

SEQ ID NO: 1593654 - RNA, 19 nt, Artificial Sequence
  Description of Artificial Sequence: Synthetic oligonucleotide
  Antisense strand to SEQ ID NO: 1593653
cucuaucuaacugauucuc

SEQ ID NO: 1593655 - RNA, 19 nt, Artificial Sequence
  Description of Artificial Sequence: Synthetic oligonucleotide
  Sense strand starting at position 1477 of SEQ ID NO: 1560344
gggccauuccugugguuca

SEQ ID NO: 1593656 - RNA, 19 nt, Artificial Sequence
  Description of Artificial Sequence: Synthetic oligonucleotide
  Antisense strand to SEQ ID NO: 1593655
ugaaccacaggaauggccc

SEQ ID NO: 1593657 - RNA, 19 nt, Artificial Sequence
  Description of Artificial Sequence: Synthetic oligonucleotide
  Sense strand starting at position 2011 of SEQ ID NO: 1560344
cagagucagcccuagauga

SEQ ID NO: 1593658 - RNA, 19 nt, Artificial Sequence
  Description of Artificial Sequence: Synthetic oligonucleotide
  Antisense strand to SEQ ID NO: 1593657
ucaucuagggcugacucug

SEQ ID NO: 1593659 - RNA, 19 nt, Artificial Sequence
  Description of Artificial Sequence: Synthetic oligonucleotide
  Sense strand starting at position 2171 of SEQ ID NO: 1560344
uggaggaggugugauguua

SEQ ID NO: 1593660 - RNA, 19 nt, Artificial Sequence
  Description of Artificial Sequence: Synthetic oligonucleotide
  Antisense strand to SEQ ID NO: 1593659
uaacaucacaccuccucca

SEQ ID NO: 1593661 - RNA, 19 nt, Artificial Sequence
  Description of Artificial Sequence: Synthetic oligonucleotide
  Sense strand starting at position 2308 of SEQ ID NO: 1560344
agcagugucaugcagcuuu

SEQ ID NO: 1593662 - RNA, 19 nt, Artificial Sequence
  Description of Artificial Sequence: Synthetic oligonucleotide
  Antisense strand to SEQ ID NO: 1593661
aaagcugcaugacacugcu

SEQ ID NO: 1593663 - RNA, 19 nt, Artificial Sequence
  Description of Artificial Sequence: Synthetic oligonucleotide
  Sense strand starting at position 2325 of SEQ ID NO: 1560344
uuugcucauucgucaagga

SEQ ID NO: 1593664 - RNA, 19 nt, Artificial Sequence
  Description of Artificial Sequence: Synthetic oligonucleotide
  Antisense strand to SEQ ID NO: 1593663
uccuugacgaaugagcaaa

SEQ ID NO: 1593665 - RNA, 19 nt, Artificial Sequence
  Description of Artificial Sequence: Synthetic oligonucleotide
  Sense strand starting at position 2329 of SEQ ID NO: 1560344
cucauucgucaaggacaau

SEQ ID NO: 1593666 - RNA, 19 nt, Artificial Sequence
  Description of Artificial Sequence: Synthetic oligonucleotide
  Antisense strand to SEQ ID NO: 1593665
auuguccuugacgaaugag

SEQ ID NO: 1593667 - RNA, 19 nt, Artificial Sequence
  Description of Artificial Sequence: Synthetic oligonucleotide
  Sense strand starting at position 2383 of SEQ ID NO: 1560344
aggucagaaaugcauguua

SEQ ID NO: 1593668 - RNA, 19 nt, Artificial Sequence
  Description of Artificial Sequence: Synthetic oligonucleotide
  Antisense strand to SEQ ID NO: 1593667
uaacaugcauuucugaccu

SEQ ID NO: 1593669 - RNA, 19 nt, Artificial Sequence
  Description of Artificial Sequence: Synthetic oligonucleotide
  Sense strand starting at position 2385 of SEQ ID NO: 1560344
gucagaaaugcauguuagg

SEQ ID NO: 1593670 - RNA, 19 nt, Artificial Sequence
  Description of Artificial Sequence: Synthetic oligonucleotide
  Antisense strand to SEQ ID NO: 1593669
ccuaacaugcauuucugac

SEQ ID NO: 1593671 - RNA, 19 nt, Artificial Sequence
  Description of Artificial Sequence: Synthetic oligonucleotide
  Sense strand starting at position 2621 of SEQ ID NO: 1560344
gucccucugugacacagau

SEQ ID NO: 1593672 - RNA, 19 nt, Artificial Sequence
  Description of Artificial Sequence: Synthetic oligonucleotide
  Antisense strand to SEQ ID NO: 1593671
aucugugucacagagggac

SEQ ID NO: 1593673 - RNA, 19 nt, Artificial Sequence
  Description of Artificial Sequence: Synthetic oligonucleotide
  Sense strand starting at position 2928 of SEQ ID NO: 1560344
gccaucacaccaugaguga

SEQ ID NO: 1593674 - RNA, 19 nt, Artificial Sequence
  Description of Artificial Sequence: Synthetic oligonucleotide
  Antisense strand to SEQ ID NO: 1593673
ucacucauggugugauggc

SEQ ID NO: 1593675 - RNA, 19 nt, Artificial Sequence
  Description of Artificial Sequence: Synthetic oligonucleotide
  Sense strand starting at position 3033 of SEQ ID NO: 1560344
ggucuuuccugggccauga

SEQ ID NO: 1593676 - RNA, 19 nt, Artificial Sequence
  Description of Artificial Sequence: Synthetic oligonucleotide
  Antisense strand to SEQ ID NO: 1593675
ucauggcccaggaaagacc

SEQ ID NO: 1593677 - RNA, 19 nt, Artificial Sequence
  Description of Artificial Sequence: Synthetic oligonucleotide
  Sense strand starting at position 3333 of SEQ ID NO: 1560344
cucaguuguccgggucagu

SEQ ID NO: 1593678 - RNA, 19 nt, Artificial Sequence
  Description of Artificial Sequence: Synthetic oligonucleotide
  Antisense strand to SEQ ID NO: 1593677
acugacccggacaacugag

SEQ ID NO: 1593679 - RNA, 19 nt, Artificial Sequence
  Description of Artificial Sequence: Synthetic oligonucleotide
  Sense strand starting at position 3464 of SEQ ID NO: 1560344
gggagucucuggccugauu

SEQ ID NO: 1593680 - RNA, 19 nt, Artificial Sequence
  Description of Artificial Sequence: Synthetic oligonucleotide
  Antisense strand to SEQ ID NO: 1593679
aaucaggccagagacuccc

SEQ ID NO: 1593681 - RNA, 19 nt, Artificial Sequence
  Description of Artificial Sequence: Synthetic oligonucleotide
  Sense strand starting at position 3466 of SEQ ID NO: 1560344
gagucucuggccugauuug

SEQ ID NO: 1593682 - RNA, 19 nt, Artificial Sequence
  Description of Artificial Sequence: Synthetic oligonucleotide
  Antisense strand to SEQ ID NO: 1593681
caaaucaggccagagacuc

SEQ ID NO: 1593683 - RNA, 19 nt, Artificial Sequence
  Description of Artificial Sequence: Synthetic oligonucleotide
  Sense strand starting at position 3526 of SEQ ID NO: 1560344
ccuggaguuuguggaauga

SEQ ID NO: 1593684 - RNA, 19 nt, Artificial Sequence
  Description of Artificial Sequence: Synthetic oligonucleotide
  Antisense strand to SEQ ID NO: 1593683
ucauuccacaaacuccagg

SEQ ID NO: 1593685 - RNA, 19 nt, Artificial Sequence
  Description of Artificial Sequence: Synthetic oligonucleotide
  Sense strand starting at position 3530 of SEQ ID NO: 1560344
gaguuuguggaaugaauga

SEQ ID NO: 1593686 - RNA, 19 nt, Artificial Sequence
  Description of Artificial Sequence: Synthetic oligonucleotide
  Antisense strand to SEQ ID NO: 1593685
ucauucauuccacaaacuc

SEQ ID NO: 1593687 - RNA, 19 nt, Artificial Sequence
  Description of Artificial Sequence: Synthetic oligonucleotide
  Sense strand starting at position 325 of SEQ ID NO: 1560345
ccgugugggucagcagaaa

SEQ ID NO: 1593688 - RNA, 19 nt, Artificial Sequence
  Description of Artificial Sequence: Synthetic oligonucleotide
  Antisense strand to SEQ ID NO: 1593687
uuucugcugacccacacgg

SEQ ID NO: 1593689 - RNA, 19 nt, Artificial Sequence
  Description of Artificial Sequence: Synthetic oligonucleotide
  Sense strand starting at position 380 of SEQ ID NO: 1560345
aaggguagcaguuaaaguu

SEQ ID NO: 1593690 - RNA, 19 nt, Artificial Sequence
  Description of Artificial Sequence: Synthetic oligonucleotide
  Antisense strand to SEQ ID NO: 1593689
aacuuuaacugcuacccuu

SEQ ID NO: 1593691 - RNA, 19 nt, Artificial Sequence
  Description of Artificial Sequence: Synthetic oligonucleotide
  Sense strand starting at position 386 of SEQ ID NO: 1560345
agcaguuaaaguugguaaa

SEQ ID NO: 1593692 - RNA, 19 nt, Artificial Sequence
  Description of Artificial Sequence: Synthetic oligonucleotide
  Antisense strand to SEQ ID NO: 1593691
uuuaccaacuuuaacugcu

SEQ ID NO: 1593693 - RNA, 19 nt, Artificial Sequence
  Description of Artificial Sequence: Synthetic oligonucleotide
  Sense strand starting at position 598 of SEQ ID NO: 1560345
auagcaagacucuguccuu

SEQ ID NO: 1593694 - RNA, 19 nt, Artificial Sequence
  Description of Artificial Sequence: Synthetic oligonucleotide
  Antisense strand to SEQ ID NO: 1593693
aaggacagagucuugcuau

SEQ ID NO: 1593695 - RNA, 19 nt, Artificial Sequence
  Description of Artificial Sequence: Synthetic oligonucleotide
  Sense strand starting at position 638 of SEQ ID NO: 1560345
acuguauuaaagggaguua

SEQ ID NO: 1593696 - RNA, 19 nt, Artificial Sequence
  Description of Artificial Sequence: Synthetic oligonucleotide
  Antisense strand to SEQ ID NO: 1593695
uaacucccuuuaauacagu

SEQ ID NO: 1593697 - RNA, 19 nt, Artificial Sequence
  Description of Artificial Sequence: Synthetic oligonucleotide
  Sense strand starting at position 818 of SEQ ID NO: 1560345
agcaauuaucuaugaagac

SEQ ID NO: 1593698 - RNA, 19 nt, Artificial Sequence
  Description of Artificial Sequence: Synthetic oligonucleotide
  Antisense strand to SEQ ID NO: 1593697
gucuucauagauaauugcu

SEQ ID NO: 1593699 - RNA, 19 nt, Artificial Sequence
  Description of Artificial Sequence: Synthetic oligonucleotide
  Sense strand starting at position 819 of SEQ ID NO: 1560345
gcaauuaucuaugaagaca

SEQ ID NO: 1593700 - RNA, 19 nt, Artificial Sequence
  Description of Artificial Sequence: Synthetic oligonucleotide
  Antisense strand to SEQ ID NO: 1593699
ugucuucauagauaauugc

SEQ ID NO: 1593701 - RNA, 19 nt, Artificial Sequence
  Description of Artificial Sequence: Synthetic oligonucleotide
  Sense strand starting at position 1182 of SEQ ID NO: 1560345
auuagcauuuaucgaauga

SEQ ID NO: 1593702 - RNA, 19 nt, Artificial Sequence
  Description of Artificial Sequence: Synthetic oligonucleotide
  Antisense strand to SEQ ID NO: 1593701
ucauucgauaaaugcuaau

SEQ ID NO: 1593703 - RNA, 19 nt, Artificial Sequence
  Description of Artificial Sequence: Synthetic oligonucleotide
  Sense strand starting at position 1202 of SEQ ID NO: 1560345
aaauaugugccagacuguu

SEQ ID NO: 1593704 - RNA, 19 nt, Artificial Sequence
  Description of Artificial Sequence: Synthetic oligonucleotide
  Antisense strand to SEQ ID NO: 1593703
aacagucuggcacauauuu

SEQ ID NO: 1593705 - RNA, 19 nt, Artificial Sequence
  Description of Artificial Sequence: Synthetic oligonucleotide
  Sense strand starting at position 1224 of SEQ ID NO: 1560345
agcccuuucccugcgugau

SEQ ID NO: 1593706 - RNA, 19 nt, Artificial Sequence
  Description of Artificial Sequence: Synthetic oligonucleotide
  Antisense strand to SEQ ID NO: 1593705
aucacgcagggaaagggcu

SEQ ID NO: 1593707 - RNA, 19 nt, Artificial Sequence
  Description of Artificial Sequence: Synthetic oligonucleotide
  Sense strand starting at position 1225 of SEQ ID NO: 1560345
gcccuuucccugcgugauc

SEQ ID NO: 1593708 - RNA, 19 nt, Artificial Sequence
  Description of Artificial Sequence: Synthetic oligonucleotide
  Antisense strand to SEQ ID NO: 1593707
gaucacgcagggaaagggc

SEQ ID NO: 1593709 - RNA, 19 nt, Artificial Sequence
  Description of Artificial Sequence: Synthetic oligonucleotide
  Sense strand starting at position 1236 of SEQ ID NO: 1560345
gcgugaucucagugaaguc

SEQ ID NO: 1593710 - RNA, 19 nt, Artificial Sequence
  Description of Artificial Sequence: Synthetic oligonucleotide
  Antisense strand to SEQ ID NO: 1593709
gacuucacugagaucacgc

SEQ ID NO: 1593711 - RNA, 19 nt, Artificial Sequence
  Description of Artificial Sequence: Synthetic oligonucleotide
  Sense strand starting at position 1246 of SEQ ID NO: 1560345
agugaagucccauaauagc

SEQ ID NO: 1593712 - RNA, 19 nt, Artificial Sequence
  Description of Artificial Sequence: Synthetic oligonucleotide
  Antisense strand to SEQ ID NO: 1593711
gcuauuaugggacuucacu

SEQ ID NO: 1593713 - RNA, 19 nt, Artificial Sequence
  Description of Artificial Sequence: Synthetic oligonucleotide
  Sense strand starting at position 1540 of SEQ ID NO: 1560345
gccucuuccagcggugaca

SEQ ID NO: 1593714 - RNA, 19 nt, Artificial Sequence
  Description of Artificial Sequence: Synthetic oligonucleotide
  Antisense strand to SEQ ID NO: 1593713
ugucaccgcuggaagaggc

SEQ ID NO: 1593715 - RNA, 19 nt, Artificial Sequence
  Description of Artificial Sequence: Synthetic oligonucleotide
  Sense strand starting at position 1743 of SEQ ID NO: 1560345
cgaccaaagucgccaugau

SEQ ID NO: 1593716 - RNA, 19 nt, Artificial Sequence
  Description of Artificial Sequence: Synthetic oligonucleotide
  Antisense strand to SEQ ID NO: 1593715
aucauggcgacuuuggucg

SEQ ID NO: 1593717 - RNA, 19 nt, Artificial Sequence
  Description of Artificial Sequence: Synthetic oligonucleotide
  Sense strand starting at position 1744 of SEQ ID NO: 1560345
gaccaaagucgccaugauc

SEQ ID NO: 1593718 - RNA, 19 nt, Artificial Sequence
  Description of Artificial Sequence: Synthetic oligonucleotide
  Antisense strand to SEQ ID NO: 1593717
gaucauggcgacuuugguc

SEQ ID NO: 1593719 - RNA, 19 nt, Artificial Sequence
  Description of Artificial Sequence: Synthetic oligonucleotide
  Sense strand starting at position 1851 of SEQ ID NO: 1560345
ucccguagccggucgagaa

SEQ ID NO: 1593720 - RNA, 19 nt, Artificial Sequence
  Description of Artificial Sequence: Synthetic oligonucleotide
  Antisense strand to SEQ ID NO: 1593719
uucucgaccggcuacggga

SEQ ID NO: 1593721 - RNA, 19 nt, Artificial Sequence
  Description of Artificial Sequence: Synthetic oligonucleotide
  Sense strand starting at position 1852 of SEQ ID NO: 1560345
cccguagccggucgagaaa

SEQ ID NO: 1593722 - RNA, 19 nt, Artificial Sequence
  Description of Artificial Sequence: Synthetic oligonucleotide
  Antisense strand to SEQ ID NO: 1593721
uuucucgaccggcuacggg

SEQ ID NO: 1593723 - RNA, 19 nt, Artificial Sequence
  Description of Artificial Sequence: Synthetic oligonucleotide
  Sense strand starting at position 1853 of SEQ ID NO: 1560345
ccguagccggucgagaaau

SEQ ID NO: 1593724 - RNA, 19 nt, Artificial Sequence
  Description of Artificial Sequence: Synthetic oligonucleotide
  Antisense strand to SEQ ID NO: 1593723
auuucucgaccggcuacgg

SEQ ID NO: 1593725 - RNA, 19 nt, Artificial Sequence
  Description of Artificial Sequence: Synthetic oligonucleotide
  Sense strand starting at position 1854 of SEQ ID NO: 1560345
cguagccggucgagaaauu

SEQ ID NO: 1593726 - RNA, 19 nt, Artificial Sequence
  Description of Artificial Sequence: Synthetic oligonucleotide
  Antisense strand to SEQ ID NO: 1593725
aauuucucgaccggcuacg

SEQ ID NO: 1593727 - RNA, 19 nt, Artificial Sequence
  Description of Artificial Sequence: Synthetic oligonucleotide
  Sense strand starting at position 1855 of SEQ ID NO: 1560345
guagccggucgagaaauuu

SEQ ID NO: 1593728 - RNA, 19 nt, Artificial Sequence
  Description of Artificial Sequence: Synthetic oligonucleotide
  Antisense strand to SEQ ID NO: 1593727
aaauuucucgaccggcuac

SEQ ID NO: 1593729 - RNA, 19 nt, Artificial Sequence
  Description of Artificial Sequence: Synthetic oligonucleotide
  Sense strand starting at position 1993 of SEQ ID NO: 1560345
gcgugauuuggccgcgacu

SEQ ID NO: 1593730 - RNA, 19 nt, Artificial Sequence
  Description of Artificial Sequence: Synthetic oligonucleotide
  Antisense strand to SEQ ID NO: 1593729
agucgcggccaaaucacgc

SEQ ID NO: 1593731 - RNA, 19 nt, Artificial Sequence
  Description of Artificial Sequence: Synthetic oligonucleotide
  Sense strand starting at position 2759 of SEQ ID NO: 1560345
gagcgaauggcuugguaga

SEQ ID NO: 1593732 - RNA, 19 nt, Artificial Sequence
  Description of Artificial Sequence: Synthetic oligonucleotide
  Antisense strand to SEQ ID NO: 1593731
ucuaccaagccauucgcuc

SEQ ID NO: 1593733 - RNA, 19 nt, Artificial Sequence
  Description of Artificial Sequence: Synthetic oligonucleotide
  Sense strand starting at position 2761 of SEQ ID NO: 1560345
gcgaauggcuugguagaga

SEQ ID NO: 1593734 - RNA, 19 nt, Artificial Sequence
  Description of Artificial Sequence: Synthetic oligonucleotide
  Antisense strand to SEQ ID NO: 1593733
ucucuaccaagccauucgc

SEQ ID NO: 1593735 - RNA, 19 nt, Artificial Sequence
  Description of Artificial Sequence: Synthetic oligonucleotide
  Sense strand starting at position 2801 of SEQ ID NO: 1560345
acuuaaugaugcuucuuga

SEQ ID NO: 1593736 - RNA, 19 nt, Artificial Sequence
  Description of Artificial Sequence: Synthetic oligonucleotide
  Antisense strand to SEQ ID NO: 1593735
ucaagaagcaucauuaagu

SEQ ID NO: 1593737 - RNA, 19 nt, Artificial Sequence
  Description of Artificial Sequence: Synthetic oligonucleotide
  Sense strand starting at position 2804 of SEQ ID NO: 1560345
uaaugaugcuucuugaugu

SEQ ID NO: 1593738 - RNA, 19 nt, Artificial Sequence
  Description of Artificial Sequence: Synthetic oligonucleotide
  Antisense strand to SEQ ID NO: 1593737
acaucaagaagcaucauua

SEQ ID NO: 1593739 - RNA, 19 nt, Artificial Sequence
  Description of Artificial Sequence: Synthetic oligonucleotide
  Sense strand starting at position 2811 of SEQ ID NO: 1560345
gcuucuugaugucuaugca

SEQ ID NO: 1593740 - RNA, 19 nt, Artificial Sequence
  Description of Artificial Sequence: Synthetic oligonucleotide
  Antisense strand to SEQ ID NO: 1593739
ugcauagacaucaagaagc

SEQ ID NO: 1593741 - RNA, 19 nt, Artificial Sequence
  Description of Artificial Sequence: Synthetic oligonucleotide
  Sense strand starting at position 2814 of SEQ ID NO: 1560345
ucuugaugucuaugcacaa

SEQ ID NO: 1593742 - RNA, 19 nt, Artificial Sequence
  Description of Artificial Sequence: Synthetic oligonucleotide
  Antisense strand to SEQ ID NO: 1593741
uugugcauagacaucaaga

SEQ ID NO: 1593743 - RNA, 19 nt, Artificial Sequence
  Description of Artificial Sequence: Synthetic oligonucleotide
  Sense strand starting at position 2818 of SEQ ID NO: 1560345
gaugucuaugcacaaggau

SEQ ID NO: 1593744 - RNA, 19 nt, Artificial Sequence
  Description of Artificial Sequence: Synthetic oligonucleotide
  Antisense strand to SEQ ID NO: 1593743
auccuugugcauagacauc

SEQ ID NO: 1593745 - RNA, 19 nt, Artificial Sequence
  Description of Artificial Sequence: Synthetic oligonucleotide
  Sense strand starting at position 2821 of SEQ ID NO: 1560345
gucuaugcacaaggauaaa

SEQ ID NO: 1593746 - RNA, 19 nt, Artificial Sequence
  Description of Artificial Sequence: Synthetic oligonucleotide
  Antisense strand to SEQ ID NO: 1593745
uuuauccuugugcauagac

SEQ ID NO: 1593747 - RNA, 19 nt, Artificial Sequence
  Description of Artificial Sequence: Synthetic oligonucleotide
  Sense strand starting at position 2840 of SEQ ID NO: 1560345
uuuguauuacuggaauauc

SEQ ID NO: 1593748 - RNA, 19 nt, Artificial Sequence
  Description of Artificial Sequence: Synthetic oligonucleotide
  Antisense strand to SEQ ID NO: 1593747
gauauuccaguaauacaaa

SEQ ID NO: 1593749 - RNA, 19 nt, Artificial Sequence
  Description of Artificial Sequence: Synthetic oligonucleotide
  Sense strand starting at position 2849 of SEQ ID NO: 1560345
cuggaauaucguggccaaa

SEQ ID NO: 1593750 - RNA, 19 nt, Artificial Sequence
  Description of Artificial Sequence: Synthetic oligonucleotide
  Antisense strand to SEQ ID NO: 1593749
uuuggccacgauauuccag

SEQ ID NO: 1593751 - RNA, 19 nt, Artificial Sequence
  Description of Artificial Sequence: Synthetic oligonucleotide
  Sense strand starting at position 2852 of SEQ ID NO: 1560345
gaauaucguggccaaagga

SEQ ID NO: 1593752 - RNA, 19 nt, Artificial Sequence
  Description of Artificial Sequence: Synthetic oligonucleotide
  Antisense strand to SEQ ID NO: 1593751
uccuuuggccacgauauuc

SEQ ID NO: 1593753 - RNA, 19 nt, Artificial Sequence
  Description of Artificial Sequence: Synthetic oligonucleotide
  Sense strand starting at position 2861 of SEQ ID NO: 1560345
ggccaaaggaccuguugaa

SEQ ID NO: 1593754 - RNA, 19 nt, Artificial Sequence
  Description of Artificial Sequence: Synthetic oligonucleotide
  Antisense strand to SEQ ID NO: 1593753
uucaacagguccuuuggcc

SEQ ID NO: 1593755 - RNA, 19 nt, Artificial Sequence
  Description of Artificial Sequence: Synthetic oligonucleotide
  Sense strand starting at position 3034 of SEQ ID NO: 1560345
acaggccuuuccgauggau

SEQ ID NO: 1593756 - RNA, 19 nt, Artificial Sequence
  Description of Artificial Sequence: Synthetic oligonucleotide
  Antisense strand to SEQ ID NO: 1593755
auccaucggaaaggccugu

SEQ ID NO: 1593757 - RNA, 19 nt, Artificial Sequence
  Description of Artificial Sequence: Synthetic oligonucleotide
  Sense strand starting at position 3036 of SEQ ID NO: 1560345
aggccuuuccgauggaugu

SEQ ID NO: 1593758 - RNA, 19 nt, Artificial Sequence
  Description of Artificial Sequence: Synthetic oligonucleotide
  Antisense strand to SEQ ID NO: 1593757
acauccaucggaaaggccu

SEQ ID NO: 1593759 - RNA, 19 nt, Artificial Sequence
  Description of Artificial Sequence: Synthetic oligonucleotide
  Sense strand starting at position 3037 of SEQ ID NO: 1560345
ggccuuuccgauggauguu

SEQ ID NO: 1593760 - RNA, 19 nt, Artificial Sequence
  Description of Artificial Sequence: Synthetic oligonucleotide
  Antisense strand to SEQ ID NO: 1593759
aacauccaucggaaaggcc

SEQ ID NO: 1593761 - RNA, 19 nt, Artificial Sequence
  Description of Artificial Sequence: Synthetic oligonucleotide
  Sense strand starting at position 3658 of SEQ ID NO: 1560345
gaaagagauuguggagguu

SEQ ID NO: 1593762 - RNA, 19 nt, Artificial Sequence
  Description of Artificial Sequence: Synthetic oligonucleotide
  Antisense strand to SEQ ID NO: 1593761
aaccuccacaaucucuuuc

SEQ ID NO: 1593763 - RNA, 19 nt, Artificial Sequence
  Description of Artificial Sequence: Synthetic oligonucleotide
  Sense strand starting at position 3847 of SEQ ID NO: 1560345
gcgaaauuauagcucacug

SEQ ID NO: 1593764 - RNA, 19 nt, Artificial Sequence
  Description of Artificial Sequence: Synthetic oligonucleotide
  Antisense strand to SEQ ID NO: 1593763
cagugagcuauaauuucgc

SEQ ID NO: 1593765 - RNA, 19 nt, Artificial Sequence
  Description of Artificial Sequence: Synthetic oligonucleotide
  Sense strand starting at position 3883 of SEQ ID NO: 1560345
gcucaagugauccgauccu

SEQ ID NO: 1593766 - RNA, 19 nt, Artificial Sequence
  Description of Artificial Sequence: Synthetic oligonucleotide
  Antisense strand to SEQ ID NO: 1593765
aggaucggaucacuugagc

SEQ ID NO: 1593767 - RNA, 19 nt, Artificial Sequence
  Description of Artificial Sequence: Synthetic oligonucleotide
  Sense strand starting at position 117 of SEQ ID NO: 1560346
ccaugauuacgacacugua

SEQ ID NO: 1593768 - RNA, 19 nt, Artificial Sequence
  Description of Artificial Sequence: Synthetic oligonucleotide
  Antisense strand to SEQ ID NO: 1593767
uacagugucguaaucaugg

SEQ ID NO: 1593769 - RNA, 19 nt, Artificial Sequence
  Description of Artificial Sequence: Synthetic oligonucleotide
  Sense strand starting at position 635 of SEQ ID NO: 1560346
agguauauuuaauggaaca

SEQ ID NO: 1593770 - RNA, 19 nt, Artificial Sequence
  Description of Artificial Sequence: Synthetic oligonucleotide
  Antisense strand to SEQ ID NO: 1593769
uguuccauuaaauauaccu

SEQ ID NO: 1593771 - RNA, 19 nt, Artificial Sequence
  Description of Artificial Sequence: Synthetic oligonucleotide
  Sense strand starting at position 771 of SEQ ID NO: 1560346
ugaucaaaguugucuccua

SEQ ID NO: 1593772 - RNA, 19 nt, Artificial Sequence
  Description of Artificial Sequence: Synthetic oligonucleotide
  Antisense strand to SEQ ID NO: 1593771
uaggagacaacuuugauca

SEQ ID NO: 1593773 - RNA, 19 nt, Artificial Sequence
  Description of Artificial Sequence: Synthetic oligonucleotide
  Sense strand starting at position 861 of SEQ ID NO: 1560346
cuguaaagauuuggaaaua

SEQ ID NO: 1593774 - RNA, 19 nt, Artificial Sequence
  Description of Artificial Sequence: Synthetic oligonucleotide
  Antisense strand to SEQ ID NO: 1593773
uauuuccaaaucuuuacag

SEQ ID NO: 1593775 - RNA, 19 nt, Artificial Sequence
  Description of Artificial Sequence: Synthetic oligonucleotide
  Sense strand starting at position 862 of SEQ ID NO: 1560346
uguaaagauuuggaaauag

SEQ ID NO: 1593776 - RNA, 19 nt, Artificial Sequence
  Description of Artificial Sequence: Synthetic oligonucleotide
  Antisense strand to SEQ ID NO: 1593775
cuauuuccaaaucuuuaca

SEQ ID NO: 1593777 - RNA, 19 nt, Artificial Sequence
  Description of Artificial Sequence: Synthetic oligonucleotide
  Sense strand starting at position 873 of SEQ ID NO: 1560346
ggaaauagauaccagagga

SEQ ID NO: 1593778 - RNA, 19 nt, Artificial Sequence
  Description of Artificial Sequence: Synthetic oligonucleotide
  Antisense strand to SEQ ID NO: 1593777
uccucugguaucuauuucc

SEQ ID NO: 1593779 - RNA, 19 nt, Artificial Sequence
  Description of Artificial Sequence: Synthetic oligonucleotide
  Sense strand starting at position 1029 of SEQ ID NO: 1560346
guuuaaaggcguguuguuu

SEQ ID NO: 1593780 - RNA, 19 nt, Artificial Sequence
  Description of Artificial Sequence: Synthetic oligonucleotide
  Antisense strand to SEQ ID NO: 1593779
aaacaacacgccuuuaaac

SEQ ID NO: 1593781 - RNA, 19 nt, Artificial Sequence
  Description of Artificial Sequence: Synthetic oligonucleotide
  Sense strand starting at position 1086 of SEQ ID NO: 1560346
ucguguauuacuggaacau

SEQ ID NO: 1593782 - RNA, 19 nt, Artificial Sequence
  Description of Artificial Sequence: Synthetic oligonucleotide
  Antisense strand to SEQ ID NO: 1593781
auguuccaguaauacacga

SEQ ID NO: 1593783 - RNA, 19 nt, Artificial Sequence
  Description of Artificial Sequence: Synthetic oligonucleotide
  Sense strand starting at position 1087 of SEQ ID NO: 1560346
cguguauuacuggaacauu

SEQ ID NO: 1593784 - RNA, 19 nt, Artificial Sequence
  Description of Artificial Sequence: Synthetic oligonucleotide
  Antisense strand to SEQ ID NO: 1593783
aauguuccaguaauacacg

SEQ ID NO: 1593785 - RNA, 19 nt, Artificial Sequence
  Description of Artificial Sequence: Synthetic oligonucleotide
  Sense strand starting at position 1169 of SEQ ID NO: 1560346
guaaauagacgcugucuaa

SEQ ID NO: 1593786 - RNA, 19 nt, Artificial Sequence
  Description of Artificial Sequence: Synthetic oligonucleotide
  Antisense strand to SEQ ID NO: 1593785
uuagacagcgucuauuuac

SEQ ID NO: 1593787 - RNA, 19 nt, Artificial Sequence
  Description of Artificial Sequence: Synthetic oligonucleotide
  Sense strand starting at position 1172 of SEQ ID NO: 1560346
aauagacgcugucuaaagu

SEQ ID NO: 1593788 - RNA, 19 nt, Artificial Sequence
  Description of Artificial Sequence: Synthetic oligonucleotide
  Antisense strand to SEQ ID NO: 1593787
acuuuagacagcgucuauu

SEQ ID NO: 1593789 - RNA, 19 nt, Artificial Sequence
  Description of Artificial Sequence: Synthetic oligonucleotide
  Sense strand starting at position 1173 of SEQ ID NO: 1560346
auagacgcugucuaaaguu

SEQ ID NO: 1593790 - RNA, 19 nt, Artificial Sequence
  Description of Artificial Sequence: Synthetic oligonucleotide
  Antisense strand to SEQ ID NO: 1593789
aacuuuagacagcgucuau

SEQ ID NO: 1593791 - RNA, 19 nt, Artificial Sequence
  Description of Artificial Sequence: Synthetic oligonucleotide
  Sense strand starting at position 1207 of SEQ ID NO: 1560346
agagcuuucgaacauauca

SEQ ID NO: 1593792 - RNA, 19 nt, Artificial Sequence
  Description of Artificial Sequence: Synthetic oligonucleotide
  Antisense strand to SEQ ID NO: 1593791
ugauauguucgaaagcucu

SEQ ID NO: 1593793 - RNA, 19 nt, Artificial Sequence
  Description of Artificial Sequence: Synthetic oligonucleotide
  Sense strand starting at position 1214 of SEQ ID NO: 1560346
ucgaacauaucacugaaca

SEQ ID NO: 1593794 - RNA, 19 nt, Artificial Sequence
  Description of Artificial Sequence: Synthetic oligonucleotide
  Antisense strand to SEQ ID NO: 1593793
uguucagugauauguucga

SEQ ID NO: 1593795 - RNA, 19 nt, Artificial Sequence
  Description of Artificial Sequence: Synthetic oligonucleotide
  Sense strand starting at position 1215 of SEQ ID NO: 1560346
cgaacauaucacugaacau

SEQ ID NO: 1593796 - RNA, 19 nt, Artificial Sequence
  Description of Artificial Sequence: Synthetic oligonucleotide
  Antisense strand to SEQ ID NO: 1593795
auguucagugauauguucg

SEQ ID NO: 1593797 - RNA, 19 nt, Artificial Sequence
  Description of Artificial Sequence: Synthetic oligonucleotide
  Sense strand starting at position 1555 of SEQ ID NO: 1560346
ggcuuucuaacgugcauuu

SEQ ID NO: 1593798 - RNA, 19 nt, Artificial Sequence
  Description of Artificial Sequence: Synthetic oligonucleotide
  Antisense strand to SEQ ID NO: 1593797
aaaugcacguuagaaagcc

SEQ ID NO: 1593799 - RNA, 19 nt, Artificial Sequence
  Description of Artificial Sequence: Synthetic oligonucleotide
  Sense strand starting at position 1565 of SEQ ID NO: 1560346
cgugcauuuguauaacuuu

SEQ ID NO: 1593800 - RNA, 19 nt, Artificial Sequence
  Description of Artificial Sequence: Synthetic oligonucleotide
  Antisense strand to SEQ ID NO: 1593799
aaaguuauacaaaugcacg

SEQ ID NO: 1593801 - RNA, 19 nt, Artificial Sequence
  Description of Artificial Sequence: Synthetic oligonucleotide
  Sense strand starting at position 1571 of SEQ ID NO: 1560346
uuuguauaacuuuggguuu

SEQ ID NO: 1593802 - RNA, 19 nt, Artificial Sequence
  Description of Artificial Sequence: Synthetic oligonucleotide
  Antisense strand to SEQ ID NO: 1593801
aaacccaaaguuauacaaa

SEQ ID NO: 1593803 - RNA, 19 nt, Artificial Sequence
  Description of Artificial Sequence: Synthetic oligonucleotide
  Sense strand starting at position 1574 of SEQ ID NO: 1560346
guauaacuuuggguuuaaa

SEQ ID NO: 1593804 - RNA, 19 nt, Artificial Sequence
  Description of Artificial Sequence: Synthetic oligonucleotide
  Antisense strand to SEQ ID NO: 1593803
uuuaaacccaaaguuauac

SEQ ID NO: 1593805 - RNA, 19 nt, Artificial Sequence
  Description of Artificial Sequence: Synthetic oligonucleotide
  Sense strand starting at position 1821 of SEQ ID NO: 1560346
cacuuuguucugggaggca

SEQ ID NO: 1593806 - RNA, 19 nt, Artificial Sequence
  Description of Artificial Sequence: Synthetic oligonucleotide
  Antisense strand to SEQ ID NO: 1593805
ugccucccagaacaaagug

SEQ ID NO: 1593807 - RNA, 19 nt, Artificial Sequence
  Description of Artificial Sequence: Synthetic oligonucleotide
  Sense strand starting at position 2347 of SEQ ID NO: 1560346
uucgaaacacuuggaucaa

SEQ ID NO: 1593808 - RNA, 19 nt, Artificial Sequence
  Description of Artificial Sequence: Synthetic oligonucleotide
  Antisense strand to SEQ ID NO: 1593807
uugauccaaguguuucgaa

SEQ ID NO: 1593809 - RNA, 19 nt, Artificial Sequence
  Description of Artificial Sequence: Synthetic oligonucleotide
  Sense strand starting at position 2545 of SEQ ID NO: 1560346
acugaauuaauccggaggu

SEQ ID NO: 1593810 - RNA, 19 nt, Artificial Sequence
  Description of Artificial Sequence: Synthetic oligonucleotide
  Antisense strand to SEQ ID NO: 1593809
accuccggauuaauucagu

SEQ ID NO: 1593811 - RNA, 19 nt, Artificial Sequence
  Description of Artificial Sequence: Synthetic oligonucleotide
  Sense strand starting at position 2547 of SEQ ID NO: 1560346
ugaauuaauccggagguuc

SEQ ID NO: 1593812 - RNA, 19 nt, Artificial Sequence
  Description of Artificial Sequence: Synthetic oligonucleotide
  Antisense strand to SEQ ID NO: 1593811
gaaccuccggauuaauuca

SEQ ID NO: 1593813 - RNA, 19 nt, Artificial Sequence
  Description of Artificial Sequence: Synthetic oligonucleotide
  Sense strand starting at position 2635 of SEQ ID NO: 1560346
uucugauggcccuagauug

SEQ ID NO: 1593814 - RNA, 19 nt, Artificial Sequence
  Description of Artificial Sequence: Synthetic oligonucleotide
  Antisense strand to SEQ ID NO: 1593813
caaucuagggccaucagaa

SEQ ID NO: 1593815 - RNA, 19 nt, Artificial Sequence
  Description of Artificial Sequence: Synthetic oligonucleotide
  Sense strand starting at position 2666 of SEQ ID NO: 1560346
caaggugacugaucucaga

SEQ ID NO: 1593816 - RNA, 19 nt, Artificial Sequence
  Description of Artificial Sequence: Synthetic oligonucleotide
  Antisense strand to SEQ ID NO: 1593815
ucugagaucagucaccuug

SEQ ID NO: 1593817 - RNA, 19 nt, Artificial Sequence
  Description of Artificial Sequence: Synthetic oligonucleotide
  Sense strand starting at position 2725 of SEQ ID NO: 1560346
gcugguaaaucauucucca

SEQ ID NO: 1593818 - RNA, 19 nt, Artificial Sequence
  Description of Artificial Sequence: Synthetic oligonucleotide
  Antisense strand to SEQ ID NO: 1593817
uggagaaugauuuaccagc

SEQ ID NO: 1593819 - RNA, 19 nt, Artificial Sequence
  Description of Artificial Sequence: Synthetic oligonucleotide
  Sense strand starting at position 2830 of SEQ ID NO: 1560346
agagauaccuggucuguug

SEQ ID NO: 1593820 - RNA, 19 nt, Artificial Sequence
  Description of Artificial Sequence: Synthetic oligonucleotide
  Antisense strand to SEQ ID NO: 1593819
caacagaccagguaucucu

SEQ ID NO: 1593821 - RNA, 19 nt, Artificial Sequence
  Description of Artificial Sequence: Synthetic oligonucleotide
  Sense strand starting at position 3086 of SEQ ID NO: 1560346
acuguauuauugguagagu

SEQ ID NO: 1593822 - RNA, 19 nt, Artificial Sequence
  Description of Artificial Sequence: Synthetic oligonucleotide
  Antisense strand to SEQ ID NO: 1593821
acucuaccaauaauacagu

SEQ ID NO: 1593823 - RNA, 19 nt, Artificial Sequence
  Description of Artificial Sequence: Synthetic oligonucleotide
  Sense strand starting at position 3121 of SEQ ID NO: 1560346
cacgcaguuccuuauguga

SEQ ID NO: 1593824 - RNA, 19 nt, Artificial Sequence
  Description of Artificial Sequence: Synthetic oligonucleotide
  Antisense strand to SEQ ID NO: 1593823
ucacauaaggaacugcgug

SEQ ID NO: 1593825 - RNA, 19 nt, Artificial Sequence
  Description of Artificial Sequence: Synthetic oligonucleotide
  Sense strand starting at position 3124 of SEQ ID NO: 1560346
gcaguuccuuaugugaaag

SEQ ID NO: 1593826 - RNA, 19 nt, Artificial Sequence
  Description of Artificial Sequence: Synthetic oligonucleotide
  Antisense strand to SEQ ID NO: 1593825
cuuucacauaaggaacugc

SEQ ID NO: 1593827 - RNA, 19 nt, Artificial Sequence
  Description of Artificial Sequence: Synthetic oligonucleotide
  Sense strand starting at position 3511 of SEQ ID NO: 1560346
gcugcucaauucucugaca

SEQ ID NO: 1593828 - RNA, 19 nt, Artificial Sequence
  Description of Artificial Sequence: Synthetic oligonucleotide
  Antisense strand to SEQ ID NO: 1593827
ugucagagaauugagcagc

SEQ ID NO: 1593829 - RNA, 19 nt, Artificial Sequence
  Description of Artificial Sequence: Synthetic oligonucleotide
  Sense strand starting at position 3551 of SEQ ID NO: 1560346
ggacaagaauacuaacuaa

SEQ ID NO: 1593830 - RNA, 19 nt, Artificial Sequence
  Description of Artificial Sequence: Synthetic oligonucleotide
  Antisense strand to SEQ ID NO: 1593829
uuaguuaguauucuugucc

SEQ ID NO: 1593831 - RNA, 19 nt, Artificial Sequence
  Description of Artificial Sequence: Synthetic oligonucleotide
  Sense strand starting at position 3603 of SEQ ID NO: 1560346
uccucuaagucuuccucga

SEQ ID NO: 1593832 - RNA, 19 nt, Artificial Sequence
  Description of Artificial Sequence: Synthetic oligonucleotide
  Antisense strand to SEQ ID NO: 1593831
ucgaggaagacuuagagga

SEQ ID NO: 1593833 - RNA, 19 nt, Artificial Sequence
  Description of Artificial Sequence: Synthetic oligonucleotide
  Sense strand starting at position 3605 of SEQ ID NO: 1560346
cucuaagucuuccucgaaa

SEQ ID NO: 1593834 - RNA, 19 nt, Artificial Sequence
  Description of Artificial Sequence: Synthetic oligonucleotide
  Antisense strand to SEQ ID NO: 1593833
uuucgaggaagacuuagag

SEQ ID NO: 1593835 - RNA, 19 nt, Artificial Sequence
  Description of Artificial Sequence: Synthetic oligonucleotide
  Sense strand starting at position 3707 of SEQ ID NO: 1560346
uguuguaaauaccuuaaca

SEQ ID NO: 1593836 - RNA, 19 nt, Artificial Sequence
  Description of Artificial Sequence: Synthetic oligonucleotide
  Antisense strand to SEQ ID NO: 1593835
uguuaagguauuuacaaca

SEQ ID NO: 1593837 - RNA, 19 nt, Artificial Sequence
  Description of Artificial Sequence: Synthetic oligonucleotide
  Sense strand starting at position 3729 of SEQ ID NO: 1560346
agacaaagcaauugugugu

SEQ ID NO: 1593838 - RNA, 19 nt, Artificial Sequence
  Description of Artificial Sequence: Synthetic oligonucleotide
  Antisense strand to SEQ ID NO: 1593837
acacacaauugcuuugucu

SEQ ID NO: 1593839 - RNA, 19 nt, Artificial Sequence
  Description of Artificial Sequence: Synthetic oligonucleotide
  Sense strand starting at position 3732 of SEQ ID NO: 1560346
caaagcaauuguguguuau

SEQ ID NO: 1593840 - RNA, 19 nt, Artificial Sequence
  Description of Artificial Sequence: Synthetic oligonucleotide
  Antisense strand to SEQ ID NO: 1593839
auaacacacaauugcuuug

SEQ ID NO: 1593841 - RNA, 19 nt, Artificial Sequence
  Description of Artificial Sequence: Synthetic oligonucleotide
  Sense strand starting at position 3770 of SEQ ID NO: 1560346
augcauacuugugcugaca

SEQ ID NO: 1593842 - RNA, 19 nt, Artificial Sequence
  Description of Artificial Sequence: Synthetic oligonucleotide
  Antisense strand to SEQ ID NO: 1593841
ugucagcacaaguaugcau

SEQ ID NO: 1593843 - RNA, 19 nt, Artificial Sequence
  Description of Artificial Sequence: Synthetic oligonucleotide
  Sense strand starting at position 3802 of SEQ ID NO: 1560346
ugcugauacccauggacuu

SEQ ID NO: 1593844 - RNA, 19 nt, Artificial Sequence
  Description of Artificial Sequence: Synthetic oligonucleotide
  Antisense strand to SEQ ID NO: 1593843
aaguccauggguaucagca

SEQ ID NO: 1593845 - RNA, 19 nt, Artificial Sequence
  Description of Artificial Sequence: Synthetic oligonucleotide
  Sense strand starting at position 3817 of SEQ ID NO: 1560346
acuugagcuuguuucuuua

SEQ ID NO: 1593846 - RNA, 19 nt, Artificial Sequence
  Description of Artificial Sequence: Synthetic oligonucleotide
  Antisense strand to SEQ ID NO: 1593845
uaaagaaacaagcucaagu

SEQ ID NO: 1593847 - RNA, 19 nt, Artificial Sequence
  Description of Artificial Sequence: Synthetic oligonucleotide
  Sense strand starting at position 10 of SEQ ID NO: 1560347
uuagaccgcugagauaaua

SEQ ID NO: 1593848 - RNA, 19 nt, Artificial Sequence
  Description of Artificial Sequence: Synthetic oligonucleotide
  Antisense strand to SEQ ID NO: 1593847
uauuaucucagcggucuaa

SEQ ID NO: 1593849 - RNA, 19 nt, Artificial Sequence
  Description of Artificial Sequence: Synthetic oligonucleotide
  Sense strand starting at position 754 of SEQ ID NO: 1560347
cuggaauugguaugaguca

SEQ ID NO: 1593850 - RNA, 19 nt, Artificial Sequence
  Description of Artificial Sequence: Synthetic oligonucleotide
  Antisense strand to SEQ ID NO: 1593849
ugacucauaccaauuccag

SEQ ID NO: 1593851 - RNA, 19 nt, Artificial Sequence
  Description of Artificial Sequence: Synthetic oligonucleotide
  Sense strand starting at position 788 of SEQ ID NO: 1560347
uggucaccucuugaucaca

SEQ ID NO: 1593852 - RNA, 19 nt, Artificial Sequence
  Description of Artificial Sequence: Synthetic oligonucleotide
  Antisense strand to SEQ ID NO: 1593851
ugugaucaagaggugacca

SEQ ID NO: 1593853 - RNA, 19 nt, Artificial Sequence
  Description of Artificial Sequence: Synthetic oligonucleotide
  Sense strand starting at position 860 of SEQ ID NO: 1560347
gaugguacuuuaggaugau

SEQ ID NO: 1593854 - RNA, 19 nt, Artificial Sequence
  Description of Artificial Sequence: Synthetic oligonucleotide
  Antisense strand to SEQ ID NO: 1593853
aucauccuaaaguaccauc

SEQ ID NO: 1593855 - RNA, 19 nt, Artificial Sequence
  Description of Artificial Sequence: Synthetic oligonucleotide
  Sense strand starting at position 861 of SEQ ID NO: 1560347
augguacuuuaggaugaua

SEQ ID NO: 1593856 - RNA, 19 nt, Artificial Sequence
  Description of Artificial Sequence: Synthetic oligonucleotide
  Antisense strand to SEQ ID NO: 1593855
uaucauccuaaaguaccau

SEQ ID NO: 1593857 - RNA, 19 nt, Artificial Sequence
  Description of Artificial Sequence: Synthetic oligonucleotide
  Sense strand starting at position 863 of SEQ ID NO: 1560347
gguacuuuaggaugauagu

SEQ ID NO: 1593858 - RNA, 19 nt, Artificial Sequence
  Description of Artificial Sequence: Synthetic oligonucleotide
  Antisense strand to SEQ ID NO: 1593857
acuaucauccuaaaguacc

SEQ ID NO: 1593859 - RNA, 19 nt, Artificial Sequence
  Description of Artificial Sequence: Synthetic oligonucleotide
  Sense strand starting at position 874 of SEQ ID NO: 1560347
augauaguccacuguguuc

SEQ ID NO: 1593860 - RNA, 19 nt, Artificial Sequence
  Description of Artificial Sequence: Synthetic oligonucleotide
  Antisense strand to SEQ ID NO: 1593859
gaacacaguggacuaucau

SEQ ID NO: 1593861 - RNA, 19 nt, Artificial Sequence
  Description of Artificial Sequence: Synthetic oligonucleotide
  Sense strand starting at position 937 of SEQ ID NO: 1560347
acugucaucucucuugagu

SEQ ID NO: 1593862 - RNA, 19 nt, Artificial Sequence
  Description of Artificial Sequence: Synthetic oligonucleotide
  Antisense strand to SEQ ID NO: 1593861
acucaagagagaugacagu

SEQ ID NO: 1593863 - RNA, 19 nt, Artificial Sequence
  Description of Artificial Sequence: Synthetic oligonucleotide
  Sense strand starting at position 939 of SEQ ID NO: 1560347
ugucaucucucuugaguuu

SEQ ID NO: 1593864 - RNA, 19 nt, Artificial Sequence
  Description of Artificial Sequence: Synthetic oligonucleotide
  Antisense strand to SEQ ID NO: 1593863
aaacucaagagagaugaca

SEQ ID NO: 1593865 - RNA, 19 nt, Artificial Sequence
  Description of Artificial Sequence: Synthetic oligonucleotide
  Sense strand starting at position 948 of SEQ ID NO: 1560347
ucuugaguuuggcuuucua

SEQ ID NO: 1593866 - RNA, 19 nt, Artificial Sequence
  Description of Artificial Sequence: Synthetic oligonucleotide
  Antisense strand to SEQ ID NO: 1593865
uagaaagccaaacucaaga

SEQ ID NO: 1593867 - RNA, 19 nt, Artificial Sequence
  Description of Artificial Sequence: Synthetic oligonucleotide
  Sense strand starting at position 1133 of SEQ ID NO: 1560347
uuguaucuuuaaggagaga

SEQ ID NO: 1593868 - RNA, 19 nt, Artificial Sequence
  Description of Artificial Sequence: Synthetic oligonucleotide
  Antisense strand to SEQ ID NO: 1593867
ucucuccuuaaagauacaa

SEQ ID NO: 1593869 - RNA, 19 nt, Artificial Sequence
  Description of Artificial Sequence: Synthetic oligonucleotide
  Sense strand starting at position 1259 of SEQ ID NO: 1560347
gcccgaguuuggcuuucuu

SEQ ID NO: 1593870 - RNA, 19 nt, Artificial Sequence
  Description of Artificial Sequence: Synthetic oligonucleotide
  Antisense strand to SEQ ID NO: 1593869
aagaaagccaaacucgggc

SEQ ID NO: 1593871 - RNA, 19 nt, Artificial Sequence
  Description of Artificial Sequence: Synthetic oligonucleotide
  Sense strand starting at position 1426 of SEQ ID NO: 1560347
gccaguaauuucuguagua

SEQ ID NO: 1593872 - RNA, 19 nt, Artificial Sequence
  Description of Artificial Sequence: Synthetic oligonucleotide
  Antisense strand to SEQ ID NO: 1593871
uacuacagaaauuacuggc

SEQ ID NO: 1593873 - RNA, 19 nt, Artificial Sequence
  Description of Artificial Sequence: Synthetic oligonucleotide
  Sense strand starting at position 1714 of SEQ ID NO: 1560347
cuucuugccucaguuacuu

SEQ ID NO: 1593874 - RNA, 19 nt, Artificial Sequence
  Description of Artificial Sequence: Synthetic oligonucleotide
  Antisense strand to SEQ ID NO: 1593873
aaguaacugaggcaagaag

SEQ ID NO: 1593875 - RNA, 19 nt, Artificial Sequence
  Description of Artificial Sequence: Synthetic oligonucleotide
  Sense strand starting at position 1819 of SEQ ID NO: 1560347
ggagcuacuuccugaccau

SEQ ID NO: 1593876 - RNA, 19 nt, Artificial Sequence
  Description of Artificial Sequence: Synthetic oligonucleotide
  Antisense strand to SEQ ID NO: 1593875
auggucaggaaguagcucc

SEQ ID NO: 1593877 - RNA, 19 nt, Artificial Sequence
  Description of Artificial Sequence: Synthetic oligonucleotide
  Sense strand starting at position 1865 of SEQ ID NO: 1560347
agcgaugaaucucaucacu

SEQ ID NO: 1593878 - RNA, 19 nt, Artificial Sequence
  Description of Artificial Sequence: Synthetic oligonucleotide
  Antisense strand to SEQ ID NO: 1593877
agugaugagauucaucgcu

SEQ ID NO: 1593879 - RNA, 19 nt, Artificial Sequence
  Description of Artificial Sequence: Synthetic oligonucleotide
  Sense strand starting at position 1867 of SEQ ID NO: 1560347
cgaugaaucucaucacuac

SEQ ID NO: 1593880 - RNA, 19 nt, Artificial Sequence
  Description of Artificial Sequence: Synthetic oligonucleotide
  Antisense strand to SEQ ID NO: 1593879
guagugaugagauucaucg

SEQ ID NO: 1593881 - RNA, 19 nt, Artificial Sequence
  Description of Artificial Sequence: Synthetic oligonucleotide
  Sense strand starting at position 1975 of SEQ ID NO: 1560347
uuagcaucauucucaguga

SEQ ID NO: 1593882 - RNA, 19 nt, Artificial Sequence
  Description of Artificial Sequence: Synthetic oligonucleotide
  Antisense strand to SEQ ID NO: 1593881
ucacugagaaugaugcuaa

SEQ ID NO: 1593883 - RNA, 19 nt, Artificial Sequence
  Description of Artificial Sequence: Synthetic oligonucleotide
  Sense strand starting at position 1978 of SEQ ID NO: 1560347
gcaucauucucagugauuu

SEQ ID NO: 1593884 - RNA, 19 nt, Artificial Sequence
  Description of Artificial Sequence: Synthetic oligonucleotide
  Antisense strand to SEQ ID NO: 1593883
aaaucacugagaaugaugc

SEQ ID NO: 1593885 - RNA, 19 nt, Artificial Sequence
  Description of Artificial Sequence: Synthetic oligonucleotide
  Sense strand starting at position 2002 of SEQ ID NO: 1560347
accagauaguucuuccgca

SEQ ID NO: 1593886 - RNA, 19 nt, Artificial Sequence
  Description of Artificial Sequence: Synthetic oligonucleotide
  Antisense strand to SEQ ID NO: 1593885
ugcggaagaacuaucuggu

SEQ ID NO: 1593887 - RNA, 19 nt, Artificial Sequence
  Description of Artificial Sequence: Synthetic oligonucleotide
  Sense strand starting at position 2076 of SEQ ID NO: 1560347
ucucccucucguggucaaa

SEQ ID NO: 1593888 - RNA, 19 nt, Artificial Sequence
  Description of Artificial Sequence: Synthetic oligonucleotide
  Antisense strand to SEQ ID NO: 1593887
uuugaccacgagagggaga

SEQ ID NO: 1593889 - RNA, 19 nt, Artificial Sequence
  Description of Artificial Sequence: Synthetic oligonucleotide
  Sense strand starting at position 2095 of SEQ ID NO: 1560347
cccagaccuuguuugaaua

SEQ ID NO: 1593890 - RNA, 19 nt, Artificial Sequence
  Description of Artificial Sequence: Synthetic oligonucleotide
  Antisense strand to SEQ ID NO: 1593889
uauucaaacaaggucuggg

SEQ ID NO: 1593891 - RNA, 19 nt, Artificial Sequence
  Description of Artificial Sequence: Synthetic oligonucleotide
  Sense strand starting at position 2096 of SEQ ID NO: 1560347
ccagaccuuguuugaauaa

SEQ ID NO: 1593892 - RNA, 19 nt, Artificial Sequence
  Description of Artificial Sequence: Synthetic oligonucleotide
  Antisense strand to SEQ ID NO: 1593891
uuauucaaacaaggucugg

SEQ ID NO: 1593893 - RNA, 19 nt, Artificial Sequence
  Description of Artificial Sequence: Synthetic oligonucleotide
  Sense strand starting at position 2297 of SEQ ID NO: 1560347
gcuuaaauuccaugguuaa

SEQ ID NO: 1593894 - RNA, 19 nt, Artificial Sequence
  Description of Artificial Sequence: Synthetic oligonucleotide
  Antisense strand to SEQ ID NO: 1593893
uuaaccauggaauuuaagc

SEQ ID NO: 1593895 - RNA, 19 nt, Artificial Sequence
  Description of Artificial Sequence: Synthetic oligonucleotide
  Sense strand starting at position 2503 of SEQ ID NO: 1560347
ccaccuacuccagagguua

SEQ ID NO: 1593896 - RNA, 19 nt, Artificial Sequence
  Description of Artificial Sequence: Synthetic oligonucleotide
  Antisense strand to SEQ ID NO: 1593895
uaaccucuggaguaggugg

SEQ ID NO: 1593897 - RNA, 19 nt, Artificial Sequence
  Description of Artificial Sequence: Synthetic oligonucleotide
  Sense strand starting at position 3325 of SEQ ID NO: 1560347
gugugaauuaguugucuag

SEQ ID NO: 1593898 - RNA, 19 nt, Artificial Sequence
  Description of Artificial Sequence: Synthetic oligonucleotide
  Antisense strand to SEQ ID NO: 1593897
cuagacaacuaauucacac

SEQ ID NO: 1593899 - RNA, 19 nt, Artificial Sequence
  Description of Artificial Sequence: Synthetic oligonucleotide
  Sense strand starting at position 3327 of SEQ ID NO: 1560347
gugaauuaguugucuagaa

SEQ ID NO: 1593900 - RNA, 19 nt, Artificial Sequence
  Description of Artificial Sequence: Synthetic oligonucleotide
  Antisense strand to SEQ ID NO: 1593899
uucuagacaacuaauucac

SEQ ID NO: 1593901 - RNA, 19 nt, Artificial Sequence
  Description of Artificial Sequence: Synthetic oligonucleotide
  Sense strand starting at position 3328 of SEQ ID NO: 1560347
ugaauuaguugucuagaag

SEQ ID NO: 1593902 - RNA, 19 nt, Artificial Sequence
  Description of Artificial Sequence: Synthetic oligonucleotide
  Antisense strand to SEQ ID NO: 1593901
cuucuagacaacuaauuca

SEQ ID NO: 1593903 - RNA, 19 nt, Artificial Sequence
  Description of Artificial Sequence: Synthetic oligonucleotide
  Sense strand starting at position 3367 of SEQ ID NO: 1560347
agagaaaugucauauggcu

SEQ ID NO: 1593904 - RNA, 19 nt, Artificial Sequence
  Description of Artificial Sequence: Synthetic oligonucleotide
  Antisense strand to SEQ ID NO: 1593903
agccauaugacauuucucu

SEQ ID NO: 1593905 - RNA, 19 nt, Artificial Sequence
  Description of Artificial Sequence: Synthetic oligonucleotide
  Sense strand starting at position 3523 of SEQ ID NO: 1560347
gggucucaugcaggaggaa

SEQ ID NO: 1593906 - RNA, 19 nt, Artificial Sequence
  Description of Artificial Sequence: Synthetic oligonucleotide
  Antisense strand to SEQ ID NO: 1593905
uuccuccugcaugagaccc

SEQ ID NO: 1593907 - RNA, 19 nt, Artificial Sequence
  Description of Artificial Sequence: Synthetic oligonucleotide
  Sense strand starting at position 3556 of SEQ ID NO: 1560347
gggugugugcagagaaugu

SEQ ID NO: 1593908 - RNA, 19 nt, Artificial Sequence
  Description of Artificial Sequence: Synthetic oligonucleotide
  Antisense strand to SEQ ID NO: 1593907
acauucucugcacacaccc

SEQ ID NO: 1593909 - RNA, 19 nt, Artificial Sequence
  Description of Artificial Sequence: Synthetic oligonucleotide
  Sense strand starting at position 3560 of SEQ ID NO: 1560347
gugugcagagaauguguua

SEQ ID NO: 1593910 - RNA, 19 nt, Artificial Sequence
  Description of Artificial Sequence: Synthetic oligonucleotide
  Antisense strand to SEQ ID NO: 1593909
uaacacauucucugcacac

SEQ ID NO: 1593911 - RNA, 19 nt, Artificial Sequence
  Description of Artificial Sequence: Synthetic oligonucleotide
  Sense strand starting at position 6 of SEQ ID NO: 1560348
uuacuagaacugugagugu

SEQ ID NO: 1593912 - RNA, 19 nt, Artificial Sequence
  Description of Artificial Sequence: Synthetic oligonucleotide
  Antisense strand to SEQ ID NO: 1593911
acacucacaguucuaguaa

SEQ ID NO: 1593913 - RNA, 19 nt, Artificial Sequence
  Description of Artificial Sequence: Synthetic oligonucleotide
  Sense strand starting at position 9 of SEQ ID NO: 1560348
cuagaacugugaguguguu

SEQ ID NO: 1593914 - RNA, 19 nt, Artificial Sequence
  Description of Artificial Sequence: Synthetic oligonucleotide
  Antisense strand to SEQ ID NO: 1593913
aacacacucacaguucuag

SEQ ID NO: 1593915 - RNA, 19 nt, Artificial Sequence
  Description of Artificial Sequence: Synthetic oligonucleotide
  Sense strand starting at position 10 of SEQ ID NO: 1560348
uagaacugugaguguguuu

SEQ ID NO: 1593916 - RNA, 19 nt, Artificial Sequence
  Description of Artificial Sequence: Synthetic oligonucleotide
  Antisense strand to SEQ ID NO: 1593915
aaacacacucacaguucua

SEQ ID NO: 1593917 - RNA, 19 nt, Artificial Sequence
  Description of Artificial Sequence: Synthetic oligonucleotide
  Sense strand starting at position 754 of SEQ ID NO: 1560348
ggaggccuucugugaaaua

SEQ ID NO: 1593918 - RNA, 19 nt, Artificial Sequence
  Description of Artificial Sequence: Synthetic oligonucleotide
  Antisense strand to SEQ ID NO: 1593917
uauuucacagaaggccucc

SEQ ID NO: 1593919 - RNA, 19 nt, Artificial Sequence
  Description of Artificial Sequence: Synthetic oligonucleotide
  Sense strand starting at position 938 of SEQ ID NO: 1560348
uggcccuucucacugauuu

SEQ ID NO: 1593920 - RNA, 19 nt, Artificial Sequence
  Description of Artificial Sequence: Synthetic oligonucleotide
  Antisense strand to SEQ ID NO: 1593919
aaaucagugagaagggcca

SEQ ID NO: 1593921 - RNA, 19 nt, Artificial Sequence
  Description of Artificial Sequence: Synthetic oligonucleotide
  Sense strand starting at position 946 of SEQ ID NO: 1560348
cucacugauuugcagcaaa

SEQ ID NO: 1593922 - RNA, 19 nt, Artificial Sequence
  Description of Artificial Sequence: Synthetic oligonucleotide
  Antisense strand to SEQ ID NO: 1593921
uuugcugcaaaucagugag

SEQ ID NO: 1593923 - RNA, 19 nt, Artificial Sequence
  Description of Artificial Sequence: Synthetic oligonucleotide
  Sense strand starting at position 1281 of SEQ ID NO: 1560348
uggacuuccucuuccgaga

SEQ ID NO: 1593924 - RNA, 19 nt, Artificial Sequence
  Description of Artificial Sequence: Synthetic oligonucleotide
  Antisense strand to SEQ ID NO: 1593923
ucucggaagaggaagucca

SEQ ID NO: 1593925 - RNA, 19 nt, Artificial Sequence
  Description of Artificial Sequence: Synthetic oligonucleotide
  Sense strand starting at position 2203 of SEQ ID NO: 1560348
cuugaagugucccuaauuc

SEQ ID NO: 1593926 - RNA, 19 nt, Artificial Sequence
  Description of Artificial Sequence: Synthetic oligonucleotide
  Antisense strand to SEQ ID NO: 1593925
gaauuagggacacuucaag

SEQ ID NO: 1593927 - RNA, 19 nt, Artificial Sequence
  Description of Artificial Sequence: Synthetic oligonucleotide
  Sense strand starting at position 2207 of SEQ ID NO: 1560348
aagugucccuaauucguua

SEQ ID NO: 1593928 - RNA, 19 nt, Artificial Sequence
  Description of Artificial Sequence: Synthetic oligonucleotide
  Antisense strand to SEQ ID NO: 1593927
uaacgaauuagggacacuu

SEQ ID NO: 1593929 - RNA, 19 nt, Artificial Sequence
  Description of Artificial Sequence: Synthetic oligonucleotide
  Sense strand starting at position 2214 of SEQ ID NO: 1560348
ccuaauucguuaguagcaa

SEQ ID NO: 1593930 - RNA, 19 nt, Artificial Sequence
  Description of Artificial Sequence: Synthetic oligonucleotide
  Antisense strand to SEQ ID NO: 1593929
uugcuacuaacgaauuagg

SEQ ID NO: 1593931 - RNA, 19 nt, Artificial Sequence
  Description of Artificial Sequence: Synthetic oligonucleotide
  Sense strand starting at position 2230 of SEQ ID NO: 1560348
caaugagacgucuggcucu

SEQ ID NO: 1593932 - RNA, 19 nt, Artificial Sequence
  Description of Artificial Sequence: Synthetic oligonucleotide
  Antisense strand to SEQ ID NO: 1593931
agagccagacgucucauug

SEQ ID NO: 1593933 - RNA, 19 nt, Artificial Sequence
  Description of Artificial Sequence: Synthetic oligonucleotide
  Sense strand starting at position 2247 of SEQ ID NO: 1560348
cugagcaaccauuguuauu

SEQ ID NO: 1593934 - RNA, 19 nt, Artificial Sequence
  Description of Artificial Sequence: Synthetic oligonucleotide
  Antisense strand to SEQ ID NO: 1593933
aauaacaaugguugcucag

SEQ ID NO: 1593935 - RNA, 19 nt, Artificial Sequence
  Description of Artificial Sequence: Synthetic oligonucleotide
  Sense strand starting at position 2294 of SEQ ID NO: 1560348
guauccguuaacguguuaa

SEQ ID NO: 1593936 - RNA, 19 nt, Artificial Sequence
  Description of Artificial Sequence: Synthetic oligonucleotide
  Antisense strand to SEQ ID NO: 1593935
uuaacacguuaacggauac

SEQ ID NO: 1593937 - RNA, 19 nt, Artificial Sequence
  Description of Artificial Sequence: Synthetic oligonucleotide
  Sense strand starting at position 2519 of SEQ ID NO: 1560348
ccaaguggcuugucuauga

SEQ ID NO: 1593938 - RNA, 19 nt, Artificial Sequence
  Description of Artificial Sequence: Synthetic oligonucleotide
  Antisense strand to SEQ ID NO: 1593937
ucauagacaagccacuugg

SEQ ID NO: 1593939 - RNA, 19 nt, Artificial Sequence
  Description of Artificial Sequence: Synthetic oligonucleotide
  Sense strand starting at position 2523 of SEQ ID NO: 1560348
guggcuugucuaugaucac

SEQ ID NO: 1593940 - RNA, 19 nt, Artificial Sequence
  Description of Artificial Sequence: Synthetic oligonucleotide
  Antisense strand to SEQ ID NO: 1593939
gugaucauagacaagccac

SEQ ID NO: 1593941 - RNA, 19 nt, Artificial Sequence
  Description of Artificial Sequence: Synthetic oligonucleotide
  Sense strand starting at position 2529 of SEQ ID NO: 1560348
ugucuaugaucaccagcua

SEQ ID NO: 1593942 - RNA, 19 nt, Artificial Sequence
  Description of Artificial Sequence: Synthetic oligonucleotide
  Antisense strand to SEQ ID NO: 1593941
uagcuggugaucauagaca

SEQ ID NO: 1593943 - RNA, 19 nt, Artificial Sequence
  Description of Artificial Sequence: Synthetic oligonucleotide
  Sense strand starting at position 2599 of SEQ ID NO: 1560348
cuagaucagcucuguccaa

SEQ ID NO: 1593944 - RNA, 19 nt, Artificial Sequence
  Description of Artificial Sequence: Synthetic oligonucleotide
  Antisense strand to SEQ ID NO: 1593943
uuggacagagcugaucuag

SEQ ID NO: 1593945 - RNA, 19 nt, Artificial Sequence
  Description of Artificial Sequence: Synthetic oligonucleotide
  Sense strand starting at position 2943 of SEQ ID NO: 1560348
ugugaaaguugaucaugug

SEQ ID NO: 1593946 - RNA, 19 nt, Artificial Sequence
  Description of Artificial Sequence: Synthetic oligonucleotide
  Antisense strand to SEQ ID NO: 1593945
cacaugaucaacuuucaca

SEQ ID NO: 1593947 - RNA, 19 nt, Artificial Sequence
  Description of Artificial Sequence: Synthetic oligonucleotide
  Sense strand starting at position 2944 of SEQ ID NO: 1560348
gugaaaguugaucauguga

SEQ ID NO: 1593948 - RNA, 19 nt, Artificial Sequence
  Description of Artificial Sequence: Synthetic oligonucleotide
  Antisense strand to SEQ ID NO: 1593947
ucacaugaucaacuuucac

SEQ ID NO: 1593949 - RNA, 19 nt, Artificial Sequence
  Description of Artificial Sequence: Synthetic oligonucleotide
  Sense strand starting at position 2963 of SEQ ID NO: 1560348
auuggauccuucuugucau

SEQ ID NO: 1593950 - RNA, 19 nt, Artificial Sequence
  Description of Artificial Sequence: Synthetic oligonucleotide
  Antisense strand to SEQ ID NO: 1593949
augacaagaaggauccaau

SEQ ID NO: 1593951 - RNA, 19 nt, Artificial Sequence
  Description of Artificial Sequence: Synthetic oligonucleotide
  Sense strand starting at position 2966 of SEQ ID NO: 1560348
ggauccuucuugucauauc

SEQ ID NO: 1593952 - RNA, 19 nt, Artificial Sequence
  Description of Artificial Sequence: Synthetic oligonucleotide
  Antisense strand to SEQ ID NO: 1593951
gauaugacaagaaggaucc

SEQ ID NO: 1593953 - RNA, 19 nt, Artificial Sequence
  Description of Artificial Sequence: Synthetic oligonucleotide
  Sense strand starting at position 3026 of SEQ ID NO: 1560348
ggcagauaccauugcucca

SEQ ID NO: 1593954 - RNA, 19 nt, Artificial Sequence
  Description of Artificial Sequence: Synthetic oligonucleotide
  Antisense strand to SEQ ID NO: 1593953
uggagcaaugguaucugcc

SEQ ID NO: 1593955 - RNA, 19 nt, Artificial Sequence
  Description of Artificial Sequence: Synthetic oligonucleotide
  Sense strand starting at position 3029 of SEQ ID NO: 1560348
agauaccauugcuccaaga

SEQ ID NO: 1593956 - RNA, 19 nt, Artificial Sequence
  Description of Artificial Sequence: Synthetic oligonucleotide
  Antisense strand to SEQ ID NO: 1593955
ucuuggagcaaugguaucu

SEQ ID NO: 1593957 - RNA, 19 nt, Artificial Sequence
  Description of Artificial Sequence: Synthetic oligonucleotide
  Sense strand starting at position 3046 of SEQ ID NO: 1560348
gaaagugauucucugcaag

SEQ ID NO: 1593958 - RNA, 19 nt, Artificial Sequence
  Description of Artificial Sequence: Synthetic oligonucleotide
  Antisense strand to SEQ ID NO: 1593957
cuugcagagaaucacuuuc

SEQ ID NO: 1593959 - RNA, 19 nt, Artificial Sequence
  Description of Artificial Sequence: Synthetic oligonucleotide
  Sense strand starting at position 3049 of SEQ ID NO: 1560348
agugauucucugcaagccu

SEQ ID NO: 1593960 - RNA, 19 nt, Artificial Sequence
  Description of Artificial Sequence: Synthetic oligonucleotide
  Antisense strand to SEQ ID NO: 1593959
aggcuugcagagaaucacu

SEQ ID NO: 1593961 - RNA, 19 nt, Artificial Sequence
  Description of Artificial Sequence: Synthetic oligonucleotide
  Sense strand starting at position 3265 of SEQ ID NO: 1560348
ccucuuuguucuuugaaag

SEQ ID NO: 1593962 - RNA, 19 nt, Artificial Sequence
  Description of Artificial Sequence: Synthetic oligonucleotide
  Antisense strand to SEQ ID NO: 1593961
cuuucaaagaacaaagagg

SEQ ID NO: 1593963 - RNA, 19 nt, Artificial Sequence
  Description of Artificial Sequence: Synthetic oligonucleotide
  Sense strand starting at position 3266 of SEQ ID NO: 1560348
cucuuuguucuuugaaagu

SEQ ID NO: 1593964 - RNA, 19 nt, Artificial Sequence
  Description of Artificial Sequence: Synthetic oligonucleotide
  Antisense strand to SEQ ID NO: 1593963
acuuucaaagaacaaagag

SEQ ID NO: 1593965 - RNA, 19 nt, Artificial Sequence
  Description of Artificial Sequence: Synthetic oligonucleotide
  Sense strand starting at position 3308 of SEQ ID NO: 1560348
ggaugccucgaaugucaau

SEQ ID NO: 1593966 - RNA, 19 nt, Artificial Sequence
  Description of Artificial Sequence: Synthetic oligonucleotide
  Antisense strand to SEQ ID NO: 1593965
auugacauucgaggcaucc

SEQ ID NO: 1593967 - RNA, 19 nt, Artificial Sequence
  Description of Artificial Sequence: Synthetic oligonucleotide
  Sense strand starting at position 3682 of SEQ ID NO: 1560348
uuuauuuggcuucgacaua

SEQ ID NO: 1593968 - RNA, 19 nt, Artificial Sequence
  Description of Artificial Sequence: Synthetic oligonucleotide
  Antisense strand to SEQ ID NO: 1593967
uaugucgaagccaaauaaa

SEQ ID NO: 1593969 - RNA, 19 nt, Artificial Sequence
  Description of Artificial Sequence: Synthetic oligonucleotide
  Sense strand starting at position 3683 of SEQ ID NO: 1560348
uuauuuggcuucgacauaa

SEQ ID NO: 1593970 - RNA, 19 nt, Artificial Sequence
  Description of Artificial Sequence: Synthetic oligonucleotide
  Antisense strand to SEQ ID NO: 1593969
uuaugucgaagccaaauaa

SEQ ID NO: 1593971 - RNA, 19 nt, Artificial Sequence
  Description of Artificial Sequence: Synthetic oligonucleotide
  Sense strand starting at position 3695 of SEQ ID NO: 1560348
gacauaacgugagcuguau

SEQ ID NO: 1593972 - RNA, 19 nt, Artificial Sequence
  Description of Artificial Sequence: Synthetic oligonucleotide
  Antisense strand to SEQ ID NO: 1593971
auacagcucacguuauguc

SEQ ID NO: 1593973 - RNA, 19 nt, Artificial Sequence
  Description of Artificial Sequence: Synthetic oligonucleotide
  Sense strand starting at position 3699 of SEQ ID NO: 1560348
uaacgugagcuguauacau

SEQ ID NO: 1593974 - RNA, 19 nt, Artificial Sequence
  Description of Artificial Sequence: Synthetic oligonucleotide
  Antisense strand to SEQ ID NO: 1593973
auguauacagcucacguua

SEQ ID NO: 1593975 - RNA, 19 nt, Artificial Sequence
  Description of Artificial Sequence: Synthetic oligonucleotide
  Sense strand starting at position 3701 of SEQ ID NO: 1560348
acgugagcuguauacauag

SEQ ID NO: 1593976 - RNA, 19 nt, Artificial Sequence
  Description of Artificial Sequence: Synthetic oligonucleotide
  Antisense strand to SEQ ID NO: 1593975
cuauguauacagcucacgu

SEQ ID NO: 1593977 - RNA, 19 nt, Artificial Sequence
  Description of Artificial Sequence: Synthetic oligonucleotide
  Sense strand starting at position 3703 of SEQ ID NO: 1560348
gugagcuguauacauaguu

SEQ ID NO: 1593978 - RNA, 19 nt, Artificial Sequence
  Description of Artificial Sequence: Synthetic oligonucleotide
  Antisense strand to SEQ ID NO: 1593977
aacuauguauacagcucac

SEQ ID NO: 1593979 - RNA, 19 nt, Artificial Sequence
  Description of Artificial Sequence: Synthetic oligonucleotide
  Sense strand starting at position 3708 of SEQ ID NO: 1560348
cuguauacauaguuuaaga

SEQ ID NO: 1593980 - RNA, 19 nt, Artificial Sequence
  Description of Artificial Sequence: Synthetic oligonucleotide
  Antisense strand to SEQ ID NO: 1593979
ucuuaaacuauguauacag

SEQ ID NO: 1593981 - RNA, 19 nt, Artificial Sequence
  Description of Artificial Sequence: Synthetic oligonucleotide
  Sense strand starting at position 3793 of SEQ ID NO: 1560348
ugauaaacaguuggcauaa

SEQ ID NO: 1593982 - RNA, 19 nt, Artificial Sequence
  Description of Artificial Sequence: Synthetic oligonucleotide
  Antisense strand to SEQ ID NO: 1593981
uuaugccaacuguuuauca

SEQ ID NO: 1593983 - RNA, 19 nt, Artificial Sequence
  Description of Artificial Sequence: Synthetic oligonucleotide
  Sense strand starting at position 3794 of SEQ ID NO: 1560348
gauaaacaguuggcauaau

SEQ ID NO: 1593984 - RNA, 19 nt, Artificial Sequence
  Description of Artificial Sequence: Synthetic oligonucleotide
  Antisense strand to SEQ ID NO: 1593983
auuaugccaacuguuuauc

SEQ ID NO: 1593985 - RNA, 19 nt, Artificial Sequence
  Description of Artificial Sequence: Synthetic oligonucleotide
  Sense strand starting at position 3803 of SEQ ID NO: 1560348
uuggcauaaugagcaaauu

SEQ ID NO: 1593986 - RNA, 19 nt, Artificial Sequence
  Description of Artificial Sequence: Synthetic oligonucleotide
  Antisense strand to SEQ ID NO: 1593985
aauuugcucauuaugccaa

SEQ ID NO: 1593987 - RNA, 19 nt, Artificial Sequence
  Description of Artificial Sequence: Synthetic oligonucleotide
  Sense strand starting at position 3804 of SEQ ID NO: 1560348
uggcauaaugagcaaauua

SEQ ID NO: 1593988 - RNA, 19 nt, Artificial Sequence
  Description of Artificial Sequence: Synthetic oligonucleotide
  Antisense strand to SEQ ID NO: 1593987
uaauuugcucauuaugcca

SEQ ID NO: 1593989 - RNA, 19 nt, Artificial Sequence
  Description of Artificial Sequence: Synthetic oligonucleotide
  Sense strand starting at position 3812 of SEQ ID NO: 1560348
ugagcaaauuacguaguau

SEQ ID NO: 1593990 - RNA, 19 nt, Artificial Sequence
  Description of Artificial Sequence: Synthetic oligonucleotide
  Antisense strand to SEQ ID NO: 1593989
auacuacguaauuugcuca

SEQ ID NO: 1593991 - RNA, 19 nt, Artificial Sequence
  Description of Artificial Sequence: Synthetic oligonucleotide
  Sense strand starting at position 614 of SEQ ID NO: 1560349
guucgcugucucuacucau

SEQ ID NO: 1593992 - RNA, 19 nt, Artificial Sequence
  Description of Artificial Sequence: Synthetic oligonucleotide
  Antisense strand to SEQ ID NO: 1593991
augaguagagacagcgaac

SEQ ID NO: 1593993 - RNA, 19 nt, Artificial Sequence
  Description of Artificial Sequence: Synthetic oligonucleotide
  Sense strand starting at position 662 of SEQ ID NO: 1560349
acuaaauuauagugcugaa

SEQ ID NO: 1593994 - RNA, 19 nt, Artificial Sequence
  Description of Artificial Sequence: Synthetic oligonucleotide
  Antisense strand to SEQ ID NO: 1593993
uucagcacuauaauuuagu

SEQ ID NO: 1593995 - RNA, 19 nt, Artificial Sequence
  Description of Artificial Sequence: Synthetic oligonucleotide
  Sense strand starting at position 666 of SEQ ID NO: 1560349
aauuauagugcugaaagca

SEQ ID NO: 1593996 - RNA, 19 nt, Artificial Sequence
  Description of Artificial Sequence: Synthetic oligonucleotide
  Antisense strand to SEQ ID NO: 1593995
ugcuuucagcacuauaauu

SEQ ID NO: 1593997 - RNA, 19 nt, Artificial Sequence
  Description of Artificial Sequence: Synthetic oligonucleotide
  Sense strand starting at position 713 of SEQ ID NO: 1560349
gaauccugagucuagcaau

SEQ ID NO: 1593998 - RNA, 19 nt, Artificial Sequence
  Description of Artificial Sequence: Synthetic oligonucleotide
  Antisense strand to SEQ ID NO: 1593997
auugcuagacucaggauuc

SEQ ID NO: 1593999 - RNA, 19 nt, Artificial Sequence
  Description of Artificial Sequence: Synthetic oligonucleotide
  Sense strand starting at position 716 of SEQ ID NO: 1560349
uccugagucuagcaauuaa

SEQ ID NO: 1594000 - RNA, 19 nt, Artificial Sequence
  Description of Artificial Sequence: Synthetic oligonucleotide
  Antisense strand to SEQ ID NO: 1593999
uuaauugcuagacucagga

SEQ ID NO: 1594001 - RNA, 19 nt, Artificial Sequence
  Description of Artificial Sequence: Synthetic oligonucleotide
  Sense strand starting at position 736 of SEQ ID NO: 1560349
gcuggauagccuugggaaa

SEQ ID NO: 1594002 - RNA, 19 nt, Artificial Sequence
  Description of Artificial Sequence: Synthetic oligonucleotide
  Antisense strand to SEQ ID NO: 1594001
uuucccaaggcuauccagc

SEQ ID NO: 1594003 - RNA, 19 nt, Artificial Sequence
  Description of Artificial Sequence: Synthetic oligonucleotide
  Sense strand starting at position 738 of SEQ ID NO: 1560349
uggauagccuugggaaagu

SEQ ID NO: 1594004 - RNA, 19 nt, Artificial Sequence
  Description of Artificial Sequence: Synthetic oligonucleotide
  Antisense strand to SEQ ID NO: 1594003
acuuucccaaggcuaucca

SEQ ID NO: 1594005 - RNA, 19 nt, Artificial Sequence
  Description of Artificial Sequence: Synthetic oligonucleotide
  Sense strand starting at position 844 of SEQ ID NO: 1560349
ugaguuaauguguacaaac

SEQ ID NO: 1594006 - RNA, 19 nt, Artificial Sequence
  Description of Artificial Sequence: Synthetic oligonucleotide
  Antisense strand to SEQ ID NO: 1594005
guuuguacacauuaacuca

SEQ ID NO: 1594007 - RNA, 19 nt, Artificial Sequence
  Description of Artificial Sequence: Synthetic oligonucleotide
  Sense strand starting at position 894 of SEQ ID NO: 1560349
caauaagcguuagcuguaa

SEQ ID NO: 1594008 - RNA, 19 nt, Artificial Sequence
  Description of Artificial Sequence: Synthetic oligonucleotide
  Antisense strand to SEQ ID NO: 1594007
uuacagcuaacgcuuauug

SEQ ID NO: 1594009 - RNA, 19 nt, Artificial Sequence
  Description of Artificial Sequence: Synthetic oligonucleotide
  Sense strand starting at position 896 of SEQ ID NO: 1560349
auaagcguuagcuguaauc

SEQ ID NO: 1594010 - RNA, 19 nt, Artificial Sequence
  Description of Artificial Sequence: Synthetic oligonucleotide
  Antisense strand to SEQ ID NO: 1594009
gauuacagcuaacgcuuau

SEQ ID NO: 1594011 - RNA, 19 nt, Artificial Sequence
  Description of Artificial Sequence: Synthetic oligonucleotide
  Sense strand starting at position 898 of SEQ ID NO: 1560349
aagcguuagcuguaaucca

SEQ ID NO: 1594012 - RNA, 19 nt, Artificial Sequence
  Description of Artificial Sequence: Synthetic oligonucleotide
  Antisense strand to SEQ ID NO: 1594011
uggauuacagcuaacgcuu

SEQ ID NO: 1594013 - RNA, 19 nt, Artificial Sequence
  Description of Artificial Sequence: Synthetic oligonucleotide
  Sense strand starting at position 948 of SEQ ID NO: 1560349
gggugugugcccagaucag

SEQ ID NO: 1594014 - RNA, 19 nt, Artificial Sequence
  Description of Artificial Sequence: Synthetic oligonucleotide
  Antisense strand to SEQ ID NO: 1594013
cugaucugggcacacaccc

SEQ ID NO: 1594015 - RNA, 19 nt, Artificial Sequence
  Description of Artificial Sequence: Synthetic oligonucleotide
  Sense strand starting at position 1185 of SEQ ID NO: 1560349
ggcacugaggcucacagau

SEQ ID NO: 1594016 - RNA, 19 nt, Artificial Sequence
  Description of Artificial Sequence: Synthetic oligonucleotide
  Antisense strand to SEQ ID NO: 1594015
aucugugagccucagugcc

SEQ ID NO: 1594017 - RNA, 19 nt, Artificial Sequence
  Description of Artificial Sequence: Synthetic oligonucleotide
  Sense strand starting at position 1187 of SEQ ID NO: 1560349
cacugaggcucacagauuu

SEQ ID NO: 1594018 - RNA, 19 nt, Artificial Sequence
  Description of Artificial Sequence: Synthetic oligonucleotide
  Antisense strand to SEQ ID NO: 1594017
aaaucugugagccucagug

SEQ ID NO: 1594019 - RNA, 19 nt, Artificial Sequence
  Description of Artificial Sequence: Synthetic oligonucleotide
  Sense strand starting at position 1238 of SEQ ID NO: 1560349
auaugaaugcuguacuucu

SEQ ID NO: 1594020 - RNA, 19 nt, Artificial Sequence
  Description of Artificial Sequence: Synthetic oligonucleotide
  Antisense strand to SEQ ID NO: 1594019
agaaguacagcauucauau

SEQ ID NO: 1594021 - RNA, 19 nt, Artificial Sequence
  Description of Artificial Sequence: Synthetic oligonucleotide
  Sense strand starting at position 1247 of SEQ ID NO: 1560349
cuguacuucucauagggau

SEQ ID NO: 1594022 - RNA, 19 nt, Artificial Sequence
  Description of Artificial Sequence: Synthetic oligonucleotide
  Antisense strand to SEQ ID NO: 1594021
aucccuaugagaaguacag

SEQ ID NO: 1594023 - RNA, 19 nt, Artificial Sequence
  Description of Artificial Sequence: Synthetic oligonucleotide
  Sense strand starting at position 1306 of SEQ ID NO: 1560349
gugcgaaagccugucucga

SEQ ID NO: 1594024 - RNA, 19 nt, Artificial Sequence
  Description of Artificial Sequence: Synthetic oligonucleotide
  Antisense strand to SEQ ID NO: 1594023
ucgagacaggcuuucgcac

SEQ ID NO: 1594025 - RNA, 19 nt, Artificial Sequence
  Description of Artificial Sequence: Synthetic oligonucleotide
  Sense strand starting at position 1307 of SEQ ID NO: 1560349
ugcgaaagccugucucgau

SEQ ID NO: 1594026 - RNA, 19 nt, Artificial Sequence
  Description of Artificial Sequence: Synthetic oligonucleotide
  Antisense strand to SEQ ID NO: 1594025
aucgagacaggcuuucgca

SEQ ID NO: 1594027 - RNA, 19 nt, Artificial Sequence
  Description of Artificial Sequence: Synthetic oligonucleotide
  Sense strand starting at position 1308 of SEQ ID NO: 1560349
gcgaaagccugucucgaug

SEQ ID NO: 1594028 - RNA, 19 nt, Artificial Sequence
  Description of Artificial Sequence: Synthetic oligonucleotide
  Antisense strand to SEQ ID NO: 1594027
caucgagacaggcuuucgc

SEQ ID NO: 1594029 - RNA, 19 nt, Artificial Sequence
  Description of Artificial Sequence: Synthetic oligonucleotide
  Sense strand starting at position 1327 of SEQ ID NO: 1560349
gcccuuucuggccguauua

SEQ ID NO: 1594030 - RNA, 19 nt, Artificial Sequence
  Description of Artificial Sequence: Synthetic oligonucleotide
  Antisense strand to SEQ ID NO: 1594029
uaauacggccagaaagggc

SEQ ID NO: 1594031 - RNA, 19 nt, Artificial Sequence
  Description of Artificial Sequence: Synthetic oligonucleotide
  Sense strand starting at position 1339 of SEQ ID NO: 1560349
cguauuauccuacaguucu

SEQ ID NO: 1594032 - RNA, 19 nt, Artificial Sequence
  Description of Artificial Sequence: Synthetic oligonucleotide
  Antisense strand to SEQ ID NO: 1594031
agaacuguaggauaauacg

SEQ ID NO: 1594033 - RNA, 19 nt, Artificial Sequence
  Description of Artificial Sequence: Synthetic oligonucleotide
  Sense strand starting at position 2777 of SEQ ID NO: 1560349
gaaggaaagucccauacau

SEQ ID NO: 1594034 - RNA, 19 nt, Artificial Sequence
  Description of Artificial Sequence: Synthetic oligonucleotide
  Antisense strand to SEQ ID NO: 1594033
auguaugggacuuuccuuc

SEQ ID NO: 1594035 - RNA, 19 nt, Artificial Sequence
  Description of Artificial Sequence: Synthetic oligonucleotide
  Sense strand starting at position 2786 of SEQ ID NO: 1560349
ucccauacauuaggaguua

SEQ ID NO: 1594036 - RNA, 19 nt, Artificial Sequence
  Description of Artificial Sequence: Synthetic oligonucleotide
  Antisense strand to SEQ ID NO: 1594035
uaacuccuaauguauggga

SEQ ID NO: 1594037 - RNA, 19 nt, Artificial Sequence
  Description of Artificial Sequence: Synthetic oligonucleotide
  Sense strand starting at position 2798 of SEQ ID NO: 1560349
ggaguuaguccacaucaua

SEQ ID NO: 1594038 - RNA, 19 nt, Artificial Sequence
  Description of Artificial Sequence: Synthetic oligonucleotide
  Antisense strand to SEQ ID NO: 1594037
uaugauguggacuaacucc

SEQ ID NO: 1594039 - RNA, 19 nt, Artificial Sequence
  Description of Artificial Sequence: Synthetic oligonucleotide
  Sense strand starting at position 2801 of SEQ ID NO: 1560349
guuaguccacaucauagaa

SEQ ID NO: 1594040 - RNA, 19 nt, Artificial Sequence
  Description of Artificial Sequence: Synthetic oligonucleotide
  Antisense strand to SEQ ID NO: 1594039
uucuaugauguggacuaac

SEQ ID NO: 1594041 - RNA, 19 nt, Artificial Sequence
  Description of Artificial Sequence: Synthetic oligonucleotide
  Sense strand starting at position 2853 of SEQ ID NO: 1560349
gaggcagugagcuaguguu

SEQ ID NO: 1594042 - RNA, 19 nt, Artificial Sequence
  Description of Artificial Sequence: Synthetic oligonucleotide
  Antisense strand to SEQ ID NO: 1594041
aacacuagcucacugccuc

SEQ ID NO: 1594043 - RNA, 19 nt, Artificial Sequence
  Description of Artificial Sequence: Synthetic oligonucleotide
  Sense strand starting at position 3266 of SEQ ID NO: 1560349
ggcagagaucuuuguguac

SEQ ID NO: 1594044 - RNA, 19 nt, Artificial Sequence
  Description of Artificial Sequence: Synthetic oligonucleotide
  Antisense strand to SEQ ID NO: 1594043
guacacaaagaucucugcc

SEQ ID NO: 1594045 - RNA, 19 nt, Artificial Sequence
  Description of Artificial Sequence: Synthetic oligonucleotide
  Sense strand starting at position 3269 of SEQ ID NO: 1560349
agagaucuuuguguaccuu

SEQ ID NO: 1594046 - RNA, 19 nt, Artificial Sequence
  Description of Artificial Sequence: Synthetic oligonucleotide
  Antisense strand to SEQ ID NO: 1594045
aagguacacaaagaucucu

SEQ ID NO: 1594047 - RNA, 19 nt, Artificial Sequence
  Description of Artificial Sequence: Synthetic oligonucleotide
  Sense strand starting at position 3297 of SEQ ID NO: 1560349
ccuagaacagcguaaacau

SEQ ID NO: 1594048 - RNA, 19 nt, Artificial Sequence
  Description of Artificial Sequence: Synthetic oligonucleotide
  Antisense strand to SEQ ID NO: 1594047
auguuuacgcuguucuagg

SEQ ID NO: 1594049 - RNA, 19 nt, Artificial Sequence
  Description of Artificial Sequence: Synthetic oligonucleotide
  Sense strand starting at position 3306 of SEQ ID NO: 1560349
gcguaaacauguguucagu

SEQ ID NO: 1594050 - RNA, 19 nt, Artificial Sequence
  Description of Artificial Sequence: Synthetic oligonucleotide
  Antisense strand to SEQ ID NO: 1594049
acugaacacauguuuacgc

SEQ ID NO: 1594051 - RNA, 19 nt, Artificial Sequence
  Description of Artificial Sequence: Synthetic oligonucleotide
  Sense strand starting at position 3330 of SEQ ID NO: 1560349
uuuauugcaucggaacuau

SEQ ID NO: 1594052 - RNA, 19 nt, Artificial Sequence
  Description of Artificial Sequence: Synthetic oligonucleotide
  Antisense strand to SEQ ID NO: 1594051
auaguuccgaugcaauaaa

SEQ ID NO: 1594053 - RNA, 19 nt, Artificial Sequence
  Description of Artificial Sequence: Synthetic oligonucleotide
  Sense strand starting at position 3365 of SEQ ID NO: 1560349
agacaacccugguaggaau

SEQ ID NO: 1594054 - RNA, 19 nt, Artificial Sequence
  Description of Artificial Sequence: Synthetic oligonucleotide
  Antisense strand to SEQ ID NO: 1594053
auuccuaccaggguugucu

SEQ ID NO: 1594055 - RNA, 19 nt, Artificial Sequence
  Description of Artificial Sequence: Synthetic oligonucleotide
  Sense strand starting at position 3391 of SEQ ID NO: 1560349
ccaaauuuauaaggcagaa

SEQ ID NO: 1594056 - RNA, 19 nt, Artificial Sequence
  Description of Artificial Sequence: Synthetic oligonucleotide
  Antisense strand to SEQ ID NO: 1594055
uucugccuuauaaauuugg

SEQ ID NO: 1594057 - RNA, 19 nt, Artificial Sequence
  Description of Artificial Sequence: Synthetic oligonucleotide
  Sense strand starting at position 3459 of SEQ ID NO: 1560349
acugaaauguauuggauuu

SEQ ID NO: 1594058 - RNA, 19 nt, Artificial Sequence
  Description of Artificial Sequence: Synthetic oligonucleotide
  Antisense strand to SEQ ID NO: 1594057
aaauccaauacauuucagu

SEQ ID NO: 1594059 - RNA, 19 nt, Artificial Sequence
  Description of Artificial Sequence: Synthetic oligonucleotide
  Sense strand starting at position 3488 of SEQ ID NO: 1560349
acucuugacuaggucguua

SEQ ID NO: 1594060 - RNA, 19 nt, Artificial Sequence
  Description of Artificial Sequence: Synthetic oligonucleotide
  Antisense strand to SEQ ID NO: 1594059
uaacgaccuagucaagagu

SEQ ID NO: 1594061 - RNA, 19 nt, Artificial Sequence
  Description of Artificial Sequence: Synthetic oligonucleotide
  Sense strand starting at position 3490 of SEQ ID NO: 1560349
ucuugacuaggucguuaga

SEQ ID NO: 1594062 - RNA, 19 nt, Artificial Sequence
  Description of Artificial Sequence: Synthetic oligonucleotide
  Antisense strand to SEQ ID NO: 1594061
ucuaacgaccuagucaaga

SEQ ID NO: 1594063 - RNA, 19 nt, Artificial Sequence
  Description of Artificial Sequence: Synthetic oligonucleotide
  Sense strand starting at position 3492 of SEQ ID NO: 1560349
uugacuaggucguuagauc

SEQ ID NO: 1594064 - RNA, 19 nt, Artificial Sequence
  Description of Artificial Sequence: Synthetic oligonucleotide
  Antisense strand to SEQ ID NO: 1594063
gaucuaacgaccuagucaa

SEQ ID NO: 1594065 - RNA, 19 nt, Artificial Sequence
  Description of Artificial Sequence: Synthetic oligonucleotide
  Sense strand starting at position 3493 of SEQ ID NO: 1560349
ugacuaggucguuagauca

SEQ ID NO: 1594066 - RNA, 19 nt, Artificial Sequence
  Description of Artificial Sequence: Synthetic oligonucleotide
  Antisense strand to SEQ ID NO: 1594065
ugaucuaacgaccuaguca

SEQ ID NO: 1594067 - RNA, 19 nt, Artificial Sequence
  Description of Artificial Sequence: Synthetic oligonucleotide
  Sense strand starting at position 3570 of SEQ ID NO: 1560349
ccgggagacuggcuuuagu

SEQ ID NO: 1594068 - RNA, 19 nt, Artificial Sequence
  Description of Artificial Sequence: Synthetic oligonucleotide
  Antisense strand to SEQ ID NO: 1594067
acuaaagccagucucccgg

SEQ ID NO: 1594069 - RNA, 19 nt, Artificial Sequence
  Description of Artificial Sequence: Synthetic oligonucleotide
  Sense strand starting at position 3578 of SEQ ID NO: 1560349
cuggcuuuaguccaggagu

SEQ ID NO: 1594070 - RNA, 19 nt, Artificial Sequence
  Description of Artificial Sequence: Synthetic oligonucleotide
  Antisense strand to SEQ ID NO: 1594069
acuccuggacuaaagccag

SEQ ID NO: 1594071 - RNA, 19 nt, Artificial Sequence
  Description of Artificial Sequence: Synthetic oligonucleotide
  Sense strand starting at position 205 of SEQ ID NO: 1560350
ggcagaaguauucgaccca

SEQ ID NO: 1594072 - RNA, 19 nt, Artificial Sequence
  Description of Artificial Sequence: Synthetic oligonucleotide
  Antisense strand to SEQ ID NO: 1594071
ugggucgaauacuucugcc

SEQ ID NO: 1594073 - RNA, 19 nt, Artificial Sequence
  Description of Artificial Sequence: Synthetic oligonucleotide
  Sense strand starting at position 283 of SEQ ID NO: 1560350
agucaaaguucuucucugu

SEQ ID NO: 1594074 - RNA, 19 nt, Artificial Sequence
  Description of Artificial Sequence: Synthetic oligonucleotide
  Antisense strand to SEQ ID NO: 1594073
acagagaagaacuuugacu

SEQ ID NO: 1594075 - RNA, 19 nt, Artificial Sequence
  Description of Artificial Sequence: Synthetic oligonucleotide
  Sense strand starting at position 289 of SEQ ID NO: 1560350
aguucuucucuguggguua

SEQ ID NO: 1594076 - RNA, 19 nt, Artificial Sequence
  Description of Artificial Sequence: Synthetic oligonucleotide
  Antisense strand to SEQ ID NO: 1594075
uaacccacagagaagaacu

SEQ ID NO: 1594077 - RNA, 19 nt, Artificial Sequence
  Description of Artificial Sequence: Synthetic oligonucleotide
  Sense strand starting at position 586 of SEQ ID NO: 1560350
agagcagucucaggauguu

SEQ ID NO: 1594078 - RNA, 19 nt, Artificial Sequence
  Description of Artificial Sequence: Synthetic oligonucleotide
  Antisense strand to SEQ ID NO: 1594077
aacauccugagacugcucu

SEQ ID NO: 1594079 - RNA, 19 nt, Artificial Sequence
  Description of Artificial Sequence: Synthetic oligonucleotide
  Sense strand starting at position 595 of SEQ ID NO: 1560350
ucaggauguugaggucuga

SEQ ID NO: 1594080 - RNA, 19 nt, Artificial Sequence
  Description of Artificial Sequence: Synthetic oligonucleotide
  Antisense strand to SEQ ID NO: 1594079
ucagaccucaacauccuga

SEQ ID NO: 1594081 - RNA, 19 nt, Artificial Sequence
  Description of Artificial Sequence: Synthetic oligonucleotide
  Sense strand starting at position 716 of SEQ ID NO: 1560350
cagggagccuugucaagau

SEQ ID NO: 1594082 - RNA, 19 nt, Artificial Sequence
  Description of Artificial Sequence: Synthetic oligonucleotide
  Antisense strand to SEQ ID NO: 1594081
aucuugacaaggcucccug

SEQ ID NO: 1594083 - RNA, 19 nt, Artificial Sequence
  Description of Artificial Sequence: Synthetic oligonucleotide
  Sense strand starting at position 751 of SEQ ID NO: 1560350
agaugcagauucugugaua

SEQ ID NO: 1594084 - RNA, 19 nt, Artificial Sequence
  Description of Artificial Sequence: Synthetic oligonucleotide
  Antisense strand to SEQ ID NO: 1594083
uaucacagaaucugcaucu

SEQ ID NO: 1594085 - RNA, 19 nt, Artificial Sequence
  Description of Artificial Sequence: Synthetic oligonucleotide
  Sense strand starting at position 752 of SEQ ID NO: 1560350
gaugcagauucugugauau

SEQ ID NO: 1594086 - RNA, 19 nt, Artificial Sequence
  Description of Artificial Sequence: Synthetic oligonucleotide
  Antisense strand to SEQ ID NO: 1594085
auaucacagaaucugcauc

SEQ ID NO: 1594087 - RNA, 19 nt, Artificial Sequence
  Description of Artificial Sequence: Synthetic oligonucleotide
  Sense strand starting at position 754 of SEQ ID NO: 1560350
ugcagauucugugauaugg

SEQ ID NO: 1594088 - RNA, 19 nt, Artificial Sequence
  Description of Artificial Sequence: Synthetic oligonucleotide
  Antisense strand to SEQ ID NO: 1594087
ccauaucacagaaucugca

SEQ ID NO: 1594089 - RNA, 19 nt, Artificial Sequence
  Description of Artificial Sequence: Synthetic oligonucleotide
  Sense strand starting at position 756 of SEQ ID NO: 1560350
cagauucugugauauggac

SEQ ID NO: 1594090 - RNA, 19 nt, Artificial Sequence
  Description of Artificial Sequence: Synthetic oligonucleotide
  Antisense strand to SEQ ID NO: 1594089
guccauaucacagaaucug

SEQ ID NO: 1594091 - RNA, 19 nt, Artificial Sequence
  Description of Artificial Sequence: Synthetic oligonucleotide
  Sense strand starting at position 795 of SEQ ID NO: 1560350
uauuaagcuguuugggaga

SEQ ID NO: 1594092 - RNA, 19 nt, Artificial Sequence
  Description of Artificial Sequence: Synthetic oligonucleotide
  Antisense strand to SEQ ID NO: 1594091
ucucccaaacagcuuaaua

SEQ ID NO: 1594093 - RNA, 19 nt, Artificial Sequence
  Description of Artificial Sequence: Synthetic oligonucleotide
  Sense strand starting at position 832 of SEQ ID NO: 1560350
auggcaacaccuugagaau

SEQ ID NO: 1594094 - RNA, 19 nt, Artificial Sequence
  Description of Artificial Sequence: Synthetic oligonucleotide
  Antisense strand to SEQ ID NO: 1594093
auucucaagguguugccau

SEQ ID NO: 1594095 - RNA, 19 nt, Artificial Sequence
  Description of Artificial Sequence: Synthetic oligonucleotide
  Sense strand starting at position 845 of SEQ ID NO: 1560350
gagaaucacugaucccgga

SEQ ID NO: 1594096 - RNA, 19 nt, Artificial Sequence
  Description of Artificial Sequence: Synthetic oligonucleotide
  Antisense strand to SEQ ID NO: 1594095
uccgggaucagugauucuc

SEQ ID NO: 1594097 - RNA, 19 nt, Artificial Sequence
  Description of Artificial Sequence: Synthetic oligonucleotide
  Sense strand starting at position 860 of SEQ ID NO: 1560350
cggagugauccugauuccu

SEQ ID NO: 1594098 - RNA, 19 nt, Artificial Sequence
  Description of Artificial Sequence: Synthetic oligonucleotide
  Antisense strand to SEQ ID NO: 1594097
aggaaucaggaucacuccg

SEQ ID NO: 1594099 - RNA, 19 nt, Artificial Sequence
  Description of Artificial Sequence: Synthetic oligonucleotide
  Sense strand starting at position 862 of SEQ ID NO: 1560350
gagugauccugauuccucu

SEQ ID NO: 1594100 - RNA, 19 nt, Artificial Sequence
  Description of Artificial Sequence: Synthetic oligonucleotide
  Antisense strand to SEQ ID NO: 1594099
agaggaaucaggaucacuc

SEQ ID NO: 1594101 - RNA, 19 nt, Artificial Sequence
  Description of Artificial Sequence: Synthetic oligonucleotide
  Sense strand starting at position 928 of SEQ ID NO: 1560350
uguaauacaucuuggcuua

SEQ ID NO: 1594102 - RNA, 19 nt, Artificial Sequence
  Description of Artificial Sequence: Synthetic oligonucleotide
  Antisense strand to SEQ ID NO: 1594101
uaagccaagauguauuaca

SEQ ID NO: 1594103 - RNA, 19 nt, Artificial Sequence
  Description of Artificial Sequence: Synthetic oligonucleotide
  Sense strand starting at position 929 of SEQ ID NO: 1560350
guaauacaucuuggcuuaa

SEQ ID NO: 1594104 - RNA, 19 nt, Artificial Sequence
  Description of Artificial Sequence: Synthetic oligonucleotide
  Antisense strand to SEQ ID NO: 1594103
uuaagccaagauguauuac

SEQ ID NO: 1594105 - RNA, 19 nt, Artificial Sequence
  Description of Artificial Sequence: Synthetic oligonucleotide
  Sense strand starting at position 941 of SEQ ID NO: 1560350
ggcuuaagggccugaggau

SEQ ID NO: 1594106 - RNA, 19 nt, Artificial Sequence
  Description of Artificial Sequence: Synthetic oligonucleotide
  Antisense strand to SEQ ID NO: 1594105
auccucaggcccuuaagcc

SEQ ID NO: 1594107 - RNA, 19 nt, Artificial Sequence
  Description of Artificial Sequence: Synthetic oligonucleotide
  Sense strand starting at position 953 of SEQ ID NO: 1560350
ugaggauccagcuguauca

SEQ ID NO: 1594108 - RNA, 19 nt, Artificial Sequence
  Description of Artificial Sequence: Synthetic oligonucleotide
  Antisense strand to SEQ ID NO: 1594107
ugauacagcuggauccuca

SEQ ID NO: 1594109 - RNA, 19 nt, Artificial Sequence
  Description of Artificial Sequence: Synthetic oligonucleotide
  Sense strand starting at position 1101 of SEQ ID NO: 1560350
ggugcugucucagcuucua

SEQ ID NO: 1594110 - RNA, 19 nt, Artificial Sequence
  Description of Artificial Sequence: Synthetic oligonucleotide
  Antisense strand to SEQ ID NO: 1594109
uagaagcugagacagcacc

SEQ ID NO: 1594111 - RNA, 19 nt, Artificial Sequence
  Description of Artificial Sequence: Synthetic oligonucleotide
  Sense strand starting at position 1166 of SEQ ID NO: 1560350
gcauaaacuccagagccua

SEQ ID NO: 1594112 - RNA, 19 nt, Artificial Sequence
  Description of Artificial Sequence: Synthetic oligonucleotide
  Antisense strand to SEQ ID NO: 1594111
uaggcucuggaguuuaugc

SEQ ID NO: 1594113 - RNA, 19 nt, Artificial Sequence
  Description of Artificial Sequence: Synthetic oligonucleotide
  Sense strand starting at position 1224 of SEQ ID NO: 1560350
guggcuuaguaccacaaga

SEQ ID NO: 1594114 - RNA, 19 nt, Artificial Sequence
  Description of Artificial Sequence: Synthetic oligonucleotide
  Antisense strand to SEQ ID NO: 1594113
ucuugugguacuaagccac

SEQ ID NO: 1594115 - RNA, 19 nt, Artificial Sequence
  Description of Artificial Sequence: Synthetic oligonucleotide
  Sense strand starting at position 1264 of SEQ ID NO: 1560350
gauccugagucguccagga

SEQ ID NO: 1594116 - RNA, 19 nt, Artificial Sequence
  Description of Artificial Sequence: Synthetic oligonucleotide
  Antisense strand to SEQ ID NO: 1594115
uccuggacgacucaggauc

SEQ ID NO: 1594117 - RNA, 19 nt, Artificial Sequence
  Description of Artificial Sequence: Synthetic oligonucleotide
  Sense strand starting at position 1266 of SEQ ID NO: 1560350
uccugagucguccaggaac

SEQ ID NO: 1594118 - RNA, 19 nt, Artificial Sequence
  Description of Artificial Sequence: Synthetic oligonucleotide
  Antisense strand to SEQ ID NO: 1594117
guuccuggacgacucagga

SEQ ID NO: 1594119 - RNA, 19 nt, Artificial Sequence
  Description of Artificial Sequence: Synthetic oligonucleotide
  Sense strand starting at position 1268 of SEQ ID NO: 1560350
cugagucguccaggaacca

SEQ ID NO: 1594120 - RNA, 19 nt, Artificial Sequence
  Description of Artificial Sequence: Synthetic oligonucleotide
  Antisense strand to SEQ ID NO: 1594119
ugguuccuggacgacucag

SEQ ID NO: 1594121 - RNA, 19 nt, Artificial Sequence
  Description of Artificial Sequence: Synthetic oligonucleotide
  Sense strand starting at position 1585 of SEQ ID NO: 1560350
gugacauggucagacacga

SEQ ID NO: 1594122 - RNA, 19 nt, Artificial Sequence
  Description of Artificial Sequence: Synthetic oligonucleotide
  Antisense strand to SEQ ID NO: 1594121
ucgugucugaccaugucac

SEQ ID NO: 1594123 - RNA, 19 nt, Artificial Sequence
  Description of Artificial Sequence: Synthetic oligonucleotide
  Sense strand starting at position 1876 of SEQ ID NO: 1560350
gacucuggguccgagucau

SEQ ID NO: 1594124 - RNA, 19 nt, Artificial Sequence
  Description of Artificial Sequence: Synthetic oligonucleotide
  Antisense strand to SEQ ID NO: 1594123
augacucggacccagaguc

SEQ ID NO: 1594125 - RNA, 19 nt, Artificial Sequence
  Description of Artificial Sequence: Synthetic oligonucleotide
  Sense strand starting at position 1968 of SEQ ID NO: 1560350
gcgucuugucuccuaggca

SEQ ID NO: 1594126 - RNA, 19 nt, Artificial Sequence
  Description of Artificial Sequence: Synthetic oligonucleotide
  Antisense strand to SEQ ID NO: 1594125
ugccuaggagacaagacgc

SEQ ID NO: 1594127 - RNA, 19 nt, Artificial Sequence
  Description of Artificial Sequence: Synthetic oligonucleotide
  Sense strand starting at position 2043 of SEQ ID NO: 1560350
gaagucagacacuggcuua

SEQ ID NO: 1594128 - RNA, 19 nt, Artificial Sequence
  Description of Artificial Sequence: Synthetic oligonucleotide
  Antisense strand to SEQ ID NO: 1594127
uaagccagugucugacuuc

SEQ ID NO: 1594129 - RNA, 19 nt, Artificial Sequence
  Description of Artificial Sequence: Synthetic oligonucleotide
  Sense strand starting at position 2046 of SEQ ID NO: 1560350
gucagacacuggcuuaaua

SEQ ID NO: 1594130 - RNA, 19 nt, Artificial Sequence
  Description of Artificial Sequence: Synthetic oligonucleotide
  Antisense strand to SEQ ID NO: 1594129
uauuaagccagugucugac

SEQ ID NO: 1594131 - RNA, 19 nt, Artificial Sequence
  Description of Artificial Sequence: Synthetic oligonucleotide
  Sense strand starting at position 2380 of SEQ ID NO: 1560350
gaaggcaucuguuauaugu

SEQ ID NO: 1594132 - RNA, 19 nt, Artificial Sequence
  Description of Artificial Sequence: Synthetic oligonucleotide
  Antisense strand to SEQ ID NO: 1594131
acauauaacagaugccuuc

SEQ ID NO: 1594133 - RNA, 19 nt, Artificial Sequence
  Description of Artificial Sequence: Synthetic oligonucleotide
  Sense strand starting at position 2382 of SEQ ID NO: 1560350
aggcaucuguuauauguga

SEQ ID NO: 1594134 - RNA, 19 nt, Artificial Sequence
  Description of Artificial Sequence: Synthetic oligonucleotide
  Antisense strand to SEQ ID NO: 1594133
ucacauauaacagaugccu

SEQ ID NO: 1594135 - RNA, 19 nt, Artificial Sequence
  Description of Artificial Sequence: Synthetic oligonucleotide
  Sense strand starting at position 2501 of SEQ ID NO: 1560350
agaggcaucaguuaaguga

SEQ ID NO: 1594136 - RNA, 19 nt, Artificial Sequence
  Description of Artificial Sequence: Synthetic oligonucleotide
  Antisense strand to SEQ ID NO: 1594135
ucacuuaacugaugccucu

SEQ ID NO: 1594137 - RNA, 19 nt, Artificial Sequence
  Description of Artificial Sequence: Synthetic oligonucleotide
  Sense strand starting at position 2629 of SEQ ID NO: 1560350
agcggagugcuuggcucau

SEQ ID NO: 1594138 - RNA, 19 nt, Artificial Sequence
  Description of Artificial Sequence: Synthetic oligonucleotide
  Antisense strand to SEQ ID NO: 1594137
augagccaagcacuccgcu

SEQ ID NO: 1594139 - RNA, 19 nt, Artificial Sequence
  Description of Artificial Sequence: Synthetic oligonucleotide
  Sense strand starting at position 2633 of SEQ ID NO: 1560350
gagugcuuggcucauugca

SEQ ID NO: 1594140 - RNA, 19 nt, Artificial Sequence
  Description of Artificial Sequence: Synthetic oligonucleotide
  Antisense strand to SEQ ID NO: 1594139
ugcaaugagccaagcacuc

SEQ ID NO: 1594141 - RNA, 19 nt, Artificial Sequence
  Description of Artificial Sequence: Synthetic oligonucleotide
  Sense strand starting at position 2658 of SEQ ID NO: 1560350
gcuuucuggacucaaguga

SEQ ID NO: 1594142 - RNA, 19 nt, Artificial Sequence
  Description of Artificial Sequence: Synthetic oligonucleotide
  Antisense strand to SEQ ID NO: 1594141
ucacuugaguccagaaagc

SEQ ID NO: 1594143 - RNA, 19 nt, Artificial Sequence
  Description of Artificial Sequence: Synthetic oligonucleotide
  Sense strand starting at position 3573 of SEQ ID NO: 1560350
ugcuguuugcucuacuuga

SEQ ID NO: 1594144 - RNA, 19 nt, Artificial Sequence
  Description of Artificial Sequence: Synthetic oligonucleotide
  Antisense strand to SEQ ID NO: 1594143
ucaaguagagcaaacagca

SEQ ID NO: 1594145 - RNA, 19 nt, Artificial Sequence
  Description of Artificial Sequence: Synthetic oligonucleotide
  Sense strand starting at position 3764 of SEQ ID NO: 1560350
ggacuuauuuguugaauau

SEQ ID NO: 1594146 - RNA, 19 nt, Artificial Sequence
  Description of Artificial Sequence: Synthetic oligonucleotide
  Antisense strand to SEQ ID NO: 1594145
auauucaacaaauaagucc

SEQ ID NO: 1594147 - RNA, 19 nt, Artificial Sequence
  Description of Artificial Sequence: Synthetic oligonucleotide
  Sense strand starting at position 3775 of SEQ ID NO: 1560350
uugaauauuggaugugugu

SEQ ID NO: 1594148 - RNA, 19 nt, Artificial Sequence
  Description of Artificial Sequence: Synthetic oligonucleotide
  Antisense strand to SEQ ID NO: 1594147
acacacauccaauauucaa

SEQ ID NO: 1594149 - RNA, 19 nt, Artificial Sequence
  Description of Artificial Sequence: Synthetic oligonucleotide
  Sense strand starting at position 3777 of SEQ ID NO: 1560350
gaauauuggauguguguca

SEQ ID NO: 1594150 - RNA, 19 nt, Artificial Sequence
  Description of Artificial Sequence: Synthetic oligonucleotide
  Antisense strand to SEQ ID NO: 1594149
ugacacacauccaauauuc

SEQ ID NO: 1594151 - RNA, 19 nt, Artificial Sequence
  Description of Artificial Sequence: Synthetic oligonucleotide
  Sense strand starting at position 272 of SEQ ID NO: 1560351
ucaguaguacacuaagacu

SEQ ID NO: 1594152 - RNA, 19 nt, Artificial Sequence
  Description of Artificial Sequence: Synthetic oligonucleotide
  Antisense strand to SEQ ID NO: 1594151
agucuuaguguacuacuga

SEQ ID NO: 1594153 - RNA, 19 nt, Artificial Sequence
  Description of Artificial Sequence: Synthetic oligonucleotide
  Sense strand starting at position 283 of SEQ ID NO: 1560351
cuaagacugccucaugcuu

SEQ ID NO: 1594154 - RNA, 19 nt, Artificial Sequence
  Description of Artificial Sequence: Synthetic oligonucleotide
  Antisense strand to SEQ ID NO: 1594153
aagcaugaggcagucuuag

SEQ ID NO: 1594155 - RNA, 19 nt, Artificial Sequence
  Description of Artificial Sequence: Synthetic oligonucleotide
  Sense strand starting at position 308 of SEQ ID NO: 1560351
gcaguaguacuacagaaug

SEQ ID NO: 1594156 - RNA, 19 nt, Artificial Sequence
  Description of Artificial Sequence: Synthetic oligonucleotide
  Antisense strand to SEQ ID NO: 1594155
cauucuguaguacuacugc

SEQ ID NO: 1594157 - RNA, 19 nt, Artificial Sequence
  Description of Artificial Sequence: Synthetic oligonucleotide
  Sense strand starting at position 318 of SEQ ID NO: 1560351
uacagaaugcuagaguguu

SEQ ID NO: 1594158 - RNA, 19 nt, Artificial Sequence
  Description of Artificial Sequence: Synthetic oligonucleotide
  Antisense strand to SEQ ID NO: 1594157
aacacucuagcauucugua

SEQ ID NO: 1594159 - RNA, 19 nt, Artificial Sequence
  Description of Artificial Sequence: Synthetic oligonucleotide
  Sense strand starting at position 324 of SEQ ID NO: 1560351
augcuagaguguucaguag

SEQ ID NO: 1594160 - RNA, 19 nt, Artificial Sequence
  Description of Artificial Sequence: Synthetic oligonucleotide
  Antisense strand to SEQ ID NO: 1594159
cuacugaacacucuagcau

SEQ ID NO: 1594161 - RNA, 19 nt, Artificial Sequence
  Description of Artificial Sequence: Synthetic oligonucleotide
  Sense strand starting at position 328 of SEQ ID NO: 1560351
uagaguguucaguaggguu

SEQ ID NO: 1594162 - RNA, 19 nt, Artificial Sequence
  Description of Artificial Sequence: Synthetic oligonucleotide
  Antisense strand to SEQ ID NO: 1594161
aacccuacugaacacucua

SEQ ID NO: 1594163 - RNA, 19 nt, Artificial Sequence
  Description of Artificial Sequence: Synthetic oligonucleotide
  Sense strand starting at position 382 of SEQ ID NO: 1560351
gaggaaguggguugcuaaa

SEQ ID NO: 1594164 - RNA, 19 nt, Artificial Sequence
  Description of Artificial Sequence: Synthetic oligonucleotide
  Antisense strand to SEQ ID NO: 1594163
uuuagcaacccacuuccuc

SEQ ID NO: 1594165 - RNA, 19 nt, Artificial Sequence
  Description of Artificial Sequence: Synthetic oligonucleotide
  Sense strand starting at position 524 of SEQ ID NO: 1560351
acuauaaauccaggccuga

SEQ ID NO: 1594166 - RNA, 19 nt, Artificial Sequence
  Description of Artificial Sequence: Synthetic oligonucleotide
  Antisense strand to SEQ ID NO: 1594165
ucaggccuggauuuauagu

SEQ ID NO: 1594167 - RNA, 19 nt, Artificial Sequence
  Description of Artificial Sequence: Synthetic oligonucleotide
  Sense strand starting at position 541 of SEQ ID NO: 1560351
gagcauuaaugagucugaa

SEQ ID NO: 1594168 - RNA, 19 nt, Artificial Sequence
  Description of Artificial Sequence: Synthetic oligonucleotide
  Antisense strand to SEQ ID NO: 1594167
uucagacucauuaaugcuc

SEQ ID NO: 1594169 - RNA, 19 nt, Artificial Sequence
  Description of Artificial Sequence: Synthetic oligonucleotide
  Sense strand starting at position 553 of SEQ ID NO: 1560351
gucugaaggguuuggagau

SEQ ID NO: 1594170 - RNA, 19 nt, Artificial Sequence
  Description of Artificial Sequence: Synthetic oligonucleotide
  Antisense strand to SEQ ID NO: 1594169
aucuccaaacccuucagac

SEQ ID NO: 1594171 - RNA, 19 nt, Artificial Sequence
  Description of Artificial Sequence: Synthetic oligonucleotide
  Sense strand starting at position 1214 of SEQ ID NO: 1560351
cuaguauuauuccuacuga

SEQ ID NO: 1594172 - RNA, 19 nt, Artificial Sequence
  Description of Artificial Sequence: Synthetic oligonucleotide
  Antisense strand to SEQ ID NO: 1594171
ucaguaggaauaauacuag

SEQ ID NO: 1594173 - RNA, 19 nt, Artificial Sequence
  Description of Artificial Sequence: Synthetic oligonucleotide
  Sense strand starting at position 1341 of SEQ ID NO: 1560351
ucuggauaauaucuuuguu

SEQ ID NO: 1594174 - RNA, 19 nt, Artificial Sequence
  Description of Artificial Sequence: Synthetic oligonucleotide
  Antisense strand to SEQ ID NO: 1594173
aacaaagauauuauccaga

SEQ ID NO: 1594175 - RNA, 19 nt, Artificial Sequence
  Description of Artificial Sequence: Synthetic oligonucleotide
  Sense strand starting at position 1343 of SEQ ID NO: 1560351
uggauaauaucuuuguuga

SEQ ID NO: 1594176 - RNA, 19 nt, Artificial Sequence
  Description of Artificial Sequence: Synthetic oligonucleotide
  Antisense strand to SEQ ID NO: 1594175
ucaacaaagauauuaucca

SEQ ID NO: 1594177 - RNA, 19 nt, Artificial Sequence
  Description of Artificial Sequence: Synthetic oligonucleotide
  Sense strand starting at position 1344 of SEQ ID NO: 1560351
ggauaauaucuuuguugaa

SEQ ID NO: 1594178 - RNA, 19 nt, Artificial Sequence
  Description of Artificial Sequence: Synthetic oligonucleotide
  Antisense strand to SEQ ID NO: 1594177
uucaacaaagauauuaucc

SEQ ID NO: 1594179 - RNA, 19 nt, Artificial Sequence
  Description of Artificial Sequence: Synthetic oligonucleotide
  Sense strand starting at position 1596 of SEQ ID NO: 1560351
gggcuuggguagagacaaa

SEQ ID NO: 1594180 - RNA, 19 nt, Artificial Sequence
  Description of Artificial Sequence: Synthetic oligonucleotide
  Antisense strand to SEQ ID NO: 1594179
uuugucucuacccaagccc

SEQ ID NO: 1594181 - RNA, 19 nt, Artificial Sequence
  Description of Artificial Sequence: Synthetic oligonucleotide
  Sense strand starting at position 1607 of SEQ ID NO: 1560351
gagacaaaguuauagauac

SEQ ID NO: 1594182 - RNA, 19 nt, Artificial Sequence
  Description of Artificial Sequence: Synthetic oligonucleotide
  Antisense strand to SEQ ID NO: 1594181
guaucuauaacuuugucuc

SEQ ID NO: 1594183 - RNA, 19 nt, Artificial Sequence
  Description of Artificial Sequence: Synthetic oligonucleotide
  Sense strand starting at position 2053 of SEQ ID NO: 1560351
uucuauguuggccagggua

SEQ ID NO: 1594184 - RNA, 19 nt, Artificial Sequence
  Description of Artificial Sequence: Synthetic oligonucleotide
  Antisense strand to SEQ ID NO: 1594183
uacccuggccaacauagaa

SEQ ID NO: 1594185 - RNA, 19 nt, Artificial Sequence
  Description of Artificial Sequence: Synthetic oligonucleotide
  Sense strand starting at position 2195 of SEQ ID NO: 1560351
aucuuugaaccagaugcua

SEQ ID NO: 1594186 - RNA, 19 nt, Artificial Sequence
  Description of Artificial Sequence: Synthetic oligonucleotide
  Antisense strand to SEQ ID NO: 1594185
uagcaucugguucaaagau

SEQ ID NO: 1594187 - RNA, 19 nt, Artificial Sequence
  Description of Artificial Sequence: Synthetic oligonucleotide
  Sense strand starting at position 2238 of SEQ ID NO: 1560351
agaauauaaggugguggau

SEQ ID NO: 1594188 - RNA, 19 nt, Artificial Sequence
  Description of Artificial Sequence: Synthetic oligonucleotide
  Antisense strand to SEQ ID NO: 1594187
auccaccaccuuauauucu

SEQ ID NO: 1594189 - RNA, 19 nt, Artificial Sequence
  Description of Artificial Sequence: Synthetic oligonucleotide
  Sense strand starting at position 2340 of SEQ ID NO: 1560351
ugagauucauggucugagu

SEQ ID NO: 1594190 - RNA, 19 nt, Artificial Sequence
  Description of Artificial Sequence: Synthetic oligonucleotide
  Antisense strand to SEQ ID NO: 1594189
acucagaccaugaaucuca

SEQ ID NO: 1594191 - RNA, 19 nt, Artificial Sequence
  Description of Artificial Sequence: Synthetic oligonucleotide
  Sense strand starting at position 2391 of SEQ ID NO: 1560351
uacccuuauccuggagaug

SEQ ID NO: 1594192 - RNA, 19 nt, Artificial Sequence
  Description of Artificial Sequence: Synthetic oligonucleotide
  Antisense strand to SEQ ID NO: 1594191
caucuccaggauaagggua

SEQ ID NO: 1594193 - RNA, 19 nt, Artificial Sequence
  Description of Artificial Sequence: Synthetic oligonucleotide
  Sense strand starting at position 2405 of SEQ ID NO: 1560351
agaugaucucaaugccaga

SEQ ID NO: 1594194 - RNA, 19 nt, Artificial Sequence
  Description of Artificial Sequence: Synthetic oligonucleotide
  Antisense strand to SEQ ID NO: 1594193
ucuggcauugagaucaucu

SEQ ID NO: 1594195 - RNA, 19 nt, Artificial Sequence
  Description of Artificial Sequence: Synthetic oligonucleotide
  Sense strand starting at position 2598 of SEQ ID NO: 1560351
guacauuguugcucauuga

SEQ ID NO: 1594196 - RNA, 19 nt, Artificial Sequence
  Description of Artificial Sequence: Synthetic oligonucleotide
  Antisense strand to SEQ ID NO: 1594195
ucaaugagcaacaauguac

SEQ ID NO: 1594197 - RNA, 19 nt, Artificial Sequence
  Description of Artificial Sequence: Synthetic oligonucleotide
  Sense strand starting at position 2601 of SEQ ID NO: 1560351
cauuguugcucauugagua

SEQ ID NO: 1594198 - RNA, 19 nt, Artificial Sequence
  Description of Artificial Sequence: Synthetic oligonucleotide
  Antisense strand to SEQ ID NO: 1594197
uacucaaugagcaacaaug

SEQ ID NO: 1594199 - RNA, 19 nt, Artificial Sequence
  Description of Artificial Sequence: Synthetic oligonucleotide
  Sense strand starting at position 2602 of SEQ ID NO: 1560351
auuguugcucauugaguau

SEQ ID NO: 1594200 - RNA, 19 nt, Artificial Sequence
  Description of Artificial Sequence: Synthetic oligonucleotide
  Antisense strand to SEQ ID NO: 1594199
auacucaaugagcaacaau

SEQ ID NO: 1594201 - RNA, 19 nt, Artificial Sequence
  Description of Artificial Sequence: Synthetic oligonucleotide
  Sense strand starting at position 2653 of SEQ ID NO: 1560351
augggaagguuuguuauac

SEQ ID NO: 1594202 - RNA, 19 nt, Artificial Sequence
  Description of Artificial Sequence: Synthetic oligonucleotide
  Antisense strand to SEQ ID NO: 1594201
guauaacaaaccuucccau

SEQ ID NO: 1594203 - RNA, 19 nt, Artificial Sequence
  Description of Artificial Sequence: Synthetic oligonucleotide
  Sense strand starting at position 2722 of SEQ ID NO: 1560351
gguaauaagcuugguaccu

SEQ ID NO: 1594204 - RNA, 19 nt, Artificial Sequence
  Description of Artificial Sequence: Synthetic oligonucleotide
  Antisense strand to SEQ ID NO: 1594203
agguaccaagcuuauuacc

SEQ ID NO: 1594205 - RNA, 19 nt, Artificial Sequence
  Description of Artificial Sequence: Synthetic oligonucleotide
  Sense strand starting at position 2723 of SEQ ID NO: 1560351
guaauaagcuugguaccua

SEQ ID NO: 1594206 - RNA, 19 nt, Artificial Sequence
  Description of Artificial Sequence: Synthetic oligonucleotide
  Antisense strand to SEQ ID NO: 1594205
uagguaccaagcuuauuac

SEQ ID NO: 1594207 - RNA, 19 nt, Artificial Sequence
  Description of Artificial Sequence: Synthetic oligonucleotide
  Sense strand starting at position 2828 of SEQ ID NO: 1560351
ugaguucuauuauuuagcu

SEQ ID NO: 1594208 - RNA, 19 nt, Artificial Sequence
  Description of Artificial Sequence: Synthetic oligonucleotide
  Antisense strand to SEQ ID NO: 1594207
agcuaaauaauagaacuca

SEQ ID NO: 1594209 - RNA, 19 nt, Artificial Sequence
  Description of Artificial Sequence: Synthetic oligonucleotide
  Sense strand starting at position 2889 of SEQ ID NO: 1560351
uuguauaguuugcuaagga

SEQ ID NO: 1594210 - RNA, 19 nt, Artificial Sequence
  Description of Artificial Sequence: Synthetic oligonucleotide
  Antisense strand to SEQ ID NO: 1594209
uccuuagcaaacuauacaa

SEQ ID NO: 1594211 - RNA, 19 nt, Artificial Sequence
  Description of Artificial Sequence: Synthetic oligonucleotide
  Sense strand starting at position 3460 of SEQ ID NO: 1560351
uccugagcuugucccauau

SEQ ID NO: 1594212 - RNA, 19 nt, Artificial Sequence
  Description of Artificial Sequence: Synthetic oligonucleotide
  Antisense strand to SEQ ID NO: 1594211
auaugggacaagcucagga

SEQ ID NO: 1594213 - RNA, 19 nt, Artificial Sequence
  Description of Artificial Sequence: Synthetic oligonucleotide
  Sense strand starting at position 3607 of SEQ ID NO: 1560351
cuggaaauuugguguugau

SEQ ID NO: 1594214 - RNA, 19 nt, Artificial Sequence
  Description of Artificial Sequence: Synthetic oligonucleotide
  Antisense strand to SEQ ID NO: 1594213
aucaacaccaaauuuccag

SEQ ID NO: 1594215 - RNA, 19 nt, Artificial Sequence
  Description of Artificial Sequence: Synthetic oligonucleotide
  Sense strand starting at position 3610 of SEQ ID NO: 1560351
gaaauuugguguugaugau

SEQ ID NO: 1594216 - RNA, 19 nt, Artificial Sequence
  Description of Artificial Sequence: Synthetic oligonucleotide
  Antisense strand to SEQ ID NO: 1594215
aucaucaacaccaaauuuc

SEQ ID NO: 1594217 - RNA, 19 nt, Artificial Sequence
  Description of Artificial Sequence: Synthetic oligonucleotide
  Sense strand starting at position 3617 of SEQ ID NO: 1560351
gguguugaugauugcauga

SEQ ID NO: 1594218 - RNA, 19 nt, Artificial Sequence
  Description of Artificial Sequence: Synthetic oligonucleotide
  Antisense strand to SEQ ID NO: 1594217
ucaugcaaucaucaacacc

SEQ ID NO: 1594219 - RNA, 19 nt, Artificial Sequence
  Description of Artificial Sequence: Synthetic oligonucleotide
  Sense strand starting at position 3630 of SEQ ID NO: 1560351
gcaugaaauugaccgcauu

SEQ ID NO: 1594220 - RNA, 19 nt, Artificial Sequence
  Description of Artificial Sequence: Synthetic oligonucleotide
  Antisense strand to SEQ ID NO: 1594219
aaugcggucaauuucaugc

SEQ ID NO: 1594221 - RNA, 19 nt, Artificial Sequence
  Description of Artificial Sequence: Synthetic oligonucleotide
  Sense strand starting at position 3633 of SEQ ID NO: 1560351
ugaaauugaccgcauucua

SEQ ID NO: 1594222 - RNA, 19 nt, Artificial Sequence
  Description of Artificial Sequence: Synthetic oligonucleotide
  Antisense strand to SEQ ID NO: 1594221
uagaaugcggucaauuuca

SEQ ID NO: 1594223 - RNA, 19 nt, Artificial Sequence
  Description of Artificial Sequence: Synthetic oligonucleotide
  Sense strand starting at position 3733 of SEQ ID NO: 1560351
gacaaauaauggcuguacu

SEQ ID NO: 1594224 - RNA, 19 nt, Artificial Sequence
  Description of Artificial Sequence: Synthetic oligonucleotide
  Antisense strand to SEQ ID NO: 1594223
aguacagccauuauuuguc

SEQ ID NO: 1594225 - RNA, 19 nt, Artificial Sequence
  Description of Artificial Sequence: Synthetic oligonucleotide
  Sense strand starting at position 3745 of SEQ ID NO: 1560351
cuguacucuuaguugagua

SEQ ID NO: 1594226 - RNA, 19 nt, Artificial Sequence
  Description of Artificial Sequence: Synthetic oligonucleotide
  Antisense strand to SEQ ID NO: 1594225
uacucaacuaagaguacag

SEQ ID NO: 1594227 - RNA, 19 nt, Artificial Sequence
  Description of Artificial Sequence: Synthetic oligonucleotide
  Sense strand starting at position 3746 of SEQ ID NO: 1560351
uguacucuuaguugaguau

SEQ ID NO: 1594228 - RNA, 19 nt, Artificial Sequence
  Description of Artificial Sequence: Synthetic oligonucleotide
  Antisense strand to SEQ ID NO: 1594227
auacucaacuaagaguaca

SEQ ID NO: 1594229 - RNA, 19 nt, Artificial Sequence
  Description of Artificial Sequence: Synthetic oligonucleotide
  Sense strand starting at position 3747 of SEQ ID NO: 1560351
guacucuuaguugaguauu

SEQ ID NO: 1594230 - RNA, 19 nt, Artificial Sequence
  Description of Artificial Sequence: Synthetic oligonucleotide
  Antisense strand to SEQ ID NO: 1594229
aauacucaacuaagaguac

SEQ ID NO: 1594231 - RNA, 19 nt, Artificial Sequence
  Description of Artificial Sequence: Synthetic oligonucleotide
  Sense strand starting at position 49 of SEQ ID NO: 1560352
cugggauuucugcgccauc

SEQ ID NO: 1594232 - RNA, 19 nt, Artificial Sequence
  Description of Artificial Sequence: Synthetic oligonucleotide
  Antisense strand to SEQ ID NO: 1594231
gauggcgcagaaaucccag

SEQ ID NO: 1594233 - RNA, 19 nt, Artificial Sequence
  Description of Artificial Sequence: Synthetic oligonucleotide
  Sense strand starting at position 50 of SEQ ID NO: 1560352
ugggauuucugcgccaucu

SEQ ID NO: 1594234 - RNA, 19 nt, Artificial Sequence
  Description of Artificial Sequence: Synthetic oligonucleotide
  Antisense strand to SEQ ID NO: 1594233
agauggcgcagaaauccca

SEQ ID NO: 1594235 - RNA, 19 nt, Artificial Sequence
  Description of Artificial Sequence: Synthetic oligonucleotide
  Sense strand starting at position 83 of SEQ ID NO: 1560352
cuuuccaaguucuuggaaa

SEQ ID NO: 1594236 - RNA, 19 nt, Artificial Sequence
  Description of Artificial Sequence: Synthetic oligonucleotide
  Antisense strand to SEQ ID NO: 1594235
uuuccaagaacuuggaaag

SEQ ID NO: 1594237 - RNA, 19 nt, Artificial Sequence
  Description of Artificial Sequence: Synthetic oligonucleotide
  Sense strand starting at position 85 of SEQ ID NO: 1560352
uuccaaguucuuggaaacu

SEQ ID NO: 1594238 - RNA, 19 nt, Artificial Sequence
  Description of Artificial Sequence: Synthetic oligonucleotide
  Antisense strand to SEQ ID NO: 1594237
aguuuccaagaacuuggaa

SEQ ID NO: 1594239 - RNA, 19 nt, Artificial Sequence
  Description of Artificial Sequence: Synthetic oligonucleotide
  Sense strand starting at position 246 of SEQ ID NO: 1560352
ggaggaguguacucaggaa

SEQ ID NO: 1594240 - RNA, 19 nt, Artificial Sequence
  Description of Artificial Sequence: Synthetic oligonucleotide
  Antisense strand to SEQ ID NO: 1594239
uuccugaguacacuccucc

SEQ ID NO: 1594241 - RNA, 19 nt, Artificial Sequence
  Description of Artificial Sequence: Synthetic oligonucleotide
  Sense strand starting at position 250 of SEQ ID NO: 1560352
gaguguacucaggaaggua

SEQ ID NO: 1594242 - RNA, 19 nt, Artificial Sequence
  Description of Artificial Sequence: Synthetic oligonucleotide
  Antisense strand to SEQ ID NO: 1594241
uaccuuccugaguacacuc

SEQ ID NO: 1594243 - RNA, 19 nt, Artificial Sequence
  Description of Artificial Sequence: Synthetic oligonucleotide
  Sense strand starting at position 253 of SEQ ID NO: 1560352
uguacucaggaagguauau

SEQ ID NO: 1594244 - RNA, 19 nt, Artificial Sequence
  Description of Artificial Sequence: Synthetic oligonucleotide
  Antisense strand to SEQ ID NO: 1594243
auauaccuuccugaguaca

SEQ ID NO: 1594245 - RNA, 19 nt, Artificial Sequence
  Description of Artificial Sequence: Synthetic oligonucleotide
  Sense strand starting at position 489 of SEQ ID NO: 1560352
cuuacaauagcucgaguua

SEQ ID NO: 1594246 - RNA, 19 nt, Artificial Sequence
  Description of Artificial Sequence: Synthetic oligonucleotide
  Antisense strand to SEQ ID NO: 1594245
uaacucgagcuauuguaag

SEQ ID NO: 1594247 - RNA, 19 nt, Artificial Sequence
  Description of Artificial Sequence: Synthetic oligonucleotide
  Sense strand starting at position 490 of SEQ ID NO: 1560352
uuacaauagcucgaguuac

SEQ ID NO: 1594248 - RNA, 19 nt, Artificial Sequence
  Description of Artificial Sequence: Synthetic oligonucleotide
  Antisense strand to SEQ ID NO: 1594247
guaacucgagcuauuguaa

SEQ ID NO: 1594249 - RNA, 19 nt, Artificial Sequence
  Description of Artificial Sequence: Synthetic oligonucleotide
  Sense strand starting at position 504 of SEQ ID NO: 1560352
guuacaauggcucgacuuu

SEQ ID NO: 1594250 - RNA, 19 nt, Artificial Sequence
  Description of Artificial Sequence: Synthetic oligonucleotide
  Antisense strand to SEQ ID NO: 1594249
aaagucgagccauuguaac

SEQ ID NO: 1594251 - RNA, 19 nt, Artificial Sequence
  Description of Artificial Sequence: Synthetic oligonucleotide
  Sense strand starting at position 516 of SEQ ID NO: 1560352
cgacuuuacaauggucuga

SEQ ID NO: 1594252 - RNA, 19 nt, Artificial Sequence
  Description of Artificial Sequence: Synthetic oligonucleotide
  Antisense strand to SEQ ID NO: 1594251
ucagaccauuguaaagucg

SEQ ID NO: 1594253 - RNA, 19 nt, Artificial Sequence
  Description of Artificial Sequence: Synthetic oligonucleotide
  Sense strand starting at position 529 of SEQ ID NO: 1560352
gucugaaaccaauaugcgu

SEQ ID NO: 1594254 - RNA, 19 nt, Artificial Sequence
  Description of Artificial Sequence: Synthetic oligonucleotide
  Antisense strand to SEQ ID NO: 1594253
acgcauauugguuucagac

SEQ ID NO: 1594255 - RNA, 19 nt, Artificial Sequence
  Description of Artificial Sequence: Synthetic oligonucleotide
  Sense strand starting at position 534 of SEQ ID NO: 1560352
aaaccaauaugcguuuagu

SEQ ID NO: 1594256 - RNA, 19 nt, Artificial Sequence
  Description of Artificial Sequence: Synthetic oligonucleotide
  Antisense strand to SEQ ID NO: 1594255
acuaaacgcauauugguuu

SEQ ID NO: 1594257 - RNA, 19 nt, Artificial Sequence
  Description of Artificial Sequence: Synthetic oligonucleotide
  Sense strand starting at position 537 of SEQ ID NO: 1560352
ccaauaugcguuuagugga

SEQ ID NO: 1594258 - RNA, 19 nt, Artificial Sequence
  Description of Artificial Sequence: Synthetic oligonucleotide
  Antisense strand to SEQ ID NO: 1594257
uccacuaaacgcauauugg

SEQ ID NO: 1594259 - RNA, 19 nt, Artificial Sequence
  Description of Artificial Sequence: Synthetic oligonucleotide
  Sense strand starting at position 681 of SEQ ID NO: 1560352
ggaagagcaucuguauuag

SEQ ID NO: 1594260 - RNA, 19 nt, Artificial Sequence
  Description of Artificial Sequence: Synthetic oligonucleotide
  Antisense strand to SEQ ID NO: 1594259
cuaauacagaugcucuucc

SEQ ID NO: 1594261 - RNA, 19 nt, Artificial Sequence
  Description of Artificial Sequence: Synthetic oligonucleotide
  Sense strand starting at position 690 of SEQ ID NO: 1560352
ucuguauuaggaugcuauc
